United States Patent Application Publication US 2014/0004565 A1 - sequence listing, part 24

SEQ ID NO: 487642 - RNA, 19 nt, Artificial Sequence
  Description of Artificial Sequence: Synthetic oligonucleotide
auccguuucacaucguacc

SEQ ID NO: 487643 - RNA, 19 nt, Artificial Sequence
  Description of Artificial Sequence: Synthetic oligonucleotide
aaaauuacccugggcaucg

SEQ ID NO: 487644 - RNA, 19 nt, Artificial Sequence
  Description of Artificial Sequence: Synthetic oligonucleotide
aauuguagagugcaaaauu

SEQ ID NO: 487645 - RNA, 19 nt, Artificial Sequence
  Description of Artificial Sequence: Synthetic oligonucleotide
aaucccgucgcacuugagg

SEQ ID NO: 487646 - RNA, 19 nt, Artificial Sequence
  Description of Artificial Sequence: Synthetic oligonucleotide
acucaucgaguccagacgc

SEQ ID NO: 487647 - RNA, 19 nt, Artificial Sequence
  Description of Artificial Sequence: Synthetic oligonucleotide
aaucugaccaaucuuccca

SEQ ID NO: 487648 - RNA, 19 nt, Artificial Sequence
  Description of Artificial Sequence: Synthetic oligonucleotide
ucuuacgaauuguagagug

SEQ ID NO: 487649 - RNA, 19 nt, Artificial Sequence
  Description of Artificial Sequence: Synthetic oligonucleotide
aguuauuugcuuuuaguga

SEQ ID NO: 487650 - RNA, 19 nt, Artificial Sequence
  Description of Artificial Sequence: Synthetic oligonucleotide
gagaaaaccaauuaauaaa

SEQ ID NO: 487651 - RNA, 19 nt, Artificial Sequence
  Description of Artificial Sequence: Synthetic oligonucleotide
uuguggauguggcuuaucg

SEQ ID NO: 487652 - RNA, 19 nt, Artificial Sequence
  Description of Artificial Sequence: Synthetic oligonucleotide
uuuuaugaugcagugaaga

SEQ ID NO: 487653 - RNA, 19 nt, Artificial Sequence
  Description of Artificial Sequence: Synthetic oligonucleotide
uucaucuuacgaauuguag

SEQ ID NO: 487654 - RNA, 19 nt, Artificial Sequence
  Description of Artificial Sequence: Synthetic oligonucleotide
ucaucuuacgaauuguaga

SEQ ID NO: 487655 - RNA, 19 nt, Artificial Sequence
  Description of Artificial Sequence: Synthetic oligonucleotide
uauauguugaugguaagac

SEQ ID NO: 487656 - RNA, 19 nt, Artificial Sequence
  Description of Artificial Sequence: Synthetic oligonucleotide
aaaguuacuuaggugauga

SEQ ID NO: 487657 - RNA, 19 nt, Artificial Sequence
  Description of Artificial Sequence: Synthetic oligonucleotide
uugccuuacuuuuaaaagc

SEQ ID NO: 487658 - RNA, 19 nt, Artificial Sequence
  Description of Artificial Sequence: Synthetic oligonucleotide
ugauucuuuaaguuggcga

SEQ ID NO: 487659 - RNA, 19 nt, Artificial Sequence
  Description of Artificial Sequence: Synthetic oligonucleotide
ucuccauacuuguaaaugc

SEQ ID NO: 487660 - RNA, 19 nt, Artificial Sequence
  Description of Artificial Sequence: Synthetic oligonucleotide
ugguacguccuucagaaug

SEQ ID NO: 487661 - RNA, 19 nt, Artificial Sequence
  Description of Artificial Sequence: Synthetic oligonucleotide
aacaaggacagcaaucauc

SEQ ID NO: 487662 - RNA, 19 nt, Artificial Sequence
  Description of Artificial Sequence: Synthetic oligonucleotide
aacaaccuaguaaagucac

SEQ ID NO: 487663 - RNA, 19 nt, Artificial Sequence
  Description of Artificial Sequence: Synthetic oligonucleotide
auguacagcaucucagucg

SEQ ID NO: 487664 - RNA, 19 nt, Artificial Sequence
  Description of Artificial Sequence: Synthetic oligonucleotide
aucagauagaaaacggacc

SEQ ID NO: 487665 - RNA, 19 nt, Artificial Sequence
  Description of Artificial Sequence: Synthetic oligonucleotide
augacaauucacaagauca

SEQ ID NO: 487666 - RNA, 19 nt, Artificial Sequence
  Description of Artificial Sequence: Synthetic oligonucleotide
aacauagcaaccauagaug

SEQ ID NO: 487667 - RNA, 19 nt, Artificial Sequence
  Description of Artificial Sequence: Synthetic oligonucleotide
caagaucagauagaaaacg

SEQ ID NO: 487668 - RNA, 19 nt, Artificial Sequence
  Description of Artificial Sequence: Synthetic oligonucleotide
ugguuugggacuuucaaga

SEQ ID NO: 487669 - RNA, 19 nt, Artificial Sequence
  Description of Artificial Sequence: Synthetic oligonucleotide
ugacaauucacaagaucag

SEQ ID NO: 487670 - RNA, 19 nt, Artificial Sequence
  Description of Artificial Sequence: Synthetic oligonucleotide
uguuuguucaucuuacgaa

SEQ ID NO: 487671 - RNA, 19 nt, Artificial Sequence
  Description of Artificial Sequence: Synthetic oligonucleotide
aacucucagaacauguaac

SEQ ID NO: 487672 - RNA, 19 nt, Artificial Sequence
  Description of Artificial Sequence: Synthetic oligonucleotide
uacucaucgaguccagacg

SEQ ID NO: 487673 - RNA, 19 nt, Artificial Sequence
  Description of Artificial Sequence: Synthetic oligonucleotide
aaccaauuaauaaaccugu

SEQ ID NO: 487674 - RNA, 19 nt, Artificial Sequence
  Description of Artificial Sequence: Synthetic oligonucleotide
ugcauacacauaccaaucc

SEQ ID NO: 487675 - RNA, 19 nt, Artificial Sequence
  Description of Artificial Sequence: Synthetic oligonucleotide
ugaaaggcuacuacaagaa

SEQ ID NO: 487676 - RNA, 19 nt, Artificial Sequence
  Description of Artificial Sequence: Synthetic oligonucleotide
aucccgucgcacuugaggc

SEQ ID NO: 487677 - RNA, 19 nt, Artificial Sequence
  Description of Artificial Sequence: Synthetic oligonucleotide
aaaaucaccucaacuaugu

SEQ ID NO: 487678 - RNA, 19 nt, Artificial Sequence
  Description of Artificial Sequence: Synthetic oligonucleotide
caacagauaaacagagugc

SEQ ID NO: 487679 - RNA, 19 nt, Artificial Sequence
  Description of Artificial Sequence: Synthetic oligonucleotide
gauaaacagagugccacgg

SEQ ID NO: 487680 - RNA, 19 nt, Artificial Sequence
  Description of Artificial Sequence: Synthetic oligonucleotide
aagugcucagucaagauca

SEQ ID NO: 487681 - RNA, 19 nt, Artificial Sequence
  Description of Artificial Sequence: Synthetic oligonucleotide
ugaugguaagacaaccuca

SEQ ID NO: 487682 - RNA, 19 nt, Artificial Sequence
  Description of Artificial Sequence: Synthetic oligonucleotide
ucuauuuucaauggguuaa

SEQ ID NO: 487683 - RNA, 19 nt, Artificial Sequence
  Description of Artificial Sequence: Synthetic oligonucleotide
aacaaucuguguacgaauc

SEQ ID NO: 487684 - RNA, 19 nt, Artificial Sequence
  Description of Artificial Sequence: Synthetic oligonucleotide
uguaacuuccccucauugc

SEQ ID NO: 487685 - RNA, 19 nt, Artificial Sequence
  Description of Artificial Sequence: Synthetic oligonucleotide
uaguaaagucacgagacag

SEQ ID NO: 487686 - RNA, 19 nt, Artificial Sequence
  Description of Artificial Sequence: Synthetic oligonucleotide
gcaacagauaaacagagug

SEQ ID NO: 487687 - RNA, 19 nt, Artificial Sequence
  Description of Artificial Sequence: Synthetic oligonucleotide
guuaggauuugguacgucc

SEQ ID NO: 487688 - RNA, 19 nt, Artificial Sequence
  Description of Artificial Sequence: Synthetic oligonucleotide
uguaaaugcagguuggguu

SEQ ID NO: 487689 - RNA, 19 nt, Artificial Sequence
  Description of Artificial Sequence: Synthetic oligonucleotide
aaccucuccacugaaugac

SEQ ID NO: 487690 - RNA, 19 nt, Artificial Sequence
  Description of Artificial Sequence: Synthetic oligonucleotide
uaacuuucaguguuggaga

SEQ ID NO: 487691 - RNA, 19 nt, Artificial Sequence
  Description of Artificial Sequence: Synthetic oligonucleotide
ucucuuacaaacuuugguu

SEQ ID NO: 487692 - RNA, 19 nt, Artificial Sequence
  Description of Artificial Sequence: Synthetic oligonucleotide
ucuuacaaacuuugguuug

SEQ ID NO: 487693 - RNA, 19 nt, Artificial Sequence
  Description of Artificial Sequence: Synthetic oligonucleotide
gauucuuuaaguuggcgaa

SEQ ID NO: 487694 - RNA, 19 nt, Artificial Sequence
  Description of Artificial Sequence: Synthetic oligonucleotide
ucccauccguuucacaucg

SEQ ID NO: 487695 - RNA, 19 nt, Artificial Sequence
  Description of Artificial Sequence: Synthetic oligonucleotide
aguaaagucacgagacagc

SEQ ID NO: 487696 - RNA, 19 nt, Artificial Sequence
  Description of Artificial Sequence: Synthetic oligonucleotide
uccugaguaagacaaucug

SEQ ID NO: 487697 - RNA, 19 nt, Artificial Sequence
  Description of Artificial Sequence: Synthetic oligonucleotide
gaauugaaaguuacuuagg

SEQ ID NO: 487698 - RNA, 19 nt, Artificial Sequence
  Description of Artificial Sequence: Synthetic oligonucleotide
auguuguacucaucgaguc

SEQ ID NO: 487699 - RNA, 19 nt, Artificial Sequence
  Description of Artificial Sequence: Synthetic oligonucleotide
caguaggauuuuaugaugc

SEQ ID NO: 487700 - RNA, 19 nt, Artificial Sequence
  Description of Artificial Sequence: Synthetic oligonucleotide
aagaguuuugaagacuuca

SEQ ID NO: 487701 - RNA, 19 nt, Artificial Sequence
  Description of Artificial Sequence: Synthetic oligonucleotide
ucucagaacauguaacuuc

SEQ ID NO: 487702 - RNA, 19 nt, Artificial Sequence
  Description of Artificial Sequence: Synthetic oligonucleotide
uaucuaauauauguugaug

SEQ ID NO: 487703 - RNA, 19 nt, Artificial Sequence
  Description of Artificial Sequence: Synthetic oligonucleotide
gacuguuaggccuguagag

SEQ ID NO: 487704 - RNA, 19 nt, Artificial Sequence
  Description of Artificial Sequence: Synthetic oligonucleotide
uucaaggggaucuuauucu

SEQ ID NO: 487705 - RNA, 19 nt, Artificial Sequence
  Description of Artificial Sequence: Synthetic oligonucleotide
aaccuaguaaagucacgag

SEQ ID NO: 487706 - RNA, 19 nt, Artificial Sequence
  Description of Artificial Sequence: Synthetic oligonucleotide
agaccucuauuuucaaugg

SEQ ID NO: 487707 - RNA, 19 nt, Artificial Sequence
  Description of Artificial Sequence: Synthetic oligonucleotide
uugguuugggacuuucaag

SEQ ID NO: 487708 - RNA, 19 nt, Artificial Sequence
  Description of Artificial Sequence: Synthetic oligonucleotide
uugaugguaagacaaccuc

SEQ ID NO: 487709 - RNA, 19 nt, Artificial Sequence
  Description of Artificial Sequence: Synthetic oligonucleotide
uacgaaucaucuuaucaac

SEQ ID NO: 487710 - RNA, 19 nt, Artificial Sequence
  Description of Artificial Sequence: Synthetic oligonucleotide
uuacgaauuguagagugca

SEQ ID NO: 487711 - RNA, 19 nt, Artificial Sequence
  Description of Artificial Sequence: Synthetic oligonucleotide
aggguuaccauguacugcu

SEQ ID NO: 487712 - RNA, 19 nt, Artificial Sequence
  Description of Artificial Sequence: Synthetic oligonucleotide
aguuugcacaguucgauga

SEQ ID NO: 487713 - RNA, 19 nt, Artificial Sequence
  Description of Artificial Sequence: Synthetic oligonucleotide
gaagagaauugcuacuuuc

SEQ ID NO: 487714 - RNA, 19 nt, Artificial Sequence
  Description of Artificial Sequence: Synthetic oligonucleotide
uucaagauccugaguaaga

SEQ ID NO: 487715 - RNA, 19 nt, Artificial Sequence
  Description of Artificial Sequence: Synthetic oligonucleotide
uuaggauuugguacguccu

SEQ ID NO: 487716 - RNA, 19 nt, Artificial Sequence
  Description of Artificial Sequence: Synthetic oligonucleotide
agauucgguccauuucugc

SEQ ID NO: 487717 - RNA, 19 nt, Artificial Sequence
  Description of Artificial Sequence: Synthetic oligonucleotide
cagucguucuauuugcucc

SEQ ID NO: 487718 - RNA, 19 nt, Artificial Sequence
  Description of Artificial Sequence: Synthetic oligonucleotide
agcuccgaugagaagaucc

SEQ ID NO: 487719 - RNA, 19 nt, Artificial Sequence
  Description of Artificial Sequence: Synthetic oligonucleotide
aauuacccugggcaucggg

SEQ ID NO: 487720 - RNA, 19 nt, Artificial Sequence
  Description of Artificial Sequence: Synthetic oligonucleotide
uguuguacucaucgagucc

SEQ ID NO: 487721 - RNA, 19 nt, Artificial Sequence
  Description of Artificial Sequence: Synthetic oligonucleotide
ugcagugcuucgcagagga

SEQ ID NO: 487722 - RNA, 19 nt, Artificial Sequence
  Description of Artificial Sequence: Synthetic oligonucleotide
gcuccaacggaauugaaag

SEQ ID NO: 487723 - RNA, 19 nt, Artificial Sequence
  Description of Artificial Sequence: Synthetic oligonucleotide
uuaucggcaguccauacuu

SEQ ID NO: 487724 - RNA, 19 nt, Artificial Sequence
  Description of Artificial Sequence: Synthetic oligonucleotide
uuaguugccuuacuuuuaa

SEQ ID NO: 487725 - RNA, 19 nt, Artificial Sequence
  Description of Artificial Sequence: Synthetic oligonucleotide
uuucaagauccugaguaag

SEQ ID NO: 487726 - RNA, 19 nt, Artificial Sequence
  Description of Artificial Sequence: Synthetic oligonucleotide
aacgcuggaagaugacgag

SEQ ID NO: 487727 - RNA, 19 nt, Artificial Sequence
  Description of Artificial Sequence: Synthetic oligonucleotide
ugcggcacagucaacaauc

SEQ ID NO: 487728 - RNA, 19 nt, Artificial Sequence
  Description of Artificial Sequence: Synthetic oligonucleotide
cuuacgaauuguagagugc

SEQ ID NO: 487729 - RNA, 19 nt, Artificial Sequence
  Description of Artificial Sequence: Synthetic oligonucleotide
uuguagagugcaaaauuuc

SEQ ID NO: 487730 - RNA, 19 nt, Artificial Sequence
  Description of Artificial Sequence: Synthetic oligonucleotide
aguugccuuacuuuuaaaa

SEQ ID NO: 487731 - RNA, 19 nt, Artificial Sequence
  Description of Artificial Sequence: Synthetic oligonucleotide
agugcuucgcagaggaugc

SEQ ID NO: 487732 - RNA, 19 nt, Artificial Sequence
  Description of Artificial Sequence: Synthetic oligonucleotide
uuaggaagugaaaggcuac

SEQ ID NO: 487733 - RNA, 19 nt, Artificial Sequence
  Description of Artificial Sequence: Synthetic oligonucleotide
auagaaaacggaccaaaua

SEQ ID NO: 487734 - RNA, 19 nt, Artificial Sequence
  Description of Artificial Sequence: Synthetic oligonucleotide
aguaagacaaucugaccaa

SEQ ID NO: 487735 - RNA, 19 nt, Artificial Sequence
  Description of Artificial Sequence: Synthetic oligonucleotide
augacuguuaggccuguag

SEQ ID NO: 487736 - RNA, 19 nt, Artificial Sequence
  Description of Artificial Sequence: Synthetic oligonucleotide
guuacuuaggugaugagaa

SEQ ID NO: 487737 - RNA, 19 nt, Artificial Sequence
  Description of Artificial Sequence: Synthetic oligonucleotide
cuuaggugaugagaaaacc

SEQ ID NO: 487738 - RNA, 19 nt, Artificial Sequence
  Description of Artificial Sequence: Synthetic oligonucleotide
ugaaaguuacuuaggugau

SEQ ID NO: 487739 - RNA, 19 nt, Artificial Sequence
  Description of Artificial Sequence: Synthetic oligonucleotide
uccagacgcauguacagca

SEQ ID NO: 487740 - RNA, 19 nt, Artificial Sequence
  Description of Artificial Sequence: Synthetic oligonucleotide
acggaccaaauauacagcu

SEQ ID NO: 487741 - RNA, 19 nt, Artificial Sequence
  Description of Artificial Sequence: Synthetic oligonucleotide
aaacgcuggaagaugacga

SEQ ID NO: 487742 - RNA, 19 nt, Artificial Sequence
  Description of Artificial Sequence: Synthetic oligonucleotide
aucaacaaggacagcaauc

SEQ ID NO: 487743 - RNA, 19 nt, Artificial Sequence
  Description of Artificial Sequence: Synthetic oligonucleotide
cagauaaacagagugccac

SEQ ID NO: 487744 - RNA, 19 nt, Artificial Sequence
  Description of Artificial Sequence: Synthetic oligonucleotide
guacgaaucaucuuaucaa

SEQ ID NO: 487745 - RNA, 19 nt, Artificial Sequence
  Description of Artificial Sequence: Synthetic oligonucleotide
gugaaaggcuacuacaaga

SEQ ID NO: 487746 - RNA, 19 nt, Artificial Sequence
  Description of Artificial Sequence: Synthetic oligonucleotide
gacuucauggaacuuugca

SEQ ID NO: 487747 - RNA, 19 nt, Artificial Sequence
  Description of Artificial Sequence: Synthetic oligonucleotide
uucaucauuaguugccuua

SEQ ID NO: 487748 - RNA, 19 nt, Artificial Sequence
  Description of Artificial Sequence: Synthetic oligonucleotide
aguucgaugagcaguguag

SEQ ID NO: 487749 - RNA, 19 nt, Artificial Sequence
  Description of Artificial Sequence: Synthetic oligonucleotide
aguuacuuaggugaugaga

SEQ ID NO: 487750 - RNA, 19 nt, Artificial Sequence
  Description of Artificial Sequence: Synthetic oligonucleotide
auguaacuuccccucauug

SEQ ID NO: 487751 - RNA, 19 nt, Artificial Sequence
  Description of Artificial Sequence: Synthetic oligonucleotide
ucuggcgucguuuaagaua

SEQ ID NO: 487752 - RNA, 19 nt, Artificial Sequence
  Description of Artificial Sequence: Synthetic oligonucleotide
gaccucuauuuucaauggg

SEQ ID NO: 487753 - RNA, 19 nt, Artificial Sequence
  Description of Artificial Sequence: Synthetic oligonucleotide
ucaacaaucuguguacgaa

SEQ ID NO: 487754 - RNA, 19 nt, Artificial Sequence
  Description of Artificial Sequence: Synthetic oligonucleotide
uuacaaacuuugguuuggg

SEQ ID NO: 487755 - RNA, 19 nt, Artificial Sequence
  Description of Artificial Sequence: Synthetic oligonucleotide
uccgaugagaagauccagu

SEQ ID NO: 487756 - RNA, 19 nt, Artificial Sequence
  Description of Artificial Sequence: Synthetic oligonucleotide
acaugagucuucuggcguc

SEQ ID NO: 487757 - RNA, 19 nt, Artificial Sequence
  Description of Artificial Sequence: Synthetic oligonucleotide
auaccauggggucaauaug

SEQ ID NO: 487758 - RNA, 19 nt, Artificial Sequence
  Description of Artificial Sequence: Synthetic oligonucleotide
gauucgguccauuucugca

SEQ ID NO: 487759 - RNA, 19 nt, Artificial Sequence
  Description of Artificial Sequence: Synthetic oligonucleotide
ucauggaacuuugcaagag

SEQ ID NO: 487760 - RNA, 19 nt, Artificial Sequence
  Description of Artificial Sequence: Synthetic oligonucleotide
uguguacgaaucaucuuau

SEQ ID NO: 487761 - RNA, 19 nt, Artificial Sequence
  Description of Artificial Sequence: Synthetic oligonucleotide
cugagucacacuuacaaaa

SEQ ID NO: 487762 - RNA, 19 nt, Artificial Sequence
  Description of Artificial Sequence: Synthetic oligonucleotide
ucauagcuucuacaaauua

SEQ ID NO: 487763 - RNA, 19 nt, Artificial Sequence
  Description of Artificial Sequence: Synthetic oligonucleotide
aaaacggaccaaauauaca

SEQ ID NO: 487764 - RNA, 19 nt, Artificial Sequence
  Description of Artificial Sequence: Synthetic oligonucleotide
aaguuacuuaggugaugag

SEQ ID NO: 487765 - RNA, 19 nt, Artificial Sequence
  Description of Artificial Sequence: Synthetic oligonucleotide
aagauaacuuucaguguug

SEQ ID NO: 487766 - RNA, 19 nt, Artificial Sequence
  Description of Artificial Sequence: Synthetic oligonucleotide
caacggaauugaaaguuac

SEQ ID NO: 487767 - RNA, 19 nt, Artificial Sequence
  Description of Artificial Sequence: Synthetic oligonucleotide
uaagacaaucugaccaauc

SEQ ID NO: 487768 - RNA, 19 nt, Artificial Sequence
  Description of Artificial Sequence: Synthetic oligonucleotide
uccguuucacaucguacca

SEQ ID NO: 487769 - RNA, 19 nt, Artificial Sequence
  Description of Artificial Sequence: Synthetic oligonucleotide
acaaucuguguacgaauca

SEQ ID NO: 487770 - RNA, 19 nt, Artificial Sequence
  Description of Artificial Sequence: Synthetic oligonucleotide
ugggugauuccuccaaacu

SEQ ID NO: 487771 - RNA, 19 nt, Artificial Sequence
  Description of Artificial Sequence: Synthetic oligonucleotide
ggauuuggccgcuaggugc

SEQ ID NO: 487772 - RNA, 19 nt, Artificial Sequence
  Description of Artificial Sequence: Synthetic oligonucleotide
agagaauugcuacuuucau

SEQ ID NO: 487773 - RNA, 19 nt, Artificial Sequence
  Description of Artificial Sequence: Synthetic oligonucleotide
ggaccaaauauacagcuuc

SEQ ID NO: 487774 - RNA, 19 nt, Artificial Sequence
  Description of Artificial Sequence: Synthetic oligonucleotide
ucuucuggcgucguuuaag

SEQ ID NO: 487775 - RNA, 19 nt, Artificial Sequence
  Description of Artificial Sequence: Synthetic oligonucleotide
guuggcgaaucauagcuuc

SEQ ID NO: 487776 - RNA, 19 nt, Artificial Sequence
  Description of Artificial Sequence: Synthetic oligonucleotide
aucgaguccagacgcaugu

SEQ ID NO: 487777 - RNA, 19 nt, Artificial Sequence
  Description of Artificial Sequence: Synthetic oligonucleotide
caguguuggagaagauucg

SEQ ID NO: 487778 - RNA, 19 nt, Artificial Sequence
  Description of Artificial Sequence: Synthetic oligonucleotide
guacucaucgaguccagac

SEQ ID NO: 487779 - RNA, 19 nt, Artificial Sequence
  Description of Artificial Sequence: Synthetic oligonucleotide
caaucugaccaaucuuccc

SEQ ID NO: 487780 - RNA, 19 nt, Artificial Sequence
  Description of Artificial Sequence: Synthetic oligonucleotide
ugacucccuggcauaacag

SEQ ID NO: 487781 - RNA, 19 nt, Artificial Sequence
  Description of Artificial Sequence: Synthetic oligonucleotide
uccaacggaauugaaaguu

SEQ ID NO: 487782 - RNA, 19 nt, Artificial Sequence
  Description of Artificial Sequence: Synthetic oligonucleotide
cauagauggggcagcaauc

SEQ ID NO: 487783 - RNA, 19 nt, Artificial Sequence
  Description of Artificial Sequence: Synthetic oligonucleotide
uggaacuuugcaagagcac

SEQ ID NO: 487784 - RNA, 19 nt, Artificial Sequence
  Description of Artificial Sequence: Synthetic oligonucleotide
ucuuauaccauggggucaa

SEQ ID NO: 487785 - RNA, 19 nt, Artificial Sequence
  Description of Artificial Sequence: Synthetic oligonucleotide
auaccaaucccgucgcacu

SEQ ID NO: 487786 - RNA, 19 nt, Artificial Sequence
  Description of Artificial Sequence: Synthetic oligonucleotide
caagugcucagucaagauc

SEQ ID NO: 487787 - RNA, 19 nt, Artificial Sequence
  Description of Artificial Sequence: Synthetic oligonucleotide
ucuuaggaugugccuuucc

SEQ ID NO: 487788 - RNA, 19 nt, Artificial Sequence
  Description of Artificial Sequence: Synthetic oligonucleotide
uggcauaacaggacccucu

SEQ ID NO: 487789 - RNA, 19 nt, Artificial Sequence
  Description of Artificial Sequence: Synthetic oligonucleotide
agugccacggaauguccag

SEQ ID NO: 487790 - RNA, 19 nt, Artificial Sequence
  Description of Artificial Sequence: Synthetic oligonucleotide
cugcagucguucuauuugc

SEQ ID NO: 487791 - RNA, 19 nt, Artificial Sequence
  Description of Artificial Sequence: Synthetic oligonucleotide
auuguagagugcaaaauuu

SEQ ID NO: 487792 - RNA, 19 nt, Artificial Sequence
  Description of Artificial Sequence: Synthetic oligonucleotide
ucacgagacagcuccgaug

SEQ ID NO: 487793 - RNA, 19 nt, Artificial Sequence
  Description of Artificial Sequence: Synthetic oligonucleotide
aguguaguguacauuacau

SEQ ID NO: 487794 - RNA, 19 nt, Artificial Sequence
  Description of Artificial Sequence: Synthetic oligonucleotide
cauccguuucacaucguac

SEQ ID NO: 487795 - RNA, 19 nt, Artificial Sequence
  Description of Artificial Sequence: Synthetic oligonucleotide
auaaacagagugccacgga

SEQ ID NO: 487796 - RNA, 19 nt, Artificial Sequence
  Description of Artificial Sequence: Synthetic oligonucleotide
gaucuuauucuucccugga

SEQ ID NO: 487797 - RNA, 19 nt, Artificial Sequence
  Description of Artificial Sequence: Synthetic oligonucleotide
auagauggggcagcaauca

SEQ ID NO: 487798 - RNA, 19 nt, Artificial Sequence
  Description of Artificial Sequence: Synthetic oligonucleotide
uuguaaaugcagguugggu

SEQ ID NO: 487799 - RNA, 19 nt, Artificial Sequence
  Description of Artificial Sequence: Synthetic oligonucleotide
agauagaaaacggaccaaa

SEQ ID NO: 487800 - RNA, 19 nt, Artificial Sequence
  Description of Artificial Sequence: Synthetic oligonucleotide
ugaccaaucuucccagcuc

SEQ ID NO: 487801 - RNA, 19 nt, Artificial Sequence
  Description of Artificial Sequence: Synthetic oligonucleotide
gaaaguuacuuaggugaug

SEQ ID NO: 487802 - RNA, 19 nt, Artificial Sequence
  Description of Artificial Sequence: Synthetic oligonucleotide
acggaauugaaaguuacuu

SEQ ID NO: 487803 - RNA, 19 nt, Artificial Sequence
  Description of Artificial Sequence: Synthetic oligonucleotide
caaacuuugguuugggacu

SEQ ID NO: 487804 - RNA, 19 nt, Artificial Sequence
  Description of Artificial Sequence: Synthetic oligonucleotide
uacagcaucucagucgccu

SEQ ID NO: 487805 - RNA, 19 nt, Artificial Sequence
  Description of Artificial Sequence: Synthetic oligonucleotide
cuggcgucguuuaagauaa

SEQ ID NO: 487806 - RNA, 19 nt, Artificial Sequence
  Description of Artificial Sequence: Synthetic oligonucleotide
ggggucaauaugcuggucc

SEQ ID NO: 487807 - RNA, 19 nt, Artificial Sequence
  Description of Artificial Sequence: Synthetic oligonucleotide
uucuuauaccaugggguca

SEQ ID NO: 487808 - RNA, 19 nt, Artificial Sequence
  Description of Artificial Sequence: Synthetic oligonucleotide
augacucccuggcauaaca

SEQ ID NO: 487809 - RNA, 19 nt, Artificial Sequence
  Description of Artificial Sequence: Synthetic oligonucleotide
accucuauuuucaaugggu

SEQ ID NO: 487810 - RNA, 19 nt, Artificial Sequence
  Description of Artificial Sequence: Synthetic oligonucleotide
cauguacagcaucucaguc

SEQ ID NO: 487811 - RNA, 19 nt, Artificial Sequence
  Description of Artificial Sequence: Synthetic oligonucleotide
uacaccgagucuucugugu

SEQ ID NO: 487812 - RNA, 19 nt, Artificial Sequence
  Description of Artificial Sequence: Synthetic oligonucleotide
gauaacuuucaguguugga

SEQ ID NO: 487813 - RNA, 19 nt, Artificial Sequence
  Description of Artificial Sequence: Synthetic oligonucleotide
agcaugggcacaugagucu

SEQ ID NO: 487814 - RNA, 19 nt, Artificial Sequence
  Description of Artificial Sequence: Synthetic oligonucleotide
cuguguacgaaucaucuua

SEQ ID NO: 487815 - RNA, 19 nt, Artificial Sequence
  Description of Artificial Sequence: Synthetic oligonucleotide
cacauaccaaucccgucgc

SEQ ID NO: 487816 - RNA, 19 nt, Artificial Sequence
  Description of Artificial Sequence: Synthetic oligonucleotide
aacggaauugaaaguuacu

SEQ ID NO: 487817 - RNA, 19 nt, Artificial Sequence
  Description of Artificial Sequence: Synthetic oligonucleotide
cuguuaggccuguagagca

SEQ ID NO: 487818 - RNA, 19 nt, Artificial Sequence
  Description of Artificial Sequence: Synthetic oligonucleotide
ugaaacgcuggaagaugac

SEQ ID NO: 487819 - RNA, 19 nt, Artificial Sequence
  Description of Artificial Sequence: Synthetic oligonucleotide
agggaagauacaugacugu

SEQ ID NO: 487820 - RNA, 19 nt, Artificial Sequence
  Description of Artificial Sequence: Synthetic oligonucleotide
gugauucuuuaaguuggcg

SEQ ID NO: 487821 - RNA, 19 nt, Artificial Sequence
  Description of Artificial Sequence: Synthetic oligonucleotide
ucucuaugcaguucuuaua

SEQ ID NO: 487822 - RNA, 19 nt, Artificial Sequence
  Description of Artificial Sequence: Synthetic oligonucleotide
ccuuacuuuuaaaagcaac

SEQ ID NO: 487823 - RNA, 19 nt, Artificial Sequence
  Description of Artificial Sequence: Synthetic oligonucleotide
gauagcucaccagcugugc

SEQ ID NO: 487824 - RNA, 19 nt, Artificial Sequence
  Description of Artificial Sequence: Synthetic oligonucleotide
aggcaaucuaaauacucuu

SEQ ID NO: 487825 - RNA, 19 nt, Artificial Sequence
  Description of Artificial Sequence: Synthetic oligonucleotide
aucggcaguccauacuugu

SEQ ID NO: 487826 - RNA, 19 nt, Artificial Sequence
  Description of Artificial Sequence: Synthetic oligonucleotide
uguuaggccuguagagcac

SEQ ID NO: 487827 - RNA, 19 nt, Artificial Sequence
  Description of Artificial Sequence: Synthetic oligonucleotide
aguguacauuacaucaaug

SEQ ID NO: 487828 - RNA, 19 nt, Artificial Sequence
  Description of Artificial Sequence: Synthetic oligonucleotide
caaccuaguaaagucacga

SEQ ID NO: 487829 - RNA, 19 nt, Artificial Sequence
  Description of Artificial Sequence: Synthetic oligonucleotide
caccucaacuaugugguag

SEQ ID NO: 487830 - RNA, 19 nt, Artificial Sequence
  Description of Artificial Sequence: Synthetic oligonucleotide
uaucggcaguccauacuug

SEQ ID NO: 487831 - RNA, 19 nt, Artificial Sequence
  Description of Artificial Sequence: Synthetic oligonucleotide
cauaccaaucccgucgcac

SEQ ID NO: 487832 - RNA, 19 nt, Artificial Sequence
  Description of Artificial Sequence: Synthetic oligonucleotide
uacgaauuguagagugcaa

SEQ ID NO: 487833 - RNA, 19 nt, Artificial Sequence
  Description of Artificial Sequence: Synthetic oligonucleotide
uaaaugcagguuggguuug

SEQ ID NO: 487834 - RNA, 19 nt, Artificial Sequence
  Description of Artificial Sequence: Synthetic oligonucleotide
ggaggaacaauaucuaaua

SEQ ID NO: 487835 - RNA, 19 nt, Artificial Sequence
  Description of Artificial Sequence: Synthetic oligonucleotide
aagauucgguccauuucug

SEQ ID NO: 487836 - RNA, 19 nt, Artificial Sequence
  Description of Artificial Sequence: Synthetic oligonucleotide
uuauaguuauuugcuuuua

SEQ ID NO: 487837 - RNA, 19 nt, Artificial Sequence
  Description of Artificial Sequence: Synthetic oligonucleotide
auacacauaccaaucccgu

SEQ ID NO: 487838 - RNA, 19 nt, Artificial Sequence
  Description of Artificial Sequence: Synthetic oligonucleotide
uuggcgaaucauagcuucu

SEQ ID NO: 487839 - RNA, 19 nt, Artificial Sequence
  Description of Artificial Sequence: Synthetic oligonucleotide
ugcuacuuucaucuccaua

SEQ ID NO: 487840 - RNA, 19 nt, Artificial Sequence
  Description of Artificial Sequence: Synthetic oligonucleotide
acaaccuaguaaagucacg

SEQ ID NO: 487841 - RNA, 19 nt, Artificial Sequence
  Description of Artificial Sequence: Synthetic oligonucleotide
uucgguccauuucugcauc

SEQ ID NO: 487842 - RNA, 19 nt, Artificial Sequence
  Description of Artificial Sequence: Synthetic oligonucleotide
augugagggucuaacucgg

SEQ ID NO: 487843 - RNA, 19 nt, Artificial Sequence
  Description of Artificial Sequence: Synthetic oligonucleotide
agcaaccauagauggggca

SEQ ID NO: 487844 - RNA, 19 nt, Artificial Sequence
  Description of Artificial Sequence: Synthetic oligonucleotide
acgaauuguagagugcaaa

SEQ ID NO: 487845 - RNA, 19 nt, Artificial Sequence
  Description of Artificial Sequence: Synthetic oligonucleotide
aguucaaggggaucuuauu

SEQ ID NO: 487846 - RNA, 19 nt, Artificial Sequence
  Description of Artificial Sequence: Synthetic oligonucleotide
ugcagucguucuauuugcu

SEQ ID NO: 487847 - RNA, 19 nt, Artificial Sequence
  Description of Artificial Sequence: Synthetic oligonucleotide
gggaucuuauucuucccug

SEQ ID NO: 487848 - RNA, 19 nt, Artificial Sequence
  Description of Artificial Sequence: Synthetic oligonucleotide
caagauccugaguaagaca

SEQ ID NO: 487849 - RNA, 19 nt, Artificial Sequence
  Description of Artificial Sequence: Synthetic oligonucleotide
acaucguaccaagugcuca

SEQ ID NO: 487850 - RNA, 19 nt, Artificial Sequence
  Description of Artificial Sequence: Synthetic oligonucleotide
ugccacggaauguccagga

SEQ ID NO: 487851 - RNA, 19 nt, Artificial Sequence
  Description of Artificial Sequence: Synthetic oligonucleotide
ggugauuccuccaaacuuc

SEQ ID NO: 487852 - RNA, 19 nt, Artificial Sequence
  Description of Artificial Sequence: Synthetic oligonucleotide
ugugagggucuaacucggc

SEQ ID NO: 487853 - RNA, 19 nt, Artificial Sequence
  Description of Artificial Sequence: Synthetic oligonucleotide
uuggccgcuaggugcagca

SEQ ID NO: 487854 - RNA, 19 nt, Artificial Sequence
  Description of Artificial Sequence: Synthetic oligonucleotide
uacacauguuguacucauc

SEQ ID NO: 487855 - RNA, 19 nt, Artificial Sequence
  Description of Artificial Sequence: Synthetic oligonucleotide
uguggcuuaucggcagucc

SEQ ID NO: 487856 - RNA, 19 nt, Artificial Sequence
  Description of Artificial Sequence: Synthetic oligonucleotide
cuggauagcucaccagcug

SEQ ID NO: 487857 - RNA, 19 nt, Artificial Sequence
  Description of Artificial Sequence: Synthetic oligonucleotide
gauuuggccgcuaggugca

SEQ ID NO: 487858 - RNA, 19 nt, Artificial Sequence
  Description of Artificial Sequence: Synthetic oligonucleotide
ucguaccaagugcucaguc

SEQ ID NO: 487859 - RNA, 19 nt, Artificial Sequence
  Description of Artificial Sequence: Synthetic oligonucleotide
ucaauaugcuggucccauc

SEQ ID NO: 487860 - RNA, 19 nt, Artificial Sequence
  Description of Artificial Sequence: Synthetic oligonucleotide
ugggcaucggguacaccga

SEQ ID NO: 487861 - RNA, 19 nt, Artificial Sequence
  Description of Artificial Sequence: Synthetic oligonucleotide
caagaguuuugaagacuuc

SEQ ID NO: 487862 - RNA, 19 nt, Artificial Sequence
  Description of Artificial Sequence: Synthetic oligonucleotide
caggguuaccauguacugc

SEQ ID NO: 487863 - RNA, 19 nt, Artificial Sequence
  Description of Artificial Sequence: Synthetic oligonucleotide
cauguuguacucaucgagu

SEQ ID NO: 487864 - RNA, 19 nt, Artificial Sequence
  Description of Artificial Sequence: Synthetic oligonucleotide
acgaaucaucuuaucaaca

SEQ ID NO: 487865 - RNA, 19 nt, Artificial Sequence
  Description of Artificial Sequence: Synthetic oligonucleotide
gggucaauaugcugguccc

SEQ ID NO: 487866 - RNA, 19 nt, Artificial Sequence
  Description of Artificial Sequence: Synthetic oligonucleotide
uuacccugggcaucgggua

SEQ ID NO: 487867 - RNA, 19 nt, Artificial Sequence
  Description of Artificial Sequence: Synthetic oligonucleotide
gugggugauuccuccaaac

SEQ ID NO: 487868 - RNA, 19 nt, Artificial Sequence
  Description of Artificial Sequence: Synthetic oligonucleotide
gguacguccuucagaaugc

SEQ ID NO: 487869 - RNA, 19 nt, Artificial Sequence
  Description of Artificial Sequence: Synthetic oligonucleotide
uggcuuaucggcaguccau

SEQ ID NO: 487870 - RNA, 19 nt, Artificial Sequence
  Description of Artificial Sequence: Synthetic oligonucleotide
aaauuacccugggcaucgg

SEQ ID NO: 487871 - RNA, 19 nt, Artificial Sequence
  Description of Artificial Sequence: Synthetic oligonucleotide
cuucuggcgucguuuaaga

SEQ ID NO: 487872 - RNA, 19 nt, Artificial Sequence
  Description of Artificial Sequence: Synthetic oligonucleotide
accgagucuucugugugag

SEQ ID NO: 487873 - RNA, 19 nt, Artificial Sequence
  Description of Artificial Sequence: Synthetic oligonucleotide
ggcaagguagggucuuagg

SEQ ID NO: 487874 - RNA, 19 nt, Artificial Sequence
  Description of Artificial Sequence: Synthetic oligonucleotide
gaauuguagagugcaaaau

SEQ ID NO: 487875 - RNA, 19 nt, Artificial Sequence
  Description of Artificial Sequence: Synthetic oligonucleotide
agucgccugugcaagaacu

SEQ ID NO: 487876 - RNA, 19 nt, Artificial Sequence
  Description of Artificial Sequence: Synthetic oligonucleotide
ggcaguccauacuuguagc

SEQ ID NO: 487877 - RNA, 19 nt, Artificial Sequence
  Description of Artificial Sequence: Synthetic oligonucleotide
caaccauagauggggcagc

SEQ ID NO: 487878 - RNA, 19 nt, Artificial Sequence
  Description of Artificial Sequence: Synthetic oligonucleotide
aucggguacaccgagucuu

SEQ ID NO: 487879 - RNA, 19 nt, Artificial Sequence
  Description of Artificial Sequence: Synthetic oligonucleotide
caggcaaucuaaauacucu

SEQ ID NO: 487880 - RNA, 19 nt, Artificial Sequence
  Description of Artificial Sequence: Synthetic oligonucleotide
aaggugggaggaacaauau

SEQ ID NO: 487881 - RNA, 19 nt, Artificial Sequence
  Description of Artificial Sequence: Synthetic oligonucleotide
acagauaaacagagugcca

SEQ ID NO: 487882 - RNA, 19 nt, Artificial Sequence
  Description of Artificial Sequence: Synthetic oligonucleotide
guacaccgagucuucugug

SEQ ID NO: 487883 - RNA, 19 nt, Artificial Sequence
  Description of Artificial Sequence: Synthetic oligonucleotide
agcaaucaucuguggguga

SEQ ID NO: 487884 - RNA, 19 nt, Artificial Sequence
  Description of Artificial Sequence: Synthetic oligonucleotide
caucgaguccagacgcaug

SEQ ID NO: 487885 - RNA, 19 nt, Artificial Sequence
  Description of Artificial Sequence: Synthetic oligonucleotide
guaguguacauuacaucaa

SEQ ID NO: 487886 - RNA, 19 nt, Artificial Sequence
  Description of Artificial Sequence: Synthetic oligonucleotide
agucaagaucaugaugaaa

SEQ ID NO: 487887 - RNA, 19 nt, Artificial Sequence
  Description of Artificial Sequence: Synthetic oligonucleotide
cccuggauagcucaccagc

SEQ ID NO: 487888 - RNA, 19 nt, Artificial Sequence
  Description of Artificial Sequence: Synthetic oligonucleotide
auucuuuaaguuggcgaau

SEQ ID NO: 487889 - RNA, 19 nt, Artificial Sequence
  Description of Artificial Sequence: Synthetic oligonucleotide
cuagaacuucucuuacaaa

SEQ ID NO: 487890 - RNA, 19 nt, Artificial Sequence
  Description of Artificial Sequence: Synthetic oligonucleotide
guggcuuaucggcagucca

SEQ ID NO: 487891 - RNA, 19 nt, Artificial Sequence
  Description of Artificial Sequence: Synthetic oligonucleotide
ucggcaguccauacuugua

SEQ ID NO: 487892 - RNA, 19 nt, Artificial Sequence
  Description of Artificial Sequence: Synthetic oligonucleotide
uaccaaucccgucgcacuu

SEQ ID NO: 487893 - RNA, 19 nt, Artificial Sequence
  Description of Artificial Sequence: Synthetic oligonucleotide
aggcuacuacaagaaagca

SEQ ID NO: 487894 - RNA, 19 nt, Artificial Sequence
  Description of Artificial Sequence: Synthetic oligonucleotide
cagacgcauguacagcauc

SEQ ID NO: 487895 - RNA, 19 nt, Artificial Sequence
  Description of Artificial Sequence: Synthetic oligonucleotide
uuauaccauggggucaaua

SEQ ID NO: 487896 - RNA, 19 nt, Artificial Sequence
  Description of Artificial Sequence: Synthetic oligonucleotide
agcuccaacggaauugaaa

SEQ ID NO: 487897 - RNA, 19 nt, Artificial Sequence
  Description of Artificial Sequence: Synthetic oligonucleotide
acugcggcacagucaacaa

SEQ ID NO: 487898 - RNA, 19 nt, Artificial Sequence
  Description of Artificial Sequence: Synthetic oligonucleotide
aucauagcuucuacaaauu

SEQ ID NO: 487899 - RNA, 19 nt, Artificial Sequence
  Description of Artificial Sequence: Synthetic oligonucleotide
ggcaaucuaaauacucuuc

SEQ ID NO: 487900 - RNA, 19 nt, Artificial Sequence
  Description of Artificial Sequence: Synthetic oligonucleotide
cuucgucuuuuguguugcc

SEQ ID NO: 487901 - RNA, 19 nt, Artificial Sequence
  Description of Artificial Sequence: Synthetic oligonucleotide
ucccgucgcacuugaggca

SEQ ID NO: 487902 - RNA, 19 nt, Artificial Sequence
  Description of Artificial Sequence: Synthetic oligonucleotide
cgaaucauagcuucuacaa

SEQ ID NO: 487903 - RNA, 19 nt, Artificial Sequence
  Description of Artificial Sequence: Synthetic oligonucleotide
uaguugccuuacuuuuaaa

SEQ ID NO: 487904 - RNA, 19 nt, Artificial Sequence
  Description of Artificial Sequence: Synthetic oligonucleotide
guguacgaaucaucuuauc

SEQ ID NO: 487905 - RNA, 19 nt, Artificial Sequence
  Description of Artificial Sequence: Synthetic oligonucleotide
ggcgaaucauagcuucuac

SEQ ID NO: 487906 - RNA, 19 nt, Artificial Sequence
  Description of Artificial Sequence: Synthetic oligonucleotide
gaaugacucccuggcauaa

SEQ ID NO: 487907 - RNA, 19 nt, Artificial Sequence
  Description of Artificial Sequence: Synthetic oligonucleotide
ggauuuuaugaugcaguga

SEQ ID NO: 487908 - RNA, 19 nt, Artificial Sequence
  Description of Artificial Sequence: Synthetic oligonucleotide
guccagacgcauguacagc

SEQ ID NO: 487909 - RNA, 19 nt, Artificial Sequence
  Description of Artificial Sequence: Synthetic oligonucleotide
gagggucuaacucggcagu

SEQ ID NO: 487910 - RNA, 19 nt, Artificial Sequence
  Description of Artificial Sequence: Synthetic oligonucleotide
gcaucggguacaccgaguc

SEQ ID NO: 487911 - RNA, 19 nt, Artificial Sequence
  Description of Artificial Sequence: Synthetic oligonucleotide
aggcaagguagggucuuag

SEQ ID NO: 487912 - RNA, 19 nt, Artificial Sequence
  Description of Artificial Sequence: Synthetic oligonucleotide
cacugcggcacagucaaca

SEQ ID NO: 487913 - RNA, 19 nt, Artificial Sequence
  Description of Artificial Sequence: Synthetic oligonucleotide
acauaccaaucccgucgca

SEQ ID NO: 487914 - RNA, 19 nt, Artificial Sequence
  Description of Artificial Sequence: Synthetic oligonucleotide
cuuaucggcaguccauacu

SEQ ID NO: 487915 - RNA, 19 nt, Artificial Sequence
  Description of Artificial Sequence: Synthetic oligonucleotide
ccaggguuaccauguacug

SEQ ID NO: 487916 - RNA, 19 nt, Artificial Sequence
  Description of Artificial Sequence: Synthetic oligonucleotide
gugccacggaauguccagg

SEQ ID NO: 487917 - RNA, 19 nt, Artificial Sequence
  Description of Artificial Sequence: Synthetic oligonucleotide
auccugguuaggauuuggu

SEQ ID NO: 487918 - RNA, 19 nt, Artificial Sequence
  Description of Artificial Sequence: Synthetic oligonucleotide
gguacaccgagucuucugu

SEQ ID NO: 487919 - RNA, 19 nt, Artificial Sequence
  Description of Artificial Sequence: Synthetic oligonucleotide
caacaaucuguguacgaau

SEQ ID NO: 487920 - RNA, 19 nt, Artificial Sequence
  Description of Artificial Sequence: Synthetic oligonucleotide
acgagacagcuccgaugag

SEQ ID NO: 487921 - RNA, 19 nt, Artificial Sequence
  Description of Artificial Sequence: Synthetic oligonucleotide
cucaucgaguccagacgca

SEQ ID NO: 487922 - RNA, 19 nt, Artificial Sequence
  Description of Artificial Sequence: Synthetic oligonucleotide
cacaugagucuucuggcgu

SEQ ID NO: 487923 - RNA, 19 nt, Artificial Sequence
  Description of Artificial Sequence: Synthetic oligonucleotide
gagugccacggaaugucca

SEQ ID NO: 487924 - RNA, 19 nt, Artificial Sequence
  Description of Artificial Sequence: Synthetic oligonucleotide
ucuuguggauguggcuuau

SEQ ID NO: 487925 - RNA, 19 nt, Artificial Sequence
  Description of Artificial Sequence: Synthetic oligonucleotide
cgaaucaucuuaucaacaa

SEQ ID NO: 487926 - RNA, 19 nt, Artificial Sequence
  Description of Artificial Sequence: Synthetic oligonucleotide
gcuuaucggcaguccauac

SEQ ID NO: 487927 - RNA, 19 nt, Artificial Sequence
  Description of Artificial Sequence: Synthetic oligonucleotide
aguuggcgaaucauagcuu

SEQ ID NO: 487928 - RNA, 19 nt, Artificial Sequence
  Description of Artificial Sequence: Synthetic oligonucleotide
cuuguagcaugggcacaug

SEQ ID NO: 487929 - RNA, 19 nt, Artificial Sequence
  Description of Artificial Sequence: Synthetic oligonucleotide
guucgaugagcaguguagu

SEQ ID NO: 487930 - RNA, 19 nt, Artificial Sequence
  Description of Artificial Sequence: Synthetic oligonucleotide
cuacuuucaucuccauacu

SEQ ID NO: 487931 - RNA, 19 nt, Artificial Sequence
  Description of Artificial Sequence: Synthetic oligonucleotide
guuugccacugcggcacag

SEQ ID NO: 487932 - RNA, 19 nt, Artificial Sequence
  Description of Artificial Sequence: Synthetic oligonucleotide
caaucccgucgcacuugag

SEQ ID NO: 487933 - RNA, 19 nt, Artificial Sequence
  Description of Artificial Sequence: Synthetic oligonucleotide
gucaauaugcuggucccau

SEQ ID NO: 487934 - RNA, 19 nt, Artificial Sequence
  Description of Artificial Sequence: Synthetic oligonucleotide
guaguucaaggggaucuua

SEQ ID NO: 487935 - RNA, 19 nt, Artificial Sequence
  Description of Artificial Sequence: Synthetic oligonucleotide
cagauagaaaacggaccaa

SEQ ID NO: 487936 - RNA, 19 nt, Artificial Sequence
  Description of Artificial Sequence: Synthetic oligonucleotide
agauccugaguaagacaau

SEQ ID NO: 487937 - RNA, 19 nt, Artificial Sequence
  Description of Artificial Sequence: Synthetic oligonucleotide
caguucgaugagcagugua

SEQ ID NO: 487938 - RNA, 19 nt, Artificial Sequence
  Description of Artificial Sequence: Synthetic oligonucleotide
cuccaacggaauugaaagu

SEQ ID NO: 487939 - RNA, 19 nt, Artificial Sequence
  Description of Artificial Sequence: Synthetic oligonucleotide
gggugauuccuccaaacuu

SEQ ID NO: 487940 - RNA, 19 nt, Artificial Sequence
  Description of Artificial Sequence: Synthetic oligonucleotide
acaguucgaugagcagugu

SEQ ID NO: 487941 - RNA, 19 nt, Artificial Sequence
  Description of Artificial Sequence: Synthetic oligonucleotide
gugguaguucaaggggauc

SEQ ID NO: 487942 - RNA, 19 nt, Artificial Sequence
  Description of Artificial Sequence: Synthetic oligonucleotide
ccccucauugcuuucugca

SEQ ID NO: 487943 - RNA, 19 nt, Artificial Sequence
  Description of Artificial Sequence: Synthetic oligonucleotide
gcaagaguuuugaagacuu

SEQ ID NO: 487944 - RNA, 19 nt, Artificial Sequence
  Description of Artificial Sequence: Synthetic oligonucleotide
ccaacggaauugaaaguua

SEQ ID NO: 487945 - RNA, 19 nt, Artificial Sequence
  Description of Artificial Sequence: Synthetic oligonucleotide
uggggucaauaugcugguc

SEQ ID NO: 487946 - RNA, 19 nt, Artificial Sequence
  Description of Artificial Sequence: Synthetic oligonucleotide
gguuugggacuuucaagau

SEQ ID NO: 487947 - RNA, 19 nt, Artificial Sequence
  Description of Artificial Sequence: Synthetic oligonucleotide
ucgaguccagacgcaugua

SEQ ID NO: 487948 - RNA, 19 nt, Artificial Sequence
  Description of Artificial Sequence: Synthetic oligonucleotide
gucguucuauuugcuccuc

SEQ ID NO: 487949 - RNA, 19 nt, Artificial Sequence
  Description of Artificial Sequence: Synthetic oligonucleotide
agggucuaacucggcagua

SEQ ID NO: 487950 - RNA, 19 nt, Artificial Sequence
  Description of Artificial Sequence: Synthetic oligonucleotide
acccugggcaucggguaca

SEQ ID NO: 487951 - RNA, 19 nt, Artificial Sequence
  Description of Artificial Sequence: Synthetic oligonucleotide
gcaagagcacugaaggagu

SEQ ID NO: 487952 - RNA, 19 nt, Artificial Sequence
  Description of Artificial Sequence: Synthetic oligonucleotide
ccugucuacacauguugua

SEQ ID NO: 487953 - RNA, 19 nt, Artificial Sequence
  Description of Artificial Sequence: Synthetic oligonucleotide
ggucaauaugcugguccca

SEQ ID NO: 487954 - RNA, 19 nt, Artificial Sequence
  Description of Artificial Sequence: Synthetic oligonucleotide
uggcgucguuuaagauaac

SEQ ID NO: 487955 - RNA, 19 nt, Artificial Sequence
  Description of Artificial Sequence: Synthetic oligonucleotide
ggcgucguuuaagauaacu

SEQ ID NO: 487956 - RNA, 19 nt, Artificial Sequence
  Description of Artificial Sequence: Synthetic oligonucleotide
gucacgagacagcuccgau

SEQ ID NO: 487957 - RNA, 19 nt, Artificial Sequence
  Description of Artificial Sequence: Synthetic oligonucleotide
gguuaggauuugguacguc

SEQ ID NO: 487958 - RNA, 19 nt, Artificial Sequence
  Description of Artificial Sequence: Synthetic oligonucleotide
ccucuaugacaaaccucuc

SEQ ID NO: 487959 - RNA, 19 nt, Artificial Sequence
  Description of Artificial Sequence: Synthetic oligonucleotide
ccgagucuucugugugagg

SEQ ID NO: 487960 - RNA, 19 nt, Artificial Sequence
  Description of Artificial Sequence: Synthetic oligonucleotide
gggcccacaggcaaucuaa

SEQ ID NO: 487961 - RNA, 19 nt, Artificial Sequence
  Description of Artificial Sequence: Synthetic oligonucleotide
cccgucgcacuugaggcac

SEQ ID NO: 487962 - RNA, 19 nt, Artificial Sequence
  Description of Artificial Sequence: Synthetic oligonucleotide
caucggguacaccgagucu

SEQ ID NO: 487963 - RNA, 19 nt, Artificial Sequence
  Description of Artificial Sequence: Synthetic oligonucleotide
ggcuuaucggcaguccaua

SEQ ID NO: 487964 - RNA, 19 nt, Artificial Sequence
  Description of Artificial Sequence: Synthetic oligonucleotide
gagcaguguaguguacauu

SEQ ID NO: 487965 - RNA, 19 nt, Artificial Sequence
  Description of Artificial Sequence: Synthetic oligonucleotide
gccuuacuuuuaaaagcaa

SEQ ID NO: 487966 - RNA, 19 nt, Artificial Sequence
  Description of Artificial Sequence: Synthetic oligonucleotide
agacaaccucaugcauuuu

SEQ ID NO: 487967 - RNA, 19 nt, Artificial Sequence
  Description of Artificial Sequence: Synthetic oligonucleotide
gggucuuaggaugugccuu

SEQ ID NO: 487968 - RNA, 19 nt, Artificial Sequence
  Description of Artificial Sequence: Synthetic oligonucleotide
cagcuccgaugagaagauc

SEQ ID NO: 487969 - RNA, 19 nt, Artificial Sequence
  Description of Artificial Sequence: Synthetic oligonucleotide
gcuucgcagaggaugcugu

SEQ ID NO: 487970 - RNA, 19 nt, Artificial Sequence
  Description of Artificial Sequence: Synthetic oligonucleotide
cugcggcacagucaacaau

SEQ ID NO: 487971 - RNA, 19 nt, Artificial Sequence
  Description of Artificial Sequence: Synthetic oligonucleotide
ggggcguuggaagcugaaa

SEQ ID NO: 487972 - RNA, 19 nt, Artificial Sequence
  Description of Artificial Sequence: Synthetic oligonucleotide
gguaguucaaggggaucuu

SEQ ID NO: 487973 - RNA, 19 nt, Artificial Sequence
  Description of Artificial Sequence: Synthetic oligonucleotide
gugcuucgcagaggaugcu

SEQ ID NO: 487974 - RNA, 19 nt, Artificial Sequence
  Description of Artificial Sequence: Synthetic oligonucleotide
ggcaucggguacaccgagu

SEQ ID NO: 487975 - RNA, 19 nt, Artificial Sequence
  Description of Artificial Sequence: Synthetic oligonucleotide
cuuauaccauggggucaau

SEQ ID NO: 487976 - RNA, 19 nt, Artificial Sequence
  Description of Artificial Sequence: Synthetic oligonucleotide
ccagacgcauguacagcau

SEQ ID NO: 487977 - RNA, 19 nt, Artificial Sequence
  Description of Artificial Sequence: Synthetic oligonucleotide
ccacugcggcacagucaac

SEQ ID NO: 487978 - RNA, 19 nt, Artificial Sequence
  Description of Artificial Sequence: Synthetic oligonucleotide
cgaugagaagauccaguuu

SEQ ID NO: 487979 - RNA, 19 nt, Artificial Sequence
  Description of Artificial Sequence: Synthetic oligonucleotide
ccgucgcacuugaggcaca

SEQ ID NO: 487980 - RNA, 19 nt, Artificial Sequence
  Description of Artificial Sequence: Synthetic oligonucleotide
aguuuuauuaggcucaucg

SEQ ID NO: 487981 - RNA, 19 nt, Artificial Sequence
  Description of Artificial Sequence: Synthetic oligonucleotide
cuuauugucaccuucuagg

SEQ ID NO: 487982 - RNA, 19 nt, Artificial Sequence
  Description of Artificial Sequence: Synthetic oligonucleotide
uucacgaucaccauguuug

SEQ ID NO: 487983 - RNA, 19 nt, Artificial Sequence
  Description of Artificial Sequence: Synthetic oligonucleotide
aacguauugggguagaaug

SEQ ID NO: 487984 - RNA, 19 nt, Artificial Sequence
  Description of Artificial Sequence: Synthetic oligonucleotide
ugaagauuggucaaguagc

SEQ ID NO: 487985 - RNA, 19 nt, Artificial Sequence
  Description of Artificial Sequence: Synthetic oligonucleotide
gaagauugaaauucugggg

SEQ ID NO: 487986 - RNA, 19 nt, Artificial Sequence
  Description of Artificial Sequence: Synthetic oligonucleotide
uaagcuacagguuucuagg

SEQ ID NO: 487987 - RNA, 19 nt, Artificial Sequence
  Description of Artificial Sequence: Synthetic oligonucleotide
auuauuacccugcuuauug

SEQ ID NO: 487988 - RNA, 19 nt, Artificial Sequence
  Description of Artificial Sequence: Synthetic oligonucleotide
gauauuauuacccugcuua

SEQ ID NO: 487989 - RNA, 19 nt, Artificial Sequence
  Description of Artificial Sequence: Synthetic oligonucleotide
uuuggaccgacuaacaucu

SEQ ID NO: 487990 - RNA, 19 nt, Artificial Sequence
  Description of Artificial Sequence: Synthetic oligonucleotide
uguaccugaagauugguca

SEQ ID NO: 487991 - RNA, 19 nt, Artificial Sequence
  Description of Artificial Sequence: Synthetic oligonucleotide
aauaggagggcaaaugggg

SEQ ID NO: 487992 - RNA, 19 nt, Artificial Sequence
  Description of Artificial Sequence: Synthetic oligonucleotide
aaacccguguaacacgucg

SEQ ID NO: 487993 - RNA, 19 nt, Artificial Sequence
  Description of Artificial Sequence: Synthetic oligonucleotide
gauagggauguucacacag

SEQ ID NO: 487994 - RNA, 19 nt, Artificial Sequence
  Description of Artificial Sequence: Synthetic oligonucleotide
uuuaaacccguguaacacg

SEQ ID NO: 487995 - RNA, 19 nt, Artificial Sequence
  Description of Artificial Sequence: Synthetic oligonucleotide
uuauugucaccuucuaggg

SEQ ID NO: 487996 - RNA, 19 nt, Artificial Sequence
  Description of Artificial Sequence: Synthetic oligonucleotide
acuggguuaacccauaggu

SEQ ID NO: 487997 - RNA, 19 nt, Artificial Sequence
  Description of Artificial Sequence: Synthetic oligonucleotide
uccacuaugaugauagccu

SEQ ID NO: 487998 - RNA, 19 nt, Artificial Sequence
  Description of Artificial Sequence: Synthetic oligonucleotide
uaaacuuuaaacccgugua

SEQ ID NO: 487999 - RNA, 19 nt, Artificial Sequence
  Description of Artificial Sequence: Synthetic oligonucleotide
auuucguaugcauucuugg

SEQ ID NO: 488000 - RNA, 19 nt, Artificial Sequence
  Description of Artificial Sequence: Synthetic oligonucleotide
ugaauggucucauugucag

SEQ ID NO: 488001 - RNA, 19 nt, Artificial Sequence
  Description of Artificial Sequence: Synthetic oligonucleotide
uauuuaaugucccugucau

SEQ ID NO: 488002 - RNA, 19 nt, Artificial Sequence
  Description of Artificial Sequence: Synthetic oligonucleotide
uggguuaacccauagguca

SEQ ID NO: 488003 - RNA, 19 nt, Artificial Sequence
  Description of Artificial Sequence: Synthetic oligonucleotide
ucaucgaggggucacgggg

SEQ ID NO: 488004 - RNA, 19 nt, Artificial Sequence
  Description of Artificial Sequence: Synthetic oligonucleotide
uaggguuucguugucaccg

SEQ ID NO: 488005 - RNA, 19 nt, Artificial Sequence
  Description of Artificial Sequence: Synthetic oligonucleotide
cauguaguagcguacuggg

SEQ ID NO: 488006 - RNA, 19 nt, Artificial Sequence
  Description of Artificial Sequence: Synthetic oligonucleotide
ucauaguuaugcugguugg

SEQ ID NO: 488007 - RNA, 19 nt, Artificial Sequence
  Description of Artificial Sequence: Synthetic oligonucleotide
uguuuguaaaguauggguu

SEQ ID NO: 488008 - RNA, 19 nt, Artificial Sequence
  Description of Artificial Sequence: Synthetic oligonucleotide
aggguauagggguauauag

SEQ ID NO: 488009 - RNA, 19 nt, Artificial Sequence
  Description of Artificial Sequence: Synthetic oligonucleotide
auguuuguaaaguaugggu

SEQ ID NO: 488010 - RNA, 19 nt, Artificial Sequence
  Description of Artificial Sequence: Synthetic oligonucleotide
guuuguaaaguauggguug

SEQ ID NO: 488011 - RNA, 19 nt, Artificial Sequence
  Description of Artificial Sequence: Synthetic oligonucleotide
auaaacuuuaaacccgugu

SEQ ID NO: 488012 - RNA, 19 nt, Artificial Sequence
  Description of Artificial Sequence: Synthetic oligonucleotide
gguauagggguauauagag

SEQ ID NO: 488013 - RNA, 19 nt, Artificial Sequence
  Description of Artificial Sequence: Synthetic oligonucleotide
aaacuuuaaacccguguaa

SEQ ID NO: 488014 - RNA, 19 nt, Artificial Sequence
  Description of Artificial Sequence: Synthetic oligonucleotide
uguuuauccgauuuucccu

SEQ ID NO: 488015 - RNA, 19 nt, Artificial Sequence
  Description of Artificial Sequence: Synthetic oligonucleotide
caccucauagacuuggucc

SEQ ID NO: 488016 - RNA, 19 nt, Artificial Sequence
  Description of Artificial Sequence: Synthetic oligonucleotide
uucguaugcauucuuggcu

SEQ ID NO: 488017 - RNA, 19 nt, Artificial Sequence
  Description of Artificial Sequence: Synthetic oligonucleotide
accgacuaacaucuggggc

SEQ ID NO: 488018 - RNA, 19 nt, Artificial Sequence
  Description of Artificial Sequence: Synthetic oligonucleotide
ugcguaguugugacgaagg

SEQ ID NO: 488019 - RNA, 19 nt, Artificial Sequence
  Description of Artificial Sequence: Synthetic oligonucleotide
gggauguucacacagcacg

SEQ ID NO: 488020 - RNA, 19 nt, Artificial Sequence
  Description of Artificial Sequence: Synthetic oligonucleotide
uagggguauauagagagag

SEQ ID NO: 488021 - RNA, 19 nt, Artificial Sequence
  Description of Artificial Sequence: Synthetic oligonucleotide
guauggguuggucugaaag

SEQ ID NO: 488022 - RNA, 19 nt, Artificial Sequence
  Description of Artificial Sequence: Synthetic oligonucleotide
aacgaagugcaaugcgggg

SEQ ID NO: 488023 - RNA, 19 nt, Artificial Sequence
  Description of Artificial Sequence: Synthetic oligonucleotide
aguauuuaaugucccuguc

SEQ ID NO: 488024 - RNA, 19 nt, Artificial Sequence
  Description of Artificial Sequence: Synthetic oligonucleotide
ucaguuaccucauuaucac

SEQ ID NO: 488025 - RNA, 19 nt, Artificial Sequence
  Description of Artificial Sequence: Synthetic oligonucleotide
gaagauuggucaaguagcg

SEQ ID NO: 488026 - RNA, 19 nt, Artificial Sequence
  Description of Artificial Sequence: Synthetic oligonucleotide
agcuacagguuucuagggc

SEQ ID NO: 488027 - RNA, 19 nt, Artificial Sequence
  Description of Artificial Sequence: Synthetic oligonucleotide
caggaauaccacaaaggcg

SEQ ID NO: 488028 - RNA, 19 nt, Artificial Sequence
  Description of Artificial Sequence: Synthetic oligonucleotide
uuaaacccguguaacacgu

SEQ ID NO: 488029 - RNA, 19 nt, Artificial Sequence
  Description of Artificial Sequence: Synthetic oligonucleotide
uauuagaauccucacuguc

SEQ ID NO: 488030 - RNA, 19 nt, Artificial Sequence
  Description of Artificial Sequence: Synthetic oligonucleotide
ucugagauccuguaccuga

SEQ ID NO: 488031 - RNA, 19 nt, Artificial Sequence
  Description of Artificial Sequence: Synthetic oligonucleotide
cucauaguuaugcugguug

SEQ ID NO: 488032 - RNA, 19 nt, Artificial Sequence
  Description of Artificial Sequence: Synthetic oligonucleotide
gaugauagccucuuccuuc

SEQ ID NO: 488033 - RNA, 19 nt, Artificial Sequence
  Description of Artificial Sequence: Synthetic oligonucleotide
uuguucuguagccacuucc

SEQ ID NO: 488034 - RNA, 19 nt, Artificial Sequence
  Description of Artificial Sequence: Synthetic oligonucleotide
uccucacuuagugauaggg

SEQ ID NO: 488035 - RNA, 19 nt, Artificial Sequence
  Description of Artificial Sequence: Synthetic oligonucleotide
aaauaaacuuuaaacccgu

SEQ ID NO: 488036 - RNA, 19 nt, Artificial Sequence
  Description of Artificial Sequence: Synthetic oligonucleotide
uggaccgacuaacaucugg

SEQ ID NO: 488037 - RNA, 19 nt, Artificial Sequence
  Description of Artificial Sequence: Synthetic oligonucleotide
uuagaauccucacugucau

SEQ ID NO: 488038 - RNA, 19 nt, Artificial Sequence
  Description of Artificial Sequence: Synthetic oligonucleotide
uuucguaugcauucuuggc

SEQ ID NO: 488039 - RNA, 19 nt, Artificial Sequence
  Description of Artificial Sequence: Synthetic oligonucleotide
gauugaaauucuggggugg

SEQ ID NO: 488040 - RNA, 19 nt, Artificial Sequence
  Description of Artificial Sequence: Synthetic oligonucleotide
ugaugaagauugaaauucu

SEQ ID NO: 488041 - RNA, 19 nt, Artificial Sequence
  Description of Artificial Sequence: Synthetic oligonucleotide
aauucuggggugguugagg

SEQ ID NO: 488042 - RNA, 19 nt, Artificial Sequence
  Description of Artificial Sequence: Synthetic oligonucleotide
cucgcugucaaacaggguc

SEQ ID NO: 488043 - RNA, 19 nt, Artificial Sequence
  Description of Artificial Sequence: Synthetic oligonucleotide
acuaucacugcugucuugg

SEQ ID NO: 488044 - RNA, 19 nt, Artificial Sequence
  Description of Artificial Sequence: Synthetic oligonucleotide
uaguauuuaaugucccugu

SEQ ID NO: 488045 - RNA, 19 nt, Artificial Sequence
  Description of Artificial Sequence: Synthetic oligonucleotide
uuugagacgcaagaaggcc

SEQ ID NO: 488046 - RNA, 19 nt, Artificial Sequence
  Description of Artificial Sequence: Synthetic oligonucleotide
auugucaccuucuaggguu

SEQ ID NO: 488047 - RNA, 19 nt, Artificial Sequence
  Description of Artificial Sequence: Synthetic oligonucleotide
uuugcguuugagacgcaag

SEQ ID NO: 488048 - RNA, 19 nt, Artificial Sequence
  Description of Artificial Sequence: Synthetic oligonucleotide
ugguugaugaagauugaaa

SEQ ID NO: 488049 - RNA, 19 nt, Artificial Sequence
  Description of Artificial Sequence: Synthetic oligonucleotide
caacgaagugcaaugcggg

SEQ ID NO: 488050 - RNA, 19 nt, Artificial Sequence
  Description of Artificial Sequence: Synthetic oligonucleotide
uauggguuggucugaaagu

SEQ ID NO: 488051 - RNA, 19 nt, Artificial Sequence
  Description of Artificial Sequence: Synthetic oligonucleotide
ucacuuagugauagggaug

SEQ ID NO: 488052 - RNA, 19 nt, Artificial Sequence
  Description of Artificial Sequence: Synthetic oligonucleotide
uccucgcuuagcacgauag

SEQ ID NO: 488053 - RNA, 19 nt, Artificial Sequence
  Description of Artificial Sequence: Synthetic oligonucleotide
guugugacgaaggucacag

SEQ ID NO: 488054 - RNA, 19 nt, Artificial Sequence
  Description of Artificial Sequence: Synthetic oligonucleotide
aguagcggaaaaugucuuc

SEQ ID NO: 488055 - RNA, 19 nt, Artificial Sequence
  Description of Artificial Sequence: Synthetic oligonucleotide
gugaucuuauuguuggggc

SEQ ID NO: 488056 - RNA, 19 nt, Artificial Sequence
  Description of Artificial Sequence: Synthetic oligonucleotide
uuaaggucaggguucucgc

SEQ ID NO: 488057 - RNA, 19 nt, Artificial Sequence
  Description of Artificial Sequence: Synthetic oligonucleotide
aagcguuugggaccggcag

SEQ ID NO: 488058 - RNA, 19 nt, Artificial Sequence
  Description of Artificial Sequence: Synthetic oligonucleotide
cuuuggaccgacuaacauc

SEQ ID NO: 488059 - RNA, 19 nt, Artificial Sequence
  Description of Artificial Sequence: Synthetic oligonucleotide
agauugaaauucuggggug

SEQ ID NO: 488060 - RNA, 19 nt, Artificial Sequence
  Description of Artificial Sequence: Synthetic oligonucleotide
gguauauagagagagcccc

SEQ ID NO: 488061 - RNA, 19 nt, Artificial Sequence
  Description of Artificial Sequence: Synthetic oligonucleotide
uuccacuaugaugauagcc

SEQ ID NO: 488062 - RNA, 19 nt, Artificial Sequence
  Description of Artificial Sequence: Synthetic oligonucleotide
ucagugaucucaucaauuu

SEQ ID NO: 488063 - RNA, 19 nt, Artificial Sequence
  Description of Artificial Sequence: Synthetic oligonucleotide
uuccucucauguaguagcg

SEQ ID NO: 488064 - RNA, 19 nt, Artificial Sequence
  Description of Artificial Sequence: Synthetic oligonucleotide
uugcguuugagacgcaaga

SEQ ID NO: 488065 - RNA, 19 nt, Artificial Sequence
  Description of Artificial Sequence: Synthetic oligonucleotide
gagaaacuucgggagaagg

SEQ ID NO: 488066 - RNA, 19 nt, Artificial Sequence
  Description of Artificial Sequence: Synthetic oligonucleotide
uuauuagaauccucacugu

SEQ ID NO: 488067 - RNA, 19 nt, Artificial Sequence
  Description of Artificial Sequence: Synthetic oligonucleotide
uagcguacuggguuaaccc

SEQ ID NO: 488068 - RNA, 19 nt, Artificial Sequence
  Description of Artificial Sequence: Synthetic oligonucleotide
uugagacgcaagaaggccu

SEQ ID NO: 488069 - RNA, 19 nt, Artificial Sequence
  Description of Artificial Sequence: Synthetic oligonucleotide
aagauuggucaaguagcgg

SEQ ID NO: 488070 - RNA, 19 nt, Artificial Sequence
  Description of Artificial Sequence: Synthetic oligonucleotide
gccuaugcucacuagaagg

SEQ ID NO: 488071 - RNA, 19 nt, Artificial Sequence
  Description of Artificial Sequence: Synthetic oligonucleotide
acgaucaccauguuuguaa

SEQ ID NO: 488072 - RNA, 19 nt, Artificial Sequence
  Description of Artificial Sequence: Synthetic oligonucleotide
auuuaaugucccugucauc

SEQ ID NO: 488073 - RNA, 19 nt, Artificial Sequence
  Description of Artificial Sequence: Synthetic oligonucleotide
uguuggggcccucauuaag

SEQ ID NO: 488074 - RNA, 19 nt, Artificial Sequence
  Description of Artificial Sequence: Synthetic oligonucleotide
cauuucguaugcauucuug

SEQ ID NO: 488075 - RNA, 19 nt, Artificial Sequence
  Description of Artificial Sequence: Synthetic oligonucleotide
uaacccauaggucauucuu

SEQ ID NO: 488076 - RNA, 19 nt, Artificial Sequence
  Description of Artificial Sequence: Synthetic oligonucleotide
guagaaugagacaccagcc

SEQ ID NO: 488077 - RNA, 19 nt, Artificial Sequence
  Description of Artificial Sequence: Synthetic oligonucleotide
auuagaauccucacuguca

SEQ ID NO: 488078 - RNA, 19 nt, Artificial Sequence
  Description of Artificial Sequence: Synthetic oligonucleotide
auuaggcucaucgaggggu

SEQ ID NO: 488079 - RNA, 19 nt, Artificial Sequence
  Description of Artificial Sequence: Synthetic oligonucleotide
gaugaagauugaaauucug

SEQ ID NO: 488080 - RNA, 19 nt, Artificial Sequence
  Description of Artificial Sequence: Synthetic oligonucleotide
acugaggcgggcuaguggu

SEQ ID NO: 488081 - RNA, 19 nt, Artificial Sequence
  Description of Artificial Sequence: Synthetic oligonucleotide
agcccauggagauaugucu

SEQ ID NO: 488082 - RNA, 19 nt, Artificial Sequence
  Description of Artificial Sequence: Synthetic oligonucleotide
agcguuugggaccggcagc

SEQ ID NO: 488083 - RNA, 19 nt, Artificial Sequence
  Description of Artificial Sequence: Synthetic oligonucleotide
ucgucagagaugauuugga

SEQ ID NO: 488084 - RNA, 19 nt, Artificial Sequence
  Description of Artificial Sequence: Synthetic oligonucleotide
guugagucgucagagauga

SEQ ID NO: 488085 - RNA, 19 nt, Artificial Sequence
  Description of Artificial Sequence: Synthetic oligonucleotide
ucuucaucgcguugguuga

SEQ ID NO: 488086 - RNA, 19 nt, Artificial Sequence
  Description of Artificial Sequence: Synthetic oligonucleotide
aagacuucaauggcauucu

SEQ ID NO: 488087 - RNA, 19 nt, Artificial Sequence
  Description of Artificial Sequence: Synthetic oligonucleotide
aguuaugcugguuggugcu

SEQ ID NO: 488088 - RNA, 19 nt, Artificial Sequence
  Description of Artificial Sequence: Synthetic oligonucleotide
gaccgacuaacaucugggg

SEQ ID NO: 488089 - RNA, 19 nt, Artificial Sequence
  Description of Artificial Sequence: Synthetic oligonucleotide
auagggauguucacacagc

SEQ ID NO: 488090 - RNA, 19 nt, Artificial Sequence
  Description of Artificial Sequence: Synthetic oligonucleotide
gucaccgucagcuuucuca

SEQ ID NO: 488091 - RNA, 19 nt, Artificial Sequence
  Description of Artificial Sequence: Synthetic oligonucleotide
uggauauuauuacccugcu

SEQ ID NO: 488092 - RNA, 19 nt, Artificial Sequence
  Description of Artificial Sequence: Synthetic oligonucleotide
auauuauuacccugcuuau

SEQ ID NO: 488093 - RNA, 19 nt, Artificial Sequence
  Description of Artificial Sequence: Synthetic oligonucleotide
ugagcgguugcgcuggaac

SEQ ID NO: 488094 - RNA, 19 nt, Artificial Sequence
  Description of Artificial Sequence: Synthetic oligonucleotide
uauuacccugcuuauuguc

SEQ ID NO: 488095 - RNA, 19 nt, Artificial Sequence
  Description of Artificial Sequence: Synthetic oligonucleotide
agagucuuaucaaagacuu

SEQ ID NO: 488096 - RNA, 19 nt, Artificial Sequence
  Description of Artificial Sequence: Synthetic oligonucleotide
gaauccucacugucauagg

SEQ ID NO: 488097 - RNA, 19 nt, Artificial Sequence
  Description of Artificial Sequence: Synthetic oligonucleotide
auaggcguucuuuucuucu

SEQ ID NO: 488098 - RNA, 19 nt, Artificial Sequence
  Description of Artificial Sequence: Synthetic oligonucleotide
guuucguugucaccgucag

SEQ ID NO: 488099 - RNA, 19 nt, Artificial Sequence
  Description of Artificial Sequence: Synthetic oligonucleotide
ucuggagaccacugcguag

SEQ ID NO: 488100 - RNA, 19 nt, Artificial Sequence
  Description of Artificial Sequence: Synthetic oligonucleotide
uguaacacgucggucuccc

SEQ ID NO: 488101 - RNA, 19 nt, Artificial Sequence
  Description of Artificial Sequence: Synthetic oligonucleotide
gggguauauagagagagcc

SEQ ID NO: 488102 - RNA, 19 nt, Artificial Sequence
  Description of Artificial Sequence: Synthetic oligonucleotide
aucgcguugguugaugaag

SEQ ID NO: 488103 - RNA, 19 nt, Artificial Sequence
  Description of Artificial Sequence: Synthetic oligonucleotide
aauaaacuuuaaacccgug

SEQ ID NO: 488104 - RNA, 19 nt, Artificial Sequence
  Description of Artificial Sequence: Synthetic oligonucleotide
agauaugucugagauccug

SEQ ID NO: 488105 - RNA, 19 nt, Artificial Sequence
  Description of Artificial Sequence: Synthetic oligonucleotide
uuacccugcuuauugucac

SEQ ID NO: 488106 - RNA, 19 nt, Artificial Sequence
  Description of Artificial Sequence: Synthetic oligonucleotide
uagcacgauagcuuccuca

SEQ ID NO: 488107 - RNA, 19 nt, Artificial Sequence
  Description of Artificial Sequence: Synthetic oligonucleotide
ugaagaagcuuugucuggu

SEQ ID NO: 488108 - RNA, 19 nt, Artificial Sequence
  Description of Artificial Sequence: Synthetic oligonucleotide
ugggguagaaugagacacc

SEQ ID NO: 488109 - RNA, 19 nt, Artificial Sequence
  Description of Artificial Sequence: Synthetic oligonucleotide
ugggccuaugcucacuaga

SEQ ID NO: 488110 - RNA, 19 nt, Artificial Sequence
  Description of Artificial Sequence: Synthetic oligonucleotide
gcuacagguuucuagggcc

SEQ ID NO: 488111 - RNA, 19 nt, Artificial Sequence
  Description of Artificial Sequence: Synthetic oligonucleotide
ccuaugcucacuagaaggg

SEQ ID NO: 488112 - RNA, 19 nt, Artificial Sequence
  Description of Artificial Sequence: Synthetic oligonucleotide
guuugagacgcaagaaggc

SEQ ID NO: 488113 - RNA, 19 nt, Artificial Sequence
  Description of Artificial Sequence: Synthetic oligonucleotide
gaaugagacaccagccggc

SEQ ID NO: 488114 - RNA, 19 nt, Artificial Sequence
  Description of Artificial Sequence: Synthetic oligonucleotide
ccgacuaacaucuggggcc

SEQ ID NO: 488115 - RNA, 19 nt, Artificial Sequence
  Description of Artificial Sequence: Synthetic oligonucleotide
aagcauugcgcucucuguu

SEQ ID NO: 488116 - RNA, 19 nt, Artificial Sequence
  Description of Artificial Sequence: Synthetic oligonucleotide
ccaacgaagugcaaugcgg

SEQ ID NO: 488117 - RNA, 19 nt, Artificial Sequence
  Description of Artificial Sequence: Synthetic oligonucleotide
agcauugcgcucucuguug

SEQ ID NO: 488118 - RNA, 19 nt, Artificial Sequence
  Description of Artificial Sequence: Synthetic oligonucleotide
ucuguugagucgucagaga

SEQ ID NO: 488119 - RNA, 19 nt, Artificial Sequence
  Description of Artificial Sequence: Synthetic oligonucleotide
guaaaguauggguuggucu

SEQ ID NO: 488120 - RNA, 19 nt, Artificial Sequence
  Description of Artificial Sequence: Synthetic oligonucleotide
ugcgaguuugggccugggg

SEQ ID NO: 488121 - RNA, 19 nt, Artificial Sequence
  Description of Artificial Sequence: Synthetic oligonucleotide
aagccuggaauaugcugga

SEQ ID NO: 488122 - RNA, 19 nt, Artificial Sequence
  Description of Artificial Sequence: Synthetic oligonucleotide
ucguaugcauucuuggcuu

SEQ ID NO: 488123 - RNA, 19 nt, Artificial Sequence
  Description of Artificial Sequence: Synthetic oligonucleotide
ucaccauuucguaugcauu

SEQ ID NO: 488124 - RNA, 19 nt, Artificial Sequence
  Description of Artificial Sequence: Synthetic oligonucleotide
acccauaggucauucuuga

SEQ ID NO: 488125 - RNA, 19 nt, Artificial Sequence
  Description of Artificial Sequence: Synthetic oligonucleotide
aagugcaaugcggggccgc

SEQ ID NO: 488126 - RNA, 19 nt, Artificial Sequence
  Description of Artificial Sequence: Synthetic oligonucleotide
agcacgauagcuuccucaa

SEQ ID NO: 488127 - RNA, 19 nt, Artificial Sequence
  Description of Artificial Sequence: Synthetic oligonucleotide
ucucauguaguagcguacu

SEQ ID NO: 488128 - RNA, 19 nt, Artificial Sequence
  Description of Artificial Sequence: Synthetic oligonucleotide
uccucuuuggaccgacuaa

SEQ ID NO: 488129 - RNA, 19 nt, Artificial Sequence
  Description of Artificial Sequence: Synthetic oligonucleotide
aacccguguaacacgucgg

SEQ ID NO: 488130 - RNA, 19 nt, Artificial Sequence
  Description of Artificial Sequence: Synthetic oligonucleotide
cucucauguaguagcguac

SEQ ID NO: 488131 - RNA, 19 nt, Artificial Sequence
  Description of Artificial Sequence: Synthetic oligonucleotide
uuaacccauaggucauucu

SEQ ID NO: 488132 - RNA, 19 nt, Artificial Sequence
  Description of Artificial Sequence: Synthetic oligonucleotide
uaggcguucuuuucuucug

SEQ ID NO: 488133 - RNA, 19 nt, Artificial Sequence
  Description of Artificial Sequence: Synthetic oligonucleotide
agacgcaagaaggccuugc

SEQ ID NO: 488134 - RNA, 19 nt, Artificial Sequence
  Description of Artificial Sequence: Synthetic oligonucleotide
cuggguuaacccauagguc

SEQ ID NO: 488135 - RNA, 19 nt, Artificial Sequence
  Description of Artificial Sequence: Synthetic oligonucleotide
agcguacuggguuaaccca

SEQ ID NO: 488136 - RNA, 19 nt, Artificial Sequence
  Description of Artificial Sequence: Synthetic oligonucleotide
ggucugaaaguacagcuuc

SEQ ID NO: 488137 - RNA, 19 nt, Artificial Sequence
  Description of Artificial Sequence: Synthetic oligonucleotide
ugcaaugcggggccgcaca

SEQ ID NO: 488138 - RNA, 19 nt, Artificial Sequence
  Description of Artificial Sequence: Synthetic oligonucleotide
agggguauauagagagagc

SEQ ID NO: 488139 - RNA, 19 nt, Artificial Sequence
  Description of Artificial Sequence: Synthetic oligonucleotide
ucaucgcguugguugauga

SEQ ID NO: 488140 - RNA, 19 nt, Artificial Sequence
  Description of Artificial Sequence: Synthetic oligonucleotide
gaagcuuugucugguguca

SEQ ID NO: 488141 - RNA, 19 nt, Artificial Sequence
  Description of Artificial Sequence: Synthetic oligonucleotide
uucacgucaguuaccucau

SEQ ID NO: 488142 - RNA, 19 nt, Artificial Sequence
  Description of Artificial Sequence: Synthetic oligonucleotide
acgucaguuaccucauuau

SEQ ID NO: 488143 - RNA, 19 nt, Artificial Sequence
  Description of Artificial Sequence: Synthetic oligonucleotide
ggucaaguagcggaaaaug

SEQ ID NO: 488144 - RNA, 19 nt, Artificial Sequence
  Description of Artificial Sequence: Synthetic oligonucleotide
gguugaugaagauugaaau

SEQ ID NO: 488145 - RNA, 19 nt, Artificial Sequence
  Description of Artificial Sequence: Synthetic oligonucleotide
gcguuugagacgcaagaag

SEQ ID NO: 488146 - RNA, 19 nt, Artificial Sequence
  Description of Artificial Sequence: Synthetic oligonucleotide
uugcgcucucuguuguuag

SEQ ID NO: 488147 - RNA, 19 nt, Artificial Sequence
  Description of Artificial Sequence: Synthetic oligonucleotide
caaguagcggaaaaugucu

SEQ ID NO: 488148 - RNA, 19 nt, Artificial Sequence
  Description of Artificial Sequence: Synthetic oligonucleotide
guagcguacuggguuaacc

SEQ ID NO: 488149 - RNA, 19 nt, Artificial Sequence
  Description of Artificial Sequence: Synthetic oligonucleotide
ugagacgcaagaaggccuu

SEQ ID NO: 488150 - RNA, 19 nt, Artificial Sequence
  Description of Artificial Sequence: Synthetic oligonucleotide
ggaauaugcuggaugauga

SEQ ID NO: 488151 - RNA, 19 nt, Artificial Sequence
  Description of Artificial Sequence: Synthetic oligonucleotide
uggagauaugucugagauc

SEQ ID NO: 488152 - RNA, 19 nt, Artificial Sequence
  Description of Artificial Sequence: Synthetic oligonucleotide
ggaccgacuaacaucuggg

SEQ ID NO: 488153 - RNA, 19 nt, Artificial Sequence
  Description of Artificial Sequence: Synthetic oligonucleotide
agucgucagagaugauuug

SEQ ID NO: 488154 - RNA, 19 nt, Artificial Sequence
  Description of Artificial Sequence: Synthetic oligonucleotide
ucauaggcguucuuuucuu

SEQ ID NO: 488155 - RNA, 19 nt, Artificial Sequence
  Description of Artificial Sequence: Synthetic oligonucleotide
uauuauuacccugcuuauu

SEQ ID NO: 488156 - RNA, 19 nt, Artificial Sequence
  Description of Artificial Sequence: Synthetic oligonucleotide
cacugaggcgggcuagugg

SEQ ID NO: 488157 - RNA, 19 nt, Artificial Sequence
  Description of Artificial Sequence: Synthetic oligonucleotide
guacuggguuaacccauag

SEQ ID NO: 488158 - RNA, 19 nt, Artificial Sequence
  Description of Artificial Sequence: Synthetic oligonucleotide
cucacuuagugauagggau

SEQ ID NO: 488159 - RNA, 19 nt, Artificial Sequence
  Description of Artificial Sequence: Synthetic oligonucleotide
ucacgaucaccauguuugu

SEQ ID NO: 488160 - RNA, 19 nt, Artificial Sequence
  Description of Artificial Sequence: Synthetic oligonucleotide
agggauguucacacagcac

SEQ ID NO: 488161 - RNA, 19 nt, Artificial Sequence
  Description of Artificial Sequence: Synthetic oligonucleotide
acgcaagaaggccuugccu

SEQ ID NO: 488162 - RNA, 19 nt, Artificial Sequence
  Description of Artificial Sequence: Synthetic oligonucleotide
ugcguuugagacgcaagaa

SEQ ID NO: 488163 - RNA, 19 nt, Artificial Sequence
  Description of Artificial Sequence: Synthetic oligonucleotide
cucauguaguagcguacug

SEQ ID NO: 488164 - RNA, 19 nt, Artificial Sequence
  Description of Artificial Sequence: Synthetic oligonucleotide
gccccugcgaguuugggcc

SEQ ID NO: 488165 - RNA, 19 nt, Artificial Sequence
  Description of Artificial Sequence: Synthetic oligonucleotide
cuagcugaauaggagggca

SEQ ID NO: 488166 - RNA, 19 nt, Artificial Sequence
  Description of Artificial Sequence: Synthetic oligonucleotide
gaagcauugcgcucucugu

SEQ ID NO: 488167 - RNA, 19 nt, Artificial Sequence
  Description of Artificial Sequence: Synthetic oligonucleotide
ggaggguaaucccuccucc

SEQ ID NO: 488168 - RNA, 19 nt, Artificial Sequence
  Description of Artificial Sequence: Synthetic oligonucleotide
caguaugcuuuccauccuc

SEQ ID NO: 488169 - RNA, 19 nt, Artificial Sequence
  Description of Artificial Sequence: Synthetic oligonucleotide
gaggguaaucccuccucca

SEQ ID NO: 488170 - RNA, 19 nt, Artificial Sequence
  Description of Artificial Sequence: Synthetic oligonucleotide
ucaccuucuaggguuucgu

SEQ ID NO: 488171 - RNA, 19 nt, Artificial Sequence
  Description of Artificial Sequence: Synthetic oligonucleotide
acguauugggguagaauga

SEQ ID NO: 488172 - RNA, 19 nt, Artificial Sequence
  Description of Artificial Sequence: Synthetic oligonucleotide
uucuaggguuucguuguca

SEQ ID NO: 488173 - RNA, 19 nt, Artificial Sequence
  Description of Artificial Sequence: Synthetic oligonucleotide
uucaucgcguugguugaug

SEQ ID NO: 488174 - RNA, 19 nt, Artificial Sequence
  Description of Artificial Sequence: Synthetic oligonucleotide
cuuccacuaugaugauagc

SEQ ID NO: 488175 - RNA, 19 nt, Artificial Sequence
  Description of Artificial Sequence: Synthetic oligonucleotide
gguugaggaaugcuuugac

SEQ ID NO: 488176 - RNA, 19 nt, Artificial Sequence
  Description of Artificial Sequence: Synthetic oligonucleotide
aguaugcuuuccauccucu

SEQ ID NO: 488177 - RNA, 19 nt, Artificial Sequence
  Description of Artificial Sequence: Synthetic oligonucleotide
gauuggucaaguagcggaa

SEQ ID NO: 488178 - RNA, 19 nt, Artificial Sequence
  Description of Artificial Sequence: Synthetic oligonucleotide
cauaggcguucuuuucuuc

SEQ ID NO: 488179 - RNA, 19 nt, Artificial Sequence
  Description of Artificial Sequence: Synthetic oligonucleotide
uaggguauagggguauaua

SEQ ID NO: 488180 - RNA, 19 nt, Artificial Sequence
  Description of Artificial Sequence: Synthetic oligonucleotide
ggucuucgcaucuggauga

SEQ ID NO: 488181 - RNA, 19 nt, Artificial Sequence
  Description of Artificial Sequence: Synthetic oligonucleotide
uuguaaaguauggguuggu

SEQ ID NO: 488182 - RNA, 19 nt, Artificial Sequence
  Description of Artificial Sequence: Synthetic oligonucleotide
gcccucauuaaggucaggg

SEQ ID NO: 488183 - RNA, 19 nt, Artificial Sequence
  Description of Artificial Sequence: Synthetic oligonucleotide
uaguugugacgaaggucac

SEQ ID NO: 488184 - RNA, 19 nt, Artificial Sequence
  Description of Artificial Sequence: Synthetic oligonucleotide
cacugcguaguugugacga

SEQ ID NO: 488185 - RNA, 19 nt, Artificial Sequence
  Description of Artificial Sequence: Synthetic oligonucleotide
ccaaaggggaggguaaucc

SEQ ID NO: 488186 - RNA, 19 nt, Artificial Sequence
  Description of Artificial Sequence: Synthetic oligonucleotide
cucaaaguagucggugguc

SEQ ID NO: 488187 - RNA, 19 nt, Artificial Sequence
  Description of Artificial Sequence: Synthetic oligonucleotide
guauagggguauauagaga

SEQ ID NO: 488188 - RNA, 19 nt, Artificial Sequence
  Description of Artificial Sequence: Synthetic oligonucleotide
uuuauccgauuuucccuuu

SEQ ID NO: 488189 - RNA, 19 nt, Artificial Sequence
  Description of Artificial Sequence: Synthetic oligonucleotide
aguagcguacuggguuaac

SEQ ID NO: 488190 - RNA, 19 nt, Artificial Sequence
  Description of Artificial Sequence: Synthetic oligonucleotide
caaaggcgaagcugccuug

SEQ ID NO: 488191 - RNA, 19 nt, Artificial Sequence
  Description of Artificial Sequence: Synthetic oligonucleotide
acagcggaucuccucacuu

SEQ ID NO: 488192 - RNA, 19 nt, Artificial Sequence
  Description of Artificial Sequence: Synthetic oligonucleotide
aaguagcggaaaaugucuu

SEQ ID NO: 488193 - RNA, 19 nt, Artificial Sequence
  Description of Artificial Sequence: Synthetic oligonucleotide
guaguagcguacuggguua

SEQ ID NO: 488194 - RNA, 19 nt, Artificial Sequence
  Description of Artificial Sequence: Synthetic oligonucleotide
acccguguaacacgucggu

SEQ ID NO: 488195 - RNA, 19 nt, Artificial Sequence
  Description of Artificial Sequence: Synthetic oligonucleotide
caaaugggguaggguauag

SEQ ID NO: 488196 - RNA, 19 nt, Artificial Sequence
  Description of Artificial Sequence: Synthetic oligonucleotide
uagcggaaaaugucuucau

SEQ ID NO: 488197 - RNA, 19 nt, Artificial Sequence
  Description of Artificial Sequence: Synthetic oligonucleotide
gguaauauguuuauccgau

SEQ ID NO: 488198 - RNA, 19 nt, Artificial Sequence
  Description of Artificial Sequence: Synthetic oligonucleotide
ggguauauagagagagccc

SEQ ID NO: 488199 - RNA, 19 nt, Artificial Sequence
  Description of Artificial Sequence: Synthetic oligonucleotide
uguucaccgccuccagguc

SEQ ID NO: 488200 - RNA, 19 nt, Artificial Sequence
  Description of Artificial Sequence: Synthetic oligonucleotide
guuuauccgauuuucccuu

SEQ ID NO: 488201 - RNA, 19 nt, Artificial Sequence
  Description of Artificial Sequence: Synthetic oligonucleotide
uaaacccguguaacacguc

SEQ ID NO: 488202 - RNA, 19 nt, Artificial Sequence
  Description of Artificial Sequence: Synthetic oligonucleotide
cccaacgaagugcaaugcg

SEQ ID NO: 488203 - RNA, 19 nt, Artificial Sequence
  Description of Artificial Sequence: Synthetic oligonucleotide
cucucggcucuccuucacc

SEQ ID NO: 488204 - RNA, 19 nt, Artificial Sequence
  Description of Artificial Sequence: Synthetic oligonucleotide
cugcguaguugugacgaag

SEQ ID NO: 488205 - RNA, 19 nt, Artificial Sequence
  Description of Artificial Sequence: Synthetic oligonucleotide
ggcccaagcguuugggacc

SEQ ID NO: 488206 - RNA, 19 nt, Artificial Sequence
  Description of Artificial Sequence: Synthetic oligonucleotide
aguugugacgaaggucaca

SEQ ID NO: 488207 - RNA, 19 nt, Artificial Sequence
  Description of Artificial Sequence: Synthetic oligonucleotide
ggggucacggggaaagggg

SEQ ID NO: 488208 - RNA, 19 nt, Artificial Sequence
  Description of Artificial Sequence: Synthetic oligonucleotide
aggcucaucgaggggucac

SEQ ID NO: 488209 - RNA, 19 nt, Artificial Sequence
  Description of Artificial Sequence: Synthetic oligonucleotide
ugggaccggcagcacuucc

SEQ ID NO: 488210 - RNA, 19 nt, Artificial Sequence
  Description of Artificial Sequence: Synthetic oligonucleotide
caaaggguaauauguuuau

SEQ ID NO: 488211 - RNA, 19 nt, Artificial Sequence
  Description of Artificial Sequence: Synthetic oligonucleotide
gaaaggggcggugcuucug

SEQ ID NO: 488212 - RNA, 19 nt, Artificial Sequence
  Description of Artificial Sequence: Synthetic oligonucleotide
ggccuaugcucacuagaag

SEQ ID NO: 488213 - RNA, 19 nt, Artificial Sequence
  Description of Artificial Sequence: Synthetic oligonucleotide
cacuuagugauagggaugu

SEQ ID NO: 488214 - RNA, 19 nt, Artificial Sequence
  Description of Artificial Sequence: Synthetic oligonucleotide
ccuacgucgccgaugccgc

SEQ ID NO: 488215 - RNA, 19 nt, Artificial Sequence
  Description of Artificial Sequence: Synthetic oligonucleotide
aggguuucguugucaccgu

SEQ ID NO: 488216 - RNA, 19 nt, Artificial Sequence
  Description of Artificial Sequence: Synthetic oligonucleotide
ugcgcucucuguuguuagu

SEQ ID NO: 488217 - RNA, 19 nt, Artificial Sequence
  Description of Artificial Sequence: Synthetic oligonucleotide
gaggagggccaaaggggag

SEQ ID NO: 488218 - RNA, 19 nt, Artificial Sequence
  Description of Artificial Sequence: Synthetic oligonucleotide
guauugggguagaaugaga

SEQ ID NO: 488219 - RNA, 19 nt, Artificial Sequence
  Description of Artificial Sequence: Synthetic oligonucleotide
gagucgucagagaugauuu

SEQ ID NO: 488220 - RNA, 19 nt, Artificial Sequence
  Description of Artificial Sequence: Synthetic oligonucleotide
gccuugcaaagacacugag

SEQ ID NO: 488221 - RNA, 19 nt, Artificial Sequence
  Description of Artificial Sequence: Synthetic oligonucleotide
cuugaagcauugcgcucuc

SEQ ID NO: 488222 - RNA, 19 nt, Artificial Sequence
  Description of Artificial Sequence: Synthetic oligonucleotide
agggcaaaugggguagggu

SEQ ID NO: 488223 - RNA, 19 nt, Artificial Sequence
  Description of Artificial Sequence: Synthetic oligonucleotide
ccaaaggguaauauguuua

SEQ ID NO: 488224 - RNA, 19 nt, Artificial Sequence
  Description of Artificial Sequence: Synthetic oligonucleotide
agcugaauaggagggcaaa

SEQ ID NO: 488225 - RNA, 19 nt, Artificial Sequence
  Description of Artificial Sequence: Synthetic oligonucleotide
ggguauagggguauauaga

SEQ ID NO: 488226 - RNA, 19 nt, Artificial Sequence
  Description of Artificial Sequence: Synthetic oligonucleotide
auugcgcucucuguuguua

SEQ ID NO: 488227 - RNA, 19 nt, Artificial Sequence
  Description of Artificial Sequence: Synthetic oligonucleotide
uuggaccgacuaacaucug

SEQ ID NO: 488228 - RNA, 19 nt, Artificial Sequence
  Description of Artificial Sequence: Synthetic oligonucleotide
ccaaauaagaacucugcau

SEQ ID NO: 488229 - RNA, 19 nt, Artificial Sequence
  Description of Artificial Sequence: Synthetic oligonucleotide
ggaucuccucacuuaguga

SEQ ID NO: 488230 - RNA, 19 nt, Artificial Sequence
  Description of Artificial Sequence: Synthetic oligonucleotide
caagcguuugggaccggca

SEQ ID NO: 488231 - RNA, 19 nt, Artificial Sequence
  Description of Artificial Sequence: Synthetic oligonucleotide
uccgccuacgucgccgaug

SEQ ID NO: 488232 - RNA, 19 nt, Artificial Sequence
  Description of Artificial Sequence: Synthetic oligonucleotide
caucgaggggucacgggga

SEQ ID NO: 488233 - RNA, 19 nt, Artificial Sequence
  Description of Artificial Sequence: Synthetic oligonucleotide
cucgcuuagcacgauagcu

SEQ ID NO: 488234 - RNA, 19 nt, Artificial Sequence
  Description of Artificial Sequence: Synthetic oligonucleotide
cuguugagucgucagagau

SEQ ID NO: 488235 - RNA, 19 nt, Artificial Sequence
  Description of Artificial Sequence: Synthetic oligonucleotide
gagaugauuuggaucuccu

SEQ ID NO: 488236 - RNA, 19 nt, Artificial Sequence
  Description of Artificial Sequence: Synthetic oligonucleotide
cuguccucgcuuagcacga

SEQ ID NO: 488237 - RNA, 19 nt, Artificial Sequence
  Description of Artificial Sequence: Synthetic oligonucleotide
cccggugccaacguauugg

SEQ ID NO: 488238 - RNA, 19 nt, Artificial Sequence
  Description of Artificial Sequence: Synthetic oligonucleotide
acugcguaguugugacgaa

SEQ ID NO: 488239 - RNA, 19 nt, Artificial Sequence
  Description of Artificial Sequence: Synthetic oligonucleotide
uggggcccucauuaagguc

SEQ ID NO: 488240 - RNA, 19 nt, Artificial Sequence
  Description of Artificial Sequence: Synthetic oligonucleotide
gucugagauccuguaccug

SEQ ID NO: 488241 - RNA, 19 nt, Artificial Sequence
  Description of Artificial Sequence: Synthetic oligonucleotide
gaugccgccuccucacacu

SEQ ID NO: 488242 - RNA, 19 nt, Artificial Sequence
  Description of Artificial Sequence: Synthetic oligonucleotide
cacggagagaggggcuugg

SEQ ID NO: 488243 - RNA, 19 nt, Artificial Sequence
  Description of Artificial Sequence: Synthetic oligonucleotide
cguauugggguagaaugag

SEQ ID NO: 488244 - RNA, 19 nt, Artificial Sequence
  Description of Artificial Sequence: Synthetic oligonucleotide
gagcgguugcgcuggaacu

SEQ ID NO: 488245 - RNA, 19 nt, Artificial Sequence
  Description of Artificial Sequence: Synthetic oligonucleotide
guaacacgucggucucccc

SEQ ID NO: 488246 - RNA, 19 nt, Artificial Sequence
  Description of Artificial Sequence: Synthetic oligonucleotide
cugagauccuguaccugaa

SEQ ID NO: 488247 - RNA, 19 nt, Artificial Sequence
  Description of Artificial Sequence: Synthetic oligonucleotide
cuuagcacgauagcuuccu

SEQ ID NO: 488248 - RNA, 19 nt, Artificial Sequence
  Description of Artificial Sequence: Synthetic oligonucleotide
ccggugccaacguauuggg

SEQ ID NO: 488249 - RNA, 19 nt, Artificial Sequence
  Description of Artificial Sequence: Synthetic oligonucleotide
gugccaacguauuggggua

SEQ ID NO: 488250 - RNA, 19 nt, Artificial Sequence
  Description of Artificial Sequence: Synthetic oligonucleotide
agugcaaugcggggccgca

SEQ ID NO: 488251 - RNA, 19 nt, Artificial Sequence
  Description of Artificial Sequence: Synthetic oligonucleotide
cuaucacugcugucuugga

SEQ ID NO: 488252 - RNA, 19 nt, Artificial Sequence
  Description of Artificial Sequence: Synthetic oligonucleotide
ggguuggucugaaaguaca

SEQ ID NO: 488253 - RNA, 19 nt, Artificial Sequence
  Description of Artificial Sequence: Synthetic oligonucleotide
gcgaguuugggccuggggu

SEQ ID NO: 488254 - RNA, 19 nt, Artificial Sequence
  Description of Artificial Sequence: Synthetic oligonucleotide
guguaacacgucggucucc

SEQ ID NO: 488255 - RNA, 19 nt, Artificial Sequence
  Description of Artificial Sequence: Synthetic oligonucleotide
cacuaugaugauagccucu

SEQ ID NO: 488256 - RNA, 19 nt, Artificial Sequence
  Description of Artificial Sequence: Synthetic oligonucleotide
ccucacuuagugauaggga

SEQ ID NO: 488257 - RNA, 19 nt, Artificial Sequence
  Description of Artificial Sequence: Synthetic oligonucleotide
ccgccuacgucgccgaugc

SEQ ID NO: 488258 - RNA, 19 nt, Artificial Sequence
  Description of Artificial Sequence: Synthetic oligonucleotide
cuacagguuucuagggccu

SEQ ID NO: 488259 - RNA, 19 nt, Artificial Sequence
  Description of Artificial Sequence: Synthetic oligonucleotide
gguaaucccuccuccaaau

SEQ ID NO: 488260 - RNA, 19 nt, Artificial Sequence
  Description of Artificial Sequence: Synthetic oligonucleotide
ccuagcugaauaggagggc

SEQ ID NO: 488261 - RNA, 19 nt, Artificial Sequence
  Description of Artificial Sequence: Synthetic oligonucleotide
caaugcggggccgcacagc

SEQ ID NO: 488262 - RNA, 19 nt, Artificial Sequence
  Description of Artificial Sequence: Synthetic oligonucleotide
uugucaccgucagcuuucu

SEQ ID NO: 488263 - RNA, 19 nt, Artificial Sequence
  Description of Artificial Sequence: Synthetic oligonucleotide
ggggcggugcuucugggga

SEQ ID NO: 488264 - RNA, 19 nt, Artificial Sequence
  Description of Artificial Sequence: Synthetic oligonucleotide
gcuggcccaagcguuuggg

SEQ ID NO: 488265 - RNA, 19 nt, Artificial Sequence
  Description of Artificial Sequence: Synthetic oligonucleotide
gcccaagcguuugggaccg

SEQ ID NO: 488266 - RNA, 19 nt, Artificial Sequence
  Description of Artificial Sequence: Synthetic oligonucleotide
ucuucgcaucuggaugaau

SEQ ID NO: 488267 - RNA, 19 nt, Artificial Sequence
  Description of Artificial Sequence: Synthetic oligonucleotide
ggccccugcgaguuugggc

SEQ ID NO: 488268 - RNA, 19 nt, Artificial Sequence
  Description of Artificial Sequence: Synthetic oligonucleotide
cgcuuagcacgauagcuuc

SEQ ID NO: 488269 - RNA, 19 nt, Artificial Sequence
  Description of Artificial Sequence: Synthetic oligonucleotide
ggcucaucgaggggucacg

SEQ ID NO: 488270 - RNA, 19 nt, Artificial Sequence
  Description of Artificial Sequence: Synthetic oligonucleotide
ggcgggcuaguggucaggg

SEQ ID NO: 488271 - RNA, 19 nt, Artificial Sequence
  Description of Artificial Sequence: Synthetic oligonucleotide
ugucaccgucagcuuucuc

SEQ ID NO: 488272 - RNA, 19 nt, Artificial Sequence
  Description of Artificial Sequence: Synthetic oligonucleotide
ggguaaucccuccuccaaa

SEQ ID NO: 488273 - RNA, 19 nt, Artificial Sequence
  Description of Artificial Sequence: Synthetic oligonucleotide
cauaguuaugcugguuggu

SEQ ID NO: 488274 - RNA, 19 nt, Artificial Sequence
  Description of Artificial Sequence: Synthetic oligonucleotide
cgauagcuuccucaauggc

SEQ ID NO: 488275 - RNA, 19 nt, Artificial Sequence
  Description of Artificial Sequence: Synthetic oligonucleotide
ucgccgaugccgccuccuc

SEQ ID NO: 488276 - RNA, 19 nt, Artificial Sequence
  Description of Artificial Sequence: Synthetic oligonucleotide
gccugagcgguugcgcugg

SEQ ID NO: 488277 - RNA, 19 nt, Artificial Sequence
  Description of Artificial Sequence: Synthetic oligonucleotide
cugaggcgggcuagugguc

SEQ ID NO: 488278 - RNA, 19 nt, Artificial Sequence
  Description of Artificial Sequence: Synthetic oligonucleotide
gccgaugccgccuccucac

SEQ ID NO: 488279 - RNA, 19 nt, Artificial Sequence
  Description of Artificial Sequence: Synthetic oligonucleotide
cguaguugugacgaagguc

SEQ ID NO: 488280 - RNA, 19 nt, Artificial Sequence
  Description of Artificial Sequence: Synthetic oligonucleotide
gcuuagcacgauagcuucc

SEQ ID NO: 488281 - RNA, 19 nt, Artificial Sequence
  Description of Artificial Sequence: Synthetic oligonucleotide
gacuaacaucuggggcccc

SEQ ID NO: 488282 - RNA, 19 nt, Artificial Sequence
  Description of Artificial Sequence: Synthetic oligonucleotide
ccucgcuuagcacgauagc

SEQ ID NO: 488283 - RNA, 19 nt, Artificial Sequence
  Description of Artificial Sequence: Synthetic oligonucleotide
caucgcguugguugaugaa

SEQ ID NO: 488284 - RNA, 19 nt, Artificial Sequence
  Description of Artificial Sequence: Synthetic oligonucleotide
uugagucgucagagaugau

SEQ ID NO: 488285 - RNA, 19 nt, Artificial Sequence
  Description of Artificial Sequence: Synthetic oligonucleotide
ggagggcaaaugggguagg

SEQ ID NO: 488286 - RNA, 19 nt, Artificial Sequence
  Description of Artificial Sequence: Synthetic oligonucleotide
caguuaccucauuaucacu

SEQ ID NO: 488287 - RNA, 19 nt, Artificial Sequence
  Description of Artificial Sequence: Synthetic oligonucleotide
augcggggccgcacagccc

SEQ ID NO: 488288 - RNA, 19 nt, Artificial Sequence
  Description of Artificial Sequence: Synthetic oligonucleotide
gggccuaugcucacuagaa

SEQ ID NO: 488289 - RNA, 19 nt, Artificial Sequence
  Description of Artificial Sequence: Synthetic oligonucleotide
cuucacgaucaccauguuu

SEQ ID NO: 488290 - RNA, 19 nt, Artificial Sequence
  Description of Artificial Sequence: Synthetic oligonucleotide
ccguguaacacgucggucu

SEQ ID NO: 488291 - RNA, 19 nt, Artificial Sequence
  Description of Artificial Sequence: Synthetic oligonucleotide
aggcgggcuaguggucagg

SEQ ID NO: 488292 - RNA, 19 nt, Artificial Sequence
  Description of Artificial Sequence: Synthetic oligonucleotide
ggcuggcccaagcguuugg

SEQ ID NO: 488293 - RNA, 19 nt, Artificial Sequence
  Description of Artificial Sequence: Synthetic oligonucleotide
ccacugcguaguugugacg

SEQ ID NO: 488294 - RNA, 19 nt, Artificial Sequence
  Description of Artificial Sequence: Synthetic oligonucleotide
uugggaccggcagcacuuc

SEQ ID NO: 488295 - RNA, 19 nt, Artificial Sequence
  Description of Artificial Sequence: Synthetic oligonucleotide
ccccuaagcuacagguuuc

SEQ ID NO: 488296 - RNA, 19 nt, Artificial Sequence
  Description of Artificial Sequence: Synthetic oligonucleotide
cgacuaacaucuggggccc

SEQ ID NO: 488297 - RNA, 19 nt, Artificial Sequence
  Description of Artificial Sequence: Synthetic oligonucleotide
cguguaacacgucggucuc

SEQ ID NO: 488298 - RNA, 19 nt, Artificial Sequence
  Description of Artificial Sequence: Synthetic oligonucleotide
cauuaaggucaggguucuc

SEQ ID NO: 488299 - RNA, 19 nt, Artificial Sequence
  Description of Artificial Sequence: Synthetic oligonucleotide
auggccccugcgaguuugg

SEQ ID NO: 488300 - RNA, 19 nt, Artificial Sequence
  Description of Artificial Sequence: Synthetic oligonucleotide
gcguuugggaccggcagca

SEQ ID NO: 488301 - RNA, 19 nt, Artificial Sequence
  Description of Artificial Sequence: Synthetic oligonucleotide
ggauauuauuacccugcuu

SEQ ID NO: 488302 - RNA, 19 nt, Artificial Sequence
  Description of Artificial Sequence: Synthetic oligonucleotide
ccaagcguuugggaccggc

SEQ ID NO: 488303 - RNA, 19 nt, Artificial Sequence
  Description of Artificial Sequence: Synthetic oligonucleotide
caacguauugggguagaau

SEQ ID NO: 488304 - RNA, 19 nt, Artificial Sequence
  Description of Artificial Sequence: Synthetic oligonucleotide
ccccaacgaagugcaaugc

SEQ ID NO: 488305 - RNA, 19 nt, Artificial Sequence
  Description of Artificial Sequence: Synthetic oligonucleotide
cugcgaguuugggccuggg

SEQ ID NO: 488306 - RNA, 19 nt, Artificial Sequence
  Description of Artificial Sequence: Synthetic oligonucleotide
acuuagugauagggauguu

SEQ ID NO: 488307 - RNA, 19 nt, Artificial Sequence
  Description of Artificial Sequence: Synthetic oligonucleotide
gagauaugucugagauccu

SEQ ID NO: 488308 - RNA, 19 nt, Artificial Sequence
  Description of Artificial Sequence: Synthetic oligonucleotide
guuccuggccccggugcca

SEQ ID NO: 488309 - RNA, 19 nt, Artificial Sequence
  Description of Artificial Sequence: Synthetic oligonucleotide
ggcggugcuucuggggagc

SEQ ID NO: 488310 - RNA, 19 nt, Artificial Sequence
  Description of Artificial Sequence: Synthetic oligonucleotide
guccucgcuuagcacgaua

SEQ ID NO: 488311 - RNA, 19 nt, Artificial Sequence
  Description of Artificial Sequence: Synthetic oligonucleotide
ggaauaccacaaaggcgaa

SEQ ID NO: 488312 - RNA, 19 nt, Artificial Sequence
  Description of Artificial Sequence: Synthetic oligonucleotide
gucauggccccugcgaguu

SEQ ID NO: 488313 - RNA, 19 nt, Artificial Sequence
  Description of Artificial Sequence: Synthetic oligonucleotide
ccugaagauuggucaagua

SEQ ID NO: 488314 - RNA, 19 nt, Artificial Sequence
  Description of Artificial Sequence: Synthetic oligonucleotide
cacgaucaccauguuugua

SEQ ID NO: 488315 - RNA, 19 nt, Artificial Sequence
  Description of Artificial Sequence: Synthetic oligonucleotide
gcauugcgcucucuguugu

SEQ ID NO: 488316 - RNA, 19 nt, Artificial Sequence
  Description of Artificial Sequence: Synthetic oligonucleotide
gcguaguugugacgaaggu

SEQ ID NO: 488317 - RNA, 19 nt, Artificial Sequence
  Description of Artificial Sequence: Synthetic oligonucleotide
gccugccuugauguucacc

SEQ ID NO: 488318 - RNA, 19 nt, Artificial Sequence
  Description of Artificial Sequence: Synthetic oligonucleotide
cccucauuaaggucagggu

SEQ ID NO: 488319 - RNA, 19 nt, Artificial Sequence
  Description of Artificial Sequence: Synthetic oligonucleotide
gcgggcuaguggucagggc

SEQ ID NO: 488320 - RNA, 19 nt, Artificial Sequence
  Description of Artificial Sequence: Synthetic oligonucleotide
ggcccugaccaaggcauca

SEQ ID NO: 488321 - RNA, 19 nt, Artificial Sequence
  Description of Artificial Sequence: Synthetic oligonucleotide
gucuucgcaucuggaugaa

SEQ ID NO: 488322 - RNA, 19 nt, Artificial Sequence
  Description of Artificial Sequence: Synthetic oligonucleotide
ccugcaguaugcuuuccau

SEQ ID NO: 488323 - RNA, 19 nt, Artificial Sequence
  Description of Artificial Sequence: Synthetic oligonucleotide
gcugaauaggagggcaaau

SEQ ID NO: 488324 - RNA, 19 nt, Artificial Sequence
  Description of Artificial Sequence: Synthetic oligonucleotide
gacgaaggucacagcggau

SEQ ID NO: 488325 - RNA, 19 nt, Artificial Sequence
  Description of Artificial Sequence: Synthetic oligonucleotide
gccggccugagcgguugcg

SEQ ID NO: 488326 - RNA, 19 nt, Artificial Sequence
  Description of Artificial Sequence: Synthetic oligonucleotide
ggggccgcacagcccuagc

SEQ ID NO: 488327 - RNA, 19 nt, Artificial Sequence
  Description of Artificial Sequence: Synthetic oligonucleotide
cagcacggagagaggggcu

SEQ ID NO: 488328 - RNA, 19 nt, Artificial Sequence
  Description of Artificial Sequence: Synthetic oligonucleotide
ccccggugccaacguauug

SEQ ID NO: 488329 - RNA, 19 nt, Artificial Sequence
  Description of Artificial Sequence: Synthetic oligonucleotide
ggcccucauuaaggucagg

SEQ ID NO: 488330 - RNA, 19 nt, Artificial Sequence
  Description of Artificial Sequence: Synthetic oligonucleotide
cauugcgcucucuguuguu

SEQ ID NO: 488331 - RNA, 19 nt, Artificial Sequence
  Description of Artificial Sequence: Synthetic oligonucleotide
cacuugcuuccaccucaua

SEQ ID NO: 488332 - RNA, 19 nt, Artificial Sequence
  Description of Artificial Sequence: Synthetic oligonucleotide
gcguacuggguuaacccau

SEQ ID NO: 488333 - RNA, 19 nt, Artificial Sequence
  Description of Artificial Sequence: Synthetic oligonucleotide
caggcuggcccaagcguuu

SEQ ID NO: 488334 - RNA, 19 nt, Artificial Sequence
  Description of Artificial Sequence: Synthetic oligonucleotide
cguacuggguuaacccaua

SEQ ID NO: 488335 - RNA, 19 nt, Artificial Sequence
  Description of Artificial Sequence: Synthetic oligonucleotide
gcguugguugaugaagauu

SEQ ID NO: 488336 - RNA, 19 nt, Artificial Sequence
  Description of Artificial Sequence: Synthetic oligonucleotide
caccgccuccagguccauc

SEQ ID NO: 488337 - RNA, 19 nt, Artificial Sequence
  Description of Artificial Sequence: Synthetic oligonucleotide
gucgccgaugccgccuccu

SEQ ID NO: 488338 - RNA, 19 nt, Artificial Sequence
  Description of Artificial Sequence: Synthetic oligonucleotide
cuucaucgcguugguugau

SEQ ID NO: 488339 - RNA, 19 nt, Artificial Sequence
  Description of Artificial Sequence: Synthetic oligonucleotide
ccaacguauugggguagaa

SEQ ID NO: 488340 - RNA, 19 nt, Artificial Sequence
  Description of Artificial Sequence: Synthetic oligonucleotide
ccuaagcuacagguuucua

SEQ ID NO: 488341 - RNA, 19 nt, Artificial Sequence
  Description of Artificial Sequence: Synthetic oligonucleotide
cccuaagcuacagguuucu

SEQ ID NO: 488342 - RNA, 19 nt, Artificial Sequence
  Description of Artificial Sequence: Synthetic oligonucleotide
ggccccggugccaacguau

SEQ ID NO: 488343 - RNA, 19 nt, Artificial Sequence
  Description of Artificial Sequence: Synthetic oligonucleotide
gcggaucuccucacuuagu

SEQ ID NO: 488344 - RNA, 19 nt, Artificial Sequence
  Description of Artificial Sequence: Synthetic oligonucleotide
gcggugcuucuggggagca

SEQ ID NO: 488345 - RNA, 19 nt, Artificial Sequence
  Description of Artificial Sequence: Synthetic oligonucleotide
ccgaugccgccuccucaca

SEQ ID NO: 488346 - RNA, 19 nt, Artificial Sequence
  Description of Artificial Sequence: Synthetic oligonucleotide
cccaagcguuugggaccgg

SEQ ID NO: 488347 - RNA, 19 nt, Artificial Sequence
  Description of Artificial Sequence: Synthetic oligonucleotide
cgcguugguugaugaagau

SEQ ID NO: 488348 - RNA, 19 nt, Artificial Sequence
  Description of Artificial Sequence: Synthetic oligonucleotide
cggggaaaggggcggugcu

SEQ ID NO: 488349 - RNA, 19 nt, Artificial Sequence
  Description of Artificial Sequence: Synthetic oligonucleotide
cuccgccuacgucgccgau

SEQ ID NO: 488350 - RNA, 19 nt, Artificial Sequence
  Description of Artificial Sequence: Synthetic oligonucleotide
ccccugcgaguuugggccu

SEQ ID NO: 488351 - RNA, 19 nt, Artificial Sequence
  Description of Artificial Sequence: Synthetic oligonucleotide
gccccggugccaacguauu

SEQ ID NO: 488352 - RNA, 19 nt, Artificial Sequence
  Description of Artificial Sequence: Synthetic oligonucleotide
gcggggccgcacagcccua

SEQ ID NO: 488353 - RNA, 19 nt, Artificial Sequence
  Description of Artificial Sequence: Synthetic oligonucleotide
uauaaauugagcuacaaac

SEQ ID NO: 488354 - RNA, 19 nt, Artificial Sequence
  Description of Artificial Sequence: Synthetic oligonucleotide
ugugaugcaaagaagaggg

SEQ ID NO: 488355 - RNA, 19 nt, Artificial Sequence
  Description of Artificial Sequence: Synthetic oligonucleotide
aaaucauuccccuuauugc

SEQ ID NO: 488356 - RNA, 19 nt, Artificial Sequence
  Description of Artificial Sequence: Synthetic oligonucleotide
aaaaugacauuacaucccc

SEQ ID NO: 488357 - RNA, 19 nt, Artificial Sequence
  Description of Artificial Sequence: Synthetic oligonucleotide
auauuaaguaaauagugac

SEQ ID NO: 488358 - RNA, 19 nt, Artificial Sequence
  Description of Artificial Sequence: Synthetic oligonucleotide
uguucaauagguauguagg

SEQ ID NO: 488359 - RNA, 19 nt, Artificial Sequence
  Description of Artificial Sequence: Synthetic oligonucleotide
ucuuuaaccagaaagcucc

SEQ ID NO: 488360 - RNA, 19 nt, Artificial Sequence
  Description of Artificial Sequence: Synthetic oligonucleotide
uagguauugaaacacauag

SEQ ID NO: 488361 - RNA, 19 nt, Artificial Sequence
  Description of Artificial Sequence: Synthetic oligonucleotide
aaacauaccacauaugaga

SEQ ID NO: 488362 - RNA, 19 nt, Artificial Sequence
  Description of Artificial Sequence: Synthetic oligonucleotide
acuuagacaaaaucguucc

SEQ ID NO: 488363 - RNA, 19 nt, Artificial Sequence
  Description of Artificial Sequence: Synthetic oligonucleotide
uaugacuuauuaaauggcg

SEQ ID NO: 488364 - RNA, 19 nt, Artificial Sequence
  Description of Artificial Sequence: Synthetic oligonucleotide
uuuuacuuaguccuucugg

SEQ ID NO: 488365 - RNA, 19 nt, Artificial Sequence
  Description of Artificial Sequence: Synthetic oligonucleotide
uuuacaaucugcauauccc

SEQ ID NO: 488366 - RNA, 19 nt, Artificial Sequence
  Description of Artificial Sequence: Synthetic oligonucleotide
uuuggaauuuaccaaacca

SEQ ID NO: 488367 - RNA, 19 nt, Artificial Sequence
  Description of Artificial Sequence: Synthetic oligonucleotide
uccuacauuaaacauacca

SEQ ID NO: 488368 - RNA, 19 nt, Artificial Sequence
  Description of Artificial Sequence: Synthetic oligonucleotide
aguagaauugaaaagcucg

SEQ ID NO: 488369 - RNA, 19 nt, Artificial Sequence
  Description of Artificial Sequence: Synthetic oligonucleotide
uuggaauuuaccaaaccag

SEQ ID NO: 488370 - RNA, 19 nt, Artificial Sequence
  Description of Artificial Sequence: Synthetic oligonucleotide
uacauugcuagauaccugg

SEQ ID NO: 488371 - RNA, 19 nt, Artificial Sequence
  Description of Artificial Sequence: Synthetic oligonucleotide
cauuacauccccuacauug

SEQ ID NO: 488372 - RNA, 19 nt, Artificial Sequence
  Description of Artificial Sequence: Synthetic oligonucleotide
uauuaaauggcgucgacac

SEQ ID NO: 488373 - RNA, 19 nt, Artificial Sequence
  Description of Artificial Sequence: Synthetic oligonucleotide
augaucauggcuucaaccg

SEQ ID NO: 488374 - RNA, 19 nt, Artificial Sequence
  Description of Artificial Sequence: Synthetic oligonucleotide
uguacauacccucaauucc

SEQ ID NO: 488375 - RNA, 19 nt, Artificial Sequence
  Description of Artificial Sequence: Synthetic oligonucleotide
agaauugaaaagcucgggg

SEQ ID NO: 488376 - RNA, 19 nt, Artificial Sequence
  Description of Artificial Sequence: Synthetic oligonucleotide
uauaacuuggcccuaucug

SEQ ID NO: 488377 - RNA, 19 nt, Artificial Sequence
  Description of Artificial Sequence: Synthetic oligonucleotide
uaaacauaccacauaugag

SEQ ID NO: 488378 - RNA, 19 nt, Artificial Sequence
  Description of Artificial Sequence: Synthetic oligonucleotide
aaucauuccccuuauugca

SEQ ID NO: 488379 - RNA, 19 nt, Artificial Sequence
  Description of Artificial Sequence: Synthetic oligonucleotide
aauuccgucuuccacuguc

SEQ ID NO: 488380 - RNA, 19 nt, Artificial Sequence
  Description of Artificial Sequence: Synthetic oligonucleotide
gaauugaaaagcucggggc

SEQ ID NO: 488381 - RNA, 19 nt, Artificial Sequence
  Description of Artificial Sequence: Synthetic oligonucleotide
aauugaaaagcucggggcu

SEQ ID NO: 488382 - RNA, 19 nt, Artificial Sequence
  Description of Artificial Sequence: Synthetic oligonucleotide
aaaugaaaguguuuuacuu

SEQ ID NO: 488383 - RNA, 19 nt, Artificial Sequence
  Description of Artificial Sequence: Synthetic oligonucleotide
cauagguagaaauauuaag

SEQ ID NO: 488384 - RNA, 19 nt, Artificial Sequence
  Description of Artificial Sequence: Synthetic oligonucleotide
uaacuaaaggguuauuagc

SEQ ID NO: 488385 - RNA, 19 nt, Artificial Sequence
  Description of Artificial Sequence: Synthetic oligonucleotide
guaacuaaaggguuauuag

SEQ ID NO: 488386 - RNA, 19 nt, Artificial Sequence
  Description of Artificial Sequence: Synthetic oligonucleotide
uuaggaaauguuuaccuac

SEQ ID NO: 488387 - RNA, 19 nt, Artificial Sequence
  Description of Artificial Sequence: Synthetic oligonucleotide
gacucuaugaagcuauugc

SEQ ID NO: 488388 - RNA, 19 nt, Artificial Sequence
  Description of Artificial Sequence: Synthetic oligonucleotide
uggacuguucuauaaauug

SEQ ID NO: 488389 - RNA, 19 nt, Artificial Sequence
  Description of Artificial Sequence: Synthetic oligonucleotide
cuacaaacuacccauggcc

SEQ ID NO: 488390 - RNA, 19 nt, Artificial Sequence
  Description of Artificial Sequence: Synthetic oligonucleotide
uaugaauacauacaaucua

SEQ ID NO: 488391 - RNA, 19 nt, Artificial Sequence
  Description of Artificial Sequence: Synthetic oligonucleotide
uuguaucaaauguaaagca

SEQ ID NO: 488392 - RNA, 19 nt, Artificial Sequence
  Description of Artificial Sequence: Synthetic oligonucleotide
uuccacuuagcacauacug

SEQ ID NO: 488393 - RNA, 19 nt, Artificial Sequence
  Description of Artificial Sequence: Synthetic oligonucleotide
uuccucaagauuuacagaa

SEQ ID NO: 488394 - RNA, 19 nt, Artificial Sequence
  Description of Artificial Sequence: Synthetic oligonucleotide
uuaaguaaauagugacccg

SEQ ID NO: 488395 - RNA, 19 nt, Artificial Sequence
  Description of Artificial Sequence: Synthetic oligonucleotide
aucagaagagcucagcucu

SEQ ID NO: 488396 - RNA, 19 nt, Artificial Sequence
  Description of Artificial Sequence: Synthetic oligonucleotide
gagguggagacauugauca

SEQ ID NO: 488397 - RNA, 19 nt, Artificial Sequence
  Description of Artificial Sequence: Synthetic oligonucleotide
aaguaaauagugacccgcc

SEQ ID NO: 488398 - RNA, 19 nt, Artificial Sequence
  Description of Artificial Sequence: Synthetic oligonucleotide
uguaucaaauguaaagcau

SEQ ID NO: 488399 - RNA, 19 nt, Artificial Sequence
  Description of Artificial Sequence: Synthetic oligonucleotide
ugaucaugccucuauaacu

SEQ ID NO: 488400 - RNA, 19 nt, Artificial Sequence
  Description of Artificial Sequence: Synthetic oligonucleotide
aaccuuaucaucagagagg

SEQ ID NO: 488401 - RNA, 19 nt, Artificial Sequence
  Description of Artificial Sequence: Synthetic oligonucleotide
agaguaacuccuuugaaau

SEQ ID NO: 488402 - RNA, 19 nt, Artificial Sequence
  Description of Artificial Sequence: Synthetic oligonucleotide
ucaauagguauguagguau

SEQ ID NO: 488403 - RNA, 19 nt, Artificial Sequence
  Description of Artificial Sequence: Synthetic oligonucleotide
uguucuauaaauugagcua

SEQ ID NO: 488404 - RNA, 19 nt, Artificial Sequence
  Description of Artificial Sequence: Synthetic oligonucleotide
ugaucauggcuucaaccgg

SEQ ID NO: 488405 - RNA, 19 nt, Artificial Sequence
  Description of Artificial Sequence: Synthetic oligonucleotide
uggaauuuaccaaaccagu

SEQ ID NO: 488406 - RNA, 19 nt, Artificial Sequence
  Description of Artificial Sequence: Synthetic oligonucleotide
uguuuauuguugcugccug

SEQ ID NO: 488407 - RNA, 19 nt, Artificial Sequence
  Description of Artificial Sequence: Synthetic oligonucleotide
auuaaauggcgucgacacc

SEQ ID NO: 488408 - RNA, 19 nt, Artificial Sequence
  Description of Artificial Sequence: Synthetic oligonucleotide
agggaaugcuccuaucccc

SEQ ID NO: 488409 - RNA, 19 nt, Artificial Sequence
  Description of Artificial Sequence: Synthetic oligonucleotide
aaugacauuacauccccua

SEQ ID NO: 488410 - RNA, 19 nt, Artificial Sequence
  Description of Artificial Sequence: Synthetic oligonucleotide
aacauuuugagggcgcguc

SEQ ID NO: 488411 - RNA, 19 nt, Artificial Sequence
  Description of Artificial Sequence: Synthetic oligonucleotide
uagagaauauguaauucuc

SEQ ID NO: 488412 - RNA, 19 nt, Artificial Sequence
  Description of Artificial Sequence: Synthetic oligonucleotide
gacuuauuaaauggcgucg

SEQ ID NO: 488413 - RNA, 19 nt, Artificial Sequence
  Description of Artificial Sequence: Synthetic oligonucleotide
ugugccuuaacagugagau

SEQ ID NO: 488414 - RNA, 19 nt, Artificial Sequence
  Description of Artificial Sequence: Synthetic oligonucleotide
uacauacugucuuagcucu

SEQ ID NO: 488415 - RNA, 19 nt, Artificial Sequence
  Description of Artificial Sequence: Synthetic oligonucleotide
aacaggaauugucuggcca

SEQ ID NO: 488416 - RNA, 19 nt, Artificial Sequence
  Description of Artificial Sequence: Synthetic oligonucleotide
acuaaaggguuauuagcag

SEQ ID NO: 488417 - RNA, 19 nt, Artificial Sequence
  Description of Artificial Sequence: Synthetic oligonucleotide
uaaacaaucaccggaggac

SEQ ID NO: 488418 - RNA, 19 nt, Artificial Sequence
  Description of Artificial Sequence: Synthetic oligonucleotide
ucaugccucuauaacuugg

SEQ ID NO: 488419 - RNA, 19 nt, Artificial Sequence
  Description of Artificial Sequence: Synthetic oligonucleotide
caugaucauggcuucaacc

SEQ ID NO: 488420 - RNA, 19 nt, Artificial Sequence
  Description of Artificial Sequence: Synthetic oligonucleotide
gguauguagguauugaaac

SEQ ID NO: 488421 - RNA, 19 nt, Artificial Sequence
  Description of Artificial Sequence: Synthetic oligonucleotide
ugcuagcuaaacaaucacc

SEQ ID NO: 488422 - RNA, 19 nt, Artificial Sequence
  Description of Artificial Sequence: Synthetic oligonucleotide
cugaacaggaauugucugg

SEQ ID NO: 488423 - RNA, 19 nt, Artificial Sequence
  Description of Artificial Sequence: Synthetic oligonucleotide
uugaucaugccucuauaac

SEQ ID NO: 488424 - RNA, 19 nt, Artificial Sequence
  Description of Artificial Sequence: Synthetic oligonucleotide
augacauuacauccccuac

SEQ ID NO: 488425 - RNA, 19 nt, Artificial Sequence
  Description of Artificial Sequence: Synthetic oligonucleotide
auuucaacuuuggugagag

SEQ ID NO: 488426 - RNA, 19 nt, Artificial Sequence
  Description of Artificial Sequence: Synthetic oligonucleotide
gagcaguagaauugaaaag

SEQ ID NO: 488427 - RNA, 19 nt, Artificial Sequence
  Description of Artificial Sequence: Synthetic oligonucleotide
agcuacaaacuacccaugg

SEQ ID NO: 488428 - RNA, 19 nt, Artificial Sequence
  Description of Artificial Sequence: Synthetic oligonucleotide
aauaguuguaucaaaugua

SEQ ID NO: 488429 - RNA, 19 nt, Artificial Sequence
  Description of Artificial Sequence: Synthetic oligonucleotide
aauugucuggccauggcug

SEQ ID NO: 488430 - RNA, 19 nt, Artificial Sequence
  Description of Artificial Sequence: Synthetic oligonucleotide
aauugaucuuuaauaguug

SEQ ID NO: 488431 - RNA, 19 nt, Artificial Sequence
  Description of Artificial Sequence: Synthetic oligonucleotide
auaaauugagcuacaaacu

SEQ ID NO: 488432 - RNA, 19 nt, Artificial Sequence
  Description of Artificial Sequence: Synthetic oligonucleotide
ucuugcuagcuaaacaauc

SEQ ID NO: 488433 - RNA, 19 nt, Artificial Sequence
  Description of Artificial Sequence: Synthetic oligonucleotide
ugaugcaaagaagagggca

SEQ ID NO: 488434 - RNA, 19 nt, Artificial Sequence
  Description of Artificial Sequence: Synthetic oligonucleotide
ugacauuacauccccuaca

SEQ ID NO: 488435 - RNA, 19 nt, Artificial Sequence
  Description of Artificial Sequence: Synthetic oligonucleotide
uagaauugaaaagcucggg

SEQ ID NO: 488436 - RNA, 19 nt, Artificial Sequence
  Description of Artificial Sequence: Synthetic oligonucleotide
uagauaccuggcuaccugg

SEQ ID NO: 488437 - RNA, 19 nt, Artificial Sequence
  Description of Artificial Sequence: Synthetic oligonucleotide
guagaauugaaaagcucgg

SEQ ID NO: 488438 - RNA, 19 nt, Artificial Sequence
  Description of Artificial Sequence: Synthetic oligonucleotide
aaguaaccaagacucuaug

SEQ ID NO: 488439 - RNA, 19 nt, Artificial Sequence
  Description of Artificial Sequence: Synthetic oligonucleotide
uuauuaaauggcgucgaca

SEQ ID NO: 488440 - RNA, 19 nt, Artificial Sequence
  Description of Artificial Sequence: Synthetic oligonucleotide
cuuuuaccauucuugcuag

SEQ ID NO: 488441 - RNA, 19 nt, Artificial Sequence
  Description of Artificial Sequence: Synthetic oligonucleotide
uccuaacgcucucugaacc

SEQ ID NO: 488442 - RNA, 19 nt, Artificial Sequence
  Description of Artificial Sequence: Synthetic oligonucleotide
uauuggugagugucaaugc

SEQ ID NO: 488443 - RNA, 19 nt, Artificial Sequence
  Description of Artificial Sequence: Synthetic oligonucleotide
aaacuacccauggccaagc

SEQ ID NO: 488444 - RNA, 19 nt, Artificial Sequence
  Description of Artificial Sequence: Synthetic oligonucleotide
uuacuggaaaguuauuuua

SEQ ID NO: 488445 - RNA, 19 nt, Artificial Sequence
  Description of Artificial Sequence: Synthetic oligonucleotide
guauuggugagugucaaug

SEQ ID NO: 488446 - RNA, 19 nt, Artificial Sequence
  Description of Artificial Sequence: Synthetic oligonucleotide
guaaccaagacucuaugaa

SEQ ID NO: 488447 - RNA, 19 nt, Artificial Sequence
  Description of Artificial Sequence: Synthetic oligonucleotide
agguccuuagcuucgaaga

SEQ ID NO: 488448 - RNA, 19 nt, Artificial Sequence
  Description of Artificial Sequence: Synthetic oligonucleotide
agaauggguccuccuaacg

SEQ ID NO: 488449 - RNA, 19 nt, Artificial Sequence
  Description of Artificial Sequence: Synthetic oligonucleotide
ggauucauagcuuggcuag

SEQ ID NO: 488450 - RNA, 19 nt, Artificial Sequence
  Description of Artificial Sequence: Synthetic oligonucleotide
cuugugguaaauaagucua

SEQ ID NO: 488451 - RNA, 19 nt, Artificial Sequence
  Description of Artificial Sequence: Synthetic oligonucleotide
uuagaguaacuccuuugaa

SEQ ID NO: 488452 - RNA, 19 nt, Artificial Sequence
  Description of Artificial Sequence: Synthetic oligonucleotide
aauucucuggcuagggucu

SEQ ID NO: 488453 - RNA, 19 nt, Artificial Sequence
  Description of Artificial Sequence: Synthetic oligonucleotide
uaaauagugacccgccauu

SEQ ID NO: 488454 - RNA, 19 nt, Artificial Sequence
  Description of Artificial Sequence: Synthetic oligonucleotide
augccucuauaacuuggcc

SEQ ID NO: 488455 - RNA, 19 nt, Artificial Sequence
  Description of Artificial Sequence: Synthetic oligonucleotide
uaaauucucuggcuagggu

SEQ ID NO: 488456 - RNA, 19 nt, Artificial Sequence
  Description of Artificial Sequence: Synthetic oligonucleotide
aaauagugacccgccauug

SEQ ID NO: 488457 - RNA, 19 nt, Artificial Sequence
  Description of Artificial Sequence: Synthetic oligonucleotide
aaggguuauuagcagggau

SEQ ID NO: 488458 - RNA, 19 nt, Artificial Sequence
  Description of Artificial Sequence: Synthetic oligonucleotide
uacuuaguccuucugggua

SEQ ID NO: 488459 - RNA, 19 nt, Artificial Sequence
  Description of Artificial Sequence: Synthetic oligonucleotide
ugccugaauaaauucucug

SEQ ID NO: 488460 - RNA, 19 nt, Artificial Sequence
  Description of Artificial Sequence: Synthetic oligonucleotide
agcugcuuacucugaaagg

SEQ ID NO: 488461 - RNA, 19 nt, Artificial Sequence
  Description of Artificial Sequence: Synthetic oligonucleotide
uaacuuggcccuaucugug

SEQ ID NO: 488462 - RNA, 19 nt, Artificial Sequence
  Description of Artificial Sequence: Synthetic oligonucleotide
auugagcuacaaacuaccc

SEQ ID NO: 488463 - RNA, 19 nt, Artificial Sequence
  Description of Artificial Sequence: Synthetic oligonucleotide
aaaguaaccaagacucuau

SEQ ID NO: 488464 - RNA, 19 nt, Artificial Sequence
  Description of Artificial Sequence: Synthetic oligonucleotide
uaaccagaaagcuccacau

SEQ ID NO: 488465 - RNA, 19 nt, Artificial Sequence
  Description of Artificial Sequence: Synthetic oligonucleotide
uuccauuacauugguacca

SEQ ID NO: 488466 - RNA, 19 nt, Artificial Sequence
  Description of Artificial Sequence: Synthetic oligonucleotide
auugaucaugccucuauaa

SEQ ID NO: 488467 - RNA, 19 nt, Artificial Sequence
  Description of Artificial Sequence: Synthetic oligonucleotide
gaagacuggccuugggacc

SEQ ID NO: 488468 - RNA, 19 nt, Artificial Sequence
  Description of Artificial Sequence: Synthetic oligonucleotide
gacaccaacuucucuguac

SEQ ID NO: 488469 - RNA, 19 nt, Artificial Sequence
  Description of Artificial Sequence: Synthetic oligonucleotide
auagugacccgccauugca

SEQ ID NO: 488470 - RNA, 19 nt, Artificial Sequence
  Description of Artificial Sequence: Synthetic oligonucleotide
aguaacuaaaggguuauua

SEQ ID NO: 488471 - RNA, 19 nt, Artificial Sequence
  Description of Artificial Sequence: Synthetic oligonucleotide
aauggcgucgacaccaacu

SEQ ID NO: 488472 - RNA, 19 nt, Artificial Sequence
  Description of Artificial Sequence: Synthetic oligonucleotide
uacauugguaccagggaau

SEQ ID NO: 488473 - RNA, 19 nt, Artificial Sequence
  Description of Artificial Sequence: Synthetic oligonucleotide
auagcuugugguaaauaag

SEQ ID NO: 488474 - RNA, 19 nt, Artificial Sequence
  Description of Artificial Sequence: Synthetic oligonucleotide
aacauaccacauaugagaa

SEQ ID NO: 488475 - RNA, 19 nt, Artificial Sequence
  Description of Artificial Sequence: Synthetic oligonucleotide
aacaaucaccggaggacac

SEQ ID NO: 488476 - RNA, 19 nt, Artificial Sequence
  Description of Artificial Sequence: Synthetic oligonucleotide
cucuuuaaccagaaagcuc

SEQ ID NO: 488477 - RNA, 19 nt, Artificial Sequence
  Description of Artificial Sequence: Synthetic oligonucleotide
uugaucuuuaauaguugua

SEQ ID NO: 488478 - RNA, 19 nt, Artificial Sequence
  Description of Artificial Sequence: Synthetic oligonucleotide
agcuaaacaaucaccggag

SEQ ID NO: 488479 - RNA, 19 nt, Artificial Sequence
  Description of Artificial Sequence: Synthetic oligonucleotide
gaauuugcuccaugggaac

SEQ ID NO: 488480 - RNA, 19 nt, Artificial Sequence
  Description of Artificial Sequence: Synthetic oligonucleotide
acaccaacuucucuguaca

SEQ ID NO: 488481 - RNA, 19 nt, Artificial Sequence
  Description of Artificial Sequence: Synthetic oligonucleotide
aaauggcgucgacaccaac

SEQ ID NO: 488482 - RNA, 19 nt, Artificial Sequence
  Description of Artificial Sequence: Synthetic oligonucleotide
guuuaggcagaauuugcuc

SEQ ID NO: 488483 - RNA, 19 nt, Artificial Sequence
  Description of Artificial Sequence: Synthetic oligonucleotide
agguauugaaacacauagg

SEQ ID NO: 488484 - RNA, 19 nt, Artificial Sequence
  Description of Artificial Sequence: Synthetic oligonucleotide
ugggauucauagcuuggcu

SEQ ID NO: 488485 - RNA, 19 nt, Artificial Sequence
  Description of Artificial Sequence: Synthetic oligonucleotide
uccauuacauugguaccag

SEQ ID NO: 488486 - RNA, 19 nt, Artificial Sequence
  Description of Artificial Sequence: Synthetic oligonucleotide
cuaaacaaucaccggagga

SEQ ID NO: 488487 - RNA, 19 nt, Artificial Sequence
  Description of Artificial Sequence: Synthetic oligonucleotide
aauuugcuccaugggaaca

SEQ ID NO: 488488 - RNA, 19 nt, Artificial Sequence
  Description of Artificial Sequence: Synthetic oligonucleotide
uuacauccccuacauugcu

SEQ ID NO: 488489 - RNA, 19 nt, Artificial Sequence
  Description of Artificial Sequence: Synthetic oligonucleotide
cuagauaccuggcuaccug

SEQ ID NO: 488490 - RNA, 19 nt, Artificial Sequence
  Description of Artificial Sequence: Synthetic oligonucleotide
acauugaucaugccucuau

SEQ ID NO: 488491 - RNA, 19 nt, Artificial Sequence
  Description of Artificial Sequence: Synthetic oligonucleotide
guaacauuuugagggcgcg

SEQ ID NO: 488492 - RNA, 19 nt, Artificial Sequence
  Description of Artificial Sequence: Synthetic oligonucleotide
cuuauuaaauggcgucgac

SEQ ID NO: 488493 - RNA, 19 nt, Artificial Sequence
  Description of Artificial Sequence: Synthetic oligonucleotide
ugaaauaauuugugccuua

SEQ ID NO: 488494 - RNA, 19 nt, Artificial Sequence
  Description of Artificial Sequence: Synthetic oligonucleotide
uugcaaagucucuuuggac

SEQ ID NO: 488495 - RNA, 19 nt, Artificial Sequence
  Description of Artificial Sequence: Synthetic oligonucleotide
uucuugcuagcuaaacaau

SEQ ID NO: 488496 - RNA, 19 nt, Artificial Sequence
  Description of Artificial Sequence: Synthetic oligonucleotide
cucgaugcuguucucauca

SEQ ID NO: 488497 - RNA, 19 nt, Artificial Sequence
  Description of Artificial Sequence: Synthetic oligonucleotide
gaugcgugggacugucugc

SEQ ID NO: 488498 - RNA, 19 nt, Artificial Sequence
  Description of Artificial Sequence: Synthetic oligonucleotide
uuuccacaacugcuggaug

SEQ ID NO: 488499 - RNA, 19 nt, Artificial Sequence
  Description of Artificial Sequence: Synthetic oligonucleotide
ugaguaacuaaaggguuau

SEQ ID NO: 488500 - RNA, 19 nt, Artificial Sequence
  Description of Artificial Sequence: Synthetic oligonucleotide
cagggaaugcuccuauccc

SEQ ID NO: 488501 - RNA, 19 nt, Artificial Sequence
  Description of Artificial Sequence: Synthetic oligonucleotide
cauacuguugugaugcaaa

SEQ ID NO: 488502 - RNA, 19 nt, Artificial Sequence
  Description of Artificial Sequence: Synthetic oligonucleotide
uggugccucagcuuuuacc

SEQ ID NO: 488503 - RNA, 19 nt, Artificial Sequence
  Description of Artificial Sequence: Synthetic oligonucleotide
uuaccauucuugcuagcua

SEQ ID NO: 488504 - RNA, 19 nt, Artificial Sequence
  Description of Artificial Sequence: Synthetic oligonucleotide
auagguauguagguauuga

SEQ ID NO: 488505 - RNA, 19 nt, Artificial Sequence
  Description of Artificial Sequence: Synthetic oligonucleotide
cuguguggggcuuccauac

SEQ ID NO: 488506 - RNA, 19 nt, Artificial Sequence
  Description of Artificial Sequence: Synthetic oligonucleotide
ugcuacauacugucuuagc

SEQ ID NO: 488507 - RNA, 19 nt, Artificial Sequence
  Description of Artificial Sequence: Synthetic oligonucleotide
acuuauuaaauggcgucga

SEQ ID NO: 488508 - RNA, 19 nt, Artificial Sequence
  Description of Artificial Sequence: Synthetic oligonucleotide
ugggacugucugcagggag

SEQ ID NO: 488509 - RNA, 19 nt, Artificial Sequence
  Description of Artificial Sequence: Synthetic oligonucleotide
acagaauggguccuccuaa

SEQ ID NO: 488510 - RNA, 19 nt, Artificial Sequence
  Description of Artificial Sequence: Synthetic oligonucleotide
gagggcgcguccucgaugc

SEQ ID NO: 488511 - RNA, 19 nt, Artificial Sequence
  Description of Artificial Sequence: Synthetic oligonucleotide
uagcuucgaagacuggccu

SEQ ID NO: 488512 - RNA, 19 nt, Artificial Sequence
  Description of Artificial Sequence: Synthetic oligonucleotide
auuuugagggcgcguccuc

SEQ ID NO: 488513 - RNA, 19 nt, Artificial Sequence
  Description of Artificial Sequence: Synthetic oligonucleotide
cauucuugcuagcuaaaca

SEQ ID NO: 488514 - RNA, 19 nt, Artificial Sequence
  Description of Artificial Sequence: Synthetic oligonucleotide
uuucaacuuuggugagagg

SEQ ID NO: 488515 - RNA, 19 nt, Artificial Sequence
  Description of Artificial Sequence: Synthetic oligonucleotide
cuuggcccuaucugugugg

SEQ ID NO: 488516 - RNA, 19 nt, Artificial Sequence
  Description of Artificial Sequence: Synthetic oligonucleotide
cuggguauuggugaguguc

SEQ ID NO: 488517 - RNA, 19 nt, Artificial Sequence
  Description of Artificial Sequence: Synthetic oligonucleotide
caacuuuaggaaauguuua

SEQ ID NO: 488518 - RNA, 19 nt, Artificial Sequence
  Description of Artificial Sequence: Synthetic oligonucleotide
cuacauugcuagauaccug

SEQ ID NO: 488519 - RNA, 19 nt, Artificial Sequence
  Description of Artificial Sequence: Synthetic oligonucleotide
uuggccucuagagaauaug

SEQ ID NO: 488520 - RNA, 19 nt, Artificial Sequence
  Description of Artificial Sequence: Synthetic oligonucleotide
ucuauaacuuggcccuauc

SEQ ID NO: 488521 - RNA, 19 nt, Artificial Sequence
  Description of Artificial Sequence: Synthetic oligonucleotide
ucguuggugccucagcuuu

SEQ ID NO: 488522 - RNA, 19 nt, Artificial Sequence
  Description of Artificial Sequence: Synthetic oligonucleotide
caguaacauuuugagggcg

SEQ ID NO: 488523 - RNA, 19 nt, Artificial Sequence
  Description of Artificial Sequence: Synthetic oligonucleotide
gccauuuguuuauuguugc

SEQ ID NO: 488524 - RNA, 19 nt, Artificial Sequence
  Description of Artificial Sequence: Synthetic oligonucleotide
uuggcccuaucuguguggg

SEQ ID NO: 488525 - RNA, 19 nt, Artificial Sequence
  Description of Artificial Sequence: Synthetic oligonucleotide
agauccuacauuaaacaua

SEQ ID NO: 488526 - RNA, 19 nt, Artificial Sequence
  Description of Artificial Sequence: Synthetic oligonucleotide
agaggcugaugcgugggac

SEQ ID NO: 488527 - RNA, 19 nt, Artificial Sequence
  Description of Artificial Sequence: Synthetic oligonucleotide
caccggaggacacaguuuc

SEQ ID NO: 488528 - RNA, 19 nt, Artificial Sequence
  Description of Artificial Sequence: Synthetic oligonucleotide
aucaccggaggacacaguu

SEQ ID NO: 488529 - RNA, 19 nt, Artificial Sequence
  Description of Artificial Sequence: Synthetic oligonucleotide
cuaacgcucucugaacccc

SEQ ID NO: 488530 - RNA, 19 nt, Artificial Sequence
  Description of Artificial Sequence: Synthetic oligonucleotide
acauugcuagauaccuggc

SEQ ID NO: 488531 - RNA, 19 nt, Artificial Sequence
  Description of Artificial Sequence: Synthetic oligonucleotide
ucggggcugcuacauacug

SEQ ID NO: 488532 - RNA, 19 nt, Artificial Sequence
  Description of Artificial Sequence: Synthetic oligonucleotide
gguguuacuuuccauuaca

SEQ ID NO: 488533 - RNA, 19 nt, Artificial Sequence
  Description of Artificial Sequence: Synthetic oligonucleotide
acaaacuacccauggccaa

SEQ ID NO: 488534 - RNA, 19 nt, Artificial Sequence
  Description of Artificial Sequence: Synthetic oligonucleotide
gacauuacauccccuacau

SEQ ID NO: 488535 - RNA, 19 nt, Artificial Sequence
  Description of Artificial Sequence: Synthetic oligonucleotide
gaauugucuggccauggcu

SEQ ID NO: 488536 - RNA, 19 nt, Artificial Sequence
  Description of Artificial Sequence: Synthetic oligonucleotide
agacauugaucaugccucu

SEQ ID NO: 488537 - RNA, 19 nt, Artificial Sequence
  Description of Artificial Sequence: Synthetic oligonucleotide
ucugaaccccugccauagg

SEQ ID NO: 488538 - RNA, 19 nt, Artificial Sequence
  Description of Artificial Sequence: Synthetic oligonucleotide
uccucaagauuuacagaau

SEQ ID NO: 488539 - RNA, 19 nt, Artificial Sequence
  Description of Artificial Sequence: Synthetic oligonucleotide
uccuauccccuucuccucu

SEQ ID NO: 488540 - RNA, 19 nt, Artificial Sequence
  Description of Artificial Sequence: Synthetic oligonucleotide
aggaauugucuggccaugg

SEQ ID NO: 488541 - RNA, 19 nt, Artificial Sequence
  Description of Artificial Sequence: Synthetic oligonucleotide
ggccaaauaggccugccug

SEQ ID NO: 488542 - RNA, 19 nt, Artificial Sequence
  Description of Artificial Sequence: Synthetic oligonucleotide
cacuuagcacauacuguug

SEQ ID NO: 488543 - RNA, 19 nt, Artificial Sequence
  Description of Artificial Sequence: Synthetic oligonucleotide
caaacuacccauggccaag

SEQ ID NO: 488544 - RNA, 19 nt, Artificial Sequence
  Description of Artificial Sequence: Synthetic oligonucleotide
gauucauagcuuggcuagc

SEQ ID NO: 488545 - RNA, 19 nt, Artificial Sequence
  Description of Artificial Sequence: Synthetic oligonucleotide
uggggcuuccauacaauuu

SEQ ID NO: 488546 - RNA, 19 nt, Artificial Sequence
  Description of Artificial Sequence: Synthetic oligonucleotide
auaaaguaaccaagacucu

SEQ ID NO: 488547 - RNA, 19 nt, Artificial Sequence
  Description of Artificial Sequence: Synthetic oligonucleotide
gcuacaaacuacccauggc

SEQ ID NO: 488548 - RNA, 19 nt, Artificial Sequence
  Description of Artificial Sequence: Synthetic oligonucleotide
auucauagcuuggcuagca

SEQ ID NO: 488549 - RNA, 19 nt, Artificial Sequence
  Description of Artificial Sequence: Synthetic oligonucleotide
uccacaacugcuggauggc

SEQ ID NO: 488550 - RNA, 19 nt, Artificial Sequence
  Description of Artificial Sequence: Synthetic oligonucleotide
ccggcaguaacauuuugag

SEQ ID NO: 488551 - RNA, 19 nt, Artificial Sequence
  Description of Artificial Sequence: Synthetic oligonucleotide
caaucaccggaggacacag

SEQ ID NO: 488552 - RNA, 19 nt, Artificial Sequence
  Description of Artificial Sequence: Synthetic oligonucleotide
aaaugacauuacauccccu

SEQ ID NO: 488553 - RNA, 19 nt, Artificial Sequence
  Description of Artificial Sequence: Synthetic oligonucleotide
gcaguaacauuuugagggc

SEQ ID NO: 488554 - RNA, 19 nt, Artificial Sequence
  Description of Artificial Sequence: Synthetic oligonucleotide
guauugaaacacauaggaa

SEQ ID NO: 488555 - RNA, 19 nt, Artificial Sequence
  Description of Artificial Sequence: Synthetic oligonucleotide
uuugagggcgcguccucga

SEQ ID NO: 488556 - RNA, 19 nt, Artificial Sequence
  Description of Artificial Sequence: Synthetic oligonucleotide
uuuggccucuagagaauau

SEQ ID NO: 488557 - RNA, 19 nt, Artificial Sequence
  Description of Artificial Sequence: Synthetic oligonucleotide
cagaauggguccuccuaac

SEQ ID NO: 488558 - RNA, 19 nt, Artificial Sequence
  Description of Artificial Sequence: Synthetic oligonucleotide
auggcgucgacaccaacuu

SEQ ID NO: 488559 - RNA, 19 nt, Artificial Sequence
  Description of Artificial Sequence: Synthetic oligonucleotide
aacuacccauggccaagcu

SEQ ID NO: 488560 - RNA, 19 nt, Artificial Sequence
  Description of Artificial Sequence: Synthetic oligonucleotide
uaaauggcgucgacaccaa

SEQ ID NO: 488561 - RNA, 19 nt, Artificial Sequence
  Description of Artificial Sequence: Synthetic oligonucleotide
uggccaaauaggccugccu

SEQ ID NO: 488562 - RNA, 19 nt, Artificial Sequence
  Description of Artificial Sequence: Synthetic oligonucleotide
ggaauuuaccaaaccaguc

SEQ ID NO: 488563 - RNA, 19 nt, Artificial Sequence
  Description of Artificial Sequence: Synthetic oligonucleotide
cuccuaacgcucucugaac

SEQ ID NO: 488564 - RNA, 19 nt, Artificial Sequence
  Description of Artificial Sequence: Synthetic oligonucleotide
cugaguaacuaaaggguua

SEQ ID NO: 488565 - RNA, 19 nt, Artificial Sequence
  Description of Artificial Sequence: Synthetic oligonucleotide
ugagggcgcguccucgaug

SEQ ID NO: 488566 - RNA, 19 nt, Artificial Sequence
  Description of Artificial Sequence: Synthetic oligonucleotide
uguggggcuuccauacaau

SEQ ID NO: 488567 - RNA, 19 nt, Artificial Sequence
  Description of Artificial Sequence: Synthetic oligonucleotide
cuguaucagaagagcucag

SEQ ID NO: 488568 - RNA, 19 nt, Artificial Sequence
  Description of Artificial Sequence: Synthetic oligonucleotide
ggguuauuagcagggauac

SEQ ID NO: 488569 - RNA, 19 nt, Artificial Sequence
  Description of Artificial Sequence: Synthetic oligonucleotide
uuuuggccucuagagaaua

SEQ ID NO: 488570 - RNA, 19 nt, Artificial Sequence
  Description of Artificial Sequence: Synthetic oligonucleotide
gcuacauacugucuuagcu

SEQ ID NO: 488571 - RNA, 19 nt, Artificial Sequence
  Description of Artificial Sequence: Synthetic oligonucleotide
auggccaaauaggccugcc

SEQ ID NO: 488572 - RNA, 19 nt, Artificial Sequence
  Description of Artificial Sequence: Synthetic oligonucleotide
ucaaacugagaggguggca

SEQ ID NO: 488573 - RNA, 19 nt, Artificial Sequence
  Description of Artificial Sequence: Synthetic oligonucleotide
uccuccuaacgcucucuga

SEQ ID NO: 488574 - RNA, 19 nt, Artificial Sequence
  Description of Artificial Sequence: Synthetic oligonucleotide
aggguuauuagcagggaua

SEQ ID NO: 488575 - RNA, 19 nt, Artificial Sequence
  Description of Artificial Sequence: Synthetic oligonucleotide
ggaugguagugacagucac

SEQ ID NO: 488576 - RNA, 19 nt, Artificial Sequence
  Description of Artificial Sequence: Synthetic oligonucleotide
ucauuccccuuauugcauu

SEQ ID NO: 488577 - RNA, 19 nt, Artificial Sequence
  Description of Artificial Sequence: Synthetic oligonucleotide
uaacauuuugagggcgcgu

SEQ ID NO: 488578 - RNA, 19 nt, Artificial Sequence
  Description of Artificial Sequence: Synthetic oligonucleotide
gcuacuuagacaaaaucgu

SEQ ID NO: 488579 - RNA, 19 nt, Artificial Sequence
  Description of Artificial Sequence: Synthetic oligonucleotide
ggaauugucuggccauggc

SEQ ID NO: 488580 - RNA, 19 nt, Artificial Sequence
  Description of Artificial Sequence: Synthetic oligonucleotide
gguuugcagugguggaagg

SEQ ID NO: 488581 - RNA, 19 nt, Artificial Sequence
  Description of Artificial Sequence: Synthetic oligonucleotide
accggcaguaacauuuuga

SEQ ID NO: 488582 - RNA, 19 nt, Artificial Sequence
  Description of Artificial Sequence: Synthetic oligonucleotide
cugcuacauacugucuuag

SEQ ID NO: 488583 - RNA, 19 nt, Artificial Sequence
  Description of Artificial Sequence: Synthetic oligonucleotide
gguccuuagcuucgaagac

SEQ ID NO: 488584 - RNA, 19 nt, Artificial Sequence
  Description of Artificial Sequence: Synthetic oligonucleotide
uggcuagggucuuuucauc

SEQ ID NO: 488585 - RNA, 19 nt, Artificial Sequence
  Description of Artificial Sequence: Synthetic oligonucleotide
gauggccaaauaggccugc

SEQ ID NO: 488586 - RNA, 19 nt, Artificial Sequence
  Description of Artificial Sequence: Synthetic oligonucleotide
ccuaacgcucucugaaccc

SEQ ID NO: 488587 - RNA, 19 nt, Artificial Sequence
  Description of Artificial Sequence: Synthetic oligonucleotide
ggcccuaucuguguggggc

SEQ ID NO: 488588 - RNA, 19 nt, Artificial Sequence
  Description of Artificial Sequence: Synthetic oligonucleotide
ucaccggaggacacaguuu

SEQ ID NO: 488589 - RNA, 19 nt, Artificial Sequence
  Description of Artificial Sequence: Synthetic oligonucleotide
ugguagugacagucacuga

SEQ ID NO: 488590 - RNA, 19 nt, Artificial Sequence
  Description of Artificial Sequence: Synthetic oligonucleotide
agcuaugguccaugucuga

SEQ ID NO: 488591 - RNA, 19 nt, Artificial Sequence
  Description of Artificial Sequence: Synthetic oligonucleotide
ugacccgccauugcaggcu

SEQ ID NO: 488592 - RNA, 19 nt, Artificial Sequence
  Description of Artificial Sequence: Synthetic oligonucleotide
cacucguuggugccucagc

SEQ ID NO: 488593 - RNA, 19 nt, Artificial Sequence
  Description of Artificial Sequence: Synthetic oligonucleotide
ggacuguucuauaaauuga

SEQ ID NO: 488594 - RNA, 19 nt, Artificial Sequence
  Description of Artificial Sequence: Synthetic oligonucleotide
uacccucaauuccaauguu

SEQ ID NO: 488595 - RNA, 19 nt, Artificial Sequence
  Description of Artificial Sequence: Synthetic oligonucleotide
cccuacauugcuagauacc

SEQ ID NO: 488596 - RNA, 19 nt, Artificial Sequence
  Description of Artificial Sequence: Synthetic oligonucleotide
cuauaacuuggcccuaucu

SEQ ID NO: 488597 - RNA, 19 nt, Artificial Sequence
  Description of Artificial Sequence: Synthetic oligonucleotide
gauaccuggcuaccuggua

SEQ ID NO: 488598 - RNA, 19 nt, Artificial Sequence
  Description of Artificial Sequence: Synthetic oligonucleotide
gccucuauaacuuggcccu

SEQ ID NO: 488599 - RNA, 19 nt, Artificial Sequence
  Description of Artificial Sequence: Synthetic oligonucleotide
ggcuagggucuuuucauca

SEQ ID NO: 488600 - RNA, 19 nt, Artificial Sequence
  Description of Artificial Sequence: Synthetic oligonucleotide
ucaaauguuuuggccucua

SEQ ID NO: 488601 - RNA, 19 nt, Artificial Sequence
  Description of Artificial Sequence: Synthetic oligonucleotide
gauuuacagaauggguccu

SEQ ID NO: 488602 - RNA, 19 nt, Artificial Sequence
  Description of Artificial Sequence: Synthetic oligonucleotide
auagcuuggcuagcaggga

SEQ ID NO: 488603 - RNA, 19 nt, Artificial Sequence
  Description of Artificial Sequence: Synthetic oligonucleotide
augcgugggacugucugca

SEQ ID NO: 488604 - RNA, 19 nt, Artificial Sequence
  Description of Artificial Sequence: Synthetic oligonucleotide
accggaggacacaguuucc

SEQ ID NO: 488605 - RNA, 19 nt, Artificial Sequence
  Description of Artificial Sequence: Synthetic oligonucleotide
cagcccaacaugaauuucu

SEQ ID NO: 488606 - RNA, 19 nt, Artificial Sequence
  Description of Artificial Sequence: Synthetic oligonucleotide
ggguuugcagugguggaag

SEQ ID NO: 488607 - RNA, 19 nt, Artificial Sequence
  Description of Artificial Sequence: Synthetic oligonucleotide
aacgcucucugaaccccug

SEQ ID NO: 488608 - RNA, 19 nt, Artificial Sequence
  Description of Artificial Sequence: Synthetic oligonucleotide
uggcccuaucugugugggg

SEQ ID NO: 488609 - RNA, 19 nt, Artificial Sequence
  Description of Artificial Sequence: Synthetic oligonucleotide
gggauucauagcuuggcua

SEQ ID NO: 488610 - RNA, 19 nt, Artificial Sequence
  Description of Artificial Sequence: Synthetic oligonucleotide
ugcgugggacugucugcag

SEQ ID NO: 488611 - RNA, 19 nt, Artificial Sequence
  Description of Artificial Sequence: Synthetic oligonucleotide
cuccuauccccuucuccuc

SEQ ID NO: 488612 - RNA, 19 nt, Artificial Sequence
  Description of Artificial Sequence: Synthetic oligonucleotide
gugacccgccauugcaggc

SEQ ID NO: 488613 - RNA, 19 nt, Artificial Sequence
  Description of Artificial Sequence: Synthetic oligonucleotide
guuugcagugguggaagga

SEQ ID NO: 488614 - RNA, 19 nt, Artificial Sequence
  Description of Artificial Sequence: Synthetic oligonucleotide
gccauagguagaaauauua

SEQ ID NO: 488615 - RNA, 19 nt, Artificial Sequence
  Description of Artificial Sequence: Synthetic oligonucleotide
cauugcuagauaccuggcu

SEQ ID NO: 488616 - RNA, 19 nt, Artificial Sequence
  Description of Artificial Sequence: Synthetic oligonucleotide
agcuucgaagacuggccuu

SEQ ID NO: 488617 - RNA, 19 nt, Artificial Sequence
  Description of Artificial Sequence: Synthetic oligonucleotide
uacccauggccaagcuuuc

SEQ ID NO: 488618 - RNA, 19 nt, Artificial Sequence
  Description of Artificial Sequence: Synthetic oligonucleotide
gcuaccugguacagcagag

SEQ ID NO: 488619 - RNA, 19 nt, Artificial Sequence
  Description of Artificial Sequence: Synthetic oligonucleotide
gcuagcagggaugguagug

SEQ ID NO: 488620 - RNA, 19 nt, Artificial Sequence
  Description of Artificial Sequence: Synthetic oligonucleotide
uucaaccggcaguaacauu

SEQ ID NO: 488621 - RNA, 19 nt, Artificial Sequence
  Description of Artificial Sequence: Synthetic oligonucleotide
gacagcccaacaugaauuu

SEQ ID NO: 488622 - RNA, 19 nt, Artificial Sequence
  Description of Artificial Sequence: Synthetic oligonucleotide
ccauagguagaaauauuaa

SEQ ID NO: 488623 - RNA, 19 nt, Artificial Sequence
  Description of Artificial Sequence: Synthetic oligonucleotide
ccuacuguuuuguucaaua

SEQ ID NO: 488624 - RNA, 19 nt, Artificial Sequence
  Description of Artificial Sequence: Synthetic oligonucleotide
ccauuacauugguaccagg

SEQ ID NO: 488625 - RNA, 19 nt, Artificial Sequence
  Description of Artificial Sequence: Synthetic oligonucleotide
ccaaauaggccugccugcc

SEQ ID NO: 488626 - RNA, 19 nt, Artificial Sequence
  Description of Artificial Sequence: Synthetic oligonucleotide
uggcgucgacaccaacuuc

SEQ ID NO: 488627 - RNA, 19 nt, Artificial Sequence
  Description of Artificial Sequence: Synthetic oligonucleotide
caaauaggccugccugcca

SEQ ID NO: 488628 - RNA, 19 nt, Artificial Sequence
  Description of Artificial Sequence: Synthetic oligonucleotide
aaucaccggaggacacagu

SEQ ID NO: 488629 - RNA, 19 nt, Artificial Sequence
  Description of Artificial Sequence: Synthetic oligonucleotide
guaauucuccuugccuaaa

SEQ ID NO: 488630 - RNA, 19 nt, Artificial Sequence
  Description of Artificial Sequence: Synthetic oligonucleotide
cugcuuacucugaaagggu

SEQ ID NO: 488631 - RNA, 19 nt, Artificial Sequence
  Description of Artificial Sequence: Synthetic oligonucleotide
ggccugaacaggaauuguc

SEQ ID NO: 488632 - RNA, 19 nt, Artificial Sequence
  Description of Artificial Sequence: Synthetic oligonucleotide
uaggcagaauuugcuccau

SEQ ID NO: 488633 - RNA, 19 nt, Artificial Sequence
  Description of Artificial Sequence: Synthetic oligonucleotide
ccugccauagguagaaaua

SEQ ID NO: 488634 - RNA, 19 nt, Artificial Sequence
  Description of Artificial Sequence: Synthetic oligonucleotide
ccuacauugcuagauaccu

SEQ ID NO: 488635 - RNA, 19 nt, Artificial Sequence
  Description of Artificial Sequence: Synthetic oligonucleotide
cacauacuguugugaugca

SEQ ID NO: 488636 - RNA, 19 nt, Artificial Sequence
  Description of Artificial Sequence: Synthetic oligonucleotide
gacauugaucaugccucua

SEQ ID NO: 488637 - RNA, 19 nt, Artificial Sequence
  Description of Artificial Sequence: Synthetic oligonucleotide
ggcgucgacaccaacuucu

SEQ ID NO: 488638 - RNA, 19 nt, Artificial Sequence
  Description of Artificial Sequence: Synthetic oligonucleotide
cauuuugagggcgcguccu

SEQ ID NO: 488639 - RNA, 19 nt, Artificial Sequence
  Description of Artificial Sequence: Synthetic oligonucleotide
ggagcagaggcugaugcgu

SEQ ID NO: 488640 - RNA, 19 nt, Artificial Sequence
  Description of Artificial Sequence: Synthetic oligonucleotide
cugguacagcagagcuaug

SEQ ID NO: 488641 - RNA, 19 nt, Artificial Sequence
  Description of Artificial Sequence: Synthetic oligonucleotide
gggaugguagugacaguca

SEQ ID NO: 488642 - RNA, 19 nt, Artificial Sequence
  Description of Artificial Sequence: Synthetic oligonucleotide
ccacuuagcacauacuguu

SEQ ID NO: 488643 - RNA, 19 nt, Artificial Sequence
  Description of Artificial Sequence: Synthetic oligonucleotide
ggaaagcugcuuacucuga

SEQ ID NO: 488644 - RNA, 19 nt, Artificial Sequence
  Description of Artificial Sequence: Synthetic oligonucleotide
cggaggacacaguuucccc

SEQ ID NO: 488645 - RNA, 19 nt, Artificial Sequence
  Description of Artificial Sequence: Synthetic oligonucleotide
accugguacagcagagcua

SEQ ID NO: 488646 - RNA, 19 nt, Artificial Sequence
  Description of Artificial Sequence: Synthetic oligonucleotide
auggcugcugggauucaua

SEQ ID NO: 488647 - RNA, 19 nt, Artificial Sequence
  Description of Artificial Sequence: Synthetic oligonucleotide
cuucaaccggcaguaacau

SEQ ID NO: 488648 - RNA, 19 nt, Artificial Sequence
  Description of Artificial Sequence: Synthetic oligonucleotide
gcugaguaacuaaaggguu

SEQ ID NO: 488649 - RNA, 19 nt, Artificial Sequence
  Description of Artificial Sequence: Synthetic oligonucleotide
guaccagggaaugcuccua

SEQ ID NO: 488650 - RNA, 19 nt, Artificial Sequence
  Description of Artificial Sequence: Synthetic oligonucleotide
gcugaugcgugggacuguc

SEQ ID NO: 488651 - RNA, 19 nt, Artificial Sequence
  Description of Artificial Sequence: Synthetic oligonucleotide
agcucggggcugcuacaua

SEQ ID NO: 488652 - RNA, 19 nt, Artificial Sequence
  Description of Artificial Sequence: Synthetic oligonucleotide
cucacucguuggugccuca

SEQ ID NO: 488653 - RNA, 19 nt, Artificial Sequence
  Description of Artificial Sequence: Synthetic oligonucleotide
gggcgcguccucgaugcug

SEQ ID NO: 488654 - RNA, 19 nt, Artificial Sequence
  Description of Artificial Sequence: Synthetic oligonucleotide
gcuagauaccuggcuaccu

SEQ ID NO: 488655 - RNA, 19 nt, Artificial Sequence
  Description of Artificial Sequence: Synthetic oligonucleotide
cucggggcugcuacauacu

SEQ ID NO: 488656 - RNA, 19 nt, Artificial Sequence
  Description of Artificial Sequence: Synthetic oligonucleotide
cucuauaacuuggcccuau

SEQ ID NO: 488657 - RNA, 19 nt, Artificial Sequence
  Description of Artificial Sequence: Synthetic oligonucleotide
gaguaacuaaaggguuauu

SEQ ID NO: 488658 - RNA, 19 nt, Artificial Sequence
  Description of Artificial Sequence: Synthetic oligonucleotide
gcuaugguccaugucugau

SEQ ID NO: 488659 - RNA, 19 nt, Artificial Sequence
  Description of Artificial Sequence: Synthetic oligonucleotide
caaccggcaguaacauuuu

SEQ ID NO: 488660 - RNA, 19 nt, Artificial Sequence
  Description of Artificial Sequence: Synthetic oligonucleotide
agggcgcguccucgaugcu

SEQ ID NO: 488661 - RNA, 19 nt, Artificial Sequence
  Description of Artificial Sequence: Synthetic oligonucleotide
ggguccuccuaacgcucuc

SEQ ID NO: 488662 - RNA, 19 nt, Artificial Sequence
  Description of Artificial Sequence: Synthetic oligonucleotide
gguuauuagcagggauacu

SEQ ID NO: 488663 - RNA, 19 nt, Artificial Sequence
  Description of Artificial Sequence: Synthetic oligonucleotide
gacccgccauugcaggcuu

SEQ ID NO: 488664 - RNA, 19 nt, Artificial Sequence
  Description of Artificial Sequence: Synthetic oligonucleotide
gcgucgacaccaacuucuc

SEQ ID NO: 488665 - RNA, 19 nt, Artificial Sequence
  Description of Artificial Sequence: Synthetic oligonucleotide
cugaugcgugggacugucu

SEQ ID NO: 488666 - RNA, 19 nt, Artificial Sequence
  Description of Artificial Sequence: Synthetic oligonucleotide
ggcgcguccucgaugcugu

SEQ ID NO: 488667 - RNA, 19 nt, Artificial Sequence
  Description of Artificial Sequence: Synthetic oligonucleotide
gcccuaucuguguggggcu

SEQ ID NO: 488668 - RNA, 19 nt, Artificial Sequence
  Description of Artificial Sequence: Synthetic oligonucleotide
ggaaugcuccuauccccuu

SEQ ID NO: 488669 - RNA, 19 nt, Artificial Sequence
  Description of Artificial Sequence: Synthetic oligonucleotide
gguccuccuaacgcucucu

SEQ ID NO: 488670 - RNA, 19 nt, Artificial Sequence
  Description of Artificial Sequence: Synthetic oligonucleotide
ggccugccugccauuaacu

SEQ ID NO: 488671 - RNA, 19 nt, Artificial Sequence
  Description of Artificial Sequence: Synthetic oligonucleotide
ccuugccuaaagugauuuu

SEQ ID NO: 488672 - RNA, 19 nt, Artificial Sequence
  Description of Artificial Sequence: Synthetic oligonucleotide
gggcugcuacauacugucu

SEQ ID NO: 488673 - RNA, 19 nt, Artificial Sequence
  Description of Artificial Sequence: Synthetic oligonucleotide
ccucuauaacuuggcccua

SEQ ID NO: 488674 - RNA, 19 nt, Artificial Sequence
  Description of Artificial Sequence: Synthetic oligonucleotide
cgucgacaccaacuucucu

SEQ ID NO: 488675 - RNA, 19 nt, Artificial Sequence
  Description of Artificial Sequence: Synthetic oligonucleotide
cccuaucuguguggggcuu

SEQ ID NO: 488676 - RNA, 19 nt, Artificial Sequence
  Description of Artificial Sequence: Synthetic oligonucleotide
auagucaacagccuguccc

SEQ ID NO: 488677 - RNA, 19 nt, Artificial Sequence
  Description of Artificial Sequence: Synthetic oligonucleotide
acuaucaagucauucaugg

SEQ ID NO: 488678 - RNA, 19 nt, Artificial Sequence
  Description of Artificial Sequence: Synthetic oligonucleotide
aaaauuuucaaaguggggu

SEQ ID NO: 488679 - RNA, 19 nt, Artificial Sequence
  Description of Artificial Sequence: Synthetic oligonucleotide
uuaucuuuagucaauagaa

SEQ ID NO: 488680 - RNA, 19 nt, Artificial Sequence
  Description of Artificial Sequence: Synthetic oligonucleotide
uuugcaucauuuaagacca

SEQ ID NO: 488681 - RNA, 19 nt, Artificial Sequence
  Description of Artificial Sequence: Synthetic oligonucleotide
aauaagauguauaccuucc

SEQ ID NO: 488682 - RNA, 19 nt, Artificial Sequence
  Description of Artificial Sequence: Synthetic oligonucleotide
aaagcugaaguccacacug

SEQ ID NO: 488683 - RNA, 19 nt, Artificial Sequence
  Description of Artificial Sequence: Synthetic oligonucleotide
uaguauacaaccaccagag

SEQ ID NO: 488684 - RNA, 19 nt, Artificial Sequence
  Description of Artificial Sequence: Synthetic oligonucleotide
ucaucgauaaacuugcuca

SEQ ID NO: 488685 - RNA, 19 nt, Artificial Sequence
  Description of Artificial Sequence: Synthetic oligonucleotide
aauaccagcuuccccaugg

SEQ ID NO: 488686 - RNA, 19 nt, Artificial Sequence
  Description of Artificial Sequence: Synthetic oligonucleotide
uuggcuaugaccaaguccu

SEQ ID NO: 488687 - RNA, 19 nt, Artificial Sequence
  Description of Artificial Sequence: Synthetic oligonucleotide
aaaucuacuggccagcaug

SEQ ID NO: 488688 - RNA, 19 nt, Artificial Sequence
  Description of Artificial Sequence: Synthetic oligonucleotide
uguucaucgauaaacuugc

SEQ ID NO: 488689 - RNA, 19 nt, Artificial Sequence
  Description of Artificial Sequence: Synthetic oligonucleotide
aaauagaugguggggaagc

SEQ ID NO: 488690 - RNA, 19 nt, Artificial Sequence
  Description of Artificial Sequence: Synthetic oligonucleotide
gauacugucauuguguugc

SEQ ID NO: 488691 - RNA, 19 nt, Artificial Sequence
  Description of Artificial Sequence: Synthetic oligonucleotide
cuuaguugaaacuaucaag

SEQ ID NO: 488692 - RNA, 19 nt, Artificial Sequence
  Description of Artificial Sequence: Synthetic oligonucleotide
uuccauauuucucucgugg

SEQ ID NO: 488693 - RNA, 19 nt, Artificial Sequence
  Description of Artificial Sequence: Synthetic oligonucleotide
cuuuguuacgccaaaacug

SEQ ID NO: 488694 - RNA, 19 nt, Artificial Sequence
  Description of Artificial Sequence: Synthetic oligonucleotide
aguuaucaaaguuugcauc

SEQ ID NO: 488695 - RNA, 19 nt, Artificial Sequence
  Description of Artificial Sequence: Synthetic oligonucleotide
uuuguuacgccaaaacuga

SEQ ID NO: 488696 - RNA, 19 nt, Artificial Sequence
  Description of Artificial Sequence: Synthetic oligonucleotide
ugauacugcagauaccccg

SEQ ID NO: 488697 - RNA, 19 nt, Artificial Sequence
  Description of Artificial Sequence: Synthetic oligonucleotide
aucacgauggcaucaaagg

SEQ ID NO: 488698 - RNA, 19 nt, Artificial Sequence
  Description of Artificial Sequence: Synthetic oligonucleotide
uguggaacccugaacaucc

SEQ ID NO: 488699 - RNA, 19 nt, Artificial Sequence
  Description of Artificial Sequence: Synthetic oligonucleotide
ucuauaaucaaagcugaag

SEQ ID NO: 488700 - RNA, 19 nt, Artificial Sequence
  Description of Artificial Sequence: Synthetic oligonucleotide
gaacuuagcuauuucagug

SEQ ID NO: 488701 - RNA, 19 nt, Artificial Sequence
  Description of Artificial Sequence: Synthetic oligonucleotide
ucggaaaauuuucaaagug

SEQ ID NO: 488702 - RNA, 19 nt, Artificial Sequence
  Description of Artificial Sequence: Synthetic oligonucleotide
aaauuacuuaguugaaacu

SEQ ID NO: 488703 - RNA, 19 nt, Artificial Sequence
  Description of Artificial Sequence: Synthetic oligonucleotide
cucacaucaaaucuacugg

SEQ ID NO: 488704 - RNA, 19 nt, Artificial Sequence
  Description of Artificial Sequence: Synthetic oligonucleotide
uucaaagugggguagccag

SEQ ID NO: 488705 - RNA, 19 nt, Artificial Sequence
  Description of Artificial Sequence: Synthetic oligonucleotide
aucaauaccagcuucccca

SEQ ID NO: 488706 - RNA, 19 nt, Artificial Sequence
  Description of Artificial Sequence: Synthetic oligonucleotide
uaaagcucuuccuuggucc

SEQ ID NO: 488707 - RNA, 19 nt, Artificial Sequence
  Description of Artificial Sequence: Synthetic oligonucleotide
gaagcgugacuucaggugg

SEQ ID NO: 488708 - RNA, 19 nt, Artificial Sequence
  Description of Artificial Sequence: Synthetic oligonucleotide
agauugcucaaucauguag

SEQ ID NO: 488709 - RNA, 19 nt, Artificial Sequence
  Description of Artificial Sequence: Synthetic oligonucleotide
aauuacuuaguugaaacua

SEQ ID NO: 488710 - RNA, 19 nt, Artificial Sequence
  Description of Artificial Sequence: Synthetic oligonucleotide
aguugaaacuaucaaguca

SEQ ID NO: 488711 - RNA, 19 nt, Artificial Sequence
  Description of Artificial Sequence: Synthetic oligonucleotide
aggccuuuaaagcucuucc

SEQ ID NO: 488712 - RNA, 19 nt, Artificial Sequence
  Description of Artificial Sequence: Synthetic oligonucleotide
cuuauaucggucauuggug

SEQ ID NO: 488713 - RNA, 19 nt, Artificial Sequence
  Description of Artificial Sequence: Synthetic oligonucleotide
uguaguauacaaccaccag

SEQ ID NO: 488714 - RNA, 19 nt, Artificial Sequence
  Description of Artificial Sequence: Synthetic oligonucleotide
uuucucauauucuggagca

SEQ ID NO: 488715 - RNA, 19 nt, Artificial Sequence
  Description of Artificial Sequence: Synthetic oligonucleotide
agcauguuucaccacauag

SEQ ID NO: 488716 - RNA, 19 nt, Artificial Sequence
  Description of Artificial Sequence: Synthetic oligonucleotide
ucauucauggcuauucagu

SEQ ID NO: 488717 - RNA, 19 nt, Artificial Sequence
  Description of Artificial Sequence: Synthetic oligonucleotide
ucauguagcugacaauucc

SEQ ID NO: 488718 - RNA, 19 nt, Artificial Sequence
  Description of Artificial Sequence: Synthetic oligonucleotide
cauuuaagaccaaaacacc

SEQ ID NO: 488719 - RNA, 19 nt, Artificial Sequence
  Description of Artificial Sequence: Synthetic oligonucleotide
uucaguguugaaagugugg

SEQ ID NO: 488720 - RNA, 19 nt, Artificial Sequence
  Description of Artificial Sequence: Synthetic oligonucleotide
aagcccuccaccuuauauc

SEQ ID NO: 488721 - RNA, 19 nt, Artificial Sequence
  Description of Artificial Sequence: Synthetic oligonucleotide
gcuauuucaguguugaaag

SEQ ID NO: 488722 - RNA, 19 nt, Artificial Sequence
  Description of Artificial Sequence: Synthetic oligonucleotide
aaagaagucaagauacugu

SEQ ID NO: 488723 - RNA, 19 nt, Artificial Sequence
  Description of Artificial Sequence: Synthetic oligonucleotide
guuaucaaaguuugcauca

SEQ ID NO: 488724 - RNA, 19 nt, Artificial Sequence
  Description of Artificial Sequence: Synthetic oligonucleotide
cucaaauuuaacuggguuc

SEQ ID NO: 488725 - RNA, 19 nt, Artificial Sequence
  Description of Artificial Sequence: Synthetic oligonucleotide
aaucauguagcugacaauu

SEQ ID NO: 488726 - RNA, 19 nt, Artificial Sequence
  Description of Artificial Sequence: Synthetic oligonucleotide
aauuggaggagagugcuug

SEQ ID NO: 488727 - RNA, 19 nt, Artificial Sequence
  Description of Artificial Sequence: Synthetic oligonucleotide
gauugcucaaucauguagc

SEQ ID NO: 488728 - RNA, 19 nt, Artificial Sequence
  Description of Artificial Sequence: Synthetic oligonucleotide
uuuagucaauagaagcgug

SEQ ID NO: 488729 - RNA, 19 nt, Artificial Sequence
  Description of Artificial Sequence: Synthetic oligonucleotide
aagauguauaccuuccaaa

SEQ ID NO: 488730 - RNA, 19 nt, Artificial Sequence
  Description of Artificial Sequence: Synthetic oligonucleotide
uacuuaguugaaacuauca

SEQ ID NO: 488731 - RNA, 19 nt, Artificial Sequence
  Description of Artificial Sequence: Synthetic oligonucleotide
uacgccaaaacugaguagc

SEQ ID NO: 488732 - RNA, 19 nt, Artificial Sequence
  Description of Artificial Sequence: Synthetic oligonucleotide
acuguaguauacaaccacc

SEQ ID NO: 488733 - RNA, 19 nt, Artificial Sequence
  Description of Artificial Sequence: Synthetic oligonucleotide
acuuuguuacgccaaaacu

SEQ ID NO: 488734 - RNA, 19 nt, Artificial Sequence
  Description of Artificial Sequence: Synthetic oligonucleotide
uccauauuucucucguggg

SEQ ID NO: 488735 - RNA, 19 nt, Artificial Sequence
  Description of Artificial Sequence: Synthetic oligonucleotide
guuaucuuuagucaauaga

SEQ ID NO: 488736 - RNA, 19 nt, Artificial Sequence
  Description of Artificial Sequence: Synthetic oligonucleotide
gggauaaccacucacauca

SEQ ID NO: 488737 - RNA, 19 nt, Artificial Sequence
  Description of Artificial Sequence: Synthetic oligonucleotide
auggcaaagguguacucgg

SEQ ID NO: 488738 - RNA, 19 nt, Artificial Sequence
  Description of Artificial Sequence: Synthetic oligonucleotide
uuagucaauagaagcguga

SEQ ID NO: 488739 - RNA, 19 nt, Artificial Sequence
  Description of Artificial Sequence: Synthetic oligonucleotide
acaaaguuaucaaaguuug

SEQ ID NO: 488740 - RNA, 19 nt, Artificial Sequence
  Description of Artificial Sequence: Synthetic oligonucleotide
ucucagauuguuagcagca

SEQ ID NO: 488741 - RNA, 19 nt, Artificial Sequence
  Description of Artificial Sequence: Synthetic oligonucleotide
acuccaguagcacuguauc

SEQ ID NO: 488742 - RNA, 19 nt, Artificial Sequence
  Description of Artificial Sequence: Synthetic oligonucleotide
ugagguugcaucaaucuua

SEQ ID NO: 488743 - RNA, 19 nt, Artificial Sequence
  Description of Artificial Sequence: Synthetic oligonucleotide
uuauaucggucauugguga

SEQ ID NO: 488744 - RNA, 19 nt, Artificial Sequence
  Description of Artificial Sequence: Synthetic oligonucleotide
uuuucgguggcccaccaga

SEQ ID NO: 488745 - RNA, 19 nt, Artificial Sequence
  Description of Artificial Sequence: Synthetic oligonucleotide
cauguuucaccacauaguc

SEQ ID NO: 488746 - RNA, 19 nt, Artificial Sequence
  Description of Artificial Sequence: Synthetic oligonucleotide
augaugacuacaucaucuc

SEQ ID NO: 488747 - RNA, 19 nt, Artificial Sequence
  Description of Artificial Sequence: Synthetic oligonucleotide
agauguauaccuuccaaaa

SEQ ID NO: 488748 - RNA, 19 nt, Artificial Sequence
  Description of Artificial Sequence: Synthetic oligonucleotide
aaaauagaugguggggaag

SEQ ID NO: 488749 - RNA, 19 nt, Artificial Sequence
  Description of Artificial Sequence: Synthetic oligonucleotide
uguggugaaaucuguaauc

SEQ ID NO: 488750 - RNA, 19 nt, Artificial Sequence
  Description of Artificial Sequence: Synthetic oligonucleotide
uaagauguauaccuuccaa

SEQ ID NO: 488751 - RNA, 19 nt, Artificial Sequence
  Description of Artificial Sequence: Synthetic oligonucleotide
agaagcgugacuucaggug

SEQ ID NO: 488752 - RNA, 19 nt, Artificial Sequence
  Description of Artificial Sequence: Synthetic oligonucleotide
aucacauugcuccugggcu

SEQ ID NO: 488753 - RNA, 19 nt, Artificial Sequence
  Description of Artificial Sequence: Synthetic oligonucleotide
auugcuccugggcucauac

SEQ ID NO: 488754 - RNA, 19 nt, Artificial Sequence
  Description of Artificial Sequence: Synthetic oligonucleotide
aguguugaaagugugguga

SEQ ID NO: 488755 - RNA, 19 nt, Artificial Sequence
  Description of Artificial Sequence: Synthetic oligonucleotide
agucaagauacugucauug

SEQ ID NO: 488756 - RNA, 19 nt, Artificial Sequence
  Description of Artificial Sequence: Synthetic oligonucleotide
uggcuauucaguauucaga

SEQ ID NO: 488757 - RNA, 19 nt, Artificial Sequence
  Description of Artificial Sequence: Synthetic oligonucleotide
guaguauacaaccaccaga

SEQ ID NO: 488758 - RNA, 19 nt, Artificial Sequence
  Description of Artificial Sequence: Synthetic oligonucleotide
ugucgcauaguccuccuca

SEQ ID NO: 488759 - RNA, 19 nt, Artificial Sequence
  Description of Artificial Sequence: Synthetic oligonucleotide
auggcuauucaguauucag

SEQ ID NO: 488760 - RNA, 19 nt, Artificial Sequence
  Description of Artificial Sequence: Synthetic oligonucleotide
gauacugcagauaccccgg

SEQ ID NO: 488761 - RNA, 19 nt, Artificial Sequence
  Description of Artificial Sequence: Synthetic oligonucleotide
ggcuauucaguauucagag

SEQ ID NO: 488762 - RNA, 19 nt, Artificial Sequence
  Description of Artificial Sequence: Synthetic oligonucleotide
cacaacaucaucaaaguua

SEQ ID NO: 488763 - RNA, 19 nt, Artificial Sequence
  Description of Artificial Sequence: Synthetic oligonucleotide
auuuaagaccaaaacacca

SEQ ID NO: 488764 - RNA, 19 nt, Artificial Sequence
  Description of Artificial Sequence: Synthetic oligonucleotide
agaaucuccuuugagggag

SEQ ID NO: 488765 - RNA, 19 nt, Artificial Sequence
  Description of Artificial Sequence: Synthetic oligonucleotide
agcccuccaccuuauaucg

SEQ ID NO: 488766 - RNA, 19 nt, Artificial Sequence
  Description of Artificial Sequence: Synthetic oligonucleotide
uuucaguguugaaagugug

SEQ ID NO: 488767 - RNA, 19 nt, Artificial Sequence
  Description of Artificial Sequence: Synthetic oligonucleotide
cacccucaaauuuaacugg

SEQ ID NO: 488768 - RNA, 19 nt, Artificial Sequence
  Description of Artificial Sequence: Synthetic oligonucleotide
ucauacuuggacuggaauu

SEQ ID NO: 488769 - RNA, 19 nt, Artificial Sequence
  Description of Artificial Sequence: Synthetic oligonucleotide
uucaucgauaaacuugcuc

SEQ ID NO: 488770 - RNA, 19 nt, Artificial Sequence
  Description of Artificial Sequence: Synthetic oligonucleotide
cuuucaagaacuuagcuau

SEQ ID NO: 488771 - RNA, 19 nt, Artificial Sequence
  Description of Artificial Sequence: Synthetic oligonucleotide
uguuacgccaaaacugagu

SEQ ID NO: 488772 - RNA, 19 nt, Artificial Sequence
  Description of Artificial Sequence: Synthetic oligonucleotide
ugacaauuccauauuucuc

SEQ ID NO: 488773 - RNA, 19 nt, Artificial Sequence
  Description of Artificial Sequence: Synthetic oligonucleotide
uugaugacuggcuuuaguu

SEQ ID NO: 488774 - RNA, 19 nt, Artificial Sequence
  Description of Artificial Sequence: Synthetic oligonucleotide
uugauggugggauaaccac

SEQ ID NO: 488775 - RNA, 19 nt, Artificial Sequence
  Description of Artificial Sequence: Synthetic oligonucleotide
uguccagucaggcugggaa

SEQ ID NO: 488776 - RNA, 19 nt, Artificial Sequence
  Description of Artificial Sequence: Synthetic oligonucleotide
auguucaucgauaaacuug

SEQ ID NO: 488777 - RNA, 19 nt, Artificial Sequence
  Description of Artificial Sequence: Synthetic oligonucleotide
gaacccugaacauccauca

SEQ ID NO: 488778 - RNA, 19 nt, Artificial Sequence
  Description of Artificial Sequence: Synthetic oligonucleotide
ucgguggcccaccagaggc

SEQ ID NO: 488779 - RNA, 19 nt, Artificial Sequence
  Description of Artificial Sequence: Synthetic oligonucleotide
uuugaugacuggcuuuagu

SEQ ID NO: 488780 - RNA, 19 nt, Artificial Sequence
  Description of Artificial Sequence: Synthetic oligonucleotide
cucucagauuguuagcagc

SEQ ID NO: 488781 - RNA, 19 nt, Artificial Sequence
  Description of Artificial Sequence: Synthetic oligonucleotide
caucacgauggcaucaaag

SEQ ID NO: 488782 - RNA, 19 nt, Artificial Sequence
  Description of Artificial Sequence: Synthetic oligonucleotide
auaaacuugcucaaaugcu

SEQ ID NO: 488783 - RNA, 19 nt, Artificial Sequence
  Description of Artificial Sequence: Synthetic oligonucleotide
ugauggugggauaaccacu

SEQ ID NO: 488784 - RNA, 19 nt, Artificial Sequence
  Description of Artificial Sequence: Synthetic oligonucleotide
cuauaaucaaagcugaagu

SEQ ID NO: 488785 - RNA, 19 nt, Artificial Sequence
  Description of Artificial Sequence: Synthetic oligonucleotide
aaagguguacucggggaag

SEQ ID NO: 488786 - RNA, 19 nt, Artificial Sequence
  Description of Artificial Sequence: Synthetic oligonucleotide
uuuaaagcucuuccuuggu

SEQ ID NO: 488787 - RNA, 19 nt, Artificial Sequence
  Description of Artificial Sequence: Synthetic oligonucleotide
uugacuggucccuuguugu

SEQ ID NO: 488788 - RNA, 19 nt, Artificial Sequence
  Description of Artificial Sequence: Synthetic oligonucleotide
auaagauguauaccuucca

SEQ ID NO: 488789 - RNA, 19 nt, Artificial Sequence
  Description of Artificial Sequence: Synthetic oligonucleotide
ugaguagcaguucuauaau

SEQ ID NO: 488790 - RNA, 19 nt, Artificial Sequence
  Description of Artificial Sequence: Synthetic oligonucleotide
aguauacaaccaccagagg

SEQ ID NO: 488791 - RNA, 19 nt, Artificial Sequence
  Description of Artificial Sequence: Synthetic oligonucleotide
aguguggugaaaucuguaa

SEQ ID NO: 488792 - RNA, 19 nt, Artificial Sequence
  Description of Artificial Sequence: Synthetic oligonucleotide
uguggcauguucaucgaua

SEQ ID NO: 488793 - RNA, 19 nt, Artificial Sequence
  Description of Artificial Sequence: Synthetic oligonucleotide
guuaguguagaugggcucc

SEQ ID NO: 488794 - RNA, 19 nt, Artificial Sequence
  Description of Artificial Sequence: Synthetic oligonucleotide
cugaguagcaguucuauaa

SEQ ID NO: 488795 - RNA, 19 nt, Artificial Sequence
  Description of Artificial Sequence: Synthetic oligonucleotide
auucagagcaugagguggc

SEQ ID NO: 488796 - RNA, 19 nt, Artificial Sequence
  Description of Artificial Sequence: Synthetic oligonucleotide
gacaaacucccggagagug

SEQ ID NO: 488797 - RNA, 19 nt, Artificial Sequence
  Description of Artificial Sequence: Synthetic oligonucleotide
ucucucagauuguuagcag

SEQ ID NO: 488798 - RNA, 19 nt, Artificial Sequence
  Description of Artificial Sequence: Synthetic oligonucleotide
guugcuuggugccuaauga

SEQ ID NO: 488799 - RNA, 19 nt, Artificial Sequence
  Description of Artificial Sequence: Synthetic oligonucleotide
uuuucaaagugggguagcc

SEQ ID NO: 488800 - RNA, 19 nt, Artificial Sequence
  Description of Artificial Sequence: Synthetic oligonucleotide
aaaguuaucuuuagucaau

SEQ ID NO: 488801 - RNA, 19 nt, Artificial Sequence
  Description of Artificial Sequence: Synthetic oligonucleotide
cuaucaagucauucauggc

SEQ ID NO: 488802 - RNA, 19 nt, Artificial Sequence
  Description of Artificial Sequence: Synthetic oligonucleotide
cacuguaguauacaaccac

SEQ ID NO: 488803 - RNA, 19 nt, Artificial Sequence
  Description of Artificial Sequence: Synthetic oligonucleotide
caaaguuaucuuuagucaa

SEQ ID NO: 488804 - RNA, 19 nt, Artificial Sequence
  Description of Artificial Sequence: Synthetic oligonucleotide
ugaugucauuagcaguagc

SEQ ID NO: 488805 - RNA, 19 nt, Artificial Sequence
  Description of Artificial Sequence: Synthetic oligonucleotide
agcaauggcaaagguguac

SEQ ID NO: 488806 - RNA, 19 nt, Artificial Sequence
  Description of Artificial Sequence: Synthetic oligonucleotide
auguuucaccacauagucc

SEQ ID NO: 488807 - RNA, 19 nt, Artificial Sequence
  Description of Artificial Sequence: Synthetic oligonucleotide
uccuucaaagugcuggcaa

SEQ ID NO: 488808 - RNA, 19 nt, Artificial Sequence
  Description of Artificial Sequence: Synthetic oligonucleotide
uggugcauagaacuccagu

SEQ ID NO: 488809 - RNA, 19 nt, Artificial Sequence
  Description of Artificial Sequence: Synthetic oligonucleotide
uaccgcuuggcaucauugg

SEQ ID NO: 488810 - RNA, 19 nt, Artificial Sequence
  Description of Artificial Sequence: Synthetic oligonucleotide
uaguugaaacuaucaaguc

SEQ ID NO: 488811 - RNA, 19 nt, Artificial Sequence
  Description of Artificial Sequence: Synthetic oligonucleotide
gaagucaagauacugucau

SEQ ID NO: 488812 - RNA, 19 nt, Artificial Sequence
  Description of Artificial Sequence: Synthetic oligonucleotide
auugcucaaucauguagcu

SEQ ID NO: 488813 - RNA, 19 nt, Artificial Sequence
  Description of Artificial Sequence: Synthetic oligonucleotide
aaagugcuggcaauuuucu

SEQ ID NO: 488814 - RNA, 19 nt, Artificial Sequence
  Description of Artificial Sequence: Synthetic oligonucleotide
ucacuucugucgcauaguc

SEQ ID NO: 488815 - RNA, 19 nt, Artificial Sequence
  Description of Artificial Sequence: Synthetic oligonucleotide
cggaaaauuuucaaagugg

SEQ ID NO: 488816 - RNA, 19 nt, Artificial Sequence
  Description of Artificial Sequence: Synthetic oligonucleotide
agccagagacaucaaaccu

SEQ ID NO: 488817 - RNA, 19 nt, Artificial Sequence
  Description of Artificial Sequence: Synthetic oligonucleotide
uuucgguggcccaccagag

SEQ ID NO: 488818 - RNA, 19 nt, Artificial Sequence
  Description of Artificial Sequence: Synthetic oligonucleotide
guuacgccaaaacugagua

SEQ ID NO: 488819 - RNA, 19 nt, Artificial Sequence
  Description of Artificial Sequence: Synthetic oligonucleotide
cuugacuggucccuuguug

SEQ ID NO: 488820 - RNA, 19 nt, Artificial Sequence
  Description of Artificial Sequence: Synthetic oligonucleotide
uaaugauguccacuacagu

SEQ ID NO: 488821 - RNA, 19 nt, Artificial Sequence
  Description of Artificial Sequence: Synthetic oligonucleotide
ucccuuguuguucuugggu

SEQ ID NO: 488822 - RNA, 19 nt, Artificial Sequence
  Description of Artificial Sequence: Synthetic oligonucleotide
agcuauuucaguguugaaa

SEQ ID NO: 488823 - RNA, 19 nt, Artificial Sequence
  Description of Artificial Sequence: Synthetic oligonucleotide
gagguugcaucaaucuuag

SEQ ID NO: 488824 - RNA, 19 nt, Artificial Sequence
  Description of Artificial Sequence: Synthetic oligonucleotide
uuguuacgccaaaacugag

SEQ ID NO: 488825 - RNA, 19 nt, Artificial Sequence
  Description of Artificial Sequence: Synthetic oligonucleotide
ugaugacuggcuuuaguuu

SEQ ID NO: 488826 - RNA, 19 nt, Artificial Sequence
  Description of Artificial Sequence: Synthetic oligonucleotide
auuucaguguugaaagugu

SEQ ID NO: 488827 - RNA, 19 nt, Artificial Sequence
  Description of Artificial Sequence: Synthetic oligonucleotide
uuacgccaaaacugaguag

SEQ ID NO: 488828 - RNA, 19 nt, Artificial Sequence
  Description of Artificial Sequence: Synthetic oligonucleotide
uugaaaguguggugaaauc

SEQ ID NO: 488829 - RNA, 19 nt, Artificial Sequence
  Description of Artificial Sequence: Synthetic oligonucleotide
uagucaauagaagcgugac

SEQ ID NO: 488830 - RNA, 19 nt, Artificial Sequence
  Description of Artificial Sequence: Synthetic oligonucleotide
caucaacuuuggcuaaagg

SEQ ID NO: 488831 - RNA, 19 nt, Artificial Sequence
  Description of Artificial Sequence: Synthetic oligonucleotide
gaguagcaguucuauaauc

SEQ ID NO: 488832 - RNA, 19 nt, Artificial Sequence
  Description of Artificial Sequence: Synthetic oligonucleotide
uacucggggaaguccuugg

SEQ ID NO: 488833 - RNA, 19 nt, Artificial Sequence
  Description of Artificial Sequence: Synthetic oligonucleotide
auaaccacucacaucaaau

SEQ ID NO: 488834 - RNA, 19 nt, Artificial Sequence
  Description of Artificial Sequence: Synthetic oligonucleotide
cuugauggugggauaacca

SEQ ID NO: 488835 - RNA, 19 nt, Artificial Sequence
  Description of Artificial Sequence: Synthetic oligonucleotide
cuuccuuaacuuccaaguc

SEQ ID NO: 488836 - RNA, 19 nt, Artificial Sequence
  Description of Artificial Sequence: Synthetic oligonucleotide
uucuauaaucaaagcugaa

SEQ ID NO: 488837 - RNA, 19 nt, Artificial Sequence
  Description of Artificial Sequence: Synthetic oligonucleotide
guagcugacaauuccauau

SEQ ID NO: 488838 - RNA, 19 nt, Artificial Sequence
  Description of Artificial Sequence: Synthetic oligonucleotide
cugugauuugaugacuggc

SEQ ID NO: 488839 - RNA, 19 nt, Artificial Sequence
  Description of Artificial Sequence: Synthetic oligonucleotide
uccacuacagugucugguc

SEQ ID NO: 488840 - RNA, 19 nt, Artificial Sequence
  Description of Artificial Sequence: Synthetic oligonucleotide
uacuuggacuggaauuucu

SEQ ID NO: 488841 - RNA, 19 nt, Artificial Sequence
  Description of Artificial Sequence: Synthetic oligonucleotide
ggugaaaucuguaaucuuc

SEQ ID NO: 488842 - RNA, 19 nt, Artificial Sequence
  Description of Artificial Sequence: Synthetic oligonucleotide
uucucaggcugcaucaaua

SEQ ID NO: 488843 - RNA, 19 nt, Artificial Sequence
  Description of Artificial Sequence: Synthetic oligonucleotide
augacuggcuuuaguuucc

SEQ ID NO: 488844 - RNA, 19 nt, Artificial Sequence
  Description of Artificial Sequence: Synthetic oligonucleotide
uggugccuaaugaugucca

SEQ ID NO: 488845 - RNA, 19 nt, Artificial Sequence
  Description of Artificial Sequence: Synthetic oligonucleotide
augagguggcacaacaaag

SEQ ID NO: 488846 - RNA, 19 nt, Artificial Sequence
  Description of Artificial Sequence: Synthetic oligonucleotide
ggaaacuucucugacuuug

SEQ ID NO: 488847 - RNA, 19 nt, Artificial Sequence
  Description of Artificial Sequence: Synthetic oligonucleotide
caucaauaccagcuucccc

SEQ ID NO: 488848 - RNA, 19 nt, Artificial Sequence
  Description of Artificial Sequence: Synthetic oligonucleotide
caccuuauaucggucauug

SEQ ID NO: 488849 - RNA, 19 nt, Artificial Sequence
  Description of Artificial Sequence: Synthetic oligonucleotide
cuguaguauacaaccacca

SEQ ID NO: 488850 - RNA, 19 nt, Artificial Sequence
  Description of Artificial Sequence: Synthetic oligonucleotide
ucuccauccuucaggaauu

SEQ ID NO: 488851 - RNA, 19 nt, Artificial Sequence
  Description of Artificial Sequence: Synthetic oligonucleotide
uaucggucauuggugaugu

SEQ ID NO: 488852 - RNA, 19 nt, Artificial Sequence
  Description of Artificial Sequence: Synthetic oligonucleotide
agauacugucauuguguug

SEQ ID NO: 488853 - RNA, 19 nt, Artificial Sequence
  Description of Artificial Sequence: Synthetic oligonucleotide
uucgguggcccaccagagg

SEQ ID NO: 488854 - RNA, 19 nt, Artificial Sequence
  Description of Artificial Sequence: Synthetic oligonucleotide
ugguguaccgcuuggcauc

SEQ ID NO: 488855 - RNA, 19 nt, Artificial Sequence
  Description of Artificial Sequence: Synthetic oligonucleotide
uuuguggcauguucaucga

SEQ ID NO: 488856 - RNA, 19 nt, Artificial Sequence
  Description of Artificial Sequence: Synthetic oligonucleotide
gggcaaaauagaugguggg

SEQ ID NO: 488857 - RNA, 19 nt, Artificial Sequence
  Description of Artificial Sequence: Synthetic oligonucleotide
uaucuuugucagcaacaaa

SEQ ID NO: 488858 - RNA, 19 nt, Artificial Sequence
  Description of Artificial Sequence: Synthetic oligonucleotide
cugacaauuccauauuucu

SEQ ID NO: 488859 - RNA, 19 nt, Artificial Sequence
  Description of Artificial Sequence: Synthetic oligonucleotide
auaucggucauuggugaug

SEQ ID NO: 488860 - RNA, 19 nt, Artificial Sequence
  Description of Artificial Sequence: Synthetic oligonucleotide
aaguuaucuuuagucaaua

SEQ ID NO: 488861 - RNA, 19 nt, Artificial Sequence
  Description of Artificial Sequence: Synthetic oligonucleotide
aucauguagcugacaauuc

SEQ ID NO: 488862 - RNA, 19 nt, Artificial Sequence
  Description of Artificial Sequence: Synthetic oligonucleotide
cacuacagugucugguccc

SEQ ID NO: 488863 - RNA, 19 nt, Artificial Sequence
  Description of Artificial Sequence: Synthetic oligonucleotide
gauaaccacucacaucaaa

SEQ ID NO: 488864 - RNA, 19 nt, Artificial Sequence
  Description of Artificial Sequence: Synthetic oligonucleotide
ucaaaucuacuggccagca

SEQ ID NO: 488865 - RNA, 19 nt, Artificial Sequence
  Description of Artificial Sequence: Synthetic oligonucleotide
ugggccauuguagucaaaa

SEQ ID NO: 488866 - RNA, 19 nt, Artificial Sequence
  Description of Artificial Sequence: Synthetic oligonucleotide
ucucucgugggccauugua

SEQ ID NO: 488867 - RNA, 19 nt, Artificial Sequence
  Description of Artificial Sequence: Synthetic oligonucleotide
cagaggcaaagcauguuuc

SEQ ID NO: 488868 - RNA, 19 nt, Artificial Sequence
  Description of Artificial Sequence: Synthetic oligonucleotide
acuuggacuggaauuucuc

SEQ ID NO: 488869 - RNA, 19 nt, Artificial Sequence
  Description of Artificial Sequence: Synthetic oligonucleotide
ugggauaaccacucacauc

SEQ ID NO: 488870 - RNA, 19 nt, Artificial Sequence
  Description of Artificial Sequence: Synthetic oligonucleotide
ccacccucaaauuuaacug

SEQ ID NO: 488871 - RNA, 19 nt, Artificial Sequence
  Description of Artificial Sequence: Synthetic oligonucleotide
ugcaucauuuaagaccaaa

SEQ ID NO: 488872 - RNA, 19 nt, Artificial Sequence
  Description of Artificial Sequence: Synthetic oligonucleotide
cugauacugcagauacccc

SEQ ID NO: 488873 - RNA, 19 nt, Artificial Sequence
  Description of Artificial Sequence: Synthetic oligonucleotide
cugauggcucuguggaacc

SEQ ID NO: 488874 - RNA, 19 nt, Artificial Sequence
  Description of Artificial Sequence: Synthetic oligonucleotide
ggcaaagguguacucgggg

SEQ ID NO: 488875 - RNA, 19 nt, Artificial Sequence
  Description of Artificial Sequence: Synthetic oligonucleotide
cuuaacuuccaagucaucu

SEQ ID NO: 488876 - RNA, 19 nt, Artificial Sequence
  Description of Artificial Sequence: Synthetic oligonucleotide
uccaccuuauaucggucau

SEQ ID NO: 488877 - RNA, 19 nt, Artificial Sequence
  Description of Artificial Sequence: Synthetic oligonucleotide
uguaaucuucucucagauu

SEQ ID NO: 488878 - RNA, 19 nt, Artificial Sequence
  Description of Artificial Sequence: Synthetic oligonucleotide
cauuguagucaaaaggccu

SEQ ID NO: 488879 - RNA, 19 nt, Artificial Sequence
  Description of Artificial Sequence: Synthetic oligonucleotide
ucgugggccauuguaguca

SEQ ID NO: 488880 - RNA, 19 nt, Artificial Sequence
  Description of Artificial Sequence: Synthetic oligonucleotide
cauucauggcuauucagua

SEQ ID NO: 488881 - RNA, 19 nt, Artificial Sequence
  Description of Artificial Sequence: Synthetic oligonucleotide
uauaucggucauuggugau

SEQ ID NO: 488882 - RNA, 19 nt, Artificial Sequence
  Description of Artificial Sequence: Synthetic oligonucleotide
uucuugccuagguuagugu

SEQ ID NO: 488883 - RNA, 19 nt, Artificial Sequence
  Description of Artificial Sequence: Synthetic oligonucleotide
caaugggagggucauuauc

SEQ ID NO: 488884 - RNA, 19 nt, Artificial Sequence
  Description of Artificial Sequence: Synthetic oligonucleotide
uugcuuggugccuaaugau

SEQ ID NO: 488885 - RNA, 19 nt, Artificial Sequence
  Description of Artificial Sequence: Synthetic oligonucleotide
ggacuggaauuucucaggc

SEQ ID NO: 488886 - RNA, 19 nt, Artificial Sequence
  Description of Artificial Sequence: Synthetic oligonucleotide
cauagucaacagccugucc

SEQ ID NO: 488887 - RNA, 19 nt, Artificial Sequence
  Description of Artificial Sequence: Synthetic oligonucleotide
uuggguauuggcugugauu

SEQ ID NO: 488888 - RNA, 19 nt, Artificial Sequence
  Description of Artificial Sequence: Synthetic oligonucleotide
acaaccaccagagggcgcu

SEQ ID NO: 488889 - RNA, 19 nt, Artificial Sequence
  Description of Artificial Sequence: Synthetic oligonucleotide
cacauaguccuuaauggcu

SEQ ID NO: 488890 - RNA, 19 nt, Artificial Sequence
  Description of Artificial Sequence: Synthetic oligonucleotide
caguguugaaaguguggug

SEQ ID NO: 488891 - RNA, 19 nt, Artificial Sequence
  Description of Artificial Sequence: Synthetic oligonucleotide
gcaguucuauaaucaaagc

SEQ ID NO: 488892 - RNA, 19 nt, Artificial Sequence
  Description of Artificial Sequence: Synthetic oligonucleotide
uuguuagcagcauccugau

SEQ ID NO: 488893 - RNA, 19 nt, Artificial Sequence
  Description of Artificial Sequence: Synthetic oligonucleotide
aacuccaguagcacuguau

SEQ ID NO: 488894 - RNA, 19 nt, Artificial Sequence
  Description of Artificial Sequence: Synthetic oligonucleotide
cugcauuauucacaacauc

SEQ ID NO: 488895 - RNA, 19 nt, Artificial Sequence
  Description of Artificial Sequence: Synthetic oligonucleotide
caugagguggcacaacaaa

SEQ ID NO: 488896 - RNA, 19 nt, Artificial Sequence
  Description of Artificial Sequence: Synthetic oligonucleotide
gauccaucacgauggcauc

SEQ ID NO: 488897 - RNA, 19 nt, Artificial Sequence
  Description of Artificial Sequence: Synthetic oligonucleotide
cuaaaggaauuggaggaga

SEQ ID NO: 488898 - RNA, 19 nt, Artificial Sequence
  Description of Artificial Sequence: Synthetic oligonucleotide
agcaaugggagggucauua

SEQ ID NO: 488899 - RNA, 19 nt, Artificial Sequence
  Description of Artificial Sequence: Synthetic oligonucleotide
cuugguguaccgcuuggca

SEQ ID NO: 488900 - RNA, 19 nt, Artificial Sequence
  Description of Artificial Sequence: Synthetic oligonucleotide
aguccacacuguaguauac

SEQ ID NO: 488901 - RNA, 19 nt, Artificial Sequence
  Description of Artificial Sequence: Synthetic oligonucleotide
caaacucccggagaguguc

SEQ ID NO: 488902 - RNA, 19 nt, Artificial Sequence
  Description of Artificial Sequence: Synthetic oligonucleotide
ucaucuaggauggcugcau

SEQ ID NO: 488903 - RNA, 19 nt, Artificial Sequence
  Description of Artificial Sequence: Synthetic oligonucleotide
ucucguauucaggggcaag

SEQ ID NO: 488904 - RNA, 19 nt, Artificial Sequence
  Description of Artificial Sequence: Synthetic oligonucleotide
uccagucaggcugggaaac

SEQ ID NO: 488905 - RNA, 19 nt, Artificial Sequence
  Description of Artificial Sequence: Synthetic oligonucleotide
uucaaagugcuggcaauuu

SEQ ID NO: 488906 - RNA, 19 nt, Artificial Sequence
  Description of Artificial Sequence: Synthetic oligonucleotide
uacaaccaccagagggcgc

SEQ ID NO: 488907 - RNA, 19 nt, Artificial Sequence
  Description of Artificial Sequence: Synthetic oligonucleotide
cuuuagucaauagaagcgu

SEQ ID NO: 488908 - RNA, 19 nt, Artificial Sequence
  Description of Artificial Sequence: Synthetic oligonucleotide
aucaagucauucauggcua

SEQ ID NO: 488909 - RNA, 19 nt, Artificial Sequence
  Description of Artificial Sequence: Synthetic oligonucleotide
guggcauguucaucgauaa

SEQ ID NO: 488910 - RNA, 19 nt, Artificial Sequence
  Description of Artificial Sequence: Synthetic oligonucleotide
uggugaaaucuguaaucuu

SEQ ID NO: 488911 - RNA, 19 nt, Artificial Sequence
  Description of Artificial Sequence: Synthetic oligonucleotide
guaccgcuuggcaucauug

SEQ ID NO: 488912 - RNA, 19 nt, Artificial Sequence
  Description of Artificial Sequence: Synthetic oligonucleotide
gcuaaaggaauuggaggag

SEQ ID NO: 488913 - RNA, 19 nt, Artificial Sequence
  Description of Artificial Sequence: Synthetic oligonucleotide
gcuauucaguauucagagc

SEQ ID NO: 488914 - RNA, 19 nt, Artificial Sequence
  Description of Artificial Sequence: Synthetic oligonucleotide
acugaguagcaguucuaua

SEQ ID NO: 488915 - RNA, 19 nt, Artificial Sequence
  Description of Artificial Sequence: Synthetic oligonucleotide
gucccuuguuguucuuggg

SEQ ID NO: 488916 - RNA, 19 nt, Artificial Sequence
  Description of Artificial Sequence: Synthetic oligonucleotide
gagggcgcuugguguaccg

SEQ ID NO: 488917 - RNA, 19 nt, Artificial Sequence
  Description of Artificial Sequence: Synthetic oligonucleotide
caucgauaaacuugcucaa

SEQ ID NO: 488918 - RNA, 19 nt, Artificial Sequence
  Description of Artificial Sequence: Synthetic oligonucleotide
uguaccgcuuggcaucauu

SEQ ID NO: 488919 - RNA, 19 nt, Artificial Sequence
  Description of Artificial Sequence: Synthetic oligonucleotide
aggacuuuguuacgccaaa

SEQ ID NO: 488920 - RNA, 19 nt, Artificial Sequence
  Description of Artificial Sequence: Synthetic oligonucleotide
cuucucguauucaggggca

SEQ ID NO: 488921 - RNA, 19 nt, Artificial Sequence
  Description of Artificial Sequence: Synthetic oligonucleotide
auuugaugacuggcuuuag

SEQ ID NO: 488922 - RNA, 19 nt, Artificial Sequence
  Description of Artificial Sequence: Synthetic oligonucleotide
guugaaaguguggugaaau

SEQ ID NO: 488923 - RNA, 19 nt, Artificial Sequence
  Description of Artificial Sequence: Synthetic oligonucleotide
caguagcacuguaucuuug

SEQ ID NO: 488924 - RNA, 19 nt, Artificial Sequence
  Description of Artificial Sequence: Synthetic oligonucleotide
gaccccaaugaugacuaca

SEQ ID NO: 488925 - RNA, 19 nt, Artificial Sequence
  Description of Artificial Sequence: Synthetic oligonucleotide
acuacagugucuggucccu

SEQ ID NO: 488926 - RNA, 19 nt, Artificial Sequence
  Description of Artificial Sequence: Synthetic oligonucleotide
guggugaaaucuguaaucu

SEQ ID NO: 488927 - RNA, 19 nt, Artificial Sequence
  Description of Artificial Sequence: Synthetic oligonucleotide
ccuaaugauguccacuaca

SEQ ID NO: 488928 - RNA, 19 nt, Artificial Sequence
  Description of Artificial Sequence: Synthetic oligonucleotide
cuccaccuuauaucgguca

SEQ ID NO: 488929 - RNA, 19 nt, Artificial Sequence
  Description of Artificial Sequence: Synthetic oligonucleotide
uuggcagccuucucguauu

SEQ ID NO: 488930 - RNA, 19 nt, Artificial Sequence
  Description of Artificial Sequence: Synthetic oligonucleotide
cuguucaguggcaucaacu

SEQ ID NO: 488931 - RNA, 19 nt, Artificial Sequence
  Description of Artificial Sequence: Synthetic oligonucleotide
gguauuggcugugauuuga

SEQ ID NO: 488932 - RNA, 19 nt, Artificial Sequence
  Description of Artificial Sequence: Synthetic oligonucleotide
uccaucacgauggcaucaa

SEQ ID NO: 488933 - RNA, 19 nt, Artificial Sequence
  Description of Artificial Sequence: Synthetic oligonucleotide
ucuuggguauuggcuguga

SEQ ID NO: 488934 - RNA, 19 nt, Artificial Sequence
  Description of Artificial Sequence: Synthetic oligonucleotide
uguuagcagcauccugaua

SEQ ID NO: 488935 - RNA, 19 nt, Artificial Sequence
  Description of Artificial Sequence: Synthetic oligonucleotide
ucagagcaugagguggcac

SEQ ID NO: 488936 - RNA, 19 nt, Artificial Sequence
  Description of Artificial Sequence: Synthetic oligonucleotide
aaacugaguagcaguucua

SEQ ID NO: 488937 - RNA, 19 nt, Artificial Sequence
  Description of Artificial Sequence: Synthetic oligonucleotide
uccuucacuucugucgcau

SEQ ID NO: 488938 - RNA, 19 nt, Artificial Sequence
  Description of Artificial Sequence: Synthetic oligonucleotide
ugcagauaccccgggucac

SEQ ID NO: 488939 - RNA, 19 nt, Artificial Sequence
  Description of Artificial Sequence: Synthetic oligonucleotide
uucagagcaugagguggca

SEQ ID NO: 488940 - RNA, 19 nt, Artificial Sequence
  Description of Artificial Sequence: Synthetic oligonucleotide
caccagagggcgcuuggug

SEQ ID NO: 488941 - RNA, 19 nt, Artificial Sequence
  Description of Artificial Sequence: Synthetic oligonucleotide
gggcaaguuucuugcagug

SEQ ID NO: 488942 - RNA, 19 nt, Artificial Sequence
  Description of Artificial Sequence: Synthetic oligonucleotide
cugcagauaccccggguca

SEQ ID NO: 488943 - RNA, 19 nt, Artificial Sequence
  Description of Artificial Sequence: Synthetic oligonucleotide
ugucucccugaaagacccc

SEQ ID NO: 488944 - RNA, 19 nt, Artificial Sequence
  Description of Artificial Sequence: Synthetic oligonucleotide
ccgcucucaucuaggaugg

SEQ ID NO: 488945 - RNA, 19 nt, Artificial Sequence
  Description of Artificial Sequence: Synthetic oligonucleotide
uccuuugagggaggcccag

SEQ ID NO: 488946 - RNA, 19 nt, Artificial Sequence
  Description of Artificial Sequence: Synthetic oligonucleotide
cugucuguucaguggcauc

SEQ ID NO: 488947 - RNA, 19 nt, Artificial Sequence
  Description of Artificial Sequence: Synthetic oligonucleotide
agggcgcuugguguaccgc

SEQ ID NO: 488948 - RNA, 19 nt, Artificial Sequence
  Description of Artificial Sequence: Synthetic oligonucleotide
uaauggcugauggcucugu

SEQ ID NO: 488949 - RNA, 19 nt, Artificial Sequence
  Description of Artificial Sequence: Synthetic oligonucleotide
aagcgugacuucaggugga

SEQ ID NO: 488950 - RNA, 19 nt, Artificial Sequence
  Description of Artificial Sequence: Synthetic oligonucleotide
uggcaucaacuuuggcuaa

SEQ ID NO: 488951 - RNA, 19 nt, Artificial Sequence
  Description of Artificial Sequence: Synthetic oligonucleotide
uaguguagaugggcuccag

SEQ ID NO: 488952 - RNA, 19 nt, Artificial Sequence
  Description of Artificial Sequence: Synthetic oligonucleotide
cauacuuggacuggaauuu

SEQ ID NO: 488953 - RNA, 19 nt, Artificial Sequence
  Description of Artificial Sequence: Synthetic oligonucleotide
ucguauucaggggcaaguu

SEQ ID NO: 488954 - RNA, 19 nt, Artificial Sequence
  Description of Artificial Sequence: Synthetic oligonucleotide
caggacuuuguuacgccaa

SEQ ID NO: 488955 - RNA, 19 nt, Artificial Sequence
  Description of Artificial Sequence: Synthetic oligonucleotide
gcugauggcucuguggaac

SEQ ID NO: 488956 - RNA, 19 nt, Artificial Sequence
  Description of Artificial Sequence: Synthetic oligonucleotide
cuucugucgcauaguccuc

SEQ ID NO: 488957 - RNA, 19 nt, Artificial Sequence
  Description of Artificial Sequence: Synthetic oligonucleotide
agaccaccaggccuuuaaa

SEQ ID NO: 488958 - RNA, 19 nt, Artificial Sequence
  Description of Artificial Sequence: Synthetic oligonucleotide
guguggugaaaucuguaau

SEQ ID NO: 488959 - RNA, 19 nt, Artificial Sequence
  Description of Artificial Sequence: Synthetic oligonucleotide
uagcuauuucaguguugaa

SEQ ID NO: 488960 - RNA, 19 nt, Artificial Sequence
  Description of Artificial Sequence: Synthetic oligonucleotide
agauaccccgggucacugu

SEQ ID NO: 488961 - RNA, 19 nt, Artificial Sequence
  Description of Artificial Sequence: Synthetic oligonucleotide
ggucauuauccuucaaagu

SEQ ID NO: 488962 - RNA, 19 nt, Artificial Sequence
  Description of Artificial Sequence: Synthetic oligonucleotide
ugggagggucauuauccuu

SEQ ID NO: 488963 - RNA, 19 nt, Artificial Sequence
  Description of Artificial Sequence: Synthetic oligonucleotide
ggagcaaacugcuugcaau

SEQ ID NO: 488964 - RNA, 19 nt, Artificial Sequence
  Description of Artificial Sequence: Synthetic oligonucleotide
gcuaugaccaaguccuucu

SEQ ID NO: 488965 - RNA, 19 nt, Artificial Sequence
  Description of Artificial Sequence: Synthetic oligonucleotide
cauggcuauucaguauuca

SEQ ID NO: 488966 - RNA, 19 nt, Artificial Sequence
  Description of Artificial Sequence: Synthetic oligonucleotide
gugauuugaugacuggcuu

SEQ ID NO: 488967 - RNA, 19 nt, Artificial Sequence
  Description of Artificial Sequence: Synthetic oligonucleotide
ccacuacagugucuggucc

SEQ ID NO: 488968 - RNA, 19 nt, Artificial Sequence
  Description of Artificial Sequence: Synthetic oligonucleotide
uauuucucucgugggccau

SEQ ID NO: 488969 - RNA, 19 nt, Artificial Sequence
  Description of Artificial Sequence: Synthetic oligonucleotide
ccagauugcucaaucaugu

SEQ ID NO: 488970 - RNA, 19 nt, Artificial Sequence
  Description of Artificial Sequence: Synthetic oligonucleotide
ugucagcaacaaaguuauc

SEQ ID NO: 488971 - RNA, 19 nt, Artificial Sequence
  Description of Artificial Sequence: Synthetic oligonucleotide
cugggcucauacuuggacu

SEQ ID NO: 488972 - RNA, 19 nt, Artificial Sequence
  Description of Artificial Sequence: Synthetic oligonucleotide
ugggguagccagagacauc

SEQ ID NO: 488973 - RNA, 19 nt, Artificial Sequence
  Description of Artificial Sequence: Synthetic oligonucleotide
acaaacucccggagagugu

SEQ ID NO: 488974 - RNA, 19 nt, Artificial Sequence
  Description of Artificial Sequence: Synthetic oligonucleotide
uucucguauucaggggcaa

SEQ ID NO: 488975 - RNA, 19 nt, Artificial Sequence
  Description of Artificial Sequence: Synthetic oligonucleotide
uucucucgugggccauugu

SEQ ID NO: 488976 - RNA, 19 nt, Artificial Sequence
  Description of Artificial Sequence: Synthetic oligonucleotide
gucuuucccacuaccaccu

SEQ ID NO: 488977 - RNA, 19 nt, Artificial Sequence
  Description of Artificial Sequence: Synthetic oligonucleotide
agcgugacuucagguggag

SEQ ID NO: 488978 - RNA, 19 nt, Artificial Sequence
  Description of Artificial Sequence: Synthetic oligonucleotide
caccuugacuggucccuug

SEQ ID NO: 488979 - RNA, 19 nt, Artificial Sequence
  Description of Artificial Sequence: Synthetic oligonucleotide
auaguccuuaauggcugau

SEQ ID NO: 488980 - RNA, 19 nt, Artificial Sequence
  Description of Artificial Sequence: Synthetic oligonucleotide
guccacacuguaguauaca

SEQ ID NO: 488981 - RNA, 19 nt, Artificial Sequence
  Description of Artificial Sequence: Synthetic oligonucleotide
gguggcacaacaaagcauu

SEQ ID NO: 488982 - RNA, 19 nt, Artificial Sequence
  Description of Artificial Sequence: Synthetic oligonucleotide
guccagucaggcugggaaa

SEQ ID NO: 488983 - RNA, 19 nt, Artificial Sequence
  Description of Artificial Sequence: Synthetic oligonucleotide
uggcagccuucucguauuc

SEQ ID NO: 488984 - RNA, 19 nt, Artificial Sequence
  Description of Artificial Sequence: Synthetic oligonucleotide
cucgccacucucacugaga

SEQ ID NO: 488985 - RNA, 19 nt, Artificial Sequence
  Description of Artificial Sequence: Synthetic oligonucleotide
acgccaaaacugaguagca

SEQ ID NO: 488986 - RNA, 19 nt, Artificial Sequence
  Description of Artificial Sequence: Synthetic oligonucleotide
cagauaccccgggucacug

SEQ ID NO: 488987 - RNA, 19 nt, Artificial Sequence
  Description of Artificial Sequence: Synthetic oligonucleotide
cuuggcagccuucucguau

SEQ ID NO: 488988 - RNA, 19 nt, Artificial Sequence
  Description of Artificial Sequence: Synthetic oligonucleotide
ccuccaggacuuuguuacg

SEQ ID NO: 488989 - RNA, 19 nt, Artificial Sequence
  Description of Artificial Sequence: Synthetic oligonucleotide
caaucauguagcugacaau

SEQ ID NO: 488990 - RNA, 19 nt, Artificial Sequence
  Description of Artificial Sequence: Synthetic oligonucleotide
guguacucggggaaguccu

SEQ ID NO: 488991 - RNA, 19 nt, Artificial Sequence
  Description of Artificial Sequence: Synthetic oligonucleotide
gcauguuucaccacauagu

SEQ ID NO: 488992 - RNA, 19 nt, Artificial Sequence
  Description of Artificial Sequence: Synthetic oligonucleotide
ucccggagagugucugcau

SEQ ID NO: 488993 - RNA, 19 nt, Artificial Sequence
  Description of Artificial Sequence: Synthetic oligonucleotide
gccuaaugauguccacuac

SEQ ID NO: 488994 - RNA, 19 nt, Artificial Sequence
  Description of Artificial Sequence: Synthetic oligonucleotide
cucguauucaggggcaagu

SEQ ID NO: 488995 - RNA, 19 nt, Artificial Sequence
  Description of Artificial Sequence: Synthetic oligonucleotide
gcacuguaucuuugucagc

SEQ ID NO: 488996 - RNA, 19 nt, Artificial Sequence
  Description of Artificial Sequence: Synthetic oligonucleotide
gugccuaaugauguccacu

SEQ ID NO: 488997 - RNA, 19 nt, Artificial Sequence
  Description of Artificial Sequence: Synthetic oligonucleotide
ggccuuuaaagcucuuccu

SEQ ID NO: 488998 - RNA, 19 nt, Artificial Sequence
  Description of Artificial Sequence: Synthetic oligonucleotide
cucccggagagugucugca

SEQ ID NO: 488999 - RNA, 19 nt, Artificial Sequence
  Description of Artificial Sequence: Synthetic oligonucleotide
gcuugguguaccgcuuggc

SEQ ID NO: 489000 - RNA, 19 nt, Artificial Sequence
  Description of Artificial Sequence: Synthetic oligonucleotide
ccauggagacuuucaagaa

SEQ ID NO: 489001 - RNA, 19 nt, Artificial Sequence
  Description of Artificial Sequence: Synthetic oligonucleotide
cuggagcaaacugcuugca

SEQ ID NO: 489002 - RNA, 19 nt, Artificial Sequence
  Description of Artificial Sequence: Synthetic oligonucleotide
gucgcauaguccuccucau

SEQ ID NO: 489003 - RNA, 19 nt, Artificial Sequence
  Description of Artificial Sequence: Synthetic oligonucleotide
cuuggguauuggcugugau

SEQ ID NO: 489004 - RNA, 19 nt, Artificial Sequence
  Description of Artificial Sequence: Synthetic oligonucleotide
cuucaaagugcuggcaauu

SEQ ID NO: 489005 - RNA, 19 nt, Artificial Sequence
  Description of Artificial Sequence: Synthetic oligonucleotide
ccuuaacuuccaagucauc

SEQ ID NO: 489006 - RNA, 19 nt, Artificial Sequence
  Description of Artificial Sequence: Synthetic oligonucleotide
gcgcuugguguaccgcuug

SEQ ID NO: 489007 - RNA, 19 nt, Artificial Sequence
  Description of Artificial Sequence: Synthetic oligonucleotide
gguguaccgcuuggcauca

SEQ ID NO: 489008 - RNA, 19 nt, Artificial Sequence
  Description of Artificial Sequence: Synthetic oligonucleotide
gcgugacuucagguggagg

SEQ ID NO: 489009 - RNA, 19 nt, Artificial Sequence
  Description of Artificial Sequence: Synthetic oligonucleotide
ccucaaugguauuuucugu

SEQ ID NO: 489010 - RNA, 19 nt, Artificial Sequence
  Description of Artificial Sequence: Synthetic oligonucleotide
ccuccaccuuauaucgguc

SEQ ID NO: 489011 - RNA, 19 nt, Artificial Sequence
  Description of Artificial Sequence: Synthetic oligonucleotide
ccccgggucacugucuccc

SEQ ID NO: 489012 - RNA, 19 nt, Artificial Sequence
  Description of Artificial Sequence: Synthetic oligonucleotide
cacucacaucaaaucuacu

SEQ ID NO: 489013 - RNA, 19 nt, Artificial Sequence
  Description of Artificial Sequence: Synthetic oligonucleotide
ccucaaauuuaacuggguu

SEQ ID NO: 489014 - RNA, 19 nt, Artificial Sequence
  Description of Artificial Sequence: Synthetic oligonucleotide
caaaucuacuggccagcau

SEQ ID NO: 489015 - RNA, 19 nt, Artificial Sequence
  Description of Artificial Sequence: Synthetic oligonucleotide
ccugaaagaccccaaugau

SEQ ID NO: 489016 - RNA, 19 nt, Artificial Sequence
  Description of Artificial Sequence: Synthetic oligonucleotide
ggacuuuguuacgccaaaa

SEQ ID NO: 489017 - RNA, 19 nt, Artificial Sequence
  Description of Artificial Sequence: Synthetic oligonucleotide
gcucucaucuaggauggcu

SEQ ID NO: 489018 - RNA, 19 nt, Artificial Sequence
  Description of Artificial Sequence: Synthetic oligonucleotide
gaauuggaggagagugcuu

SEQ ID NO: 489019 - RNA, 19 nt, Artificial Sequence
  Description of Artificial Sequence: Synthetic oligonucleotide
gcccuccaccuuauaucgg

SEQ ID NO: 489020 - RNA, 19 nt, Artificial Sequence
  Description of Artificial Sequence: Synthetic oligonucleotide
guucaucgauaaacuugcu

SEQ ID NO: 489021 - RNA, 19 nt, Artificial Sequence
  Description of Artificial Sequence: Synthetic oligonucleotide
gcaugagguggcacaacaa

SEQ ID NO: 489022 - RNA, 19 nt, Artificial Sequence
  Description of Artificial Sequence: Synthetic oligonucleotide
ggcaucaacuuuggcuaaa

SEQ ID NO: 489023 - RNA, 19 nt, Artificial Sequence
  Description of Artificial Sequence: Synthetic oligonucleotide
ggcugauggcucuguggaa

SEQ ID NO: 489024 - RNA, 19 nt, Artificial Sequence
  Description of Artificial Sequence: Synthetic oligonucleotide
gggcgcuugguguaccgcu

SEQ ID NO: 489025 - RNA, 19 nt, Artificial Sequence
  Description of Artificial Sequence: Synthetic oligonucleotide
guccuggagcccucauagu

SEQ ID NO: 489026 - RNA, 19 nt, Artificial Sequence
  Description of Artificial Sequence: Synthetic oligonucleotide
caucuaggauggcugcauu

SEQ ID NO: 489027 - RNA, 19 nt, Artificial Sequence
  Description of Artificial Sequence: Synthetic oligonucleotide
ggauaaccacucacaucaa

SEQ ID NO: 489028 - RNA, 19 nt, Artificial Sequence
  Description of Artificial Sequence: Synthetic oligonucleotide
cucugacuuuggcaacaau

SEQ ID NO: 489029 - RNA, 19 nt, Artificial Sequence
  Description of Artificial Sequence: Synthetic oligonucleotide
ccaguagcacuguaucuuu

SEQ ID NO: 489030 - RNA, 19 nt, Artificial Sequence
  Description of Artificial Sequence: Synthetic oligonucleotide
cagucaggcugggaaacuu

SEQ ID NO: 489031 - RNA, 19 nt, Artificial Sequence
  Description of Artificial Sequence: Synthetic oligonucleotide
cauugcuccugggcucaua

SEQ ID NO: 489032 - RNA, 19 nt, Artificial Sequence
  Description of Artificial Sequence: Synthetic oligonucleotide
cauugacguccucgccacu

SEQ ID NO: 489033 - RNA, 19 nt, Artificial Sequence
  Description of Artificial Sequence: Synthetic oligonucleotide
gcagauaccccgggucacu

SEQ ID NO: 489034 - RNA, 19 nt, Artificial Sequence
  Description of Artificial Sequence: Synthetic oligonucleotide
ccuuugagggaggcccaga

SEQ ID NO: 489035 - RNA, 19 nt, Artificial Sequence
  Description of Artificial Sequence: Synthetic oligonucleotide
cgugggccauuguagucaa

SEQ ID NO: 489036 - RNA, 19 nt, Artificial Sequence
  Description of Artificial Sequence: Synthetic oligonucleotide
guggcccaccagaggcaaa

SEQ ID NO: 489037 - RNA, 19 nt, Artificial Sequence
  Description of Artificial Sequence: Synthetic oligonucleotide
gugggccauuguagucaaa

SEQ ID NO: 489038 - RNA, 19 nt, Artificial Sequence
  Description of Artificial Sequence: Synthetic oligonucleotide
ggcgcuugguguaccgcuu

SEQ ID NO: 489039 - RNA, 19 nt, Artificial Sequence
  Description of Artificial Sequence: Synthetic oligonucleotide
ccaccuuauaucggucauu

SEQ ID NO: 489040 - RNA, 19 nt, Artificial Sequence
  Description of Artificial Sequence: Synthetic oligonucleotide
aaugaaugaaucccuuagc

SEQ ID NO: 489041 - RNA, 19 nt, Artificial Sequence
  Description of Artificial Sequence: Synthetic oligonucleotide
agaguuuguagccacaggc

SEQ ID NO: 489042 - RNA, 19 nt, Artificial Sequence
  Description of Artificial Sequence: Synthetic oligonucleotide
uuuggguucaugcacaaag

SEQ ID NO: 489043 - RNA, 19 nt, Artificial Sequence
  Description of Artificial Sequence: Synthetic oligonucleotide
gaaugaaucccuuagcacc

SEQ ID NO: 489044 - RNA, 19 nt, Artificial Sequence
  Description of Artificial Sequence: Synthetic oligonucleotide
agauuuaccagacaggucu

SEQ ID NO: 489045 - RNA, 19 nt, Artificial Sequence
  Description of Artificial Sequence: Synthetic oligonucleotide
uguauucugagauuuacca

SEQ ID NO: 489046 - RNA, 19 nt, Artificial Sequence
  Description of Artificial Sequence: Synthetic oligonucleotide
uugaaauugacugccagcg

SEQ ID NO: 489047 - RNA, 19 nt, Artificial Sequence
  Description of Artificial Sequence: Synthetic oligonucleotide
aaguuuaaguuccgguagc

SEQ ID NO: 489048 - RNA, 19 nt, Artificial Sequence
  Description of Artificial Sequence: Synthetic oligonucleotide
ugucacauaaacuuccaag

SEQ ID NO: 489049 - RNA, 19 nt, Artificial Sequence
  Description of Artificial Sequence: Synthetic oligonucleotide
uuuaaguuccgguagcgag

SEQ ID NO: 489050 - RNA, 19 nt, Artificial Sequence
  Description of Artificial Sequence: Synthetic oligonucleotide
acagaaaucacaucgauuu

SEQ ID NO: 489051 - RNA, 19 nt, Artificial Sequence
  Description of Artificial Sequence: Synthetic oligonucleotide
aacuaagcaagagaacagc

SEQ ID NO: 489052 - RNA, 19 nt, Artificial Sequence
  Description of Artificial Sequence: Synthetic oligonucleotide
acaauacaugauuuccucc

SEQ ID NO: 489053 - RNA, 19 nt, Artificial Sequence
  Description of Artificial Sequence: Synthetic oligonucleotide
uucauucccugccagaucc

SEQ ID NO: 489054 - RNA, 19 nt, Artificial Sequence
  Description of Artificial Sequence: Synthetic oligonucleotide
uuaaagcuggacaucuggg

SEQ ID NO: 489055 - RNA, 19 nt, Artificial Sequence
  Description of Artificial Sequence: Synthetic oligonucleotide
uucuaguacacguagcuug

SEQ ID NO: 489056 - RNA, 19 nt, Artificial Sequence
  Description of Artificial Sequence: Synthetic oligonucleotide
uuaaguuccgguagcgagg

SEQ ID NO: 489057 - RNA, 19 nt, Artificial Sequence
  Description of Artificial Sequence: Synthetic oligonucleotide
ucuauaguaacccggaauu

SEQ ID NO: 489058 - RNA, 19 nt, Artificial Sequence
  Description of Artificial Sequence: Synthetic oligonucleotide
uagaucucaaagaauguca

SEQ ID NO: 489059 - RNA, 19 nt, Artificial Sequence
  Description of Artificial Sequence: Synthetic oligonucleotide
aaauucccaguuuggaaag

SEQ ID NO: 489060 - RNA, 19 nt, Artificial Sequence
  Description of Artificial Sequence: Synthetic oligonucleotide
ucuaguacacguagcuugg

SEQ ID NO: 489061 - RNA, 19 nt, Artificial Sequence
  Description of Artificial Sequence: Synthetic oligonucleotide
uucacaauacaugauuucc

SEQ ID NO: 489062 - RNA, 19 nt, Artificial Sequence
  Description of Artificial Sequence: Synthetic oligonucleotide
agacgacuucauuugaagc

SEQ ID NO: 489063 - RNA, 19 nt, Artificial Sequence
  Description of Artificial Sequence: Synthetic oligonucleotide
ucuucuaguacacguagcu

SEQ ID NO: 489064 - RNA, 19 nt, Artificial Sequence
  Description of Artificial Sequence: Synthetic oligonucleotide
uaaucauccgggcaaauuc

SEQ ID NO: 489065 - RNA, 19 nt, Artificial Sequence
  Description of Artificial Sequence: Synthetic oligonucleotide
uucgaagaccuucuuuugg

SEQ ID NO: 489066 - RNA, 19 nt, Artificial Sequence
  Description of Artificial Sequence: Synthetic oligonucleotide
augcacaaagagcaaacac

SEQ ID NO: 489067 - RNA, 19 nt, Artificial Sequence
  Description of Artificial Sequence: Synthetic oligonucleotide
ucuuauuuccgaguucugg

SEQ ID NO: 489068 - RNA, 19 nt, Artificial Sequence
  Description of Artificial Sequence: Synthetic oligonucleotide
gcaaaaucgaagcagaaug

SEQ ID NO: 489069 - RNA, 19 nt, Artificial Sequence
  Description of Artificial Sequence: Synthetic oligonucleotide
aacccggaauucuuuaauc

SEQ ID NO: 489070 - RNA, 19 nt, Artificial Sequence
  Description of Artificial Sequence: Synthetic oligonucleotide
aguggaacggcuucgaaga

SEQ ID NO: 489071 - RNA, 19 nt, Artificial Sequence
  Description of Artificial Sequence: Synthetic oligonucleotide
caaugaaugaaucccuuag

SEQ ID NO: 489072 - RNA, 19 nt, Artificial Sequence
  Description of Artificial Sequence: Synthetic oligonucleotide
ugagauuuaccagacaggu

SEQ ID NO: 489073 - RNA, 19 nt, Artificial Sequence
  Description of Artificial Sequence: Synthetic oligonucleotide
aacgguaauucugucauug

SEQ ID NO: 489074 - RNA, 19 nt, Artificial Sequence
  Description of Artificial Sequence: Synthetic oligonucleotide
auuggaguuggcaaaaguc

SEQ ID NO: 489075 - RNA, 19 nt, Artificial Sequence
  Description of Artificial Sequence: Synthetic oligonucleotide
ucaucuguuugcuagccug

SEQ ID NO: 489076 - RNA, 19 nt, Artificial Sequence
  Description of Artificial Sequence: Synthetic oligonucleotide
aagaauuggaguuggcaaa

SEQ ID NO: 489077 - RNA, 19 nt, Artificial Sequence
  Description of Artificial Sequence: Synthetic oligonucleotide
caaaguuugcuggauaggg

SEQ ID NO: 489078 - RNA, 19 nt, Artificial Sequence
  Description of Artificial Sequence: Synthetic oligonucleotide
agaucaaacaccuucccau

SEQ ID NO: 489079 - RNA, 19 nt, Artificial Sequence
  Description of Artificial Sequence: Synthetic oligonucleotide
caaguuuaaguuccgguag

SEQ ID NO: 489080 - RNA, 19 nt, Artificial Sequence
  Description of Artificial Sequence: Synthetic oligonucleotide
uuggaguugacugaucugc

SEQ ID NO: 489081 - RNA, 19 nt, Artificial Sequence
  Description of Artificial Sequence: Synthetic oligonucleotide
uggacaugcgaguggaacg

SEQ ID NO: 489082 - RNA, 19 nt, Artificial Sequence
  Description of Artificial Sequence: Synthetic oligonucleotide
ucgcugaccaucgacaacg

SEQ ID NO: 489083 - RNA, 19 nt, Artificial Sequence
  Description of Artificial Sequence: Synthetic oligonucleotide
cuugaaauugacugccagc

SEQ ID NO: 489084 - RNA, 19 nt, Artificial Sequence
  Description of Artificial Sequence: Synthetic oligonucleotide
acaugauuuccuccgacag

SEQ ID NO: 489085 - RNA, 19 nt, Artificial Sequence
  Description of Artificial Sequence: Synthetic oligonucleotide
aaucgaagcagaaugccug

SEQ ID NO: 489086 - RNA, 19 nt, Artificial Sequence
  Description of Artificial Sequence: Synthetic oligonucleotide
ugaaugaaucccuuagcac

SEQ ID NO: 489087 - RNA, 19 nt, Artificial Sequence
  Description of Artificial Sequence: Synthetic oligonucleotide
gaagaauuggaguuggcaa

SEQ ID NO: 489088 - RNA, 19 nt, Artificial Sequence
  Description of Artificial Sequence: Synthetic oligonucleotide
aggcugacucuucagaagg

SEQ ID NO: 489089 - RNA, 19 nt, Artificial Sequence
  Description of Artificial Sequence: Synthetic oligonucleotide
agcgaggucccauuagagc

SEQ ID NO: 489090 - RNA, 19 nt, Artificial Sequence
  Description of Artificial Sequence: Synthetic oligonucleotide
auuugaauuggcugcucuc

SEQ ID NO: 489091 - RNA, 19 nt, Artificial Sequence
  Description of Artificial Sequence: Synthetic oligonucleotide
acggaauggggugugagcc

SEQ ID NO: 489092 - RNA, 19 nt, Artificial Sequence
  Description of Artificial Sequence: Synthetic oligonucleotide
uuugaauuggcugcucucc

SEQ ID NO: 489093 - RNA, 19 nt, Artificial Sequence
  Description of Artificial Sequence: Synthetic oligonucleotide
uagacgacuucauuugaag

SEQ ID NO: 489094 - RNA, 19 nt, Artificial Sequence
  Description of Artificial Sequence: Synthetic oligonucleotide
acaacgguaauucugucau

SEQ ID NO: 489095 - RNA, 19 nt, Artificial Sequence
  Description of Artificial Sequence: Synthetic oligonucleotide
ucgacaacgguaauucugu

SEQ ID NO: 489096 - RNA, 19 nt, Artificial Sequence
  Description of Artificial Sequence: Synthetic oligonucleotide
aaaguuugcuggauagggg

SEQ ID NO: 489097 - RNA, 19 nt, Artificial Sequence
  Description of Artificial Sequence: Synthetic oligonucleotide
aaaaucgucuguaccagug

SEQ ID NO: 489098 - RNA, 19 nt, Artificial Sequence
  Description of Artificial Sequence: Synthetic oligonucleotide
uauuuccgaguucugggcc

SEQ ID NO: 489099 - RNA, 19 nt, Artificial Sequence
  Description of Artificial Sequence: Synthetic oligonucleotide
aagugcuuagucugcuuag

SEQ ID NO: 489100 - RNA, 19 nt, Artificial Sequence
  Description of Artificial Sequence: Synthetic oligonucleotide
uuauuuccgaguucugggc

SEQ ID NO: 489101 - RNA, 19 nt, Artificial Sequence
  Description of Artificial Sequence: Synthetic oligonucleotide
uauaguaacccggaauucu

SEQ ID NO: 489102 - RNA, 19 nt, Artificial Sequence
  Description of Artificial Sequence: Synthetic oligonucleotide
auacaugauuuccuccgac

SEQ ID NO: 489103 - RNA, 19 nt, Artificial Sequence
  Description of Artificial Sequence: Synthetic oligonucleotide
gagaauuugccaugcaauc

SEQ ID NO: 489104 - RNA, 19 nt, Artificial Sequence
  Description of Artificial Sequence: Synthetic oligonucleotide
ucgcuuuauucuuauuucc

SEQ ID NO: 489105 - RNA, 19 nt, Artificial Sequence
  Description of Artificial Sequence: Synthetic oligonucleotide
ggcaauucgaaccucuggg

SEQ ID NO: 489106 - RNA, 19 nt, Artificial Sequence
  Description of Artificial Sequence: Synthetic oligonucleotide
uccccaaugaaugaauccc

SEQ ID NO: 489107 - RNA, 19 nt, Artificial Sequence
  Description of Artificial Sequence: Synthetic oligonucleotide
uuagucugcugagucaggg

SEQ ID NO: 489108 - RNA, 19 nt, Artificial Sequence
  Description of Artificial Sequence: Synthetic oligonucleotide
aaauugacugccagcgagg

SEQ ID NO: 489109 - RNA, 19 nt, Artificial Sequence
  Description of Artificial Sequence: Synthetic oligonucleotide
agaucucaaagaaugucac

SEQ ID NO: 489110 - RNA, 19 nt, Artificial Sequence
  Description of Artificial Sequence: Synthetic oligonucleotide
cuaagucauagucuggcug

SEQ ID NO: 489111 - RNA, 19 nt, Artificial Sequence
  Description of Artificial Sequence: Synthetic oligonucleotide
cuccaugcgagucuggcgg

SEQ ID NO: 489112 - RNA, 19 nt, Artificial Sequence
  Description of Artificial Sequence: Synthetic oligonucleotide
gaguggaacggcuucgaag

SEQ ID NO: 489113 - RNA, 19 nt, Artificial Sequence
  Description of Artificial Sequence: Synthetic oligonucleotide
accgaaaacugcuuucgag

SEQ ID NO: 489114 - RNA, 19 nt, Artificial Sequence
  Description of Artificial Sequence: Synthetic oligonucleotide
ccuaaccaaagccagaagg

SEQ ID NO: 489115 - RNA, 19 nt, Artificial Sequence
  Description of Artificial Sequence: Synthetic oligonucleotide
uuccguuuccauuugaauu

SEQ ID NO: 489116 - RNA, 19 nt, Artificial Sequence
  Description of Artificial Sequence: Synthetic oligonucleotide
aguacacguagcuuggccu

SEQ ID NO: 489117 - RNA, 19 nt, Artificial Sequence
  Description of Artificial Sequence: Synthetic oligonucleotide
uggaguugacugaucugcg

SEQ ID NO: 489118 - RNA, 19 nt, Artificial Sequence
  Description of Artificial Sequence: Synthetic oligonucleotide
acgguaauucugucauugc

SEQ ID NO: 489119 - RNA, 19 nt, Artificial Sequence
  Description of Artificial Sequence: Synthetic oligonucleotide
auguauucugagauuuacc

SEQ ID NO: 489120 - RNA, 19 nt, Artificial Sequence
  Description of Artificial Sequence: Synthetic oligonucleotide
gaguaagugggugacauuc

SEQ ID NO: 489121 - RNA, 19 nt, Artificial Sequence
  Description of Artificial Sequence: Synthetic oligonucleotide
ucgaagaccuucuuuugga

SEQ ID NO: 489122 - RNA, 19 nt, Artificial Sequence
  Description of Artificial Sequence: Synthetic oligonucleotide
cuguagacgacuucauuug

SEQ ID NO: 489123 - RNA, 19 nt, Artificial Sequence
  Description of Artificial Sequence: Synthetic oligonucleotide
aggcuggugugacauaaac

SEQ ID NO: 489124 - RNA, 19 nt, Artificial Sequence
  Description of Artificial Sequence: Synthetic oligonucleotide
acacacgcagauccugugc

SEQ ID NO: 489125 - RNA, 19 nt, Artificial Sequence
  Description of Artificial Sequence: Synthetic oligonucleotide
cacuagaagugucagcccc

SEQ ID NO: 489126 - RNA, 19 nt, Artificial Sequence
  Description of Artificial Sequence: Synthetic oligonucleotide
agcagaaugccugauucuc

SEQ ID NO: 489127 - RNA, 19 nt, Artificial Sequence
  Description of Artificial Sequence: Synthetic oligonucleotide
uaguacacguagcuuggcc

SEQ ID NO: 489128 - RNA, 19 nt, Artificial Sequence
  Description of Artificial Sequence: Synthetic oligonucleotide
cucgcuuuauucuuauuuc

SEQ ID NO: 489129 - RNA, 19 nt, Artificial Sequence
  Description of Artificial Sequence: Synthetic oligonucleotide
aagugggugacauucuaua

SEQ ID NO: 489130 - RNA, 19 nt, Artificial Sequence
  Description of Artificial Sequence: Synthetic oligonucleotide
uggggugugagccuuguuc

SEQ ID NO: 489131 - RNA, 19 nt, Artificial Sequence
  Description of Artificial Sequence: Synthetic oligonucleotide
uguagacgacuucauuuga

SEQ ID NO: 489132 - RNA, 19 nt, Artificial Sequence
  Description of Artificial Sequence: Synthetic oligonucleotide
ugggugacauucuauagua

SEQ ID NO: 489133 - RNA, 19 nt, Artificial Sequence
  Description of Artificial Sequence: Synthetic oligonucleotide
caugauuuccuccgacagg

SEQ ID NO: 489134 - RNA, 19 nt, Artificial Sequence
  Description of Artificial Sequence: Synthetic oligonucleotide
ucuugcuuauucagugggc

SEQ ID NO: 489135 - RNA, 19 nt, Artificial Sequence
  Description of Artificial Sequence: Synthetic oligonucleotide
aguuuaaguuccgguagcg

SEQ ID NO: 489136 - RNA, 19 nt, Artificial Sequence
  Description of Artificial Sequence: Synthetic oligonucleotide
agaagugucagccccucgu

SEQ ID NO: 489137 - RNA, 19 nt, Artificial Sequence
  Description of Artificial Sequence: Synthetic oligonucleotide
ucucgcagggcugagaagu

SEQ ID NO: 489138 - RNA, 19 nt, Artificial Sequence
  Description of Artificial Sequence: Synthetic oligonucleotide
guugcauggccacacgcag

SEQ ID NO: 489139 - RNA, 19 nt, Artificial Sequence
  Description of Artificial Sequence: Synthetic oligonucleotide
ugcccgucugcccauaggc

SEQ ID NO: 489140 - RNA, 19 nt, Artificial Sequence
  Description of Artificial Sequence: Synthetic oligonucleotide
gcguguuuaaaguauauuc

SEQ ID NO: 489141 - RNA, 19 nt, Artificial Sequence
  Description of Artificial Sequence: Synthetic oligonucleotide
uucccugccagauccacca

SEQ ID NO: 489142 - RNA, 19 nt, Artificial Sequence
  Description of Artificial Sequence: Synthetic oligonucleotide
agauccaccaaggagaauu

SEQ ID NO: 489143 - RNA, 19 nt, Artificial Sequence
  Description of Artificial Sequence: Synthetic oligonucleotide
aggagcuuaugccugguga

SEQ ID NO: 489144 - RNA, 19 nt, Artificial Sequence
  Description of Artificial Sequence: Synthetic oligonucleotide
uugaauuggcugcucucca

SEQ ID NO: 489145 - RNA, 19 nt, Artificial Sequence
  Description of Artificial Sequence: Synthetic oligonucleotide
aacugcuuucgagaguuug

SEQ ID NO: 489146 - RNA, 19 nt, Artificial Sequence
  Description of Artificial Sequence: Synthetic oligonucleotide
cuuuagauguauucugaga

SEQ ID NO: 489147 - RNA, 19 nt, Artificial Sequence
  Description of Artificial Sequence: Synthetic oligonucleotide
aagcagaaugccugauucu

SEQ ID NO: 489148 - RNA, 19 nt, Artificial Sequence
  Description of Artificial Sequence: Synthetic oligonucleotide
gacaacgguaauucuguca

SEQ ID NO: 489149 - RNA, 19 nt, Artificial Sequence
  Description of Artificial Sequence: Synthetic oligonucleotide
cauucuauaguaacccgga

SEQ ID NO: 489150 - RNA, 19 nt, Artificial Sequence
  Description of Artificial Sequence: Synthetic oligonucleotide
gcuuucgagaguuuguagc

SEQ ID NO: 489151 - RNA, 19 nt, Artificial Sequence
  Description of Artificial Sequence: Synthetic oligonucleotide
caaccgaaaacugcuuucg

SEQ ID NO: 489152 - RNA, 19 nt, Artificial Sequence
  Description of Artificial Sequence: Synthetic oligonucleotide
cuccccaaugaaugaaucc

SEQ ID NO: 489153 - RNA, 19 nt, Artificial Sequence
  Description of Artificial Sequence: Synthetic oligonucleotide
gcauagaucccuuuagaug

SEQ ID NO: 489154 - RNA, 19 nt, Artificial Sequence
  Description of Artificial Sequence: Synthetic oligonucleotide
aagcagucaugaaaagcuc

SEQ ID NO: 489155 - RNA, 19 nt, Artificial Sequence
  Description of Artificial Sequence: Synthetic oligonucleotide
uuagauguauucugagauu

SEQ ID NO: 489156 - RNA, 19 nt, Artificial Sequence
  Description of Artificial Sequence: Synthetic oligonucleotide
cuuagucugcuuagucugc

SEQ ID NO: 489157 - RNA, 19 nt, Artificial Sequence
  Description of Artificial Sequence: Synthetic oligonucleotide
uucgagaguuuguagccac

SEQ ID NO: 489158 - RNA, 19 nt, Artificial Sequence
  Description of Artificial Sequence: Synthetic oligonucleotide
aauugacugccagcgaggu

SEQ ID NO: 489159 - RNA, 19 nt, Artificial Sequence
  Description of Artificial Sequence: Synthetic oligonucleotide
ugugcucuuccguaggauc

SEQ ID NO: 489160 - RNA, 19 nt, Artificial Sequence
  Description of Artificial Sequence: Synthetic oligonucleotide
aucgacaacgguaauucug

SEQ ID NO: 489161 - RNA, 19 nt, Artificial Sequence
  Description of Artificial Sequence: Synthetic oligonucleotide
uaacccggaauucuuuaau

SEQ ID NO: 489162 - RNA, 19 nt, Artificial Sequence
  Description of Artificial Sequence: Synthetic oligonucleotide
aaccgaaaacugcuuucga

SEQ ID NO: 489163 - RNA, 19 nt, Artificial Sequence
  Description of Artificial Sequence: Synthetic oligonucleotide
ucccauuagagcuggcuuc

SEQ ID NO: 489164 - RNA, 19 nt, Artificial Sequence
  Description of Artificial Sequence: Synthetic oligonucleotide
gcucaagccagccuggucc

SEQ ID NO: 489165 - RNA, 19 nt, Artificial Sequence
  Description of Artificial Sequence: Synthetic oligonucleotide
ucugcauaucucagcgugu

SEQ ID NO: 489166 - RNA, 19 nt, Artificial Sequence
  Description of Artificial Sequence: Synthetic oligonucleotide
uaagugggugacauucuau

SEQ ID NO: 489167 - RNA, 19 nt, Artificial Sequence
  Description of Artificial Sequence: Synthetic oligonucleotide
cuggguuuauugcagccac

SEQ ID NO: 489168 - RNA, 19 nt, Artificial Sequence
  Description of Artificial Sequence: Synthetic oligonucleotide
aguucuggguuuauugcag

SEQ ID NO: 489169 - RNA, 19 nt, Artificial Sequence
  Description of Artificial Sequence: Synthetic oligonucleotide
ugcuuauucagugggcgcu

SEQ ID NO: 489170 - RNA, 19 nt, Artificial Sequence
  Description of Artificial Sequence: Synthetic oligonucleotide
ucagcguguuuaaaguaua

SEQ ID NO: 489171 - RNA, 19 nt, Artificial Sequence
  Description of Artificial Sequence: Synthetic oligonucleotide
acuaagcaagagaacagca

SEQ ID NO: 489172 - RNA, 19 nt, Artificial Sequence
  Description of Artificial Sequence: Synthetic oligonucleotide
aucauccgggcaaauuccc

SEQ ID NO: 489173 - RNA, 19 nt, Artificial Sequence
  Description of Artificial Sequence: Synthetic oligonucleotide
ugaauuggcugcucuccac

SEQ ID NO: 489174 - RNA, 19 nt, Artificial Sequence
  Description of Artificial Sequence: Synthetic oligonucleotide
ggcucgaagaagaaucugg

SEQ ID NO: 489175 - RNA, 19 nt, Artificial Sequence
  Description of Artificial Sequence: Synthetic oligonucleotide
uggcggucagcacuagaag

SEQ ID NO: 489176 - RNA, 19 nt, Artificial Sequence
  Description of Artificial Sequence: Synthetic oligonucleotide
cugaccaucgacaacggua

SEQ ID NO: 489177 - RNA, 19 nt, Artificial Sequence
  Description of Artificial Sequence: Synthetic oligonucleotide
ucggaacuguuacauuuuc

SEQ ID NO: 489178 - RNA, 19 nt, Artificial Sequence
  Description of Artificial Sequence: Synthetic oligonucleotide
uuuaccagacaggucucca

SEQ ID NO: 489179 - RNA, 19 nt, Artificial Sequence
  Description of Artificial Sequence: Synthetic oligonucleotide
cuaagcaagagaacagcaa

SEQ ID NO: 489180 - RNA, 19 nt, Artificial Sequence
  Description of Artificial Sequence: Synthetic oligonucleotide
gcaaucucccuuuggcucg

SEQ ID NO: 489181 - RNA, 19 nt, Artificial Sequence
  Description of Artificial Sequence: Synthetic oligonucleotide
auuuccuccgacaggguug

SEQ ID NO: 489182 - RNA, 19 nt, Artificial Sequence
  Description of Artificial Sequence: Synthetic oligonucleotide
gcaaucaugcaaguccucg

SEQ ID NO: 489183 - RNA, 19 nt, Artificial Sequence
  Description of Artificial Sequence: Synthetic oligonucleotide
ucuguuugcuagccuguuc

SEQ ID NO: 489184 - RNA, 19 nt, Artificial Sequence
  Description of Artificial Sequence: Synthetic oligonucleotide
ggagcuuaugccuggugag

SEQ ID NO: 489185 - RNA, 19 nt, Artificial Sequence
  Description of Artificial Sequence: Synthetic oligonucleotide
auauuccugagcucgcuuu

SEQ ID NO: 489186 - RNA, 19 nt, Artificial Sequence
  Description of Artificial Sequence: Synthetic oligonucleotide
gcugugaaccuguagacga

SEQ ID NO: 489187 - RNA, 19 nt, Artificial Sequence
  Description of Artificial Sequence: Synthetic oligonucleotide
agucccuaaccaaagccag

SEQ ID NO: 489188 - RNA, 19 nt, Artificial Sequence
  Description of Artificial Sequence: Synthetic oligonucleotide
augcgaguggaacggcuuc

SEQ ID NO: 489189 - RNA, 19 nt, Artificial Sequence
  Description of Artificial Sequence: Synthetic oligonucleotide
ugaaucccuuagcaccuga

SEQ ID NO: 489190 - RNA, 19 nt, Artificial Sequence
  Description of Artificial Sequence: Synthetic oligonucleotide
ucucagcguguuuaaagua

SEQ ID NO: 489191 - RNA, 19 nt, Artificial Sequence
  Description of Artificial Sequence: Synthetic oligonucleotide
cuuagucugcugagucagg

SEQ ID NO: 489192 - RNA, 19 nt, Artificial Sequence
  Description of Artificial Sequence: Synthetic oligonucleotide
acuuugucaaguccacuuu

SEQ ID NO: 489193 - RNA, 19 nt, Artificial Sequence
  Description of Artificial Sequence: Synthetic oligonucleotide
agaucauggcaaucaugca

SEQ ID NO: 489194 - RNA, 19 nt, Artificial Sequence
  Description of Artificial Sequence: Synthetic oligonucleotide
cacggaauggggugugagc

SEQ ID NO: 489195 - RNA, 19 nt, Artificial Sequence
  Description of Artificial Sequence: Synthetic oligonucleotide
agucuggcugaucagucau

SEQ ID NO: 489196 - RNA, 19 nt, Artificial Sequence
  Description of Artificial Sequence: Synthetic oligonucleotide
auugacugccagcgagguc

SEQ ID NO: 489197 - RNA, 19 nt, Artificial Sequence
  Description of Artificial Sequence: Synthetic oligonucleotide
uugccaugcaaucucccuu

SEQ ID NO: 489198 - RNA, 19 nt, Artificial Sequence
  Description of Artificial Sequence: Synthetic oligonucleotide
gaguuuguagccacaggca

SEQ ID NO: 489199 - RNA, 19 nt, Artificial Sequence
  Description of Artificial Sequence: Synthetic oligonucleotide
ugggcgcuuccucacacac

SEQ ID NO: 489200 - RNA, 19 nt, Artificial Sequence
  Description of Artificial Sequence: Synthetic oligonucleotide
guaccaguggccuugcugu

SEQ ID NO: 489201 - RNA, 19 nt, Artificial Sequence
  Description of Artificial Sequence: Synthetic oligonucleotide
augugcuucgggugggaug

SEQ ID NO: 489202 - RNA, 19 nt, Artificial Sequence
  Description of Artificial Sequence: Synthetic oligonucleotide
cuauaguaacccggaauuc

SEQ ID NO: 489203 - RNA, 19 nt, Artificial Sequence
  Description of Artificial Sequence: Synthetic oligonucleotide
ugagcucgcuuuauucuua

SEQ ID NO: 489204 - RNA, 19 nt, Artificial Sequence
  Description of Artificial Sequence: Synthetic oligonucleotide
cucuccgagucuuccuggg

SEQ ID NO: 489205 - RNA, 19 nt, Artificial Sequence
  Description of Artificial Sequence: Synthetic oligonucleotide
ucgagaguuuguagccaca

SEQ ID NO: 489206 - RNA, 19 nt, Artificial Sequence
  Description of Artificial Sequence: Synthetic oligonucleotide
ucacggaauggggugugag

SEQ ID NO: 489207 - RNA, 19 nt, Artificial Sequence
  Description of Artificial Sequence: Synthetic oligonucleotide
cucgaguucuccccaauga

SEQ ID NO: 489208 - RNA, 19 nt, Artificial Sequence
  Description of Artificial Sequence: Synthetic oligonucleotide
agcuugcucucacggaaug

SEQ ID NO: 489209 - RNA, 19 nt, Artificial Sequence
  Description of Artificial Sequence: Synthetic oligonucleotide
cagaaugccugauucucca

SEQ ID NO: 489210 - RNA, 19 nt, Artificial Sequence
  Description of Artificial Sequence: Synthetic oligonucleotide
cguaggaucagucagagua

SEQ ID NO: 489211 - RNA, 19 nt, Artificial Sequence
  Description of Artificial Sequence: Synthetic oligonucleotide
ggacaugcgaguggaacgg

SEQ ID NO: 489212 - RNA, 19 nt, Artificial Sequence
  Description of Artificial Sequence: Synthetic oligonucleotide
auuggcugcucuccacuga

SEQ ID NO: 489213 - RNA, 19 nt, Artificial Sequence
  Description of Artificial Sequence: Synthetic oligonucleotide
uggguuuauugcagccaca

SEQ ID NO: 489214 - RNA, 19 nt, Artificial Sequence
  Description of Artificial Sequence: Synthetic oligonucleotide
uaguaacccggaauucuuu

SEQ ID NO: 489215 - RNA, 19 nt, Artificial Sequence
  Description of Artificial Sequence: Synthetic oligonucleotide
gcaauucucucuccgaguc

SEQ ID NO: 489216 - RNA, 19 nt, Artificial Sequence
  Description of Artificial Sequence: Synthetic oligonucleotide
ggugggauggacuugcucu

SEQ ID NO: 489217 - RNA, 19 nt, Artificial Sequence
  Description of Artificial Sequence: Synthetic oligonucleotide
cagcgaggucccauuagag

SEQ ID NO: 489218 - RNA, 19 nt, Artificial Sequence
  Description of Artificial Sequence: Synthetic oligonucleotide
aguugcauggccacacgca

SEQ ID NO: 489219 - RNA, 19 nt, Artificial Sequence
  Description of Artificial Sequence: Synthetic oligonucleotide
cuuaccuggcauuuaccaa

SEQ ID NO: 489220 - RNA, 19 nt, Artificial Sequence
  Description of Artificial Sequence: Synthetic oligonucleotide
ggaagaauuggaguuggca

SEQ ID NO: 489221 - RNA, 19 nt, Artificial Sequence
  Description of Artificial Sequence: Synthetic oligonucleotide
guggacaugcgaguggaac

SEQ ID NO: 489222 - RNA, 19 nt, Artificial Sequence
  Description of Artificial Sequence: Synthetic oligonucleotide
caaucaugcaaguccucga

SEQ ID NO: 489223 - RNA, 19 nt, Artificial Sequence
  Description of Artificial Sequence: Synthetic oligonucleotide
ugucugcauaucucagcgu

SEQ ID NO: 489224 - RNA, 19 nt, Artificial Sequence
  Description of Artificial Sequence: Synthetic oligonucleotide
cugugaaccuguagacgac

SEQ ID NO: 489225 - RNA, 19 nt, Artificial Sequence
  Description of Artificial Sequence: Synthetic oligonucleotide
uuuggguguaagggaagaa

SEQ ID NO: 489226 - RNA, 19 nt, Artificial Sequence
  Description of Artificial Sequence: Synthetic oligonucleotide
ccuugaaauugacugccag

SEQ ID NO: 489227 - RNA, 19 nt, Artificial Sequence
  Description of Artificial Sequence: Synthetic oligonucleotide
uugcuucggaacuguuaca

SEQ ID NO: 489228 - RNA, 19 nt, Artificial Sequence
  Description of Artificial Sequence: Synthetic oligonucleotide
agugcuuagucugcuuagu

SEQ ID NO: 489229 - RNA, 19 nt, Artificial Sequence
  Description of Artificial Sequence: Synthetic oligonucleotide
acguagcuuggccuucuug

SEQ ID NO: 489230 - RNA, 19 nt, Artificial Sequence
  Description of Artificial Sequence: Synthetic oligonucleotide
ucagaguaagugggugaca

SEQ ID NO: 489231 - RNA, 19 nt, Artificial Sequence
  Description of Artificial Sequence: Synthetic oligonucleotide
ucuggcggucagcacuaga

SEQ ID NO: 489232 - RNA, 19 nt, Artificial Sequence
  Description of Artificial Sequence: Synthetic oligonucleotide
cuggcggucagcacuagaa

SEQ ID NO: 489233 - RNA, 19 nt, Artificial Sequence
  Description of Artificial Sequence: Synthetic oligonucleotide
cucuuccguaggaucaguc

SEQ ID NO: 489234 - RNA, 19 nt, Artificial Sequence
  Description of Artificial Sequence: Synthetic oligonucleotide
aguaagugggugacauucu

SEQ ID NO: 489235 - RNA, 19 nt, Artificial Sequence
  Description of Artificial Sequence: Synthetic oligonucleotide
auaggcaaagcagguugcu

SEQ ID NO: 489236 - RNA, 19 nt, Artificial Sequence
  Description of Artificial Sequence: Synthetic oligonucleotide
guaacccggaauucuuuaa

SEQ ID NO: 489237 - RNA, 19 nt, Artificial Sequence
  Description of Artificial Sequence: Synthetic oligonucleotide
agcgcccugaugcacuccu

SEQ ID NO: 489238 - RNA, 19 nt, Artificial Sequence
  Description of Artificial Sequence: Synthetic oligonucleotide
cauaucucagcguguuuaa

SEQ ID NO: 489239 - RNA, 19 nt, Artificial Sequence
  Description of Artificial Sequence: Synthetic oligonucleotide
gugggugacauucuauagu

SEQ ID NO: 489240 - RNA, 19 nt, Artificial Sequence
  Description of Artificial Sequence: Synthetic oligonucleotide
auaguaacccggaauucuu

SEQ ID NO: 489241 - RNA, 19 nt, Artificial Sequence
  Description of Artificial Sequence: Synthetic oligonucleotide
cacacacgcagauccugug

SEQ ID NO: 489242 - RNA, 19 nt, Artificial Sequence
  Description of Artificial Sequence: Synthetic oligonucleotide
guaagugggugacauucua

SEQ ID NO: 489243 - RNA, 19 nt, Artificial Sequence
  Description of Artificial Sequence: Synthetic oligonucleotide
uuuaaucauccgggcaaau

SEQ ID NO: 489244 - RNA, 19 nt, Artificial Sequence
  Description of Artificial Sequence: Synthetic oligonucleotide
ccaucgacaacgguaauuc

SEQ ID NO: 489245 - RNA, 19 nt, Artificial Sequence
  Description of Artificial Sequence: Synthetic oligonucleotide
guuuaaguuccgguagcga

SEQ ID NO: 489246 - RNA, 19 nt, Artificial Sequence
  Description of Artificial Sequence: Synthetic oligonucleotide
guuugcuagccuguucuuc

SEQ ID NO: 489247 - RNA, 19 nt, Artificial Sequence
  Description of Artificial Sequence: Synthetic oligonucleotide
cuucucgcagggcugagaa

SEQ ID NO: 489248 - RNA, 19 nt, Artificial Sequence
  Description of Artificial Sequence: Synthetic oligonucleotide
ccaaggagaauuugccaug

SEQ ID NO: 489249 - RNA, 19 nt, Artificial Sequence
  Description of Artificial Sequence: Synthetic oligonucleotide
ucccgggaagccauugcau

SEQ ID NO: 489250 - RNA, 19 nt, Artificial Sequence
  Description of Artificial Sequence: Synthetic oligonucleotide
caucccgggaagccauugc

SEQ ID NO: 489251 - RNA, 19 nt, Artificial Sequence
  Description of Artificial Sequence: Synthetic oligonucleotide
ccgaaaacugcuuucgaga

SEQ ID NO: 489252 - RNA, 19 nt, Artificial Sequence
  Description of Artificial Sequence: Synthetic oligonucleotide
gcaaccgaaaacugcuuuc

SEQ ID NO: 489253 - RNA, 19 nt, Artificial Sequence
  Description of Artificial Sequence: Synthetic oligonucleotide
acuagaagugucagccccu

SEQ ID NO: 489254 - RNA, 19 nt, Artificial Sequence
  Description of Artificial Sequence: Synthetic oligonucleotide
cuaguacacguagcuuggc

SEQ ID NO: 489255 - RNA, 19 nt, Artificial Sequence
  Description of Artificial Sequence: Synthetic oligonucleotide
ugagcagaucaaacaccuu

SEQ ID NO: 489256 - RNA, 19 nt, Artificial Sequence
  Description of Artificial Sequence: Synthetic oligonucleotide
agcguguuuaaaguauauu

SEQ ID NO: 489257 - RNA, 19 nt, Artificial Sequence
  Description of Artificial Sequence: Synthetic oligonucleotide
gugacauaaacagaucuuu

SEQ ID NO: 489258 - RNA, 19 nt, Artificial Sequence
  Description of Artificial Sequence: Synthetic oligonucleotide
gcucucacggaauggggug

SEQ ID NO: 489259 - RNA, 19 nt, Artificial Sequence
  Description of Artificial Sequence: Synthetic oligonucleotide
ggcugaucagucaucucag

SEQ ID NO: 489260 - RNA, 19 nt, Artificial Sequence
  Description of Artificial Sequence: Synthetic oligonucleotide
ccuuaccuggcauuuacca

SEQ ID NO: 489261 - RNA, 19 nt, Artificial Sequence
  Description of Artificial Sequence: Synthetic oligonucleotide
uaccaguggccuugcugug

SEQ ID NO: 489262 - RNA, 19 nt, Artificial Sequence
  Description of Artificial Sequence: Synthetic oligonucleotide
cucagcguguuuaaaguau

SEQ ID NO: 489263 - RNA, 19 nt, Artificial Sequence
  Description of Artificial Sequence: Synthetic oligonucleotide
uagaaguucuggguuuauu

SEQ ID NO: 489264 - RNA, 19 nt, Artificial Sequence
  Description of Artificial Sequence: Synthetic oligonucleotide
gagcgggaagaauuggagu

SEQ ID NO: 489265 - RNA, 19 nt, Artificial Sequence
  Description of Artificial Sequence: Synthetic oligonucleotide
caggcaugggagcgggaag

SEQ ID NO: 489266 - RNA, 19 nt, Artificial Sequence
  Description of Artificial Sequence: Synthetic oligonucleotide
guagacgacuucauuugaa

SEQ ID NO: 489267 - RNA, 19 nt, Artificial Sequence
  Description of Artificial Sequence: Synthetic oligonucleotide
ccaaguuuaaguuccggua

SEQ ID NO: 489268 - RNA, 19 nt, Artificial Sequence
  Description of Artificial Sequence: Synthetic oligonucleotide
cauuugaauuggcugcucu

SEQ ID NO: 489269 - RNA, 19 nt, Artificial Sequence
  Description of Artificial Sequence: Synthetic oligonucleotide
cuagaagugucagccccuc

SEQ ID NO: 489270 - RNA, 19 nt, Artificial Sequence
  Description of Artificial Sequence: Synthetic oligonucleotide
accaucgacaacgguaauu

SEQ ID NO: 489271 - RNA, 19 nt, Artificial Sequence
  Description of Artificial Sequence: Synthetic oligonucleotide
guaggaucagucagaguaa

SEQ ID NO: 489272 - RNA, 19 nt, Artificial Sequence
  Description of Artificial Sequence: Synthetic oligonucleotide
ugaugacuucucgcagggc

SEQ ID NO: 489273 - RNA, 19 nt, Artificial Sequence
  Description of Artificial Sequence: Synthetic oligonucleotide
gacaugcgaguggaacggc

SEQ ID NO: 489274 - RNA, 19 nt, Artificial Sequence
  Description of Artificial Sequence: Synthetic oligonucleotide
uccaugcgagucuggcggu

SEQ ID NO: 489275 - RNA, 19 nt, Artificial Sequence
  Description of Artificial Sequence: Synthetic oligonucleotide
ucgcagggcugagaagugc

SEQ ID NO: 489276 - RNA, 19 nt, Artificial Sequence
  Description of Artificial Sequence: Synthetic oligonucleotide
cucgcagggcugagaagug

SEQ ID NO: 489277 - RNA, 19 nt, Artificial Sequence
  Description of Artificial Sequence: Synthetic oligonucleotide
gcgaggucccauuagagcu

SEQ ID NO: 489278 - RNA, 19 nt, Artificial Sequence
  Description of Artificial Sequence: Synthetic oligonucleotide
cugucuucuaguacacgua

SEQ ID NO: 489279 - RNA, 19 nt, Artificial Sequence
  Description of Artificial Sequence: Synthetic oligonucleotide
cauucccugccagauccac

SEQ ID NO: 489280 - RNA, 19 nt, Artificial Sequence
  Description of Artificial Sequence: Synthetic oligonucleotide
uagaucccuuuagauguau

SEQ ID NO: 489281 - RNA, 19 nt, Artificial Sequence
  Description of Artificial Sequence: Synthetic oligonucleotide
augcgagucuggcggucag

SEQ ID NO: 489282 - RNA, 19 nt, Artificial Sequence
  Description of Artificial Sequence: Synthetic oligonucleotide
gccuagggaggccaguggc

SEQ ID NO: 489283 - RNA, 19 nt, Artificial Sequence
  Description of Artificial Sequence: Synthetic oligonucleotide
gcagaaugccugauucucc

SEQ ID NO: 489284 - RNA, 19 nt, Artificial Sequence
  Description of Artificial Sequence: Synthetic oligonucleotide
auaucucagcguguuuaaa

SEQ ID NO: 489285 - RNA, 19 nt, Artificial Sequence
  Description of Artificial Sequence: Synthetic oligonucleotide
ccgggaagccauugcauag

SEQ ID NO: 489286 - RNA, 19 nt, Artificial Sequence
  Description of Artificial Sequence: Synthetic oligonucleotide
cuuauucagugggcgcuuc

SEQ ID NO: 489287 - RNA, 19 nt, Artificial Sequence
  Description of Artificial Sequence: Synthetic oligonucleotide
uccucgaguucuccccaau

SEQ ID NO: 489288 - RNA, 19 nt, Artificial Sequence
  Description of Artificial Sequence: Synthetic oligonucleotide
cuaggagagacuuguuaau

SEQ ID NO: 489289 - RNA, 19 nt, Artificial Sequence
  Description of Artificial Sequence: Synthetic oligonucleotide
acaugcgaguggaacggcu

SEQ ID NO: 489290 - RNA, 19 nt, Artificial Sequence
  Description of Artificial Sequence: Synthetic oligonucleotide
cugcccgucugcccauagg

SEQ ID NO: 489291 - RNA, 19 nt, Artificial Sequence
  Description of Artificial Sequence: Synthetic oligonucleotide
uacacguagcuuggccuuc

SEQ ID NO: 489292 - RNA, 19 nt, Artificial Sequence
  Description of Artificial Sequence: Synthetic oligonucleotide
ccaugcaaucucccuuugg

SEQ ID NO: 489293 - RNA, 19 nt, Artificial Sequence
  Description of Artificial Sequence: Synthetic oligonucleotide
aggucuccacccauugugu

SEQ ID NO: 489294 - RNA, 19 nt, Artificial Sequence
  Description of Artificial Sequence: Synthetic oligonucleotide
ccgguagcgaggcugacuc

SEQ ID NO: 489295 - RNA, 19 nt, Artificial Sequence
  Description of Artificial Sequence: Synthetic oligonucleotide
gcucgaagaagaaucugga

SEQ ID NO: 489296 - RNA, 19 nt, Artificial Sequence
  Description of Artificial Sequence: Synthetic oligonucleotide
gcauaucucagcguguuua

SEQ ID NO: 489297 - RNA, 19 nt, Artificial Sequence
  Description of Artificial Sequence: Synthetic oligonucleotide
augaaucccuuagcaccug

SEQ ID NO: 489298 - RNA, 19 nt, Artificial Sequence
  Description of Artificial Sequence: Synthetic oligonucleotide
cccauuagagcuggcuucc

SEQ ID NO: 489299 - RNA, 19 nt, Artificial Sequence
  Description of Artificial Sequence: Synthetic oligonucleotide
agacaucccgggaagccau

SEQ ID NO: 489300 - RNA, 19 nt, Artificial Sequence
  Description of Artificial Sequence: Synthetic oligonucleotide
ugccagcgaggucccauua

SEQ ID NO: 489301 - RNA, 19 nt, Artificial Sequence
  Description of Artificial Sequence: Synthetic oligonucleotide
cuggauaggggaagaggcu

SEQ ID NO: 489302 - RNA, 19 nt, Artificial Sequence
  Description of Artificial Sequence: Synthetic oligonucleotide
ugcuucgggugggauggac

SEQ ID NO: 489303 - RNA, 19 nt, Artificial Sequence
  Description of Artificial Sequence: Synthetic oligonucleotide
ggaacggcuucgaagaccu

SEQ ID NO: 489304 - RNA, 19 nt, Artificial Sequence
  Description of Artificial Sequence: Synthetic oligonucleotide
caucuguuugcuagccugu

SEQ ID NO: 489305 - RNA, 19 nt, Artificial Sequence
  Description of Artificial Sequence: Synthetic oligonucleotide
cauccaacucagucccuaa

SEQ ID NO: 489306 - RNA, 19 nt, Artificial Sequence
  Description of Artificial Sequence: Synthetic oligonucleotide
gccagcgaggucccauuag

SEQ ID NO: 489307 - RNA, 19 nt, Artificial Sequence
  Description of Artificial Sequence: Synthetic oligonucleotide
cagaguaagugggugacau

SEQ ID NO: 489308 - RNA, 19 nt, Artificial Sequence
  Description of Artificial Sequence: Synthetic oligonucleotide
acuucucgcagggcugaga

SEQ ID NO: 489309 - RNA, 19 nt, Artificial Sequence
  Description of Artificial Sequence: Synthetic oligonucleotide
gacuucucgcagggcugag

SEQ ID NO: 489310 - RNA, 19 nt, Artificial Sequence
  Description of Artificial Sequence: Synthetic oligonucleotide
cugaucugacucauggcuu

SEQ ID NO: 489311 - RNA, 19 nt, Artificial Sequence
  Description of Artificial Sequence: Synthetic oligonucleotide
ggccugaugccccuuaccu

SEQ ID NO: 489312 - RNA, 19 nt, Artificial Sequence
  Description of Artificial Sequence: Synthetic oligonucleotide
guacacguagcuuggccuu

SEQ ID NO: 489313 - RNA, 19 nt, Artificial Sequence
  Description of Artificial Sequence: Synthetic oligonucleotide
acacguagcuuggccuucu

SEQ ID NO: 489314 - RNA, 19 nt, Artificial Sequence
  Description of Artificial Sequence: Synthetic oligonucleotide
ccccuuaccuggcauuuac

SEQ ID NO: 489315 - RNA, 19 nt, Artificial Sequence
  Description of Artificial Sequence: Synthetic oligonucleotide
cccuuaccuggcauuuacc

SEQ ID NO: 489316 - RNA, 19 nt, Artificial Sequence
  Description of Artificial Sequence: Synthetic oligonucleotide
gcgaggcugacucuucaga

SEQ ID NO: 489317 - RNA, 19 nt, Artificial Sequence
  Description of Artificial Sequence: Synthetic oligonucleotide
auagaucccuuuagaugua

SEQ ID NO: 489318 - RNA, 19 nt, Artificial Sequence
  Description of Artificial Sequence: Synthetic oligonucleotide
cgagaguuuguagccacag

SEQ ID NO: 489319 - RNA, 19 nt, Artificial Sequence
  Description of Artificial Sequence: Synthetic oligonucleotide
gcugaucagucaucucaga

SEQ ID NO: 489320 - RNA, 19 nt, Artificial Sequence
  Description of Artificial Sequence: Synthetic oligonucleotide
ccaaugaaugaaucccuua

SEQ ID NO: 489321 - RNA, 19 nt, Artificial Sequence
  Description of Artificial Sequence: Synthetic oligonucleotide
agaucccuuuagauguauu

SEQ ID NO: 489322 - RNA, 19 nt, Artificial Sequence
  Description of Artificial Sequence: Synthetic oligonucleotide
cgguaauucugucauugca

SEQ ID NO: 489323 - RNA, 19 nt, Artificial Sequence
  Description of Artificial Sequence: Synthetic oligonucleotide
ggaguugacugaucugcgu

SEQ ID NO: 489324 - RNA, 19 nt, Artificial Sequence
  Description of Artificial Sequence: Synthetic oligonucleotide
cagaaguccugcaggcacu

SEQ ID NO: 489325 - RNA, 19 nt, Artificial Sequence
  Description of Artificial Sequence: Synthetic oligonucleotide
agcucgcuuuauucuuauu

SEQ ID NO: 489326 - RNA, 19 nt, Artificial Sequence
  Description of Artificial Sequence: Synthetic oligonucleotide
caugcgagucuggcgguca

SEQ ID NO: 489327 - RNA, 19 nt, Artificial Sequence
  Description of Artificial Sequence: Synthetic oligonucleotide
ggcaaaaucgaagcagaau

SEQ ID NO: 489328 - RNA, 19 nt, Artificial Sequence
  Description of Artificial Sequence: Synthetic oligonucleotide
cccuaaccaaagccagaag

SEQ ID NO: 489329 - RNA, 19 nt, Artificial Sequence
  Description of Artificial Sequence: Synthetic oligonucleotide
caucgacaacgguaauucu

SEQ ID NO: 489330 - RNA, 19 nt, Artificial Sequence
  Description of Artificial Sequence: Synthetic oligonucleotide
ggaguuggcaaaagucugu

SEQ ID NO: 489331 - RNA, 19 nt, Artificial Sequence
  Description of Artificial Sequence: Synthetic oligonucleotide
caugcgaguggaacggcuu

SEQ ID NO: 489332 - RNA, 19 nt, Artificial Sequence
  Description of Artificial Sequence: Synthetic oligonucleotide
cgaggucccauuagagcug

SEQ ID NO: 489333 - RNA, 19 nt, Artificial Sequence
  Description of Artificial Sequence: Synthetic oligonucleotide
ggucagcacuagaaguguc

SEQ ID NO: 489334 - RNA, 19 nt, Artificial Sequence
  Description of Artificial Sequence: Synthetic oligonucleotide
ggguuuauugcagccacau

SEQ ID NO: 489335 - RNA, 19 nt, Artificial Sequence
  Description of Artificial Sequence: Synthetic oligonucleotide
cagcguguuuaaaguauau

SEQ ID NO: 489336 - RNA, 19 nt, Artificial Sequence
  Description of Artificial Sequence: Synthetic oligonucleotide
cauauuccugagcucgcuu

SEQ ID NO: 489337 - RNA, 19 nt, Artificial Sequence
  Description of Artificial Sequence: Synthetic oligonucleotide
ggcaaccgaaaacugcuuu

SEQ ID NO: 489338 - RNA, 19 nt, Artificial Sequence
  Description of Artificial Sequence: Synthetic oligonucleotide
cuucuaguacacguagcuu

SEQ ID NO: 489339 - RNA, 19 nt, Artificial Sequence
  Description of Artificial Sequence: Synthetic oligonucleotide
guccucgaguucuccccaa

SEQ ID NO: 489340 - RNA, 19 nt, Artificial Sequence
  Description of Artificial Sequence: Synthetic oligonucleotide
uuccgguagcgaggcugac

SEQ ID NO: 489341 - RNA, 19 nt, Artificial Sequence
  Description of Artificial Sequence: Synthetic oligonucleotide
gaugugcuucgggugggau

SEQ ID NO: 489342 - RNA, 19 nt, Artificial Sequence
  Description of Artificial Sequence: Synthetic oligonucleotide
cagugggcgcuuccucaca

SEQ ID NO: 489343 - RNA, 19 nt, Artificial Sequence
  Description of Artificial Sequence: Synthetic oligonucleotide
cugcauaucucagcguguu

SEQ ID NO: 489344 - RNA, 19 nt, Artificial Sequence
  Description of Artificial Sequence: Synthetic oligonucleotide
acccuccaugcgagucugg

SEQ ID NO: 489345 - RNA, 19 nt, Artificial Sequence
  Description of Artificial Sequence: Synthetic oligonucleotide
cgcugaccaucgacaacgg

SEQ ID NO: 489346 - RNA, 19 nt, Artificial Sequence
  Description of Artificial Sequence: Synthetic oligonucleotide
ccccaaugaaugaaucccu

SEQ ID NO: 489347 - RNA, 19 nt, Artificial Sequence
  Description of Artificial Sequence: Synthetic oligonucleotide
cucucacggaauggggugu

SEQ ID NO: 489348 - RNA, 19 nt, Artificial Sequence
  Description of Artificial Sequence: Synthetic oligonucleotide
cacccauugugugagucuu

SEQ ID NO: 489349 - RNA, 19 nt, Artificial Sequence
  Description of Artificial Sequence: Synthetic oligonucleotide
gucuggcggucagcacuag

SEQ ID NO: 489350 - RNA, 19 nt, Artificial Sequence
  Description of Artificial Sequence: Synthetic oligonucleotide
gguagcgaggcugacucuu

SEQ ID NO: 489351 - RNA, 19 nt, Artificial Sequence
  Description of Artificial Sequence: Synthetic oligonucleotide
cccgggaagccauugcaua

SEQ ID NO: 489352 - RNA, 19 nt, Artificial Sequence
  Description of Artificial Sequence: Synthetic oligonucleotide
cagcacaguuaaccaggua

SEQ ID NO: 489353 - RNA, 19 nt, Artificial Sequence
  Description of Artificial Sequence: Synthetic oligonucleotide
gaccaucgacaacgguaau

SEQ ID NO: 489354 - RNA, 19 nt, Artificial Sequence
  Description of Artificial Sequence: Synthetic oligonucleotide
cagcgcccugaugcacucc

SEQ ID NO: 489355 - RNA, 19 nt, Artificial Sequence
  Description of Artificial Sequence: Synthetic oligonucleotide
cgacaacgguaauucuguc

SEQ ID NO: 489356 - RNA, 19 nt, Artificial Sequence
  Description of Artificial Sequence: Synthetic oligonucleotide
ccagcgcccugaugcacuc

SEQ ID NO: 489357 - RNA, 19 nt, Artificial Sequence
  Description of Artificial Sequence: Synthetic oligonucleotide
cgcccugaugcacuccuuc

SEQ ID NO: 489358 - RNA, 19 nt, Artificial Sequence
  Description of Artificial Sequence: Synthetic oligonucleotide
caacgguaauucugucauu

SEQ ID NO: 489359 - RNA, 19 nt, Artificial Sequence
  Description of Artificial Sequence: Synthetic oligonucleotide
gcugaccaucgacaacggu

SEQ ID NO: 489360 - RNA, 19 nt, Artificial Sequence
  Description of Artificial Sequence: Synthetic oligonucleotide
gcuucgggugggauggacu

SEQ ID NO: 489361 - RNA, 19 nt, Artificial Sequence
  Description of Artificial Sequence: Synthetic oligonucleotide
gcgcuuccucacacacacg

SEQ ID NO: 489362 - RNA, 19 nt, Artificial Sequence
  Description of Artificial Sequence: Synthetic oligonucleotide
ccacccauugugugagucu

SEQ ID NO: 489363 - RNA, 19 nt, Artificial Sequence
  Description of Artificial Sequence: Synthetic oligonucleotide
uuccuccgacaggguugca

SEQ ID NO: 489364 - RNA, 19 nt, Artificial Sequence
  Description of Artificial Sequence: Synthetic oligonucleotide
cugccagcgaggucccauu

SEQ ID NO: 489365 - RNA, 19 nt, Artificial Sequence
  Description of Artificial Sequence: Synthetic oligonucleotide
ccaugcgagucuggcgguc

SEQ ID NO: 489366 - RNA, 19 nt, Artificial Sequence
  Description of Artificial Sequence: Synthetic oligonucleotide
ccgagucuuccugggccug

SEQ ID NO: 489367 - RNA, 19 nt, Artificial Sequence
  Description of Artificial Sequence: Synthetic oligonucleotide
gccguuucuugcuguucau

SEQ ID NO: 489368 - RNA, 19 nt, Artificial Sequence
  Description of Artificial Sequence: Synthetic oligonucleotide
cguucauucccugccagau

SEQ ID NO: 489369 - RNA, 19 nt, Artificial Sequence
  Description of Artificial Sequence: Synthetic oligonucleotide
gcuuauucagugggcgcuu

SEQ ID NO: 489370 - RNA, 19 nt, Artificial Sequence
  Description of Artificial Sequence: Synthetic oligonucleotide
ccauuagagcuggcuucca

SEQ ID NO: 489371 - RNA, 19 nt, Artificial Sequence
  Description of Artificial Sequence: Synthetic oligonucleotide
cuguaccaguggccuugcu

SEQ ID NO: 489372 - RNA, 19 nt, Artificial Sequence
  Description of Artificial Sequence: Synthetic oligonucleotide
gugcuucgggugggaugga

SEQ ID NO: 489373 - RNA, 19 nt, Artificial Sequence
  Description of Artificial Sequence: Synthetic oligonucleotide
gugcuaggagagacuuguu

SEQ ID NO: 489374 - RNA, 19 nt, Artificial Sequence
  Description of Artificial Sequence: Synthetic oligonucleotide
cgaguggaacggcuucgaa

SEQ ID NO: 489375 - RNA, 19 nt, Artificial Sequence
  Description of Artificial Sequence: Synthetic oligonucleotide
ccauugcauagaucccuuu

SEQ ID NO: 489376 - RNA, 19 nt, Artificial Sequence
  Description of Artificial Sequence: Synthetic oligonucleotide
cccgcuuguucuucauuuu

SEQ ID NO: 489377 - RNA, 19 nt, Artificial Sequence
  Description of Artificial Sequence: Synthetic oligonucleotide
cacguagcuuggccuucuu

SEQ ID NO: 489378 - RNA, 19 nt, Artificial Sequence
  Description of Artificial Sequence: Synthetic oligonucleotide
cagauccaccaaggagaau

SEQ ID NO: 489379 - RNA, 19 nt, Artificial Sequence
  Description of Artificial Sequence: Synthetic oligonucleotide
gaacggcuucgaagaccuu

SEQ ID NO: 489380 - RNA, 19 nt, Artificial Sequence
  Description of Artificial Sequence: Synthetic oligonucleotide
ccguaggaucagucagagu

SEQ ID NO: 489381 - RNA, 19 nt, Artificial Sequence
  Description of Artificial Sequence: Synthetic oligonucleotide
gcgcccugaugcacuccuu

SEQ ID NO: 489382 - RNA, 19 nt, Artificial Sequence
  Description of Artificial Sequence: Synthetic oligonucleotide
aacaaauuggaucaguacc

SEQ ID NO: 489383 - RNA, 19 nt, Artificial Sequence
  Description of Artificial Sequence: Synthetic oligonucleotide
acuauuuagaaacugacag

SEQ ID NO: 489384 - RNA, 19 nt, Artificial Sequence
  Description of Artificial Sequence: Synthetic oligonucleotide
aucuauauaauuuggagag

SEQ ID NO: 489385 - RNA, 19 nt, Artificial Sequence
  Description of Artificial Sequence: Synthetic oligonucleotide
uucacggagaaucaaaagg

SEQ ID NO: 489386 - RNA, 19 nt, Artificial Sequence
  Description of Artificial Sequence: Synthetic oligonucleotide
aauagagaguaauaugcuc

SEQ ID NO: 489387 - RNA, 19 nt, Artificial Sequence
  Description of Artificial Sequence: Synthetic oligonucleotide
aguaauaugcucuaccaag

SEQ ID NO: 489388 - RNA, 19 nt, Artificial Sequence
  Description of Artificial Sequence: Synthetic oligonucleotide
aaaccaaguggccuguugc

SEQ ID NO: 489389 - RNA, 19 nt, Artificial Sequence
  Description of Artificial Sequence: Synthetic oligonucleotide
cuagcuaaauaauauaaag

SEQ ID NO: 489390 - RNA, 19 nt, Artificial Sequence
  Description of Artificial Sequence: Synthetic oligonucleotide
uguauaaguaaacacuuga

SEQ ID NO: 489391 - RNA, 19 nt, Artificial Sequence
  Description of Artificial Sequence: Synthetic oligonucleotide
aauuuggagagacagacaa

SEQ ID NO: 489392 - RNA, 19 nt, Artificial Sequence
  Description of Artificial Sequence: Synthetic oligonucleotide
uguauuuaauucaugggca

SEQ ID NO: 489393 - RNA, 19 nt, Artificial Sequence
  Description of Artificial Sequence: Synthetic oligonucleotide
aaacaaauauucauucagc

SEQ ID NO: 489394 - RNA, 19 nt, Artificial Sequence
  Description of Artificial Sequence: Synthetic oligonucleotide
acaucauacaacgacacgc

SEQ ID NO: 489395 - RNA, 19 nt, Artificial Sequence
  Description of Artificial Sequence: Synthetic oligonucleotide
aaauauggaccccucuuac

SEQ ID NO: 489396 - RNA, 19 nt, Artificial Sequence
  Description of Artificial Sequence: Synthetic oligonucleotide
aauauggaccccucuuacc

SEQ ID NO: 489397 - RNA, 19 nt, Artificial Sequence
  Description of Artificial Sequence: Synthetic oligonucleotide
uguacaucuuccaacaucu

SEQ ID NO: 489398 - RNA, 19 nt, Artificial Sequence
  Description of Artificial Sequence: Synthetic oligonucleotide
uauuuagaaacugacagca

SEQ ID NO: 489399 - RNA, 19 nt, Artificial Sequence
  Description of Artificial Sequence: Synthetic oligonucleotide
uacauuuacuguaacacca

SEQ ID NO: 489400 - RNA, 19 nt, Artificial Sequence
  Description of Artificial Sequence: Synthetic oligonucleotide
auauaauacacagaacugg

SEQ ID NO: 489401 - RNA, 19 nt, Artificial Sequence
  Description of Artificial Sequence: Synthetic oligonucleotide
aguuucccaaaauagagag

SEQ ID NO: 489402 - RNA, 19 nt, Artificial Sequence
  Description of Artificial Sequence: Synthetic oligonucleotide
uaucuaugcaucuauauaa

SEQ ID NO: 489403 - RNA, 19 nt, Artificial Sequence
  Description of Artificial Sequence: Synthetic oligonucleotide
aaacccaagaacaaguguc

SEQ ID NO: 489404 - RNA, 19 nt, Artificial Sequence
  Description of Artificial Sequence: Synthetic oligonucleotide
uggauauuacacuuuauca

SEQ ID NO: 489405 - RNA, 19 nt, Artificial Sequence
  Description of Artificial Sequence: Synthetic oligonucleotide
guguauuuaauucaugggc

SEQ ID NO: 489406 - RNA, 19 nt, Artificial Sequence
  Description of Artificial Sequence: Synthetic oligonucleotide
aacaccgcccuaucuaugc

SEQ ID NO: 489407 - RNA, 19 nt, Artificial Sequence
  Description of Artificial Sequence: Synthetic oligonucleotide
uuaaacuggguugaaaacc

SEQ ID NO: 489408 - RNA, 19 nt, Artificial Sequence
  Description of Artificial Sequence: Synthetic oligonucleotide
uuaauuaagaaaaguuguc

SEQ ID NO: 489409 - RNA, 19 nt, Artificial Sequence
  Description of Artificial Sequence: Synthetic oligonucleotide
uacaguuugaguaacugaa

SEQ ID NO: 489410 - RNA, 19 nt, Artificial Sequence
  Description of Artificial Sequence: Synthetic oligonucleotide
acaaucacgcccuaauuuc

SEQ ID NO: 489411 - RNA, 19 nt, Artificial Sequence
  Description of Artificial Sequence: Synthetic oligonucleotide
guaagcacuggccacaagg

SEQ ID NO: 489412 - RNA, 19 nt, Artificial Sequence
  Description of Artificial Sequence: Synthetic oligonucleotide
cuuaauggugaauucagug

SEQ ID NO: 489413 - RNA, 19 nt, Artificial Sequence
  Description of Artificial Sequence: Synthetic oligonucleotide
aaagcucugauaaugucuc

SEQ ID NO: 489414 - RNA, 19 nt, Artificial Sequence
  Description of Artificial Sequence: Synthetic oligonucleotide
uuaauggugaauucagugu

SEQ ID NO: 489415 - RNA, 19 nt, Artificial Sequence
  Description of Artificial Sequence: Synthetic oligonucleotide
uaucacauuagacauguau

SEQ ID NO: 489416 - RNA, 19 nt, Artificial Sequence
  Description of Artificial Sequence: Synthetic oligonucleotide
ucugauaaugucucuaagu

SEQ ID NO: 489417 - RNA, 19 nt, Artificial Sequence
  Description of Artificial Sequence: Synthetic oligonucleotide
cugauaaugucucuaagug

SEQ ID NO: 489418 - RNA, 19 nt, Artificial Sequence
  Description of Artificial Sequence: Synthetic oligonucleotide
uacacuuuaucacauuaga

SEQ ID NO: 489419 - RNA, 19 nt, Artificial Sequence
  Description of Artificial Sequence: Synthetic oligonucleotide
aauuggaucaguaccaccu

SEQ ID NO: 489420 - RNA, 19 nt, Artificial Sequence
  Description of Artificial Sequence: Synthetic oligonucleotide
ucacggagaaucaaaaggu

SEQ ID NO: 489421 - RNA, 19 nt, Artificial Sequence
  Description of Artificial Sequence: Synthetic oligonucleotide
ucagggaugcuuauagucc

SEQ ID NO: 489422 - RNA, 19 nt, Artificial Sequence
  Description of Artificial Sequence: Synthetic oligonucleotide
aacgugucgggcucugugc

SEQ ID NO: 489423 - RNA, 19 nt, Artificial Sequence
  Description of Artificial Sequence: Synthetic oligonucleotide
uuccauugaaggacaagcg

SEQ ID NO: 489424 - RNA, 19 nt, Artificial Sequence
  Description of Artificial Sequence: Synthetic oligonucleotide
cugaauguagauauggguc

SEQ ID NO: 489425 - RNA, 19 nt, Artificial Sequence
  Description of Artificial Sequence: Synthetic oligonucleotide
uuuaaugcugacaccuuug

SEQ ID NO: 489426 - RNA, 19 nt, Artificial Sequence
  Description of Artificial Sequence: Synthetic oligonucleotide
ucuaagccaauccaauccc

SEQ ID NO: 489427 - RNA, 19 nt, Artificial Sequence
  Description of Artificial Sequence: Synthetic oligonucleotide
auuggacaaguacagugac

SEQ ID NO: 489428 - RNA, 19 nt, Artificial Sequence
  Description of Artificial Sequence: Synthetic oligonucleotide
aaaucguguucuguggucg

SEQ ID NO: 489429 - RNA, 19 nt, Artificial Sequence
  Description of Artificial Sequence: Synthetic oligonucleotide
aucaugacuagcuuaucag

SEQ ID NO: 489430 - RNA, 19 nt, Artificial Sequence
  Description of Artificial Sequence: Synthetic oligonucleotide
uaugcucuaccaagcaacg

SEQ ID NO: 489431 - RNA, 19 nt, Artificial Sequence
  Description of Artificial Sequence: Synthetic oligonucleotide
ucuagcuaaauaauauaaa

SEQ ID NO: 489432 - RNA, 19 nt, Artificial Sequence
  Description of Artificial Sequence: Synthetic oligonucleotide
aaacaagaugaacucggug

SEQ ID NO: 489433 - RNA, 19 nt, Artificial Sequence
  Description of Artificial Sequence: Synthetic oligonucleotide
gagaguaauaugcucuacc

SEQ ID NO: 489434 - RNA, 19 nt, Artificial Sequence
  Description of Artificial Sequence: Synthetic oligonucleotide
acgguugacauccaugguc

SEQ ID NO: 489435 - RNA, 19 nt, Artificial Sequence
  Description of Artificial Sequence: Synthetic oligonucleotide
ugucuaguacagcacaggc

SEQ ID NO: 489436 - RNA, 19 nt, Artificial Sequence
  Description of Artificial Sequence: Synthetic oligonucleotide
caaaaggugcuuaauuaag

SEQ ID NO: 489437 - RNA, 19 nt, Artificial Sequence
  Description of Artificial Sequence: Synthetic oligonucleotide
auaugcucuaccaagcaac

SEQ ID NO: 489438 - RNA, 19 nt, Artificial Sequence
  Description of Artificial Sequence: Synthetic oligonucleotide
ucuaauuuugacguuggcu

SEQ ID NO: 489439 - RNA, 19 nt, Artificial Sequence
  Description of Artificial Sequence: Synthetic oligonucleotide
agaguaauaugcucuacca

SEQ ID NO: 489440 - RNA, 19 nt, Artificial Sequence
  Description of Artificial Sequence: Synthetic oligonucleotide
guagauauggguccgguac

SEQ ID NO: 489441 - RNA, 19 nt, Artificial Sequence
  Description of Artificial Sequence: Synthetic oligonucleotide
cauggaugaucaauggccg

SEQ ID NO: 489442 - RNA, 19 nt, Artificial Sequence
  Description of Artificial Sequence: Synthetic oligonucleotide
aaugacauggaugaucaau

SEQ ID NO: 489443 - RNA, 19 nt, Artificial Sequence
  Description of Artificial Sequence: Synthetic oligonucleotide
gcauacauggaccauaaag

SEQ ID NO: 489444 - RNA, 19 nt, Artificial Sequence
  Description of Artificial Sequence: Synthetic oligonucleotide
guuccuaacaggcuuaaac

SEQ ID NO: 489445 - RNA, 19 nt, Artificial Sequence
  Description of Artificial Sequence: Synthetic oligonucleotide
caaucccaaauucaggcgg

SEQ ID NO: 489446 - RNA, 19 nt, Artificial Sequence
  Description of Artificial Sequence: Synthetic oligonucleotide
uugaguaacugaagaagca

SEQ ID NO: 489447 - RNA, 19 nt, Artificial Sequence
  Description of Artificial Sequence: Synthetic oligonucleotide
ucauacaacgacacgcaca

SEQ ID NO: 489448 - RNA, 19 nt, Artificial Sequence
  Description of Artificial Sequence: Synthetic oligonucleotide
ugacauggaugaucaaugg

SEQ ID NO: 489449 - RNA, 19 nt, Artificial Sequence
  Description of Artificial Sequence: Synthetic oligonucleotide
uggagcaauuuguucacgg

SEQ ID NO: 489450 - RNA, 19 nt, Artificial Sequence
  Description of Artificial Sequence: Synthetic oligonucleotide
ugcaucuauauaauuugga

SEQ ID NO: 489451 - RNA, 19 nt, Artificial Sequence
  Description of Artificial Sequence: Synthetic oligonucleotide
acuguaugcaggcagacaa

SEQ ID NO: 489452 - RNA, 19 nt, Artificial Sequence
  Description of Artificial Sequence: Synthetic oligonucleotide
uugaacaccaaauguacau

SEQ ID NO: 489453 - RNA, 19 nt, Artificial Sequence
  Description of Artificial Sequence: Synthetic oligonucleotide
uccauugaaggacaagcga

SEQ ID NO: 489454 - RNA, 19 nt, Artificial Sequence
  Description of Artificial Sequence: Synthetic oligonucleotide
ugggauaauccuuggaaca

SEQ ID NO: 489455 - RNA, 19 nt, Artificial Sequence
  Description of Artificial Sequence: Synthetic oligonucleotide
ggauauuacacuuuaucac

SEQ ID NO: 489456 - RNA, 19 nt, Artificial Sequence
  Description of Artificial Sequence: Synthetic oligonucleotide
auuuacuguaacaccaggg

SEQ ID NO: 489457 - RNA, 19 nt, Artificial Sequence
  Description of Artificial Sequence: Synthetic oligonucleotide
uucagggaugcuuauaguc

SEQ ID NO: 489458 - RNA, 19 nt, Artificial Sequence
  Description of Artificial Sequence: Synthetic oligonucleotide
auauggaccccucuuaccu

SEQ ID NO: 489459 - RNA, 19 nt, Artificial Sequence
  Description of Artificial Sequence: Synthetic oligonucleotide
agccacuucgaaccaaggc

SEQ ID NO: 489460 - RNA, 19 nt, Artificial Sequence
  Description of Artificial Sequence: Synthetic oligonucleotide
uacaacgacacgcacaauu

SEQ ID NO: 489461 - RNA, 19 nt, Artificial Sequence
  Description of Artificial Sequence: Synthetic oligonucleotide
cuggauauuacacuuuauc

SEQ ID NO: 489462 - RNA, 19 nt, Artificial Sequence
  Description of Artificial Sequence: Synthetic oligonucleotide
uagacuugcugaauguugu

SEQ ID NO: 489463 - RNA, 19 nt, Artificial Sequence
  Description of Artificial Sequence: Synthetic oligonucleotide
uguacacucuguauaagua

SEQ ID NO: 489464 - RNA, 19 nt, Artificial Sequence
  Description of Artificial Sequence: Synthetic oligonucleotide
acaaagcucugauaauguc

SEQ ID NO: 489465 - RNA, 19 nt, Artificial Sequence
  Description of Artificial Sequence: Synthetic oligonucleotide
auuacacuuuaucacauua

SEQ ID NO: 489466 - RNA, 19 nt, Artificial Sequence
  Description of Artificial Sequence: Synthetic oligonucleotide
aguaccaccuucccagcac

SEQ ID NO: 489467 - RNA, 19 nt, Artificial Sequence
  Description of Artificial Sequence: Synthetic oligonucleotide
uuaccuuccaguuucccaa

SEQ ID NO: 489468 - RNA, 19 nt, Artificial Sequence
  Description of Artificial Sequence: Synthetic oligonucleotide
acggagaaucaaaaggugc

SEQ ID NO: 489469 - RNA, 19 nt, Artificial Sequence
  Description of Artificial Sequence: Synthetic oligonucleotide
caguguuugccacagguag

SEQ ID NO: 489470 - RNA, 19 nt, Artificial Sequence
  Description of Artificial Sequence: Synthetic oligonucleotide
aacacaucauacaacgaca

SEQ ID NO: 489471 - RNA, 19 nt, Artificial Sequence
  Description of Artificial Sequence: Synthetic oligonucleotide
auucagugugaaauggagc

SEQ ID NO: 489472 - RNA, 19 nt, Artificial Sequence
  Description of Artificial Sequence: Synthetic oligonucleotide
caucuaauuuugacguugg

SEQ ID NO: 489473 - RNA, 19 nt, Artificial Sequence
  Description of Artificial Sequence: Synthetic oligonucleotide
agacaagcguucuucgcac

SEQ ID NO: 489474 - RNA, 19 nt, Artificial Sequence
  Description of Artificial Sequence: Synthetic oligonucleotide
uacaaucacgcccuaauuu

SEQ ID NO: 489475 - RNA, 19 nt, Artificial Sequence
  Description of Artificial Sequence: Synthetic oligonucleotide
gauaccacaucccgugaag

SEQ ID NO: 489476 - RNA, 19 nt, Artificial Sequence
  Description of Artificial Sequence: Synthetic oligonucleotide
ugggauaccacaucccgug

SEQ ID NO: 489477 - RNA, 19 nt, Artificial Sequence
  Description of Artificial Sequence: Synthetic oligonucleotide
uucaaaguauguacacucu

SEQ ID NO: 489478 - RNA, 19 nt, Artificial Sequence
  Description of Artificial Sequence: Synthetic oligonucleotide
uggucgaggauugagggag

SEQ ID NO: 489479 - RNA, 19 nt, Artificial Sequence
  Description of Artificial Sequence: Synthetic oligonucleotide
aaguuguccaucaaucuga

SEQ ID NO: 489480 - RNA, 19 nt, Artificial Sequence
  Description of Artificial Sequence: Synthetic oligonucleotide
agauucagcuguuccauug

SEQ ID NO: 489481 - RNA, 19 nt, Artificial Sequence
  Description of Artificial Sequence: Synthetic oligonucleotide
aggacaagcgaugaucugg

SEQ ID NO: 489482 - RNA, 19 nt, Artificial Sequence
  Description of Artificial Sequence: Synthetic oligonucleotide
ugagggagucuguugaagc

SEQ ID NO: 489483 - RNA, 19 nt, Artificial Sequence
  Description of Artificial Sequence: Synthetic oligonucleotide
gacauggaugaucaauggc

SEQ ID NO: 489484 - RNA, 19 nt, Artificial Sequence
  Description of Artificial Sequence: Synthetic oligonucleotide
aauuucuagcuaaauaaua

SEQ ID NO: 489485 - RNA, 19 nt, Artificial Sequence
  Description of Artificial Sequence: Synthetic oligonucleotide
acacuuuaucacauuagac

SEQ ID NO: 489486 - RNA, 19 nt, Artificial Sequence
  Description of Artificial Sequence: Synthetic oligonucleotide
uauugucuuguaagcacug

SEQ ID NO: 489487 - RNA, 19 nt, Artificial Sequence
  Description of Artificial Sequence: Synthetic oligonucleotide
acauuagacauguauuaaa

SEQ ID NO: 489488 - RNA, 19 nt, Artificial Sequence
  Description of Artificial Sequence: Synthetic oligonucleotide
acaagcgaugaucuggaug

SEQ ID NO: 489489 - RNA, 19 nt, Artificial Sequence
  Description of Artificial Sequence: Synthetic oligonucleotide
agacucugaugcuccaagc

SEQ ID NO: 489490 - RNA, 19 nt, Artificial Sequence
  Description of Artificial Sequence: Synthetic oligonucleotide
aaauucaggcgggauucac

SEQ ID NO: 489491 - RNA, 19 nt, Artificial Sequence
  Description of Artificial Sequence: Synthetic oligonucleotide
gaugcuuauaguccuuuga

SEQ ID NO: 489492 - RNA, 19 nt, Artificial Sequence
  Description of Artificial Sequence: Synthetic oligonucleotide
agacuacugggucacagug

SEQ ID NO: 489493 - RNA, 19 nt, Artificial Sequence
  Description of Artificial Sequence: Synthetic oligonucleotide
uggugguguauuuaauuca

SEQ ID NO: 489494 - RNA, 19 nt, Artificial Sequence
  Description of Artificial Sequence: Synthetic oligonucleotide
aucauacaacgacacgcac

SEQ ID NO: 489495 - RNA, 19 nt, Artificial Sequence
  Description of Artificial Sequence: Synthetic oligonucleotide
aauuuugacguuggcuuug

SEQ ID NO: 489496 - RNA, 19 nt, Artificial Sequence
  Description of Artificial Sequence: Synthetic oligonucleotide
ggaugggucacccacacgc

SEQ ID NO: 489497 - RNA, 19 nt, Artificial Sequence
  Description of Artificial Sequence: Synthetic oligonucleotide
aggugcuuaauuaagaaaa

SEQ ID NO: 489498 - RNA, 19 nt, Artificial Sequence
  Description of Artificial Sequence: Synthetic oligonucleotide
uagguguuuggcuauugca

SEQ ID NO: 489499 - RNA, 19 nt, Artificial Sequence
  Description of Artificial Sequence: Synthetic oligonucleotide
uaaacaagaugaacucggu

SEQ ID NO: 489500 - RNA, 19 nt, Artificial Sequence
  Description of Artificial Sequence: Synthetic oligonucleotide
cauuuacuguaacaccagg

SEQ ID NO: 489501 - RNA, 19 nt, Artificial Sequence
  Description of Artificial Sequence: Synthetic oligonucleotide
auguacacucuguauaagu

SEQ ID NO: 489502 - RNA, 19 nt, Artificial Sequence
  Description of Artificial Sequence: Synthetic oligonucleotide
guaauaugcucuaccaagc

SEQ ID NO: 489503 - RNA, 19 nt, Artificial Sequence
  Description of Artificial Sequence: Synthetic oligonucleotide
ggauagacgguugacaucc

SEQ ID NO: 489504 - RNA, 19 nt, Artificial Sequence
  Description of Artificial Sequence: Synthetic oligonucleotide
uauugcaggacuggggacc

SEQ ID NO: 489505 - RNA, 19 nt, Artificial Sequence
  Description of Artificial Sequence: Synthetic oligonucleotide
gaaagcuggugucuaguac

SEQ ID NO: 489506 - RNA, 19 nt, Artificial Sequence
  Description of Artificial Sequence: Synthetic oligonucleotide
aaaauucagggaugcuuau

SEQ ID NO: 489507 - RNA, 19 nt, Artificial Sequence
  Description of Artificial Sequence: Synthetic oligonucleotide
ggaccauaaaggcacagcc

SEQ ID NO: 489508 - RNA, 19 nt, Artificial Sequence
  Description of Artificial Sequence: Synthetic oligonucleotide
augacauggaugaucaaug

SEQ ID NO: 489509 - RNA, 19 nt, Artificial Sequence
  Description of Artificial Sequence: Synthetic oligonucleotide
uauggguccgguacacaag

SEQ ID NO: 489510 - RNA, 19 nt, Artificial Sequence
  Description of Artificial Sequence: Synthetic oligonucleotide
uccuuugacccuugacugg

SEQ ID NO: 489511 - RNA, 19 nt, Artificial Sequence
  Description of Artificial Sequence: Synthetic oligonucleotide
aacgacacgcacaauuucu

SEQ ID NO: 489512 - RNA, 19 nt, Artificial Sequence
  Description of Artificial Sequence: Synthetic oligonucleotide
cuuuaucacauuagacaug

SEQ ID NO: 489513 - RNA, 19 nt, Artificial Sequence
  Description of Artificial Sequence: Synthetic oligonucleotide
aaauaauauaaagcauuuu

SEQ ID NO: 489514 - RNA, 19 nt, Artificial Sequence
  Description of Artificial Sequence: Synthetic oligonucleotide
ugggauagacgguugacau

SEQ ID NO: 489515 - RNA, 19 nt, Artificial Sequence
  Description of Artificial Sequence: Synthetic oligonucleotide
uagauauggguccgguaca

SEQ ID NO: 489516 - RNA, 19 nt, Artificial Sequence
  Description of Artificial Sequence: Synthetic oligonucleotide
uaccaagcaacguccacca

SEQ ID NO: 489517 - RNA, 19 nt, Artificial Sequence
  Description of Artificial Sequence: Synthetic oligonucleotide
cuguauaaguaaacacuug

SEQ ID NO: 489518 - RNA, 19 nt, Artificial Sequence
  Description of Artificial Sequence: Synthetic oligonucleotide
aggcuuaaacaagaugaac

SEQ ID NO: 489519 - RNA, 19 nt, Artificial Sequence
  Description of Artificial Sequence: Synthetic oligonucleotide
uuguucacggagaaucaaa

SEQ ID NO: 489520 - RNA, 19 nt, Artificial Sequence
  Description of Artificial Sequence: Synthetic oligonucleotide
cauacaacgacacgcacaa

SEQ ID NO: 489521 - RNA, 19 nt, Artificial Sequence
  Description of Artificial Sequence: Synthetic oligonucleotide
guucacggagaaucaaaag

SEQ ID NO: 489522 - RNA, 19 nt, Artificial Sequence
  Description of Artificial Sequence: Synthetic oligonucleotide
caagcgaugaucuggaugu

SEQ ID NO: 489523 - RNA, 19 nt, Artificial Sequence
  Description of Artificial Sequence: Synthetic oligonucleotide
uuaauucaugggcaguguu

SEQ ID NO: 489524 - RNA, 19 nt, Artificial Sequence
  Description of Artificial Sequence: Synthetic oligonucleotide
aagaugaacucgguguccu

SEQ ID NO: 489525 - RNA, 19 nt, Artificial Sequence
  Description of Artificial Sequence: Synthetic oligonucleotide
cuguggucgaggauugagg

SEQ ID NO: 489526 - RNA, 19 nt, Artificial Sequence
  Description of Artificial Sequence: Synthetic oligonucleotide
cuggguugaaaaccaagug

SEQ ID NO: 489527 - RNA, 19 nt, Artificial Sequence
  Description of Artificial Sequence: Synthetic oligonucleotide
ucagacuacugggucacag

SEQ ID NO: 489528 - RNA, 19 nt, Artificial Sequence
  Description of Artificial Sequence: Synthetic oligonucleotide
ugguacuauuuagaaacug

SEQ ID NO: 489529 - RNA, 19 nt, Artificial Sequence
  Description of Artificial Sequence: Synthetic oligonucleotide
uggaacaccgcccuaucua

SEQ ID NO: 489530 - RNA, 19 nt, Artificial Sequence
  Description of Artificial Sequence: Synthetic oligonucleotide
ucuaugcaucuauauaauu

SEQ ID NO: 489531 - RNA, 19 nt, Artificial Sequence
  Description of Artificial Sequence: Synthetic oligonucleotide
caauccaaucccaaauuca

SEQ ID NO: 489532 - RNA, 19 nt, Artificial Sequence
  Description of Artificial Sequence: Synthetic oligonucleotide
guugcaucaggauggguca

SEQ ID NO: 489533 - RNA, 19 nt, Artificial Sequence
  Description of Artificial Sequence: Synthetic oligonucleotide
cacuuuauaaaggcacacc

SEQ ID NO: 489534 - RNA, 19 nt, Artificial Sequence
  Description of Artificial Sequence: Synthetic oligonucleotide
augcaucuauauaauuugg

SEQ ID NO: 489535 - RNA, 19 nt, Artificial Sequence
  Description of Artificial Sequence: Synthetic oligonucleotide
ucgaaccaaggcacaaaug

SEQ ID NO: 489536 - RNA, 19 nt, Artificial Sequence
  Description of Artificial Sequence: Synthetic oligonucleotide
gaaaggcuauuugaacacc

SEQ ID NO: 489537 - RNA, 19 nt, Artificial Sequence
  Description of Artificial Sequence: Synthetic oligonucleotide
acagguagguguuuggcua

SEQ ID NO: 489538 - RNA, 19 nt, Artificial Sequence
  Description of Artificial Sequence: Synthetic oligonucleotide
cacgcccuaauuucuuugg

SEQ ID NO: 489539 - RNA, 19 nt, Artificial Sequence
  Description of Artificial Sequence: Synthetic oligonucleotide
agauauggguccgguacac

SEQ ID NO: 489540 - RNA, 19 nt, Artificial Sequence
  Description of Artificial Sequence: Synthetic oligonucleotide
gaccuuugcugguugugcc

SEQ ID NO: 489541 - RNA, 19 nt, Artificial Sequence
  Description of Artificial Sequence: Synthetic oligonucleotide
agccaauccaaucccaaau

SEQ ID NO: 489542 - RNA, 19 nt, Artificial Sequence
  Description of Artificial Sequence: Synthetic oligonucleotide
augggucacccacacgcac

SEQ ID NO: 489543 - RNA, 19 nt, Artificial Sequence
  Description of Artificial Sequence: Synthetic oligonucleotide
cacggagaaucaaaaggug

SEQ ID NO: 489544 - RNA, 19 nt, Artificial Sequence
  Description of Artificial Sequence: Synthetic oligonucleotide
auugaaggacaagcgauga

SEQ ID NO: 489545 - RNA, 19 nt, Artificial Sequence
  Description of Artificial Sequence: Synthetic oligonucleotide
aucacauuagacauguauu

SEQ ID NO: 489546 - RNA, 19 nt, Artificial Sequence
  Description of Artificial Sequence: Synthetic oligonucleotide
acuggguugaaaaccaagu

SEQ ID NO: 489547 - RNA, 19 nt, Artificial Sequence
  Description of Artificial Sequence: Synthetic oligonucleotide
agacaaugcuuccugggau

SEQ ID NO: 489548 - RNA, 19 nt, Artificial Sequence
  Description of Artificial Sequence: Synthetic oligonucleotide
gaacgugucgggcucugug

SEQ ID NO: 489549 - RNA, 19 nt, Artificial Sequence
  Description of Artificial Sequence: Synthetic oligonucleotide
gucuuguaagcacuggcca

SEQ ID NO: 489550 - RNA, 19 nt, Artificial Sequence
  Description of Artificial Sequence: Synthetic oligonucleotide
guagguguuuggcuauugc

SEQ ID NO: 489551 - RNA, 19 nt, Artificial Sequence
  Description of Artificial Sequence: Synthetic oligonucleotide
auccaugguccaaugguac

SEQ ID NO: 489552 - RNA, 19 nt, Artificial Sequence
  Description of Artificial Sequence: Synthetic oligonucleotide
gaguaauaugcucuaccaa

SEQ ID NO: 489553 - RNA, 19 nt, Artificial Sequence
  Description of Artificial Sequence: Synthetic oligonucleotide
aauucaggcgggauucaca

SEQ ID NO: 489554 - RNA, 19 nt, Artificial Sequence
  Description of Artificial Sequence: Synthetic oligonucleotide
ugguccaaugguacuauuu

SEQ ID NO: 489555 - RNA, 19 nt, Artificial Sequence
  Description of Artificial Sequence: Synthetic oligonucleotide
acaagcguucuucgcacug

SEQ ID NO: 489556 - RNA, 19 nt, Artificial Sequence
  Description of Artificial Sequence: Synthetic oligonucleotide
ucaggaugggucacccaca

SEQ ID NO: 489557 - RNA, 19 nt, Artificial Sequence
  Description of Artificial Sequence: Synthetic oligonucleotide
uugagggagucuguugaag

SEQ ID NO: 489558 - RNA, 19 nt, Artificial Sequence
  Description of Artificial Sequence: Synthetic oligonucleotide
ucacgcccuaauuucuuug

SEQ ID NO: 489559 - RNA, 19 nt, Artificial Sequence
  Description of Artificial Sequence: Synthetic oligonucleotide
aguguuugccacagguagg

SEQ ID NO: 489560 - RNA, 19 nt, Artificial Sequence
  Description of Artificial Sequence: Synthetic oligonucleotide
aacgucaguggcagcuucg

SEQ ID NO: 489561 - RNA, 19 nt, Artificial Sequence
  Description of Artificial Sequence: Synthetic oligonucleotide
auaugccaagucuccaggu

SEQ ID NO: 489562 - RNA, 19 nt, Artificial Sequence
  Description of Artificial Sequence: Synthetic oligonucleotide
ugcccuauuucagagcccu

SEQ ID NO: 489563 - RNA, 19 nt, Artificial Sequence
  Description of Artificial Sequence: Synthetic oligonucleotide
auaauccuuggaacaccgc

SEQ ID NO: 489564 - RNA, 19 nt, Artificial Sequence
  Description of Artificial Sequence: Synthetic oligonucleotide
guauaaguaaacacuugaa

SEQ ID NO: 489565 - RNA, 19 nt, Artificial Sequence
  Description of Artificial Sequence: Synthetic oligonucleotide
uuggaacaccgcccuaucu

SEQ ID NO: 489566 - RNA, 19 nt, Artificial Sequence
  Description of Artificial Sequence: Synthetic oligonucleotide
gguacuauuuagaaacuga

SEQ ID NO: 489567 - RNA, 19 nt, Artificial Sequence
  Description of Artificial Sequence: Synthetic oligonucleotide
uccaugguccaaugguacu

SEQ ID NO: 489568 - RNA, 19 nt, Artificial Sequence
  Description of Artificial Sequence: Synthetic oligonucleotide
uauuacacuuuaucacauu

SEQ ID NO: 489569 - RNA, 19 nt, Artificial Sequence
  Description of Artificial Sequence: Synthetic oligonucleotide
gugucuaguacagcacagg

SEQ ID NO: 489570 - RNA, 19 nt, Artificial Sequence
  Description of Artificial Sequence: Synthetic oligonucleotide
ugggucacccacacgcaca

SEQ ID NO: 489571 - RNA, 19 nt, Artificial Sequence
  Description of Artificial Sequence: Synthetic oligonucleotide
uuuguucacggagaaucaa

SEQ ID NO: 489572 - RNA, 19 nt, Artificial Sequence
  Description of Artificial Sequence: Synthetic oligonucleotide
ugaacaccaaauguacaua

SEQ ID NO: 489573 - RNA, 19 nt, Artificial Sequence
  Description of Artificial Sequence: Synthetic oligonucleotide
gccacuucgaaccaaggca

SEQ ID NO: 489574 - RNA, 19 nt, Artificial Sequence
  Description of Artificial Sequence: Synthetic oligonucleotide
uguucagcauuguucugua

SEQ ID NO: 489575 - RNA, 19 nt, Artificial Sequence
  Description of Artificial Sequence: Synthetic oligonucleotide
uugacauccaugguccaau

SEQ ID NO: 489576 - RNA, 19 nt, Artificial Sequence
  Description of Artificial Sequence: Synthetic oligonucleotide
ccugcccuauuucagagcc

SEQ ID NO: 489577 - RNA, 19 nt, Artificial Sequence
  Description of Artificial Sequence: Synthetic oligonucleotide
ggugaauucagugugaaau

SEQ ID NO: 489578 - RNA, 19 nt, Artificial Sequence
  Description of Artificial Sequence: Synthetic oligonucleotide
cagacaagcguucuucgca

SEQ ID NO: 489579 - RNA, 19 nt, Artificial Sequence
  Description of Artificial Sequence: Synthetic oligonucleotide
caacaucuguuuuacucca

SEQ ID NO: 489580 - RNA, 19 nt, Artificial Sequence
  Description of Artificial Sequence: Synthetic oligonucleotide
acguccaccaccaauuuaa

SEQ ID NO: 489581 - RNA, 19 nt, Artificial Sequence
  Description of Artificial Sequence: Synthetic oligonucleotide
acaucccgugaagaucugc

SEQ ID NO: 489582 - RNA, 19 nt, Artificial Sequence
  Description of Artificial Sequence: Synthetic oligonucleotide
cugugggauaccacauccc

SEQ ID NO: 489583 - RNA, 19 nt, Artificial Sequence
  Description of Artificial Sequence: Synthetic oligonucleotide
cauggaacuucugguagac

SEQ ID NO: 489584 - RNA, 19 nt, Artificial Sequence
  Description of Artificial Sequence: Synthetic oligonucleotide
gacuacugggucacagugc

SEQ ID NO: 489585 - RNA, 19 nt, Artificial Sequence
  Description of Artificial Sequence: Synthetic oligonucleotide
cuauugcaggacuggggac

SEQ ID NO: 489586 - RNA, 19 nt, Artificial Sequence
  Description of Artificial Sequence: Synthetic oligonucleotide
gacguuggcuuugugaaaa

SEQ ID NO: 489587 - RNA, 19 nt, Artificial Sequence
  Description of Artificial Sequence: Synthetic oligonucleotide
uuauaguccuuugacccuu

SEQ ID NO: 489588 - RNA, 19 nt, Artificial Sequence
  Description of Artificial Sequence: Synthetic oligonucleotide
uguccuuauuggacaagua

SEQ ID NO: 489589 - RNA, 19 nt, Artificial Sequence
  Description of Artificial Sequence: Synthetic oligonucleotide
cucuuccuuuaacagagca

SEQ ID NO: 489590 - RNA, 19 nt, Artificial Sequence
  Description of Artificial Sequence: Synthetic oligonucleotide
auugaccuuugcugguugu

SEQ ID NO: 489591 - RNA, 19 nt, Artificial Sequence
  Description of Artificial Sequence: Synthetic oligonucleotide
ucuauuauuuuggcugguu

SEQ ID NO: 489592 - RNA, 19 nt, Artificial Sequence
  Description of Artificial Sequence: Synthetic oligonucleotide
aagcucugauaaugucucu

SEQ ID NO: 489593 - RNA, 19 nt, Artificial Sequence
  Description of Artificial Sequence: Synthetic oligonucleotide
augggauagacgguugaca

SEQ ID NO: 489594 - RNA, 19 nt, Artificial Sequence
  Description of Artificial Sequence: Synthetic oligonucleotide
aaauucagggaugcuuaua

SEQ ID NO: 489595 - RNA, 19 nt, Artificial Sequence
  Description of Artificial Sequence: Synthetic oligonucleotide
guugaaaaccaaguggccu

SEQ ID NO: 489596 - RNA, 19 nt, Artificial Sequence
  Description of Artificial Sequence: Synthetic oligonucleotide
acuugguaagguguugagu

SEQ ID NO: 489597 - RNA, 19 nt, Artificial Sequence
  Description of Artificial Sequence: Synthetic oligonucleotide
aacguccaccaccaauuua

SEQ ID NO: 489598 - RNA, 19 nt, Artificial Sequence
  Description of Artificial Sequence: Synthetic oligonucleotide
cacucuguauaaguaaaca

SEQ ID NO: 489599 - RNA, 19 nt, Artificial Sequence
  Description of Artificial Sequence: Synthetic oligonucleotide
acgacacgcacaauuucuc

SEQ ID NO: 489600 - RNA, 19 nt, Artificial Sequence
  Description of Artificial Sequence: Synthetic oligonucleotide
uuuugacguuggcuuugug

SEQ ID NO: 489601 - RNA, 19 nt, Artificial Sequence
  Description of Artificial Sequence: Synthetic oligonucleotide
gacaaugcuuccugggaua

SEQ ID NO: 489602 - RNA, 19 nt, Artificial Sequence
  Description of Artificial Sequence: Synthetic oligonucleotide
aucccgugaagaucugcug

SEQ ID NO: 489603 - RNA, 19 nt, Artificial Sequence
  Description of Artificial Sequence: Synthetic oligonucleotide
uucgcacugugggauacca

SEQ ID NO: 489604 - RNA, 19 nt, Artificial Sequence
  Description of Artificial Sequence: Synthetic oligonucleotide
caaccagaguauucuucac

SEQ ID NO: 489605 - RNA, 19 nt, Artificial Sequence
  Description of Artificial Sequence: Synthetic oligonucleotide
gucaccugcccuauuucag

SEQ ID NO: 489606 - RNA, 19 nt, Artificial Sequence
  Description of Artificial Sequence: Synthetic oligonucleotide
ccucuuaccuuccaguuuc

SEQ ID NO: 489607 - RNA, 19 nt, Artificial Sequence
  Description of Artificial Sequence: Synthetic oligonucleotide
uugacccuugacugguggu

SEQ ID NO: 489608 - RNA, 19 nt, Artificial Sequence
  Description of Artificial Sequence: Synthetic oligonucleotide
cuaagccaauccaauccca

SEQ ID NO: 489609 - RNA, 19 nt, Artificial Sequence
  Description of Artificial Sequence: Synthetic oligonucleotide
auuggaucaguaccaccuu

SEQ ID NO: 489610 - RNA, 19 nt, Artificial Sequence
  Description of Artificial Sequence: Synthetic oligonucleotide
augaacucgguguccuuau

SEQ ID NO: 489611 - RNA, 19 nt, Artificial Sequence
  Description of Artificial Sequence: Synthetic oligonucleotide
gggauucacaggaaaauuc

SEQ ID NO: 489612 - RNA, 19 nt, Artificial Sequence
  Description of Artificial Sequence: Synthetic oligonucleotide
caaguggccuguugcauca

SEQ ID NO: 489613 - RNA, 19 nt, Artificial Sequence
  Description of Artificial Sequence: Synthetic oligonucleotide
caacgacacgcacaauuuc

SEQ ID NO: 489614 - RNA, 19 nt, Artificial Sequence
  Description of Artificial Sequence: Synthetic oligonucleotide
aucuaugcaucuauauaau

SEQ ID NO: 489615 - RNA, 19 nt, Artificial Sequence
  Description of Artificial Sequence: Synthetic oligonucleotide
ucagugugaaauggagcaa

SEQ ID NO: 489616 - RNA, 19 nt, Artificial Sequence
  Description of Artificial Sequence: Synthetic oligonucleotide
cugucugaauguagauaug

SEQ ID NO: 489617 - RNA, 19 nt, Artificial Sequence
  Description of Artificial Sequence: Synthetic oligonucleotide
agagacagacaagcguucu

SEQ ID NO: 489618 - RNA, 19 nt, Artificial Sequence
  Description of Artificial Sequence: Synthetic oligonucleotide
ggcucugugcaucagacua

SEQ ID NO: 489619 - RNA, 19 nt, Artificial Sequence
  Description of Artificial Sequence: Synthetic oligonucleotide
ggcuacauuuacuguaaca

SEQ ID NO: 489620 - RNA, 19 nt, Artificial Sequence
  Description of Artificial Sequence: Synthetic oligonucleotide
acuagcuuaucaggauaug

SEQ ID NO: 489621 - RNA, 19 nt, Artificial Sequence
  Description of Artificial Sequence: Synthetic oligonucleotide
auaccacaucccgugaaga

SEQ ID NO: 489622 - RNA, 19 nt, Artificial Sequence
  Description of Artificial Sequence: Synthetic oligonucleotide
ggauaauccuuggaacacc

SEQ ID NO: 489623 - RNA, 19 nt, Artificial Sequence
  Description of Artificial Sequence: Synthetic oligonucleotide
ucuucgcacugugggauac

SEQ ID NO: 489624 - RNA, 19 nt, Artificial Sequence
  Description of Artificial Sequence: Synthetic oligonucleotide
acgcacaauuucuccaaaa

SEQ ID NO: 489625 - RNA, 19 nt, Artificial Sequence
  Description of Artificial Sequence: Synthetic oligonucleotide
cagggucuaagccaaucca

SEQ ID NO: 489626 - RNA, 19 nt, Artificial Sequence
  Description of Artificial Sequence: Synthetic oligonucleotide
aagcgaugaucuggauguc

SEQ ID NO: 489627 - RNA, 19 nt, Artificial Sequence
  Description of Artificial Sequence: Synthetic oligonucleotide
acgugucgggcucugugca

SEQ ID NO: 489628 - RNA, 19 nt, Artificial Sequence
  Description of Artificial Sequence: Synthetic oligonucleotide
gucuaguacagcacaggca

SEQ ID NO: 489629 - RNA, 19 nt, Artificial Sequence
  Description of Artificial Sequence: Synthetic oligonucleotide
guuuuacuccagcugcaaa

SEQ ID NO: 489630 - RNA, 19 nt, Artificial Sequence
  Description of Artificial Sequence: Synthetic oligonucleotide
cucuuaccuuccaguuucc

SEQ ID NO: 489631 - RNA, 19 nt, Artificial Sequence
  Description of Artificial Sequence: Synthetic oligonucleotide
gaucaauggccggaacaca

SEQ ID NO: 489632 - RNA, 19 nt, Artificial Sequence
  Description of Artificial Sequence: Synthetic oligonucleotide
gggauaauccuuggaacac

SEQ ID NO: 489633 - RNA, 19 nt, Artificial Sequence
  Description of Artificial Sequence: Synthetic oligonucleotide
cuuggaacaccgcccuauc

SEQ ID NO: 489634 - RNA, 19 nt, Artificial Sequence
  Description of Artificial Sequence: Synthetic oligonucleotide
agcgaugaucuggaugucu

SEQ ID NO: 489635 - RNA, 19 nt, Artificial Sequence
  Description of Artificial Sequence: Synthetic oligonucleotide
uauggaccccucuuaccuu

SEQ ID NO: 489636 - RNA, 19 nt, Artificial Sequence
  Description of Artificial Sequence: Synthetic oligonucleotide
uggccuguugcaucaggau

SEQ ID NO: 489637 - RNA, 19 nt, Artificial Sequence
  Description of Artificial Sequence: Synthetic oligonucleotide
cacaaagcucugauaaugu

SEQ ID NO: 489638 - RNA, 19 nt, Artificial Sequence
  Description of Artificial Sequence: Synthetic oligonucleotide
accgcccuaucuaugcauc

SEQ ID NO: 489639 - RNA, 19 nt, Artificial Sequence
  Description of Artificial Sequence: Synthetic oligonucleotide
aaucacgcccuaauuucuu

SEQ ID NO: 489640 - RNA, 19 nt, Artificial Sequence
  Description of Artificial Sequence: Synthetic oligonucleotide
acgcccuaauuucuuugga

SEQ ID NO: 489641 - RNA, 19 nt, Artificial Sequence
  Description of Artificial Sequence: Synthetic oligonucleotide
cauccaugguccaauggua

SEQ ID NO: 489642 - RNA, 19 nt, Artificial Sequence
  Description of Artificial Sequence: Synthetic oligonucleotide
guacuuggggccucccuga

SEQ ID NO: 489643 - RNA, 19 nt, Artificial Sequence
  Description of Artificial Sequence: Synthetic oligonucleotide
auggaccauaaaggcacag

SEQ ID NO: 489644 - RNA, 19 nt, Artificial Sequence
  Description of Artificial Sequence: Synthetic oligonucleotide
ucccaugggauagacgguu

SEQ ID NO: 489645 - RNA, 19 nt, Artificial Sequence
  Description of Artificial Sequence: Synthetic oligonucleotide
augguacuauuuagaaacu

SEQ ID NO: 489646 - RNA, 19 nt, Artificial Sequence
  Description of Artificial Sequence: Synthetic oligonucleotide
gcaggcuacauuuacugua

SEQ ID NO: 489647 - RNA, 19 nt, Artificial Sequence
  Description of Artificial Sequence: Synthetic oligonucleotide
cuuugacccuugacuggug

SEQ ID NO: 489648 - RNA, 19 nt, Artificial Sequence
  Description of Artificial Sequence: Synthetic oligonucleotide
gccggaacacaucauacaa

SEQ ID NO: 489649 - RNA, 19 nt, Artificial Sequence
  Description of Artificial Sequence: Synthetic oligonucleotide
acuucgaaccaaggcacaa

SEQ ID NO: 489650 - RNA, 19 nt, Artificial Sequence
  Description of Artificial Sequence: Synthetic oligonucleotide
gcugacaccuuugucauaa

SEQ ID NO: 489651 - RNA, 19 nt, Artificial Sequence
  Description of Artificial Sequence: Synthetic oligonucleotide
aucguguucuguggucgag

SEQ ID NO: 489652 - RNA, 19 nt, Artificial Sequence
  Description of Artificial Sequence: Synthetic oligonucleotide
uuguaagcacuggccacaa

SEQ ID NO: 489653 - RNA, 19 nt, Artificial Sequence
  Description of Artificial Sequence: Synthetic oligonucleotide
gaacaccgcccuaucuaug

SEQ ID NO: 489654 - RNA, 19 nt, Artificial Sequence
  Description of Artificial Sequence: Synthetic oligonucleotide
cugcccuauuucagagccc

SEQ ID NO: 489655 - RNA, 19 nt, Artificial Sequence
  Description of Artificial Sequence: Synthetic oligonucleotide
aaggcacaaauggucucua

SEQ ID NO: 489656 - RNA, 19 nt, Artificial Sequence
  Description of Artificial Sequence: Synthetic oligonucleotide
gaugggucacccacacgca

SEQ ID NO: 489657 - RNA, 19 nt, Artificial Sequence
  Description of Artificial Sequence: Synthetic oligonucleotide
ucgcacugugggauaccac

SEQ ID NO: 489658 - RNA, 19 nt, Artificial Sequence
  Description of Artificial Sequence: Synthetic oligonucleotide
aauggccggaacacaucau

SEQ ID NO: 489659 - RNA, 19 nt, Artificial Sequence
  Description of Artificial Sequence: Synthetic oligonucleotide
uucuucgcacugugggaua

SEQ ID NO: 489660 - RNA, 19 nt, Artificial Sequence
  Description of Artificial Sequence: Synthetic oligonucleotide
guggucgaggauugaggga

SEQ ID NO: 489661 - RNA, 19 nt, Artificial Sequence
  Description of Artificial Sequence: Synthetic oligonucleotide
gcucugauaaugucucuaa

SEQ ID NO: 489662 - RNA, 19 nt, Artificial Sequence
  Description of Artificial Sequence: Synthetic oligonucleotide
caucccgugaagaucugcu

SEQ ID NO: 489663 - RNA, 19 nt, Artificial Sequence
  Description of Artificial Sequence: Synthetic oligonucleotide
acaccgcccuaucuaugca

SEQ ID NO: 489664 - RNA, 19 nt, Artificial Sequence
  Description of Artificial Sequence: Synthetic oligonucleotide
acuguaacaccagggucua

SEQ ID NO: 489665 - RNA, 19 nt, Artificial Sequence
  Description of Artificial Sequence: Synthetic oligonucleotide
acuggauauuacacuuuau

SEQ ID NO: 489666 - RNA, 19 nt, Artificial Sequence
  Description of Artificial Sequence: Synthetic oligonucleotide
caaucacgcccuaauuucu

SEQ ID NO: 489667 - RNA, 19 nt, Artificial Sequence
  Description of Artificial Sequence: Synthetic oligonucleotide
ccggaacacaucauacaac

SEQ ID NO: 489668 - RNA, 19 nt, Artificial Sequence
  Description of Artificial Sequence: Synthetic oligonucleotide
gaaugacauggaugaucaa

SEQ ID NO: 489669 - RNA, 19 nt, Artificial Sequence
  Description of Artificial Sequence: Synthetic oligonucleotide
cucaacgucaguggcagcu

SEQ ID NO: 489670 - RNA, 19 nt, Artificial Sequence
  Description of Artificial Sequence: Synthetic oligonucleotide
ggacaaguacagugacaug

SEQ ID NO: 489671 - RNA, 19 nt, Artificial Sequence
  Description of Artificial Sequence: Synthetic oligonucleotide
cauggaccauaaaggcaca

SEQ ID NO: 489672 - RNA, 19 nt, Artificial Sequence
  Description of Artificial Sequence: Synthetic oligonucleotide
caggcaaccagaguauucu

SEQ ID NO: 489673 - RNA, 19 nt, Artificial Sequence
  Description of Artificial Sequence: Synthetic oligonucleotide
ucaacgucaguggcagcuu

SEQ ID NO: 489674 - RNA, 19 nt, Artificial Sequence
  Description of Artificial Sequence: Synthetic oligonucleotide
gcauggaacuucugguaga

SEQ ID NO: 489675 - RNA, 19 nt, Artificial Sequence
  Description of Artificial Sequence: Synthetic oligonucleotide
ggcaaccagaguauucuuc

SEQ ID NO: 489676 - RNA, 19 nt, Artificial Sequence
  Description of Artificial Sequence: Synthetic oligonucleotide
gggauagacgguugacauc

SEQ ID NO: 489677 - RNA, 19 nt, Artificial Sequence
  Description of Artificial Sequence: Synthetic oligonucleotide
cacuucgaaccaaggcaca

SEQ ID NO: 489678 - RNA, 19 nt, Artificial Sequence
  Description of Artificial Sequence: Synthetic oligonucleotide
gguccgguacacaagccuc

SEQ ID NO: 489679 - RNA, 19 nt, Artificial Sequence
  Description of Artificial Sequence: Synthetic oligonucleotide
ggauaccacaucccgugaa

SEQ ID NO: 489680 - RNA, 19 nt, Artificial Sequence
  Description of Artificial Sequence: Synthetic oligonucleotide
cuucgcacugugggauacc

SEQ ID NO: 489681 - RNA, 19 nt, Artificial Sequence
  Description of Artificial Sequence: Synthetic oligonucleotide
gguagguguuuggcuauug

SEQ ID NO: 489682 - RNA, 19 nt, Artificial Sequence
  Description of Artificial Sequence: Synthetic oligonucleotide
augguccaaugguacuauu

SEQ ID NO: 489683 - RNA, 19 nt, Artificial Sequence
  Description of Artificial Sequence: Synthetic oligonucleotide
guucuucgcacugugggau

SEQ ID NO: 489684 - RNA, 19 nt, Artificial Sequence
  Description of Artificial Sequence: Synthetic oligonucleotide
gacgguugacauccauggu

SEQ ID NO: 489685 - RNA, 19 nt, Artificial Sequence
  Description of Artificial Sequence: Synthetic oligonucleotide
ggaacacaucauacaacga

SEQ ID NO: 489686 - RNA, 19 nt, Artificial Sequence
  Description of Artificial Sequence: Synthetic oligonucleotide
aucccaaauucaggcggga

SEQ ID NO: 489687 - RNA, 19 nt, Artificial Sequence
  Description of Artificial Sequence: Synthetic oligonucleotide
aggguguacuuggggccuc

SEQ ID NO: 489688 - RNA, 19 nt, Artificial Sequence
  Description of Artificial Sequence: Synthetic oligonucleotide
gacaagcguucuucgcacu

SEQ ID NO: 489689 - RNA, 19 nt, Artificial Sequence
  Description of Artificial Sequence: Synthetic oligonucleotide
cuucgaaccaaggcacaaa

SEQ ID NO: 489690 - RNA, 19 nt, Artificial Sequence
  Description of Artificial Sequence: Synthetic oligonucleotide
ggugguguauuuaauucau

SEQ ID NO: 489691 - RNA, 19 nt, Artificial Sequence
  Description of Artificial Sequence: Synthetic oligonucleotide
cacaucccgugaagaucug

SEQ ID NO: 489692 - RNA, 19 nt, Artificial Sequence
  Description of Artificial Sequence: Synthetic oligonucleotide
ccuaucuaugcaucuauau

SEQ ID NO: 489693 - RNA, 19 nt, Artificial Sequence
  Description of Artificial Sequence: Synthetic oligonucleotide
aagcaacguccaccaccaa

SEQ ID NO: 489694 - RNA, 19 nt, Artificial Sequence
  Description of Artificial Sequence: Synthetic oligonucleotide
caucaggaugggucaccca

SEQ ID NO: 489695 - RNA, 19 nt, Artificial Sequence
  Description of Artificial Sequence: Synthetic oligonucleotide
cagacuacugggucacagu

SEQ ID NO: 489696 - RNA, 19 nt, Artificial Sequence
  Description of Artificial Sequence: Synthetic oligonucleotide
gcugauagacucugaugcu

SEQ ID NO: 489697 - RNA, 19 nt, Artificial Sequence
  Description of Artificial Sequence: Synthetic oligonucleotide
ggaacaccgcccuaucuau

SEQ ID NO: 489698 - RNA, 19 nt, Artificial Sequence
  Description of Artificial Sequence: Synthetic oligonucleotide
cacgcacaauuucuccaaa

SEQ ID NO: 489699 - RNA, 19 nt, Artificial Sequence
  Description of Artificial Sequence: Synthetic oligonucleotide
gcaaacaaauuggaucagu

SEQ ID NO: 489700 - RNA, 19 nt, Artificial Sequence
  Description of Artificial Sequence: Synthetic oligonucleotide
agaacgugucgggcucugu

SEQ ID NO: 489701 - RNA, 19 nt, Artificial Sequence
  Description of Artificial Sequence: Synthetic oligonucleotide
ggaugaucaauggccggaa

SEQ ID NO: 489702 - RNA, 19 nt, Artificial Sequence
  Description of Artificial Sequence: Synthetic oligonucleotide
ggguccgguacacaagccu

SEQ ID NO: 489703 - RNA, 19 nt, Artificial Sequence
  Description of Artificial Sequence: Synthetic oligonucleotide
gggugaacucuuccuuuaa

SEQ ID NO: 489704 - RNA, 19 nt, Artificial Sequence
  Description of Artificial Sequence: Synthetic oligonucleotide
aucagacuacugggucaca

SEQ ID NO: 489705 - RNA, 19 nt, Artificial Sequence
  Description of Artificial Sequence: Synthetic oligonucleotide
gcaacguccaccaccaauu

SEQ ID NO: 489706 - RNA, 19 nt, Artificial Sequence
  Description of Artificial Sequence: Synthetic oligonucleotide
cuuugcugguugugcccaa

SEQ ID NO: 489707 - RNA, 19 nt, Artificial Sequence
  Description of Artificial Sequence: Synthetic oligonucleotide
gacaagcgaugaucuggau

SEQ ID NO: 489708 - RNA, 19 nt, Artificial Sequence
  Description of Artificial Sequence: Synthetic oligonucleotide
ccaugggauagacgguuga

SEQ ID NO: 489709 - RNA, 19 nt, Artificial Sequence
  Description of Artificial Sequence: Synthetic oligonucleotide
caagcguucuucgcacugu

SEQ ID NO: 489710 - RNA, 19 nt, Artificial Sequence
  Description of Artificial Sequence: Synthetic oligonucleotide
agguagguguuuggcuauu

SEQ ID NO: 489711 - RNA, 19 nt, Artificial Sequence
  Description of Artificial Sequence: Synthetic oligonucleotide
caugguccaaugguacuau

SEQ ID NO: 489712 - RNA, 19 nt, Artificial Sequence
  Description of Artificial Sequence: Synthetic oligonucleotide
auacaacgacacgcacaau

SEQ ID NO: 489713 - RNA, 19 nt, Artificial Sequence
  Description of Artificial Sequence: Synthetic oligonucleotide
gguguacuuggggccuccc

SEQ ID NO: 489714 - RNA, 19 nt, Artificial Sequence
  Description of Artificial Sequence: Synthetic oligonucleotide
cucuauuauuuuggcuggu

SEQ ID NO: 489715 - RNA, 19 nt, Artificial Sequence
  Description of Artificial Sequence: Synthetic oligonucleotide
cguucuucgcacuguggga

SEQ ID NO: 489716 - RNA, 19 nt, Artificial Sequence
  Description of Artificial Sequence: Synthetic oligonucleotide
cucccaugggauagacggu

SEQ ID NO: 489717 - RNA, 19 nt, Artificial Sequence
  Description of Artificial Sequence: Synthetic oligonucleotide
gguagacuugcugaauguu

SEQ ID NO: 489718 - RNA, 19 nt, Artificial Sequence
  Description of Artificial Sequence: Synthetic oligonucleotide
ggagaaucaaaaggugcuu

SEQ ID NO: 489719 - RNA, 19 nt, Artificial Sequence
  Description of Artificial Sequence: Synthetic oligonucleotide
gcccuaucuaugcaucuau

SEQ ID NO: 489720 - RNA, 19 nt, Artificial Sequence
  Description of Artificial Sequence: Synthetic oligonucleotide
ggcauacauggaccauaaa

SEQ ID NO: 489721 - RNA, 19 nt, Artificial Sequence
  Description of Artificial Sequence: Synthetic oligonucleotide
cuuggcauacauggaccau

SEQ ID NO: 489722 - RNA, 19 nt, Artificial Sequence
  Description of Artificial Sequence: Synthetic oligonucleotide
caccgcccuaucuaugcau

SEQ ID NO: 489723 - RNA, 19 nt, Artificial Sequence
  Description of Artificial Sequence: Synthetic oligonucleotide
ggguguacuuggggccucc

SEQ ID NO: 489724 - RNA, 19 nt, Artificial Sequence
  Description of Artificial Sequence: Synthetic oligonucleotide
cgcccuaauuucuuuggaa

SEQ ID NO: 489725 - RNA, 19 nt, Artificial Sequence
  Description of Artificial Sequence: Synthetic oligonucleotide
ccaugguccaaugguacua

SEQ ID NO: 489726 - RNA, 19 nt, Artificial Sequence
  Description of Artificial Sequence: Synthetic oligonucleotide
cccuaucuaugcaucuaua

SEQ ID NO: 489727 - RNA, 19 nt, Artificial Sequence
  Description of Artificial Sequence: Synthetic oligonucleotide
caacguccaccaccaauuu

SEQ ID NO: 489728 - RNA, 19 nt, Artificial Sequence
  Description of Artificial Sequence: Synthetic oligonucleotide
cucccugacuggccauggu

SEQ ID NO: 489729 - RNA, 19 nt, Artificial Sequence
  Description of Artificial Sequence: Synthetic oligonucleotide
gguugugcccaaggcugcu

SEQ ID NO: 489730 - RNA, 19 nt, Artificial Sequence
  Description of Artificial Sequence: Synthetic oligonucleotide
ggagaacgugucgggcucu

SEQ ID NO: 489731 - RNA, 19 nt, Artificial Sequence
  Description of Artificial Sequence: Synthetic oligonucleotide
ccacacgcacacugugcaa

SEQ ID NO: 489732 - RNA, 19 nt, Artificial Sequence
  Description of Artificial Sequence: Synthetic oligonucleotide
caaugcuuccugggauaau

SEQ ID NO: 489733 - RNA, 19 nt, Artificial Sequence
  Description of Artificial Sequence: Synthetic oligonucleotide
ccccucuuaccuuccaguu

SEQ ID NO: 489734 - RNA, 19 nt, Artificial Sequence
  Description of Artificial Sequence: Synthetic oligonucleotide
ggucgaggauugagggagu

SEQ ID NO: 489735 - RNA, 19 nt, Artificial Sequence
  Description of Artificial Sequence: Synthetic oligonucleotide
ccgcccuaucuaugcaucu

SEQ ID NO: 489736 - RNA, 19 nt, Artificial Sequence
  Description of Artificial Sequence: Synthetic oligonucleotide
cgggauucacaggaaaauu

SEQ ID NO: 489737 - RNA, 19 nt, Artificial Sequence
  Description of Artificial Sequence: Synthetic oligonucleotide
cccuugacuggugguguau

SEQ ID NO: 489738 - RNA, 19 nt, Artificial Sequence
  Description of Artificial Sequence: Synthetic oligonucleotide
aaauguuaacuuuagaagc

SEQ ID NO: 489739 - RNA, 19 nt, Artificial Sequence
  Description of Artificial Sequence: Synthetic oligonucleotide
aaugauacuuucuugagag

SEQ ID NO: 489740 - RNA, 19 nt, Artificial Sequence
  Description of Artificial Sequence: Synthetic oligonucleotide
uuuuaugagaugaaaagcc

SEQ ID NO: 489741 - RNA, 19 nt, Artificial Sequence
  Description of Artificial Sequence: Synthetic oligonucleotide
aauguaguguuuuaaaugu

SEQ ID NO: 489742 - RNA, 19 nt, Artificial Sequence
  Description of Artificial Sequence: Synthetic oligonucleotide
aacugaguguauuuggugc

SEQ ID NO: 489743 - RNA, 19 nt, Artificial Sequence
  Description of Artificial Sequence: Synthetic oligonucleotide
aaaacaacauguuuaaggu

SEQ ID NO: 489744 - RNA, 19 nt, Artificial Sequence
  Description of Artificial Sequence: Synthetic oligonucleotide
agaaucgugaccuuucucc

SEQ ID NO: 489745 - RNA, 19 nt, Artificial Sequence
  Description of Artificial Sequence: Synthetic oligonucleotide
uacauugguaguaagauca

SEQ ID NO: 489746 - RNA, 19 nt, Artificial Sequence
  Description of Artificial Sequence: Synthetic oligonucleotide
gaugaaaagccucagauuc

SEQ ID NO: 489747 - RNA, 19 nt, Artificial Sequence
  Description of Artificial Sequence: Synthetic oligonucleotide
agugucuagacacuuacac

SEQ ID NO: 489748 - RNA, 19 nt, Artificial Sequence
  Description of Artificial Sequence: Synthetic oligonucleotide
uuuaugauacagaagacau

SEQ ID NO: 489749 - RNA, 19 nt, Artificial Sequence
  Description of Artificial Sequence: Synthetic oligonucleotide
aaggagguuggccuaaggc

SEQ ID NO: 489750 - RNA, 19 nt, Artificial Sequence
  Description of Artificial Sequence: Synthetic oligonucleotide
uuugauaauuaguuguucc

SEQ ID NO: 489751 - RNA, 19 nt, Artificial Sequence
  Description of Artificial Sequence: Synthetic oligonucleotide
ugaaaugauacuuucuuga

SEQ ID NO: 489752 - RNA, 19 nt, Artificial Sequence
  Description of Artificial Sequence: Synthetic oligonucleotide
ugauaugccaaucacuuca

SEQ ID NO: 489753 - RNA, 19 nt, Artificial Sequence
  Description of Artificial Sequence: Synthetic oligonucleotide
uuuugcgaugacaaguugg

SEQ ID NO: 489754 - RNA, 19 nt, Artificial Sequence
  Description of Artificial Sequence: Synthetic oligonucleotide
uuuagaaggcaaaugcugc

SEQ ID NO: 489755 - RNA, 19 nt, Artificial Sequence
  Description of Artificial Sequence: Synthetic oligonucleotide
ucuaugaaaggacugacuc

SEQ ID NO: 489756 - RNA, 19 nt, Artificial Sequence
  Description of Artificial Sequence: Synthetic oligonucleotide
aguaaagugcaucaagcuc

SEQ ID NO: 489757 - RNA, 19 nt, Artificial Sequence
  Description of Artificial Sequence: Synthetic oligonucleotide
uuuaccuagauaaauguua

SEQ ID NO: 489758 - RNA, 19 nt, Artificial Sequence
  Description of Artificial Sequence: Synthetic oligonucleotide
uuaccuaugagauggacac

SEQ ID NO: 489759 - RNA, 19 nt, Artificial Sequence
  Description of Artificial Sequence: Synthetic oligonucleotide
guaaagaacguucacauuc

SEQ ID NO: 489760 - RNA, 19 nt, Artificial Sequence
  Description of Artificial Sequence: Synthetic oligonucleotide
aaaguggcuuauccaaagc

SEQ ID NO: 489761 - RNA, 19 nt, Artificial Sequence
  Description of Artificial Sequence: Synthetic oligonucleotide
auuacuuuaauugcuaaug

SEQ ID NO: 489762 - RNA, 19 nt, Artificial Sequence
  Description of Artificial Sequence: Synthetic oligonucleotide
ucuaucagauaaaacugag

SEQ ID NO: 489763 - RNA, 19 nt, Artificial Sequence
  Description of Artificial Sequence: Synthetic oligonucleotide
guaaguuucuaucagauaa

SEQ ID NO: 489764 - RNA, 19 nt, Artificial Sequence
  Description of Artificial Sequence: Synthetic oligonucleotide
augaacguaaguuucuauc

SEQ ID NO: 489765 - RNA, 19 nt, Artificial Sequence
  Description of Artificial Sequence: Synthetic oligonucleotide
ucagauaaaacugaggcau

SEQ ID NO: 489766 - RNA, 19 nt, Artificial Sequence
  Description of Artificial Sequence: Synthetic oligonucleotide
uauuuggugcucuacguag

SEQ ID NO: 489767 - RNA, 19 nt, Artificial Sequence
  Description of Artificial Sequence: Synthetic oligonucleotide
aagguuauagaaguaaagu

SEQ ID NO: 489768 - RNA, 19 nt, Artificial Sequence
  Description of Artificial Sequence: Synthetic oligonucleotide
aaauuggugauguuguaaa

SEQ ID NO: 489769 - RNA, 19 nt, Artificial Sequence
  Description of Artificial Sequence: Synthetic oligonucleotide
ugaacguaaguuucuauca

SEQ ID NO: 489770 - RNA, 19 nt, Artificial Sequence
  Description of Artificial Sequence: Synthetic oligonucleotide
ucaacgaccacccuugagu

SEQ ID NO: 489771 - RNA, 19 nt, Artificial Sequence
  Description of Artificial Sequence: Synthetic oligonucleotide
uuuaugagaugaaaagccu

SEQ ID NO: 489772 - RNA, 19 nt, Artificial Sequence
  Description of Artificial Sequence: Synthetic oligonucleotide
ggugauguuguaaagaacg

SEQ ID NO: 489773 - RNA, 19 nt, Artificial Sequence
  Description of Artificial Sequence: Synthetic oligonucleotide
ucauuaagaaggcaacuga

SEQ ID NO: 489774 - RNA, 19 nt, Artificial Sequence
  Description of Artificial Sequence: Synthetic oligonucleotide
aaaugauacuuucuugaga

SEQ ID NO: 489775 - RNA, 19 nt, Artificial Sequence
  Description of Artificial Sequence: Synthetic oligonucleotide
auagaaguaaagugcauca

SEQ ID NO: 489776 - RNA, 19 nt, Artificial Sequence
  Description of Artificial Sequence: Synthetic oligonucleotide
ucuaugaugguugucagcu

SEQ ID NO: 489777 - RNA, 19 nt, Artificial Sequence
  Description of Artificial Sequence: Synthetic oligonucleotide
uuugcgaugacaaguuggc

SEQ ID NO: 489778 - RNA, 19 nt, Artificial Sequence
  Description of Artificial Sequence: Synthetic oligonucleotide
aacaacauguuuaagguau

SEQ ID NO: 489779 - RNA, 19 nt, Artificial Sequence
  Description of Artificial Sequence: Synthetic oligonucleotide
aaccccaacaugcuacugg

SEQ ID NO: 489780 - RNA, 19 nt, Artificial Sequence
  Description of Artificial Sequence: Synthetic oligonucleotide
uauaaagggcuacauguac

SEQ ID NO: 489781 - RNA, 19 nt, Artificial Sequence
  Description of Artificial Sequence: Synthetic oligonucleotide
uuuaagggccauauucucc

SEQ ID NO: 489782 - RNA, 19 nt, Artificial Sequence
  Description of Artificial Sequence: Synthetic oligonucleotide
cuuuuaugagaugaaaagc

SEQ ID NO: 489783 - RNA, 19 nt, Artificial Sequence
  Description of Artificial Sequence: Synthetic oligonucleotide
caucaguccacauuggccc

SEQ ID NO: 489784 - RNA, 19 nt, Artificial Sequence
  Description of Artificial Sequence: Synthetic oligonucleotide
gauaauuaguuguucccug

SEQ ID NO: 489785 - RNA, 19 nt, Artificial Sequence
  Description of Artificial Sequence: Synthetic oligonucleotide
agcuauugcacucuucuag

SEQ ID NO: 489786 - RNA, 19 nt, Artificial Sequence
  Description of Artificial Sequence: Synthetic oligonucleotide
uuagaauagcuauugcacu

SEQ ID NO: 489787 - RNA, 19 nt, Artificial Sequence
  Description of Artificial Sequence: Synthetic oligonucleotide
aacuauagcuggccagagc

SEQ ID NO: 489788 - RNA, 19 nt, Artificial Sequence
  Description of Artificial Sequence: Synthetic oligonucleotide
cauauaugcuaucaagggc

SEQ ID NO: 489789 - RNA, 19 nt, Artificial Sequence
  Description of Artificial Sequence: Synthetic oligonucleotide
aauguuaacuuuagaagcu

SEQ ID NO: 489790 - RNA, 19 nt, Artificial Sequence
  Description of Artificial Sequence: Synthetic oligonucleotide
ucuuaaguucaaauuggug

SEQ ID NO: 489791 - RNA, 19 nt, Artificial Sequence
  Description of Artificial Sequence: Synthetic oligonucleotide
aaaaguauugcaccacaaa

SEQ ID NO: 489792 - RNA, 19 nt, Artificial Sequence
  Description of Artificial Sequence: Synthetic oligonucleotide
uucuaucagauaaaacuga

SEQ ID NO: 489793 - RNA, 19 nt, Artificial Sequence
  Description of Artificial Sequence: Synthetic oligonucleotide
gaagcuaucuuguuggcca

SEQ ID NO: 489794 - RNA, 19 nt, Artificial Sequence
  Description of Artificial Sequence: Synthetic oligonucleotide
ucuacguagagaucauucc

SEQ ID NO: 489795 - RNA, 19 nt, Artificial Sequence
  Description of Artificial Sequence: Synthetic oligonucleotide
agaagcuccaguuauuacu

SEQ ID NO: 489796 - RNA, 19 nt, Artificial Sequence
  Description of Artificial Sequence: Synthetic oligonucleotide
gauguuguaaagaacguuc

SEQ ID NO: 489797 - RNA, 19 nt, Artificial Sequence
  Description of Artificial Sequence: Synthetic oligonucleotide
guuuauaauagugaagaac

SEQ ID NO: 489798 - RNA, 19 nt, Artificial Sequence
  Description of Artificial Sequence: Synthetic oligonucleotide
ucaucaguccacauuggcc

SEQ ID NO: 489799 - RNA, 19 nt, Artificial Sequence
  Description of Artificial Sequence: Synthetic oligonucleotide
gauauuagcagcacuacga

SEQ ID NO: 489800 - RNA, 19 nt, Artificial Sequence
  Description of Artificial Sequence: Synthetic oligonucleotide
acauauguuggccuuaaga

SEQ ID NO: 489801 - RNA, 19 nt, Artificial Sequence
  Description of Artificial Sequence: Synthetic oligonucleotide
aauugcuaaugaaacuuuc

SEQ ID NO: 489802 - RNA, 19 nt, Artificial Sequence
  Description of Artificial Sequence: Synthetic oligonucleotide
aaaguugaucucucgggca

SEQ ID NO: 489803 - RNA, 19 nt, Artificial Sequence
  Description of Artificial Sequence: Synthetic oligonucleotide
ugguuggggaaacaaaaug

SEQ ID NO: 489804 - RNA, 19 nt, Artificial Sequence
  Description of Artificial Sequence: Synthetic oligonucleotide
uaauagugaagaacauuug

SEQ ID NO: 489805 - RNA, 19 nt, Artificial Sequence
  Description of Artificial Sequence: Synthetic oligonucleotide
cuacguagagaucauuccg

SEQ ID NO: 489806 - RNA, 19 nt, Artificial Sequence
  Description of Artificial Sequence: Synthetic oligonucleotide
uucauuaagaaggcaacug

SEQ ID NO: 489807 - RNA, 19 nt, Artificial Sequence
  Description of Artificial Sequence: Synthetic oligonucleotide
caacauugcaugaggaacc

SEQ ID NO: 489808 - RNA, 19 nt, Artificial Sequence
  Description of Artificial Sequence: Synthetic oligonucleotide
ucguuaucaaagguuauag

SEQ ID NO: 489809 - RNA, 19 nt, Artificial Sequence
  Description of Artificial Sequence: Synthetic oligonucleotide
uuaccuagauaaauguuaa

SEQ ID NO: 489810 - RNA, 19 nt, Artificial Sequence
  Description of Artificial Sequence: Synthetic oligonucleotide
auaauagugaagaacauuu

SEQ ID NO: 489811 - RNA, 19 nt, Artificial Sequence
  Description of Artificial Sequence: Synthetic oligonucleotide
auugguaguaagaucacag

SEQ ID NO: 489812 - RNA, 19 nt, Artificial Sequence
  Description of Artificial Sequence: Synthetic oligonucleotide
ugguaguaagaucacaguc

SEQ ID NO: 489813 - RNA, 19 nt, Artificial Sequence
  Description of Artificial Sequence: Synthetic oligonucleotide
uuaagggccauauucuccu

SEQ ID NO: 489814 - RNA, 19 nt, Artificial Sequence
  Description of Artificial Sequence: Synthetic oligonucleotide
uuaugagaugaaaagccuc

SEQ ID NO: 489815 - RNA, 19 nt, Artificial Sequence
  Description of Artificial Sequence: Synthetic oligonucleotide
uuaugauacagaagacaug

SEQ ID NO: 489816 - RNA, 19 nt, Artificial Sequence
  Description of Artificial Sequence: Synthetic oligonucleotide
gcauauaugcuaucaaggg

SEQ ID NO: 489817 - RNA, 19 nt, Artificial Sequence
  Description of Artificial Sequence: Synthetic oligonucleotide
gaacguaaguuucuaucag

SEQ ID NO: 489818 - RNA, 19 nt, Artificial Sequence
  Description of Artificial Sequence: Synthetic oligonucleotide
ugaagugcuuuaaucaaaa

SEQ ID NO: 489819 - RNA, 19 nt, Artificial Sequence
  Description of Artificial Sequence: Synthetic oligonucleotide
acugucucguuaucaaagg

SEQ ID NO: 489820 - RNA, 19 nt, Artificial Sequence
  Description of Artificial Sequence: Synthetic oligonucleotide
uauagaaguaaagugcauc

SEQ ID NO: 489821 - RNA, 19 nt, Artificial Sequence
  Description of Artificial Sequence: Synthetic oligonucleotide
ucaaagguuauagaaguaa

SEQ ID NO: 489822 - RNA, 19 nt, Artificial Sequence
  Description of Artificial Sequence: Synthetic oligonucleotide
cuaugaaaggacugacucc

SEQ ID NO: 489823 - RNA, 19 nt, Artificial Sequence
  Description of Artificial Sequence: Synthetic oligonucleotide
uguauuuggugcucuacgu

SEQ ID NO: 489824 - RNA, 19 nt, Artificial Sequence
  Description of Artificial Sequence: Synthetic oligonucleotide
uccaagacgagcacauuca

SEQ ID NO: 489825 - RNA, 19 nt, Artificial Sequence
  Description of Artificial Sequence: Synthetic oligonucleotide
uauaugcuaucaagggcag

SEQ ID NO: 489826 - RNA, 19 nt, Artificial Sequence
  Description of Artificial Sequence: Synthetic oligonucleotide
cuucuagugcugaaggagc

SEQ ID NO: 489827 - RNA, 19 nt, Artificial Sequence
  Description of Artificial Sequence: Synthetic oligonucleotide
gagauagauggccggaugc

SEQ ID NO: 489828 - RNA, 19 nt, Artificial Sequence
  Description of Artificial Sequence: Synthetic oligonucleotide
auugcacucuucuagugcu

SEQ ID NO: 489829 - RNA, 19 nt, Artificial Sequence
  Description of Artificial Sequence: Synthetic oligonucleotide
uguaaacagugucuagaca

SEQ ID NO: 489830 - RNA, 19 nt, Artificial Sequence
  Description of Artificial Sequence: Synthetic oligonucleotide
auauaaauuuaccuagaua

SEQ ID NO: 489831 - RNA, 19 nt, Artificial Sequence
  Description of Artificial Sequence: Synthetic oligonucleotide
agugaagaacauuugcuau

SEQ ID NO: 489832 - RNA, 19 nt, Artificial Sequence
  Description of Artificial Sequence: Synthetic oligonucleotide
guuauagaaguaaagugca

SEQ ID NO: 489833 - RNA, 19 nt, Artificial Sequence
  Description of Artificial Sequence: Synthetic oligonucleotide
ugauaauuaguuguucccu

SEQ ID NO: 489834 - RNA, 19 nt, Artificial Sequence
  Description of Artificial Sequence: Synthetic oligonucleotide
cauuccgucugcuugcuag

SEQ ID NO: 489835 - RNA, 19 nt, Artificial Sequence
  Description of Artificial Sequence: Synthetic oligonucleotide
uguuugauaauuaguuguu

SEQ ID NO: 489836 - RNA, 19 nt, Artificial Sequence
  Description of Artificial Sequence: Synthetic oligonucleotide
ucuuauacuccagaguuuc

SEQ ID NO: 489837 - RNA, 19 nt, Artificial Sequence
  Description of Artificial Sequence: Synthetic oligonucleotide
aucagauaaaacugaggca

SEQ ID NO: 489838 - RNA, 19 nt, Artificial Sequence
  Description of Artificial Sequence: Synthetic oligonucleotide
acuuggauuucuguauggc

SEQ ID NO: 489839 - RNA, 19 nt, Artificial Sequence
  Description of Artificial Sequence: Synthetic oligonucleotide
auuuuaugauacagaagac

SEQ ID NO: 489840 - RNA, 19 nt, Artificial Sequence
  Description of Artificial Sequence: Synthetic oligonucleotide
gagcuaaaguggcuuaucc

SEQ ID NO: 489841 - RNA, 19 nt, Artificial Sequence
  Description of Artificial Sequence: Synthetic oligonucleotide
ugggauauuagcagcacua

SEQ ID NO: 489842 - RNA, 19 nt, Artificial Sequence
  Description of Artificial Sequence: Synthetic oligonucleotide
agacauguuuauaauagug

SEQ ID NO: 489843 - RNA, 19 nt, Artificial Sequence
  Description of Artificial Sequence: Synthetic oligonucleotide
uaaaugagugggccuaaga

SEQ ID NO: 489844 - RNA, 19 nt, Artificial Sequence
  Description of Artificial Sequence: Synthetic oligonucleotide
agcauuauuggugacagaa

SEQ ID NO: 489845 - RNA, 19 nt, Artificial Sequence
  Description of Artificial Sequence: Synthetic oligonucleotide
auaauuaguuguucccuga

SEQ ID NO: 489846 - RNA, 19 nt, Artificial Sequence
  Description of Artificial Sequence: Synthetic oligonucleotide
gacgagcacauucauuaag

SEQ ID NO: 489847 - RNA, 19 nt, Artificial Sequence
  Description of Artificial Sequence: Synthetic oligonucleotide
aguuauuacuuuaauugcu

SEQ ID NO: 489848 - RNA, 19 nt, Artificial Sequence
  Description of Artificial Sequence: Synthetic oligonucleotide
uagugaagaacauuugcua

SEQ ID NO: 489849 - RNA, 19 nt, Artificial Sequence
  Description of Artificial Sequence: Synthetic oligonucleotide
aguucuaggugguugggga

SEQ ID NO: 489850 - RNA, 19 nt, Artificial Sequence
  Description of Artificial Sequence: Synthetic oligonucleotide
agcuccuuagaauagcuau

SEQ ID NO: 489851 - RNA, 19 nt, Artificial Sequence
  Description of Artificial Sequence: Synthetic oligonucleotide
guuggagauagauggccgg

SEQ ID NO: 489852 - RNA, 19 nt, Artificial Sequence
  Description of Artificial Sequence: Synthetic oligonucleotide
uucuaugaaaggacugacu

SEQ ID NO: 489853 - RNA, 19 nt, Artificial Sequence
  Description of Artificial Sequence: Synthetic oligonucleotide
aaguugcauacucaucagu

SEQ ID NO: 489854 - RNA, 19 nt, Artificial Sequence
  Description of Artificial Sequence: Synthetic oligonucleotide
uauaauagugaagaacauu

SEQ ID NO: 489855 - RNA, 19 nt, Artificial Sequence
  Description of Artificial Sequence: Synthetic oligonucleotide
uagcuuuacuccaggaacu

SEQ ID NO: 489856 - RNA, 19 nt, Artificial Sequence
  Description of Artificial Sequence: Synthetic oligonucleotide
uuaagugcuaauguucaaa

SEQ ID NO: 489857 - RNA, 19 nt, Artificial Sequence
  Description of Artificial Sequence: Synthetic oligonucleotide
auagauggccggaugcugc

SEQ ID NO: 489858 - RNA, 19 nt, Artificial Sequence
  Description of Artificial Sequence: Synthetic oligonucleotide
aauuaguuguucccugaua

SEQ ID NO: 489859 - RNA, 19 nt, Artificial Sequence
  Description of Artificial Sequence: Synthetic oligonucleotide
ucaacuauagcuggccaga

SEQ ID NO: 489860 - RNA, 19 nt, Artificial Sequence
  Description of Artificial Sequence: Synthetic oligonucleotide
ugaaggagcuuaacgugca

SEQ ID NO: 489861 - RNA, 19 nt, Artificial Sequence
  Description of Artificial Sequence: Synthetic oligonucleotide
ugcaccacaaaugacucac

SEQ ID NO: 489862 - RNA, 19 nt, Artificial Sequence
  Description of Artificial Sequence: Synthetic oligonucleotide
cauaccagcuugcaaggag

SEQ ID NO: 489863 - RNA, 19 nt, Artificial Sequence
  Description of Artificial Sequence: Synthetic oligonucleotide
uccaguuauuacuuuaauu

SEQ ID NO: 489864 - RNA, 19 nt, Artificial Sequence
  Description of Artificial Sequence: Synthetic oligonucleotide
auugcaccacaaaugacuc

SEQ ID NO: 489865 - RNA, 19 nt, Artificial Sequence
  Description of Artificial Sequence: Synthetic oligonucleotide
cucaacuauagcuggccag

SEQ ID NO: 489866 - RNA, 19 nt, Artificial Sequence
  Description of Artificial Sequence: Synthetic oligonucleotide
aauagcuauugcacucuuc

SEQ ID NO: 489867 - RNA, 19 nt, Artificial Sequence
  Description of Artificial Sequence: Synthetic oligonucleotide
uucucgacaggacaugaau

SEQ ID NO: 489868 - RNA, 19 nt, Artificial Sequence
  Description of Artificial Sequence: Synthetic oligonucleotide
uugguaguaagaucacagu

SEQ ID NO: 489869 - RNA, 19 nt, Artificial Sequence
  Description of Artificial Sequence: Synthetic oligonucleotide
uucccuugagagcuaaagu

SEQ ID NO: 489870 - RNA, 19 nt, Artificial Sequence
  Description of Artificial Sequence: Synthetic oligonucleotide
ucagucauguaaccucugu

SEQ ID NO: 489871 - RNA, 19 nt, Artificial Sequence
  Description of Artificial Sequence: Synthetic oligonucleotide
caugcuacuggaaggggac

SEQ ID NO: 489872 - RNA, 19 nt, Artificial Sequence
  Description of Artificial Sequence: Synthetic oligonucleotide
auauguuggccuuaagaua

SEQ ID NO: 489873 - RNA, 19 nt, Artificial Sequence
  Description of Artificial Sequence: Synthetic oligonucleotide
ugagcaugcucucuucuuc

SEQ ID NO: 489874 - RNA, 19 nt, Artificial Sequence
  Description of Artificial Sequence: Synthetic oligonucleotide
uccuuagaauagcuauugc

SEQ ID NO: 489875 - RNA, 19 nt, Artificial Sequence
  Description of Artificial Sequence: Synthetic oligonucleotide
aaugccauccugauuuaga

SEQ ID NO: 489876 - RNA, 19 nt, Artificial Sequence
  Description of Artificial Sequence: Synthetic oligonucleotide
acugaguguauuuggugcu

SEQ ID NO: 489877 - RNA, 19 nt, Artificial Sequence
  Description of Artificial Sequence: Synthetic oligonucleotide
augauacuuucuugagagg

SEQ ID NO: 489878 - RNA, 19 nt, Artificial Sequence
  Description of Artificial Sequence: Synthetic oligonucleotide
ugcuaucaagggcagcagc

SEQ ID NO: 489879 - RNA, 19 nt, Artificial Sequence
  Description of Artificial Sequence: Synthetic oligonucleotide
auacuccagaguuucuuug

SEQ ID NO: 489880 - RNA, 19 nt, Artificial Sequence
  Description of Artificial Sequence: Synthetic oligonucleotide
acauguacugucucguuau

SEQ ID NO: 489881 - RNA, 19 nt, Artificial Sequence
  Description of Artificial Sequence: Synthetic oligonucleotide
uuauagaaguaaagugcau

SEQ ID NO: 489882 - RNA, 19 nt, Artificial Sequence
  Description of Artificial Sequence: Synthetic oligonucleotide
aaggcaacugaguguauuu

SEQ ID NO: 489883 - RNA, 19 nt, Artificial Sequence
  Description of Artificial Sequence: Synthetic oligonucleotide
cauugcaugaggaacccca

SEQ ID NO: 489884 - RNA, 19 nt, Artificial Sequence
  Description of Artificial Sequence: Synthetic oligonucleotide
aacaugcuacuggaagggg

SEQ ID NO: 489885 - RNA, 19 nt, Artificial Sequence
  Description of Artificial Sequence: Synthetic oligonucleotide
uacauguacugucucguua

SEQ ID NO: 489886 - RNA, 19 nt, Artificial Sequence
  Description of Artificial Sequence: Synthetic oligonucleotide
uggacacaucucaaguucu

SEQ ID NO: 489887 - RNA, 19 nt, Artificial Sequence
  Description of Artificial Sequence: Synthetic oligonucleotide
agcuaaaguggcuuaucca

SEQ ID NO: 489888 - RNA, 19 nt, Artificial Sequence
  Description of Artificial Sequence: Synthetic oligonucleotide
cuucuaugaugguugucag

SEQ ID NO: 489889 - RNA, 19 nt, Artificial Sequence
  Description of Artificial Sequence: Synthetic oligonucleotide
aacucaaaucaaaugguuu

SEQ ID NO: 489890 - RNA, 19 nt, Artificial Sequence
  Description of Artificial Sequence: Synthetic oligonucleotide
cuggcgaaguuccugcucc

SEQ ID NO: 489891 - RNA, 19 nt, Artificial Sequence
  Description of Artificial Sequence: Synthetic oligonucleotide
uucuaugaugguugucagc

SEQ ID NO: 489892 - RNA, 19 nt, Artificial Sequence
  Description of Artificial Sequence: Synthetic oligonucleotide
ugaaacuuucaaacucaaa

SEQ ID NO: 489893 - RNA, 19 nt, Artificial Sequence
  Description of Artificial Sequence: Synthetic oligonucleotide
uucacacagguuccgauuu

SEQ ID NO: 489894 - RNA, 19 nt, Artificial Sequence
  Description of Artificial Sequence: Synthetic oligonucleotide
uuggccuaaggcuuguaaa

SEQ ID NO: 489895 - RNA, 19 nt, Artificial Sequence
  Description of Artificial Sequence: Synthetic oligonucleotide
cagugaaguucauaccagc

SEQ ID NO: 489896 - RNA, 19 nt, Artificial Sequence
  Description of Artificial Sequence: Synthetic oligonucleotide
aaacucaaaucaaaugguu

SEQ ID NO: 489897 - RNA, 19 nt, Artificial Sequence
  Description of Artificial Sequence: Synthetic oligonucleotide
ucaagcuccuuagaauagc

SEQ ID NO: 489898 - RNA, 19 nt, Artificial Sequence
  Description of Artificial Sequence: Synthetic oligonucleotide
augagugggccuaagagga

SEQ ID NO: 489899 - RNA, 19 nt, Artificial Sequence
  Description of Artificial Sequence: Synthetic oligonucleotide
agugcguucccugcauugc

SEQ ID NO: 489900 - RNA, 19 nt, Artificial Sequence
  Description of Artificial Sequence: Synthetic oligonucleotide
cuguuugauaauuaguugu

SEQ ID NO: 489901 - RNA, 19 nt, Artificial Sequence
  Description of Artificial Sequence: Synthetic oligonucleotide
auaccagcuugcaaggagg

SEQ ID NO: 489902 - RNA, 19 nt, Artificial Sequence
  Description of Artificial Sequence: Synthetic oligonucleotide
gaaggggacuucaacgacc

SEQ ID NO: 489903 - RNA, 19 nt, Artificial Sequence
  Description of Artificial Sequence: Synthetic oligonucleotide
guagcucccuccuugggug

SEQ ID NO: 489904 - RNA, 19 nt, Artificial Sequence
  Description of Artificial Sequence: Synthetic oligonucleotide
gacucaacuauagcuggcc

SEQ ID NO: 489905 - RNA, 19 nt, Artificial Sequence
  Description of Artificial Sequence: Synthetic oligonucleotide
aaagaacguucacauucau

SEQ ID NO: 489906 - RNA, 19 nt, Artificial Sequence
  Description of Artificial Sequence: Synthetic oligonucleotide
agacaucuuauacuccaga

SEQ ID NO: 489907 - RNA, 19 nt, Artificial Sequence
  Description of Artificial Sequence: Synthetic oligonucleotide
cccguuaccuaugagaugg

SEQ ID NO: 489908 - RNA, 19 nt, Artificial Sequence
  Description of Artificial Sequence: Synthetic oligonucleotide
ugaucucucgggcaucagu

SEQ ID NO: 489909 - RNA, 19 nt, Artificial Sequence
  Description of Artificial Sequence: Synthetic oligonucleotide
gugaaucuguaguagggca

SEQ ID NO: 489910 - RNA, 19 nt, Artificial Sequence
  Description of Artificial Sequence: Synthetic oligonucleotide
uugggugguucuaggacca

SEQ ID NO: 489911 - RNA, 19 nt, Artificial Sequence
  Description of Artificial Sequence: Synthetic oligonucleotide
caacugaguguauuuggug

SEQ ID NO: 489912 - RNA, 19 nt, Artificial Sequence
  Description of Artificial Sequence: Synthetic oligonucleotide
uuuagaagcuccaguuauu

SEQ ID NO: 489913 - RNA, 19 nt, Artificial Sequence
  Description of Artificial Sequence: Synthetic oligonucleotide
ucucgacaggacaugaauu

SEQ ID NO: 489914 - RNA, 19 nt, Artificial Sequence
  Description of Artificial Sequence: Synthetic oligonucleotide
gaaucgugaccuuucucca

SEQ ID NO: 489915 - RNA, 19 nt, Artificial Sequence
  Description of Artificial Sequence: Synthetic oligonucleotide
gagcugggauauuagcagc

SEQ ID NO: 489916 - RNA, 19 nt, Artificial Sequence
  Description of Artificial Sequence: Synthetic oligonucleotide
ccccuauuuacauugguag

SEQ ID NO: 489917 - RNA, 19 nt, Artificial Sequence
  Description of Artificial Sequence: Synthetic oligonucleotide
cuuggauuucuguauggca

SEQ ID NO: 489918 - RNA, 19 nt, Artificial Sequence
  Description of Artificial Sequence: Synthetic oligonucleotide
ugguucuaggaccauggua

SEQ ID NO: 489919 - RNA, 19 nt, Artificial Sequence
  Description of Artificial Sequence: Synthetic oligonucleotide
cucauauauaaagggcuac

SEQ ID NO: 489920 - RNA, 19 nt, Artificial Sequence
  Description of Artificial Sequence: Synthetic oligonucleotide
ugcugcaaauacuuggauu

SEQ ID NO: 489921 - RNA, 19 nt, Artificial Sequence
  Description of Artificial Sequence: Synthetic oligonucleotide
gauagauggccggaugcug

SEQ ID NO: 489922 - RNA, 19 nt, Artificial Sequence
  Description of Artificial Sequence: Synthetic oligonucleotide
gaaaagccucagauucucg

SEQ ID NO: 489923 - RNA, 19 nt, Artificial Sequence
  Description of Artificial Sequence: Synthetic oligonucleotide
aaaugaacguaaguuucua

SEQ ID NO: 489924 - RNA, 19 nt, Artificial Sequence
  Description of Artificial Sequence: Synthetic oligonucleotide
ugguuuggauccaaaccaa

SEQ ID NO: 489925 - RNA, 19 nt, Artificial Sequence
  Description of Artificial Sequence: Synthetic oligonucleotide
gaaggggccauauuuggua

SEQ ID NO: 489926 - RNA, 19 nt, Artificial Sequence
  Description of Artificial Sequence: Synthetic oligonucleotide
uuaaaugagugggccuaag

SEQ ID NO: 489927 - RNA, 19 nt, Artificial Sequence
  Description of Artificial Sequence: Synthetic oligonucleotide
agaauagcuauugcacucu

SEQ ID NO: 489928 - RNA, 19 nt, Artificial Sequence
  Description of Artificial Sequence: Synthetic oligonucleotide
auaaauuuaccuagauaaa

SEQ ID NO: 489929 - RNA, 19 nt, Artificial Sequence
  Description of Artificial Sequence: Synthetic oligonucleotide
guuaccuaugagauggaca

SEQ ID NO: 489930 - RNA, 19 nt, Artificial Sequence
  Description of Artificial Sequence: Synthetic oligonucleotide
agugaaguucauaccagcu

SEQ ID NO: 489931 - RNA, 19 nt, Artificial Sequence
  Description of Artificial Sequence: Synthetic oligonucleotide
uuauacuccagaguuucuu

SEQ ID NO: 489932 - RNA, 19 nt, Artificial Sequence
  Description of Artificial Sequence: Synthetic oligonucleotide
agagcuaaaguggcuuauc

SEQ ID NO: 489933 - RNA, 19 nt, Artificial Sequence
  Description of Artificial Sequence: Synthetic oligonucleotide
ugcuccuuauggagaagca

SEQ ID NO: 489934 - RNA, 19 nt, Artificial Sequence
  Description of Artificial Sequence: Synthetic oligonucleotide
caucuuauacuccagaguu

SEQ ID NO: 489935 - RNA, 19 nt, Artificial Sequence
  Description of Artificial Sequence: Synthetic oligonucleotide
cuuaacgugcagcaggaaa

SEQ ID NO: 489936 - RNA, 19 nt, Artificial Sequence
  Description of Artificial Sequence: Synthetic oligonucleotide
acauacauauguuggccuu

SEQ ID NO: 489937 - RNA, 19 nt, Artificial Sequence
  Description of Artificial Sequence: Synthetic oligonucleotide
uaggaccaugguauccgag

SEQ ID NO: 489938 - RNA, 19 nt, Artificial Sequence
  Description of Artificial Sequence: Synthetic oligonucleotide
agcaugagugcguucccug

SEQ ID NO: 489939 - RNA, 19 nt, Artificial Sequence
  Description of Artificial Sequence: Synthetic oligonucleotide
accuaugagauggacacau

SEQ ID NO: 489940 - RNA, 19 nt, Artificial Sequence
  Description of Artificial Sequence: Synthetic oligonucleotide
ggcuacauguacugucucg

SEQ ID NO: 489941 - RNA, 19 nt, Artificial Sequence
  Description of Artificial Sequence: Synthetic oligonucleotide
uacauauguuggccuuaag

SEQ ID NO: 489942 - RNA, 19 nt, Artificial Sequence
  Description of Artificial Sequence: Synthetic oligonucleotide
aaggggacuucaacgacca

SEQ ID NO: 489943 - RNA, 19 nt, Artificial Sequence
  Description of Artificial Sequence: Synthetic oligonucleotide
uagaagcuccaguuauuac

SEQ ID NO: 489944 - RNA, 19 nt, Artificial Sequence
  Description of Artificial Sequence: Synthetic oligonucleotide
gagugcguucccugcauug

SEQ ID NO: 489945 - RNA, 19 nt, Artificial Sequence
  Description of Artificial Sequence: Synthetic oligonucleotide
ggccauauucuccugcugc

SEQ ID NO: 489946 - RNA, 19 nt, Artificial Sequence
  Description of Artificial Sequence: Synthetic oligonucleotide
auaugcuaucaagggcagc

SEQ ID NO: 489947 - RNA, 19 nt, Artificial Sequence
  Description of Artificial Sequence: Synthetic oligonucleotide
guuugauaauuaguuguuc

SEQ ID NO: 489948 - RNA, 19 nt, Artificial Sequence
  Description of Artificial Sequence: Synthetic oligonucleotide
acucaacuauagcuggcca

SEQ ID NO: 489949 - RNA, 19 nt, Artificial Sequence
  Description of Artificial Sequence: Synthetic oligonucleotide
uaccuagauaaauguuaac

SEQ ID NO: 489950 - RNA, 19 nt, Artificial Sequence
  Description of Artificial Sequence: Synthetic oligonucleotide
acauugguaguaagaucac

SEQ ID NO: 489951 - RNA, 19 nt, Artificial Sequence
  Description of Artificial Sequence: Synthetic oligonucleotide
gcaacauugcaugaggaac

SEQ ID NO: 489952 - RNA, 19 nt, Artificial Sequence
  Description of Artificial Sequence: Synthetic oligonucleotide
gaaggagcuuaacgugcag

SEQ ID NO: 489953 - RNA, 19 nt, Artificial Sequence
  Description of Artificial Sequence: Synthetic oligonucleotide
accccaacaugcuacugga

SEQ ID NO: 489954 - RNA, 19 nt, Artificial Sequence
  Description of Artificial Sequence: Synthetic oligonucleotide
auguuguaaagaacguuca

SEQ ID NO: 489955 - RNA, 19 nt, Artificial Sequence
  Description of Artificial Sequence: Synthetic oligonucleotide
acgagcacauucauuaaga

SEQ ID NO: 489956 - RNA, 19 nt, Artificial Sequence
  Description of Artificial Sequence: Synthetic oligonucleotide
gugcucuacguagagauca

SEQ ID NO: 489957 - RNA, 19 nt, Artificial Sequence
  Description of Artificial Sequence: Synthetic oligonucleotide
aaacccacccaagucuggu

SEQ ID NO: 489958 - RNA, 19 nt, Artificial Sequence
  Description of Artificial Sequence: Synthetic oligonucleotide
ugagugggccuaagaggag

SEQ ID NO: 489959 - RNA, 19 nt, Artificial Sequence
  Description of Artificial Sequence: Synthetic oligonucleotide
cacuacgaagaucugggca

SEQ ID NO: 489960 - RNA, 19 nt, Artificial Sequence
  Description of Artificial Sequence: Synthetic oligonucleotide
cuaugagauggacacaucu

SEQ ID NO: 489961 - RNA, 19 nt, Artificial Sequence
  Description of Artificial Sequence: Synthetic oligonucleotide
ugagagcuaaaguggcuua

SEQ ID NO: 489962 - RNA, 19 nt, Artificial Sequence
  Description of Artificial Sequence: Synthetic oligonucleotide
uuuaaaugagugggccuaa

SEQ ID NO: 489963 - RNA, 19 nt, Artificial Sequence
  Description of Artificial Sequence: Synthetic oligonucleotide
ucucguuaucaaagguuau

SEQ ID NO: 489964 - RNA, 19 nt, Artificial Sequence
  Description of Artificial Sequence: Synthetic oligonucleotide
aaagggcuacauguacugu

SEQ ID NO: 489965 - RNA, 19 nt, Artificial Sequence
  Description of Artificial Sequence: Synthetic oligonucleotide
ccuugagagcuaaaguggc

SEQ ID NO: 489966 - RNA, 19 nt, Artificial Sequence
  Description of Artificial Sequence: Synthetic oligonucleotide
cuuuugcgaugacaaguug

SEQ ID NO: 489967 - RNA, 19 nt, Artificial Sequence
  Description of Artificial Sequence: Synthetic oligonucleotide
uaccagcuugcaaggaggu

SEQ ID NO: 489968 - RNA, 19 nt, Artificial Sequence
  Description of Artificial Sequence: Synthetic oligonucleotide
cugaagcuaucuuguuggc

SEQ ID NO: 489969 - RNA, 19 nt, Artificial Sequence
  Description of Artificial Sequence: Synthetic oligonucleotide
gguuggagauagauggccg

SEQ ID NO: 489970 - RNA, 19 nt, Artificial Sequence
  Description of Artificial Sequence: Synthetic oligonucleotide
uccuguuguggguucuaca

SEQ ID NO: 489971 - RNA, 19 nt, Artificial Sequence
  Description of Artificial Sequence: Synthetic oligonucleotide
ugaguguauuuggugcucu

SEQ ID NO: 489972 - RNA, 19 nt, Artificial Sequence
  Description of Artificial Sequence: Synthetic oligonucleotide
uuggagauagauggccgga

SEQ ID NO: 489973 - RNA, 19 nt, Artificial Sequence
  Description of Artificial Sequence: Synthetic oligonucleotide
acauugcaugaggaacccc

SEQ ID NO: 489974 - RNA, 19 nt, Artificial Sequence
  Description of Artificial Sequence: Synthetic oligonucleotide
ugcuagcuuuacuccagga

SEQ ID NO: 489975 - RNA, 19 nt, Artificial Sequence
  Description of Artificial Sequence: Synthetic oligonucleotide
agggccauauucuccugcu

SEQ ID NO: 489976 - RNA, 19 nt, Artificial Sequence
  Description of Artificial Sequence: Synthetic oligonucleotide
auccgaggguuggagauag

SEQ ID NO: 489977 - RNA, 19 nt, Artificial Sequence
  Description of Artificial Sequence: Synthetic oligonucleotide
agauagauggccggaugcu

SEQ ID NO: 489978 - RNA, 19 nt, Artificial Sequence
  Description of Artificial Sequence: Synthetic oligonucleotide
gauucucgacaggacauga

SEQ ID NO: 489979 - RNA, 19 nt, Artificial Sequence
  Description of Artificial Sequence: Synthetic oligonucleotide
ugguauccgaggguuggag

SEQ ID NO: 489980 - RNA, 19 nt, Artificial Sequence
  Description of Artificial Sequence: Synthetic oligonucleotide
gacacugcuuuuaugagau

SEQ ID NO: 489981 - RNA, 19 nt, Artificial Sequence
  Description of Artificial Sequence: Synthetic oligonucleotide
augccagguaugaauguag

SEQ ID NO: 489982 - RNA, 19 nt, Artificial Sequence
  Description of Artificial Sequence: Synthetic oligonucleotide
gagugggccuaagaggagc

SEQ ID NO: 489983 - RNA, 19 nt, Artificial Sequence
  Description of Artificial Sequence: Synthetic oligonucleotide
ucaguccacauuggccccg

SEQ ID NO: 489984 - RNA, 19 nt, Artificial Sequence
  Description of Artificial Sequence: Synthetic oligonucleotide
augaaaggacugacucccc

SEQ ID NO: 489985 - RNA, 19 nt, Artificial Sequence
  Description of Artificial Sequence: Synthetic oligonucleotide
ggugaaucuguaguagggc

SEQ ID NO: 489986 - RNA, 19 nt, Artificial Sequence
  Description of Artificial Sequence: Synthetic oligonucleotide
uuguuggccacccguguuu

SEQ ID NO: 489987 - RNA, 19 nt, Artificial Sequence
  Description of Artificial Sequence: Synthetic oligonucleotide
aggggccauauuugguauc

SEQ ID NO: 489988 - RNA, 19 nt, Artificial Sequence
  Description of Artificial Sequence: Synthetic oligonucleotide
ucuuaaguuccagcauccu

SEQ ID NO: 489989 - RNA, 19 nt, Artificial Sequence
  Description of Artificial Sequence: Synthetic oligonucleotide
gagugucagcccauguagc

SEQ ID NO: 489990 - RNA, 19 nt, Artificial Sequence
  Description of Artificial Sequence: Synthetic oligonucleotide
acugaggcauauaugcuau

SEQ ID NO: 489991 - RNA, 19 nt, Artificial Sequence
  Description of Artificial Sequence: Synthetic oligonucleotide
auauaaagggcuacaugua

SEQ ID NO: 489992 - RNA, 19 nt, Artificial Sequence
  Description of Artificial Sequence: Synthetic oligonucleotide
cugaagugcuuuaaucaaa

SEQ ID NO: 489993 - RNA, 19 nt, Artificial Sequence
  Description of Artificial Sequence: Synthetic oligonucleotide
uugcaccacaaaugacuca

SEQ ID NO: 489994 - RNA, 19 nt, Artificial Sequence
  Description of Artificial Sequence: Synthetic oligonucleotide
caaggagguuggccuaagg

SEQ ID NO: 489995 - RNA, 19 nt, Artificial Sequence
  Description of Artificial Sequence: Synthetic oligonucleotide
auaaugccaccccuauuua

SEQ ID NO: 489996 - RNA, 19 nt, Artificial Sequence
  Description of Artificial Sequence: Synthetic oligonucleotide
gucucguuaucaaagguua

SEQ ID NO: 489997 - RNA, 19 nt, Artificial Sequence
  Description of Artificial Sequence: Synthetic oligonucleotide
agauucucgacaggacaug

SEQ ID NO: 489998 - RNA, 19 nt, Artificial Sequence
  Description of Artificial Sequence: Synthetic oligonucleotide
ggagauagauggccggaug

SEQ ID NO: 489999 - RNA, 19 nt, Artificial Sequence
  Description of Artificial Sequence: Synthetic oligonucleotide
uuggccccguuaccuauga

SEQ ID NO: 490000 - RNA, 19 nt, Artificial Sequence
  Description of Artificial Sequence: Synthetic oligonucleotide
gcucuacagcuccucaagg

SEQ ID NO: 490001 - RNA, 19 nt, Artificial Sequence
  Description of Artificial Sequence: Synthetic oligonucleotide
guaugaauguaguguuuua

SEQ ID NO: 490002 - RNA, 19 nt, Artificial Sequence
  Description of Artificial Sequence: Synthetic oligonucleotide
ggccauauuugguaucuca

SEQ ID NO: 490003 - RNA, 19 nt, Artificial Sequence
  Description of Artificial Sequence: Synthetic oligonucleotide
ucauaccagcuugcaagga

SEQ ID NO: 490004 - RNA, 19 nt, Artificial Sequence
  Description of Artificial Sequence: Synthetic oligonucleotide
guuggccuaaggcuuguaa

SEQ ID NO: 490005 - RNA, 19 nt, Artificial Sequence
  Description of Artificial Sequence: Synthetic oligonucleotide
gaugccagguaugaaugua

SEQ ID NO: 490006 - RNA, 19 nt, Artificial Sequence
  Description of Artificial Sequence: Synthetic oligonucleotide
aaucuguaguagggcagaa

SEQ ID NO: 490007 - RNA, 19 nt, Artificial Sequence
  Description of Artificial Sequence: Synthetic oligonucleotide
ggguuggagauagauggcc

SEQ ID NO: 490008 - RNA, 19 nt, Artificial Sequence
  Description of Artificial Sequence: Synthetic oligonucleotide
cuucagucauguaaccucu

SEQ ID NO: 490009 - RNA, 19 nt, Artificial Sequence
  Description of Artificial Sequence: Synthetic oligonucleotide
cucuucuagugcugaagga

SEQ ID NO: 490010 - RNA, 19 nt, Artificial Sequence
  Description of Artificial Sequence: Synthetic oligonucleotide
agcuuaacgugcagcagga

SEQ ID NO: 490011 - RNA, 19 nt, Artificial Sequence
  Description of Artificial Sequence: Synthetic oligonucleotide
agauggccggaugcugccc

SEQ ID NO: 490012 - RNA, 19 nt, Artificial Sequence
  Description of Artificial Sequence: Synthetic oligonucleotide
ugcucuacguagagaucau

SEQ ID NO: 490013 - RNA, 19 nt, Artificial Sequence
  Description of Artificial Sequence: Synthetic oligonucleotide
caacuauagcuggccagag

SEQ ID NO: 490014 - RNA, 19 nt, Artificial Sequence
  Description of Artificial Sequence: Synthetic oligonucleotide
auacauauguuggccuuaa

SEQ ID NO: 490015 - RNA, 19 nt, Artificial Sequence
  Description of Artificial Sequence: Synthetic oligonucleotide
auuuggugcucuacguaga

SEQ ID NO: 490016 - RNA, 19 nt, Artificial Sequence
  Description of Artificial Sequence: Synthetic oligonucleotide
auaugccaaucacuucaau

SEQ ID NO: 490017 - RNA, 19 nt, Artificial Sequence
  Description of Artificial Sequence: Synthetic oligonucleotide
uagcuauugcacucuucua

SEQ ID NO: 490018 - RNA, 19 nt, Artificial Sequence
  Description of Artificial Sequence: Synthetic oligonucleotide
guauugcaccacaaaugac

SEQ ID NO: 490019 - RNA, 19 nt, Artificial Sequence
  Description of Artificial Sequence: Synthetic oligonucleotide
agauaaugccaccccuauu

SEQ ID NO: 490020 - RNA, 19 nt, Artificial Sequence
  Description of Artificial Sequence: Synthetic oligonucleotide
aguucaaauuggugauguu

SEQ ID NO: 490021 - RNA, 19 nt, Artificial Sequence
  Description of Artificial Sequence: Synthetic oligonucleotide
cagaaucgugaccuuucuc

SEQ ID NO: 490022 - RNA, 19 nt, Artificial Sequence
  Description of Artificial Sequence: Synthetic oligonucleotide
augagugcguucccugcau

SEQ ID NO: 490023 - RNA, 19 nt, Artificial Sequence
  Description of Artificial Sequence: Synthetic oligonucleotide
agaaggggccauauuuggu

SEQ ID NO: 490024 - RNA, 19 nt, Artificial Sequence
  Description of Artificial Sequence: Synthetic oligonucleotide
uacgaagaucugggcagug

SEQ ID NO: 490025 - RNA, 19 nt, Artificial Sequence
  Description of Artificial Sequence: Synthetic oligonucleotide
guauccgaggguuggagau

SEQ ID NO: 490026 - RNA, 19 nt, Artificial Sequence
  Description of Artificial Sequence: Synthetic oligonucleotide
uggagauagauggccggau

SEQ ID NO: 490027 - RNA, 19 nt, Artificial Sequence
  Description of Artificial Sequence: Synthetic oligonucleotide
ggaaggggacuucaacgac

SEQ ID NO: 490028 - RNA, 19 nt, Artificial Sequence
  Description of Artificial Sequence: Synthetic oligonucleotide
ggccccguuaccuaugaga

SEQ ID NO: 490029 - RNA, 19 nt, Artificial Sequence
  Description of Artificial Sequence: Synthetic oligonucleotide
caugagugcguucccugca

SEQ ID NO: 490030 - RNA, 19 nt, Artificial Sequence
  Description of Artificial Sequence: Synthetic oligonucleotide
caguccagugcucauauau

SEQ ID NO: 490031 - RNA, 19 nt, Artificial Sequence
  Description of Artificial Sequence: Synthetic oligonucleotide
uggguucuacagccuccug

SEQ ID NO: 490032 - RNA, 19 nt, Artificial Sequence
  Description of Artificial Sequence: Synthetic oligonucleotide
cauccugauuuagaaggca

SEQ ID NO: 490033 - RNA, 19 nt, Artificial Sequence
  Description of Artificial Sequence: Synthetic oligonucleotide
cauauauaaagggcuacau

SEQ ID NO: 490034 - RNA, 19 nt, Artificial Sequence
  Description of Artificial Sequence: Synthetic oligonucleotide
gcaugagugcguucccugc

SEQ ID NO: 490035 - RNA, 19 nt, Artificial Sequence
  Description of Artificial Sequence: Synthetic oligonucleotide
guucuaggugguuggggaa

SEQ ID NO: 490036 - RNA, 19 nt, Artificial Sequence
  Description of Artificial Sequence: Synthetic oligonucleotide
cucgacaggacaugaauuu

SEQ ID NO: 490037 - RNA, 19 nt, Artificial Sequence
  Description of Artificial Sequence: Synthetic oligonucleotide
gcuaucuuguuggccaccc

SEQ ID NO: 490038 - RNA, 19 nt, Artificial Sequence
  Description of Artificial Sequence: Synthetic oligonucleotide
cugaguguauuuggugcuc

SEQ ID NO: 490039 - RNA, 19 nt, Artificial Sequence
  Description of Artificial Sequence: Synthetic oligonucleotide
cucguuaucaaagguuaua

SEQ ID NO: 490040 - RNA, 19 nt, Artificial Sequence
  Description of Artificial Sequence: Synthetic oligonucleotide
ugagugcguucccugcauu

SEQ ID NO: 490041 - RNA, 19 nt, Artificial Sequence
  Description of Artificial Sequence: Synthetic oligonucleotide
cugcaguuaacagcaauua

SEQ ID NO: 490042 - RNA, 19 nt, Artificial Sequence
  Description of Artificial Sequence: Synthetic oligonucleotide
ggaaaguugcauacucauc

SEQ ID NO: 490043 - RNA, 19 nt, Artificial Sequence
  Description of Artificial Sequence: Synthetic oligonucleotide
aagcuccuuagaauagcua

SEQ ID NO: 490044 - RNA, 19 nt, Artificial Sequence
  Description of Artificial Sequence: Synthetic oligonucleotide
gaggaaccccaacaugcua

SEQ ID NO: 490045 - RNA, 19 nt, Artificial Sequence
  Description of Artificial Sequence: Synthetic oligonucleotide
accccuauuuacauuggua

SEQ ID NO: 490046 - RNA, 19 nt, Artificial Sequence
  Description of Artificial Sequence: Synthetic oligonucleotide
uuccgucugcuugcuagcu

SEQ ID NO: 490047 - RNA, 19 nt, Artificial Sequence
  Description of Artificial Sequence: Synthetic oligonucleotide
gguauccgaggguuggaga

SEQ ID NO: 490048 - RNA, 19 nt, Artificial Sequence
  Description of Artificial Sequence: Synthetic oligonucleotide
cugaggcauauaugcuauc

SEQ ID NO: 490049 - RNA, 19 nt, Artificial Sequence
  Description of Artificial Sequence: Synthetic oligonucleotide
cagauucucgacaggacau

SEQ ID NO: 490050 - RNA, 19 nt, Artificial Sequence
  Description of Artificial Sequence: Synthetic oligonucleotide
cagagugucagcccaugua

SEQ ID NO: 490051 - RNA, 19 nt, Artificial Sequence
  Description of Artificial Sequence: Synthetic oligonucleotide
gcuauugcacucuucuagu

SEQ ID NO: 490052 - RNA, 19 nt, Artificial Sequence
  Description of Artificial Sequence: Synthetic oligonucleotide
uccgucugcuugcuagcuu

SEQ ID NO: 490053 - RNA, 19 nt, Artificial Sequence
  Description of Artificial Sequence: Synthetic oligonucleotide
cuaggaccaugguauccga

SEQ ID NO: 490054 - RNA, 19 nt, Artificial Sequence
  Description of Artificial Sequence: Synthetic oligonucleotide
cagugcccagugaaguuca

SEQ ID NO: 490055 - RNA, 19 nt, Artificial Sequence
  Description of Artificial Sequence: Synthetic oligonucleotide
aguccagugcucauauaua

SEQ ID NO: 490056 - RNA, 19 nt, Artificial Sequence
  Description of Artificial Sequence: Synthetic oligonucleotide
uauccgaggguuggagaua

SEQ ID NO: 490057 - RNA, 19 nt, Artificial Sequence
  Description of Artificial Sequence: Synthetic oligonucleotide
ucucagggccugucuuuuc

SEQ ID NO: 490058 - RNA, 19 nt, Artificial Sequence
  Description of Artificial Sequence: Synthetic oligonucleotide
auguaaccucuguuugaua

SEQ ID NO: 490059 - RNA, 19 nt, Artificial Sequence
  Description of Artificial Sequence: Synthetic oligonucleotide
agcaugcucucuucuucuu

SEQ ID NO: 490060 - RNA, 19 nt, Artificial Sequence
  Description of Artificial Sequence: Synthetic oligonucleotide
uggcgaaguuccugcuccu

SEQ ID NO: 490061 - RNA, 19 nt, Artificial Sequence
  Description of Artificial Sequence: Synthetic oligonucleotide
aucuguaguagggcagaau

SEQ ID NO: 490062 - RNA, 19 nt, Artificial Sequence
  Description of Artificial Sequence: Synthetic oligonucleotide
gauggccggaugcugcccu

SEQ ID NO: 490063 - RNA, 19 nt, Artificial Sequence
  Description of Artificial Sequence: Synthetic oligonucleotide
uggccccguuaccuaugag

SEQ ID NO: 490064 - RNA, 19 nt, Artificial Sequence
  Description of Artificial Sequence: Synthetic oligonucleotide
cagccuguugcuggaacuc

SEQ ID NO: 490065 - RNA, 19 nt, Artificial Sequence
  Description of Artificial Sequence: Synthetic oligonucleotide
ggcagaaucgugaccuuuc

SEQ ID NO: 490066 - RNA, 19 nt, Artificial Sequence
  Description of Artificial Sequence: Synthetic oligonucleotide
gcacuacgaagaucugggc

SEQ ID NO: 490067 - RNA, 19 nt, Artificial Sequence
  Description of Artificial Sequence: Synthetic oligonucleotide
cauacauauguuggccuua

SEQ ID NO: 490068 - RNA, 19 nt, Artificial Sequence
  Description of Artificial Sequence: Synthetic oligonucleotide
gaccaugguauccgagggu

SEQ ID NO: 490069 - RNA, 19 nt, Artificial Sequence
  Description of Artificial Sequence: Synthetic oligonucleotide
cuuauacuccagaguuucu

SEQ ID NO: 490070 - RNA, 19 nt, Artificial Sequence
  Description of Artificial Sequence: Synthetic oligonucleotide
ggacucaacuauagcuggc

SEQ ID NO: 490071 - RNA, 19 nt, Artificial Sequence
  Description of Artificial Sequence: Synthetic oligonucleotide
auuggccccguuaccuaug

SEQ ID NO: 490072 - RNA, 19 nt, Artificial Sequence
  Description of Artificial Sequence: Synthetic oligonucleotide
ggccuaagaggagccacag

SEQ ID NO: 490073 - RNA, 19 nt, Artificial Sequence
  Description of Artificial Sequence: Synthetic oligonucleotide
auucucgacaggacaugaa

SEQ ID NO: 490074 - RNA, 19 nt, Artificial Sequence
  Description of Artificial Sequence: Synthetic oligonucleotide
ggccuaaggcuuguaaaca

SEQ ID NO: 490075 - RNA, 19 nt, Artificial Sequence
  Description of Artificial Sequence: Synthetic oligonucleotide
gagaucauuccgucugcuu

SEQ ID NO: 490076 - RNA, 19 nt, Artificial Sequence
  Description of Artificial Sequence: Synthetic oligonucleotide
gcuaauguucaaagauaga

SEQ ID NO: 490077 - RNA, 19 nt, Artificial Sequence
  Description of Artificial Sequence: Synthetic oligonucleotide
gguaugaauguaguguuuu

SEQ ID NO: 490078 - RNA, 19 nt, Artificial Sequence
  Description of Artificial Sequence: Synthetic oligonucleotide
cccguguuuguuccagagc

SEQ ID NO: 490079 - RNA, 19 nt, Artificial Sequence
  Description of Artificial Sequence: Synthetic oligonucleotide
guaucucagggccugucuu

SEQ ID NO: 490080 - RNA, 19 nt, Artificial Sequence
  Description of Artificial Sequence: Synthetic oligonucleotide
augguauccgaggguugga

SEQ ID NO: 490081 - RNA, 19 nt, Artificial Sequence
  Description of Artificial Sequence: Synthetic oligonucleotide
cugggauauuagcagcacu

SEQ ID NO: 490082 - RNA, 19 nt, Artificial Sequence
  Description of Artificial Sequence: Synthetic oligonucleotide
ccucagauucucgacagga

SEQ ID NO: 490083 - RNA, 19 nt, Artificial Sequence
  Description of Artificial Sequence: Synthetic oligonucleotide
ucccuccuugggugguucu

SEQ ID NO: 490084 - RNA, 19 nt, Artificial Sequence
  Description of Artificial Sequence: Synthetic oligonucleotide
ccucaaggccuccaguuca

SEQ ID NO: 490085 - RNA, 19 nt, Artificial Sequence
  Description of Artificial Sequence: Synthetic oligonucleotide
gcuacauguacugucucgu

SEQ ID NO: 490086 - RNA, 19 nt, Artificial Sequence
  Description of Artificial Sequence: Synthetic oligonucleotide
cguuaucaaagguuauaga

SEQ ID NO: 490087 - RNA, 19 nt, Artificial Sequence
  Description of Artificial Sequence: Synthetic oligonucleotide
gagagcuaaaguggcuuau

SEQ ID NO: 490088 - RNA, 19 nt, Artificial Sequence
  Description of Artificial Sequence: Synthetic oligonucleotide
acaguccagugcucauaua

SEQ ID NO: 490089 - RNA, 19 nt, Artificial Sequence
  Description of Artificial Sequence: Synthetic oligonucleotide
gggccauauucuccugcug

SEQ ID NO: 490090 - RNA, 19 nt, Artificial Sequence
  Description of Artificial Sequence: Synthetic oligonucleotide
caacgaccacccuugaguu

SEQ ID NO: 490091 - RNA, 19 nt, Artificial Sequence
  Description of Artificial Sequence: Synthetic oligonucleotide
ccuaugagauggacacauc

SEQ ID NO: 490092 - RNA, 19 nt, Artificial Sequence
  Description of Artificial Sequence: Synthetic oligonucleotide
ggucagcauuauuggugac

SEQ ID NO: 490093 - RNA, 19 nt, Artificial Sequence
  Description of Artificial Sequence: Synthetic oligonucleotide
cacccaagucugguguguc

SEQ ID NO: 490094 - RNA, 19 nt, Artificial Sequence
  Description of Artificial Sequence: Synthetic oligonucleotide
cuucaacgaccacccuuga

SEQ ID NO: 490095 - RNA, 19 nt, Artificial Sequence
  Description of Artificial Sequence: Synthetic oligonucleotide
uccgcacccuccucccuuu

SEQ ID NO: 490096 - RNA, 19 nt, Artificial Sequence
  Description of Artificial Sequence: Synthetic oligonucleotide
ccaugguauccgaggguug

SEQ ID NO: 490097 - RNA, 19 nt, Artificial Sequence
  Description of Artificial Sequence: Synthetic oligonucleotide
gggugguucuaggaccaug

SEQ ID NO: 490098 - RNA, 19 nt, Artificial Sequence
  Description of Artificial Sequence: Synthetic oligonucleotide
gugcguucccugcauugcu

SEQ ID NO: 490099 - RNA, 19 nt, Artificial Sequence
  Description of Artificial Sequence: Synthetic oligonucleotide
cuaggugguuggggaaaca

SEQ ID NO: 490100 - RNA, 19 nt, Artificial Sequence
  Description of Artificial Sequence: Synthetic oligonucleotide
cuccagagcaugagugcgu

SEQ ID NO: 490101 - RNA, 19 nt, Artificial Sequence
  Description of Artificial Sequence: Synthetic oligonucleotide
ggugcucuacguagagauc

SEQ ID NO: 490102 - RNA, 19 nt, Artificial Sequence
  Description of Artificial Sequence: Synthetic oligonucleotide
gcagaaucgugaccuuucu

SEQ ID NO: 490103 - RNA, 19 nt, Artificial Sequence
  Description of Artificial Sequence: Synthetic oligonucleotide
cuacauguacugucucguu

SEQ ID NO: 490104 - RNA, 19 nt, Artificial Sequence
  Description of Artificial Sequence: Synthetic oligonucleotide
ggggccauauuugguaucu

SEQ ID NO: 490105 - RNA, 19 nt, Artificial Sequence
  Description of Artificial Sequence: Synthetic oligonucleotide
cacccguguuuguuccaga

SEQ ID NO: 490106 - RNA, 19 nt, Artificial Sequence
  Description of Artificial Sequence: Synthetic oligonucleotide
gcaaggagguuggccuaag

SEQ ID NO: 490107 - RNA, 19 nt, Artificial Sequence
  Description of Artificial Sequence: Synthetic oligonucleotide
gcuuuugcgaugacaaguu

SEQ ID NO: 490108 - RNA, 19 nt, Artificial Sequence
  Description of Artificial Sequence: Synthetic oligonucleotide
ccccguuaccuaugagaug

SEQ ID NO: 490109 - RNA, 19 nt, Artificial Sequence
  Description of Artificial Sequence: Synthetic oligonucleotide
cgagcacauucauuaagaa

SEQ ID NO: 490110 - RNA, 19 nt, Artificial Sequence
  Description of Artificial Sequence: Synthetic oligonucleotide
ugggugguucuaggaccau

SEQ ID NO: 490111 - RNA, 19 nt, Artificial Sequence
  Description of Artificial Sequence: Synthetic oligonucleotide
gccccguuaccuaugagau

SEQ ID NO: 490112 - RNA, 19 nt, Artificial Sequence
  Description of Artificial Sequence: Synthetic oligonucleotide
cccuugggagcugguuugg

SEQ ID NO: 490113 - RNA, 19 nt, Artificial Sequence
  Description of Artificial Sequence: Synthetic oligonucleotide
gcaacccauccaagacgag

SEQ ID NO: 490114 - RNA, 19 nt, Artificial Sequence
  Description of Artificial Sequence: Synthetic oligonucleotide
guugucagcugggcagccu

SEQ ID NO: 490115 - RNA, 19 nt, Artificial Sequence
  Description of Artificial Sequence: Synthetic oligonucleotide
gcacucuucuagugcugaa

SEQ ID NO: 490116 - RNA, 19 nt, Artificial Sequence
  Description of Artificial Sequence: Synthetic oligonucleotide
gcccauguagcucccuccu

SEQ ID NO: 490117 - RNA, 19 nt, Artificial Sequence
  Description of Artificial Sequence: Synthetic oligonucleotide
cacccuccucccuuuaguu

SEQ ID NO: 490118 - RNA, 19 nt, Artificial Sequence
  Description of Artificial Sequence: Synthetic oligonucleotide
agugcccagugaaguucau

SEQ ID NO: 490119 - RNA, 19 nt, Artificial Sequence
  Description of Artificial Sequence: Synthetic oligonucleotide
gcacccuccucccuuuagu

SEQ ID NO: 490120 - RNA, 19 nt, Artificial Sequence
  Description of Artificial Sequence: Synthetic oligonucleotide
gcuccuuagaauagcuauu

SEQ ID NO: 490121 - RNA, 19 nt, Artificial Sequence
  Description of Artificial Sequence: Synthetic oligonucleotide
cucuccuguuguggguucu

SEQ ID NO: 490122 - RNA, 19 nt, Artificial Sequence
  Description of Artificial Sequence: Synthetic oligonucleotide
gcuuaacgugcagcaggaa

SEQ ID NO: 490123 - RNA, 19 nt, Artificial Sequence
  Description of Artificial Sequence: Synthetic oligonucleotide
ccguuaccuaugagaugga

SEQ ID NO: 490124 - RNA, 19 nt, Artificial Sequence
  Description of Artificial Sequence: Synthetic oligonucleotide
ccgaggguuggagauagau

SEQ ID NO: 490125 - RNA, 19 nt, Artificial Sequence
  Description of Artificial Sequence: Synthetic oligonucleotide
gggcagaaucgugaccuuu

SEQ ID NO: 490126 - RNA, 19 nt, Artificial Sequence
  Description of Artificial Sequence: Synthetic oligonucleotide
gguuggccuaaggcuugua

SEQ ID NO: 490127 - RNA, 19 nt, Artificial Sequence
  Description of Artificial Sequence: Synthetic oligonucleotide
gcucuacguagagaucauu

SEQ ID NO: 490128 - RNA, 19 nt, Artificial Sequence
  Description of Artificial Sequence: Synthetic oligonucleotide
ccuuauggagaagcacuuu

SEQ ID NO: 490129 - RNA, 19 nt, Artificial Sequence
  Description of Artificial Sequence: Synthetic oligonucleotide
ggcgaaguuccugcuccuu

SEQ ID NO: 490130 - RNA, 19 nt, Artificial Sequence
  Description of Artificial Sequence: Synthetic oligonucleotide
ccgcacccuccucccuuua

SEQ ID NO: 490131 - RNA, 19 nt, Artificial Sequence
  Description of Artificial Sequence: Synthetic oligonucleotide
uguaucacuacucaaaggg

SEQ ID NO: 490132 - RNA, 19 nt, Artificial Sequence
  Description of Artificial Sequence: Synthetic oligonucleotide
uuuacuaucaauucuguac

SEQ ID NO: 490133 - RNA, 19 nt, Artificial Sequence
  Description of Artificial Sequence: Synthetic oligonucleotide
agugcaaacauccaaacag

SEQ ID NO: 490134 - RNA, 19 nt, Artificial Sequence
  Description of Artificial Sequence: Synthetic oligonucleotide
uaaacgugaacucuggacc

SEQ ID NO: 490135 - RNA, 19 nt, Artificial Sequence
  Description of Artificial Sequence: Synthetic oligonucleotide
uaagauauagaguaguuuc

SEQ ID NO: 490136 - RNA, 19 nt, Artificial Sequence
  Description of Artificial Sequence: Synthetic oligonucleotide
uuuauuaaagcagaacaag

SEQ ID NO: 490137 - RNA, 19 nt, Artificial Sequence
  Description of Artificial Sequence: Synthetic oligonucleotide
uuacuaucaauucuguacc

SEQ ID NO: 490138 - RNA, 19 nt, Artificial Sequence
  Description of Artificial Sequence: Synthetic oligonucleotide
uacauuaucugccaauugc

SEQ ID NO: 490139 - RNA, 19 nt, Artificial Sequence
  Description of Artificial Sequence: Synthetic oligonucleotide
uugacuacaguucuguuug

SEQ ID NO: 490140 - RNA, 19 nt, Artificial Sequence
  Description of Artificial Sequence: Synthetic oligonucleotide
augcuaagcacacagguac

SEQ ID NO: 490141 - RNA, 19 nt, Artificial Sequence
  Description of Artificial Sequence: Synthetic oligonucleotide
ucuuauuuccacaacacuc

SEQ ID NO: 490142 - RNA, 19 nt, Artificial Sequence
  Description of Artificial Sequence: Synthetic oligonucleotide
aauugcagauccucuggcc

SEQ ID NO: 490143 - RNA, 19 nt, Artificial Sequence
  Description of Artificial Sequence: Synthetic oligonucleotide
aauuagaucucguuuauua

SEQ ID NO: 490144 - RNA, 19 nt, Artificial Sequence
  Description of Artificial Sequence: Synthetic oligonucleotide
uuuacaaaacccuuacggc

SEQ ID NO: 490145 - RNA, 19 nt, Artificial Sequence
  Description of Artificial Sequence: Synthetic oligonucleotide
ucuucggagucuaacaggg

SEQ ID NO: 490146 - RNA, 19 nt, Artificial Sequence
  Description of Artificial Sequence: Synthetic oligonucleotide
uauagugauuauuugugag

SEQ ID NO: 490147 - RNA, 19 nt, Artificial Sequence
  Description of Artificial Sequence: Synthetic oligonucleotide
aguuucuugaagugggagc

SEQ ID NO: 490148 - RNA, 19 nt, Artificial Sequence
  Description of Artificial Sequence: Synthetic oligonucleotide
acuaaagcuuugcaggagc

SEQ ID NO: 490149 - RNA, 19 nt, Artificial Sequence
  Description of Artificial Sequence: Synthetic oligonucleotide
aaacuuugguguuguaaac

SEQ ID NO: 490150 - RNA, 19 nt, Artificial Sequence
  Description of Artificial Sequence: Synthetic oligonucleotide
aacgguguaauuuugugaa

SEQ ID NO: 490151 - RNA, 19 nt, Artificial Sequence
  Description of Artificial Sequence: Synthetic oligonucleotide
ugcuguuucagucugacaa

SEQ ID NO: 490152 - RNA, 19 nt, Artificial Sequence
  Description of Artificial Sequence: Synthetic oligonucleotide
ucuuauaccuagaaacuug

SEQ ID NO: 490153 - RNA, 19 nt, Artificial Sequence
  Description of Artificial Sequence: Synthetic oligonucleotide
ucacauguaaaacucuacc

SEQ ID NO: 490154 - RNA, 19 nt, Artificial Sequence
  Description of Artificial Sequence: Synthetic oligonucleotide
acucacaucagugugugcc

SEQ ID NO: 490155 - RNA, 19 nt, Artificial Sequence
  Description of Artificial Sequence: Synthetic oligonucleotide
aauaugacucuuugaagga

SEQ ID NO: 490156 - RNA, 19 nt, Artificial Sequence
  Description of Artificial Sequence: Synthetic oligonucleotide
ucuguaaagguuuaagguc

SEQ ID NO: 490157 - RNA, 19 nt, Artificial Sequence
  Description of Artificial Sequence: Synthetic oligonucleotide
agaagacuuggacugaggg

SEQ ID NO: 490158 - RNA, 19 nt, Artificial Sequence
  Description of Artificial Sequence: Synthetic oligonucleotide
aagguuuaagguccuggac

SEQ ID NO: 490159 - RNA, 19 nt, Artificial Sequence
  Description of Artificial Sequence: Synthetic oligonucleotide
auauuccuaagucacaugu

SEQ ID NO: 490160 - RNA, 19 nt, Artificial Sequence
  Description of Artificial Sequence: Synthetic oligonucleotide
uaucuuauaccuagaaacu

SEQ ID NO: 490161 - RNA, 19 nt, Artificial Sequence
  Description of Artificial Sequence: Synthetic oligonucleotide
agcaauaugacucuuugaa

SEQ ID NO: 490162 - RNA, 19 nt, Artificial Sequence
  Description of Artificial Sequence: Synthetic oligonucleotide
cuagcgaugcuauauagug

SEQ ID NO: 490163 - RNA, 19 nt, Artificial Sequence
  Description of Artificial Sequence: Synthetic oligonucleotide
uuugugagauuuacuauca

SEQ ID NO: 490164 - RNA, 19 nt, Artificial Sequence
  Description of Artificial Sequence: Synthetic oligonucleotide
aacuuugguguuguaaacg

SEQ ID NO: 490165 - RNA, 19 nt, Artificial Sequence
  Description of Artificial Sequence: Synthetic oligonucleotide
aaugccacugcugugaccu

SEQ ID NO: 490166 - RNA, 19 nt, Artificial Sequence
  Description of Artificial Sequence: Synthetic oligonucleotide
aguguaucacuacucaaag

SEQ ID NO: 490167 - RNA, 19 nt, Artificial Sequence
  Description of Artificial Sequence: Synthetic oligonucleotide
gaucacuugagccuaaaca

SEQ ID NO: 490168 - RNA, 19 nt, Artificial Sequence
  Description of Artificial Sequence: Synthetic oligonucleotide
ucucguuuauuaaagcaga

SEQ ID NO: 490169 - RNA, 19 nt, Artificial Sequence
  Description of Artificial Sequence: Synthetic oligonucleotide
agagugaaugucuagcaug

SEQ ID NO: 490170 - RNA, 19 nt, Artificial Sequence
  Description of Artificial Sequence: Synthetic oligonucleotide
auauagaguaguuucuuga

SEQ ID NO: 490171 - RNA, 19 nt, Artificial Sequence
  Description of Artificial Sequence: Synthetic oligonucleotide
ucuuaagucacagaugagu

SEQ ID NO: 490172 - RNA, 19 nt, Artificial Sequence
  Description of Artificial Sequence: Synthetic oligonucleotide
agucaguucauguagugcu

SEQ ID NO: 490173 - RNA, 19 nt, Artificial Sequence
  Description of Artificial Sequence: Synthetic oligonucleotide
gauauagaguaguuucuug

SEQ ID NO: 490174 - RNA, 19 nt, Artificial Sequence
  Description of Artificial Sequence: Synthetic oligonucleotide
uuaacgguguaauuuugug

SEQ ID NO: 490175 - RNA, 19 nt, Artificial Sequence
  Description of Artificial Sequence: Synthetic oligonucleotide
uucggagucuaacaggggc

SEQ ID NO: 490176 - RNA, 19 nt, Artificial Sequence
  Description of Artificial Sequence: Synthetic oligonucleotide
ucuccuugagcaaacuuug

SEQ ID NO: 490177 - RNA, 19 nt, Artificial Sequence
  Description of Artificial Sequence: Synthetic oligonucleotide
aaugagauguguggguggg

SEQ ID NO: 490178 - RNA, 19 nt, Artificial Sequence
  Description of Artificial Sequence: Synthetic oligonucleotide
caucuuaagucacagauga

SEQ ID NO: 490179 - RNA, 19 nt, Artificial Sequence
  Description of Artificial Sequence: Synthetic oligonucleotide
ucucuucggagucuaacag

SEQ ID NO: 490180 - RNA, 19 nt, Artificial Sequence
  Description of Artificial Sequence: Synthetic oligonucleotide
acaguguauauucugugug

SEQ ID NO: 490181 - RNA, 19 nt, Artificial Sequence
  Description of Artificial Sequence: Synthetic oligonucleotide
uuguaaacgugaacucugg

SEQ ID NO: 490182 - RNA, 19 nt, Artificial Sequence
  Description of Artificial Sequence: Synthetic oligonucleotide
ggaaguuaggcacaaauac

SEQ ID NO: 490183 - RNA, 19 nt, Artificial Sequence
  Description of Artificial Sequence: Synthetic oligonucleotide
agcacauacccaaaguccc

SEQ ID NO: 490184 - RNA, 19 nt, Artificial Sequence
  Description of Artificial Sequence: Synthetic oligonucleotide
uucuugauuagguccaaug

SEQ ID NO: 490185 - RNA, 19 nt, Artificial Sequence
  Description of Artificial Sequence: Synthetic oligonucleotide
auagugauuauuugugaga

SEQ ID NO: 490186 - RNA, 19 nt, Artificial Sequence
  Description of Artificial Sequence: Synthetic oligonucleotide
agauuuacuaucaauucug

SEQ ID NO: 490187 - RNA, 19 nt, Artificial Sequence
  Description of Artificial Sequence: Synthetic oligonucleotide
uuuaagguccuggacagug

SEQ ID NO: 490188 - RNA, 19 nt, Artificial Sequence
  Description of Artificial Sequence: Synthetic oligonucleotide
caaguugaagcaucuuugg

SEQ ID NO: 490189 - RNA, 19 nt, Artificial Sequence
  Description of Artificial Sequence: Synthetic oligonucleotide
uucacugcggcauguagcc

SEQ ID NO: 490190 - RNA, 19 nt, Artificial Sequence
  Description of Artificial Sequence: Synthetic oligonucleotide
aaacgugaacucuggacca

SEQ ID NO: 490191 - RNA, 19 nt, Artificial Sequence
  Description of Artificial Sequence: Synthetic oligonucleotide
agguuuaagguccuggaca

SEQ ID NO: 490192 - RNA, 19 nt, Artificial Sequence
  Description of Artificial Sequence: Synthetic oligonucleotide
uggauuguuccuuuaacaa

SEQ ID NO: 490193 - RNA, 19 nt, Artificial Sequence
  Description of Artificial Sequence: Synthetic oligonucleotide
gaaugagaugugugggugg

SEQ ID NO: 490194 - RNA, 19 nt, Artificial Sequence
  Description of Artificial Sequence: Synthetic oligonucleotide
guaaacgugaacucuggac

SEQ ID NO: 490195 - RNA, 19 nt, Artificial Sequence
  Description of Artificial Sequence: Synthetic oligonucleotide
ugugagauuuacuaucaau

SEQ ID NO: 490196 - RNA, 19 nt, Artificial Sequence
  Description of Artificial Sequence: Synthetic oligonucleotide
uuaauuagaucucguuuau

SEQ ID NO: 490197 - RNA, 19 nt, Artificial Sequence
  Description of Artificial Sequence: Synthetic oligonucleotide
uucuuauuuccacaacacu

SEQ ID NO: 490198 - RNA, 19 nt, Artificial Sequence
  Description of Artificial Sequence: Synthetic oligonucleotide
uccuuuaacaaagcaacca

SEQ ID NO: 490199 - RNA, 19 nt, Artificial Sequence
  Description of Artificial Sequence: Synthetic oligonucleotide
uguagugcuugaaggagga

SEQ ID NO: 490200 - RNA, 19 nt, Artificial Sequence
  Description of Artificial Sequence: Synthetic oligonucleotide
auauagugauuauuuguga

SEQ ID NO: 490201 - RNA, 19 nt, Artificial Sequence
  Description of Artificial Sequence: Synthetic oligonucleotide
ucccacuaaagcuuugcag

SEQ ID NO: 490202 - RNA, 19 nt, Artificial Sequence
  Description of Artificial Sequence: Synthetic oligonucleotide
aguguauauucuguguggg

SEQ ID NO: 490203 - RNA, 19 nt, Artificial Sequence
  Description of Artificial Sequence: Synthetic oligonucleotide
uaacgguguaauuuuguga

SEQ ID NO: 490204 - RNA, 19 nt, Artificial Sequence
  Description of Artificial Sequence: Synthetic oligonucleotide
agaguaguuucuugaagug

SEQ ID NO: 490205 - RNA, 19 nt, Artificial Sequence
  Description of Artificial Sequence: Synthetic oligonucleotide
acagccguaucugauuugc

SEQ ID NO: 490206 - RNA, 19 nt, Artificial Sequence
  Description of Artificial Sequence: Synthetic oligonucleotide
uguaaaacucuaccucaga

SEQ ID NO: 490207 - RNA, 19 nt, Artificial Sequence
  Description of Artificial Sequence: Synthetic oligonucleotide
uguguaagaaucacuucau

SEQ ID NO: 490208 - RNA, 19 nt, Artificial Sequence
  Description of Artificial Sequence: Synthetic oligonucleotide
uguaagauauagaguaguu

SEQ ID NO: 490209 - RNA, 19 nt, Artificial Sequence
  Description of Artificial Sequence: Synthetic oligonucleotide
agaagcguugucaagagga

SEQ ID NO: 490210 - RNA, 19 nt, Artificial Sequence
  Description of Artificial Sequence: Synthetic oligonucleotide
agcgaugcuauauagugau

SEQ ID NO: 490211 - RNA, 19 nt, Artificial Sequence
  Description of Artificial Sequence: Synthetic oligonucleotide
uacuggacagugcucgcgg

SEQ ID NO: 490212 - RNA, 19 nt, Artificial Sequence
  Description of Artificial Sequence: Synthetic oligonucleotide
aagauauagaguaguuucu

SEQ ID NO: 490213 - RNA, 19 nt, Artificial Sequence
  Description of Artificial Sequence: Synthetic oligonucleotide
uccaaguugaagcaucuuu

SEQ ID NO: 490214 - RNA, 19 nt, Artificial Sequence
  Description of Artificial Sequence: Synthetic oligonucleotide
aguaaagaugacuuuccau

SEQ ID NO: 490215 - RNA, 19 nt, Artificial Sequence
  Description of Artificial Sequence: Synthetic oligonucleotide
uccaauacugguucuguaa

SEQ ID NO: 490216 - RNA, 19 nt, Artificial Sequence
  Description of Artificial Sequence: Synthetic oligonucleotide
guggauuuaucuuauaccu

SEQ ID NO: 490217 - RNA, 19 nt, Artificial Sequence
  Description of Artificial Sequence: Synthetic oligonucleotide
uucuugaagugggagcugg

SEQ ID NO: 490218 - RNA, 19 nt, Artificial Sequence
  Description of Artificial Sequence: Synthetic oligonucleotide
ggaucuggaacauuaggcc

SEQ ID NO: 490219 - RNA, 19 nt, Artificial Sequence
  Description of Artificial Sequence: Synthetic oligonucleotide
cuaaagcuuugcaggagcc

SEQ ID NO: 490220 - RNA, 19 nt, Artificial Sequence
  Description of Artificial Sequence: Synthetic oligonucleotide
ggaacauuaggccagaugu

SEQ ID NO: 490221 - RNA, 19 nt, Artificial Sequence
  Description of Artificial Sequence: Synthetic oligonucleotide
uccugaacacauauucugu

SEQ ID NO: 490222 - RNA, 19 nt, Artificial Sequence
  Description of Artificial Sequence: Synthetic oligonucleotide
ugcauaccuggauuguucc

SEQ ID NO: 490223 - RNA, 19 nt, Artificial Sequence
  Description of Artificial Sequence: Synthetic oligonucleotide
ugccauucguaccauguac

SEQ ID NO: 490224 - RNA, 19 nt, Artificial Sequence
  Description of Artificial Sequence: Synthetic oligonucleotide
ugcuagcgaugcuauauag

SEQ ID NO: 490225 - RNA, 19 nt, Artificial Sequence
  Description of Artificial Sequence: Synthetic oligonucleotide
guacuucagccauuuagag

SEQ ID NO: 490226 - RNA, 19 nt, Artificial Sequence
  Description of Artificial Sequence: Synthetic oligonucleotide
gguuuaagguccuggacag

SEQ ID NO: 490227 - RNA, 19 nt, Artificial Sequence
  Description of Artificial Sequence: Synthetic oligonucleotide
guuguaaacgugaacucug

SEQ ID NO: 490228 - RNA, 19 nt, Artificial Sequence
  Description of Artificial Sequence: Synthetic oligonucleotide
agggcaaugacuaucuuca

SEQ ID NO: 490229 - RNA, 19 nt, Artificial Sequence
  Description of Artificial Sequence: Synthetic oligonucleotide
agccauuuagaggacagag

SEQ ID NO: 490230 - RNA, 19 nt, Artificial Sequence
  Description of Artificial Sequence: Synthetic oligonucleotide
acagugaaggauguucggg

SEQ ID NO: 490231 - RNA, 19 nt, Artificial Sequence
  Description of Artificial Sequence: Synthetic oligonucleotide
cuagguuuaaauauuccua

SEQ ID NO: 490232 - RNA, 19 nt, Artificial Sequence
  Description of Artificial Sequence: Synthetic oligonucleotide
guaucacuacucaaagggg

SEQ ID NO: 490233 - RNA, 19 nt, Artificial Sequence
  Description of Artificial Sequence: Synthetic oligonucleotide
uuugccaacuacauuucuu

SEQ ID NO: 490234 - RNA, 19 nt, Artificial Sequence
  Description of Artificial Sequence: Synthetic oligonucleotide
cucuucggagucuaacagg

SEQ ID NO: 490235 - RNA, 19 nt, Artificial Sequence
  Description of Artificial Sequence: Synthetic oligonucleotide
guaaaucucagacacacau

SEQ ID NO: 490236 - RNA, 19 nt, Artificial Sequence
  Description of Artificial Sequence: Synthetic oligonucleotide
uguaccauuaacgguguaa

SEQ ID NO: 490237 - RNA, 19 nt, Artificial Sequence
  Description of Artificial Sequence: Synthetic oligonucleotide
guguaucacuacucaaagg

SEQ ID NO: 490238 - RNA, 19 nt, Artificial Sequence
  Description of Artificial Sequence: Synthetic oligonucleotide
uguaaacgugaacucugga

SEQ ID NO: 490239 - RNA, 19 nt, Artificial Sequence
  Description of Artificial Sequence: Synthetic oligonucleotide
uuugcaggagccagaauuu

SEQ ID NO: 490240 - RNA, 19 nt, Artificial Sequence
  Description of Artificial Sequence: Synthetic oligonucleotide
uguacgcugccauucguac

SEQ ID NO: 490241 - RNA, 19 nt, Artificial Sequence
  Description of Artificial Sequence: Synthetic oligonucleotide
uguaaagguuuaagguccu

SEQ ID NO: 490242 - RNA, 19 nt, Artificial Sequence
  Description of Artificial Sequence: Synthetic oligonucleotide
ugucaagaggaaugcuaag

SEQ ID NO: 490243 - RNA, 19 nt, Artificial Sequence
  Description of Artificial Sequence: Synthetic oligonucleotide
auggugcgaauccugaaca

SEQ ID NO: 490244 - RNA, 19 nt, Artificial Sequence
  Description of Artificial Sequence: Synthetic oligonucleotide
uaccuagaaacuugguggu

SEQ ID NO: 490245 - RNA, 19 nt, Artificial Sequence
  Description of Artificial Sequence: Synthetic oligonucleotide
guagagugaaugucuagca

SEQ ID NO: 490246 - RNA, 19 nt, Artificial Sequence
  Description of Artificial Sequence: Synthetic oligonucleotide
ucguuuauuaaagcagaac

SEQ ID NO: 490247 - RNA, 19 nt, Artificial Sequence
  Description of Artificial Sequence: Synthetic oligonucleotide
uaguuucuugaagugggag

SEQ ID NO: 490248 - RNA, 19 nt, Artificial Sequence
  Description of Artificial Sequence: Synthetic oligonucleotide
uuauaccuagaaacuuggu

SEQ ID NO: 490249 - RNA, 19 nt, Artificial Sequence
  Description of Artificial Sequence: Synthetic oligonucleotide
ucuacauuaucugccaauu

SEQ ID NO: 490250 - RNA, 19 nt, Artificial Sequence
  Description of Artificial Sequence: Synthetic oligonucleotide
cauuaacgguguaauuuug

SEQ ID NO: 490251 - RNA, 19 nt, Artificial Sequence
  Description of Artificial Sequence: Synthetic oligonucleotide
uacuaucaauucuguacca

SEQ ID NO: 490252 - RNA, 19 nt, Artificial Sequence
  Description of Artificial Sequence: Synthetic oligonucleotide
caacacucacaucagugug

SEQ ID NO: 490253 - RNA, 19 nt, Artificial Sequence
  Description of Artificial Sequence: Synthetic oligonucleotide
uagagugaaugucuagcau

SEQ ID NO: 490254 - RNA, 19 nt, Artificial Sequence
  Description of Artificial Sequence: Synthetic oligonucleotide
ugagaagacuuggacugag

SEQ ID NO: 490255 - RNA, 19 nt, Artificial Sequence
  Description of Artificial Sequence: Synthetic oligonucleotide
gcaauaugacucuuugaag

SEQ ID NO: 490256 - RNA, 19 nt, Artificial Sequence
  Description of Artificial Sequence: Synthetic oligonucleotide
uagcgaugcuauauaguga

SEQ ID NO: 490257 - RNA, 19 nt, Artificial Sequence
  Description of Artificial Sequence: Synthetic oligonucleotide
uggauuuaucuuauaccua

SEQ ID NO: 490258 - RNA, 19 nt, Artificial Sequence
  Description of Artificial Sequence: Synthetic oligonucleotide
aaacuuuacaaaacccuua

SEQ ID NO: 490259 - RNA, 19 nt, Artificial Sequence
  Description of Artificial Sequence: Synthetic oligonucleotide
ugcucuacuuguccaucag

SEQ ID NO: 490260 - RNA, 19 nt, Artificial Sequence
  Description of Artificial Sequence: Synthetic oligonucleotide
ugcgccaagagcaccugug

SEQ ID NO: 490261 - RNA, 19 nt, Artificial Sequence
  Description of Artificial Sequence: Synthetic oligonucleotide
agccguaucugauuugcca

SEQ ID NO: 490262 - RNA, 19 nt, Artificial Sequence
  Description of Artificial Sequence: Synthetic oligonucleotide
cuggauuguuccuuuaaca

SEQ ID NO: 490263 - RNA, 19 nt, Artificial Sequence
  Description of Artificial Sequence: Synthetic oligonucleotide
ugacaaaauccuccucacu

SEQ ID NO: 490264 - RNA, 19 nt, Artificial Sequence
  Description of Artificial Sequence: Synthetic oligonucleotide
ucggagucuaacaggggcu

SEQ ID NO: 490265 - RNA, 19 nt, Artificial Sequence
  Description of Artificial Sequence: Synthetic oligonucleotide
acuacaguucuguuugaaa

SEQ ID NO: 490266 - RNA, 19 nt, Artificial Sequence
  Description of Artificial Sequence: Synthetic oligonucleotide
uuguccuuaagggcaauga

SEQ ID NO: 490267 - RNA, 19 nt, Artificial Sequence
  Description of Artificial Sequence: Synthetic oligonucleotide
agcguugucaagaggaaug

SEQ ID NO: 490268 - RNA, 19 nt, Artificial Sequence
  Description of Artificial Sequence: Synthetic oligonucleotide
gacaggaggaucacuugag

SEQ ID NO: 490269 - RNA, 19 nt, Artificial Sequence
  Description of Artificial Sequence: Synthetic oligonucleotide
uauuccuaagucacaugua

SEQ ID NO: 490270 - RNA, 19 nt, Artificial Sequence
  Description of Artificial Sequence: Synthetic oligonucleotide
ugccaacuacauuucuugc

SEQ ID NO: 490271 - RNA, 19 nt, Artificial Sequence
  Description of Artificial Sequence: Synthetic oligonucleotide
uagugcuugaaggaggauc

SEQ ID NO: 490272 - RNA, 19 nt, Artificial Sequence
  Description of Artificial Sequence: Synthetic oligonucleotide
auuuacuaucaauucugua

SEQ ID NO: 490273 - RNA, 19 nt, Artificial Sequence
  Description of Artificial Sequence: Synthetic oligonucleotide
ucuguguacgcugccauuc

SEQ ID NO: 490274 - RNA, 19 nt, Artificial Sequence
  Description of Artificial Sequence: Synthetic oligonucleotide
uucugagcagacucauucu

SEQ ID NO: 490275 - RNA, 19 nt, Artificial Sequence
  Description of Artificial Sequence: Synthetic oligonucleotide
cuauggcuucuauuucucc

SEQ ID NO: 490276 - RNA, 19 nt, Artificial Sequence
  Description of Artificial Sequence: Synthetic oligonucleotide
agccuaaacaacagaauga

SEQ ID NO: 490277 - RNA, 19 nt, Artificial Sequence
  Description of Artificial Sequence: Synthetic oligonucleotide
guucgggagacucuguauc

SEQ ID NO: 490278 - RNA, 19 nt, Artificial Sequence
  Description of Artificial Sequence: Synthetic oligonucleotide
auuaacgguguaauuuugu

SEQ ID NO: 490279 - RNA, 19 nt, Artificial Sequence
  Description of Artificial Sequence: Synthetic oligonucleotide
guaauuccuuccauaugag

SEQ ID NO: 490280 - RNA, 19 nt, Artificial Sequence
  Description of Artificial Sequence: Synthetic oligonucleotide
gacagagucaguucaugua

SEQ ID NO: 490281 - RNA, 19 nt, Artificial Sequence
  Description of Artificial Sequence: Synthetic oligonucleotide
gugcaaacauccaaacagc

SEQ ID NO: 490282 - RNA, 19 nt, Artificial Sequence
  Description of Artificial Sequence: Synthetic oligonucleotide
aaaggggacaguguauauu

SEQ ID NO: 490283 - RNA, 19 nt, Artificial Sequence
  Description of Artificial Sequence: Synthetic oligonucleotide
cauuuagaggacagaguca

SEQ ID NO: 490284 - RNA, 19 nt, Artificial Sequence
  Description of Artificial Sequence: Synthetic oligonucleotide
caguguaucacuacucaaa

SEQ ID NO: 490285 - RNA, 19 nt, Artificial Sequence
  Description of Artificial Sequence: Synthetic oligonucleotide
ggaguaaagaugacuuucc

SEQ ID NO: 490286 - RNA, 19 nt, Artificial Sequence
  Description of Artificial Sequence: Synthetic oligonucleotide
gacucggaccuugagaaga

SEQ ID NO: 490287 - RNA, 19 nt, Artificial Sequence
  Description of Artificial Sequence: Synthetic oligonucleotide
ccuugagcaaacuuuggug

SEQ ID NO: 490288 - RNA, 19 nt, Artificial Sequence
  Description of Artificial Sequence: Synthetic oligonucleotide
ugauuuccacuguguaaga

SEQ ID NO: 490289 - RNA, 19 nt, Artificial Sequence
  Description of Artificial Sequence: Synthetic oligonucleotide
uguguacgcugccauucgu

SEQ ID NO: 490290 - RNA, 19 nt, Artificial Sequence
  Description of Artificial Sequence: Synthetic oligonucleotide
uuccuuuauaggucccacu

SEQ ID NO: 490291 - RNA, 19 nt, Artificial Sequence
  Description of Artificial Sequence: Synthetic oligonucleotide
ugagugugaggugaccacu

SEQ ID NO: 490292 - RNA, 19 nt, Artificial Sequence
  Description of Artificial Sequence: Synthetic oligonucleotide
ucugccaauugcagauccu

SEQ ID NO: 490293 - RNA, 19 nt, Artificial Sequence
  Description of Artificial Sequence: Synthetic oligonucleotide
agauauagaguaguuucuu

SEQ ID NO: 490294 - RNA, 19 nt, Artificial Sequence
  Description of Artificial Sequence: Synthetic oligonucleotide
ccaauacugguucuguaag

SEQ ID NO: 490295 - RNA, 19 nt, Artificial Sequence
  Description of Artificial Sequence: Synthetic oligonucleotide
uugugagauuuacuaucaa

SEQ ID NO: 490296 - RNA, 19 nt, Artificial Sequence
  Description of Artificial Sequence: Synthetic oligonucleotide
uguucgggagacucuguau

SEQ ID NO: 490297 - RNA, 19 nt, Artificial Sequence
  Description of Artificial Sequence: Synthetic oligonucleotide
cuguguacgcugccauucg

SEQ ID NO: 490298 - RNA, 19 nt, Artificial Sequence
  Description of Artificial Sequence: Synthetic oligonucleotide
agguugacuacaguucugu

SEQ ID NO: 490299 - RNA, 19 nt, Artificial Sequence
  Description of Artificial Sequence: Synthetic oligonucleotide
ccaauugcagauccucugg

SEQ ID NO: 490300 - RNA, 19 nt, Artificial Sequence
  Description of Artificial Sequence: Synthetic oligonucleotide
cucucuucggagucuaaca

SEQ ID NO: 490301 - RNA, 19 nt, Artificial Sequence
  Description of Artificial Sequence: Synthetic oligonucleotide
cuucggagucuaacagggg

SEQ ID NO: 490302 - RNA, 19 nt, Artificial Sequence
  Description of Artificial Sequence: Synthetic oligonucleotide
ggaccuugagaagacuugg

SEQ ID NO: 490303 - RNA, 19 nt, Artificial Sequence
  Description of Artificial Sequence: Synthetic oligonucleotide
aacucuggaccauccuuuu

SEQ ID NO: 490304 - RNA, 19 nt, Artificial Sequence
  Description of Artificial Sequence: Synthetic oligonucleotide
uggugguuuggauggucug

SEQ ID NO: 490305 - RNA, 19 nt, Artificial Sequence
  Description of Artificial Sequence: Synthetic oligonucleotide
gaugcuauauagugauuau

SEQ ID NO: 490306 - RNA, 19 nt, Artificial Sequence
  Description of Artificial Sequence: Synthetic oligonucleotide
accuggauccaaguugaag

SEQ ID NO: 490307 - RNA, 19 nt, Artificial Sequence
  Description of Artificial Sequence: Synthetic oligonucleotide
acuaucaauucuguaccau

SEQ ID NO: 490308 - RNA, 19 nt, Artificial Sequence
  Description of Artificial Sequence: Synthetic oligonucleotide
gagccguggauuuaucuua

SEQ ID NO: 490309 - RNA, 19 nt, Artificial Sequence
  Description of Artificial Sequence: Synthetic oligonucleotide
ugugaccuucuguacuuau

SEQ ID NO: 490310 - RNA, 19 nt, Artificial Sequence
  Description of Artificial Sequence: Synthetic oligonucleotide
gguccuauauugaauguca

SEQ ID NO: 490311 - RNA, 19 nt, Artificial Sequence
  Description of Artificial Sequence: Synthetic oligonucleotide
uucaauccccacucagcaa

SEQ ID NO: 490312 - RNA, 19 nt, Artificial Sequence
  Description of Artificial Sequence: Synthetic oligonucleotide
uucguaccauguacagugu

SEQ ID NO: 490313 - RNA, 19 nt, Artificial Sequence
  Description of Artificial Sequence: Synthetic oligonucleotide
cagaagcguugucaagagg

SEQ ID NO: 490314 - RNA, 19 nt, Artificial Sequence
  Description of Artificial Sequence: Synthetic oligonucleotide
guaucuucaagagggaccu

SEQ ID NO: 490315 - RNA, 19 nt, Artificial Sequence
  Description of Artificial Sequence: Synthetic oligonucleotide
gggaguaaagaugacuuuc

SEQ ID NO: 490316 - RNA, 19 nt, Artificial Sequence
  Description of Artificial Sequence: Synthetic oligonucleotide
cccgaugaaacuugguuug

SEQ ID NO: 490317 - RNA, 19 nt, Artificial Sequence
  Description of Artificial Sequence: Synthetic oligonucleotide
gacaugcaugaagaucccc

SEQ ID NO: 490318 - RNA, 19 nt, Artificial Sequence
  Description of Artificial Sequence: Synthetic oligonucleotide
gaguguuuuagcuuuccuu

SEQ ID NO: 490319 - RNA, 19 nt, Artificial Sequence
  Description of Artificial Sequence: Synthetic oligonucleotide
caaacuuuacaaaacccuu

SEQ ID NO: 490320 - RNA, 19 nt, Artificial Sequence
  Description of Artificial Sequence: Synthetic oligonucleotide
gagugaaugucuagcaugu

SEQ ID NO: 490321 - RNA, 19 nt, Artificial Sequence
  Description of Artificial Sequence: Synthetic oligonucleotide
guacgcugccauucguacc

SEQ ID NO: 490322 - RNA, 19 nt, Artificial Sequence
  Description of Artificial Sequence: Synthetic oligonucleotide
ucguaccauguacagugua

SEQ ID NO: 490323 - RNA, 19 nt, Artificial Sequence
  Description of Artificial Sequence: Synthetic oligonucleotide
gauuuacuaucaauucugu

SEQ ID NO: 490324 - RNA, 19 nt, Artificial Sequence
  Description of Artificial Sequence: Synthetic oligonucleotide
gacagccguaucugauuug

SEQ ID NO: 490325 - RNA, 19 nt, Artificial Sequence
  Description of Artificial Sequence: Synthetic oligonucleotide
auaugagccguggauuuau

SEQ ID NO: 490326 - RNA, 19 nt, Artificial Sequence
  Description of Artificial Sequence: Synthetic oligonucleotide
guugacuacaguucuguuu

SEQ ID NO: 490327 - RNA, 19 nt, Artificial Sequence
  Description of Artificial Sequence: Synthetic oligonucleotide
aagcguugucaagaggaau

SEQ ID NO: 490328 - RNA, 19 nt, Artificial Sequence
  Description of Artificial Sequence: Synthetic oligonucleotide
gccaauugcagauccucug

SEQ ID NO: 490329 - RNA, 19 nt, Artificial Sequence
  Description of Artificial Sequence: Synthetic oligonucleotide
ccuaagucacauguaaaac

SEQ ID NO: 490330 - RNA, 19 nt, Artificial Sequence
  Description of Artificial Sequence: Synthetic oligonucleotide
ugccugggcaaaaucucau

SEQ ID NO: 490331 - RNA, 19 nt, Artificial Sequence
  Description of Artificial Sequence: Synthetic oligonucleotide
acucggaccuugagaagac

SEQ ID NO: 490332 - RNA, 19 nt, Artificial Sequence
  Description of Artificial Sequence: Synthetic oligonucleotide
aggacuagguuuaaauauu

SEQ ID NO: 490333 - RNA, 19 nt, Artificial Sequence
  Description of Artificial Sequence: Synthetic oligonucleotide
uaugagccguggauuuauc

SEQ ID NO: 490334 - RNA, 19 nt, Artificial Sequence
  Description of Artificial Sequence: Synthetic oligonucleotide
cagugguagagugaauguc

SEQ ID NO: 490335 - RNA, 19 nt, Artificial Sequence
  Description of Artificial Sequence: Synthetic oligonucleotide
uguagccaccuugucuuac

SEQ ID NO: 490336 - RNA, 19 nt, Artificial Sequence
  Description of Artificial Sequence: Synthetic oligonucleotide
agaugugaucugaaaccug

SEQ ID NO: 490337 - RNA, 19 nt, Artificial Sequence
  Description of Artificial Sequence: Synthetic oligonucleotide
uaauuagaucucguuuauu

SEQ ID NO: 490338 - RNA, 19 nt, Artificial Sequence
  Description of Artificial Sequence: Synthetic oligonucleotide
ccguggauuuaucuuauac

SEQ ID NO: 490339 - RNA, 19 nt, Artificial Sequence
  Description of Artificial Sequence: Synthetic oligonucleotide
cugccaauugcagauccuc

SEQ ID NO: 490340 - RNA, 19 nt, Artificial Sequence
  Description of Artificial Sequence: Synthetic oligonucleotide
aauuucacugcggcaugua

SEQ ID NO: 490341 - RNA, 19 nt, Artificial Sequence
  Description of Artificial Sequence: Synthetic oligonucleotide
uaccacuauggcuucuauu

SEQ ID NO: 490342 - RNA, 19 nt, Artificial Sequence
  Description of Artificial Sequence: Synthetic oligonucleotide
cucguuuauuaaagcagaa

SEQ ID NO: 490343 - RNA, 19 nt, Artificial Sequence
  Description of Artificial Sequence: Synthetic oligonucleotide
cucgcgguguucugagcag

SEQ ID NO: 490344 - RNA, 19 nt, Artificial Sequence
  Description of Artificial Sequence: Synthetic oligonucleotide
aggacagccguaucugauu

SEQ ID NO: 490345 - RNA, 19 nt, Artificial Sequence
  Description of Artificial Sequence: Synthetic oligonucleotide
auaccuggauuguuccuuu

SEQ ID NO: 490346 - RNA, 19 nt, Artificial Sequence
  Description of Artificial Sequence: Synthetic oligonucleotide
ugcgaauccugaacacaua

SEQ ID NO: 490347 - RNA, 19 nt, Artificial Sequence
  Description of Artificial Sequence: Synthetic oligonucleotide
caaugacuaucuucaggga

SEQ ID NO: 490348 - RNA, 19 nt, Artificial Sequence
  Description of Artificial Sequence: Synthetic oligonucleotide
uguucugagcagacucauu

SEQ ID NO: 490349 - RNA, 19 nt, Artificial Sequence
  Description of Artificial Sequence: Synthetic oligonucleotide
augcuauauagugauuauu

SEQ ID NO: 490350 - RNA, 19 nt, Artificial Sequence
  Description of Artificial Sequence: Synthetic oligonucleotide
caauccccacucagcaaac

SEQ ID NO: 490351 - RNA, 19 nt, Artificial Sequence
  Description of Artificial Sequence: Synthetic oligonucleotide
ucgcagucuccauuccaac

SEQ ID NO: 490352 - RNA, 19 nt, Artificial Sequence
  Description of Artificial Sequence: Synthetic oligonucleotide
aaucucagacacacauuuu

SEQ ID NO: 490353 - RNA, 19 nt, Artificial Sequence
  Description of Artificial Sequence: Synthetic oligonucleotide
aucuuaagucacagaugag

SEQ ID NO: 490354 - RNA, 19 nt, Artificial Sequence
  Description of Artificial Sequence: Synthetic oligonucleotide
auguucgggagacucugua

SEQ ID NO: 490355 - RNA, 19 nt, Artificial Sequence
  Description of Artificial Sequence: Synthetic oligonucleotide
gaugaguguuuuagcuuuc

SEQ ID NO: 490356 - RNA, 19 nt, Artificial Sequence
  Description of Artificial Sequence: Synthetic oligonucleotide
ggauguucgggagacucug

SEQ ID NO: 490357 - RNA, 19 nt, Artificial Sequence
  Description of Artificial Sequence: Synthetic oligonucleotide
aacgugaacucuggaccau

SEQ ID NO: 490358 - RNA, 19 nt, Artificial Sequence
  Description of Artificial Sequence: Synthetic oligonucleotide
ggacuagguuuaaauauuc

SEQ ID NO: 490359 - RNA, 19 nt, Artificial Sequence
  Description of Artificial Sequence: Synthetic oligonucleotide
gugcucgcgguguucugag

SEQ ID NO: 490360 - RNA, 19 nt, Artificial Sequence
  Description of Artificial Sequence: Synthetic oligonucleotide
gcggcauguagccaccuug

SEQ ID NO: 490361 - RNA, 19 nt, Artificial Sequence
  Description of Artificial Sequence: Synthetic oligonucleotide
gaagcguugucaagaggaa

SEQ ID NO: 490362 - RNA, 19 nt, Artificial Sequence
  Description of Artificial Sequence: Synthetic oligonucleotide
cuguaagauauagaguagu

SEQ ID NO: 490363 - RNA, 19 nt, Artificial Sequence
  Description of Artificial Sequence: Synthetic oligonucleotide
ggauccaaguugaagcauc

SEQ ID NO: 490364 - RNA, 19 nt, Artificial Sequence
  Description of Artificial Sequence: Synthetic oligonucleotide
acgguguaauuuugugaaa

SEQ ID NO: 490365 - RNA, 19 nt, Artificial Sequence
  Description of Artificial Sequence: Synthetic oligonucleotide
cuggaccauccuuuuccac

SEQ ID NO: 490366 - RNA, 19 nt, Artificial Sequence
  Description of Artificial Sequence: Synthetic oligonucleotide
cagccguaucugauuugcc

SEQ ID NO: 490367 - RNA, 19 nt, Artificial Sequence
  Description of Artificial Sequence: Synthetic oligonucleotide
aucgcagucuccauuccaa

SEQ ID NO: 490368 - RNA, 19 nt, Artificial Sequence
  Description of Artificial Sequence: Synthetic oligonucleotide
agugcucgcgguguucuga

SEQ ID NO: 490369 - RNA, 19 nt, Artificial Sequence
  Description of Artificial Sequence: Synthetic oligonucleotide
aagagggaccuggauccaa

SEQ ID NO: 490370 - RNA, 19 nt, Artificial Sequence
  Description of Artificial Sequence: Synthetic oligonucleotide
guaccauuaacgguguaau

SEQ ID NO: 490371 - RNA, 19 nt, Artificial Sequence
  Description of Artificial Sequence: Synthetic oligonucleotide
gacuacaguucuguuugaa

SEQ ID NO: 490372 - RNA, 19 nt, Artificial Sequence
  Description of Artificial Sequence: Synthetic oligonucleotide
gucuacauuaucugccaau

SEQ ID NO: 490373 - RNA, 19 nt, Artificial Sequence
  Description of Artificial Sequence: Synthetic oligonucleotide
gaccuugagaagacuugga

SEQ ID NO: 490374 - RNA, 19 nt, Artificial Sequence
  Description of Artificial Sequence: Synthetic oligonucleotide
guaucugauuugccaacua

SEQ ID NO: 490375 - RNA, 19 nt, Artificial Sequence
  Description of Artificial Sequence: Synthetic oligonucleotide
gugcuaaacccugcauacc

SEQ ID NO: 490376 - RNA, 19 nt, Artificial Sequence
  Description of Artificial Sequence: Synthetic oligonucleotide
agggaccuggauccaaguu

SEQ ID NO: 490377 - RNA, 19 nt, Artificial Sequence
  Description of Artificial Sequence: Synthetic oligonucleotide
agucuaacaggggcugggu

SEQ ID NO: 490378 - RNA, 19 nt, Artificial Sequence
  Description of Artificial Sequence: Synthetic oligonucleotide
cauggguucaauccccacu

SEQ ID NO: 490379 - RNA, 19 nt, Artificial Sequence
  Description of Artificial Sequence: Synthetic oligonucleotide
cagaaugagaugugugggu

SEQ ID NO: 490380 - RNA, 19 nt, Artificial Sequence
  Description of Artificial Sequence: Synthetic oligonucleotide
gcgccaagagcaccugugg

SEQ ID NO: 490381 - RNA, 19 nt, Artificial Sequence
  Description of Artificial Sequence: Synthetic oligonucleotide
caucgcagucuccauucca

SEQ ID NO: 490382 - RNA, 19 nt, Artificial Sequence
  Description of Artificial Sequence: Synthetic oligonucleotide
acuacucaaaggggacagu

SEQ ID NO: 490383 - RNA, 19 nt, Artificial Sequence
  Description of Artificial Sequence: Synthetic oligonucleotide
ggcugugagaugugaucug

SEQ ID NO: 490384 - RNA, 19 nt, Artificial Sequence
  Description of Artificial Sequence: Synthetic oligonucleotide
caccuucaucuguguacgc

SEQ ID NO: 490385 - RNA, 19 nt, Artificial Sequence
  Description of Artificial Sequence: Synthetic oligonucleotide
cuuacagucuguggcaagu

SEQ ID NO: 490386 - RNA, 19 nt, Artificial Sequence
  Description of Artificial Sequence: Synthetic oligonucleotide
gccguaucugauuugccaa

SEQ ID NO: 490387 - RNA, 19 nt, Artificial Sequence
  Description of Artificial Sequence: Synthetic oligonucleotide
aaccaggacuagguuuaaa

SEQ ID NO: 490388 - RNA, 19 nt, Artificial Sequence
  Description of Artificial Sequence: Synthetic oligonucleotide
gguguaauuuugugaaaau

SEQ ID NO: 490389 - RNA, 19 nt, Artificial Sequence
  Description of Artificial Sequence: Synthetic oligonucleotide
ggugcgaauccugaacaca

SEQ ID NO: 490390 - RNA, 19 nt, Artificial Sequence
  Description of Artificial Sequence: Synthetic oligonucleotide
gcucgcgguguucugagca

SEQ ID NO: 490391 - RNA, 19 nt, Artificial Sequence
  Description of Artificial Sequence: Synthetic oligonucleotide
ucgcgguguucugagcaga

SEQ ID NO: 490392 - RNA, 19 nt, Artificial Sequence
  Description of Artificial Sequence: Synthetic oligonucleotide
ugcucgcgguguucugagc

SEQ ID NO: 490393 - RNA, 19 nt, Artificial Sequence
  Description of Artificial Sequence: Synthetic oligonucleotide
gccaacuacauuucuugcu

SEQ ID NO: 490394 - RNA, 19 nt, Artificial Sequence
  Description of Artificial Sequence: Synthetic oligonucleotide
cgugaacucuggaccaucc

SEQ ID NO: 490395 - RNA, 19 nt, Artificial Sequence
  Description of Artificial Sequence: Synthetic oligonucleotide
gcuaaacccugcauaccug

SEQ ID NO: 490396 - RNA, 19 nt, Artificial Sequence
  Description of Artificial Sequence: Synthetic oligonucleotide
ccguaucugauuugccaac

SEQ ID NO: 490397 - RNA, 19 nt, Artificial Sequence
  Description of Artificial Sequence: Synthetic oligonucleotide
ggacucggaccuugagaag

SEQ ID NO: 490398 - RNA, 19 nt, Artificial Sequence
  Description of Artificial Sequence: Synthetic oligonucleotide
gccauucguaccauguaca

SEQ ID NO: 490399 - RNA, 19 nt, Artificial Sequence
  Description of Artificial Sequence: Synthetic oligonucleotide
gcuaagcacacagguacca

SEQ ID NO: 490400 - RNA, 19 nt, Artificial Sequence
  Description of Artificial Sequence: Synthetic oligonucleotide
ggaccauccuuuuccaccu

SEQ ID NO: 490401 - RNA, 19 nt, Artificial Sequence
  Description of Artificial Sequence: Synthetic oligonucleotide
ucgggagacucuguaucuu

SEQ ID NO: 490402 - RNA, 19 nt, Artificial Sequence
  Description of Artificial Sequence: Synthetic oligonucleotide
gauguguggguggguagcu

SEQ ID NO: 490403 - RNA, 19 nt, Artificial Sequence
  Description of Artificial Sequence: Synthetic oligonucleotide
cuucauaauccaagauuuu

SEQ ID NO: 490404 - RNA, 19 nt, Artificial Sequence
  Description of Artificial Sequence: Synthetic oligonucleotide
gacagugcucgcgguguuc

SEQ ID NO: 490405 - RNA, 19 nt, Artificial Sequence
  Description of Artificial Sequence: Synthetic oligonucleotide
gugcgaauccugaacacau

SEQ ID NO: 490406 - RNA, 19 nt, Artificial Sequence
  Description of Artificial Sequence: Synthetic oligonucleotide
ccaggacuagguuuaaaua

SEQ ID NO: 490407 - RNA, 19 nt, Artificial Sequence
  Description of Artificial Sequence: Synthetic oligonucleotide
ccacuauggcuucuauuuc

SEQ ID NO: 490408 - RNA, 19 nt, Artificial Sequence
  Description of Artificial Sequence: Synthetic oligonucleotide
cugcuagcgaugcuauaua

SEQ ID NO: 490409 - RNA, 19 nt, Artificial Sequence
  Description of Artificial Sequence: Synthetic oligonucleotide
gcgaauccugaacacauau

SEQ ID NO: 490410 - RNA, 19 nt, Artificial Sequence
  Description of Artificial Sequence: Synthetic oligonucleotide
agccguggauuuaucuuau

SEQ ID NO: 490411 - RNA, 19 nt, Artificial Sequence
  Description of Artificial Sequence: Synthetic oligonucleotide
cauaccuggauuguuccuu

SEQ ID NO: 490412 - RNA, 19 nt, Artificial Sequence
  Description of Artificial Sequence: Synthetic oligonucleotide
accuagaaacuuggugguu

SEQ ID NO: 490413 - RNA, 19 nt, Artificial Sequence
  Description of Artificial Sequence: Synthetic oligonucleotide
gaggacagccguaucugau

SEQ ID NO: 490414 - RNA, 19 nt, Artificial Sequence
  Description of Artificial Sequence: Synthetic oligonucleotide
accuugucuuacagucugu

SEQ ID NO: 490415 - RNA, 19 nt, Artificial Sequence
  Description of Artificial Sequence: Synthetic oligonucleotide
guguacgcugccauucgua

SEQ ID NO: 490416 - RNA, 19 nt, Artificial Sequence
  Description of Artificial Sequence: Synthetic oligonucleotide
ccucucuucggagucuaac

SEQ ID NO: 490417 - RNA, 19 nt, Artificial Sequence
  Description of Artificial Sequence: Synthetic oligonucleotide
ccauuaacgguguaauuuu

SEQ ID NO: 490418 - RNA, 19 nt, Artificial Sequence
  Description of Artificial Sequence: Synthetic oligonucleotide
gauguucgggagacucugu

SEQ ID NO: 490419 - RNA, 19 nt, Artificial Sequence
  Description of Artificial Sequence: Synthetic oligonucleotide
cgaugcuauauagugauua

SEQ ID NO: 490420 - RNA, 19 nt, Artificial Sequence
  Description of Artificial Sequence: Synthetic oligonucleotide
cagugcucgcgguguucug

SEQ ID NO: 490421 - RNA, 19 nt, Artificial Sequence
  Description of Artificial Sequence: Synthetic oligonucleotide
gcccgaugaaacuugguuu

SEQ ID NO: 490422 - RNA, 19 nt, Artificial Sequence
  Description of Artificial Sequence: Synthetic oligonucleotide
acccaaagucccagauccu

SEQ ID NO: 490423 - RNA, 19 nt, Artificial Sequence
  Description of Artificial Sequence: Synthetic oligonucleotide
cagccauuuagaggacaga

SEQ ID NO: 490424 - RNA, 19 nt, Artificial Sequence
  Description of Artificial Sequence: Synthetic oligonucleotide
gacuaucuucagggaguaa

SEQ ID NO: 490425 - RNA, 19 nt, Artificial Sequence
  Description of Artificial Sequence: Synthetic oligonucleotide
gcuagcgaugcuauauagu

SEQ ID NO: 490426 - RNA, 19 nt, Artificial Sequence
  Description of Artificial Sequence: Synthetic oligonucleotide
cagaguacuucagccauuu

SEQ ID NO: 490427 - RNA, 19 nt, Artificial Sequence
  Description of Artificial Sequence: Synthetic oligonucleotide
ggacagccguaucugauuu

SEQ ID NO: 490428 - RNA, 19 nt, Artificial Sequence
  Description of Artificial Sequence: Synthetic oligonucleotide
guaccacuauggcuucuau

SEQ ID NO: 490429 - RNA, 19 nt, Artificial Sequence
  Description of Artificial Sequence: Synthetic oligonucleotide
gugccugcgccaagagcac

SEQ ID NO: 490430 - RNA, 19 nt, Artificial Sequence
  Description of Artificial Sequence: Synthetic oligonucleotide
guguucugagcagacucau

SEQ ID NO: 490431 - RNA, 19 nt, Artificial Sequence
  Description of Artificial Sequence: Synthetic oligonucleotide
cccuuacggcuucuucagc

SEQ ID NO: 490432 - RNA, 19 nt, Artificial Sequence
  Description of Artificial Sequence: Synthetic oligonucleotide
gccauuuagaggacagagu

SEQ ID NO: 490433 - RNA, 19 nt, Artificial Sequence
  Description of Artificial Sequence: Synthetic oligonucleotide
caagagggaccuggaucca

SEQ ID NO: 490434 - RNA, 19 nt, Artificial Sequence
  Description of Artificial Sequence: Synthetic oligonucleotide
guuuaagguccuggacagu

SEQ ID NO: 490435 - RNA, 19 nt, Artificial Sequence
  Description of Artificial Sequence: Synthetic oligonucleotide
gcauaccuggauuguuccu

SEQ ID NO: 490436 - RNA, 19 nt, Artificial Sequence
  Description of Artificial Sequence: Synthetic oligonucleotide
ccauaugagccguggauuu

SEQ ID NO: 490437 - RNA, 19 nt, Artificial Sequence
  Description of Artificial Sequence: Synthetic oligonucleotide
gguugacuacaguucuguu

SEQ ID NO: 490438 - RNA, 19 nt, Artificial Sequence
  Description of Artificial Sequence: Synthetic oligonucleotide
cguaccauguacaguguau

SEQ ID NO: 490439 - RNA, 19 nt, Artificial Sequence
  Description of Artificial Sequence: Synthetic oligonucleotide
caugucacacugggaaguu

SEQ ID NO: 490440 - RNA, 19 nt, Artificial Sequence
  Description of Artificial Sequence: Synthetic oligonucleotide
cuguaccauuaacggugua

SEQ ID NO: 490441 - RNA, 19 nt, Artificial Sequence
  Description of Artificial Sequence: Synthetic oligonucleotide
cugcccgaugaaacuuggu

SEQ ID NO: 490442 - RNA, 19 nt, Artificial Sequence
  Description of Artificial Sequence: Synthetic oligonucleotide
ccgaugaaacuugguuuga

SEQ ID NO: 490443 - RNA, 19 nt, Artificial Sequence
  Description of Artificial Sequence: Synthetic oligonucleotide
guagugcuugaaggaggau

SEQ ID NO: 490444 - RNA, 19 nt, Artificial Sequence
  Description of Artificial Sequence: Synthetic oligonucleotide
gccguggauuuaucuuaua

SEQ ID NO: 490445 - RNA, 19 nt, Artificial Sequence
  Description of Artificial Sequence: Synthetic oligonucleotide
ccacaacacucacaucagu

SEQ ID NO: 490446 - RNA, 19 nt, Artificial Sequence
  Description of Artificial Sequence: Synthetic oligonucleotide
ggccucucuucggagucua

SEQ ID NO: 490447 - RNA, 19 nt, Artificial Sequence
  Description of Artificial Sequence: Synthetic oligonucleotide
ccucauugcuggagaugcu

SEQ ID NO: 490448 - RNA, 19 nt, Artificial Sequence
  Description of Artificial Sequence: Synthetic oligonucleotide
gcgguguucugagcagacu

SEQ ID NO: 490449 - RNA, 19 nt, Artificial Sequence
  Description of Artificial Sequence: Synthetic oligonucleotide
ccugcauaccuggauuguu

SEQ ID NO: 490450 - RNA, 19 nt, Artificial Sequence
  Description of Artificial Sequence: Synthetic oligonucleotide
cguugucaagaggaaugcu

SEQ ID NO: 490451 - RNA, 19 nt, Artificial Sequence
  Description of Artificial Sequence: Synthetic oligonucleotide
gcgaugcuauauagugauu

SEQ ID NO: 490452 - RNA, 19 nt, Artificial Sequence
  Description of Artificial Sequence: Synthetic oligonucleotide
aaucguuucaccuuuuacc

SEQ ID NO: 490453 - RNA, 19 nt, Artificial Sequence
  Description of Artificial Sequence: Synthetic oligonucleotide
aaaagauugguccucaagg

SEQ ID NO: 490454 - RNA, 19 nt, Artificial Sequence
  Description of Artificial Sequence: Synthetic oligonucleotide
auuaaaaugauuucaguag

SEQ ID NO: 490455 - RNA, 19 nt, Artificial Sequence
  Description of Artificial Sequence: Synthetic oligonucleotide
uaagcuaggaaaauaaugc

SEQ ID NO: 490456 - RNA, 19 nt, Artificial Sequence
  Description of Artificial Sequence: Synthetic oligonucleotide
auuaauauuagagacuagc

SEQ ID NO: 490457 - RNA, 19 nt, Artificial Sequence
  Description of Artificial Sequence: Synthetic oligonucleotide
aauaccuuaagcuaggaaa

SEQ ID NO: 490458 - RNA, 19 nt, Artificial Sequence
  Description of Artificial Sequence: Synthetic oligonucleotide
aaauucauaaagguaaccg

SEQ ID NO: 490459 - RNA, 19 nt, Artificial Sequence
  Description of Artificial Sequence: Synthetic oligonucleotide
aacucaauaaucaaagacg

SEQ ID NO: 490460 - RNA, 19 nt, Artificial Sequence
  Description of Artificial Sequence: Synthetic oligonucleotide
aagguaaccggccaugugc

SEQ ID NO: 490461 - RNA, 19 nt, Artificial Sequence
  Description of Artificial Sequence: Synthetic oligonucleotide
aaaaugggccauuuaaaac

SEQ ID NO: 490462 - RNA, 19 nt, Artificial Sequence
  Description of Artificial Sequence: Synthetic oligonucleotide
auuaagcuaaauuaaaaug

SEQ ID NO: 490463 - RNA, 19 nt, Artificial Sequence
  Description of Artificial Sequence: Synthetic oligonucleotide
aaaugggccauuuaaaacu

SEQ ID NO: 490464 - RNA, 19 nt, Artificial Sequence
  Description of Artificial Sequence: Synthetic oligonucleotide
agugcuaaaaccccagugc

SEQ ID NO: 490465 - RNA, 19 nt, Artificial Sequence
  Description of Artificial Sequence: Synthetic oligonucleotide
aauuuaaggauauucguau

SEQ ID NO: 490466 - RNA, 19 nt, Artificial Sequence
  Description of Artificial Sequence: Synthetic oligonucleotide
uauucuuacauacaugacu

SEQ ID NO: 490467 - RNA, 19 nt, Artificial Sequence
  Description of Artificial Sequence: Synthetic oligonucleotide
uuaacuucaacaagacggg

SEQ ID NO: 490468 - RNA, 19 nt, Artificial Sequence
  Description of Artificial Sequence: Synthetic oligonucleotide
aguuauuucccuaauaagg

SEQ ID NO: 490469 - RNA, 19 nt, Artificial Sequence
  Description of Artificial Sequence: Synthetic oligonucleotide
aauuaacuucaacaagacg

SEQ ID NO: 490470 - RNA, 19 nt, Artificial Sequence
  Description of Artificial Sequence: Synthetic oligonucleotide
aauacuacccauuacugau

SEQ ID NO: 490471 - RNA, 19 nt, Artificial Sequence
  Description of Artificial Sequence: Synthetic oligonucleotide
uucguuauagcauuggcug

SEQ ID NO: 490472 - RNA, 19 nt, Artificial Sequence
  Description of Artificial Sequence: Synthetic oligonucleotide
uuacacguaacuuuucagg

SEQ ID NO: 490473 - RNA, 19 nt, Artificial Sequence
  Description of Artificial Sequence: Synthetic oligonucleotide
ucaauaaucaaagacgcug

SEQ ID NO: 490474 - RNA, 19 nt, Artificial Sequence
  Description of Artificial Sequence: Synthetic oligonucleotide
uuaaaaugauuucaguaga

SEQ ID NO: 490475 - RNA, 19 nt, Artificial Sequence
  Description of Artificial Sequence: Synthetic oligonucleotide
aauguaaauguccacaguu

SEQ ID NO: 490476 - RNA, 19 nt, Artificial Sequence
  Description of Artificial Sequence: Synthetic oligonucleotide
uuaucuauaaggagcaaca

SEQ ID NO: 490477 - RNA, 19 nt, Artificial Sequence
  Description of Artificial Sequence: Synthetic oligonucleotide
uuaauauuagagacuagca

SEQ ID NO: 490478 - RNA, 19 nt, Artificial Sequence
  Description of Artificial Sequence: Synthetic oligonucleotide
ugacagauuguuaaggagc

SEQ ID NO: 490479 - RNA, 19 nt, Artificial Sequence
  Description of Artificial Sequence: Synthetic oligonucleotide
aaaccauucaauuaagcua

SEQ ID NO: 490480 - RNA, 19 nt, Artificial Sequence
  Description of Artificial Sequence: Synthetic oligonucleotide
acuagcauugaauuuaaug

SEQ ID NO: 490481 - RNA, 19 nt, Artificial Sequence
  Description of Artificial Sequence: Synthetic oligonucleotide
aguguauagcaccaaaauc

SEQ ID NO: 490482 - RNA, 19 nt, Artificial Sequence
  Description of Artificial Sequence: Synthetic oligonucleotide
acucaauaaucaaagacgc

SEQ ID NO: 490483 - RNA, 19 nt, Artificial Sequence
  Description of Artificial Sequence: Synthetic oligonucleotide
uuaauuaaaacuguugcaa

SEQ ID NO: 490484 - RNA, 19 nt, Artificial Sequence
  Description of Artificial Sequence: Synthetic oligonucleotide
uguccuuaaaaucaccagc

SEQ ID NO: 490485 - RNA, 19 nt, Artificial Sequence
  Description of Artificial Sequence: Synthetic oligonucleotide
uagauuuuagcuauaguaa

SEQ ID NO: 490486 - RNA, 19 nt, Artificial Sequence
  Description of Artificial Sequence: Synthetic oligonucleotide
cugaaaauuauaacaagac

SEQ ID NO: 490487 - RNA, 19 nt, Artificial Sequence
  Description of Artificial Sequence: Synthetic oligonucleotide
uauaguaaguguauagcac

SEQ ID NO: 490488 - RNA, 19 nt, Artificial Sequence
  Description of Artificial Sequence: Synthetic oligonucleotide
aacuuuucaggagugcacc

SEQ ID NO: 490489 - RNA, 19 nt, Artificial Sequence
  Description of Artificial Sequence: Synthetic oligonucleotide
auucauaaagguaaccggc

SEQ ID NO: 490490 - RNA, 19 nt, Artificial Sequence
  Description of Artificial Sequence: Synthetic oligonucleotide
aauguucuugguugacacc

SEQ ID NO: 490491 - RNA, 19 nt, Artificial Sequence
  Description of Artificial Sequence: Synthetic oligonucleotide
aauuugacuagugaugaug

SEQ ID NO: 490492 - RNA, 19 nt, Artificial Sequence
  Description of Artificial Sequence: Synthetic oligonucleotide
uuaaagcucuauuuacacg

SEQ ID NO: 490493 - RNA, 19 nt, Artificial Sequence
  Description of Artificial Sequence: Synthetic oligonucleotide
uuggauaaaguacacggcu

SEQ ID NO: 490494 - RNA, 19 nt, Artificial Sequence
  Description of Artificial Sequence: Synthetic oligonucleotide
aaagauugguccucaaggu

SEQ ID NO: 490495 - RNA, 19 nt, Artificial Sequence
  Description of Artificial Sequence: Synthetic oligonucleotide
aaaguacacggcuaauuug

SEQ ID NO: 490496 - RNA, 19 nt, Artificial Sequence
  Description of Artificial Sequence: Synthetic oligonucleotide
aagacgggcaucauuuucc

SEQ ID NO: 490497 - RNA, 19 nt, Artificial Sequence
  Description of Artificial Sequence: Synthetic oligonucleotide
guagauuuuagcuauagua

SEQ ID NO: 490498 - RNA, 19 nt, Artificial Sequence
  Description of Artificial Sequence: Synthetic oligonucleotide
caacucaauaaucaaagac

SEQ ID NO: 490499 - RNA, 19 nt, Artificial Sequence
  Description of Artificial Sequence: Synthetic oligonucleotide
ugaaccgauacccaaauuu

SEQ ID NO: 490500 - RNA, 19 nt, Artificial Sequence
  Description of Artificial Sequence: Synthetic oligonucleotide
uucaauucgccucuugcgc

SEQ ID NO: 490501 - RNA, 19 nt, Artificial Sequence
  Description of Artificial Sequence: Synthetic oligonucleotide
aaguguauagcaccaaaau

SEQ ID NO: 490502 - RNA, 19 nt, Artificial Sequence
  Description of Artificial Sequence: Synthetic oligonucleotide
ucucuagauaagaaagcag

SEQ ID NO: 490503 - RNA, 19 nt, Artificial Sequence
  Description of Artificial Sequence: Synthetic oligonucleotide
uaagcuaaauuaaaaugau

SEQ ID NO: 490504 - RNA, 19 nt, Artificial Sequence
  Description of Artificial Sequence: Synthetic oligonucleotide
uuucguuauagcauuggcu

SEQ ID NO: 490505 - RNA, 19 nt, Artificial Sequence
  Description of Artificial Sequence: Synthetic oligonucleotide
uuuacacguaacuuuucag

SEQ ID NO: 490506 - RNA, 19 nt, Artificial Sequence
  Description of Artificial Sequence: Synthetic oligonucleotide
uccccuucuacccaggaag

SEQ ID NO: 490507 - RNA, 19 nt, Artificial Sequence
  Description of Artificial Sequence: Synthetic oligonucleotide
uuuucguuauagcauuggc

SEQ ID NO: 490508 - RNA, 19 nt, Artificial Sequence
  Description of Artificial Sequence: Synthetic oligonucleotide
cauaauaccuuaagcuagg

SEQ ID NO: 490509 - RNA, 19 nt, Artificial Sequence
  Description of Artificial Sequence: Synthetic oligonucleotide
ugacuagugaugauguaca

SEQ ID NO: 490510 - RNA, 19 nt, Artificial Sequence
  Description of Artificial Sequence: Synthetic oligonucleotide
aaauuauaacaagacaaau

SEQ ID NO: 490511 - RNA, 19 nt, Artificial Sequence
  Description of Artificial Sequence: Synthetic oligonucleotide
uuacauacaugacuucuga

SEQ ID NO: 490512 - RNA, 19 nt, Artificial Sequence
  Description of Artificial Sequence: Synthetic oligonucleotide
uuagcuauaguaaguguau

SEQ ID NO: 490513 - RNA, 19 nt, Artificial Sequence
  Description of Artificial Sequence: Synthetic oligonucleotide
aagggauaugcuuucuucu

SEQ ID NO: 490514 - RNA, 19 nt, Artificial Sequence
  Description of Artificial Sequence: Synthetic oligonucleotide
uguugcaaaguccuaauuu

SEQ ID NO: 490515 - RNA, 19 nt, Artificial Sequence
  Description of Artificial Sequence: Synthetic oligonucleotide
ucaguuaaguccuuccgga

SEQ ID NO: 490516 - RNA, 19 nt, Artificial Sequence
  Description of Artificial Sequence: Synthetic oligonucleotide
aaccauucaauuaagcuaa

SEQ ID NO: 490517 - RNA, 19 nt, Artificial Sequence
  Description of Artificial Sequence: Synthetic oligonucleotide
aucguuucaccuuuuacca

SEQ ID NO: 490518 - RNA, 19 nt, Artificial Sequence
  Description of Artificial Sequence: Synthetic oligonucleotide
gucgagaucauccaggaca

SEQ ID NO: 490519 - RNA, 19 nt, Artificial Sequence
  Description of Artificial Sequence: Synthetic oligonucleotide
uuuaucuauaaggagcaac

SEQ ID NO: 490520 - RNA, 19 nt, Artificial Sequence
  Description of Artificial Sequence: Synthetic oligonucleotide
uguuaaggagcucaucuuc

SEQ ID NO: 490521 - RNA, 19 nt, Artificial Sequence
  Description of Artificial Sequence: Synthetic oligonucleotide
acauaauaccuuaagcuag

SEQ ID NO: 490522 - RNA, 19 nt, Artificial Sequence
  Description of Artificial Sequence: Synthetic oligonucleotide
uuauuuggucuuuggaaug

SEQ ID NO: 490523 - RNA, 19 nt, Artificial Sequence
  Description of Artificial Sequence: Synthetic oligonucleotide
agcuaaauuaaaaugauuu

SEQ ID NO: 490524 - RNA, 19 nt, Artificial Sequence
  Description of Artificial Sequence: Synthetic oligonucleotide
uguucucuaucaaaggguc

SEQ ID NO: 490525 - RNA, 19 nt, Artificial Sequence
  Description of Artificial Sequence: Synthetic oligonucleotide
cucuagauaagaaagcaga

SEQ ID NO: 490526 - RNA, 19 nt, Artificial Sequence
  Description of Artificial Sequence: Synthetic oligonucleotide
aacugugugucuguaauca

SEQ ID NO: 490527 - RNA, 19 nt, Artificial Sequence
  Description of Artificial Sequence: Synthetic oligonucleotide
augauguacaacucaauaa

SEQ ID NO: 490528 - RNA, 19 nt, Artificial Sequence
  Description of Artificial Sequence: Synthetic oligonucleotide
cuaucaaagggucccgugg

SEQ ID NO: 490529 - RNA, 19 nt, Artificial Sequence
  Description of Artificial Sequence: Synthetic oligonucleotide
acuacuucucaccacguca

SEQ ID NO: 490530 - RNA, 19 nt, Artificial Sequence
  Description of Artificial Sequence: Synthetic oligonucleotide
aaauuuaaggauauucgua

SEQ ID NO: 490531 - RNA, 19 nt, Artificial Sequence
  Description of Artificial Sequence: Synthetic oligonucleotide
acucaguuaaguccuuccg

SEQ ID NO: 490532 - RNA, 19 nt, Artificial Sequence
  Description of Artificial Sequence: Synthetic oligonucleotide
ugcauauaguuaacaaaga

SEQ ID NO: 490533 - RNA, 19 nt, Artificial Sequence
  Description of Artificial Sequence: Synthetic oligonucleotide
uaucaaagggucccguggc

SEQ ID NO: 490534 - RNA, 19 nt, Artificial Sequence
  Description of Artificial Sequence: Synthetic oligonucleotide
caaucagugcuaaaacccc

SEQ ID NO: 490535 - RNA, 19 nt, Artificial Sequence
  Description of Artificial Sequence: Synthetic oligonucleotide
auauuagagacuagcauug

SEQ ID NO: 490536 - RNA, 19 nt, Artificial Sequence
  Description of Artificial Sequence: Synthetic oligonucleotide
cagcauaucugcaaaugcc

SEQ ID NO: 490537 - RNA, 19 nt, Artificial Sequence
  Description of Artificial Sequence: Synthetic oligonucleotide
cucaguuaaguccuuccgg

SEQ ID NO: 490538 - RNA, 19 nt, Artificial Sequence
  Description of Artificial Sequence: Synthetic oligonucleotide
uauuaauauuagagacuag

SEQ ID NO: 490539 - RNA, 19 nt, Artificial Sequence
  Description of Artificial Sequence: Synthetic oligonucleotide
uuaaggauauucguauucu

SEQ ID NO: 490540 - RNA, 19 nt, Artificial Sequence
  Description of Artificial Sequence: Synthetic oligonucleotide
gauagcugcaagaucacac

SEQ ID NO: 490541 - RNA, 19 nt, Artificial Sequence
  Description of Artificial Sequence: Synthetic oligonucleotide
ucaagugagcaauaucccu

SEQ ID NO: 490542 - RNA, 19 nt, Artificial Sequence
  Description of Artificial Sequence: Synthetic oligonucleotide
uugacuagugaugauguac

SEQ ID NO: 490543 - RNA, 19 nt, Artificial Sequence
  Description of Artificial Sequence: Synthetic oligonucleotide
ugugugucuguaaucagau

SEQ ID NO: 490544 - RNA, 19 nt, Artificial Sequence
  Description of Artificial Sequence: Synthetic oligonucleotide
aucaagugagcaauauccc

SEQ ID NO: 490545 - RNA, 19 nt, Artificial Sequence
  Description of Artificial Sequence: Synthetic oligonucleotide
uaaccacuagcuuuuacaa

SEQ ID NO: 490546 - RNA, 19 nt, Artificial Sequence
  Description of Artificial Sequence: Synthetic oligonucleotide
aguauuaauauuagagacu

SEQ ID NO: 490547 - RNA, 19 nt, Artificial Sequence
  Description of Artificial Sequence: Synthetic oligonucleotide
cuagugaugauguacaacu

SEQ ID NO: 490548 - RNA, 19 nt, Artificial Sequence
  Description of Artificial Sequence: Synthetic oligonucleotide
accaaaaucuacuuucaaa

SEQ ID NO: 490549 - RNA, 19 nt, Artificial Sequence
  Description of Artificial Sequence: Synthetic oligonucleotide
uuuuagcuauaguaagugu

SEQ ID NO: 490550 - RNA, 19 nt, Artificial Sequence
  Description of Artificial Sequence: Synthetic oligonucleotide
uuacccuuggcacucuuac

SEQ ID NO: 490551 - RNA, 19 nt, Artificial Sequence
  Description of Artificial Sequence: Synthetic oligonucleotide
agacgcuguccuuaaaauc

SEQ ID NO: 490552 - RNA, 19 nt, Artificial Sequence
  Description of Artificial Sequence: Synthetic oligonucleotide
uauaaggagcaacauuaau

SEQ ID NO: 490553 - RNA, 19 nt, Artificial Sequence
  Description of Artificial Sequence: Synthetic oligonucleotide
uccuuaaaaucaccagcag

SEQ ID NO: 490554 - RNA, 19 nt, Artificial Sequence
  Description of Artificial Sequence: Synthetic oligonucleotide
gacgcuguccuuaaaauca

SEQ ID NO: 490555 - RNA, 19 nt, Artificial Sequence
  Description of Artificial Sequence: Synthetic oligonucleotide
aacaagacgggcaucauuu

SEQ ID NO: 490556 - RNA, 19 nt, Artificial Sequence
  Description of Artificial Sequence: Synthetic oligonucleotide
uaacaaagauuuccagucu

SEQ ID NO: 490557 - RNA, 19 nt, Artificial Sequence
  Description of Artificial Sequence: Synthetic oligonucleotide
uagagacuagcauugaauu

SEQ ID NO: 490558 - RNA, 19 nt, Artificial Sequence
  Description of Artificial Sequence: Synthetic oligonucleotide
agaacugugugucuguaau

SEQ ID NO: 490559 - RNA, 19 nt, Artificial Sequence
  Description of Artificial Sequence: Synthetic oligonucleotide
aggugccagacuuuuaaag

SEQ ID NO: 490560 - RNA, 19 nt, Artificial Sequence
  Description of Artificial Sequence: Synthetic oligonucleotide
aagacgcuguccuuaaaau

SEQ ID NO: 490561 - RNA, 19 nt, Artificial Sequence
  Description of Artificial Sequence: Synthetic oligonucleotide
aauguuuauuuggucuuug

SEQ ID NO: 490562 - RNA, 19 nt, Artificial Sequence
  Description of Artificial Sequence: Synthetic oligonucleotide
aauuuauuacuaugucaua

SEQ ID NO: 490563 - RNA, 19 nt, Artificial Sequence
  Description of Artificial Sequence: Synthetic oligonucleotide
acuagugaugauguacaac

SEQ ID NO: 490564 - RNA, 19 nt, Artificial Sequence
  Description of Artificial Sequence: Synthetic oligonucleotide
uagcauugaauuuaaugua

SEQ ID NO: 490565 - RNA, 19 nt, Artificial Sequence
  Description of Artificial Sequence: Synthetic oligonucleotide
guauuaauauuagagacua

SEQ ID NO: 490566 - RNA, 19 nt, Artificial Sequence
  Description of Artificial Sequence: Synthetic oligonucleotide
uuauuucccuaauaaggaa

SEQ ID NO: 490567 - RNA, 19 nt, Artificial Sequence
  Description of Artificial Sequence: Synthetic oligonucleotide
cuagauaagaaagcagaug

SEQ ID NO: 490568 - RNA, 19 nt, Artificial Sequence
  Description of Artificial Sequence: Synthetic oligonucleotide
gcuaauaugguuaacacaa

SEQ ID NO: 490569 - RNA, 19 nt, Artificial Sequence
  Description of Artificial Sequence: Synthetic oligonucleotide
aagaucacacaauucugua

SEQ ID NO: 490570 - RNA, 19 nt, Artificial Sequence
  Description of Artificial Sequence: Synthetic oligonucleotide
uuaaacucuccucaacguu

SEQ ID NO: 490571 - RNA, 19 nt, Artificial Sequence
  Description of Artificial Sequence: Synthetic oligonucleotide
ucaggagugcaccccuugg

SEQ ID NO: 490572 - RNA, 19 nt, Artificial Sequence
  Description of Artificial Sequence: Synthetic oligonucleotide
aaacucuccucaacguugg

SEQ ID NO: 490573 - RNA, 19 nt, Artificial Sequence
  Description of Artificial Sequence: Synthetic oligonucleotide
cuaauuugacuagugauga

SEQ ID NO: 490574 - RNA, 19 nt, Artificial Sequence
  Description of Artificial Sequence: Synthetic oligonucleotide
ugguuaacacaaaauguuu

SEQ ID NO: 490575 - RNA, 19 nt, Artificial Sequence
  Description of Artificial Sequence: Synthetic oligonucleotide
acacguaacuuuucaggag

SEQ ID NO: 490576 - RNA, 19 nt, Artificial Sequence
  Description of Artificial Sequence: Synthetic oligonucleotide
auagcugcaagaucacaca

SEQ ID NO: 490577 - RNA, 19 nt, Artificial Sequence
  Description of Artificial Sequence: Synthetic oligonucleotide
cauguaggcauacugaaaa

SEQ ID NO: 490578 - RNA, 19 nt, Artificial Sequence
  Description of Artificial Sequence: Synthetic oligonucleotide
ucuaucaaagggucccgug

SEQ ID NO: 490579 - RNA, 19 nt, Artificial Sequence
  Description of Artificial Sequence: Synthetic oligonucleotide
cucggggucgagaucaucc

SEQ ID NO: 490580 - RNA, 19 nt, Artificial Sequence
  Description of Artificial Sequence: Synthetic oligonucleotide
aacuucaacaagacgggca

SEQ ID NO: 490581 - RNA, 19 nt, Artificial Sequence
  Description of Artificial Sequence: Synthetic oligonucleotide
ucaauucgccucuugcgca

SEQ ID NO: 490582 - RNA, 19 nt, Artificial Sequence
  Description of Artificial Sequence: Synthetic oligonucleotide
gugcuaaaaccccagugcc

SEQ ID NO: 490583 - RNA, 19 nt, Artificial Sequence
  Description of Artificial Sequence: Synthetic oligonucleotide
uaacucgcucuucucugcg

SEQ ID NO: 490584 - RNA, 19 nt, Artificial Sequence
  Description of Artificial Sequence: Synthetic oligonucleotide
ugacgucugguucuucugc

SEQ ID NO: 490585 - RNA, 19 nt, Artificial Sequence
  Description of Artificial Sequence: Synthetic oligonucleotide
uaauaccuuaagcuaggaa

SEQ ID NO: 490586 - RNA, 19 nt, Artificial Sequence
  Description of Artificial Sequence: Synthetic oligonucleotide
aguagauuuuagcuauagu

SEQ ID NO: 490587 - RNA, 19 nt, Artificial Sequence
  Description of Artificial Sequence: Synthetic oligonucleotide
uuuaaccacuagcuuuuac

SEQ ID NO: 490588 - RNA, 19 nt, Artificial Sequence
  Description of Artificial Sequence: Synthetic oligonucleotide
cuguccuuaaaaucaccag

SEQ ID NO: 490589 - RNA, 19 nt, Artificial Sequence
  Description of Artificial Sequence: Synthetic oligonucleotide
auucuuacauacaugacuu

SEQ ID NO: 490590 - RNA, 19 nt, Artificial Sequence
  Description of Artificial Sequence: Synthetic oligonucleotide
caagggauaugcuuucuuc

SEQ ID NO: 490591 - RNA, 19 nt, Artificial Sequence
  Description of Artificial Sequence: Synthetic oligonucleotide
ugaaguuggacuccauauu

SEQ ID NO: 490592 - RNA, 19 nt, Artificial Sequence
  Description of Artificial Sequence: Synthetic oligonucleotide
agcccgcaaaguuuaacuc

SEQ ID NO: 490593 - RNA, 19 nt, Artificial Sequence
  Description of Artificial Sequence: Synthetic oligonucleotide
acaacucaauaaucaaaga

SEQ ID NO: 490594 - RNA, 19 nt, Artificial Sequence
  Description of Artificial Sequence: Synthetic oligonucleotide
uaggcauacugaaaauuau

SEQ ID NO: 490595 - RNA, 19 nt, Artificial Sequence
  Description of Artificial Sequence: Synthetic oligonucleotide
uaucagaggcacuugucaa

SEQ ID NO: 490596 - RNA, 19 nt, Artificial Sequence
  Description of Artificial Sequence: Synthetic oligonucleotide
uguaucagaggcacuuguc

SEQ ID NO: 490597 - RNA, 19 nt, Artificial Sequence
  Description of Artificial Sequence: Synthetic oligonucleotide
caccccuuggauaaaguac

SEQ ID NO: 490598 - RNA, 19 nt, Artificial Sequence
  Description of Artificial Sequence: Synthetic oligonucleotide
ucguuauagcauuggcugc

SEQ ID NO: 490599 - RNA, 19 nt, Artificial Sequence
  Description of Artificial Sequence: Synthetic oligonucleotide
guaucagaggcacuuguca

SEQ ID NO: 490600 - RNA, 19 nt, Artificial Sequence
  Description of Artificial Sequence: Synthetic oligonucleotide
ggucuuuggaaugacaggc

SEQ ID NO: 490601 - RNA, 19 nt, Artificial Sequence
  Description of Artificial Sequence: Synthetic oligonucleotide
aguccuaauuuauuacuau

SEQ ID NO: 490602 - RNA, 19 nt, Artificial Sequence
  Description of Artificial Sequence: Synthetic oligonucleotide
uggaucaagggauaugcuu

SEQ ID NO: 490603 - RNA, 19 nt, Artificial Sequence
  Description of Artificial Sequence: Synthetic oligonucleotide
agcucuauuuacacguaac

SEQ ID NO: 490604 - RNA, 19 nt, Artificial Sequence
  Description of Artificial Sequence: Synthetic oligonucleotide
uaaggauauucguauucuc

SEQ ID NO: 490605 - RNA, 19 nt, Artificial Sequence
  Description of Artificial Sequence: Synthetic oligonucleotide
ugucucucaaagcaucaau

SEQ ID NO: 490606 - RNA, 19 nt, Artificial Sequence
  Description of Artificial Sequence: Synthetic oligonucleotide
aggauauucguauucucuu

SEQ ID NO: 490607 - RNA, 19 nt, Artificial Sequence
  Description of Artificial Sequence: Synthetic oligonucleotide
aguuaaguccuuccggaau

SEQ ID NO: 490608 - RNA, 19 nt, Artificial Sequence
  Description of Artificial Sequence: Synthetic oligonucleotide
aucuauaaggagcaacauu

SEQ ID NO: 490609 - RNA, 19 nt, Artificial Sequence
  Description of Artificial Sequence: Synthetic oligonucleotide
cauuaauaucaagugagca

SEQ ID NO: 490610 - RNA, 19 nt, Artificial Sequence
  Description of Artificial Sequence: Synthetic oligonucleotide
ucugcgcccacgcuccgcg

SEQ ID NO: 490611 - RNA, 19 nt, Artificial Sequence
  Description of Artificial Sequence: Synthetic oligonucleotide
augguuaacacaaaauguu

SEQ ID NO: 490612 - RNA, 19 nt, Artificial Sequence
  Description of Artificial Sequence: Synthetic oligonucleotide
ccgauacccaaauuuaagg

SEQ ID NO: 490613 - RNA, 19 nt, Artificial Sequence
  Description of Artificial Sequence: Synthetic oligonucleotide
auguguguugguuuccaga

SEQ ID NO: 490614 - RNA, 19 nt, Artificial Sequence
  Description of Artificial Sequence: Synthetic oligonucleotide
auaaagguaaccggccaug

SEQ ID NO: 490615 - RNA, 19 nt, Artificial Sequence
  Description of Artificial Sequence: Synthetic oligonucleotide
cguugguuggauuuggugg

SEQ ID NO: 490616 - RNA, 19 nt, Artificial Sequence
  Description of Artificial Sequence: Synthetic oligonucleotide
aucacacaauucuguauca

SEQ ID NO: 490617 - RNA, 19 nt, Artificial Sequence
  Description of Artificial Sequence: Synthetic oligonucleotide
ucaacguugguuggauuug

SEQ ID NO: 490618 - RNA, 19 nt, Artificial Sequence
  Description of Artificial Sequence: Synthetic oligonucleotide
gaucaagggauaugcuuuc

SEQ ID NO: 490619 - RNA, 19 nt, Artificial Sequence
  Description of Artificial Sequence: Synthetic oligonucleotide
guugccgaaucccuccucc

SEQ ID NO: 490620 - RNA, 19 nt, Artificial Sequence
  Description of Artificial Sequence: Synthetic oligonucleotide
agaggaauuugaaaauacu

SEQ ID NO: 490621 - RNA, 19 nt, Artificial Sequence
  Description of Artificial Sequence: Synthetic oligonucleotide
aaugucucacauguguguu

SEQ ID NO: 490622 - RNA, 19 nt, Artificial Sequence
  Description of Artificial Sequence: Synthetic oligonucleotide
guccuuaaaaucaccagca

SEQ ID NO: 490623 - RNA, 19 nt, Artificial Sequence
  Description of Artificial Sequence: Synthetic oligonucleotide
auuuaaggauauucguauu

SEQ ID NO: 490624 - RNA, 19 nt, Artificial Sequence
  Description of Artificial Sequence: Synthetic oligonucleotide
uacuacccauuacugauuu

SEQ ID NO: 490625 - RNA, 19 nt, Artificial Sequence
  Description of Artificial Sequence: Synthetic oligonucleotide
ugcugcgugaaccgauacc

SEQ ID NO: 490626 - RNA, 19 nt, Artificial Sequence
  Description of Artificial Sequence: Synthetic oligonucleotide
auaccuuaagcuaggaaaa

SEQ ID NO: 490627 - RNA, 19 nt, Artificial Sequence
  Description of Artificial Sequence: Synthetic oligonucleotide
uuuuauaaaaugggccauu

SEQ ID NO: 490628 - RNA, 19 nt, Artificial Sequence
  Description of Artificial Sequence: Synthetic oligonucleotide
acguugguuggauuuggug

SEQ ID NO: 490629 - RNA, 19 nt, Artificial Sequence
  Description of Artificial Sequence: Synthetic oligonucleotide
accgauacccaaauuuaag

SEQ ID NO: 490630 - RNA, 19 nt, Artificial Sequence
  Description of Artificial Sequence: Synthetic oligonucleotide
ugcacagcccgcaaaguuu

SEQ ID NO: 490631 - RNA, 19 nt, Artificial Sequence
  Description of Artificial Sequence: Synthetic oligonucleotide
cuucuaauucuggaucaag

SEQ ID NO: 490632 - RNA, 19 nt, Artificial Sequence
  Description of Artificial Sequence: Synthetic oligonucleotide
uuaaggagcucaucuucau

SEQ ID NO: 490633 - RNA, 19 nt, Artificial Sequence
  Description of Artificial Sequence: Synthetic oligonucleotide
gaugaaguuggacuccaua

SEQ ID NO: 490634 - RNA, 19 nt, Artificial Sequence
  Description of Artificial Sequence: Synthetic oligonucleotide
aaucucagaggaauuugaa

SEQ ID NO: 490635 - RNA, 19 nt, Artificial Sequence
  Description of Artificial Sequence: Synthetic oligonucleotide
uugacgucugguucuucug

SEQ ID NO: 490636 - RNA, 19 nt, Artificial Sequence
  Description of Artificial Sequence: Synthetic oligonucleotide
acccauuacugauuuuaca

SEQ ID NO: 490637 - RNA, 19 nt, Artificial Sequence
  Description of Artificial Sequence: Synthetic oligonucleotide
caguagauuuuagcuauag

SEQ ID NO: 490638 - RNA, 19 nt, Artificial Sequence
  Description of Artificial Sequence: Synthetic oligonucleotide
gaaguuggacuccauauuu

SEQ ID NO: 490639 - RNA, 19 nt, Artificial Sequence
  Description of Artificial Sequence: Synthetic oligonucleotide
gcccgcaaaguuuaacucg

SEQ ID NO: 490640 - RNA, 19 nt, Artificial Sequence
  Description of Artificial Sequence: Synthetic oligonucleotide
ccuaauuuauuacuauguc

SEQ ID NO: 490641 - RNA, 19 nt, Artificial Sequence
  Description of Artificial Sequence: Synthetic oligonucleotide
uaacuucaacaagacgggc

SEQ ID NO: 490642 - RNA, 19 nt, Artificial Sequence
  Description of Artificial Sequence: Synthetic oligonucleotide
uauuagagacuagcauuga

SEQ ID NO: 490643 - RNA, 19 nt, Artificial Sequence
  Description of Artificial Sequence: Synthetic oligonucleotide
acgucugguucuucugccg

SEQ ID NO: 490644 - RNA, 19 nt, Artificial Sequence
  Description of Artificial Sequence: Synthetic oligonucleotide
ccucuugcgcacuaagucg

SEQ ID NO: 490645 - RNA, 19 nt, Artificial Sequence
  Description of Artificial Sequence: Synthetic oligonucleotide
ugcgugaaccgauacccaa

SEQ ID NO: 490646 - RNA, 19 nt, Artificial Sequence
  Description of Artificial Sequence: Synthetic oligonucleotide
uaaagguaaccggccaugu

SEQ ID NO: 490647 - RNA, 19 nt, Artificial Sequence
  Description of Artificial Sequence: Synthetic oligonucleotide
augucucacauguguguug

SEQ ID NO: 490648 - RNA, 19 nt, Artificial Sequence
  Description of Artificial Sequence: Synthetic oligonucleotide
agucuucccggucuuuaug

SEQ ID NO: 490649 - RNA, 19 nt, Artificial Sequence
  Description of Artificial Sequence: Synthetic oligonucleotide
auauucguauucucuucaa

SEQ ID NO: 490650 - RNA, 19 nt, Artificial Sequence
  Description of Artificial Sequence: Synthetic oligonucleotide
acacggcuaauuugacuag

SEQ ID NO: 490651 - RNA, 19 nt, Artificial Sequence
  Description of Artificial Sequence: Synthetic oligonucleotide
aagcuaaauuaaaaugauu

SEQ ID NO: 490652 - RNA, 19 nt, Artificial Sequence
  Description of Artificial Sequence: Synthetic oligonucleotide
gcugcgugaaccgauaccc

SEQ ID NO: 490653 - RNA, 19 nt, Artificial Sequence
  Description of Artificial Sequence: Synthetic oligonucleotide
auacccaaauuuaaggaua

SEQ ID NO: 490654 - RNA, 19 nt, Artificial Sequence
  Description of Artificial Sequence: Synthetic oligonucleotide
gucucucaaagcaucaauc

SEQ ID NO: 490655 - RNA, 19 nt, Artificial Sequence
  Description of Artificial Sequence: Synthetic oligonucleotide
uugcgcacuaagucguugu

SEQ ID NO: 490656 - RNA, 19 nt, Artificial Sequence
  Description of Artificial Sequence: Synthetic oligonucleotide
ucuguaucagaggcacuug

SEQ ID NO: 490657 - RNA, 19 nt, Artificial Sequence
  Description of Artificial Sequence: Synthetic oligonucleotide
caagacgggcaucauuuuc

SEQ ID NO: 490658 - RNA, 19 nt, Artificial Sequence
  Description of Artificial Sequence: Synthetic oligonucleotide
uaauuugacuagugaugau

SEQ ID NO: 490659 - RNA, 19 nt, Artificial Sequence
  Description of Artificial Sequence: Synthetic oligonucleotide
ucccguggcagacuuugac

SEQ ID NO: 490660 - RNA, 19 nt, Artificial Sequence
  Description of Artificial Sequence: Synthetic oligonucleotide
aaccgauacccaaauuuaa

SEQ ID NO: 490661 - RNA, 19 nt, Artificial Sequence
  Description of Artificial Sequence: Synthetic oligonucleotide
gaaccgauacccaaauuua

SEQ ID NO: 490662 - RNA, 19 nt, Artificial Sequence
  Description of Artificial Sequence: Synthetic oligonucleotide
ucguuucaccuuuuaccac

SEQ ID NO: 490663 - RNA, 19 nt, Artificial Sequence
  Description of Artificial Sequence: Synthetic oligonucleotide
uuugacuagugaugaugua

SEQ ID NO: 490664 - RNA, 19 nt, Artificial Sequence
  Description of Artificial Sequence: Synthetic oligonucleotide
ggaguugccgaaucccucc

SEQ ID NO: 490665 - RNA, 19 nt, Artificial Sequence
  Description of Artificial Sequence: Synthetic oligonucleotide
gcuaaaaccccagugccug

SEQ ID NO: 490666 - RNA, 19 nt, Artificial Sequence
  Description of Artificial Sequence: Synthetic oligonucleotide
ucgccucuugcgcacuaag

SEQ ID NO: 490667 - RNA, 19 nt, Artificial Sequence
  Description of Artificial Sequence: Synthetic oligonucleotide
aaaacccgaccgcgcuguc

SEQ ID NO: 490668 - RNA, 19 nt, Artificial Sequence
  Description of Artificial Sequence: Synthetic oligonucleotide
aucaaagacgcuguccuua

SEQ ID NO: 490669 - RNA, 19 nt, Artificial Sequence
  Description of Artificial Sequence: Synthetic oligonucleotide
uguccggccgccgaccucc

SEQ ID NO: 490670 - RNA, 19 nt, Artificial Sequence
  Description of Artificial Sequence: Synthetic oligonucleotide
aguugccgaaucccuccuc

SEQ ID NO: 490671 - RNA, 19 nt, Artificial Sequence
  Description of Artificial Sequence: Synthetic oligonucleotide
ggauauucguauucucuuc

SEQ ID NO: 490672 - RNA, 19 nt, Artificial Sequence
  Description of Artificial Sequence: Synthetic oligonucleotide
ugcaggcuuccaaauguua

SEQ ID NO: 490673 - RNA, 19 nt, Artificial Sequence
  Description of Artificial Sequence: Synthetic oligonucleotide
augguguccggccgccgac

SEQ ID NO: 490674 - RNA, 19 nt, Artificial Sequence
  Description of Artificial Sequence: Synthetic oligonucleotide
acggggucauugcuccugg

SEQ ID NO: 490675 - RNA, 19 nt, Artificial Sequence
  Description of Artificial Sequence: Synthetic oligonucleotide
caauucgccucuugcgcac

SEQ ID NO: 490676 - RNA, 19 nt, Artificial Sequence
  Description of Artificial Sequence: Synthetic oligonucleotide
ggauaaaguacacggcuaa

SEQ ID NO: 490677 - RNA, 19 nt, Artificial Sequence
  Description of Artificial Sequence: Synthetic oligonucleotide
ucggggucgagaucaucca

SEQ ID NO: 490678 - RNA, 19 nt, Artificial Sequence
  Description of Artificial Sequence: Synthetic oligonucleotide
ccuuaagcuaggaaaauaa

SEQ ID NO: 490679 - RNA, 19 nt, Artificial Sequence
  Description of Artificial Sequence: Synthetic oligonucleotide
agacgggcaucauuuuccu

SEQ ID NO: 490680 - RNA, 19 nt, Artificial Sequence
  Description of Artificial Sequence: Synthetic oligonucleotide
aguuggaauugggauauuu

SEQ ID NO: 490681 - RNA, 19 nt, Artificial Sequence
  Description of Artificial Sequence: Synthetic oligonucleotide
guauagcaccaaaaucuac

SEQ ID NO: 490682 - RNA, 19 nt, Artificial Sequence
  Description of Artificial Sequence: Synthetic oligonucleotide
auaauaccuuaagcuagga

SEQ ID NO: 490683 - RNA, 19 nt, Artificial Sequence
  Description of Artificial Sequence: Synthetic oligonucleotide
uccgcggcgccucaacuuc

SEQ ID NO: 490684 - RNA, 19 nt, Artificial Sequence
  Description of Artificial Sequence: Synthetic oligonucleotide
aaguuggacuccauauuua

SEQ ID NO: 490685 - RNA, 19 nt, Artificial Sequence
  Description of Artificial Sequence: Synthetic oligonucleotide
cuaauaugguuaacacaaa

SEQ ID NO: 490686 - RNA, 19 nt, Artificial Sequence
  Description of Artificial Sequence: Synthetic oligonucleotide
gacuagugaugauguacaa

SEQ ID NO: 490687 - RNA, 19 nt, Artificial Sequence
  Description of Artificial Sequence: Synthetic oligonucleotide
gugccaugguguccggccg

SEQ ID NO: 490688 - RNA, 19 nt, Artificial Sequence
  Description of Artificial Sequence: Synthetic oligonucleotide
gcaucaaucagugcuaaaa

SEQ ID NO: 490689 - RNA, 19 nt, Artificial Sequence
  Description of Artificial Sequence: Synthetic oligonucleotide
gguucggggucccugcugc

SEQ ID NO: 490690 - RNA, 19 nt, Artificial Sequence
  Description of Artificial Sequence: Synthetic oligonucleotide
ggcuaauuugacuagugau

SEQ ID NO: 490691 - RNA, 19 nt, Artificial Sequence
  Description of Artificial Sequence: Synthetic oligonucleotide
aacguugguuggauuuggu

SEQ ID NO: 490692 - RNA, 19 nt, Artificial Sequence
  Description of Artificial Sequence: Synthetic oligonucleotide
ccgcuaauaugguuaacac

SEQ ID NO: 490693 - RNA, 19 nt, Artificial Sequence
  Description of Artificial Sequence: Synthetic oligonucleotide
gcauauaguuaacaaagau

SEQ ID NO: 490694 - RNA, 19 nt, Artificial Sequence
  Description of Artificial Sequence: Synthetic oligonucleotide
acguaacuuuucaggagug

SEQ ID NO: 490695 - RNA, 19 nt, Artificial Sequence
  Description of Artificial Sequence: Synthetic oligonucleotide
accuuuuaccacauuugaa

SEQ ID NO: 490696 - RNA, 19 nt, Artificial Sequence
  Description of Artificial Sequence: Synthetic oligonucleotide
cccguggcagacuuugacg

SEQ ID NO: 490697 - RNA, 19 nt, Artificial Sequence
  Description of Artificial Sequence: Synthetic oligonucleotide
caugacuucugaaacuuuu

SEQ ID NO: 490698 - RNA, 19 nt, Artificial Sequence
  Description of Artificial Sequence: Synthetic oligonucleotide
ccggccaugugcuguaucc

SEQ ID NO: 490699 - RNA, 19 nt, Artificial Sequence
  Description of Artificial Sequence: Synthetic oligonucleotide
uccucaacguugguuggau

SEQ ID NO: 490700 - RNA, 19 nt, Artificial Sequence
  Description of Artificial Sequence: Synthetic oligonucleotide
gcaagacugaaaugucuca

SEQ ID NO: 490701 - RNA, 19 nt, Artificial Sequence
  Description of Artificial Sequence: Synthetic oligonucleotide
aaacccgaccgcgcugucu

SEQ ID NO: 490702 - RNA, 19 nt, Artificial Sequence
  Description of Artificial Sequence: Synthetic oligonucleotide
ugcgcacuaagucguuguu

SEQ ID NO: 490703 - RNA, 19 nt, Artificial Sequence
  Description of Artificial Sequence: Synthetic oligonucleotide
gccgcuaauaugguuaaca

SEQ ID NO: 490704 - RNA, 19 nt, Artificial Sequence
  Description of Artificial Sequence: Synthetic oligonucleotide
aauucgccucuugcgcacu

SEQ ID NO: 490705 - RNA, 19 nt, Artificial Sequence
  Description of Artificial Sequence: Synthetic oligonucleotide
cucaacguugguuggauuu

SEQ ID NO: 490706 - RNA, 19 nt, Artificial Sequence
  Description of Artificial Sequence: Synthetic oligonucleotide
cuugcgcacuaagucguug

SEQ ID NO: 490707 - RNA, 19 nt, Artificial Sequence
  Description of Artificial Sequence: Synthetic oligonucleotide
gaggugccagacuuuuaaa

SEQ ID NO: 490708 - RNA, 19 nt, Artificial Sequence
  Description of Artificial Sequence: Synthetic oligonucleotide
acaagacgggcaucauuuu

SEQ ID NO: 490709 - RNA, 19 nt, Artificial Sequence
  Description of Artificial Sequence: Synthetic oligonucleotide
cucaauaaucaaagacgcu

SEQ ID NO: 490710 - RNA, 19 nt, Artificial Sequence
  Description of Artificial Sequence: Synthetic oligonucleotide
cacaguuauuucccuaaua

SEQ ID NO: 490711 - RNA, 19 nt, Artificial Sequence
  Description of Artificial Sequence: Synthetic oligonucleotide
aaaucaccagcagccgcua

SEQ ID NO: 490712 - RNA, 19 nt, Artificial Sequence
  Description of Artificial Sequence: Synthetic oligonucleotide
agcauucucggggucgaga

SEQ ID NO: 490713 - RNA, 19 nt, Artificial Sequence
  Description of Artificial Sequence: Synthetic oligonucleotide
agccacggggucauugcuc

SEQ ID NO: 490714 - RNA, 19 nt, Artificial Sequence
  Description of Artificial Sequence: Synthetic oligonucleotide
uaaccggccaugugcugua

SEQ ID NO: 490715 - RNA, 19 nt, Artificial Sequence
  Description of Artificial Sequence: Synthetic oligonucleotide
cucuugcgcacuaagucgu

SEQ ID NO: 490716 - RNA, 19 nt, Artificial Sequence
  Description of Artificial Sequence: Synthetic oligonucleotide
ggucccguggcagacuuug

SEQ ID NO: 490717 - RNA, 19 nt, Artificial Sequence
  Description of Artificial Sequence: Synthetic oligonucleotide
guucggggucccugcugcg

SEQ ID NO: 490718 - RNA, 19 nt, Artificial Sequence
  Description of Artificial Sequence: Synthetic oligonucleotide
cauucucggggucgagauc

SEQ ID NO: 490719 - RNA, 19 nt, Artificial Sequence
  Description of Artificial Sequence: Synthetic oligonucleotide
ucuugcgcacuaagucguu

SEQ ID NO: 490720 - RNA, 19 nt, Artificial Sequence
  Description of Artificial Sequence: Synthetic oligonucleotide
cucacauguguguugguuu

SEQ ID NO: 490721 - RNA, 19 nt, Artificial Sequence
  Description of Artificial Sequence: Synthetic oligonucleotide
cugcugcgugaaccgauac

SEQ ID NO: 490722 - RNA, 19 nt, Artificial Sequence
  Description of Artificial Sequence: Synthetic oligonucleotide
caggagugcaccccuugga

SEQ ID NO: 490723 - RNA, 19 nt, Artificial Sequence
  Description of Artificial Sequence: Synthetic oligonucleotide
cacggggucauugcuccug

SEQ ID NO: 490724 - RNA, 19 nt, Artificial Sequence
  Description of Artificial Sequence: Synthetic oligonucleotide
ggucucauugucucucaaa

SEQ ID NO: 490725 - RNA, 19 nt, Artificial Sequence
  Description of Artificial Sequence: Synthetic oligonucleotide
acuacccauuacugauuuu

SEQ ID NO: 490726 - RNA, 19 nt, Artificial Sequence
  Description of Artificial Sequence: Synthetic oligonucleotide
auacuacccauuacugauu

SEQ ID NO: 490727 - RNA, 19 nt, Artificial Sequence
  Description of Artificial Sequence: Synthetic oligonucleotide
cuguaucagaggcacuugu

SEQ ID NO: 490728 - RNA, 19 nt, Artificial Sequence
  Description of Artificial Sequence: Synthetic oligonucleotide
agccgcuaauaugguuaac

SEQ ID NO: 490729 - RNA, 19 nt, Artificial Sequence
  Description of Artificial Sequence: Synthetic oligonucleotide
aacacucuuuaaagcucua

SEQ ID NO: 490730 - RNA, 19 nt, Artificial Sequence
  Description of Artificial Sequence: Synthetic oligonucleotide
cagaacugugugucuguaa

SEQ ID NO: 490731 - RNA, 19 nt, Artificial Sequence
  Description of Artificial Sequence: Synthetic oligonucleotide
gccgaccuccugcacagcc

SEQ ID NO: 490732 - RNA, 19 nt, Artificial Sequence
  Description of Artificial Sequence: Synthetic oligonucleotide
ugucaccaacaggagccuc

SEQ ID NO: 490733 - RNA, 19 nt, Artificial Sequence
  Description of Artificial Sequence: Synthetic oligonucleotide
uggcagugccauggugucc

SEQ ID NO: 490734 - RNA, 19 nt, Artificial Sequence
  Description of Artificial Sequence: Synthetic oligonucleotide
guaaccggccaugugcugu

SEQ ID NO: 490735 - RNA, 19 nt, Artificial Sequence
  Description of Artificial Sequence: Synthetic oligonucleotide
ggaucaagggauaugcuuu

SEQ ID NO: 490736 - RNA, 19 nt, Artificial Sequence
  Description of Artificial Sequence: Synthetic oligonucleotide
ccucaagguguucaaauua

SEQ ID NO: 490737 - RNA, 19 nt, Artificial Sequence
  Description of Artificial Sequence: Synthetic oligonucleotide
gcgccucaacuucugggag

SEQ ID NO: 490738 - RNA, 19 nt, Artificial Sequence
  Description of Artificial Sequence: Synthetic oligonucleotide
cugcgugaaccgauaccca

SEQ ID NO: 490739 - RNA, 19 nt, Artificial Sequence
  Description of Artificial Sequence: Synthetic oligonucleotide
cagccgcuaauaugguuaa

SEQ ID NO: 490740 - RNA, 19 nt, Artificial Sequence
  Description of Artificial Sequence: Synthetic oligonucleotide
cguaacuuuucaggagugc

SEQ ID NO: 490741 - RNA, 19 nt, Artificial Sequence
  Description of Artificial Sequence: Synthetic oligonucleotide
cacagaacugugugucugu

SEQ ID NO: 490742 - RNA, 19 nt, Artificial Sequence
  Description of Artificial Sequence: Synthetic oligonucleotide
ggucgagaucauccaggac

SEQ ID NO: 490743 - RNA, 19 nt, Artificial Sequence
  Description of Artificial Sequence: Synthetic oligonucleotide
cgcaaaguuuaacucgcuc

SEQ ID NO: 490744 - RNA, 19 nt, Artificial Sequence
  Description of Artificial Sequence: Synthetic oligonucleotide
cuggaucaagggauaugcu

SEQ ID NO: 490745 - RNA, 19 nt, Artificial Sequence
  Description of Artificial Sequence: Synthetic oligonucleotide
uucgccucuugcgcacuaa

SEQ ID NO: 490746 - RNA, 19 nt, Artificial Sequence
  Description of Artificial Sequence: Synthetic oligonucleotide
auucgccucuugcgcacua

SEQ ID NO: 490747 - RNA, 19 nt, Artificial Sequence
  Description of Artificial Sequence: Synthetic oligonucleotide
gcaccccuuggauaaagua

SEQ ID NO: 490748 - RNA, 19 nt, Artificial Sequence
  Description of Artificial Sequence: Synthetic oligonucleotide
guuacccuuggcacucuua

SEQ ID NO: 490749 - RNA, 19 nt, Artificial Sequence
  Description of Artificial Sequence: Synthetic oligonucleotide
caaaacccgaccgcgcugu

SEQ ID NO: 490750 - RNA, 19 nt, Artificial Sequence
  Description of Artificial Sequence: Synthetic oligonucleotide
ccaaaacccgaccgcgcug

SEQ ID NO: 490751 - RNA, 19 nt, Artificial Sequence
  Description of Artificial Sequence: Synthetic oligonucleotide
aaguuggaauugggauauu

SEQ ID NO: 490752 - RNA, 19 nt, Artificial Sequence
  Description of Artificial Sequence: Synthetic oligonucleotide
ccccaaaacccgaccgcgc

SEQ ID NO: 490753 - RNA, 19 nt, Artificial Sequence
  Description of Artificial Sequence: Synthetic oligonucleotide
aggacaguuucaagcuguu

SEQ ID NO: 490754 - RNA, 19 nt, Artificial Sequence
  Description of Artificial Sequence: Synthetic oligonucleotide
cuaaaaccccagugccugu

SEQ ID NO: 490755 - RNA, 19 nt, Artificial Sequence
  Description of Artificial Sequence: Synthetic oligonucleotide
ccccuuggauaaaguacac

SEQ ID NO: 490756 - RNA, 19 nt, Artificial Sequence
  Description of Artificial Sequence: Synthetic oligonucleotide
cuccucaacguugguugga

SEQ ID NO: 490757 - RNA, 19 nt, Artificial Sequence
  Description of Artificial Sequence: Synthetic oligonucleotide
gcauucucggggucgagau

SEQ ID NO: 490758 - RNA, 19 nt, Artificial Sequence
  Description of Artificial Sequence: Synthetic oligonucleotide
gggaguugccgaaucccuc

SEQ ID NO: 490759 - RNA, 19 nt, Artificial Sequence
  Description of Artificial Sequence: Synthetic oligonucleotide
caacaagacgggcaucauu

SEQ ID NO: 490760 - RNA, 19 nt, Artificial Sequence
  Description of Artificial Sequence: Synthetic oligonucleotide
cugcgcccacgcuccgcgg

SEQ ID NO: 490761 - RNA, 19 nt, Artificial Sequence
  Description of Artificial Sequence: Synthetic oligonucleotide
cuguugcaaaguccuaauu

SEQ ID NO: 490762 - RNA, 19 nt, Artificial Sequence
  Description of Artificial Sequence: Synthetic oligonucleotide
cacggcuaauuugacuagu

SEQ ID NO: 490763 - RNA, 19 nt, Artificial Sequence
  Description of Artificial Sequence: Synthetic oligonucleotide
aaccggccaugugcuguau

SEQ ID NO: 490764 - RNA, 19 nt, Artificial Sequence
  Description of Artificial Sequence: Synthetic oligonucleotide
gugugucuguaaucagauu

SEQ ID NO: 490765 - RNA, 19 nt, Artificial Sequence
  Description of Artificial Sequence: Synthetic oligonucleotide
acccgaccgcgcugucugu

SEQ ID NO: 490766 - RNA, 19 nt, Artificial Sequence
  Description of Artificial Sequence: Synthetic oligonucleotide
gacuagcauugaauuuaau

SEQ ID NO: 490767 - RNA, 19 nt, Artificial Sequence
  Description of Artificial Sequence: Synthetic oligonucleotide
gacgggcaucauuuuccuu

SEQ ID NO: 490768 - RNA, 19 nt, Artificial Sequence
  Description of Artificial Sequence: Synthetic oligonucleotide
ggccaugugcuguauccuu

SEQ ID NO: 490769 - RNA, 19 nt, Artificial Sequence
  Description of Artificial Sequence: Synthetic oligonucleotide
guguccggccgccgaccuc

SEQ ID NO: 490770 - RNA, 19 nt, Artificial Sequence
  Description of Artificial Sequence: Synthetic oligonucleotide
ccgaaucccuccuccagcu

SEQ ID NO: 490771 - RNA, 19 nt, Artificial Sequence
  Description of Artificial Sequence: Synthetic oligonucleotide
cccaaaacccgaccgcgcu

SEQ ID NO: 490772 - RNA, 19 nt, Artificial Sequence
  Description of Artificial Sequence: Synthetic oligonucleotide
ccaguagauuuuagcuaua

SEQ ID NO: 490773 - RNA, 19 nt, Artificial Sequence
  Description of Artificial Sequence: Synthetic oligonucleotide
ccugcugcgugaaccgaua

SEQ ID NO: 490774 - RNA, 19 nt, Artificial Sequence
  Description of Artificial Sequence: Synthetic oligonucleotide
ccuucuacccaggaaguuu

SEQ ID NO: 490775 - RNA, 19 nt, Artificial Sequence
  Description of Artificial Sequence: Synthetic oligonucleotide
ccccuucuacccaggaagu

SEQ ID NO: 490776 - RNA, 19 nt, Artificial Sequence
  Description of Artificial Sequence: Synthetic oligonucleotide
gcuccgcggcgccucaacu

SEQ ID NO: 490777 - RNA, 19 nt, Artificial Sequence
  Description of Artificial Sequence: Synthetic oligonucleotide
gcgcacuaagucguuguuu

SEQ ID NO: 490778 - RNA, 19 nt, Artificial Sequence
  Description of Artificial Sequence: Synthetic oligonucleotide
ccgcaaaguuuaacucgcu

SEQ ID NO: 490779 - RNA, 19 nt, Artificial Sequence
  Description of Artificial Sequence: Synthetic oligonucleotide
cgccucaacuucugggagu

SEQ ID NO: 490780 - RNA, 19 nt, Artificial Sequence
  Description of Artificial Sequence: Synthetic oligonucleotide
cgcuccgcggcgccucaac

SEQ ID NO: 490781 - RNA, 19 nt, Artificial Sequence
  Description of Artificial Sequence: Synthetic oligonucleotide
ccucaacguugguuggauu

SEQ ID NO: 490782 - RNA, 19 nt, Artificial Sequence
  Description of Artificial Sequence: Synthetic oligonucleotide
ccgcggcgccucaacuucu

SEQ ID NO: 490783 - RNA, 19 nt, Artificial Sequence
  Description of Artificial Sequence: Synthetic oligonucleotide
cgccgaccuccugcacagc

SEQ ID NO: 490784 - RNA, 19 nt, Artificial Sequence
  Description of Artificial Sequence: Synthetic oligonucleotide
uuaauuauuaguaagguua

SEQ ID NO: 490785 - RNA, 19 nt, Artificial Sequence
  Description of Artificial Sequence: Synthetic oligonucleotide
acugauauuuaucuuacgc

SEQ ID NO: 490786 - RNA, 19 nt, Artificial Sequence
  Description of Artificial Sequence: Synthetic oligonucleotide
aaugcuuugcaacaagagg

SEQ ID NO: 490787 - RNA, 19 nt, Artificial Sequence
  Description of Artificial Sequence: Synthetic oligonucleotide
ugaguuauaccuuaaaaca

SEQ ID NO: 490788 - RNA, 19 nt, Artificial Sequence
  Description of Artificial Sequence: Synthetic oligonucleotide
augaguuauaccuuaaaac

SEQ ID NO: 490789 - RNA, 19 nt, Artificial Sequence
  Description of Artificial Sequence: Synthetic oligonucleotide
acaagugcaacauuacugc

SEQ ID NO: 490790 - RNA, 19 nt, Artificial Sequence
  Description of Artificial Sequence: Synthetic oligonucleotide
ucuauuucaaguaucaaaa

SEQ ID NO: 490791 - RNA, 19 nt, Artificial Sequence
  Description of Artificial Sequence: Synthetic oligonucleotide
ugauauuuaucuuacgcag

SEQ ID NO: 490792 - RNA, 19 nt, Artificial Sequence
  Description of Artificial Sequence: Synthetic oligonucleotide
uauuaguaagguuacauga

SEQ ID NO: 490793 - RNA, 19 nt, Artificial Sequence
  Description of Artificial Sequence: Synthetic oligonucleotide
uuuacuuggauguagugug

SEQ ID NO: 490794 - RNA, 19 nt, Artificial Sequence
  Description of Artificial Sequence: Synthetic oligonucleotide
uaugaaaacagugagacaa

SEQ ID NO: 490795 - RNA, 19 nt, Artificial Sequence
  Description of Artificial Sequence: Synthetic oligonucleotide
uuuaccucuaguaaacaag

SEQ ID NO: 490796 - RNA, 19 nt, Artificial Sequence
  Description of Artificial Sequence: Synthetic oligonucleotide
agcagauuaaaauaugaag

SEQ ID NO: 490797 - RNA, 19 nt, Artificial Sequence
  Description of Artificial Sequence: Synthetic oligonucleotide
acuauaucaacauggaaug

SEQ ID NO: 490798 - RNA, 19 nt, Artificial Sequence
  Description of Artificial Sequence: Synthetic oligonucleotide
uaauacauaacacggcugc

SEQ ID NO: 490799 - RNA, 19 nt, Artificial Sequence
  Description of Artificial Sequence: Synthetic oligonucleotide
uuaccuucaguaauaaugc

SEQ ID NO: 490800 - RNA, 19 nt, Artificial Sequence
  Description of Artificial Sequence: Synthetic oligonucleotide
aaaugcauaagugauucuc

SEQ ID NO: 490801 - RNA, 19 nt, Artificial Sequence
  Description of Artificial Sequence: Synthetic oligonucleotide
accucuaguaaacaagugc

SEQ ID NO: 490802 - RNA, 19 nt, Artificial Sequence
  Description of Artificial Sequence: Synthetic oligonucleotide
aaucccaugagcccguaac

SEQ ID NO: 490803 - RNA, 19 nt, Artificial Sequence
  Description of Artificial Sequence: Synthetic oligonucleotide
uuucauaccaugaaaugug

SEQ ID NO: 490804 - RNA, 19 nt, Artificial Sequence
  Description of Artificial Sequence: Synthetic oligonucleotide
ucucauauggucuauguga

SEQ ID NO: 490805 - RNA, 19 nt, Artificial Sequence
  Description of Artificial Sequence: Synthetic oligonucleotide
ucuacaauuucuagcagag

SEQ ID NO: 490806 - RNA, 19 nt, Artificial Sequence
  Description of Artificial Sequence: Synthetic oligonucleotide
aaugaauauccauucauau

SEQ ID NO: 490807 - RNA, 19 nt, Artificial Sequence
  Description of Artificial Sequence: Synthetic oligonucleotide
aaugaguuauaccuuaaaa

SEQ ID NO: 490808 - RNA, 19 nt, Artificial Sequence
  Description of Artificial Sequence: Synthetic oligonucleotide
aacuauaucaacauggaau

SEQ ID NO: 490809 - RNA, 19 nt, Artificial Sequence
  Description of Artificial Sequence: Synthetic oligonucleotide
aaaguuuaccucuaguaaa

SEQ ID NO: 490810 - RNA, 19 nt, Artificial Sequence
  Description of Artificial Sequence: Synthetic oligonucleotide
uuauugauauaaaaugcac

SEQ ID NO: 490811 - RNA, 19 nt, Artificial Sequence
  Description of Artificial Sequence: Synthetic oligonucleotide
aacuauggacucuaaguag

SEQ ID NO: 490812 - RNA, 19 nt, Artificial Sequence
  Description of Artificial Sequence: Synthetic oligonucleotide
ugauucucagcaaucauug

SEQ ID NO: 490813 - RNA, 19 nt, Artificial Sequence
  Description of Artificial Sequence: Synthetic oligonucleotide
gauuaugugaaaagugugg

SEQ ID NO: 490814 - RNA, 19 nt, Artificial Sequence
  Description of Artificial Sequence: Synthetic oligonucleotide
uuagcagauuaaaauauga

SEQ ID NO: 490815 - RNA, 19 nt, Artificial Sequence
  Description of Artificial Sequence: Synthetic oligonucleotide
auaaaauguccacagaaga

SEQ ID NO: 490816 - RNA, 19 nt, Artificial Sequence
  Description of Artificial Sequence: Synthetic oligonucleotide
uauccauucauaucccugg

SEQ ID NO: 490817 - RNA, 19 nt, Artificial Sequence
  Description of Artificial Sequence: Synthetic oligonucleotide
caaguuauggcucugcagc

SEQ ID NO: 490818 - RNA, 19 nt, Artificial Sequence
  Description of Artificial Sequence: Synthetic oligonucleotide
agggcuucauauuucauac

SEQ ID NO: 490819 - RNA, 19 nt, Artificial Sequence
  Description of Artificial Sequence: Synthetic oligonucleotide
ugguuuaauuauuaguaag

SEQ ID NO: 490820 - RNA, 19 nt, Artificial Sequence
  Description of Artificial Sequence: Synthetic oligonucleotide
caugaucacaucuauauuc

SEQ ID NO: 490821 - RNA, 19 nt, Artificial Sequence
  Description of Artificial Sequence: Synthetic oligonucleotide
ucugcaacaaggcuccagg

SEQ ID NO: 490822 - RNA, 19 nt, Artificial Sequence
  Description of Artificial Sequence: Synthetic oligonucleotide
acaucuauauucuggaaug

SEQ ID NO: 490823 - RNA, 19 nt, Artificial Sequence
  Description of Artificial Sequence: Synthetic oligonucleotide
uacaugaucacaucuauau

SEQ ID NO: 490824 - RNA, 19 nt, Artificial Sequence
  Description of Artificial Sequence: Synthetic oligonucleotide
uauaucuauuuccaacugc

SEQ ID NO: 490825 - RNA, 19 nt, Artificial Sequence
  Description of Artificial Sequence: Synthetic oligonucleotide
uguauuacugauauuuauc

SEQ ID NO: 490826 - RNA, 19 nt, Artificial Sequence
  Description of Artificial Sequence: Synthetic oligonucleotide
aaaacuauauugcaacauu

SEQ ID NO: 490827 - RNA, 19 nt, Artificial Sequence
  Description of Artificial Sequence: Synthetic oligonucleotide
aaacuauggacucuaagua

SEQ ID NO: 490828 - RNA, 19 nt, Artificial Sequence
  Description of Artificial Sequence: Synthetic oligonucleotide
uaaaaguuuaccucuagua

SEQ ID NO: 490829 - RNA, 19 nt, Artificial Sequence
  Description of Artificial Sequence: Synthetic oligonucleotide
aacaagugcaacauuacug

SEQ ID NO: 490830 - RNA, 19 nt, Artificial Sequence
  Description of Artificial Sequence: Synthetic oligonucleotide
aagauuaugugaaaagugu

SEQ ID NO: 490831 - RNA, 19 nt, Artificial Sequence
  Description of Artificial Sequence: Synthetic oligonucleotide
aucguaaucauguucccag

SEQ ID NO: 490832 - RNA, 19 nt, Artificial Sequence
  Description of Artificial Sequence: Synthetic oligonucleotide
agagcauaacugcacaccg

SEQ ID NO: 490833 - RNA, 19 nt, Artificial Sequence
  Description of Artificial Sequence: Synthetic oligonucleotide
uauguugaaaucuugucua

SEQ ID NO: 490834 - RNA, 19 nt, Artificial Sequence
  Description of Artificial Sequence: Synthetic oligonucleotide
augcuuugcaacaagaggg

SEQ ID NO: 490835 - RNA, 19 nt, Artificial Sequence
  Description of Artificial Sequence: Synthetic oligonucleotide
aaguuuaccucuaguaaac

SEQ ID NO: 490836 - RNA, 19 nt, Artificial Sequence
  Description of Artificial Sequence: Synthetic oligonucleotide
acuauauugcaacauuuca

SEQ ID NO: 490837 - RNA, 19 nt, Artificial Sequence
  Description of Artificial Sequence: Synthetic oligonucleotide
ugagagucuaaccugaaua

SEQ ID NO: 490838 - RNA, 19 nt, Artificial Sequence
  Description of Artificial Sequence: Synthetic oligonucleotide
uaccucauuaauuuuaauc

SEQ ID NO: 490839 - RNA, 19 nt, Artificial Sequence
  Description of Artificial Sequence: Synthetic oligonucleotide
gaaaucggcagucaguuca

SEQ ID NO: 490840 - RNA, 19 nt, Artificial Sequence
  Description of Artificial Sequence: Synthetic oligonucleotide
uuacgcagcaugaaguuca

SEQ ID NO: 490841 - RNA, 19 nt, Artificial Sequence
  Description of Artificial Sequence: Synthetic oligonucleotide
uuauaccuuaaaacaaaug

SEQ ID NO: 490842 - RNA, 19 nt, Artificial Sequence
  Description of Artificial Sequence: Synthetic oligonucleotide
aaugccacuccuuguagug

SEQ ID NO: 490843 - RNA, 19 nt, Artificial Sequence
  Description of Artificial Sequence: Synthetic oligonucleotide
uguuauucacaucuauugu

SEQ ID NO: 490844 - RNA, 19 nt, Artificial Sequence
  Description of Artificial Sequence: Synthetic oligonucleotide
uaucuuacgcagcaugaag

SEQ ID NO: 490845 - RNA, 19 nt, Artificial Sequence
  Description of Artificial Sequence: Synthetic oligonucleotide
uaguaagguuacaugauca

SEQ ID NO: 490846 - RNA, 19 nt, Artificial Sequence
  Description of Artificial Sequence: Synthetic oligonucleotide
aacugcacguaguugagcu

SEQ ID NO: 490847 - RNA, 19 nt, Artificial Sequence
  Description of Artificial Sequence: Synthetic oligonucleotide
agucuaaguguuuguaaac

SEQ ID NO: 490848 - RNA, 19 nt, Artificial Sequence
  Description of Artificial Sequence: Synthetic oligonucleotide
uuaccucuaguaaacaagu

SEQ ID NO: 490849 - RNA, 19 nt, Artificial Sequence
  Description of Artificial Sequence: Synthetic oligonucleotide
aaugauacaucuuccuuua

SEQ ID NO: 490850 - RNA, 19 nt, Artificial Sequence
  Description of Artificial Sequence: Synthetic oligonucleotide
aucaacacgcuaugaaaac

SEQ ID NO: 490851 - RNA, 19 nt, Artificial Sequence
  Description of Artificial Sequence: Synthetic oligonucleotide
uuacugauauuuaucuuac

SEQ ID NO: 490852 - RNA, 19 nt, Artificial Sequence
  Description of Artificial Sequence: Synthetic oligonucleotide
uguaaugauacaucuuccu

SEQ ID NO: 490853 - RNA, 19 nt, Artificial Sequence
  Description of Artificial Sequence: Synthetic oligonucleotide
aauggucuggagaccaugc

SEQ ID NO: 490854 - RNA, 19 nt, Artificial Sequence
  Description of Artificial Sequence: Synthetic oligonucleotide
cuuggauguagugugauag

SEQ ID NO: 490855 - RNA, 19 nt, Artificial Sequence
  Description of Artificial Sequence: Synthetic oligonucleotide
ugauacaucuuccuuuacu

SEQ ID NO: 490856 - RNA, 19 nt, Artificial Sequence
  Description of Artificial Sequence: Synthetic oligonucleotide
auaugaaguguucuaucuc

SEQ ID NO: 490857 - RNA, 19 nt, Artificial Sequence
  Description of Artificial Sequence: Synthetic oligonucleotide
augugaaaaguguggaauc

SEQ ID NO: 490858 - RNA, 19 nt, Artificial Sequence
  Description of Artificial Sequence: Synthetic oligonucleotide
cugcuuaugggcauguugc

SEQ ID NO: 490859 - RNA, 19 nt, Artificial Sequence
  Description of Artificial Sequence: Synthetic oligonucleotide
agucuaaccugaauaauac

SEQ ID NO: 490860 - RNA, 19 nt, Artificial Sequence
  Description of Artificial Sequence: Synthetic oligonucleotide
uaggaaaugccacuccuug

SEQ ID NO: 490861 - RNA, 19 nt, Artificial Sequence
  Description of Artificial Sequence: Synthetic oligonucleotide
ucugcuuaugggcauguug

SEQ ID NO: 490862 - RNA, 19 nt, Artificial Sequence
  Description of Artificial Sequence: Synthetic oligonucleotide
uuaguaagguuacaugauc

SEQ ID NO: 490863 - RNA, 19 nt, Artificial Sequence
  Description of Artificial Sequence: Synthetic oligonucleotide
uugucuaucucaaucuuuc

SEQ ID NO: 490864 - RNA, 19 nt, Artificial Sequence
  Description of Artificial Sequence: Synthetic oligonucleotide
ugaaaauacaaagcuucag

SEQ ID NO: 490865 - RNA, 19 nt, Artificial Sequence
  Description of Artificial Sequence: Synthetic oligonucleotide
uaaaggacuuccaaauccu

SEQ ID NO: 490866 - RNA, 19 nt, Artificial Sequence
  Description of Artificial Sequence: Synthetic oligonucleotide
ugguuuagcaaaacucugc

SEQ ID NO: 490867 - RNA, 19 nt, Artificial Sequence
  Description of Artificial Sequence: Synthetic oligonucleotide
aaagcgucucgagaaauag

SEQ ID NO: 490868 - RNA, 19 nt, Artificial Sequence
  Description of Artificial Sequence: Synthetic oligonucleotide
auagaauucagagcauaac

SEQ ID NO: 490869 - RNA, 19 nt, Artificial Sequence
  Description of Artificial Sequence: Synthetic oligonucleotide
aucggcagucaguucaucc

SEQ ID NO: 490870 - RNA, 19 nt, Artificial Sequence
  Description of Artificial Sequence: Synthetic oligonucleotide
cuuaugggcauguugcuug

SEQ ID NO: 490871 - RNA, 19 nt, Artificial Sequence
  Description of Artificial Sequence: Synthetic oligonucleotide
aggguuagcagauuaaaau

SEQ ID NO: 490872 - RNA, 19 nt, Artificial Sequence
  Description of Artificial Sequence: Synthetic oligonucleotide
aaaacucugcuuaugggca

SEQ ID NO: 490873 - RNA, 19 nt, Artificial Sequence
  Description of Artificial Sequence: Synthetic oligonucleotide
accuaaaacauacuguaaa

SEQ ID NO: 490874 - RNA, 19 nt, Artificial Sequence
  Description of Artificial Sequence: Synthetic oligonucleotide
auaaaggaaaucggcaguc

SEQ ID NO: 490875 - RNA, 19 nt, Artificial Sequence
  Description of Artificial Sequence: Synthetic oligonucleotide
aaacucagaccucacugca

SEQ ID NO: 490876 - RNA, 19 nt, Artificial Sequence
  Description of Artificial Sequence: Synthetic oligonucleotide
uguguauccaggcaucgaa

SEQ ID NO: 490877 - RNA, 19 nt, Artificial Sequence
  Description of Artificial Sequence: Synthetic oligonucleotide
ucuaguaaacaagugcaac

SEQ ID NO: 490878 - RNA, 19 nt, Artificial Sequence
  Description of Artificial Sequence: Synthetic oligonucleotide
uauaucaacauggaaugau

SEQ ID NO: 490879 - RNA, 19 nt, Artificial Sequence
  Description of Artificial Sequence: Synthetic oligonucleotide
acgcuaugaaaacagugag

SEQ ID NO: 490880 - RNA, 19 nt, Artificial Sequence
  Description of Artificial Sequence: Synthetic oligonucleotide
uacuagagcaagucucagg

SEQ ID NO: 490881 - RNA, 19 nt, Artificial Sequence
  Description of Artificial Sequence: Synthetic oligonucleotide
uugguuuaauuauuaguaa

SEQ ID NO: 490882 - RNA, 19 nt, Artificial Sequence
  Description of Artificial Sequence: Synthetic oligonucleotide
cugauauuuaucuuacgca

SEQ ID NO: 490883 - RNA, 19 nt, Artificial Sequence
  Description of Artificial Sequence: Synthetic oligonucleotide
auguaaugauacaucuucc

SEQ ID NO: 490884 - RNA, 19 nt, Artificial Sequence
  Description of Artificial Sequence: Synthetic oligonucleotide
aaucaacacgcuaugaaaa

SEQ ID NO: 490885 - RNA, 19 nt, Artificial Sequence
  Description of Artificial Sequence: Synthetic oligonucleotide
aaucagucuccgaaucccc

SEQ ID NO: 490886 - RNA, 19 nt, Artificial Sequence
  Description of Artificial Sequence: Synthetic oligonucleotide
cuaguaaacaagugcaaca

SEQ ID NO: 490887 - RNA, 19 nt, Artificial Sequence
  Description of Artificial Sequence: Synthetic oligonucleotide
gaaucaacacgcuaugaaa

SEQ ID NO: 490888 - RNA, 19 nt, Artificial Sequence
  Description of Artificial Sequence: Synthetic oligonucleotide
aagagggcuucauauuuca

SEQ ID NO: 490889 - RNA, 19 nt, Artificial Sequence
  Description of Artificial Sequence: Synthetic oligonucleotide
auuaugugaaaagugugga

SEQ ID NO: 490890 - RNA, 19 nt, Artificial Sequence
  Description of Artificial Sequence: Synthetic oligonucleotide
aguucugcauauuuaaaua

SEQ ID NO: 490891 - RNA, 19 nt, Artificial Sequence
  Description of Artificial Sequence: Synthetic oligonucleotide
auaucuauuuccaacugca

SEQ ID NO: 490892 - RNA, 19 nt, Artificial Sequence
  Description of Artificial Sequence: Synthetic oligonucleotide
ugugaaaaguguggaauca

SEQ ID NO: 490893 - RNA, 19 nt, Artificial Sequence
  Description of Artificial Sequence: Synthetic oligonucleotide
acacguaaaacuaaaaguu

SEQ ID NO: 490894 - RNA, 19 nt, Artificial Sequence
  Description of Artificial Sequence: Synthetic oligonucleotide
cuaaucagucuccgaaucc

SEQ ID NO: 490895 - RNA, 19 nt, Artificial Sequence
  Description of Artificial Sequence: Synthetic oligonucleotide
gaaaggcgcauguauuacc

SEQ ID NO: 490896 - RNA, 19 nt, Artificial Sequence
  Description of Artificial Sequence: Synthetic oligonucleotide
aguacaauuuuccucccaa

SEQ ID NO: 490897 - RNA, 19 nt, Artificial Sequence
  Description of Artificial Sequence: Synthetic oligonucleotide
uauccauguaaugauacau

SEQ ID NO: 490898 - RNA, 19 nt, Artificial Sequence
  Description of Artificial Sequence: Synthetic oligonucleotide
uguaaacaaugaguuauac

SEQ ID NO: 490899 - RNA, 19 nt, Artificial Sequence
  Description of Artificial Sequence: Synthetic oligonucleotide
gucuaugugaacacaacug

SEQ ID NO: 490900 - RNA, 19 nt, Artificial Sequence
  Description of Artificial Sequence: Synthetic oligonucleotide
aaguuauggcucugcagca

SEQ ID NO: 490901 - RNA, 19 nt, Artificial Sequence
  Description of Artificial Sequence: Synthetic oligonucleotide
ugcauaagugauucucagc

SEQ ID NO: 490902 - RNA, 19 nt, Artificial Sequence
  Description of Artificial Sequence: Synthetic oligonucleotide
aggcgcauguauuaccuuc

SEQ ID NO: 490903 - RNA, 19 nt, Artificial Sequence
  Description of Artificial Sequence: Synthetic oligonucleotide
uguguauuacugauauuua

SEQ ID NO: 490904 - RNA, 19 nt, Artificial Sequence
  Description of Artificial Sequence: Synthetic oligonucleotide
uguaguugucuuucuacaa

SEQ ID NO: 490905 - RNA, 19 nt, Artificial Sequence
  Description of Artificial Sequence: Synthetic oligonucleotide
uuauggcucugcagcaggg

SEQ ID NO: 490906 - RNA, 19 nt, Artificial Sequence
  Description of Artificial Sequence: Synthetic oligonucleotide
uccgcuggaccccuaauca

SEQ ID NO: 490907 - RNA, 19 nt, Artificial Sequence
  Description of Artificial Sequence: Synthetic oligonucleotide
uacugauauuuaucuuacg

SEQ ID NO: 490908 - RNA, 19 nt, Artificial Sequence
  Description of Artificial Sequence: Synthetic oligonucleotide
uuuuaaucaguaguggcuu

SEQ ID NO: 490909 - RNA, 19 nt, Artificial Sequence
  Description of Artificial Sequence: Synthetic oligonucleotide
ugcagaguacuagagcaag

SEQ ID NO: 490910 - RNA, 19 nt, Artificial Sequence
  Description of Artificial Sequence: Synthetic oligonucleotide
agaguacuagagcaagucu

SEQ ID NO: 490911 - RNA, 19 nt, Artificial Sequence
  Description of Artificial Sequence: Synthetic oligonucleotide
acaauuuuccucccaacua

SEQ ID NO: 490912 - RNA, 19 nt, Artificial Sequence
  Description of Artificial Sequence: Synthetic oligonucleotide
ucguaaucauguucccagg

SEQ ID NO: 490913 - RNA, 19 nt, Artificial Sequence
  Description of Artificial Sequence: Synthetic oligonucleotide
gagagucuaaccugaauaa

SEQ ID NO: 490914 - RNA, 19 nt, Artificial Sequence
  Description of Artificial Sequence: Synthetic oligonucleotide
agauuaugugaaaagugug

SEQ ID NO: 490915 - RNA, 19 nt, Artificial Sequence
  Description of Artificial Sequence: Synthetic oligonucleotide
auauugcaacauuucauaa

SEQ ID NO: 490916 - RNA, 19 nt, Artificial Sequence
  Description of Artificial Sequence: Synthetic oligonucleotide
aacaagagggcuucauauu

SEQ ID NO: 490917 - RNA, 19 nt, Artificial Sequence
  Description of Artificial Sequence: Synthetic oligonucleotide
gaguacuagagcaagucuc

SEQ ID NO: 490918 - RNA, 19 nt, Artificial Sequence
  Description of Artificial Sequence: Synthetic oligonucleotide
aaaggcgcauguauuaccu

SEQ ID NO: 490919 - RNA, 19 nt, Artificial Sequence
  Description of Artificial Sequence: Synthetic oligonucleotide
uuaugggcauguugcuugg

SEQ ID NO: 490920 - RNA, 19 nt, Artificial Sequence
  Description of Artificial Sequence: Synthetic oligonucleotide
cguaacuccucucauaugg

SEQ ID NO: 490921 - RNA, 19 nt, Artificial Sequence
  Description of Artificial Sequence: Synthetic oligonucleotide
cauauggucuaugugaaca

SEQ ID NO: 490922 - RNA, 19 nt, Artificial Sequence
  Description of Artificial Sequence: Synthetic oligonucleotide
cacgcuaugaaaacaguga

SEQ ID NO: 490923 - RNA, 19 nt, Artificial Sequence
  Description of Artificial Sequence: Synthetic oligonucleotide
ucaacacgcuaugaaaaca

SEQ ID NO: 490924 - RNA, 19 nt, Artificial Sequence
  Description of Artificial Sequence: Synthetic oligonucleotide
auaguaaagucuaaguguu

SEQ ID NO: 490925 - RNA, 19 nt, Artificial Sequence
  Description of Artificial Sequence: Synthetic oligonucleotide
cuaaguagucuccuucaug

SEQ ID NO: 490926 - RNA, 19 nt, Artificial Sequence
  Description of Artificial Sequence: Synthetic oligonucleotide
gggaauguuauucacaucu

SEQ ID NO: 490927 - RNA, 19 nt, Artificial Sequence
  Description of Artificial Sequence: Synthetic oligonucleotide
uauucacaucuauugucac

SEQ ID NO: 490928 - RNA, 19 nt, Artificial Sequence
  Description of Artificial Sequence: Synthetic oligonucleotide
aaguacaauuuuccuccca

SEQ ID NO: 490929 - RNA, 19 nt, Artificial Sequence
  Description of Artificial Sequence: Synthetic oligonucleotide
gaauauccauucauauccc

SEQ ID NO: 490930 - RNA, 19 nt, Artificial Sequence
  Description of Artificial Sequence: Synthetic oligonucleotide
uguguuggccaaaaugauu

SEQ ID NO: 490931 - RNA, 19 nt, Artificial Sequence
  Description of Artificial Sequence: Synthetic oligonucleotide
cuuuuaaucaguaguggcu

SEQ ID NO: 490932 - RNA, 19 nt, Artificial Sequence
  Description of Artificial Sequence: Synthetic oligonucleotide
acuacgugugcacacguaa

SEQ ID NO: 490933 - RNA, 19 nt, Artificial Sequence
  Description of Artificial Sequence: Synthetic oligonucleotide
aguuauaccuuaaaacaaa

SEQ ID NO: 490934 - RNA, 19 nt, Artificial Sequence
  Description of Artificial Sequence: Synthetic oligonucleotide
gaguuauaccuuaaaacaa

SEQ ID NO: 490935 - RNA, 19 nt, Artificial Sequence
  Description of Artificial Sequence: Synthetic oligonucleotide
aacuccucucauauggucu

SEQ ID NO: 490936 - RNA, 19 nt, Artificial Sequence
  Description of Artificial Sequence: Synthetic oligonucleotide
ggaaaauggcagcuuuugg

SEQ ID NO: 490937 - RNA, 19 nt, Artificial Sequence
  Description of Artificial Sequence: Synthetic oligonucleotide
auaacugcacaccggugcu

SEQ ID NO: 490938 - RNA, 19 nt, Artificial Sequence
  Description of Artificial Sequence: Synthetic oligonucleotide
uuaaucaguaguggcuucu

SEQ ID NO: 490939 - RNA, 19 nt, Artificial Sequence
  Description of Artificial Sequence: Synthetic oligonucleotide
acuauggacucuaaguagu

SEQ ID NO: 490940 - RNA, 19 nt, Artificial Sequence
  Description of Artificial Sequence: Synthetic oligonucleotide
uuuccaacugcacguaguu

SEQ ID NO: 490941 - RNA, 19 nt, Artificial Sequence
  Description of Artificial Sequence: Synthetic oligonucleotide
auaauacauaacacggcug

SEQ ID NO: 490942 - RNA, 19 nt, Artificial Sequence
  Description of Artificial Sequence: Synthetic oligonucleotide
ucucccucuauuucaagua

SEQ ID NO: 490943 - RNA, 19 nt, Artificial Sequence
  Description of Artificial Sequence: Synthetic oligonucleotide
uuuaaucaguaguggcuuc

SEQ ID NO: 490944 - RNA, 19 nt, Artificial Sequence
  Description of Artificial Sequence: Synthetic oligonucleotide
ucuaaguagucuccuucau

SEQ ID NO: 490945 - RNA, 19 nt, Artificial Sequence
  Description of Artificial Sequence: Synthetic oligonucleotide
uggucuaugugaacacaac

SEQ ID NO: 490946 - RNA, 19 nt, Artificial Sequence
  Description of Artificial Sequence: Synthetic oligonucleotide
aaucauugguuuaauuauu

SEQ ID NO: 490947 - RNA, 19 nt, Artificial Sequence
  Description of Artificial Sequence: Synthetic oligonucleotide
uuacuuggauguaguguga

SEQ ID NO: 490948 - RNA, 19 nt, Artificial Sequence
  Description of Artificial Sequence: Synthetic oligonucleotide
ucucgagaaauaggaaaug

SEQ ID NO: 490949 - RNA, 19 nt, Artificial Sequence
  Description of Artificial Sequence: Synthetic oligonucleotide
aaggacuuccaaauccuga

SEQ ID NO: 490950 - RNA, 19 nt, Artificial Sequence
  Description of Artificial Sequence: Synthetic oligonucleotide
agcgucucgagaaauagga

SEQ ID NO: 490951 - RNA, 19 nt, Artificial Sequence
  Description of Artificial Sequence: Synthetic oligonucleotide
uggauguagugugauagaa

SEQ ID NO: 490952 - RNA, 19 nt, Artificial Sequence
  Description of Artificial Sequence: Synthetic oligonucleotide
caugugacuacgugugcac

SEQ ID NO: 490953 - RNA, 19 nt, Artificial Sequence
  Description of Artificial Sequence: Synthetic oligonucleotide
auuaguaagguuacaugau

SEQ ID NO: 490954 - RNA, 19 nt, Artificial Sequence
  Description of Artificial Sequence: Synthetic oligonucleotide
uguuuguuguguuggccaa

SEQ ID NO: 490955 - RNA, 19 nt, Artificial Sequence
  Description of Artificial Sequence: Synthetic oligonucleotide
auauccauucauaucccug

SEQ ID NO: 490956 - RNA, 19 nt, Artificial Sequence
  Description of Artificial Sequence: Synthetic oligonucleotide
ugauagaauucagagcaua

SEQ ID NO: 490957 - RNA, 19 nt, Artificial Sequence
  Description of Artificial Sequence: Synthetic oligonucleotide
gauagaauucagagcauaa

SEQ ID NO: 490958 - RNA, 19 nt, Artificial Sequence
  Description of Artificial Sequence: Synthetic oligonucleotide
uuggauguagugugauaga

SEQ ID NO: 490959 - RNA, 19 nt, Artificial Sequence
  Description of Artificial Sequence: Synthetic oligonucleotide
auaacacggcugcuugguc

SEQ ID NO: 490960 - RNA, 19 nt, Artificial Sequence
  Description of Artificial Sequence: Synthetic oligonucleotide
uauugucaccuaaaacaua

SEQ ID NO: 490961 - RNA, 19 nt, Artificial Sequence
  Description of Artificial Sequence: Synthetic oligonucleotide
uggaccccuaaucagucuc

SEQ ID NO: 490962 - RNA, 19 nt, Artificial Sequence
  Description of Artificial Sequence: Synthetic oligonucleotide
aaaggacuuccaaauccug

SEQ ID NO: 490963 - RNA, 19 nt, Artificial Sequence
  Description of Artificial Sequence: Synthetic oligonucleotide
acgugugcacacguaaaac

SEQ ID NO: 490964 - RNA, 19 nt, Artificial Sequence
  Description of Artificial Sequence: Synthetic oligonucleotide
ucuuacgcagcaugaaguu

SEQ ID NO: 490965 - RNA, 19 nt, Artificial Sequence
  Description of Artificial Sequence: Synthetic oligonucleotide
ugcacacguaaaacuaaaa

SEQ ID NO: 490966 - RNA, 19 nt, Artificial Sequence
  Description of Artificial Sequence: Synthetic oligonucleotide
aagcgucucgagaaauagg

SEQ ID NO: 490967 - RNA, 19 nt, Artificial Sequence
  Description of Artificial Sequence: Synthetic oligonucleotide
ugucuagcuuuaacuaaaa

SEQ ID NO: 490968 - RNA, 19 nt, Artificial Sequence
  Description of Artificial Sequence: Synthetic oligonucleotide
ugaaaggcgcauguauuac

SEQ ID NO: 490969 - RNA, 19 nt, Artificial Sequence
  Description of Artificial Sequence: Synthetic oligonucleotide
agcggcaaaacaaaggcau

SEQ ID NO: 490970 - RNA, 19 nt, Artificial Sequence
  Description of Artificial Sequence: Synthetic oligonucleotide
cucucauauggucuaugug

SEQ ID NO: 490971 - RNA, 19 nt, Artificial Sequence
  Description of Artificial Sequence: Synthetic oligonucleotide
aucuuacgcagcaugaagu

SEQ ID NO: 490972 - RNA, 19 nt, Artificial Sequence
  Description of Artificial Sequence: Synthetic oligonucleotide
uguugcuugggauguacuu

SEQ ID NO: 490973 - RNA, 19 nt, Artificial Sequence
  Description of Artificial Sequence: Synthetic oligonucleotide
ucauaccaugaaaugugua

SEQ ID NO: 490974 - RNA, 19 nt, Artificial Sequence
  Description of Artificial Sequence: Synthetic oligonucleotide
guuuaccucuaguaaacaa

SEQ ID NO: 490975 - RNA, 19 nt, Artificial Sequence
  Description of Artificial Sequence: Synthetic oligonucleotide
gagggcuucauauuucaua

SEQ ID NO: 490976 - RNA, 19 nt, Artificial Sequence
  Description of Artificial Sequence: Synthetic oligonucleotide
cauguguauccaggcaucg

SEQ ID NO: 490977 - RNA, 19 nt, Artificial Sequence
  Description of Artificial Sequence: Synthetic oligonucleotide
gagcauaacugcacaccgg

SEQ ID NO: 490978 - RNA, 19 nt, Artificial Sequence
  Description of Artificial Sequence: Synthetic oligonucleotide
acacgcuaugaaaacagug

SEQ ID NO: 490979 - RNA, 19 nt, Artificial Sequence
  Description of Artificial Sequence: Synthetic oligonucleotide
gagucuaaccugaauaaua

SEQ ID NO: 490980 - RNA, 19 nt, Artificial Sequence
  Description of Artificial Sequence: Synthetic oligonucleotide
gaauacagcaugcgcucuc

SEQ ID NO: 490981 - RNA, 19 nt, Artificial Sequence
  Description of Artificial Sequence: Synthetic oligonucleotide
cucauauggucuaugugaa

SEQ ID NO: 490982 - RNA, 19 nt, Artificial Sequence
  Description of Artificial Sequence: Synthetic oligonucleotide
augaccggcaguaguacuc

SEQ ID NO: 490983 - RNA, 19 nt, Artificial Sequence
  Description of Artificial Sequence: Synthetic oligonucleotide
ucauauggucuaugugaac

SEQ ID NO: 490984 - RNA, 19 nt, Artificial Sequence
  Description of Artificial Sequence: Synthetic oligonucleotide
cucuaaguagucuccuuca

SEQ ID NO: 490985 - RNA, 19 nt, Artificial Sequence
  Description of Artificial Sequence: Synthetic oligonucleotide
cauaccaugaaauguguau

SEQ ID NO: 490986 - RNA, 19 nt, Artificial Sequence
  Description of Artificial Sequence: Synthetic oligonucleotide
aacucagaccucacugcag

SEQ ID NO: 490987 - RNA, 19 nt, Artificial Sequence
  Description of Artificial Sequence: Synthetic oligonucleotide
aggaaaugccacuccuugu

SEQ ID NO: 490988 - RNA, 19 nt, Artificial Sequence
  Description of Artificial Sequence: Synthetic oligonucleotide
gaauaccauaguccauuuc

SEQ ID NO: 490989 - RNA, 19 nt, Artificial Sequence
  Description of Artificial Sequence: Synthetic oligonucleotide
caaaauuucuagguuguaa

SEQ ID NO: 490990 - RNA, 19 nt, Artificial Sequence
  Description of Artificial Sequence: Synthetic oligonucleotide
auaccaugaaauguguauu

SEQ ID NO: 490991 - RNA, 19 nt, Artificial Sequence
  Description of Artificial Sequence: Synthetic oligonucleotide
gaccuauguaaaauauuga

SEQ ID NO: 490992 - RNA, 19 nt, Artificial Sequence
  Description of Artificial Sequence: Synthetic oligonucleotide
uuccgcuggaccccuaauc

SEQ ID NO: 490993 - RNA, 19 nt, Artificial Sequence
  Description of Artificial Sequence: Synthetic oligonucleotide
caggcguucuggaacuggc

SEQ ID NO: 490994 - RNA, 19 nt, Artificial Sequence
  Description of Artificial Sequence: Synthetic oligonucleotide
gcgauggucugcaacaagg

SEQ ID NO: 490995 - RNA, 19 nt, Artificial Sequence
  Description of Artificial Sequence: Synthetic oligonucleotide
gugacuacgugugcacacg

SEQ ID NO: 490996 - RNA, 19 nt, Artificial Sequence
  Description of Artificial Sequence: Synthetic oligonucleotide
cuauugucaccuaaaacau

SEQ ID NO: 490997 - RNA, 19 nt, Artificial Sequence
  Description of Artificial Sequence: Synthetic oligonucleotide
aacacgcuaugaaaacagu

SEQ ID NO: 490998 - RNA, 19 nt, Artificial Sequence
  Description of Artificial Sequence: Synthetic oligonucleotide
agaaagucaccaccaguuu

SEQ ID NO: 490999 - RNA, 19 nt, Artificial Sequence
  Description of Artificial Sequence: Synthetic oligonucleotide
ugcuuaugggcauguugcu

SEQ ID NO: 491000 - RNA, 19 nt, Artificial Sequence
  Description of Artificial Sequence: Synthetic oligonucleotide
acaugaucacaucuauauu

SEQ ID NO: 491001 - RNA, 19 nt, Artificial Sequence
  Description of Artificial Sequence: Synthetic oligonucleotide
gagaccaugcaaugaauau

SEQ ID NO: 491002 - RNA, 19 nt, Artificial Sequence
  Description of Artificial Sequence: Synthetic oligonucleotide
guuacaugaucacaucuau

SEQ ID NO: 491003 - RNA, 19 nt, Artificial Sequence
  Description of Artificial Sequence: Synthetic oligonucleotide
aucauugguuuaauuauua

SEQ ID NO: 491004 - RNA, 19 nt, Artificial Sequence
  Description of Artificial Sequence: Synthetic oligonucleotide
ugccacuccuuguaguguc

SEQ ID NO: 491005 - RNA, 19 nt, Artificial Sequence
  Description of Artificial Sequence: Synthetic oligonucleotide
gaccccuaaucagucuccg

SEQ ID NO: 491006 - RNA, 19 nt, Artificial Sequence
  Description of Artificial Sequence: Synthetic oligonucleotide
ggguuagcagauuaaaaua

SEQ ID NO: 491007 - RNA, 19 nt, Artificial Sequence
  Description of Artificial Sequence: Synthetic oligonucleotide
aaucggcagucaguucauc

SEQ ID NO: 491008 - RNA, 19 nt, Artificial Sequence
  Description of Artificial Sequence: Synthetic oligonucleotide
aggagucuucuauagcauu

SEQ ID NO: 491009 - RNA, 19 nt, Artificial Sequence
  Description of Artificial Sequence: Synthetic oligonucleotide
ucaugaccggcaguaguac

SEQ ID NO: 491010 - RNA, 19 nt, Artificial Sequence
  Description of Artificial Sequence: Synthetic oligonucleotide
aguuuaccucuaguaaaca

SEQ ID NO: 491011 - RNA, 19 nt, Artificial Sequence
  Description of Artificial Sequence: Synthetic oligonucleotide
ugcacaccggugcuucaga

SEQ ID NO: 491012 - RNA, 19 nt, Artificial Sequence
  Description of Artificial Sequence: Synthetic oligonucleotide
cuaaaaguuuaccucuagu

SEQ ID NO: 491013 - RNA, 19 nt, Artificial Sequence
  Description of Artificial Sequence: Synthetic oligonucleotide
gcacaugugacuacgugug

SEQ ID NO: 491014 - RNA, 19 nt, Artificial Sequence
  Description of Artificial Sequence: Synthetic oligonucleotide
cauaaaggaaaucggcagu

SEQ ID NO: 491015 - RNA, 19 nt, Artificial Sequence
  Description of Artificial Sequence: Synthetic oligonucleotide
agagucuaaccugaauaau

SEQ ID NO: 491016 - RNA, 19 nt, Artificial Sequence
  Description of Artificial Sequence: Synthetic oligonucleotide
cuuacgcagcaugaaguuc

SEQ ID NO: 491017 - RNA, 19 nt, Artificial Sequence
  Description of Artificial Sequence: Synthetic oligonucleotide
ggcaguaguacucccucug

SEQ ID NO: 491018 - RNA, 19 nt, Artificial Sequence
  Description of Artificial Sequence: Synthetic oligonucleotide
auacauaacacggcugcuu

SEQ ID NO: 491019 - RNA, 19 nt, Artificial Sequence
  Description of Artificial Sequence: Synthetic oligonucleotide
uaguacucccucugcugga

SEQ ID NO: 491020 - RNA, 19 nt, Artificial Sequence
  Description of Artificial Sequence: Synthetic oligonucleotide
cugaaaggcgcauguauua

SEQ ID NO: 491021 - RNA, 19 nt, Artificial Sequence
  Description of Artificial Sequence: Synthetic oligonucleotide
auucauaucccugggcguu

SEQ ID NO: 491022 - RNA, 19 nt, Artificial Sequence
  Description of Artificial Sequence: Synthetic oligonucleotide
caacaagagggcuucauau

SEQ ID NO: 491023 - RNA, 19 nt, Artificial Sequence
  Description of Artificial Sequence: Synthetic oligonucleotide
uggcugaccuauguaaaau

SEQ ID NO: 491024 - RNA, 19 nt, Artificial Sequence
  Description of Artificial Sequence: Synthetic oligonucleotide
ccaaguuauggcucugcag

SEQ ID NO: 491025 - RNA, 19 nt, Artificial Sequence
  Description of Artificial Sequence: Synthetic oligonucleotide
cacaucuauauucuggaau

SEQ ID NO: 491026 - RNA, 19 nt, Artificial Sequence
  Description of Artificial Sequence: Synthetic oligonucleotide
uaugggcauguugcuuggg

SEQ ID NO: 491027 - RNA, 19 nt, Artificial Sequence
  Description of Artificial Sequence: Synthetic oligonucleotide
aguggcgcaggagaagacu

SEQ ID NO: 491028 - RNA, 19 nt, Artificial Sequence
  Description of Artificial Sequence: Synthetic oligonucleotide
acuucgucauaaaggaaau

SEQ ID NO: 491029 - RNA, 19 nt, Artificial Sequence
  Description of Artificial Sequence: Synthetic oligonucleotide
guaguugucuuucuacaau

SEQ ID NO: 491030 - RNA, 19 nt, Artificial Sequence
  Description of Artificial Sequence: Synthetic oligonucleotide
auggucuaugugaacacaa

SEQ ID NO: 491031 - RNA, 19 nt, Artificial Sequence
  Description of Artificial Sequence: Synthetic oligonucleotide
guagcgugcugaauccuug

SEQ ID NO: 491032 - RNA, 19 nt, Artificial Sequence
  Description of Artificial Sequence: Synthetic oligonucleotide
ugugggcacaugugacuac

SEQ ID NO: 491033 - RNA, 19 nt, Artificial Sequence
  Description of Artificial Sequence: Synthetic oligonucleotide
caacuauaucaacauggaa

SEQ ID NO: 491034 - RNA, 19 nt, Artificial Sequence
  Description of Artificial Sequence: Synthetic oligonucleotide
gacgaacaggagaaugguc

SEQ ID NO: 491035 - RNA, 19 nt, Artificial Sequence
  Description of Artificial Sequence: Synthetic oligonucleotide
uacuuggauguagugugau

SEQ ID NO: 491036 - RNA, 19 nt, Artificial Sequence
  Description of Artificial Sequence: Synthetic oligonucleotide
caaugaguuauaccuuaaa

SEQ ID NO: 491037 - RNA, 19 nt, Artificial Sequence
  Description of Artificial Sequence: Synthetic oligonucleotide
ccuaaucagucuccgaauc

SEQ ID NO: 491038 - RNA, 19 nt, Artificial Sequence
  Description of Artificial Sequence: Synthetic oligonucleotide
acuuggauguagugugaua

SEQ ID NO: 491039 - RNA, 19 nt, Artificial Sequence
  Description of Artificial Sequence: Synthetic oligonucleotide
agucuguaccucauuaauu

SEQ ID NO: 491040 - RNA, 19 nt, Artificial Sequence
  Description of Artificial Sequence: Synthetic oligonucleotide
aaggcgcauguauuaccuu

SEQ ID NO: 491041 - RNA, 19 nt, Artificial Sequence
  Description of Artificial Sequence: Synthetic oligonucleotide
caauuucuagcagagggcu

SEQ ID NO: 491042 - RNA, 19 nt, Artificial Sequence
  Description of Artificial Sequence: Synthetic oligonucleotide
cugccaaaaguucugcaua

SEQ ID NO: 491043 - RNA, 19 nt, Artificial Sequence
  Description of Artificial Sequence: Synthetic oligonucleotide
gagaaugcuuauacagaaa

SEQ ID NO: 491044 - RNA, 19 nt, Artificial Sequence
  Description of Artificial Sequence: Synthetic oligonucleotide
cagaccucacugcagagua

SEQ ID NO: 491045 - RNA, 19 nt, Artificial Sequence
  Description of Artificial Sequence: Synthetic oligonucleotide
cuauaucaacauggaauga

SEQ ID NO: 491046 - RNA, 19 nt, Artificial Sequence
  Description of Artificial Sequence: Synthetic oligonucleotide
ggucuaugugaacacaacu

SEQ ID NO: 491047 - RNA, 19 nt, Artificial Sequence
  Description of Artificial Sequence: Synthetic oligonucleotide
cacguaaaacuaaaaguuu

SEQ ID NO: 491048 - RNA, 19 nt, Artificial Sequence
  Description of Artificial Sequence: Synthetic oligonucleotide
ccucccaacuauaucaaca

SEQ ID NO: 491049 - RNA, 19 nt, Artificial Sequence
  Description of Artificial Sequence: Synthetic oligonucleotide
caccuaaaacauacuguaa

SEQ ID NO: 491050 - RNA, 19 nt, Artificial Sequence
  Description of Artificial Sequence: Synthetic oligonucleotide
gguuagcagauuaaaauau

SEQ ID NO: 491051 - RNA, 19 nt, Artificial Sequence
  Description of Artificial Sequence: Synthetic oligonucleotide
acuggcugaccuauguaaa

SEQ ID NO: 491052 - RNA, 19 nt, Artificial Sequence
  Description of Artificial Sequence: Synthetic oligonucleotide
agaccucacugcagaguac

SEQ ID NO: 491053 - RNA, 19 nt, Artificial Sequence
  Description of Artificial Sequence: Synthetic oligonucleotide
cacgucagucuguaccuca

SEQ ID NO: 491054 - RNA, 19 nt, Artificial Sequence
  Description of Artificial Sequence: Synthetic oligonucleotide
gguuacaugaucacaucua

SEQ ID NO: 491055 - RNA, 19 nt, Artificial Sequence
  Description of Artificial Sequence: Synthetic oligonucleotide
uucauaucccugggcguuc

SEQ ID NO: 491056 - RNA, 19 nt, Artificial Sequence
  Description of Artificial Sequence: Synthetic oligonucleotide
gcaucguaaucauguuccc

SEQ ID NO: 491057 - RNA, 19 nt, Artificial Sequence
  Description of Artificial Sequence: Synthetic oligonucleotide
augugacuacgugugcaca

SEQ ID NO: 491058 - RNA, 19 nt, Artificial Sequence
  Description of Artificial Sequence: Synthetic oligonucleotide
cucccaacuauaucaacau

SEQ ID NO: 491059 - RNA, 19 nt, Artificial Sequence
  Description of Artificial Sequence: Synthetic oligonucleotide
caugagcccguaacuccuc

SEQ ID NO: 491060 - RNA, 19 nt, Artificial Sequence
  Description of Artificial Sequence: Synthetic oligonucleotide
aguguggaaucaacacgcu

SEQ ID NO: 491061 - RNA, 19 nt, Artificial Sequence
  Description of Artificial Sequence: Synthetic oligonucleotide
uugcugcauacaacauuuu

SEQ ID NO: 491062 - RNA, 19 nt, Artificial Sequence
  Description of Artificial Sequence: Synthetic oligonucleotide
guguggaaucaacacgcua

SEQ ID NO: 491063 - RNA, 19 nt, Artificial Sequence
  Description of Artificial Sequence: Synthetic oligonucleotide
accccuaaucagucuccga

SEQ ID NO: 491064 - RNA, 19 nt, Artificial Sequence
  Description of Artificial Sequence: Synthetic oligonucleotide
cgauggucugcaacaaggc

SEQ ID NO: 491065 - RNA, 19 nt, Artificial Sequence
  Description of Artificial Sequence: Synthetic oligonucleotide
ugguagcgugcugaauccu

SEQ ID NO: 491066 - RNA, 19 nt, Artificial Sequence
  Description of Artificial Sequence: Synthetic oligonucleotide
ggaacuggcugaccuaugu

SEQ ID NO: 491067 - RNA, 19 nt, Artificial Sequence
  Description of Artificial Sequence: Synthetic oligonucleotide
gugcacacguaaaacuaaa

SEQ ID NO: 491068 - RNA, 19 nt, Artificial Sequence
  Description of Artificial Sequence: Synthetic oligonucleotide
cauaacacggcugcuuggu

SEQ ID NO: 491069 - RNA, 19 nt, Artificial Sequence
  Description of Artificial Sequence: Synthetic oligonucleotide
gaauuucugaaaggcgcau

SEQ ID NO: 491070 - RNA, 19 nt, Artificial Sequence
  Description of Artificial Sequence: Synthetic oligonucleotide
cagucuguaccucauuaau

SEQ ID NO: 491071 - RNA, 19 nt, Artificial Sequence
  Description of Artificial Sequence: Synthetic oligonucleotide
cugaccuauguaaaauauu

SEQ ID NO: 491072 - RNA, 19 nt, Artificial Sequence
  Description of Artificial Sequence: Synthetic oligonucleotide
ggcugaccuauguaaaaua

SEQ ID NO: 491073 - RNA, 19 nt, Artificial Sequence
  Description of Artificial Sequence: Synthetic oligonucleotide
ggagucuucuauagcauua

SEQ ID NO: 491074 - RNA, 19 nt, Artificial Sequence
  Description of Artificial Sequence: Synthetic oligonucleotide
ugcacguaguugagcucuu

SEQ ID NO: 491075 - RNA, 19 nt, Artificial Sequence
  Description of Artificial Sequence: Synthetic oligonucleotide
caguggcgcaggagaagac

SEQ ID NO: 491076 - RNA, 19 nt, Artificial Sequence
  Description of Artificial Sequence: Synthetic oligonucleotide
gaucuucaugaccggcagu

SEQ ID NO: 491077 - RNA, 19 nt, Artificial Sequence
  Description of Artificial Sequence: Synthetic oligonucleotide
ggagaccaugcaaugaaua

SEQ ID NO: 491078 - RNA, 19 nt, Artificial Sequence
  Description of Artificial Sequence: Synthetic oligonucleotide
cgucucgagaaauaggaaa

SEQ ID NO: 491079 - RNA, 19 nt, Artificial Sequence
  Description of Artificial Sequence: Synthetic oligonucleotide
gcaacaagagggcuucaua

SEQ ID NO: 491080 - RNA, 19 nt, Artificial Sequence
  Description of Artificial Sequence: Synthetic oligonucleotide
cacagaagacauguaauuu

SEQ ID NO: 491081 - RNA, 19 nt, Artificial Sequence
  Description of Artificial Sequence: Synthetic oligonucleotide
gcgcauguauuaccuucag

SEQ ID NO: 491082 - RNA, 19 nt, Artificial Sequence
  Description of Artificial Sequence: Synthetic oligonucleotide
cugcacguaguugagcucu

SEQ ID NO: 491083 - RNA, 19 nt, Artificial Sequence
  Description of Artificial Sequence: Synthetic oligonucleotide
acgcagcaugaaguucagg

SEQ ID NO: 491084 - RNA, 19 nt, Artificial Sequence
  Description of Artificial Sequence: Synthetic oligonucleotide
ggcguucugagagucuaac

SEQ ID NO: 491085 - RNA, 19 nt, Artificial Sequence
  Description of Artificial Sequence: Synthetic oligonucleotide
cguucugagagucuaaccu

SEQ ID NO: 491086 - RNA, 19 nt, Artificial Sequence
  Description of Artificial Sequence: Synthetic oligonucleotide
guacuucgucauaaaggaa

SEQ ID NO: 491087 - RNA, 19 nt, Artificial Sequence
  Description of Artificial Sequence: Synthetic oligonucleotide
cacaccggugcuucagaaa

SEQ ID NO: 491088 - RNA, 19 nt, Artificial Sequence
  Description of Artificial Sequence: Synthetic oligonucleotide
accggcaguaguacucccu

SEQ ID NO: 491089 - RNA, 19 nt, Artificial Sequence
  Description of Artificial Sequence: Synthetic oligonucleotide
ggaccccuaaucagucucc

SEQ ID NO: 491090 - RNA, 19 nt, Artificial Sequence
  Description of Artificial Sequence: Synthetic oligonucleotide
cauccccauugucuaucuc

SEQ ID NO: 491091 - RNA, 19 nt, Artificial Sequence
  Description of Artificial Sequence: Synthetic oligonucleotide
caucuauauucuggaaugu

SEQ ID NO: 491092 - RNA, 19 nt, Artificial Sequence
  Description of Artificial Sequence: Synthetic oligonucleotide
cauaucccugggcguucug

SEQ ID NO: 491093 - RNA, 19 nt, Artificial Sequence
  Description of Artificial Sequence: Synthetic oligonucleotide
guaacuccucucauauggu

SEQ ID NO: 491094 - RNA, 19 nt, Artificial Sequence
  Description of Artificial Sequence: Synthetic oligonucleotide
ccccuaaucagucuccgaa

SEQ ID NO: 491095 - RNA, 19 nt, Artificial Sequence
  Description of Artificial Sequence: Synthetic oligonucleotide
gcaggguuagcagauuaaa

SEQ ID NO: 491096 - RNA, 19 nt, Artificial Sequence
  Description of Artificial Sequence: Synthetic oligonucleotide
gcauguguauccaggcauc

SEQ ID NO: 491097 - RNA, 19 nt, Artificial Sequence
  Description of Artificial Sequence: Synthetic oligonucleotide
caugaccggcaguaguacu

SEQ ID NO: 491098 - RNA, 19 nt, Artificial Sequence
  Description of Artificial Sequence: Synthetic oligonucleotide
ccaaauccugaauaccaua

SEQ ID NO: 491099 - RNA, 19 nt, Artificial Sequence
  Description of Artificial Sequence: Synthetic oligonucleotide
cucccucuauuucaaguau

SEQ ID NO: 491100 - RNA, 19 nt, Artificial Sequence
  Description of Artificial Sequence: Synthetic oligonucleotide
acgucagucuguaccucau

SEQ ID NO: 491101 - RNA, 19 nt, Artificial Sequence
  Description of Artificial Sequence: Synthetic oligonucleotide
gcauuuacuuggauguagu

SEQ ID NO: 491102 - RNA, 19 nt, Artificial Sequence
  Description of Artificial Sequence: Synthetic oligonucleotide
guacucccucugcuggaaa

SEQ ID NO: 491103 - RNA, 19 nt, Artificial Sequence
  Description of Artificial Sequence: Synthetic oligonucleotide
ggauguagugugauagaau

SEQ ID NO: 491104 - RNA, 19 nt, Artificial Sequence
  Description of Artificial Sequence: Synthetic oligonucleotide
cgugugcacacguaaaacu

SEQ ID NO: 491105 - RNA, 19 nt, Artificial Sequence
  Description of Artificial Sequence: Synthetic oligonucleotide
ccguaacuccucucauaug

SEQ ID NO: 491106 - RNA, 19 nt, Artificial Sequence
  Description of Artificial Sequence: Synthetic oligonucleotide
gugauagaauucagagcau

SEQ ID NO: 491107 - RNA, 19 nt, Artificial Sequence
  Description of Artificial Sequence: Synthetic oligonucleotide
ccucucauauggucuaugu

SEQ ID NO: 491108 - RNA, 19 nt, Artificial Sequence
  Description of Artificial Sequence: Synthetic oligonucleotide
gcggcaaaacaaaggcauc

SEQ ID NO: 491109 - RNA, 19 nt, Artificial Sequence
  Description of Artificial Sequence: Synthetic oligonucleotide
ggaaagcgucucgagaaau

SEQ ID NO: 491110 - RNA, 19 nt, Artificial Sequence
  Description of Artificial Sequence: Synthetic oligonucleotide
cuggaccccuaaucagucu

SEQ ID NO: 491111 - RNA, 19 nt, Artificial Sequence
  Description of Artificial Sequence: Synthetic oligonucleotide
cacacccacgucagucugu

SEQ ID NO: 491112 - RNA, 19 nt, Artificial Sequence
  Description of Artificial Sequence: Synthetic oligonucleotide
cccacgucagucuguaccu

SEQ ID NO: 491113 - RNA, 19 nt, Artificial Sequence
  Description of Artificial Sequence: Synthetic oligonucleotide
gcccguaacuccucucaua

SEQ ID NO: 491114 - RNA, 19 nt, Artificial Sequence
  Description of Artificial Sequence: Synthetic oligonucleotide
gcagaguacuagagcaagu

SEQ ID NO: 491115 - RNA, 19 nt, Artificial Sequence
  Description of Artificial Sequence: Synthetic oligonucleotide
gcgucucgagaaauaggaa

SEQ ID NO: 491116 - RNA, 19 nt, Artificial Sequence
  Description of Artificial Sequence: Synthetic oligonucleotide
cugggcguucugagagucu

SEQ ID NO: 491117 - RNA, 19 nt, Artificial Sequence
  Description of Artificial Sequence: Synthetic oligonucleotide
gguagcgugcugaauccuu

SEQ ID NO: 491118 - RNA, 19 nt, Artificial Sequence
  Description of Artificial Sequence: Synthetic oligonucleotide
cccuaaucagucuccgaau

SEQ ID NO: 491119 - RNA, 19 nt, Artificial Sequence
  Description of Artificial Sequence: Synthetic oligonucleotide
gcuuaugggcauguugcuu

SEQ ID NO: 491120 - RNA, 19 nt, Artificial Sequence
  Description of Artificial Sequence: Synthetic oligonucleotide
cuuccgcuggaccccuaau

SEQ ID NO: 491121 - RNA, 19 nt, Artificial Sequence
  Description of Artificial Sequence: Synthetic oligonucleotide
ccacgucagucuguaccuc

SEQ ID NO: 491122 - RNA, 19 nt, Artificial Sequence
  Description of Artificial Sequence: Synthetic oligonucleotide
cgcauguauuaccuucagu

SEQ ID NO: 491123 - RNA, 19 nt, Artificial Sequence
  Description of Artificial Sequence: Synthetic oligonucleotide
gcacguaguugagcucuuu

SEQ ID NO: 491124 - RNA, 19 nt, Artificial Sequence
  Description of Artificial Sequence: Synthetic oligonucleotide
gcgcucucuuaugcugcau

SEQ ID NO: 491125 - RNA, 19 nt, Artificial Sequence
  Description of Artificial Sequence: Synthetic oligonucleotide
auuaccuggauacaagucc

SEQ ID NO: 491126 - RNA, 19 nt, Artificial Sequence
  Description of Artificial Sequence: Synthetic oligonucleotide
uuuaugaccaaccaugaga

SEQ ID NO: 491127 - RNA, 19 nt, Artificial Sequence
  Description of Artificial Sequence: Synthetic oligonucleotide
agaaauguaguuuggacuc

SEQ ID NO: 491128 - RNA, 19 nt, Artificial Sequence
  Description of Artificial Sequence: Synthetic oligonucleotide
ucaaauacgaaucguagca

SEQ ID NO: 491129 - RNA, 19 nt, Artificial Sequence
  Description of Artificial Sequence: Synthetic oligonucleotide
ucgccuaagaccaagagcc

SEQ ID NO: 491130 - RNA, 19 nt, Artificial Sequence
  Description of Artificial Sequence: Synthetic oligonucleotide
uguagauucagaauaucag

SEQ ID NO: 491131 - RNA, 19 nt, Artificial Sequence
  Description of Artificial Sequence: Synthetic oligonucleotide
uauaagggaauacugaccu

SEQ ID NO: 491132 - RNA, 19 nt, Artificial Sequence
  Description of Artificial Sequence: Synthetic oligonucleotide
agggauuagcaccagagcc

SEQ ID NO: 491133 - RNA, 19 nt, Artificial Sequence
  Description of Artificial Sequence: Synthetic oligonucleotide
uguggucugacauagaugu

SEQ ID NO: 491134 - RNA, 19 nt, Artificial Sequence
  Description of Artificial Sequence: Synthetic oligonucleotide
aaugugguagcuuugcuga

SEQ ID NO: 491135 - RNA, 19 nt, Artificial Sequence
  Description of Artificial Sequence: Synthetic oligonucleotide
caaccaauaaacauccugg

SEQ ID NO: 491136 - RNA, 19 nt, Artificial Sequence
  Description of Artificial Sequence: Synthetic oligonucleotide
agaguuauuggucaaacca

SEQ ID NO: 491137 - RNA, 19 nt, Artificial Sequence
  Description of Artificial Sequence: Synthetic oligonucleotide
cauuguaugcacaucaaag

SEQ ID NO: 491138 - RNA, 19 nt, Artificial Sequence
  Description of Artificial Sequence: Synthetic oligonucleotide
caaaucgaacucuuuaucg

SEQ ID NO: 491139 - RNA, 19 nt, Artificial Sequence
  Description of Artificial Sequence: Synthetic oligonucleotide
gauauaagggaauacugac

SEQ ID NO: 491140 - RNA, 19 nt, Artificial Sequence
  Description of Artificial Sequence: Synthetic oligonucleotide
ucuaagacuagcaaggaua

SEQ ID NO: 491141 - RNA, 19 nt, Artificial Sequence
  Description of Artificial Sequence: Synthetic oligonucleotide
uauaauaaugucucucagc

SEQ ID NO: 491142 - RNA, 19 nt, Artificial Sequence
  Description of Artificial Sequence: Synthetic oligonucleotide
ucucaaauacgaaucguag

SEQ ID NO: 491143 - RNA, 19 nt, Artificial Sequence
  Description of Artificial Sequence: Synthetic oligonucleotide
aaccaauaaacauccuggg

SEQ ID NO: 491144 - RNA, 19 nt, Artificial Sequence
  Description of Artificial Sequence: Synthetic oligonucleotide
gaaguugcccaucagacug

SEQ ID NO: 491145 - RNA, 19 nt, Artificial Sequence
  Description of Artificial Sequence: Synthetic oligonucleotide
uauccuauagcagaauagg

SEQ ID NO: 491146 - RNA, 19 nt, Artificial Sequence
  Description of Artificial Sequence: Synthetic oligonucleotide
aaucgaacucuuuaucgag

SEQ ID NO: 491147 - RNA, 19 nt, Artificial Sequence
  Description of Artificial Sequence: Synthetic oligonucleotide
uuauaauaaugucucucag

SEQ ID NO: 491148 - RNA, 19 nt, Artificial Sequence
  Description of Artificial Sequence: Synthetic oligonucleotide
guggaaauaguccacggcg

SEQ ID NO: 491149 - RNA, 19 nt, Artificial Sequence
  Description of Artificial Sequence: Synthetic oligonucleotide
aaagucguaacauuuuaau

SEQ ID NO: 491150 - RNA, 19 nt, Artificial Sequence
  Description of Artificial Sequence: Synthetic oligonucleotide
ugucucuaacaucaugucg

SEQ ID NO: 491151 - RNA, 19 nt, Artificial Sequence
  Description of Artificial Sequence: Synthetic oligonucleotide
ucagcuaaagacacuacca

SEQ ID NO: 491152 - RNA, 19 nt, Artificial Sequence
  Description of Artificial Sequence: Synthetic oligonucleotide
aucggcaugcuucauacac

SEQ ID NO: 491153 - RNA, 19 nt, Artificial Sequence
  Description of Artificial Sequence: Synthetic oligonucleotide
uagaaauguaguuuggacu

SEQ ID NO: 491154 - RNA, 19 nt, Artificial Sequence
  Description of Artificial Sequence: Synthetic oligonucleotide
gaauguauccuauagcaga

SEQ ID NO: 491155 - RNA, 19 nt, Artificial Sequence
  Description of Artificial Sequence: Synthetic oligonucleotide
uuguagauucagaauauca

SEQ ID NO: 491156 - RNA, 19 nt, Artificial Sequence
  Description of Artificial Sequence: Synthetic oligonucleotide
aaaucgaacucuuuaucga

SEQ ID NO: 491157 - RNA, 19 nt, Artificial Sequence
  Description of Artificial Sequence: Synthetic oligonucleotide
agucguaacauuuuaauuu

SEQ ID NO: 491158 - RNA, 19 nt, Artificial Sequence
  Description of Artificial Sequence: Synthetic oligonucleotide
ugugaauguauccuauagc

SEQ ID NO: 491159 - RNA, 19 nt, Artificial Sequence
  Description of Artificial Sequence: Synthetic oligonucleotide
aguuauaauaaugucucuc

SEQ ID NO: 491160 - RNA, 19 nt, Artificial Sequence
  Description of Artificial Sequence: Synthetic oligonucleotide
ugagauaguaacaucccac

SEQ ID NO: 491161 - RNA, 19 nt, Artificial Sequence
  Description of Artificial Sequence: Synthetic oligonucleotide
aagacuagcaaggauauaa

SEQ ID NO: 491162 - RNA, 19 nt, Artificial Sequence
  Description of Artificial Sequence: Synthetic oligonucleotide
uuaugaccaaccaugagau

SEQ ID NO: 491163 - RNA, 19 nt, Artificial Sequence
  Description of Artificial Sequence: Synthetic oligonucleotide
agacaucaaguuucaaagc

SEQ ID NO: 491164 - RNA, 19 nt, Artificial Sequence
  Description of Artificial Sequence: Synthetic oligonucleotide
aaugacccagcaucguaac

SEQ ID NO: 491165 - RNA, 19 nt, Artificial Sequence
  Description of Artificial Sequence: Synthetic oligonucleotide
acaaaucgaacucuuuauc

SEQ ID NO: 491166 - RNA, 19 nt, Artificial Sequence
  Description of Artificial Sequence: Synthetic oligonucleotide
cauagauuuucccacguag

SEQ ID NO: 491167 - RNA, 19 nt, Artificial Sequence
  Description of Artificial Sequence: Synthetic oligonucleotide
aauauaagcuucagaauca

SEQ ID NO: 491168 - RNA, 19 nt, Artificial Sequence
  Description of Artificial Sequence: Synthetic oligonucleotide
acuuuguccaguuugcgug

SEQ ID NO: 491169 - RNA, 19 nt, Artificial Sequence
  Description of Artificial Sequence: Synthetic oligonucleotide
uauccaagcaggcccauag

SEQ ID NO: 491170 - RNA, 19 nt, Artificial Sequence
  Description of Artificial Sequence: Synthetic oligonucleotide
aaaagaaugcccguaggcu

SEQ ID NO: 491171 - RNA, 19 nt, Artificial Sequence
  Description of Artificial Sequence: Synthetic oligonucleotide
augaccaaccaugagauag

SEQ ID NO: 491172 - RNA, 19 nt, Artificial Sequence
  Description of Artificial Sequence: Synthetic oligonucleotide
aaggauauaagggaauacu

SEQ ID NO: 491173 - RNA, 19 nt, Artificial Sequence
  Description of Artificial Sequence: Synthetic oligonucleotide
gagauaguaacaucccacc

SEQ ID NO: 491174 - RNA, 19 nt, Artificial Sequence
  Description of Artificial Sequence: Synthetic oligonucleotide
aguuuuaguggaguuuucc

SEQ ID NO: 491175 - RNA, 19 nt, Artificial Sequence
  Description of Artificial Sequence: Synthetic oligonucleotide
uauaucugcugccaaggug

SEQ ID NO: 491176 - RNA, 19 nt, Artificial Sequence
  Description of Artificial Sequence: Synthetic oligonucleotide
auauaagggaauacugacc

SEQ ID NO: 491177 - RNA, 19 nt, Artificial Sequence
  Description of Artificial Sequence: Synthetic oligonucleotide
aaucgguuccuccauguca

SEQ ID NO: 491178 - RNA, 19 nt, Artificial Sequence
  Description of Artificial Sequence: Synthetic oligonucleotide
agauaguaacaucccaccg

SEQ ID NO: 491179 - RNA, 19 nt, Artificial Sequence
  Description of Artificial Sequence: Synthetic oligonucleotide
auaagcuucagaaucacca

SEQ ID NO: 491180 - RNA, 19 nt, Artificial Sequence
  Description of Artificial Sequence: Synthetic oligonucleotide
ucuaacaucaugucgcuuu

SEQ ID NO: 491181 - RNA, 19 nt, Artificial Sequence
  Description of Artificial Sequence: Synthetic oligonucleotide
ugucaagaaugucaagagc

SEQ ID NO: 491182 - RNA, 19 nt, Artificial Sequence
  Description of Artificial Sequence: Synthetic oligonucleotide
cucaaauacgaaucguagc

SEQ ID NO: 491183 - RNA, 19 nt, Artificial Sequence
  Description of Artificial Sequence: Synthetic oligonucleotide
uugaguuuucugcagacau

SEQ ID NO: 491184 - RNA, 19 nt, Artificial Sequence
  Description of Artificial Sequence: Synthetic oligonucleotide
augacaaagggaucuuccg

SEQ ID NO: 491185 - RNA, 19 nt, Artificial Sequence
  Description of Artificial Sequence: Synthetic oligonucleotide
ucaacauagaaauguaguu

SEQ ID NO: 491186 - RNA, 19 nt, Artificial Sequence
  Description of Artificial Sequence: Synthetic oligonucleotide
uuugcgugaccucagugca

SEQ ID NO: 491187 - RNA, 19 nt, Artificial Sequence
  Description of Artificial Sequence: Synthetic oligonucleotide
uaucagaauauaucugcug

SEQ ID NO: 491188 - RNA, 19 nt, Artificial Sequence
  Description of Artificial Sequence: Synthetic oligonucleotide
uguggaaauaguccacggc

SEQ ID NO: 491189 - RNA, 19 nt, Artificial Sequence
  Description of Artificial Sequence: Synthetic oligonucleotide
caaaagaaugcccguaggc

SEQ ID NO: 491190 - RNA, 19 nt, Artificial Sequence
  Description of Artificial Sequence: Synthetic oligonucleotide
ucaacauguggugugaugu

SEQ ID NO: 491191 - RNA, 19 nt, Artificial Sequence
  Description of Artificial Sequence: Synthetic oligonucleotide
agcaucguaacagaaaaug

SEQ ID NO: 491192 - RNA, 19 nt, Artificial Sequence
  Description of Artificial Sequence: Synthetic oligonucleotide
aaagaaugcccguaggcua

SEQ ID NO: 491193 - RNA, 19 nt, Artificial Sequence
  Description of Artificial Sequence: Synthetic oligonucleotide
uuuaucgaggacugggaca

SEQ ID NO: 491194 - RNA, 19 nt, Artificial Sequence
  Description of Artificial Sequence: Synthetic oligonucleotide
gucguaacauuuuaauuug

SEQ ID NO: 491195 - RNA, 19 nt, Artificial Sequence
  Description of Artificial Sequence: Synthetic oligonucleotide
uuuggacucaccuuaggaa

SEQ ID NO: 491196 - RNA, 19 nt, Artificial Sequence
  Description of Artificial Sequence: Synthetic oligonucleotide
accuacucuaccuuccgcg

SEQ ID NO: 491197 - RNA, 19 nt, Artificial Sequence
  Description of Artificial Sequence: Synthetic oligonucleotide
ucuguuaaucgguuccucc

SEQ ID NO: 491198 - RNA, 19 nt, Artificial Sequence
  Description of Artificial Sequence: Synthetic oligonucleotide
aagugacacccuuucauca

SEQ ID NO: 491199 - RNA, 19 nt, Artificial Sequence
  Description of Artificial Sequence: Synthetic oligonucleotide
uuaccuggauacaagucca

SEQ ID NO: 491200 - RNA, 19 nt, Artificial Sequence
  Description of Artificial Sequence: Synthetic oligonucleotide
agcaaaagaaugcccguag

SEQ ID NO: 491201 - RNA, 19 nt, Artificial Sequence
  Description of Artificial Sequence: Synthetic oligonucleotide
gaaguaagcuuguagcaca

SEQ ID NO: 491202 - RNA, 19 nt, Artificial Sequence
  Description of Artificial Sequence: Synthetic oligonucleotide
gugaaauaagcagccaucg

SEQ ID NO: 491203 - RNA, 19 nt, Artificial Sequence
  Description of Artificial Sequence: Synthetic oligonucleotide
ugaaauaagcagccaucgc

SEQ ID NO: 491204 - RNA, 19 nt, Artificial Sequence
  Description of Artificial Sequence: Synthetic oligonucleotide
caaagcaucauagauuuuc

SEQ ID NO: 491205 - RNA, 19 nt, Artificial Sequence
  Description of Artificial Sequence: Synthetic oligonucleotide
auacgaaucguagcaauuc

SEQ ID NO: 491206 - RNA, 19 nt, Artificial Sequence
  Description of Artificial Sequence: Synthetic oligonucleotide
cucagcuaaagacacuacc

SEQ ID NO: 491207 - RNA, 19 nt, Artificial Sequence
  Description of Artificial Sequence: Synthetic oligonucleotide
uucucaaauacgaaucgua

SEQ ID NO: 491208 - RNA, 19 nt, Artificial Sequence
  Description of Artificial Sequence: Synthetic oligonucleotide
agcauaguggcaucuagcu

SEQ ID NO: 491209 - RNA, 19 nt, Artificial Sequence
  Description of Artificial Sequence: Synthetic oligonucleotide
ugugucaucucgccuaaga

SEQ ID NO: 491210 - RNA, 19 nt, Artificial Sequence
  Description of Artificial Sequence: Synthetic oligonucleotide
aagucguaacauuuuaauu

SEQ ID NO: 491211 - RNA, 19 nt, Artificial Sequence
  Description of Artificial Sequence: Synthetic oligonucleotide
ggugcgauuauccaaagca

SEQ ID NO: 491212 - RNA, 19 nt, Artificial Sequence
  Description of Artificial Sequence: Synthetic oligonucleotide
ugacccagcaucguaacag

SEQ ID NO: 491213 - RNA, 19 nt, Artificial Sequence
  Description of Artificial Sequence: Synthetic oligonucleotide
aauaaacauccugggguuc

SEQ ID NO: 491214 - RNA, 19 nt, Artificial Sequence
  Description of Artificial Sequence: Synthetic oligonucleotide
ccaugagauaguaacaucc

SEQ ID NO: 491215 - RNA, 19 nt, Artificial Sequence
  Description of Artificial Sequence: Synthetic oligonucleotide
ccaaccaugagauaguaac

SEQ ID NO: 491216 - RNA, 19 nt, Artificial Sequence
  Description of Artificial Sequence: Synthetic oligonucleotide
ucaaagucguaacauuuua

SEQ ID NO: 491217 - RNA, 19 nt, Artificial Sequence
  Description of Artificial Sequence: Synthetic oligonucleotide
uuggccaaagaaucguuca

SEQ ID NO: 491218 - RNA, 19 nt, Artificial Sequence
  Description of Artificial Sequence: Synthetic oligonucleotide
gguggacgcauucugaggg

SEQ ID NO: 491219 - RNA, 19 nt, Artificial Sequence
  Description of Artificial Sequence: Synthetic oligonucleotide
augucucuaacaucauguc

SEQ ID NO: 491220 - RNA, 19 nt, Artificial Sequence
  Description of Artificial Sequence: Synthetic oligonucleotide
ugacauagaugucucuaac

SEQ ID NO: 491221 - RNA, 19 nt, Artificial Sequence
  Description of Artificial Sequence: Synthetic oligonucleotide
ugcgauuauccaaagcauc

SEQ ID NO: 491222 - RNA, 19 nt, Artificial Sequence
  Description of Artificial Sequence: Synthetic oligonucleotide
ccugugguaauccaaagcc

SEQ ID NO: 491223 - RNA, 19 nt, Artificial Sequence
  Description of Artificial Sequence: Synthetic oligonucleotide
aacucuuuaucgaggacug

SEQ ID NO: 491224 - RNA, 19 nt, Artificial Sequence
  Description of Artificial Sequence: Synthetic oligonucleotide
aguuccuaugugcacaggu

SEQ ID NO: 491225 - RNA, 19 nt, Artificial Sequence
  Description of Artificial Sequence: Synthetic oligonucleotide
guggcaucuagcugcaagg

SEQ ID NO: 491226 - RNA, 19 nt, Artificial Sequence
  Description of Artificial Sequence: Synthetic oligonucleotide
ugacccaaguuguucaaca

SEQ ID NO: 491227 - RNA, 19 nt, Artificial Sequence
  Description of Artificial Sequence: Synthetic oligonucleotide
uuagaguuauuggucaaac

SEQ ID NO: 491228 - RNA, 19 nt, Artificial Sequence
  Description of Artificial Sequence: Synthetic oligonucleotide
uauguauaacuacuuugua

SEQ ID NO: 491229 - RNA, 19 nt, Artificial Sequence
  Description of Artificial Sequence: Synthetic oligonucleotide
ucauuguaugcacaucaaa

SEQ ID NO: 491230 - RNA, 19 nt, Artificial Sequence
  Description of Artificial Sequence: Synthetic oligonucleotide
auaucugcugccaaggugu

SEQ ID NO: 491231 - RNA, 19 nt, Artificial Sequence
  Description of Artificial Sequence: Synthetic oligonucleotide
accaugagauaguaacauc

SEQ ID NO: 491232 - RNA, 19 nt, Artificial Sequence
  Description of Artificial Sequence: Synthetic oligonucleotide
uagaguuauuggucaaacc

SEQ ID NO: 491233 - RNA, 19 nt, Artificial Sequence
  Description of Artificial Sequence: Synthetic oligonucleotide
uagcagaauagguggacgc

SEQ ID NO: 491234 - RNA, 19 nt, Artificial Sequence
  Description of Artificial Sequence: Synthetic oligonucleotide
uggaaauaguccacggcgu

SEQ ID NO: 491235 - RNA, 19 nt, Artificial Sequence
  Description of Artificial Sequence: Synthetic oligonucleotide
aauucaggccacugguccu

SEQ ID NO: 491236 - RNA, 19 nt, Artificial Sequence
  Description of Artificial Sequence: Synthetic oligonucleotide
aagguaucggcaugcuuca

SEQ ID NO: 491237 - RNA, 19 nt, Artificial Sequence
  Description of Artificial Sequence: Synthetic oligonucleotide
uacgaaucguagcaauucu

SEQ ID NO: 491238 - RNA, 19 nt, Artificial Sequence
  Description of Artificial Sequence: Synthetic oligonucleotide
ucgaacucuuuaucgagga

SEQ ID NO: 491239 - RNA, 19 nt, Artificial Sequence
  Description of Artificial Sequence: Synthetic oligonucleotide
ccuacaaauauaagcgugg

SEQ ID NO: 491240 - RNA, 19 nt, Artificial Sequence
  Description of Artificial Sequence: Synthetic oligonucleotide
uggucugacauagaugucu

SEQ ID NO: 491241 - RNA, 19 nt, Artificial Sequence
  Description of Artificial Sequence: Synthetic oligonucleotide
caaugugguagcuuugcug

SEQ ID NO: 491242 - RNA, 19 nt, Artificial Sequence
  Description of Artificial Sequence: Synthetic oligonucleotide
auagcagaauagguggacg

SEQ ID NO: 491243 - RNA, 19 nt, Artificial Sequence
  Description of Artificial Sequence: Synthetic oligonucleotide
cuacaaauauaagcguggg

SEQ ID NO: 491244 - RNA, 19 nt, Artificial Sequence
  Description of Artificial Sequence: Synthetic oligonucleotide
ucguaacagaaaauguguc

SEQ ID NO: 491245 - RNA, 19 nt, Artificial Sequence
  Description of Artificial Sequence: Synthetic oligonucleotide
caucaaguuucaaagccuc

SEQ ID NO: 491246 - RNA, 19 nt, Artificial Sequence
  Description of Artificial Sequence: Synthetic oligonucleotide
agagugaggcuacuuuguc

SEQ ID NO: 491247 - RNA, 19 nt, Artificial Sequence
  Description of Artificial Sequence: Synthetic oligonucleotide
uuaauucaggccacugguc

SEQ ID NO: 491248 - RNA, 19 nt, Artificial Sequence
  Description of Artificial Sequence: Synthetic oligonucleotide
guaucggcaugcuucauac

SEQ ID NO: 491249 - RNA, 19 nt, Artificial Sequence
  Description of Artificial Sequence: Synthetic oligonucleotide
aggauauaagggaauacug

SEQ ID NO: 491250 - RNA, 19 nt, Artificial Sequence
  Description of Artificial Sequence: Synthetic oligonucleotide
ucucgccuaagaccaagag

SEQ ID NO: 491251 - RNA, 19 nt, Artificial Sequence
  Description of Artificial Sequence: Synthetic oligonucleotide
aauguauccuauagcagaa

SEQ ID NO: 491252 - RNA, 19 nt, Artificial Sequence
  Description of Artificial Sequence: Synthetic oligonucleotide
acaugacccaaguuguuca

SEQ ID NO: 491253 - RNA, 19 nt, Artificial Sequence
  Description of Artificial Sequence: Synthetic oligonucleotide
uuaucgaggacugggacau

SEQ ID NO: 491254 - RNA, 19 nt, Artificial Sequence
  Description of Artificial Sequence: Synthetic oligonucleotide
accgcaaaccaagauacag

SEQ ID NO: 491255 - RNA, 19 nt, Artificial Sequence
  Description of Artificial Sequence: Synthetic oligonucleotide
aacauguggugugauguca

SEQ ID NO: 491256 - RNA, 19 nt, Artificial Sequence
  Description of Artificial Sequence: Synthetic oligonucleotide
cucgccuaagaccaagagc

SEQ ID NO: 491257 - RNA, 19 nt, Artificial Sequence
  Description of Artificial Sequence: Synthetic oligonucleotide
agucuggaguuuuagugga

SEQ ID NO: 491258 - RNA, 19 nt, Artificial Sequence
  Description of Artificial Sequence: Synthetic oligonucleotide
cacaguuauaauaaugucu

SEQ ID NO: 491259 - RNA, 19 nt, Artificial Sequence
  Description of Artificial Sequence: Synthetic oligonucleotide
cauagaugucucuaacauc

SEQ ID NO: 491260 - RNA, 19 nt, Artificial Sequence
  Description of Artificial Sequence: Synthetic oligonucleotide
ucaugagagagugaggcua

SEQ ID NO: 491261 - RNA, 19 nt, Artificial Sequence
  Description of Artificial Sequence: Synthetic oligonucleotide
cuaacccaucucuuaauuc

SEQ ID NO: 491262 - RNA, 19 nt, Artificial Sequence
  Description of Artificial Sequence: Synthetic oligonucleotide
gucaagagccugcuggugc

SEQ ID NO: 491263 - RNA, 19 nt, Artificial Sequence
  Description of Artificial Sequence: Synthetic oligonucleotide
aagucccugaaaucccaug

SEQ ID NO: 491264 - RNA, 19 nt, Artificial Sequence
  Description of Artificial Sequence: Synthetic oligonucleotide
uucauuguaugcacaucaa

SEQ ID NO: 491265 - RNA, 19 nt, Artificial Sequence
  Description of Artificial Sequence: Synthetic oligonucleotide
aggugcaagcccugcuucc

SEQ ID NO: 491266 - RNA, 19 nt, Artificial Sequence
  Description of Artificial Sequence: Synthetic oligonucleotide
aguuuggacucaccuuagg

SEQ ID NO: 491267 - RNA, 19 nt, Artificial Sequence
  Description of Artificial Sequence: Synthetic oligonucleotide
uucuaagacuagcaaggau

SEQ ID NO: 491268 - RNA, 19 nt, Artificial Sequence
  Description of Artificial Sequence: Synthetic oligonucleotide
accuacaaauauaagcgug

SEQ ID NO: 491269 - RNA, 19 nt, Artificial Sequence
  Description of Artificial Sequence: Synthetic oligonucleotide
caccagaguuccuaugugc

SEQ ID NO: 491270 - RNA, 19 nt, Artificial Sequence
  Description of Artificial Sequence: Synthetic oligonucleotide
uacucuaccuuccgcgcgc

SEQ ID NO: 491271 - RNA, 19 nt, Artificial Sequence
  Description of Artificial Sequence: Synthetic oligonucleotide
aaugugucaucucgccuaa

SEQ ID NO: 491272 - RNA, 19 nt, Artificial Sequence
  Description of Artificial Sequence: Synthetic oligonucleotide
gauugaccgaagcccgccg

SEQ ID NO: 491273 - RNA, 19 nt, Artificial Sequence
  Description of Artificial Sequence: Synthetic oligonucleotide
agccaguuuagaguuauug

SEQ ID NO: 491274 - RNA, 19 nt, Artificial Sequence
  Description of Artificial Sequence: Synthetic oligonucleotide
guguggaaauaguccacgg

SEQ ID NO: 491275 - RNA, 19 nt, Artificial Sequence
  Description of Artificial Sequence: Synthetic oligonucleotide
uauaacuacuuuguagauu

SEQ ID NO: 491276 - RNA, 19 nt, Artificial Sequence
  Description of Artificial Sequence: Synthetic oligonucleotide
acggcguuuucgaaguugc

SEQ ID NO: 491277 - RNA, 19 nt, Artificial Sequence
  Description of Artificial Sequence: Synthetic oligonucleotide
ugaccaaccaugagauagu

SEQ ID NO: 491278 - RNA, 19 nt, Artificial Sequence
  Description of Artificial Sequence: Synthetic oligonucleotide
gucguguucacucuccaca

SEQ ID NO: 491279 - RNA, 19 nt, Artificial Sequence
  Description of Artificial Sequence: Synthetic oligonucleotide
agaauauaucugcugccaa

SEQ ID NO: 491280 - RNA, 19 nt, Artificial Sequence
  Description of Artificial Sequence: Synthetic oligonucleotide
ucguaacauuuuaauuugu

SEQ ID NO: 491281 - RNA, 19 nt, Artificial Sequence
  Description of Artificial Sequence: Synthetic oligonucleotide
uggacucaccuuaggaagu

SEQ ID NO: 491282 - RNA, 19 nt, Artificial Sequence
  Description of Artificial Sequence: Synthetic oligonucleotide
ugccaaggugugcuaaccc

SEQ ID NO: 491283 - RNA, 19 nt, Artificial Sequence
  Description of Artificial Sequence: Synthetic oligonucleotide
uucccauuugucaacuguu

SEQ ID NO: 491284 - RNA, 19 nt, Artificial Sequence
  Description of Artificial Sequence: Synthetic oligonucleotide
ucucuaacaucaugucgcu

SEQ ID NO: 491285 - RNA, 19 nt, Artificial Sequence
  Description of Artificial Sequence: Synthetic oligonucleotide
gucaacuguuaccucauuc

SEQ ID NO: 491286 - RNA, 19 nt, Artificial Sequence
  Description of Artificial Sequence: Synthetic oligonucleotide
cuuggccaaagaaucguuc

SEQ ID NO: 491287 - RNA, 19 nt, Artificial Sequence
  Description of Artificial Sequence: Synthetic oligonucleotide
uccucaacauagaaaugua

SEQ ID NO: 491288 - RNA, 19 nt, Artificial Sequence
  Description of Artificial Sequence: Synthetic oligonucleotide
acaccuacucuaccuuccg

SEQ ID NO: 491289 - RNA, 19 nt, Artificial Sequence
  Description of Artificial Sequence: Synthetic oligonucleotide
aucgaacucuuuaucgagg

SEQ ID NO: 491290 - RNA, 19 nt, Artificial Sequence
  Description of Artificial Sequence: Synthetic oligonucleotide
aguuugcgugaccucagug

SEQ ID NO: 491291 - RNA, 19 nt, Artificial Sequence
  Description of Artificial Sequence: Synthetic oligonucleotide
aauacgaaucguagcaauu

SEQ ID NO: 491292 - RNA, 19 nt, Artificial Sequence
  Description of Artificial Sequence: Synthetic oligonucleotide
gauuaccuggauacaaguc

SEQ ID NO: 491293 - RNA, 19 nt, Artificial Sequence
  Description of Artificial Sequence: Synthetic oligonucleotide
uggguucuagaccacuguc

SEQ ID NO: 491294 - RNA, 19 nt, Artificial Sequence
  Description of Artificial Sequence: Synthetic oligonucleotide
agguggacgcauucugagg

SEQ ID NO: 491295 - RNA, 19 nt, Artificial Sequence
  Description of Artificial Sequence: Synthetic oligonucleotide
cuuaauucaggccacuggu

SEQ ID NO: 491296 - RNA, 19 nt, Artificial Sequence
  Description of Artificial Sequence: Synthetic oligonucleotide
auagauuuucccacguaga

SEQ ID NO: 491297 - RNA, 19 nt, Artificial Sequence
  Description of Artificial Sequence: Synthetic oligonucleotide
ugcaagccaucuacugucc

SEQ ID NO: 491298 - RNA, 19 nt, Artificial Sequence
  Description of Artificial Sequence: Synthetic oligonucleotide
guuaaucgguuccuccaug

SEQ ID NO: 491299 - RNA, 19 nt, Artificial Sequence
  Description of Artificial Sequence: Synthetic oligonucleotide
aagagccguguggaaauag

SEQ ID NO: 491300 - RNA, 19 nt, Artificial Sequence
  Description of Artificial Sequence: Synthetic oligonucleotide
cuacucuaccuuccgcgcg

SEQ ID NO: 491301 - RNA, 19 nt, Artificial Sequence
  Description of Artificial Sequence: Synthetic oligonucleotide
gaacucuuuaucgaggacu

SEQ ID NO: 491302 - RNA, 19 nt, Artificial Sequence
  Description of Artificial Sequence: Synthetic oligonucleotide
ugucugcccaaaacagagc

SEQ ID NO: 491303 - RNA, 19 nt, Artificial Sequence
  Description of Artificial Sequence: Synthetic oligonucleotide
ggaauacugaccuacaaau

SEQ ID NO: 491304 - RNA, 19 nt, Artificial Sequence
  Description of Artificial Sequence: Synthetic oligonucleotide
gguaaagacacugagccaa

SEQ ID NO: 491305 - RNA, 19 nt, Artificial Sequence
  Description of Artificial Sequence: Synthetic oligonucleotide
aggugugcuaacccaucuc

SEQ ID NO: 491306 - RNA, 19 nt, Artificial Sequence
  Description of Artificial Sequence: Synthetic oligonucleotide
agcaucaagaaaccacuuu

SEQ ID NO: 491307 - RNA, 19 nt, Artificial Sequence
  Description of Artificial Sequence: Synthetic oligonucleotide
ucuaccuuccgcgcgcacc

SEQ ID NO: 491308 - RNA, 19 nt, Artificial Sequence
  Description of Artificial Sequence: Synthetic oligonucleotide
ccaauauacagcauuggca

SEQ ID NO: 491309 - RNA, 19 nt, Artificial Sequence
  Description of Artificial Sequence: Synthetic oligonucleotide
acaucaaguuucaaagccu

SEQ ID NO: 491310 - RNA, 19 nt, Artificial Sequence
  Description of Artificial Sequence: Synthetic oligonucleotide
aaugcccguaggcuaucca

SEQ ID NO: 491311 - RNA, 19 nt, Artificial Sequence
  Description of Artificial Sequence: Synthetic oligonucleotide
ugaggcuacuuugucugcc

SEQ ID NO: 491312 - RNA, 19 nt, Artificial Sequence
  Description of Artificial Sequence: Synthetic oligonucleotide
gaaggguccuuugagccac

SEQ ID NO: 491313 - RNA, 19 nt, Artificial Sequence
  Description of Artificial Sequence: Synthetic oligonucleotide
ucggcaugcuucauacacu

SEQ ID NO: 491314 - RNA, 19 nt, Artificial Sequence
  Description of Artificial Sequence: Synthetic oligonucleotide
caaggauauaagggaauac

SEQ ID NO: 491315 - RNA, 19 nt, Artificial Sequence
  Description of Artificial Sequence: Synthetic oligonucleotide
cuaccuuccgcgcgcaccc

SEQ ID NO: 491316 - RNA, 19 nt, Artificial Sequence
  Description of Artificial Sequence: Synthetic oligonucleotide
cacccuuucaucagcugug

SEQ ID NO: 491317 - RNA, 19 nt, Artificial Sequence
  Description of Artificial Sequence: Synthetic oligonucleotide
aggauuaccuggauacaag

SEQ ID NO: 491318 - RNA, 19 nt, Artificial Sequence
  Description of Artificial Sequence: Synthetic oligonucleotide
uucaacaaugguucccauu

SEQ ID NO: 491319 - RNA, 19 nt, Artificial Sequence
  Description of Artificial Sequence: Synthetic oligonucleotide
cuaacaucaugucgcuuuc

SEQ ID NO: 491320 - RNA, 19 nt, Artificial Sequence
  Description of Artificial Sequence: Synthetic oligonucleotide
acguagaagacaaaucgaa

SEQ ID NO: 491321 - RNA, 19 nt, Artificial Sequence
  Description of Artificial Sequence: Synthetic oligonucleotide
gcauuggcaagugacaccc

SEQ ID NO: 491322 - RNA, 19 nt, Artificial Sequence
  Description of Artificial Sequence: Synthetic oligonucleotide
acagagcacucugauacug

SEQ ID NO: 491323 - RNA, 19 nt, Artificial Sequence
  Description of Artificial Sequence: Synthetic oligonucleotide
aucgcuuggucguguucac

SEQ ID NO: 491324 - RNA, 19 nt, Artificial Sequence
  Description of Artificial Sequence: Synthetic oligonucleotide
aguuggcauggaaaggguc

SEQ ID NO: 491325 - RNA, 19 nt, Artificial Sequence
  Description of Artificial Sequence: Synthetic oligonucleotide
cuaagaggcagugagucaa

SEQ ID NO: 491326 - RNA, 19 nt, Artificial Sequence
  Description of Artificial Sequence: Synthetic oligonucleotide
caaagucguaacauuuuaa

SEQ ID NO: 491327 - RNA, 19 nt, Artificial Sequence
  Description of Artificial Sequence: Synthetic oligonucleotide
agacugugaauguauccua

SEQ ID NO: 491328 - RNA, 19 nt, Artificial Sequence
  Description of Artificial Sequence: Synthetic oligonucleotide
uuccgcagaggauccaggu

SEQ ID NO: 491329 - RNA, 19 nt, Artificial Sequence
  Description of Artificial Sequence: Synthetic oligonucleotide
aagaaugcccguaggcuau

SEQ ID NO: 491330 - RNA, 19 nt, Artificial Sequence
  Description of Artificial Sequence: Synthetic oligonucleotide
acccaaguuguucaacaau

SEQ ID NO: 491331 - RNA, 19 nt, Artificial Sequence
  Description of Artificial Sequence: Synthetic oligonucleotide
cauggaugacaaagggauc

SEQ ID NO: 491332 - RNA, 19 nt, Artificial Sequence
  Description of Artificial Sequence: Synthetic oligonucleotide
guaaacaguuggcauggaa

SEQ ID NO: 491333 - RNA, 19 nt, Artificial Sequence
  Description of Artificial Sequence: Synthetic oligonucleotide
gcugucaacauguggugug

SEQ ID NO: 491334 - RNA, 19 nt, Artificial Sequence
  Description of Artificial Sequence: Synthetic oligonucleotide
guucuagaccacugucuug

SEQ ID NO: 491335 - RNA, 19 nt, Artificial Sequence
  Description of Artificial Sequence: Synthetic oligonucleotide
agggaauacugaccuacaa

SEQ ID NO: 491336 - RNA, 19 nt, Artificial Sequence
  Description of Artificial Sequence: Synthetic oligonucleotide
caccgcccggaucagaccc

SEQ ID NO: 491337 - RNA, 19 nt, Artificial Sequence
  Description of Artificial Sequence: Synthetic oligonucleotide
cagaauauaucugcugcca

SEQ ID NO: 491338 - RNA, 19 nt, Artificial Sequence
  Description of Artificial Sequence: Synthetic oligonucleotide
gaccuacaaauauaagcgu

SEQ ID NO: 491339 - RNA, 19 nt, Artificial Sequence
  Description of Artificial Sequence: Synthetic oligonucleotide
aggcacccgacaccuacuc

SEQ ID NO: 491340 - RNA, 19 nt, Artificial Sequence
  Description of Artificial Sequence: Synthetic oligonucleotide
auugaccgaagcccgccga

SEQ ID NO: 491341 - RNA, 19 nt, Artificial Sequence
  Description of Artificial Sequence: Synthetic oligonucleotide
aguuauuggucaaaccaua

SEQ ID NO: 491342 - RNA, 19 nt, Artificial Sequence
  Description of Artificial Sequence: Synthetic oligonucleotide
uugaccgaagcccgccgac

SEQ ID NO: 491343 - RNA, 19 nt, Artificial Sequence
  Description of Artificial Sequence: Synthetic oligonucleotide
aagggaauacugaccuaca

SEQ ID NO: 491344 - RNA, 19 nt, Artificial Sequence
  Description of Artificial Sequence: Synthetic oligonucleotide
acacugagccaaccaauaa

SEQ ID NO: 491345 - RNA, 19 nt, Artificial Sequence
  Description of Artificial Sequence: Synthetic oligonucleotide
cauggaggggagaugaugu

SEQ ID NO: 491346 - RNA, 19 nt, Artificial Sequence
  Description of Artificial Sequence: Synthetic oligonucleotide
ccgcaaaccaagauacagg

SEQ ID NO: 491347 - RNA, 19 nt, Artificial Sequence
  Description of Artificial Sequence: Synthetic oligonucleotide
uggaguuuuaguggaguuu

SEQ ID NO: 491348 - RNA, 19 nt, Artificial Sequence
  Description of Artificial Sequence: Synthetic oligonucleotide
acccgacaccuacucuacc

SEQ ID NO: 491349 - RNA, 19 nt, Artificial Sequence
  Description of Artificial Sequence: Synthetic oligonucleotide
caaugacccagcaucguaa

SEQ ID NO: 491350 - RNA, 19 nt, Artificial Sequence
  Description of Artificial Sequence: Synthetic oligonucleotide
ugcuaacccaucucuuaau

SEQ ID NO: 491351 - RNA, 19 nt, Artificial Sequence
  Description of Artificial Sequence: Synthetic oligonucleotide
ggcguuuucgaaguugccc

SEQ ID NO: 491352 - RNA, 19 nt, Artificial Sequence
  Description of Artificial Sequence: Synthetic oligonucleotide
caacauguggugugauguc

SEQ ID NO: 491353 - RNA, 19 nt, Artificial Sequence
  Description of Artificial Sequence: Synthetic oligonucleotide
cuaagacuagcaaggauau

SEQ ID NO: 491354 - RNA, 19 nt, Artificial Sequence
  Description of Artificial Sequence: Synthetic oligonucleotide
caagcaggcccauaggucu

SEQ ID NO: 491355 - RNA, 19 nt, Artificial Sequence
  Description of Artificial Sequence: Synthetic oligonucleotide
caucuagcugcaagguauc

SEQ ID NO: 491356 - RNA, 19 nt, Artificial Sequence
  Description of Artificial Sequence: Synthetic oligonucleotide
gacgcgcuuccgcagagga

SEQ ID NO: 491357 - RNA, 19 nt, Artificial Sequence
  Description of Artificial Sequence: Synthetic oligonucleotide
agcagaauagguggacgca

SEQ ID NO: 491358 - RNA, 19 nt, Artificial Sequence
  Description of Artificial Sequence: Synthetic oligonucleotide
cuuggucguguucacucuc

SEQ ID NO: 491359 - RNA, 19 nt, Artificial Sequence
  Description of Artificial Sequence: Synthetic oligonucleotide
cgaaucguagcaauucuug

SEQ ID NO: 491360 - RNA, 19 nt, Artificial Sequence
  Description of Artificial Sequence: Synthetic oligonucleotide
cugcaagguaucggcaugc

SEQ ID NO: 491361 - RNA, 19 nt, Artificial Sequence
  Description of Artificial Sequence: Synthetic oligonucleotide
gcguuuucgaaguugccca

SEQ ID NO: 491362 - RNA, 19 nt, Artificial Sequence
  Description of Artificial Sequence: Synthetic oligonucleotide
cacaucuuaaaaucacagu

SEQ ID NO: 491363 - RNA, 19 nt, Artificial Sequence
  Description of Artificial Sequence: Synthetic oligonucleotide
cuuuguccaguuugcguga

SEQ ID NO: 491364 - RNA, 19 nt, Artificial Sequence
  Description of Artificial Sequence: Synthetic oligonucleotide
gaguuauuggucaaaccau

SEQ ID NO: 491365 - RNA, 19 nt, Artificial Sequence
  Description of Artificial Sequence: Synthetic oligonucleotide
gacccaaguuguucaacaa

SEQ ID NO: 491366 - RNA, 19 nt, Artificial Sequence
  Description of Artificial Sequence: Synthetic oligonucleotide
ggccgauugaccgaagccc

SEQ ID NO: 491367 - RNA, 19 nt, Artificial Sequence
  Description of Artificial Sequence: Synthetic oligonucleotide
guaugcacaucaaagucgu

SEQ ID NO: 491368 - RNA, 19 nt, Artificial Sequence
  Description of Artificial Sequence: Synthetic oligonucleotide
ugguaauccaaagccucau

SEQ ID NO: 491369 - RNA, 19 nt, Artificial Sequence
  Description of Artificial Sequence: Synthetic oligonucleotide
cagggugcgauuauccaaa

SEQ ID NO: 491370 - RNA, 19 nt, Artificial Sequence
  Description of Artificial Sequence: Synthetic oligonucleotide
ugcagacaugacccaaguu

SEQ ID NO: 491371 - RNA, 19 nt, Artificial Sequence
  Description of Artificial Sequence: Synthetic oligonucleotide
gagccguguggaaauaguc

SEQ ID NO: 491372 - RNA, 19 nt, Artificial Sequence
  Description of Artificial Sequence: Synthetic oligonucleotide
agccugccugugguaaucc

SEQ ID NO: 491373 - RNA, 19 nt, Artificial Sequence
  Description of Artificial Sequence: Synthetic oligonucleotide
agcacagagcuugcuaaga

SEQ ID NO: 491374 - RNA, 19 nt, Artificial Sequence
  Description of Artificial Sequence: Synthetic oligonucleotide
cguaggcuauccaagcagg

SEQ ID NO: 491375 - RNA, 19 nt, Artificial Sequence
  Description of Artificial Sequence: Synthetic oligonucleotide
acucuuuaucgaggacugg

SEQ ID NO: 491376 - RNA, 19 nt, Artificial Sequence
  Description of Artificial Sequence: Synthetic oligonucleotide
augacccagcaucguaaca

SEQ ID NO: 491377 - RNA, 19 nt, Artificial Sequence
  Description of Artificial Sequence: Synthetic oligonucleotide
caaagccucuuuguagcug

SEQ ID NO: 491378 - RNA, 19 nt, Artificial Sequence
  Description of Artificial Sequence: Synthetic oligonucleotide
uaucggcaugcuucauaca

SEQ ID NO: 491379 - RNA, 19 nt, Artificial Sequence
  Description of Artificial Sequence: Synthetic oligonucleotide
agggugcgauuauccaaag

SEQ ID NO: 491380 - RNA, 19 nt, Artificial Sequence
  Description of Artificial Sequence: Synthetic oligonucleotide
gccugugguaauccaaagc

SEQ ID NO: 491381 - RNA, 19 nt, Artificial Sequence
  Description of Artificial Sequence: Synthetic oligonucleotide
auacugaccuacaaauaua

SEQ ID NO: 491382 - RNA, 19 nt, Artificial Sequence
  Description of Artificial Sequence: Synthetic oligonucleotide
ucgaggacugggacauuuc

SEQ ID NO: 491383 - RNA, 19 nt, Artificial Sequence
  Description of Artificial Sequence: Synthetic oligonucleotide
auaagggaauacugaccua

SEQ ID NO: 491384 - RNA, 19 nt, Artificial Sequence
  Description of Artificial Sequence: Synthetic oligonucleotide
ccuaagaccaagagccgug

SEQ ID NO: 491385 - RNA, 19 nt, Artificial Sequence
  Description of Artificial Sequence: Synthetic oligonucleotide
cagaguuccuaugugcaca

SEQ ID NO: 491386 - RNA, 19 nt, Artificial Sequence
  Description of Artificial Sequence: Synthetic oligonucleotide
gcgauuauccaaagcauca

SEQ ID NO: 491387 - RNA, 19 nt, Artificial Sequence
  Description of Artificial Sequence: Synthetic oligonucleotide
gauacaaguccaccaguuu

SEQ ID NO: 491388 - RNA, 19 nt, Artificial Sequence
  Description of Artificial Sequence: Synthetic oligonucleotide
accgaagcccgccgaccac

SEQ ID NO: 491389 - RNA, 19 nt, Artificial Sequence
  Description of Artificial Sequence: Synthetic oligonucleotide
gacgcauucugagggauua

SEQ ID NO: 491390 - RNA, 19 nt, Artificial Sequence
  Description of Artificial Sequence: Synthetic oligonucleotide
cugccaaggugugcuaacc

SEQ ID NO: 491391 - RNA, 19 nt, Artificial Sequence
  Description of Artificial Sequence: Synthetic oligonucleotide
uccgcagaggauccagguu

SEQ ID NO: 491392 - RNA, 19 nt, Artificial Sequence
  Description of Artificial Sequence: Synthetic oligonucleotide
accucauucccaauggcuu

SEQ ID NO: 491393 - RNA, 19 nt, Artificial Sequence
  Description of Artificial Sequence: Synthetic oligonucleotide
caucucgccuaagaccaag

SEQ ID NO: 491394 - RNA, 19 nt, Artificial Sequence
  Description of Artificial Sequence: Synthetic oligonucleotide
gaccgaagcccgccgacca

SEQ ID NO: 491395 - RNA, 19 nt, Artificial Sequence
  Description of Artificial Sequence: Synthetic oligonucleotide
caccuacucuaccuuccgc

SEQ ID NO: 491396 - RNA, 19 nt, Artificial Sequence
  Description of Artificial Sequence: Synthetic oligonucleotide
ccuacucuaccuuccgcgc

SEQ ID NO: 491397 - RNA, 19 nt, Artificial Sequence
  Description of Artificial Sequence: Synthetic oligonucleotide
gcauaguggcaucuagcug

SEQ ID NO: 491398 - RNA, 19 nt, Artificial Sequence
  Description of Artificial Sequence: Synthetic oligonucleotide
gccgauugaccgaagcccg

SEQ ID NO: 491399 - RNA, 19 nt, Artificial Sequence
  Description of Artificial Sequence: Synthetic oligonucleotide
ugaccgaagcccgccgacc

SEQ ID NO: 491400 - RNA, 19 nt, Artificial Sequence
  Description of Artificial Sequence: Synthetic oligonucleotide
ugccggacgcgcuuccgca

SEQ ID NO: 491401 - RNA, 19 nt, Artificial Sequence
  Description of Artificial Sequence: Synthetic oligonucleotide
uggaggggagaugauguuu

SEQ ID NO: 491402 - RNA, 19 nt, Artificial Sequence
  Description of Artificial Sequence: Synthetic oligonucleotide
cacccgacaccuacucuac

SEQ ID NO: 491403 - RNA, 19 nt, Artificial Sequence
  Description of Artificial Sequence: Synthetic oligonucleotide
agugcaugggcagcucugu

SEQ ID NO: 491404 - RNA, 19 nt, Artificial Sequence
  Description of Artificial Sequence: Synthetic oligonucleotide
uuccgcgcgcaccccgggg

SEQ ID NO: 491405 - RNA, 19 nt, Artificial Sequence
  Description of Artificial Sequence: Synthetic oligonucleotide
gugaggcuacuuugucugc

SEQ ID NO: 491406 - RNA, 19 nt, Artificial Sequence
  Description of Artificial Sequence: Synthetic oligonucleotide
caaauacgaaucguagcaa

SEQ ID NO: 491407 - RNA, 19 nt, Artificial Sequence
  Description of Artificial Sequence: Synthetic oligonucleotide
gaguuaggugcuguggucu

SEQ ID NO: 491408 - RNA, 19 nt, Artificial Sequence
  Description of Artificial Sequence: Synthetic oligonucleotide
uaguaacaucccaccgcaa

SEQ ID NO: 491409 - RNA, 19 nt, Artificial Sequence
  Description of Artificial Sequence: Synthetic oligonucleotide
aggcuacuuugucugccca

SEQ ID NO: 491410 - RNA, 19 nt, Artificial Sequence
  Description of Artificial Sequence: Synthetic oligonucleotide
ccagcaucguaacagaaaa

SEQ ID NO: 491411 - RNA, 19 nt, Artificial Sequence
  Description of Artificial Sequence: Synthetic oligonucleotide
gugguaauccaaagccuca

SEQ ID NO: 491412 - RNA, 19 nt, Artificial Sequence
  Description of Artificial Sequence: Synthetic oligonucleotide
cacggcguuuucgaaguug

SEQ ID NO: 491413 - RNA, 19 nt, Artificial Sequence
  Description of Artificial Sequence: Synthetic oligonucleotide
agagccguguggaaauagu

SEQ ID NO: 491414 - RNA, 19 nt, Artificial Sequence
  Description of Artificial Sequence: Synthetic oligonucleotide
acugugcugugagguaaag

SEQ ID NO: 491415 - RNA, 19 nt, Artificial Sequence
  Description of Artificial Sequence: Synthetic oligonucleotide
gaaugcccguaggcuaucc

SEQ ID NO: 491416 - RNA, 19 nt, Artificial Sequence
  Description of Artificial Sequence: Synthetic oligonucleotide
caacauagaaauguaguuu

SEQ ID NO: 491417 - RNA, 19 nt, Artificial Sequence
  Description of Artificial Sequence: Synthetic oligonucleotide
aagaaucguucagccaguu

SEQ ID NO: 491418 - RNA, 19 nt, Artificial Sequence
  Description of Artificial Sequence: Synthetic oligonucleotide
ccgcagaggauccagguuc

SEQ ID NO: 491419 - RNA, 19 nt, Artificial Sequence
  Description of Artificial Sequence: Synthetic oligonucleotide
gggccgauugaccgaagcc

SEQ ID NO: 491420 - RNA, 19 nt, Artificial Sequence
  Description of Artificial Sequence: Synthetic oligonucleotide
caggauuaccuggauacaa

SEQ ID NO: 491421 - RNA, 19 nt, Artificial Sequence
  Description of Artificial Sequence: Synthetic oligonucleotide
ugucaacuguuaccucauu

SEQ ID NO: 491422 - RNA, 19 nt, Artificial Sequence
  Description of Artificial Sequence: Synthetic oligonucleotide
cccacguagaagacaaauc

SEQ ID NO: 491423 - RNA, 19 nt, Artificial Sequence
  Description of Artificial Sequence: Synthetic oligonucleotide
uggacgcauucugagggau

SEQ ID NO: 491424 - RNA, 19 nt, Artificial Sequence
  Description of Artificial Sequence: Synthetic oligonucleotide
cauccagauucucuugcaa

SEQ ID NO: 491425 - RNA, 19 nt, Artificial Sequence
  Description of Artificial Sequence: Synthetic oligonucleotide
ugcaagguaucggcaugcu

SEQ ID NO: 491426 - RNA, 19 nt, Artificial Sequence
  Description of Artificial Sequence: Synthetic oligonucleotide
agaaugcccguaggcuauc

SEQ ID NO: 491427 - RNA, 19 nt, Artificial Sequence
  Description of Artificial Sequence: Synthetic oligonucleotide
aucgaggacugggacauuu

SEQ ID NO: 491428 - RNA, 19 nt, Artificial Sequence
  Description of Artificial Sequence: Synthetic oligonucleotide
cugugguaauccaaagccu

SEQ ID NO: 491429 - RNA, 19 nt, Artificial Sequence
  Description of Artificial Sequence: Synthetic oligonucleotide
gccaaggugugcuaaccca

SEQ ID NO: 491430 - RNA, 19 nt, Artificial Sequence
  Description of Artificial Sequence: Synthetic oligonucleotide
agaccacugucuugaguua

SEQ ID NO: 491431 - RNA, 19 nt, Artificial Sequence
  Description of Artificial Sequence: Synthetic oligonucleotide
cgcaaaccaagauacagga

SEQ ID NO: 491432 - RNA, 19 nt, Artificial Sequence
  Description of Artificial Sequence: Synthetic oligonucleotide
ucaucucgccuaagaccaa

SEQ ID NO: 491433 - RNA, 19 nt, Artificial Sequence
  Description of Artificial Sequence: Synthetic oligonucleotide
gagccuucuguuaaucggu

SEQ ID NO: 491434 - RNA, 19 nt, Artificial Sequence
  Description of Artificial Sequence: Synthetic oligonucleotide
uaagacuagcaaggauaua

SEQ ID NO: 491435 - RNA, 19 nt, Artificial Sequence
  Description of Artificial Sequence: Synthetic oligonucleotide
ggaaggguccuuugagcca

SEQ ID NO: 491436 - RNA, 19 nt, Artificial Sequence
  Description of Artificial Sequence: Synthetic oligonucleotide
gguggguucuagaccacug

SEQ ID NO: 491437 - RNA, 19 nt, Artificial Sequence
  Description of Artificial Sequence: Synthetic oligonucleotide
gcaagugacacccuuucau

SEQ ID NO: 491438 - RNA, 19 nt, Artificial Sequence
  Description of Artificial Sequence: Synthetic oligonucleotide
cguguggaaauaguccacg

SEQ ID NO: 491439 - RNA, 19 nt, Artificial Sequence
  Description of Artificial Sequence: Synthetic oligonucleotide
acgaaucguagcaauucuu

SEQ ID NO: 491440 - RNA, 19 nt, Artificial Sequence
  Description of Artificial Sequence: Synthetic oligonucleotide
caugacccaaguuguucaa

SEQ ID NO: 491441 - RNA, 19 nt, Artificial Sequence
  Description of Artificial Sequence: Synthetic oligonucleotide
aucguucagccaguuuaga

SEQ ID NO: 491442 - RNA, 19 nt, Artificial Sequence
  Description of Artificial Sequence: Synthetic oligonucleotide
ccagaguuccuaugugcac

SEQ ID NO: 491443 - RNA, 19 nt, Artificial Sequence
  Description of Artificial Sequence: Synthetic oligonucleotide
gggugcgauuauccaaagc

SEQ ID NO: 491444 - RNA, 19 nt, Artificial Sequence
  Description of Artificial Sequence: Synthetic oligonucleotide
cugccggacgcgcuuccgc

SEQ ID NO: 491445 - RNA, 19 nt, Artificial Sequence
  Description of Artificial Sequence: Synthetic oligonucleotide
gguaucggcaugcuucaua

SEQ ID NO: 491446 - RNA, 19 nt, Artificial Sequence
  Description of Artificial Sequence: Synthetic oligonucleotide
ccggaucagaccccgcgcg

SEQ ID NO: 491447 - RNA, 19 nt, Artificial Sequence
  Description of Artificial Sequence: Synthetic oligonucleotide
auguauccuauagcagaau

SEQ ID NO: 491448 - RNA, 19 nt, Artificial Sequence
  Description of Artificial Sequence: Synthetic oligonucleotide
caucuacugucccaggaau

SEQ ID NO: 491449 - RNA, 19 nt, Artificial Sequence
  Description of Artificial Sequence: Synthetic oligonucleotide
ggggccgauugaccgaagc

SEQ ID NO: 491450 - RNA, 19 nt, Artificial Sequence
  Description of Artificial Sequence: Synthetic oligonucleotide
ggucugacauagaugucuc

SEQ ID NO: 491451 - RNA, 19 nt, Artificial Sequence
  Description of Artificial Sequence: Synthetic oligonucleotide
ggacucaccuuaggaagug

SEQ ID NO: 491452 - RNA, 19 nt, Artificial Sequence
  Description of Artificial Sequence: Synthetic oligonucleotide
ggaguuuuaguggaguuuu

SEQ ID NO: 491453 - RNA, 19 nt, Artificial Sequence
  Description of Artificial Sequence: Synthetic oligonucleotide
acugccggacgcgcuuccg

SEQ ID NO: 491454 - RNA, 19 nt, Artificial Sequence
  Description of Artificial Sequence: Synthetic oligonucleotide
ggucguguucacucuccac

SEQ ID NO: 491455 - RNA, 19 nt, Artificial Sequence
  Description of Artificial Sequence: Synthetic oligonucleotide
gcuguggucugacauagau

SEQ ID NO: 491456 - RNA, 19 nt, Artificial Sequence
  Description of Artificial Sequence: Synthetic oligonucleotide
guggguucuagaccacugu

SEQ ID NO: 491457 - RNA, 19 nt, Artificial Sequence
  Description of Artificial Sequence: Synthetic oligonucleotide
acgcauucugagggauuag

SEQ ID NO: 491458 - RNA, 19 nt, Artificial Sequence
  Description of Artificial Sequence: Synthetic oligonucleotide
cuacuuugucugcccaaaa

SEQ ID NO: 491459 - RNA, 19 nt, Artificial Sequence
  Description of Artificial Sequence: Synthetic oligonucleotide
accgcccggaucagacccc

SEQ ID NO: 491460 - RNA, 19 nt, Artificial Sequence
  Description of Artificial Sequence: Synthetic oligonucleotide
guacuauguauaacuacuu

SEQ ID NO: 491461 - RNA, 19 nt, Artificial Sequence
  Description of Artificial Sequence: Synthetic oligonucleotide
gcacccgacaccuacucua

SEQ ID NO: 491462 - RNA, 19 nt, Artificial Sequence
  Description of Artificial Sequence: Synthetic oligonucleotide
gcaucguaacagaaaaugu

SEQ ID NO: 491463 - RNA, 19 nt, Artificial Sequence
  Description of Artificial Sequence: Synthetic oligonucleotide
guccaguuugcgugaccuc

SEQ ID NO: 491464 - RNA, 19 nt, Artificial Sequence
  Description of Artificial Sequence: Synthetic oligonucleotide
cuagaccacugucuugagu

SEQ ID NO: 491465 - RNA, 19 nt, Artificial Sequence
  Description of Artificial Sequence: Synthetic oligonucleotide
ccaccagaguuccuaugug

SEQ ID NO: 491466 - RNA, 19 nt, Artificial Sequence
  Description of Artificial Sequence: Synthetic oligonucleotide
gugcgauuauccaaagcau

SEQ ID NO: 491467 - RNA, 19 nt, Artificial Sequence
  Description of Artificial Sequence: Synthetic oligonucleotide
ccguguggaaauaguccac

SEQ ID NO: 491468 - RNA, 19 nt, Artificial Sequence
  Description of Artificial Sequence: Synthetic oligonucleotide
caccgcaaaccaagauaca

SEQ ID NO: 491469 - RNA, 19 nt, Artificial Sequence
  Description of Artificial Sequence: Synthetic oligonucleotide
augugucaucucgccuaag

SEQ ID NO: 491470 - RNA, 19 nt, Artificial Sequence
  Description of Artificial Sequence: Synthetic oligonucleotide
caccccggggccgauugac

SEQ ID NO: 491471 - RNA, 19 nt, Artificial Sequence
  Description of Artificial Sequence: Synthetic oligonucleotide
cuggaguuuuaguggaguu

SEQ ID NO: 491472 - RNA, 19 nt, Artificial Sequence
  Description of Artificial Sequence: Synthetic oligonucleotide
ccgauugaccgaagcccgc

SEQ ID NO: 491473 - RNA, 19 nt, Artificial Sequence
  Description of Artificial Sequence: Synthetic oligonucleotide
cuaagaccaagagccgugu

SEQ ID NO: 491474 - RNA, 19 nt, Artificial Sequence
  Description of Artificial Sequence: Synthetic oligonucleotide
gcgugaccucagugcaugg

SEQ ID NO: 491475 - RNA, 19 nt, Artificial Sequence
  Description of Artificial Sequence: Synthetic oligonucleotide
gcuaacccaucucuuaauu

SEQ ID NO: 491476 - RNA, 19 nt, Artificial Sequence
  Description of Artificial Sequence: Synthetic oligonucleotide
cccagcaucguaacagaaa

SEQ ID NO: 491477 - RNA, 19 nt, Artificial Sequence
  Description of Artificial Sequence: Synthetic oligonucleotide
ggaaauaguccacggcguu

SEQ ID NO: 491478 - RNA, 19 nt, Artificial Sequence
  Description of Artificial Sequence: Synthetic oligonucleotide
aucccaccgcaaaccaaga

SEQ ID NO: 491479 - RNA, 19 nt, Artificial Sequence
  Description of Artificial Sequence: Synthetic oligonucleotide
guggucugacauagauguc

SEQ ID NO: 491480 - RNA, 19 nt, Artificial Sequence
  Description of Artificial Sequence: Synthetic oligonucleotide
ggcuauccaagcaggccca

SEQ ID NO: 491481 - RNA, 19 nt, Artificial Sequence
  Description of Artificial Sequence: Synthetic oligonucleotide
ccagguucauggccacgag

SEQ ID NO: 491482 - RNA, 19 nt, Artificial Sequence
  Description of Artificial Sequence: Synthetic oligonucleotide
cgcgcuuccgcagaggauc

SEQ ID NO: 491483 - RNA, 19 nt, Artificial Sequence
  Description of Artificial Sequence: Synthetic oligonucleotide
cacuuucauccuucaugua

SEQ ID NO: 491484 - RNA, 19 nt, Artificial Sequence
  Description of Artificial Sequence: Synthetic oligonucleotide
cgaacucuuuaucgaggac

SEQ ID NO: 491485 - RNA, 19 nt, Artificial Sequence
  Description of Artificial Sequence: Synthetic oligonucleotide
aaggguccuuugagccacu

SEQ ID NO: 491486 - RNA, 19 nt, Artificial Sequence
  Description of Artificial Sequence: Synthetic oligonucleotide
cgacaccuacucuaccuuc

SEQ ID NO: 491487 - RNA, 19 nt, Artificial Sequence
  Description of Artificial Sequence: Synthetic oligonucleotide
cgauugaccgaagcccgcc

SEQ ID NO: 491488 - RNA, 19 nt, Artificial Sequence
  Description of Artificial Sequence: Synthetic oligonucleotide
gccggacgcgcuuccgcag

SEQ ID NO: 491489 - RNA, 19 nt, Artificial Sequence
  Description of Artificial Sequence: Synthetic oligonucleotide
gcuuggucguguucacucu

SEQ ID NO: 491490 - RNA, 19 nt, Artificial Sequence
  Description of Artificial Sequence: Synthetic oligonucleotide
cccgacaccuacucuaccu

SEQ ID NO: 491491 - RNA, 19 nt, Artificial Sequence
  Description of Artificial Sequence: Synthetic oligonucleotide
ccaccgcccggaucagacc

SEQ ID NO: 491492 - RNA, 19 nt, Artificial Sequence
  Description of Artificial Sequence: Synthetic oligonucleotide
agguaucggcaugcuucau

SEQ ID NO: 491493 - RNA, 19 nt, Artificial Sequence
  Description of Artificial Sequence: Synthetic oligonucleotide
gccuaagaccaagagccgu

SEQ ID NO: 491494 - RNA, 19 nt, Artificial Sequence
  Description of Artificial Sequence: Synthetic oligonucleotide
caguuugcgugaccucagu

SEQ ID NO: 491495 - RNA, 19 nt, Artificial Sequence
  Description of Artificial Sequence: Synthetic oligonucleotide
uaguggcaucuagcugcaa

SEQ ID NO: 491496 - RNA, 19 nt, Artificial Sequence
  Description of Artificial Sequence: Synthetic oligonucleotide
gguggccagggugcgauua

SEQ ID NO: 491497 - RNA, 19 nt, Artificial Sequence
  Description of Artificial Sequence: Synthetic oligonucleotide
uaucgaggacugggacauu

SEQ ID NO: 491498 - RNA, 19 nt, Artificial Sequence
  Description of Artificial Sequence: Synthetic oligonucleotide
ccaaggugugcuaacccau

SEQ ID NO: 491499 - RNA, 19 nt, Artificial Sequence
  Description of Artificial Sequence: Synthetic oligonucleotide
cggaucagaccccgcgcgc

SEQ ID NO: 491500 - RNA, 19 nt, Artificial Sequence
  Description of Artificial Sequence: Synthetic oligonucleotide
ggugcaagcccugcuuccu

SEQ ID NO: 491501 - RNA, 19 nt, Artificial Sequence
  Description of Artificial Sequence: Synthetic oligonucleotide
gugugcuaacccaucucuu

SEQ ID NO: 491502 - RNA, 19 nt, Artificial Sequence
  Description of Artificial Sequence: Synthetic oligonucleotide
caggcacccgacaccuacu

SEQ ID NO: 491503 - RNA, 19 nt, Artificial Sequence
  Description of Artificial Sequence: Synthetic oligonucleotide
cggcguuuucgaaguugcc

SEQ ID NO: 491504 - RNA, 19 nt, Artificial Sequence
  Description of Artificial Sequence: Synthetic oligonucleotide
agguggccagggugcgauu

SEQ ID NO: 491505 - RNA, 19 nt, Artificial Sequence
  Description of Artificial Sequence: Synthetic oligonucleotide
acgcgcuuccgcagaggau

SEQ ID NO: 491506 - RNA, 19 nt, Artificial Sequence
  Description of Artificial Sequence: Synthetic oligonucleotide
ccaaugugguagcuuugcu

SEQ ID NO: 491507 - RNA, 19 nt, Artificial Sequence
  Description of Artificial Sequence: Synthetic oligonucleotide
cggggcaaugcucagggcu

SEQ ID NO: 491508 - RNA, 19 nt, Artificial Sequence
  Description of Artificial Sequence: Synthetic oligonucleotide
ggcacccgacaccuacucu

SEQ ID NO: 491509 - RNA, 19 nt, Artificial Sequence
  Description of Artificial Sequence: Synthetic oligonucleotide
cgcaccccggggccgauug

SEQ ID NO: 491510 - RNA, 19 nt, Artificial Sequence
  Description of Artificial Sequence: Synthetic oligonucleotide
ccgcccggaucagaccccg

SEQ ID NO: 491511 - RNA, 19 nt, Artificial Sequence
  Description of Artificial Sequence: Synthetic oligonucleotide
ccucauucccaauggcuuu

SEQ ID NO: 491512 - RNA, 19 nt, Artificial Sequence
  Description of Artificial Sequence: Synthetic oligonucleotide
cucuaacaucaugucgcuu

SEQ ID NO: 491513 - RNA, 19 nt, Artificial Sequence
  Description of Artificial Sequence: Synthetic oligonucleotide
cggacgcgcuuccgcagag

SEQ ID NO: 491514 - RNA, 19 nt, Artificial Sequence
  Description of Artificial Sequence: Synthetic oligonucleotide
ggguccuuugagccacuuu

SEQ ID NO: 491515 - RNA, 19 nt, Artificial Sequence
  Description of Artificial Sequence: Synthetic oligonucleotide
ccgacaccuacucuaccuu

SEQ ID NO: 491516 - RNA, 19 nt, Artificial Sequence
  Description of Artificial Sequence: Synthetic oligonucleotide
ggacgcauucugagggauu

SEQ ID NO: 491517 - RNA, 19 nt, Artificial Sequence
  Description of Artificial Sequence: Synthetic oligonucleotide
gcaccccggggccgauuga

SEQ ID NO: 491518 - RNA, 19 nt, Artificial Sequence
  Description of Artificial Sequence: Synthetic oligonucleotide
cguuuucgaaguugcccau

SEQ ID NO: 491519 - RNA, 19 nt, Artificial Sequence
  Description of Artificial Sequence: Synthetic oligonucleotide
gcuauccaagcaggcccau

SEQ ID NO: 491520 - RNA, 19 nt, Artificial Sequence
  Description of Artificial Sequence: Synthetic oligonucleotide
cgcccggaucagaccccgc

SEQ ID NO: 491521 - RNA, 19 nt, Artificial Sequence
  Description of Artificial Sequence: Synthetic oligonucleotide
ccacggcguuuucgaaguu

SEQ ID NO: 491522 - RNA, 19 nt, Artificial Sequence
  Description of Artificial Sequence: Synthetic oligonucleotide
uuuagaaagaaugauaugc

SEQ ID NO: 491523 - RNA, 19 nt, Artificial Sequence
  Description of Artificial Sequence: Synthetic oligonucleotide
aaggccaucaaucguaagc

SEQ ID NO: 491524 - RNA, 19 nt, Artificial Sequence
  Description of Artificial Sequence: Synthetic oligonucleotide
agaaccaauacuuauagug

SEQ ID NO: 491525 - RNA, 19 nt, Artificial Sequence
  Description of Artificial Sequence: Synthetic oligonucleotide
auacuuauagugcugggcc

SEQ ID NO: 491526 - RNA, 19 nt, Artificial Sequence
  Description of Artificial Sequence: Synthetic oligonucleotide
auucuagggauauaauucc

SEQ ID NO: 491527 - RNA, 19 nt, Artificial Sequence
  Description of Artificial Sequence: Synthetic oligonucleotide
acuaguauagcuaggaagc

SEQ ID NO: 491528 - RNA, 19 nt, Artificial Sequence
  Description of Artificial Sequence: Synthetic oligonucleotide
aauacuuauagugcugggc

SEQ ID NO: 491529 - RNA, 19 nt, Artificial Sequence
  Description of Artificial Sequence: Synthetic oligonucleotide
aagguuagcagguugaaga

SEQ ID NO: 491530 - RNA, 19 nt, Artificial Sequence
  Description of Artificial Sequence: Synthetic oligonucleotide
ucucuagacaauuuugagg

SEQ ID NO: 491531 - RNA, 19 nt, Artificial Sequence
  Description of Artificial Sequence: Synthetic oligonucleotide
auauaauuccaucaggaca

SEQ ID NO: 491532 - RNA, 19 nt, Artificial Sequence
  Description of Artificial Sequence: Synthetic oligonucleotide
gacuaguauagcuaggaag

SEQ ID NO: 491533 - RNA, 19 nt, Artificial Sequence
  Description of Artificial Sequence: Synthetic oligonucleotide
auaggaguaagguacuagg

SEQ ID NO: 491534 - RNA, 19 nt, Artificial Sequence
  Description of Artificial Sequence: Synthetic oligonucleotide
ugugcgagggcauugcugg

SEQ ID NO: 491535 - RNA, 19 nt, Artificial Sequence
  Description of Artificial Sequence: Synthetic oligonucleotide
agucgaaacagacagccag

SEQ ID NO: 491536 - RNA, 19 nt, Artificial Sequence
  Description of Artificial Sequence: Synthetic oligonucleotide
gaugggaugcaauucuagg

SEQ ID NO: 491537 - RNA, 19 nt, Artificial Sequence
  Description of Artificial Sequence: Synthetic oligonucleotide
caauaaggucaguagaucc

SEQ ID NO: 491538 - RNA, 19 nt, Artificial Sequence
  Description of Artificial Sequence: Synthetic oligonucleotide
cauccuugcaccuggaucc

SEQ ID NO: 491539 - RNA, 19 nt, Artificial Sequence
  Description of Artificial Sequence: Synthetic oligonucleotide
aguuaguuccagcaguagg

SEQ ID NO: 491540 - RNA, 19 nt, Artificial Sequence
  Description of Artificial Sequence: Synthetic oligonucleotide
cucuagacaauuuugagga

SEQ ID NO: 491541 - RNA, 19 nt, Artificial Sequence
  Description of Artificial Sequence: Synthetic oligonucleotide
uugccaguaaugauaauca

SEQ ID NO: 491542 - RNA, 19 nt, Artificial Sequence
  Description of Artificial Sequence: Synthetic oligonucleotide
agggcaauaagcaacuccc

SEQ ID NO: 491543 - RNA, 19 nt, Artificial Sequence
  Description of Artificial Sequence: Synthetic oligonucleotide
gauauaauuccaucaggac

SEQ ID NO: 491544 - RNA, 19 nt, Artificial Sequence
  Description of Artificial Sequence: Synthetic oligonucleotide
ugagucgaaacagacagcc

SEQ ID NO: 491545 - RNA, 19 nt, Artificial Sequence
  Description of Artificial Sequence: Synthetic oligonucleotide
guuaguuccagcaguaggg

SEQ ID NO: 491546 - RNA, 19 nt, Artificial Sequence
  Description of Artificial Sequence: Synthetic oligonucleotide
uucuaucucuguccaaugg

SEQ ID NO: 491547 - RNA, 19 nt, Artificial Sequence
  Description of Artificial Sequence: Synthetic oligonucleotide
gaaggggugucgcagagag

SEQ ID NO: 491548 - RNA, 19 nt, Artificial Sequence
  Description of Artificial Sequence: Synthetic oligonucleotide
uuauaguugccaguaauga

SEQ ID NO: 491549 - RNA, 19 nt, Artificial Sequence
  Description of Artificial Sequence: Synthetic oligonucleotide
aguagauccagacccuggg

SEQ ID NO: 491550 - RNA, 19 nt, Artificial Sequence
  Description of Artificial Sequence: Synthetic oligonucleotide
guagacagcggccacaccc

SEQ ID NO: 491551 - RNA, 19 nt, Artificial Sequence
  Description of Artificial Sequence: Synthetic oligonucleotide
ccauauaggaguaagguac

SEQ ID NO: 491552 - RNA, 19 nt, Artificial Sequence
  Description of Artificial Sequence: Synthetic oligonucleotide
uggacuccuauccugaagu

SEQ ID NO: 491553 - RNA, 19 nt, Artificial Sequence
  Description of Artificial Sequence: Synthetic oligonucleotide
aauucuaucucuguccaau

SEQ ID NO: 491554 - RNA, 19 nt, Artificial Sequence
  Description of Artificial Sequence: Synthetic oligonucleotide
aguauagcuaggaagccgg

SEQ ID NO: 491555 - RNA, 19 nt, Artificial Sequence
  Description of Artificial Sequence: Synthetic oligonucleotide
caaacguguagacagcggc

SEQ ID NO: 491556 - RNA, 19 nt, Artificial Sequence
  Description of Artificial Sequence: Synthetic oligonucleotide
uaggaguaagguacuaggc

SEQ ID NO: 491557 - RNA, 19 nt, Artificial Sequence
  Description of Artificial Sequence: Synthetic oligonucleotide
auaaucaggaccuguagua

SEQ ID NO: 491558 - RNA, 19 nt, Artificial Sequence
  Description of Artificial Sequence: Synthetic oligonucleotide
aaugauaaucaggaccugu

SEQ ID NO: 491559 - RNA, 19 nt, Artificial Sequence
  Description of Artificial Sequence: Synthetic oligonucleotide
aauaaggucaguagaucca

SEQ ID NO: 491560 - RNA, 19 nt, Artificial Sequence
  Description of Artificial Sequence: Synthetic oligonucleotide
agaggagacagcuguguuc

SEQ ID NO: 491561 - RNA, 19 nt, Artificial Sequence
  Description of Artificial Sequence: Synthetic oligonucleotide
caugaaacggguacuuggc

SEQ ID NO: 491562 - RNA, 19 nt, Artificial Sequence
  Description of Artificial Sequence: Synthetic oligonucleotide
gacggaagaggccauauga

SEQ ID NO: 491563 - RNA, 19 nt, Artificial Sequence
  Description of Artificial Sequence: Synthetic oligonucleotide
uguguucgcacccaguuua

SEQ ID NO: 491564 - RNA, 19 nt, Artificial Sequence
  Description of Artificial Sequence: Synthetic oligonucleotide
uuccucuacccacuggcgg

SEQ ID NO: 491565 - RNA, 19 nt, Artificial Sequence
  Description of Artificial Sequence: Synthetic oligonucleotide
ugaacaggcgaugagcccc

SEQ ID NO: 491566 - RNA, 19 nt, Artificial Sequence
  Description of Artificial Sequence: Synthetic oligonucleotide
aguuauaguugccaguaau

SEQ ID NO: 491567 - RNA, 19 nt, Artificial Sequence
  Description of Artificial Sequence: Synthetic oligonucleotide
agacagccagcgcacaagc

SEQ ID NO: 491568 - RNA, 19 nt, Artificial Sequence
  Description of Artificial Sequence: Synthetic oligonucleotide
uuuccagguuuguacauga

SEQ ID NO: 491569 - RNA, 19 nt, Artificial Sequence
  Description of Artificial Sequence: Synthetic oligonucleotide
aguaauaccugaguguaga

SEQ ID NO: 491570 - RNA, 19 nt, Artificial Sequence
  Description of Artificial Sequence: Synthetic oligonucleotide
guagggauagcauggucag

SEQ ID NO: 491571 - RNA, 19 nt, Artificial Sequence
  Description of Artificial Sequence: Synthetic oligonucleotide
guguaugugggccaagggc

SEQ ID NO: 491572 - RNA, 19 nt, Artificial Sequence
  Description of Artificial Sequence: Synthetic oligonucleotide
guuauaguugccaguaaug

SEQ ID NO: 491573 - RNA, 19 nt, Artificial Sequence
  Description of Artificial Sequence: Synthetic oligonucleotide
gagacguagcaccaggcug

SEQ ID NO: 491574 - RNA, 19 nt, Artificial Sequence
  Description of Artificial Sequence: Synthetic oligonucleotide
acaauuuugaggacuggag

SEQ ID NO: 491575 - RNA, 19 nt, Artificial Sequence
  Description of Artificial Sequence: Synthetic oligonucleotide
uaagcggcgaacaggggca

SEQ ID NO: 491576 - RNA, 19 nt, Artificial Sequence
  Description of Artificial Sequence: Synthetic oligonucleotide
gcaauaagcaacucccagg

SEQ ID NO: 491577 - RNA, 19 nt, Artificial Sequence
  Description of Artificial Sequence: Synthetic oligonucleotide
aacagggaaucccacugga

SEQ ID NO: 491578 - RNA, 19 nt, Artificial Sequence
  Description of Artificial Sequence: Synthetic oligonucleotide
ucgaaacagacagccagcg

SEQ ID NO: 491579 - RNA, 19 nt, Artificial Sequence
  Description of Artificial Sequence: Synthetic oligonucleotide
aaucaggaccuguaguaau

SEQ ID NO: 491580 - RNA, 19 nt, Artificial Sequence
  Description of Artificial Sequence: Synthetic oligonucleotide
guaagcggcgaacaggggc

SEQ ID NO: 491581 - RNA, 19 nt, Artificial Sequence
  Description of Artificial Sequence: Synthetic oligonucleotide
aaguagggucuguacaacu

SEQ ID NO: 491582 - RNA, 19 nt, Artificial Sequence
  Description of Artificial Sequence: Synthetic oligonucleotide
agcacggugcccaauaagg

SEQ ID NO: 491583 - RNA, 19 nt, Artificial Sequence
  Description of Artificial Sequence: Synthetic oligonucleotide
gaagaggccauaugagcug

SEQ ID NO: 491584 - RNA, 19 nt, Artificial Sequence
  Description of Artificial Sequence: Synthetic oligonucleotide
uauaguugccaguaaugau

SEQ ID NO: 491585 - RNA, 19 nt, Artificial Sequence
  Description of Artificial Sequence: Synthetic oligonucleotide
cagcgcacaagccagaaug

SEQ ID NO: 491586 - RNA, 19 nt, Artificial Sequence
  Description of Artificial Sequence: Synthetic oligonucleotide
ucuagggauauaauuccau

SEQ ID NO: 491587 - RNA, 19 nt, Artificial Sequence
  Description of Artificial Sequence: Synthetic oligonucleotide
uaguugccaguaaugauaa

SEQ ID NO: 491588 - RNA, 19 nt, Artificial Sequence
  Description of Artificial Sequence: Synthetic oligonucleotide
uucuagggauauaauucca

SEQ ID NO: 491589 - RNA, 19 nt, Artificial Sequence
  Description of Artificial Sequence: Synthetic oligonucleotide
gaaacggguacuuggcaac

SEQ ID NO: 491590 - RNA, 19 nt, Artificial Sequence
  Description of Artificial Sequence: Synthetic oligonucleotide
ucucguagugguaggugag

SEQ ID NO: 491591 - RNA, 19 nt, Artificial Sequence
  Description of Artificial Sequence: Synthetic oligonucleotide
uacuuauagugcugggccc

SEQ ID NO: 491592 - RNA, 19 nt, Artificial Sequence
  Description of Artificial Sequence: Synthetic oligonucleotide
agucaccaucuuuagccac

SEQ ID NO: 491593 - RNA, 19 nt, Artificial Sequence
  Description of Artificial Sequence: Synthetic oligonucleotide
uucgcacccaguuuagugu

SEQ ID NO: 491594 - RNA, 19 nt, Artificial Sequence
  Description of Artificial Sequence: Synthetic oligonucleotide
uaguaauaccugaguguag

SEQ ID NO: 491595 - RNA, 19 nt, Artificial Sequence
  Description of Artificial Sequence: Synthetic oligonucleotide
ccaguaaugauaaucagga

SEQ ID NO: 491596 - RNA, 19 nt, Artificial Sequence
  Description of Artificial Sequence: Synthetic oligonucleotide
acuuauagugcugggcccg

SEQ ID NO: 491597 - RNA, 19 nt, Artificial Sequence
  Description of Artificial Sequence: Synthetic oligonucleotide
aguagggauagcaugguca

SEQ ID NO: 491598 - RNA, 19 nt, Artificial Sequence
  Description of Artificial Sequence: Synthetic oligonucleotide
uuugggagucugcuuacgu

SEQ ID NO: 491599 - RNA, 19 nt, Artificial Sequence
  Description of Artificial Sequence: Synthetic oligonucleotide
ugccaguaaugauaaucag

SEQ ID NO: 491600 - RNA, 19 nt, Artificial Sequence
  Description of Artificial Sequence: Synthetic oligonucleotide
ugaguguagaaggccauca

SEQ ID NO: 491601 - RNA, 19 nt, Artificial Sequence
  Description of Artificial Sequence: Synthetic oligonucleotide
agacguagcaccaggcugg

SEQ ID NO: 491602 - RNA, 19 nt, Artificial Sequence
  Description of Artificial Sequence: Synthetic oligonucleotide
uggcugcucaugaaacggg

SEQ ID NO: 491603 - RNA, 19 nt, Artificial Sequence
  Description of Artificial Sequence: Synthetic oligonucleotide
gucgcagagaguucaggag

SEQ ID NO: 491604 - RNA, 19 nt, Artificial Sequence
  Description of Artificial Sequence: Synthetic oligonucleotide
auaguugccaguaaugaua

SEQ ID NO: 491605 - RNA, 19 nt, Artificial Sequence
  Description of Artificial Sequence: Synthetic oligonucleotide
guucgcacccaguuuagug

SEQ ID NO: 491606 - RNA, 19 nt, Artificial Sequence
  Description of Artificial Sequence: Synthetic oligonucleotide
aguagggucuguacaacuc

SEQ ID NO: 491607 - RNA, 19 nt, Artificial Sequence
  Description of Artificial Sequence: Synthetic oligonucleotide
agugcuagcacggugccca

SEQ ID NO: 491608 - RNA, 19 nt, Artificial Sequence
  Description of Artificial Sequence: Synthetic oligonucleotide
aucgaggcguggcuggugg

SEQ ID NO: 491609 - RNA, 19 nt, Artificial Sequence
  Description of Artificial Sequence: Synthetic oligonucleotide
aggaccuguaguaauaccu

SEQ ID NO: 491610 - RNA, 19 nt, Artificial Sequence
  Description of Artificial Sequence: Synthetic oligonucleotide
ugacagcacaugaagcuau

SEQ ID NO: 491611 - RNA, 19 nt, Artificial Sequence
  Description of Artificial Sequence: Synthetic oligonucleotide
ucggcucacauuuccaggu

SEQ ID NO: 491612 - RNA, 19 nt, Artificial Sequence
  Description of Artificial Sequence: Synthetic oligonucleotide
aguggggcgacuaguauag

SEQ ID NO: 491613 - RNA, 19 nt, Artificial Sequence
  Description of Artificial Sequence: Synthetic oligonucleotide
ugggcccguagguaggugg

SEQ ID NO: 491614 - RNA, 19 nt, Artificial Sequence
  Description of Artificial Sequence: Synthetic oligonucleotide
gacaauuuugaggacugga

SEQ ID NO: 491615 - RNA, 19 nt, Artificial Sequence
  Description of Artificial Sequence: Synthetic oligonucleotide
ggcaauaagcaacucccag

SEQ ID NO: 491616 - RNA, 19 nt, Artificial Sequence
  Description of Artificial Sequence: Synthetic oligonucleotide
cuaguauagcuaggaagcc

SEQ ID NO: 491617 - RNA, 19 nt, Artificial Sequence
  Description of Artificial Sequence: Synthetic oligonucleotide
caaaggcaaacguguagac

SEQ ID NO: 491618 - RNA, 19 nt, Artificial Sequence
  Description of Artificial Sequence: Synthetic oligonucleotide
ggccauaugagcuggucag

SEQ ID NO: 491619 - RNA, 19 nt, Artificial Sequence
  Description of Artificial Sequence: Synthetic oligonucleotide
ggucccaggcuccauauag

SEQ ID NO: 491620 - RNA, 19 nt, Artificial Sequence
  Description of Artificial Sequence: Synthetic oligonucleotide
uuaguuccagcaguaggga

SEQ ID NO: 491621 - RNA, 19 nt, Artificial Sequence
  Description of Artificial Sequence: Synthetic oligonucleotide
uagugcacggugccauagg

SEQ ID NO: 491622 - RNA, 19 nt, Artificial Sequence
  Description of Artificial Sequence: Synthetic oligonucleotide
aaguuauaguugccaguaa

SEQ ID NO: 491623 - RNA, 19 nt, Artificial Sequence
  Description of Artificial Sequence: Synthetic oligonucleotide
uagcacggugcccaauaag

SEQ ID NO: 491624 - RNA, 19 nt, Artificial Sequence
  Description of Artificial Sequence: Synthetic oligonucleotide
agaacugaacaggcgauga

SEQ ID NO: 491625 - RNA, 19 nt, Artificial Sequence
  Description of Artificial Sequence: Synthetic oligonucleotide
ugggagucugcuuacguuu

SEQ ID NO: 491626 - RNA, 19 nt, Artificial Sequence
  Description of Artificial Sequence: Synthetic oligonucleotide
acuccuauccugaagucca

SEQ ID NO: 491627 - RNA, 19 nt, Artificial Sequence
  Description of Artificial Sequence: Synthetic oligonucleotide
uggggcgacuaguauagcu

SEQ ID NO: 491628 - RNA, 19 nt, Artificial Sequence
  Description of Artificial Sequence: Synthetic oligonucleotide
ucaaucguaagcggcgaac

SEQ ID NO: 491629 - RNA, 19 nt, Artificial Sequence
  Description of Artificial Sequence: Synthetic oligonucleotide
ccaucaaucguaagcggcg

SEQ ID NO: 491630 - RNA, 19 nt, Artificial Sequence
  Description of Artificial Sequence: Synthetic oligonucleotide
cagugaguccccaccacgc

SEQ ID NO: 491631 - RNA, 19 nt, Artificial Sequence
  Description of Artificial Sequence: Synthetic oligonucleotide
guagaugaaggggugucgc

SEQ ID NO: 491632 - RNA, 19 nt, Artificial Sequence
  Description of Artificial Sequence: Synthetic oligonucleotide
caacagggaaucccacugg

SEQ ID NO: 491633 - RNA, 19 nt, Artificial Sequence
  Description of Artificial Sequence: Synthetic oligonucleotide
uagugguaggugagggcag

SEQ ID NO: 491634 - RNA, 19 nt, Artificial Sequence
  Description of Artificial Sequence: Synthetic oligonucleotide
gugguuuuagaaagaauga

SEQ ID NO: 491635 - RNA, 19 nt, Artificial Sequence
  Description of Artificial Sequence: Synthetic oligonucleotide
agaggcaaacaugagucga

SEQ ID NO: 491636 - RNA, 19 nt, Artificial Sequence
  Description of Artificial Sequence: Synthetic oligonucleotide
agguagaugaagggguguc

SEQ ID NO: 491637 - RNA, 19 nt, Artificial Sequence
  Description of Artificial Sequence: Synthetic oligonucleotide
uagacagcggccacacccu

SEQ ID NO: 491638 - RNA, 19 nt, Artificial Sequence
  Description of Artificial Sequence: Synthetic oligonucleotide
uaaucaggaccuguaguaa

SEQ ID NO: 491639 - RNA, 19 nt, Artificial Sequence
  Description of Artificial Sequence: Synthetic oligonucleotide
guacaacucugacagucac

SEQ ID NO: 491640 - RNA, 19 nt, Artificial Sequence
  Description of Artificial Sequence: Synthetic oligonucleotide
aacuguuggagcagcauuu

SEQ ID NO: 491641 - RNA, 19 nt, Artificial Sequence
  Description of Artificial Sequence: Synthetic oligonucleotide
gaagccggucuccagcaac

SEQ ID NO: 491642 - RNA, 19 nt, Artificial Sequence
  Description of Artificial Sequence: Synthetic oligonucleotide
uagaugaaggggugucgca

SEQ ID NO: 491643 - RNA, 19 nt, Artificial Sequence
  Description of Artificial Sequence: Synthetic oligonucleotide
gaccuguaguaauaccuga

SEQ ID NO: 491644 - RNA, 19 nt, Artificial Sequence
  Description of Artificial Sequence: Synthetic oligonucleotide
gcaacagggaaucccacug

SEQ ID NO: 491645 - RNA, 19 nt, Artificial Sequence
  Description of Artificial Sequence: Synthetic oligonucleotide
caguaaugauaaucaggac

SEQ ID NO: 491646 - RNA, 19 nt, Artificial Sequence
  Description of Artificial Sequence: Synthetic oligonucleotide
aggccauaugagcugguca

SEQ ID NO: 491647 - RNA, 19 nt, Artificial Sequence
  Description of Artificial Sequence: Synthetic oligonucleotide
ucaggaccuguaguaauac

SEQ ID NO: 491648 - RNA, 19 nt, Artificial Sequence
  Description of Artificial Sequence: Synthetic oligonucleotide
agggacgcaaaggcaaacg

SEQ ID NO: 491649 - RNA, 19 nt, Artificial Sequence
  Description of Artificial Sequence: Synthetic oligonucleotide
augagucgaaacagacagc

SEQ ID NO: 491650 - RNA, 19 nt, Artificial Sequence
  Description of Artificial Sequence: Synthetic oligonucleotide
agaugggaugcaauucuag

SEQ ID NO: 491651 - RNA, 19 nt, Artificial Sequence
  Description of Artificial Sequence: Synthetic oligonucleotide
cugaacaggcgaugagccc

SEQ ID NO: 491652 - RNA, 19 nt, Artificial Sequence
  Description of Artificial Sequence: Synthetic oligonucleotide
uaaggccccugauaaucca

SEQ ID NO: 491653 - RNA, 19 nt, Artificial Sequence
  Description of Artificial Sequence: Synthetic oligonucleotide
agguuagcagguugaagaa

SEQ ID NO: 491654 - RNA, 19 nt, Artificial Sequence
  Description of Artificial Sequence: Synthetic oligonucleotide
gguguagagggacgcaaag

SEQ ID NO: 491655 - RNA, 19 nt, Artificial Sequence
  Description of Artificial Sequence: Synthetic oligonucleotide
ucugccaaucgaggcgugg

SEQ ID NO: 491656 - RNA, 19 nt, Artificial Sequence
  Description of Artificial Sequence: Synthetic oligonucleotide
gcagcccauaaacaguuag

SEQ ID NO: 491657 - RNA, 19 nt, Artificial Sequence
  Description of Artificial Sequence: Synthetic oligonucleotide
cacggugcccaauaagguc

SEQ ID NO: 491658 - RNA, 19 nt, Artificial Sequence
  Description of Artificial Sequence: Synthetic oligonucleotide
guuagcagguugaagaagu

SEQ ID NO: 491659 - RNA, 19 nt, Artificial Sequence
  Description of Artificial Sequence: Synthetic oligonucleotide
ugucucguagugguaggug

SEQ ID NO: 491660 - RNA, 19 nt, Artificial Sequence
  Description of Artificial Sequence: Synthetic oligonucleotide
caucauagcugcccuccag

SEQ ID NO: 491661 - RNA, 19 nt, Artificial Sequence
  Description of Artificial Sequence: Synthetic oligonucleotide
uaaugauaaucaggaccug

SEQ ID NO: 491662 - RNA, 19 nt, Artificial Sequence
  Description of Artificial Sequence: Synthetic oligonucleotide
aaacggguacuuggcaaca

SEQ ID NO: 491663 - RNA, 19 nt, Artificial Sequence
  Description of Artificial Sequence: Synthetic oligonucleotide
accguggcugggcugugac

SEQ ID NO: 491664 - RNA, 19 nt, Artificial Sequence
  Description of Artificial Sequence: Synthetic oligonucleotide
ugguaaaccaggggcuuug

SEQ ID NO: 491665 - RNA, 19 nt, Artificial Sequence
  Description of Artificial Sequence: Synthetic oligonucleotide
guggucggcucacauuucc

SEQ ID NO: 491666 - RNA, 19 nt, Artificial Sequence
  Description of Artificial Sequence: Synthetic oligonucleotide
ccaaaguagugcacggugc

SEQ ID NO: 491667 - RNA, 19 nt, Artificial Sequence
  Description of Artificial Sequence: Synthetic oligonucleotide
aacuuccgcagccauccuu

SEQ ID NO: 491668 - RNA, 19 nt, Artificial Sequence
  Description of Artificial Sequence: Synthetic oligonucleotide
guaaggccccugauaaucc

SEQ ID NO: 491669 - RNA, 19 nt, Artificial Sequence
  Description of Artificial Sequence: Synthetic oligonucleotide
gaguaagguacuaggcuga

SEQ ID NO: 491670 - RNA, 19 nt, Artificial Sequence
  Description of Artificial Sequence: Synthetic oligonucleotide
caggaccuguaguaauacc

SEQ ID NO: 491671 - RNA, 19 nt, Artificial Sequence
  Description of Artificial Sequence: Synthetic oligonucleotide
guaaaccaggggcuuugug

SEQ ID NO: 491672 - RNA, 19 nt, Artificial Sequence
  Description of Artificial Sequence: Synthetic oligonucleotide
gacccugggcaguauccag

SEQ ID NO: 491673 - RNA, 19 nt, Artificial Sequence
  Description of Artificial Sequence: Synthetic oligonucleotide
caagguuagcagguugaag

SEQ ID NO: 491674 - RNA, 19 nt, Artificial Sequence
  Description of Artificial Sequence: Synthetic oligonucleotide
uuagcagguugaagaaguu

SEQ ID NO: 491675 - RNA, 19 nt, Artificial Sequence
  Description of Artificial Sequence: Synthetic oligonucleotide
cucgccauguccgcuacgc

SEQ ID NO: 491676 - RNA, 19 nt, Artificial Sequence
  Description of Artificial Sequence: Synthetic oligonucleotide
gaaugauaugcugcugcca

SEQ ID NO: 491677 - RNA, 19 nt, Artificial Sequence
  Description of Artificial Sequence: Synthetic oligonucleotide
ggaguggacuccuauccug

SEQ ID NO: 491678 - RNA, 19 nt, Artificial Sequence
  Description of Artificial Sequence: Synthetic oligonucleotide
acggguacuuggcaacaug

SEQ ID NO: 491679 - RNA, 19 nt, Artificial Sequence
  Description of Artificial Sequence: Synthetic oligonucleotide
agcgcacaagccagaaugg

SEQ ID NO: 491680 - RNA, 19 nt, Artificial Sequence
  Description of Artificial Sequence: Synthetic oligonucleotide
ccaccuggcaggcugauag

SEQ ID NO: 491681 - RNA, 19 nt, Artificial Sequence
  Description of Artificial Sequence: Synthetic oligonucleotide
ggcaaacguguagacagcg

SEQ ID NO: 491682 - RNA, 19 nt, Artificial Sequence
  Description of Artificial Sequence: Synthetic oligonucleotide
cagaggggaagaauuccuc

SEQ ID NO: 491683 - RNA, 19 nt, Artificial Sequence
  Description of Artificial Sequence: Synthetic oligonucleotide
caauuuugaggacuggagu

SEQ ID NO: 491684 - RNA, 19 nt, Artificial Sequence
  Description of Artificial Sequence: Synthetic oligonucleotide
ucgccauguccgcuacgcg

SEQ ID NO: 491685 - RNA, 19 nt, Artificial Sequence
  Description of Artificial Sequence: Synthetic oligonucleotide
aggccccugauaauccacc

SEQ ID NO: 491686 - RNA, 19 nt, Artificial Sequence
  Description of Artificial Sequence: Synthetic oligonucleotide
gucgaaacagacagccagc

SEQ ID NO: 491687 - RNA, 19 nt, Artificial Sequence
  Description of Artificial Sequence: Synthetic oligonucleotide
uugggagucugcuuacguu

SEQ ID NO: 491688 - RNA, 19 nt, Artificial Sequence
  Description of Artificial Sequence: Synthetic oligonucleotide
agugaguccccaccacgca

SEQ ID NO: 491689 - RNA, 19 nt, Artificial Sequence
  Description of Artificial Sequence: Synthetic oligonucleotide
aggcauugugucucguagu

SEQ ID NO: 491690 - RNA, 19 nt, Artificial Sequence
  Description of Artificial Sequence: Synthetic oligonucleotide
acaugagucgaaacagaca

SEQ ID NO: 491691 - RNA, 19 nt, Artificial Sequence
  Description of Artificial Sequence: Synthetic oligonucleotide
augauaugcugcugccagu

SEQ ID NO: 491692 - RNA, 19 nt, Artificial Sequence
  Description of Artificial Sequence: Synthetic oligonucleotide
gggcgacuaguauagcuag

SEQ ID NO: 491693 - RNA, 19 nt, Artificial Sequence
  Description of Artificial Sequence: Synthetic oligonucleotide
guagguagguggguggcug

SEQ ID NO: 491694 - RNA, 19 nt, Artificial Sequence
  Description of Artificial Sequence: Synthetic oligonucleotide
cucguagugguaggugagg

SEQ ID NO: 491695 - RNA, 19 nt, Artificial Sequence
  Description of Artificial Sequence: Synthetic oligonucleotide
gcgaucucgaugaggaagg

SEQ ID NO: 491696 - RNA, 19 nt, Artificial Sequence
  Description of Artificial Sequence: Synthetic oligonucleotide
ugccaaucgaggcguggcu

SEQ ID NO: 491697 - RNA, 19 nt, Artificial Sequence
  Description of Artificial Sequence: Synthetic oligonucleotide
ggcacccagugcuagcacg

SEQ ID NO: 491698 - RNA, 19 nt, Artificial Sequence
  Description of Artificial Sequence: Synthetic oligonucleotide
cagucauccgacggaagag

SEQ ID NO: 491699 - RNA, 19 nt, Artificial Sequence
  Description of Artificial Sequence: Synthetic oligonucleotide
aggcaaacguguagacagc

SEQ ID NO: 491700 - RNA, 19 nt, Artificial Sequence
  Description of Artificial Sequence: Synthetic oligonucleotide
ucgcacccaguuuaguguc

SEQ ID NO: 491701 - RNA, 19 nt, Artificial Sequence
  Description of Artificial Sequence: Synthetic oligonucleotide
accaagguuagcagguuga

SEQ ID NO: 491702 - RNA, 19 nt, Artificial Sequence
  Description of Artificial Sequence: Synthetic oligonucleotide
cauguggcuggcugacagc

SEQ ID NO: 491703 - RNA, 19 nt, Artificial Sequence
  Description of Artificial Sequence: Synthetic oligonucleotide
augauaaucaggaccugua

SEQ ID NO: 491704 - RNA, 19 nt, Artificial Sequence
  Description of Artificial Sequence: Synthetic oligonucleotide
cugauagguaggcaaucca

SEQ ID NO: 491705 - RNA, 19 nt, Artificial Sequence
  Description of Artificial Sequence: Synthetic oligonucleotide
gaacaaggccacuguggca

SEQ ID NO: 491706 - RNA, 19 nt, Artificial Sequence
  Description of Artificial Sequence: Synthetic oligonucleotide
cugcccaaggcaccguggc

SEQ ID NO: 491707 - RNA, 19 nt, Artificial Sequence
  Description of Artificial Sequence: Synthetic oligonucleotide
uggcggugccaccauuggc

SEQ ID NO: 491708 - RNA, 19 nt, Artificial Sequence
  Description of Artificial Sequence: Synthetic oligonucleotide
uaguuccagcaguagggau

SEQ ID NO: 491709 - RNA, 19 nt, Artificial Sequence
  Description of Artificial Sequence: Synthetic oligonucleotide
gucauccgacggaagaggc

SEQ ID NO: 491710 - RNA, 19 nt, Artificial Sequence
  Description of Artificial Sequence: Synthetic oligonucleotide
gacugcccaaggcaccgug

SEQ ID NO: 491711 - RNA, 19 nt, Artificial Sequence
  Description of Artificial Sequence: Synthetic oligonucleotide
ggcuccauauaggaguaag

SEQ ID NO: 491712 - RNA, 19 nt, Artificial Sequence
  Description of Artificial Sequence: Synthetic oligonucleotide
aauccacccucuugcgguu

SEQ ID NO: 491713 - RNA, 19 nt, Artificial Sequence
  Description of Artificial Sequence: Synthetic oligonucleotide
gcuccauauaggaguaagg

SEQ ID NO: 491714 - RNA, 19 nt, Artificial Sequence
  Description of Artificial Sequence: Synthetic oligonucleotide
gguuagcagguugaagaag

SEQ ID NO: 491715 - RNA, 19 nt, Artificial Sequence
  Description of Artificial Sequence: Synthetic oligonucleotide
guaauaccugaguguagaa

SEQ ID NO: 491716 - RNA, 19 nt, Artificial Sequence
  Description of Artificial Sequence: Synthetic oligonucleotide
cuggcaggacugcccaagg

SEQ ID NO: 491717 - RNA, 19 nt, Artificial Sequence
  Description of Artificial Sequence: Synthetic oligonucleotide
ccggaguggacuccuaucc

SEQ ID NO: 491718 - RNA, 19 nt, Artificial Sequence
  Description of Artificial Sequence: Synthetic oligonucleotide
ggcacgugcgaucucgaug

SEQ ID NO: 491719 - RNA, 19 nt, Artificial Sequence
  Description of Artificial Sequence: Synthetic oligonucleotide
ggaccuguaguaauaccug

SEQ ID NO: 491720 - RNA, 19 nt, Artificial Sequence
  Description of Artificial Sequence: Synthetic oligonucleotide
cauauaggaguaagguacu

SEQ ID NO: 491721 - RNA, 19 nt, Artificial Sequence
  Description of Artificial Sequence: Synthetic oligonucleotide
gccaucaaucguaagcggc

SEQ ID NO: 491722 - RNA, 19 nt, Artificial Sequence
  Description of Artificial Sequence: Synthetic oligonucleotide
caaucguaagcggcgaaca

SEQ ID NO: 491723 - RNA, 19 nt, Artificial Sequence
  Description of Artificial Sequence: Synthetic oligonucleotide
caccacgcagggcagcggc

SEQ ID NO: 491724 - RNA, 19 nt, Artificial Sequence
  Description of Artificial Sequence: Synthetic oligonucleotide
gaguggacuccuauccuga

SEQ ID NO: 491725 - RNA, 19 nt, Artificial Sequence
  Description of Artificial Sequence: Synthetic oligonucleotide
ccaaucgaggcguggcugg

SEQ ID NO: 491726 - RNA, 19 nt, Artificial Sequence
  Description of Artificial Sequence: Synthetic oligonucleotide
aaucgaggcguggcuggug

SEQ ID NO: 491727 - RNA, 19 nt, Artificial Sequence
  Description of Artificial Sequence: Synthetic oligonucleotide
cugccaaucgaggcguggc

SEQ ID NO: 491728 - RNA, 19 nt, Artificial Sequence
  Description of Artificial Sequence: Synthetic oligonucleotide
guagagggacgcaaaggca

SEQ ID NO: 491729 - RNA, 19 nt, Artificial Sequence
  Description of Artificial Sequence: Synthetic oligonucleotide
ggggccgcaguguucuucg

SEQ ID NO: 491730 - RNA, 19 nt, Artificial Sequence
  Description of Artificial Sequence: Synthetic oligonucleotide
gccgcaguguucuucgagc

SEQ ID NO: 491731 - RNA, 19 nt, Artificial Sequence
  Description of Artificial Sequence: Synthetic oligonucleotide
aucaaucguaagcggcgaa

SEQ ID NO: 491732 - RNA, 19 nt, Artificial Sequence
  Description of Artificial Sequence: Synthetic oligonucleotide
acgugcgaucucgaugagg

SEQ ID NO: 491733 - RNA, 19 nt, Artificial Sequence
  Description of Artificial Sequence: Synthetic oligonucleotide
ggugggguaucaggaaagg

SEQ ID NO: 491734 - RNA, 19 nt, Artificial Sequence
  Description of Artificial Sequence: Synthetic oligonucleotide
ccaagaguccccacagcag

SEQ ID NO: 491735 - RNA, 19 nt, Artificial Sequence
  Description of Artificial Sequence: Synthetic oligonucleotide
caugagaugggaugcaauu

SEQ ID NO: 491736 - RNA, 19 nt, Artificial Sequence
  Description of Artificial Sequence: Synthetic oligonucleotide
gagaaccaauacuuauagu

SEQ ID NO: 491737 - RNA, 19 nt, Artificial Sequence
  Description of Artificial Sequence: Synthetic oligonucleotide
caguuaguuccagcaguag

SEQ ID NO: 491738 - RNA, 19 nt, Artificial Sequence
  Description of Artificial Sequence: Synthetic oligonucleotide
gcccaauaaggucaguaga

SEQ ID NO: 491739 - RNA, 19 nt, Artificial Sequence
  Description of Artificial Sequence: Synthetic oligonucleotide
guaugugggccaagggcug

SEQ ID NO: 491740 - RNA, 19 nt, Artificial Sequence
  Description of Artificial Sequence: Synthetic oligonucleotide
agagggcaauaagcaacuc

SEQ ID NO: 491741 - RNA, 19 nt, Artificial Sequence
  Description of Artificial Sequence: Synthetic oligonucleotide
ucgaggcguggcugguggg

SEQ ID NO: 491742 - RNA, 19 nt, Artificial Sequence
  Description of Artificial Sequence: Synthetic oligonucleotide
gggucuguacaacucugac

SEQ ID NO: 491743 - RNA, 19 nt, Artificial Sequence
  Description of Artificial Sequence: Synthetic oligonucleotide
ugcccaaggcaccguggcu

SEQ ID NO: 491744 - RNA, 19 nt, Artificial Sequence
  Description of Artificial Sequence: Synthetic oligonucleotide
uagggauagcauggucagc

SEQ ID NO: 491745 - RNA, 19 nt, Artificial Sequence
  Description of Artificial Sequence: Synthetic oligonucleotide
gacaugagaugggaugcaa

SEQ ID NO: 491746 - RNA, 19 nt, Artificial Sequence
  Description of Artificial Sequence: Synthetic oligonucleotide
caguagggauagcaugguc

SEQ ID NO: 491747 - RNA, 19 nt, Artificial Sequence
  Description of Artificial Sequence: Synthetic oligonucleotide
cucccauagcaguguuggc

SEQ ID NO: 491748 - RNA, 19 nt, Artificial Sequence
  Description of Artificial Sequence: Synthetic oligonucleotide
gcaaacguguagacagcgg

SEQ ID NO: 491749 - RNA, 19 nt, Artificial Sequence
  Description of Artificial Sequence: Synthetic oligonucleotide
cgugcgaucucgaugagga

SEQ ID NO: 491750 - RNA, 19 nt, Artificial Sequence
  Description of Artificial Sequence: Synthetic oligonucleotide
aacggguacuuggcaacau

SEQ ID NO: 491751 - RNA, 19 nt, Artificial Sequence
  Description of Artificial Sequence: Synthetic oligonucleotide
auauaggaguaagguacua

SEQ ID NO: 491752 - RNA, 19 nt, Artificial Sequence
  Description of Artificial Sequence: Synthetic oligonucleotide
uguucgcacccaguuuagu

SEQ ID NO: 491753 - RNA, 19 nt, Artificial Sequence
  Description of Artificial Sequence: Synthetic oligonucleotide
gcgaacaggggcaaagaac

SEQ ID NO: 491754 - RNA, 19 nt, Artificial Sequence
  Description of Artificial Sequence: Synthetic oligonucleotide
acaugagaugggaugcaau

SEQ ID NO: 491755 - RNA, 19 nt, Artificial Sequence
  Description of Artificial Sequence: Synthetic oligonucleotide
uaggcagagucaccaucuu

SEQ ID NO: 491756 - RNA, 19 nt, Artificial Sequence
  Description of Artificial Sequence: Synthetic oligonucleotide
ccagucaaccuccaggcca

SEQ ID NO: 491757 - RNA, 19 nt, Artificial Sequence
  Description of Artificial Sequence: Synthetic oligonucleotide
uucgagcaggaaggauucc

SEQ ID NO: 491758 - RNA, 19 nt, Artificial Sequence
  Description of Artificial Sequence: Synthetic oligonucleotide
uguuggcguuucccacagc

SEQ ID NO: 491759 - RNA, 19 nt, Artificial Sequence
  Description of Artificial Sequence: Synthetic oligonucleotide
aguaagguacuaggcugau

SEQ ID NO: 491760 - RNA, 19 nt, Artificial Sequence
  Description of Artificial Sequence: Synthetic oligonucleotide
ccgacccuugccuuggggc

SEQ ID NO: 491761 - RNA, 19 nt, Artificial Sequence
  Description of Artificial Sequence: Synthetic oligonucleotide
ccccugauaauccacccuc

SEQ ID NO: 491762 - RNA, 19 nt, Artificial Sequence
  Description of Artificial Sequence: Synthetic oligonucleotide
agacagcggccacacccug

SEQ ID NO: 491763 - RNA, 19 nt, Artificial Sequence
  Description of Artificial Sequence: Synthetic oligonucleotide
cugaguguagaaggccauc

SEQ ID NO: 491764 - RNA, 19 nt, Artificial Sequence
  Description of Artificial Sequence: Synthetic oligonucleotide
gagggacgcaaaggcaaac

SEQ ID NO: 491765 - RNA, 19 nt, Artificial Sequence
  Description of Artificial Sequence: Synthetic oligonucleotide
gcucacauuuccagguuug

SEQ ID NO: 491766 - RNA, 19 nt, Artificial Sequence
  Description of Artificial Sequence: Synthetic oligonucleotide
acgcccagaggcaaacaug

SEQ ID NO: 491767 - RNA, 19 nt, Artificial Sequence
  Description of Artificial Sequence: Synthetic oligonucleotide
gcgacuaguauagcuagga

SEQ ID NO: 491768 - RNA, 19 nt, Artificial Sequence
  Description of Artificial Sequence: Synthetic oligonucleotide
cagucaaccuccaggccaa

SEQ ID NO: 491769 - RNA, 19 nt, Artificial Sequence
  Description of Artificial Sequence: Synthetic oligonucleotide
uugcaccuggauccaccuc

SEQ ID NO: 491770 - RNA, 19 nt, Artificial Sequence
  Description of Artificial Sequence: Synthetic oligonucleotide
gagucgaaacagacagcca

SEQ ID NO: 491771 - RNA, 19 nt, Artificial Sequence
  Description of Artificial Sequence: Synthetic oligonucleotide
guagcaccaggcugguaaa

SEQ ID NO: 491772 - RNA, 19 nt, Artificial Sequence
  Description of Artificial Sequence: Synthetic oligonucleotide
agggucuguacaacucuga

SEQ ID NO: 491773 - RNA, 19 nt, Artificial Sequence
  Description of Artificial Sequence: Synthetic oligonucleotide
guguucgcacccaguuuag

SEQ ID NO: 491774 - RNA, 19 nt, Artificial Sequence
  Description of Artificial Sequence: Synthetic oligonucleotide
augggguaaggccccugau

SEQ ID NO: 491775 - RNA, 19 nt, Artificial Sequence
  Description of Artificial Sequence: Synthetic oligonucleotide
caguggggcgacuaguaua

SEQ ID NO: 491776 - RNA, 19 nt, Artificial Sequence
  Description of Artificial Sequence: Synthetic oligonucleotide
ccacccagaccagucaucc

SEQ ID NO: 491777 - RNA, 19 nt, Artificial Sequence
  Description of Artificial Sequence: Synthetic oligonucleotide
caccacuucaggccgccca

SEQ ID NO: 491778 - RNA, 19 nt, Artificial Sequence
  Description of Artificial Sequence: Synthetic oligonucleotide
ggcgacuaguauagcuagg

SEQ ID NO: 491779 - RNA, 19 nt, Artificial Sequence
  Description of Artificial Sequence: Synthetic oligonucleotide
ggccgcaguguucuucgag

SEQ ID NO: 491780 - RNA, 19 nt, Artificial Sequence
  Description of Artificial Sequence: Synthetic oligonucleotide
gaacaggcgaugagcccca

SEQ ID NO: 491781 - RNA, 19 nt, Artificial Sequence
  Description of Artificial Sequence: Synthetic oligonucleotide
ggccccugauaauccaccc

SEQ ID NO: 491782 - RNA, 19 nt, Artificial Sequence
  Description of Artificial Sequence: Synthetic oligonucleotide
caggccgcccacccagacc

SEQ ID NO: 491783 - RNA, 19 nt, Artificial Sequence
  Description of Artificial Sequence: Synthetic oligonucleotide
acagcacaugaagcuauuu

SEQ ID NO: 491784 - RNA, 19 nt, Artificial Sequence
  Description of Artificial Sequence: Synthetic oligonucleotide
gcgcacaagccagaauggg

SEQ ID NO: 491785 - RNA, 19 nt, Artificial Sequence
  Description of Artificial Sequence: Synthetic oligonucleotide
cuuuguguaugugggccaa

SEQ ID NO: 491786 - RNA, 19 nt, Artificial Sequence
  Description of Artificial Sequence: Synthetic oligonucleotide
cucuguccaauggugucca

SEQ ID NO: 491787 - RNA, 19 nt, Artificial Sequence
  Description of Artificial Sequence: Synthetic oligonucleotide
cugacagcacaugaagcua

SEQ ID NO: 491788 - RNA, 19 nt, Artificial Sequence
  Description of Artificial Sequence: Synthetic oligonucleotide
cuugcaccuggauccaccu

SEQ ID NO: 491789 - RNA, 19 nt, Artificial Sequence
  Description of Artificial Sequence: Synthetic oligonucleotide
guucuucgagcaggaagga

SEQ ID NO: 491790 - RNA, 19 nt, Artificial Sequence
  Description of Artificial Sequence: Synthetic oligonucleotide
cgggagcucgccauguccg

SEQ ID NO: 491791 - RNA, 19 nt, Artificial Sequence
  Description of Artificial Sequence: Synthetic oligonucleotide
agagggacgcaaaggcaaa

SEQ ID NO: 491792 - RNA, 19 nt, Artificial Sequence
  Description of Artificial Sequence: Synthetic oligonucleotide
aacaggcgaugagccccag

SEQ ID NO: 491793 - RNA, 19 nt, Artificial Sequence
  Description of Artificial Sequence: Synthetic oligonucleotide
ggacuccuauccugaaguc

SEQ ID NO: 491794 - RNA, 19 nt, Artificial Sequence
  Description of Artificial Sequence: Synthetic oligonucleotide
cuagcacggugcccaauaa

SEQ ID NO: 491795 - RNA, 19 nt, Artificial Sequence
  Description of Artificial Sequence: Synthetic oligonucleotide
uugcccugcaggagacgua

SEQ ID NO: 491796 - RNA, 19 nt, Artificial Sequence
  Description of Artificial Sequence: Synthetic oligonucleotide
ggagacagcuguguucgca

SEQ ID NO: 491797 - RNA, 19 nt, Artificial Sequence
  Description of Artificial Sequence: Synthetic oligonucleotide
ccucuugcgguuggaaggc

SEQ ID NO: 491798 - RNA, 19 nt, Artificial Sequence
  Description of Artificial Sequence: Synthetic oligonucleotide
ggcgaacaggggcaaagaa

SEQ ID NO: 491799 - RNA, 19 nt, Artificial Sequence
  Description of Artificial Sequence: Synthetic oligonucleotide
agaguccccacagcaggau

SEQ ID NO: 491800 - RNA, 19 nt, Artificial Sequence
  Description of Artificial Sequence: Synthetic oligonucleotide
gcgguuggaaggcuucuuc

SEQ ID NO: 491801 - RNA, 19 nt, Artificial Sequence
  Description of Artificial Sequence: Synthetic oligonucleotide
gcuagcacggugcccaaua

SEQ ID NO: 491802 - RNA, 19 nt, Artificial Sequence
  Description of Artificial Sequence: Synthetic oligonucleotide
ccagugcuagcacggugcc

SEQ ID NO: 491803 - RNA, 19 nt, Artificial Sequence
  Description of Artificial Sequence: Synthetic oligonucleotide
uagguggguggcugcucau

SEQ ID NO: 491804 - RNA, 19 nt, Artificial Sequence
  Description of Artificial Sequence: Synthetic oligonucleotide
gccaaucgaggcguggcug

SEQ ID NO: 491805 - RNA, 19 nt, Artificial Sequence
  Description of Artificial Sequence: Synthetic oligonucleotide
cagugcuagcacggugccc

SEQ ID NO: 491806 - RNA, 19 nt, Artificial Sequence
  Description of Artificial Sequence: Synthetic oligonucleotide
gggacgcaaaggcaaacgu

SEQ ID NO: 491807 - RNA, 19 nt, Artificial Sequence
  Description of Artificial Sequence: Synthetic oligonucleotide
gcggcgaacaggggcaaag

SEQ ID NO: 491808 - RNA, 19 nt, Artificial Sequence
  Description of Artificial Sequence: Synthetic oligonucleotide
gccauaugagcuggucagc

SEQ ID NO: 491809 - RNA, 19 nt, Artificial Sequence
  Description of Artificial Sequence: Synthetic oligonucleotide
ugcgguuggaaggcuucuu

SEQ ID NO: 491810 - RNA, 19 nt, Artificial Sequence
  Description of Artificial Sequence: Synthetic oligonucleotide
ccgggagcucgccaugucc

SEQ ID NO: 491811 - RNA, 19 nt, Artificial Sequence
  Description of Artificial Sequence: Synthetic oligonucleotide
cuugccuuggggccgcagu

SEQ ID NO: 491812 - RNA, 19 nt, Artificial Sequence
  Description of Artificial Sequence: Synthetic oligonucleotide
ggguggucggcucacauuu

SEQ ID NO: 491813 - RNA, 19 nt, Artificial Sequence
  Description of Artificial Sequence: Synthetic oligonucleotide
gccaccgacccuugccuug

SEQ ID NO: 491814 - RNA, 19 nt, Artificial Sequence
  Description of Artificial Sequence: Synthetic oligonucleotide
ggcggugccaccauuggcu

SEQ ID NO: 491815 - RNA, 19 nt, Artificial Sequence
  Description of Artificial Sequence: Synthetic oligonucleotide
ggggcgacuaguauagcua

SEQ ID NO: 491816 - RNA, 19 nt, Artificial Sequence
  Description of Artificial Sequence: Synthetic oligonucleotide
gggaaucccacuggaaaua

SEQ ID NO: 491817 - RNA, 19 nt, Artificial Sequence
  Description of Artificial Sequence: Synthetic oligonucleotide
aagcggcgaacaggggcaa

SEQ ID NO: 491818 - RNA, 19 nt, Artificial Sequence
  Description of Artificial Sequence: Synthetic oligonucleotide
uccgacggaagaggccaua

SEQ ID NO: 491819 - RNA, 19 nt, Artificial Sequence
  Description of Artificial Sequence: Synthetic oligonucleotide
acgcaaaggcaaacgugua

SEQ ID NO: 491820 - RNA, 19 nt, Artificial Sequence
  Description of Artificial Sequence: Synthetic oligonucleotide
cuccuauccugaaguccaa

SEQ ID NO: 491821 - RNA, 19 nt, Artificial Sequence
  Description of Artificial Sequence: Synthetic oligonucleotide
gggcaauaagcaacuccca

SEQ ID NO: 491822 - RNA, 19 nt, Artificial Sequence
  Description of Artificial Sequence: Synthetic oligonucleotide
ugggacccgggagcucgcc

SEQ ID NO: 491823 - RNA, 19 nt, Artificial Sequence
  Description of Artificial Sequence: Synthetic oligonucleotide
cccggaguggacuccuauc

SEQ ID NO: 491824 - RNA, 19 nt, Artificial Sequence
  Description of Artificial Sequence: Synthetic oligonucleotide
caccgacccuugccuuggg

SEQ ID NO: 491825 - RNA, 19 nt, Artificial Sequence
  Description of Artificial Sequence: Synthetic oligonucleotide
cugccaccgacccuugccu

SEQ ID NO: 491826 - RNA, 19 nt, Artificial Sequence
  Description of Artificial Sequence: Synthetic oligonucleotide
cacgcccagaggcaaacau

SEQ ID NO: 491827 - RNA, 19 nt, Artificial Sequence
  Description of Artificial Sequence: Synthetic oligonucleotide
ugcuagcacggugcccaau

SEQ ID NO: 491828 - RNA, 19 nt, Artificial Sequence
  Description of Artificial Sequence: Synthetic oligonucleotide
ccaccgacccuugccuugg

SEQ ID NO: 491829 - RNA, 19 nt, Artificial Sequence
  Description of Artificial Sequence: Synthetic oligonucleotide
cguaagcggcgaacagggg

SEQ ID NO: 491830 - RNA, 19 nt, Artificial Sequence
  Description of Artificial Sequence: Synthetic oligonucleotide
ccguagguagguggguggc

SEQ ID NO: 491831 - RNA, 19 nt, Artificial Sequence
  Description of Artificial Sequence: Synthetic oligonucleotide
gugcgaucucgaugaggaa

SEQ ID NO: 491832 - RNA, 19 nt, Artificial Sequence
  Description of Artificial Sequence: Synthetic oligonucleotide
gcccguagguaggugggug

SEQ ID NO: 491833 - RNA, 19 nt, Artificial Sequence
  Description of Artificial Sequence: Synthetic oligonucleotide
gcaggcauugugucucgua

SEQ ID NO: 491834 - RNA, 19 nt, Artificial Sequence
  Description of Artificial Sequence: Synthetic oligonucleotide
aucugccaaucgaggcgug

SEQ ID NO: 491835 - RNA, 19 nt, Artificial Sequence
  Description of Artificial Sequence: Synthetic oligonucleotide
guauagcuaggaagccggu

SEQ ID NO: 491836 - RNA, 19 nt, Artificial Sequence
  Description of Artificial Sequence: Synthetic oligonucleotide
guggggcgacuaguauagc

SEQ ID NO: 491837 - RNA, 19 nt, Artificial Sequence
  Description of Artificial Sequence: Synthetic oligonucleotide
gaacuuccgcagccauccu

SEQ ID NO: 491838 - RNA, 19 nt, Artificial Sequence
  Description of Artificial Sequence: Synthetic oligonucleotide
gcucgccauguccgcuacg

SEQ ID NO: 491839 - RNA, 19 nt, Artificial Sequence
  Description of Artificial Sequence: Synthetic oligonucleotide
gugucucguagugguaggu

SEQ ID NO: 491840 - RNA, 19 nt, Artificial Sequence
  Description of Artificial Sequence: Synthetic oligonucleotide
cuguguucgcacccaguuu

SEQ ID NO: 491841 - RNA, 19 nt, Artificial Sequence
  Description of Artificial Sequence: Synthetic oligonucleotide
cauagcaguguuggcguuu

SEQ ID NO: 491842 - RNA, 19 nt, Artificial Sequence
  Description of Artificial Sequence: Synthetic oligonucleotide
gacguagcaccaggcuggu

SEQ ID NO: 491843 - RNA, 19 nt, Artificial Sequence
  Description of Artificial Sequence: Synthetic oligonucleotide
gggcacccagugcuagcac

SEQ ID NO: 491844 - RNA, 19 nt, Artificial Sequence
  Description of Artificial Sequence: Synthetic oligonucleotide
cgacggaagaggccauaug

SEQ ID NO: 491845 - RNA, 19 nt, Artificial Sequence
  Description of Artificial Sequence: Synthetic oligonucleotide
gccucccauagcaguguug

SEQ ID NO: 491846 - RNA, 19 nt, Artificial Sequence
  Description of Artificial Sequence: Synthetic oligonucleotide
gguggucggcucacauuuc

SEQ ID NO: 491847 - RNA, 19 nt, Artificial Sequence
  Description of Artificial Sequence: Synthetic oligonucleotide
gggacccgggagcucgcca

SEQ ID NO: 491848 - RNA, 19 nt, Artificial Sequence
  Description of Artificial Sequence: Synthetic oligonucleotide
gcacggugcccaauaaggu

SEQ ID NO: 491849 - RNA, 19 nt, Artificial Sequence
  Description of Artificial Sequence: Synthetic oligonucleotide
gccccugauaauccacccu

SEQ ID NO: 491850 - RNA, 19 nt, Artificial Sequence
  Description of Artificial Sequence: Synthetic oligonucleotide
gugcuagcacggugcccaa

SEQ ID NO: 491851 - RNA, 19 nt, Artificial Sequence
  Description of Artificial Sequence: Synthetic oligonucleotide
gcaguagggauagcauggu

SEQ ID NO: 491852 - RNA, 19 nt, Artificial Sequence
  Description of Artificial Sequence: Synthetic oligonucleotide
cgacuaguauagcuaggaa

SEQ ID NO: 491853 - RNA, 19 nt, Artificial Sequence
  Description of Artificial Sequence: Synthetic oligonucleotide
ccaagguuagcagguugaa

SEQ ID NO: 491854 - RNA, 19 nt, Artificial Sequence
  Description of Artificial Sequence: Synthetic oligonucleotide
gguaaaccaggggcuuugu

SEQ ID NO: 491855 - RNA, 19 nt, Artificial Sequence
  Description of Artificial Sequence: Synthetic oligonucleotide
ggacccgggagcucgccau

SEQ ID NO: 491856 - RNA, 19 nt, Artificial Sequence
  Description of Artificial Sequence: Synthetic oligonucleotide
gcggccccggaguggacuc

SEQ ID NO: 491857 - RNA, 19 nt, Artificial Sequence
  Description of Artificial Sequence: Synthetic oligonucleotide
ggggugucgcagagaguuc

SEQ ID NO: 491858 - RNA, 19 nt, Artificial Sequence
  Description of Artificial Sequence: Synthetic oligonucleotide
caaucgaggcguggcuggu

SEQ ID NO: 491859 - RNA, 19 nt, Artificial Sequence
  Description of Artificial Sequence: Synthetic oligonucleotide
cugguaaaccaggggcuuu

SEQ ID NO: 491860 - RNA, 19 nt, Artificial Sequence
  Description of Artificial Sequence: Synthetic oligonucleotide
gggaagugguaagcaccaa

SEQ ID NO: 491861 - RNA, 19 nt, Artificial Sequence
  Description of Artificial Sequence: Synthetic oligonucleotide
gcugugggacccgggagcu

SEQ ID NO: 491862 - RNA, 19 nt, Artificial Sequence
  Description of Artificial Sequence: Synthetic oligonucleotide
ggguaaggccccugauaau

SEQ ID NO: 491863 - RNA, 19 nt, Artificial Sequence
  Description of Artificial Sequence: Synthetic oligonucleotide
gggagucugcuuacguuuu

SEQ ID NO: 491864 - RNA, 19 nt, Artificial Sequence
  Description of Artificial Sequence: Synthetic oligonucleotide
caccguggcugggcuguga

SEQ ID NO: 491865 - RNA, 19 nt, Artificial Sequence
  Description of Artificial Sequence: Synthetic oligonucleotide
ggcaaaccaggcagcuggu

SEQ ID NO: 491866 - RNA, 19 nt, Artificial Sequence
  Description of Artificial Sequence: Synthetic oligonucleotide
gcaccacuucaggccgccc

SEQ ID NO: 491867 - RNA, 19 nt, Artificial Sequence
  Description of Artificial Sequence: Synthetic oligonucleotide
cccgggagcucgccauguc

SEQ ID NO: 491868 - RNA, 19 nt, Artificial Sequence
  Description of Artificial Sequence: Synthetic oligonucleotide
cacccagugcuagcacggu

SEQ ID NO: 491869 - RNA, 19 nt, Artificial Sequence
  Description of Artificial Sequence: Synthetic oligonucleotide
cggaguggacuccuauccu

SEQ ID NO: 491870 - RNA, 19 nt, Artificial Sequence
  Description of Artificial Sequence: Synthetic oligonucleotide
cacuggcggugccaccauu

SEQ ID NO: 491871 - RNA, 19 nt, Artificial Sequence
  Description of Artificial Sequence: Synthetic oligonucleotide
cggcgaacaggggcaaaga

SEQ ID NO: 491872 - RNA, 19 nt, Artificial Sequence
  Description of Artificial Sequence: Synthetic oligonucleotide
ccauagcaguguuggcguu

SEQ ID NO: 491873 - RNA, 19 nt, Artificial Sequence
  Description of Artificial Sequence: Synthetic oligonucleotide
ccccggaguggacuccuau

SEQ ID NO: 491874 - RNA, 19 nt, Artificial Sequence
  Description of Artificial Sequence: Synthetic oligonucleotide
gccccggaguggacuccua

SEQ ID NO: 491875 - RNA, 19 nt, Artificial Sequence
  Description of Artificial Sequence: Synthetic oligonucleotide
uuauugauaagaucaaugg

SEQ ID NO: 491876 - RNA, 19 nt, Artificial Sequence
  Description of Artificial Sequence: Synthetic oligonucleotide
aaaauugcaaccucauuac

SEQ ID NO: 491877 - RNA, 19 nt, Artificial Sequence
  Description of Artificial Sequence: Synthetic oligonucleotide
caaauguuaaaccugaccg

SEQ ID NO: 491878 - RNA, 19 nt, Artificial Sequence
  Description of Artificial Sequence: Synthetic oligonucleotide
guuuugacagauuagagag

SEQ ID NO: 491879 - RNA, 19 nt, Artificial Sequence
  Description of Artificial Sequence: Synthetic oligonucleotide
aauacaacacaguugguca

SEQ ID NO: 491880 - RNA, 19 nt, Artificial Sequence
  Description of Artificial Sequence: Synthetic oligonucleotide
aacaauuccaaacugucca

SEQ ID NO: 491881 - RNA, 19 nt, Artificial Sequence
  Description of Artificial Sequence: Synthetic oligonucleotide
uaaaauugcaaccucauua

SEQ ID NO: 491882 - RNA, 19 nt, Artificial Sequence
  Description of Artificial Sequence: Synthetic oligonucleotide
aauauagcguucuccaauc

SEQ ID NO: 491883 - RNA, 19 nt, Artificial Sequence
  Description of Artificial Sequence: Synthetic oligonucleotide
cuuuauguaaauugguucc

SEQ ID NO: 491884 - RNA, 19 nt, Artificial Sequence
  Description of Artificial Sequence: Synthetic oligonucleotide
uccauaacaacaaacacuc

SEQ ID NO: 491885 - RNA, 19 nt, Artificial Sequence
  Description of Artificial Sequence: Synthetic oligonucleotide
aucuuaggacuuuauaugc

SEQ ID NO: 491886 - RNA, 19 nt, Artificial Sequence
  Description of Artificial Sequence: Synthetic oligonucleotide
uguuuuacgauguuuaccu

SEQ ID NO: 491887 - RNA, 19 nt, Artificial Sequence
  Description of Artificial Sequence: Synthetic oligonucleotide
acaaaguuucaccugaggg

SEQ ID NO: 491888 - RNA, 19 nt, Artificial Sequence
  Description of Artificial Sequence: Synthetic oligonucleotide
cuagagagcgauuauagcc

SEQ ID NO: 491889 - RNA, 19 nt, Artificial Sequence
  Description of Artificial Sequence: Synthetic oligonucleotide
aaugcugaagguuucgcag

SEQ ID NO: 491890 - RNA, 19 nt, Artificial Sequence
  Description of Artificial Sequence: Synthetic oligonucleotide
auagccaucuuucaacccc

SEQ ID NO: 491891 - RNA, 19 nt, Artificial Sequence
  Description of Artificial Sequence: Synthetic oligonucleotide
cacaauaacaaguuuagug

SEQ ID NO: 491892 - RNA, 19 nt, Artificial Sequence
  Description of Artificial Sequence: Synthetic oligonucleotide
aaaacuucguuauguguuc

SEQ ID NO: 491893 - RNA, 19 nt, Artificial Sequence
  Description of Artificial Sequence: Synthetic oligonucleotide
acauaaaucauccacaaua

SEQ ID NO: 491894 - RNA, 19 nt, Artificial Sequence
  Description of Artificial Sequence: Synthetic oligonucleotide
uauugauaagaucaauggc

SEQ ID NO: 491895 - RNA, 19 nt, Artificial Sequence
  Description of Artificial Sequence: Synthetic oligonucleotide
ucugacagaaaauaauggc

SEQ ID NO: 491896 - RNA, 19 nt, Artificial Sequence
  Description of Artificial Sequence: Synthetic oligonucleotide
uguuaauacaacacaguug

SEQ ID NO: 491897 - RNA, 19 nt, Artificial Sequence
  Description of Artificial Sequence: Synthetic oligonucleotide
uuuugaggggcacuuacgg

SEQ ID NO: 491898 - RNA, 19 nt, Artificial Sequence
  Description of Artificial Sequence: Synthetic oligonucleotide
aacacuguuguuugguggg

SEQ ID NO: 491899 - RNA, 19 nt, Artificial Sequence
  Description of Artificial Sequence: Synthetic oligonucleotide
aauacacuacauuugcugu

SEQ ID NO: 491900 - RNA, 19 nt, Artificial Sequence
  Description of Artificial Sequence: Synthetic oligonucleotide
ucucguaaaucuaaccagg

SEQ ID NO: 491901 - RNA, 19 nt, Artificial Sequence
  Description of Artificial Sequence: Synthetic oligonucleotide
guaaauugguuccugaccc

SEQ ID NO: 491902 - RNA, 19 nt, Artificial Sequence
  Description of Artificial Sequence: Synthetic oligonucleotide
uuucguggguaauauagcg

SEQ ID NO: 491903 - RNA, 19 nt, Artificial Sequence
  Description of Artificial Sequence: Synthetic oligonucleotide
aaaccauccaguaaaacug

SEQ ID NO: 491904 - RNA, 19 nt, Artificial Sequence
  Description of Artificial Sequence: Synthetic oligonucleotide
ucaccaaauggccagaaca

SEQ ID NO: 491905 - RNA, 19 nt, Artificial Sequence
  Description of Artificial Sequence: Synthetic oligonucleotide
cuuacgggaguuuaaauac

SEQ ID NO: 491906 - RNA, 19 nt, Artificial Sequence
  Description of Artificial Sequence: Synthetic oligonucleotide
uccaguaaugucuuuuccg

SEQ ID NO: 491907 - RNA, 19 nt, Artificial Sequence
  Description of Artificial Sequence: Synthetic oligonucleotide
uguuuugacagauuagaga

SEQ ID NO: 491908 - RNA, 19 nt, Artificial Sequence
  Description of Artificial Sequence: Synthetic oligonucleotide
uuuauaugccuuauagcca

SEQ ID NO: 491909 - RNA, 19 nt, Artificial Sequence
  Description of Artificial Sequence: Synthetic oligonucleotide
aaacaauuccaaacugucc

SEQ ID NO: 491910 - RNA, 19 nt, Artificial Sequence
  Description of Artificial Sequence: Synthetic oligonucleotide
uaaacaauuccaaacuguc

SEQ ID NO: 491911 - RNA, 19 nt, Artificial Sequence
  Description of Artificial Sequence: Synthetic oligonucleotide
uuuguuaauacaacacagu

SEQ ID NO: 491912 - RNA, 19 nt, Artificial Sequence
  Description of Artificial Sequence: Synthetic oligonucleotide
aacacaguuggucacacaa

SEQ ID NO: 491913 - RNA, 19 nt, Artificial Sequence
  Description of Artificial Sequence: Synthetic oligonucleotide
aaauugcaaccucauuacg

SEQ ID NO: 491914 - RNA, 19 nt, Artificial Sequence
  Description of Artificial Sequence: Synthetic oligonucleotide
cuuauagccaucuuucaac

SEQ ID NO: 491915 - RNA, 19 nt, Artificial Sequence
  Description of Artificial Sequence: Synthetic oligonucleotide
agcaguuugcauucuaagg

SEQ ID NO: 491916 - RNA, 19 nt, Artificial Sequence
  Description of Artificial Sequence: Synthetic oligonucleotide
uagagagcgauuauagccc

SEQ ID NO: 491917 - RNA, 19 nt, Artificial Sequence
  Description of Artificial Sequence: Synthetic oligonucleotide
uccaacguaauacacuaca

SEQ ID NO: 491918 - RNA, 19 nt, Artificial Sequence
  Description of Artificial Sequence: Synthetic oligonucleotide
ucaauaaucuuaauagcua

SEQ ID NO: 491919 - RNA, 19 nt, Artificial Sequence
  Description of Artificial Sequence: Synthetic oligonucleotide
aguaaugucuuuuccgcag

SEQ ID NO: 491920 - RNA, 19 nt, Artificial Sequence
  Description of Artificial Sequence: Synthetic oligonucleotide
cauucuaaggcaguuaggc

SEQ ID NO: 491921 - RNA, 19 nt, Artificial Sequence
  Description of Artificial Sequence: Synthetic oligonucleotide
gacagauuagagaggaugg

SEQ ID NO: 491922 - RNA, 19 nt, Artificial Sequence
  Description of Artificial Sequence: Synthetic oligonucleotide
cugaaaugcucacagaaac

SEQ ID NO: 491923 - RNA, 19 nt, Artificial Sequence
  Description of Artificial Sequence: Synthetic oligonucleotide
aucuaaccaggucugauag

SEQ ID NO: 491924 - RNA, 19 nt, Artificial Sequence
  Description of Artificial Sequence: Synthetic oligonucleotide
ucaggcgucucaaacauac

SEQ ID NO: 491925 - RNA, 19 nt, Artificial Sequence
  Description of Artificial Sequence: Synthetic oligonucleotide
uaauauagcguucuccaau

SEQ ID NO: 491926 - RNA, 19 nt, Artificial Sequence
  Description of Artificial Sequence: Synthetic oligonucleotide
uugggcggauacaugaagg

SEQ ID NO: 491927 - RNA, 19 nt, Artificial Sequence
  Description of Artificial Sequence: Synthetic oligonucleotide
acuuucguggguaauauag

SEQ ID NO: 491928 - RNA, 19 nt, Artificial Sequence
  Description of Artificial Sequence: Synthetic oligonucleotide
ugacagauuagagaggaug

SEQ ID NO: 491929 - RNA, 19 nt, Artificial Sequence
  Description of Artificial Sequence: Synthetic oligonucleotide
aggcgucucaaacauacac

SEQ ID NO: 491930 - RNA, 19 nt, Artificial Sequence
  Description of Artificial Sequence: Synthetic oligonucleotide
ggaucuggcaauuugaaac

SEQ ID NO: 491931 - RNA, 19 nt, Artificial Sequence
  Description of Artificial Sequence: Synthetic oligonucleotide
ggaguuuaaauacacugag

SEQ ID NO: 491932 - RNA, 19 nt, Artificial Sequence
  Description of Artificial Sequence: Synthetic oligonucleotide
uuggaaaucuuaauuuguc

SEQ ID NO: 491933 - RNA, 19 nt, Artificial Sequence
  Description of Artificial Sequence: Synthetic oligonucleotide
aaugauccgggcaaaacca

SEQ ID NO: 491934 - RNA, 19 nt, Artificial Sequence
  Description of Artificial Sequence: Synthetic oligonucleotide
caaugauccgggcaaaacc

SEQ ID NO: 491935 - RNA, 19 nt, Artificial Sequence
  Description of Artificial Sequence: Synthetic oligonucleotide
aaauacacugaggcucacc

SEQ ID NO: 491936 - RNA, 19 nt, Artificial Sequence
  Description of Artificial Sequence: Synthetic oligonucleotide
aauuaaugcugaagguuuc

SEQ ID NO: 491937 - RNA, 19 nt, Artificial Sequence
  Description of Artificial Sequence: Synthetic oligonucleotide
uaauagcuacaucucuucc

SEQ ID NO: 491938 - RNA, 19 nt, Artificial Sequence
  Description of Artificial Sequence: Synthetic oligonucleotide
uuugaggggcacuuacggg

SEQ ID NO: 491939 - RNA, 19 nt, Artificial Sequence
  Description of Artificial Sequence: Synthetic oligonucleotide
uucguuauguguucuggca

SEQ ID NO: 491940 - RNA, 19 nt, Artificial Sequence
  Description of Artificial Sequence: Synthetic oligonucleotide
uugaggggcacuuacggga

SEQ ID NO: 491941 - RNA, 19 nt, Artificial Sequence
  Description of Artificial Sequence: Synthetic oligonucleotide
gaagaugccgcaaagccac

SEQ ID NO: 491942 - RNA, 19 nt, Artificial Sequence
  Description of Artificial Sequence: Synthetic oligonucleotide
ugccuuauagccaucuuuc

SEQ ID NO: 491943 - RNA, 19 nt, Artificial Sequence
  Description of Artificial Sequence: Synthetic oligonucleotide
aguuaucuacuccucaaga

SEQ ID NO: 491944 - RNA, 19 nt, Artificial Sequence
  Description of Artificial Sequence: Synthetic oligonucleotide
ucuccaaugauccgggcaa

SEQ ID NO: 491945 - RNA, 19 nt, Artificial Sequence
  Description of Artificial Sequence: Synthetic oligonucleotide
uugauaagaucaauggcuu

SEQ ID NO: 491946 - RNA, 19 nt, Artificial Sequence
  Description of Artificial Sequence: Synthetic oligonucleotide
ugagggaaaggaucggcag

SEQ ID NO: 491947 - RNA, 19 nt, Artificial Sequence
  Description of Artificial Sequence: Synthetic oligonucleotide
ucacgcaacucaaucuuag

SEQ ID NO: 491948 - RNA, 19 nt, Artificial Sequence
  Description of Artificial Sequence: Synthetic oligonucleotide
ucuagagagcgauuauagc

SEQ ID NO: 491949 - RNA, 19 nt, Artificial Sequence
  Description of Artificial Sequence: Synthetic oligonucleotide
ucuccaacguaauacacua

SEQ ID NO: 491950 - RNA, 19 nt, Artificial Sequence
  Description of Artificial Sequence: Synthetic oligonucleotide
auagaugaugaccccaaca

SEQ ID NO: 491951 - RNA, 19 nt, Artificial Sequence
  Description of Artificial Sequence: Synthetic oligonucleotide
uuucgcagguuccagacau

SEQ ID NO: 491952 - RNA, 19 nt, Artificial Sequence
  Description of Artificial Sequence: Synthetic oligonucleotide
ugcuaacaguuuaacagcu

SEQ ID NO: 491953 - RNA, 19 nt, Artificial Sequence
  Description of Artificial Sequence: Synthetic oligonucleotide
uccuguuuuacgauguuua

SEQ ID NO: 491954 - RNA, 19 nt, Artificial Sequence
  Description of Artificial Sequence: Synthetic oligonucleotide
uucuccaacguaauacacu

SEQ ID NO: 491955 - RNA, 19 nt, Artificial Sequence
  Description of Artificial Sequence: Synthetic oligonucleotide
aaugccgcuggugaaaaca

SEQ ID NO: 491956 - RNA, 19 nt, Artificial Sequence
  Description of Artificial Sequence: Synthetic oligonucleotide
uuucugauaaaggaauuuc

SEQ ID NO: 491957 - RNA, 19 nt, Artificial Sequence
  Description of Artificial Sequence: Synthetic oligonucleotide
uacacaaaaggccaacguu

SEQ ID NO: 491958 - RNA, 19 nt, Artificial Sequence
  Description of Artificial Sequence: Synthetic oligonucleotide
aaucuaaccaggucugaua

SEQ ID NO: 491959 - RNA, 19 nt, Artificial Sequence
  Description of Artificial Sequence: Synthetic oligonucleotide
gugcuaacaguuuaacagc

SEQ ID NO: 491960 - RNA, 19 nt, Artificial Sequence
  Description of Artificial Sequence: Synthetic oligonucleotide
uuaauuugucaauaaucuu

SEQ ID NO: 491961 - RNA, 19 nt, Artificial Sequence
  Description of Artificial Sequence: Synthetic oligonucleotide
acuuacgggaguuuaaaua

SEQ ID NO: 491962 - RNA, 19 nt, Artificial Sequence
  Description of Artificial Sequence: Synthetic oligonucleotide
ccucuuaccaaaacgaggc

SEQ ID NO: 491963 - RNA, 19 nt, Artificial Sequence
  Description of Artificial Sequence: Synthetic oligonucleotide
auuaaugcugaagguuucg

SEQ ID NO: 491964 - RNA, 19 nt, Artificial Sequence
  Description of Artificial Sequence: Synthetic oligonucleotide
uacgggaguuuaaauacac

SEQ ID NO: 491965 - RNA, 19 nt, Artificial Sequence
  Description of Artificial Sequence: Synthetic oligonucleotide
auacacaaaaggccaacgu

SEQ ID NO: 491966 - RNA, 19 nt, Artificial Sequence
  Description of Artificial Sequence: Synthetic oligonucleotide
gucaccggcauacuguucc

SEQ ID NO: 491967 - RNA, 19 nt, Artificial Sequence
  Description of Artificial Sequence: Synthetic oligonucleotide
acuaguaucugaguaauua

SEQ ID NO: 491968 - RNA, 19 nt, Artificial Sequence
  Description of Artificial Sequence: Synthetic oligonucleotide
ugccucuuaccaaaacgag

SEQ ID NO: 491969 - RNA, 19 nt, Artificial Sequence
  Description of Artificial Sequence: Synthetic oligonucleotide
uuuauguaaauugguuccu

SEQ ID NO: 491970 - RNA, 19 nt, Artificial Sequence
  Description of Artificial Sequence: Synthetic oligonucleotide
auuauagcccuuguuccuc

SEQ ID NO: 491971 - RNA, 19 nt, Artificial Sequence
  Description of Artificial Sequence: Synthetic oligonucleotide
cuaaccaggucugauaguc

SEQ ID NO: 491972 - RNA, 19 nt, Artificial Sequence
  Description of Artificial Sequence: Synthetic oligonucleotide
guugguacuguaggaaagg

SEQ ID NO: 491973 - RNA, 19 nt, Artificial Sequence
  Description of Artificial Sequence: Synthetic oligonucleotide
acgaagcugacuuucuugu

SEQ ID NO: 491974 - RNA, 19 nt, Artificial Sequence
  Description of Artificial Sequence: Synthetic oligonucleotide
uuucacuugacaagaucau

SEQ ID NO: 491975 - RNA, 19 nt, Artificial Sequence
  Description of Artificial Sequence: Synthetic oligonucleotide
aacuucguuauguguucug

SEQ ID NO: 491976 - RNA, 19 nt, Artificial Sequence
  Description of Artificial Sequence: Synthetic oligonucleotide
uaaauugguuccugacccc

SEQ ID NO: 491977 - RNA, 19 nt, Artificial Sequence
  Description of Artificial Sequence: Synthetic oligonucleotide
acgcaacucaaucuuagga

SEQ ID NO: 491978 - RNA, 19 nt, Artificial Sequence
  Description of Artificial Sequence: Synthetic oligonucleotide
uucguggguaauauagcgu

SEQ ID NO: 491979 - RNA, 19 nt, Artificial Sequence
  Description of Artificial Sequence: Synthetic oligonucleotide
uuauguaaauugguuccug

SEQ ID NO: 491980 - RNA, 19 nt, Artificial Sequence
  Description of Artificial Sequence: Synthetic oligonucleotide
gaaaggaucggcagaugcc

SEQ ID NO: 491981 - RNA, 19 nt, Artificial Sequence
  Description of Artificial Sequence: Synthetic oligonucleotide
gaacuuuuguuaauacaac

SEQ ID NO: 491982 - RNA, 19 nt, Artificial Sequence
  Description of Artificial Sequence: Synthetic oligonucleotide
cuuauaacaacacugccau

SEQ ID NO: 491983 - RNA, 19 nt, Artificial Sequence
  Description of Artificial Sequence: Synthetic oligonucleotide
auagcguucuccaaucuug

SEQ ID NO: 491984 - RNA, 19 nt, Artificial Sequence
  Description of Artificial Sequence: Synthetic oligonucleotide
auucuaaggcaguuaggcu

SEQ ID NO: 491985 - RNA, 19 nt, Artificial Sequence
  Description of Artificial Sequence: Synthetic oligonucleotide
aaauugguuccugacccca

SEQ ID NO: 491986 - RNA, 19 nt, Artificial Sequence
  Description of Artificial Sequence: Synthetic oligonucleotide
accguauguauuuauuaau

SEQ ID NO: 491987 - RNA, 19 nt, Artificial Sequence
  Description of Artificial Sequence: Synthetic oligonucleotide
ucguuauguguucuggcaa

SEQ ID NO: 491988 - RNA, 19 nt, Artificial Sequence
  Description of Artificial Sequence: Synthetic oligonucleotide
ucguaaaucuaaccagguc

SEQ ID NO: 491989 - RNA, 19 nt, Artificial Sequence
  Description of Artificial Sequence: Synthetic oligonucleotide
gugucauuuuggaagagug

SEQ ID NO: 491990 - RNA, 19 nt, Artificial Sequence
  Description of Artificial Sequence: Synthetic oligonucleotide
ggaaaggaucggcagaugc

SEQ ID NO: 491991 - RNA, 19 nt, Artificial Sequence
  Description of Artificial Sequence: Synthetic oligonucleotide
aaccugaccguauguauuu

SEQ ID NO: 491992 - RNA, 19 nt, Artificial Sequence
  Description of Artificial Sequence: Synthetic oligonucleotide
ucuuaccaaaacgaggcuc

SEQ ID NO: 491993 - RNA, 19 nt, Artificial Sequence
  Description of Artificial Sequence: Synthetic oligonucleotide
gauaggugcugccucuuac

SEQ ID NO: 491994 - RNA, 19 nt, Artificial Sequence
  Description of Artificial Sequence: Synthetic oligonucleotide
cacaaaguuucaccugagg

SEQ ID NO: 491995 - RNA, 19 nt, Artificial Sequence
  Description of Artificial Sequence: Synthetic oligonucleotide
cugauuugcaaaggcacag

SEQ ID NO: 491996 - RNA, 19 nt, Artificial Sequence
  Description of Artificial Sequence: Synthetic oligonucleotide
ucuaaggcaguuaggcuuu

SEQ ID NO: 491997 - RNA, 19 nt, Artificial Sequence
  Description of Artificial Sequence: Synthetic oligonucleotide
ugggguacccaccacugac

SEQ ID NO: 491998 - RNA, 19 nt, Artificial Sequence
  Description of Artificial Sequence: Synthetic oligonucleotide
aaaucuaaccaggucugau

SEQ ID NO: 491999 - RNA, 19 nt, Artificial Sequence
  Description of Artificial Sequence: Synthetic oligonucleotide
ugggcggauacaugaaggc

SEQ ID NO: 492000 - RNA, 19 nt, Artificial Sequence
  Description of Artificial Sequence: Synthetic oligonucleotide
ucuugcauuccagcucucg

SEQ ID NO: 492001 - RNA, 19 nt, Artificial Sequence
  Description of Artificial Sequence: Synthetic oligonucleotide
aagcugacuuucuuguuuu

SEQ ID NO: 492002 - RNA, 19 nt, Artificial Sequence
  Description of Artificial Sequence: Synthetic oligonucleotide
accucgagucaucacuuuc

SEQ ID NO: 492003 - RNA, 19 nt, Artificial Sequence
  Description of Artificial Sequence: Synthetic oligonucleotide
auaacaacaaacacucuuu

SEQ ID NO: 492004 - RNA, 19 nt, Artificial Sequence
  Description of Artificial Sequence: Synthetic oligonucleotide
aaugucuuuuccgcagugu

SEQ ID NO: 492005 - RNA, 19 nt, Artificial Sequence
  Description of Artificial Sequence: Synthetic oligonucleotide
ccaguaaugucuuuuccgc

SEQ ID NO: 492006 - RNA, 19 nt, Artificial Sequence
  Description of Artificial Sequence: Synthetic oligonucleotide
uauagcguucuccaaucuu

SEQ ID NO: 492007 - RNA, 19 nt, Artificial Sequence
  Description of Artificial Sequence: Synthetic oligonucleotide
agaugaugaccccaacaga

SEQ ID NO: 492008 - RNA, 19 nt, Artificial Sequence
  Description of Artificial Sequence: Synthetic oligonucleotide
accggcauacuguucccac

SEQ ID NO: 492009 - RNA, 19 nt, Artificial Sequence
  Description of Artificial Sequence: Synthetic oligonucleotide
ugugaugcacuugcugucc

SEQ ID NO: 492010 - RNA, 19 nt, Artificial Sequence
  Description of Artificial Sequence: Synthetic oligonucleotide
cagaaaauaauggcaguuc

SEQ ID NO: 492011 - RNA, 19 nt, Artificial Sequence
  Description of Artificial Sequence: Synthetic oligonucleotide
uuaaaccugaccguaugua

SEQ ID NO: 492012 - RNA, 19 nt, Artificial Sequence
  Description of Artificial Sequence: Synthetic oligonucleotide
ugugcgggauacugcagcc

SEQ ID NO: 492013 - RNA, 19 nt, Artificial Sequence
  Description of Artificial Sequence: Synthetic oligonucleotide
auuuuggaagagugugaug

SEQ ID NO: 492014 - RNA, 19 nt, Artificial Sequence
  Description of Artificial Sequence: Synthetic oligonucleotide
ugugucauuuuggaagagu

SEQ ID NO: 492015 - RNA, 19 nt, Artificial Sequence
  Description of Artificial Sequence: Synthetic oligonucleotide
gcgauuauagcccuuguuc

SEQ ID NO: 492016 - RNA, 19 nt, Artificial Sequence
  Description of Artificial Sequence: Synthetic oligonucleotide
uuaauacaacacaguuggu

SEQ ID NO: 492017 - RNA, 19 nt, Artificial Sequence
  Description of Artificial Sequence: Synthetic oligonucleotide
ugaaaugaagaugccgcaa

SEQ ID NO: 492018 - RNA, 19 nt, Artificial Sequence
  Description of Artificial Sequence: Synthetic oligonucleotide
ugauaagaucaauggcuuc

SEQ ID NO: 492019 - RNA, 19 nt, Artificial Sequence
  Description of Artificial Sequence: Synthetic oligonucleotide
aacguuugcugaguugcug

SEQ ID NO: 492020 - RNA, 19 nt, Artificial Sequence
  Description of Artificial Sequence: Synthetic oligonucleotide
aaguuauugauaagaucaa

SEQ ID NO: 492021 - RNA, 19 nt, Artificial Sequence
  Description of Artificial Sequence: Synthetic oligonucleotide
uuaccuccauaaacaauuc

SEQ ID NO: 492022 - RNA, 19 nt, Artificial Sequence
  Description of Artificial Sequence: Synthetic oligonucleotide
acguaauacacuacauuug

SEQ ID NO: 492023 - RNA, 19 nt, Artificial Sequence
  Description of Artificial Sequence: Synthetic oligonucleotide
aguugguacuguaggaaag

SEQ ID NO: 492024 - RNA, 19 nt, Artificial Sequence
  Description of Artificial Sequence: Synthetic oligonucleotide
cauuacgaagcugacuuuc

SEQ ID NO: 492025 - RNA, 19 nt, Artificial Sequence
  Description of Artificial Sequence: Synthetic oligonucleotide
agcuuuguucucaucugac

SEQ ID NO: 492026 - RNA, 19 nt, Artificial Sequence
  Description of Artificial Sequence: Synthetic oligonucleotide
uuuacaacaccagggugau

SEQ ID NO: 492027 - RNA, 19 nt, Artificial Sequence
  Description of Artificial Sequence: Synthetic oligonucleotide
uacgauguuuaccuccaua

SEQ ID NO: 492028 - RNA, 19 nt, Artificial Sequence
  Description of Artificial Sequence: Synthetic oligonucleotide
uccaaucuccaguaauguc

SEQ ID NO: 492029 - RNA, 19 nt, Artificial Sequence
  Description of Artificial Sequence: Synthetic oligonucleotide
cugccucuuaccaaaacga

SEQ ID NO: 492030 - RNA, 19 nt, Artificial Sequence
  Description of Artificial Sequence: Synthetic oligonucleotide
ugucgcuguggcuagcgcu

SEQ ID NO: 492031 - RNA, 19 nt, Artificial Sequence
  Description of Artificial Sequence: Synthetic oligonucleotide
uuauagcccuuguuccuca

SEQ ID NO: 492032 - RNA, 19 nt, Artificial Sequence
  Description of Artificial Sequence: Synthetic oligonucleotide
cuaguaucugaguaauuaa

SEQ ID NO: 492033 - RNA, 19 nt, Artificial Sequence
  Description of Artificial Sequence: Synthetic oligonucleotide
auacuguucccaccucgag

SEQ ID NO: 492034 - RNA, 19 nt, Artificial Sequence
  Description of Artificial Sequence: Synthetic oligonucleotide
cacgcaacucaaucuuagg

SEQ ID NO: 492035 - RNA, 19 nt, Artificial Sequence
  Description of Artificial Sequence: Synthetic oligonucleotide
agaaaucuccuuccacgga

SEQ ID NO: 492036 - RNA, 19 nt, Artificial Sequence
  Description of Artificial Sequence: Synthetic oligonucleotide
gaauuaaugcugaagguuu

SEQ ID NO: 492037 - RNA, 19 nt, Artificial Sequence
  Description of Artificial Sequence: Synthetic oligonucleotide
agagcgauuauagcccuug

SEQ ID NO: 492038 - RNA, 19 nt, Artificial Sequence
  Description of Artificial Sequence: Synthetic oligonucleotide
augccuuauagccaucuuu

SEQ ID NO: 492039 - RNA, 19 nt, Artificial Sequence
  Description of Artificial Sequence: Synthetic oligonucleotide
aggugugcgggauacugca

SEQ ID NO: 492040 - RNA, 19 nt, Artificial Sequence
  Description of Artificial Sequence: Synthetic oligonucleotide
caguuggucacacaaaaua

SEQ ID NO: 492041 - RNA, 19 nt, Artificial Sequence
  Description of Artificial Sequence: Synthetic oligonucleotide
gcuccaaugggaauuaaug

SEQ ID NO: 492042 - RNA, 19 nt, Artificial Sequence
  Description of Artificial Sequence: Synthetic oligonucleotide
cauggauaggugcugccuc

SEQ ID NO: 492043 - RNA, 19 nt, Artificial Sequence
  Description of Artificial Sequence: Synthetic oligonucleotide
augcaucuggucuguguag

SEQ ID NO: 492044 - RNA, 19 nt, Artificial Sequence
  Description of Artificial Sequence: Synthetic oligonucleotide
uaggacuuuauaugccuua

SEQ ID NO: 492045 - RNA, 19 nt, Artificial Sequence
  Description of Artificial Sequence: Synthetic oligonucleotide
cucauuacgaagcugacuu

SEQ ID NO: 492046 - RNA, 19 nt, Artificial Sequence
  Description of Artificial Sequence: Synthetic oligonucleotide
cuuaccaaaacgaggcucu

SEQ ID NO: 492047 - RNA, 19 nt, Artificial Sequence
  Description of Artificial Sequence: Synthetic oligonucleotide
aaacuucguuauguguucu

SEQ ID NO: 492048 - RNA, 19 nt, Artificial Sequence
  Description of Artificial Sequence: Synthetic oligonucleotide
accucccacauucuggcca

SEQ ID NO: 492049 - RNA, 19 nt, Artificial Sequence
  Description of Artificial Sequence: Synthetic oligonucleotide
cagcaaguuauugauaaga

SEQ ID NO: 492050 - RNA, 19 nt, Artificial Sequence
  Description of Artificial Sequence: Synthetic oligonucleotide
agccacuaguaucugagua

SEQ ID NO: 492051 - RNA, 19 nt, Artificial Sequence
  Description of Artificial Sequence: Synthetic oligonucleotide
agccacgggugacucaagg

SEQ ID NO: 492052 - RNA, 19 nt, Artificial Sequence
  Description of Artificial Sequence: Synthetic oligonucleotide
gauacaugaaggcugcauu

SEQ ID NO: 492053 - RNA, 19 nt, Artificial Sequence
  Description of Artificial Sequence: Synthetic oligonucleotide
agcaaguuaucuacuccuc

SEQ ID NO: 492054 - RNA, 19 nt, Artificial Sequence
  Description of Artificial Sequence: Synthetic oligonucleotide
auacacuacauuugcugua

SEQ ID NO: 492055 - RNA, 19 nt, Artificial Sequence
  Description of Artificial Sequence: Synthetic oligonucleotide
uaaaucuaaccaggucuga

SEQ ID NO: 492056 - RNA, 19 nt, Artificial Sequence
  Description of Artificial Sequence: Synthetic oligonucleotide
ggauugggcggauacauga

SEQ ID NO: 492057 - RNA, 19 nt, Artificial Sequence
  Description of Artificial Sequence: Synthetic oligonucleotide
cgauuauagcccuuguucc

SEQ ID NO: 492058 - RNA, 19 nt, Artificial Sequence
  Description of Artificial Sequence: Synthetic oligonucleotide
ugucuagagagcgauuaua

SEQ ID NO: 492059 - RNA, 19 nt, Artificial Sequence
  Description of Artificial Sequence: Synthetic oligonucleotide
uugguacuguaggaaagga

SEQ ID NO: 492060 - RNA, 19 nt, Artificial Sequence
  Description of Artificial Sequence: Synthetic oligonucleotide
caaguuaucuacuccucaa

SEQ ID NO: 492061 - RNA, 19 nt, Artificial Sequence
  Description of Artificial Sequence: Synthetic oligonucleotide
ccaacguuugcugaguugc

SEQ ID NO: 492062 - RNA, 19 nt, Artificial Sequence
  Description of Artificial Sequence: Synthetic oligonucleotide
gaaaucuccuuccacggau

SEQ ID NO: 492063 - RNA, 19 nt, Artificial Sequence
  Description of Artificial Sequence: Synthetic oligonucleotide
aggcaaauguuaaaccuga

SEQ ID NO: 492064 - RNA, 19 nt, Artificial Sequence
  Description of Artificial Sequence: Synthetic oligonucleotide
agcaaguuauugauaagau

SEQ ID NO: 492065 - RNA, 19 nt, Artificial Sequence
  Description of Artificial Sequence: Synthetic oligonucleotide
auacaucaacagugcuaac

SEQ ID NO: 492066 - RNA, 19 nt, Artificial Sequence
  Description of Artificial Sequence: Synthetic oligonucleotide
uccucaagaguuugcuuau

SEQ ID NO: 492067 - RNA, 19 nt, Artificial Sequence
  Description of Artificial Sequence: Synthetic oligonucleotide
agauacaucaacagugcua

SEQ ID NO: 492068 - RNA, 19 nt, Artificial Sequence
  Description of Artificial Sequence: Synthetic oligonucleotide
ugauuugucuuggcaacuc

SEQ ID NO: 492069 - RNA, 19 nt, Artificial Sequence
  Description of Artificial Sequence: Synthetic oligonucleotide
gcuuauaacaacacugcca

SEQ ID NO: 492070 - RNA, 19 nt, Artificial Sequence
  Description of Artificial Sequence: Synthetic oligonucleotide
ucgagucaucacuuucgug

SEQ ID NO: 492071 - RNA, 19 nt, Artificial Sequence
  Description of Artificial Sequence: Synthetic oligonucleotide
uacauuugcuguagugauu

SEQ ID NO: 492072 - RNA, 19 nt, Artificial Sequence
  Description of Artificial Sequence: Synthetic oligonucleotide
ucugggaacuuuuguuaau

SEQ ID NO: 492073 - RNA, 19 nt, Artificial Sequence
  Description of Artificial Sequence: Synthetic oligonucleotide
gguuuuguccacacuguag

SEQ ID NO: 492074 - RNA, 19 nt, Artificial Sequence
  Description of Artificial Sequence: Synthetic oligonucleotide
cuacuccucaagaguuugc

SEQ ID NO: 492075 - RNA, 19 nt, Artificial Sequence
  Description of Artificial Sequence: Synthetic oligonucleotide
ugccgcaaagccacuagua

SEQ ID NO: 492076 - RNA, 19 nt, Artificial Sequence
  Description of Artificial Sequence: Synthetic oligonucleotide
acagauuagagaggaugga

SEQ ID NO: 492077 - RNA, 19 nt, Artificial Sequence
  Description of Artificial Sequence: Synthetic oligonucleotide
cgggaguuuaaauacacug

SEQ ID NO: 492078 - RNA, 19 nt, Artificial Sequence
  Description of Artificial Sequence: Synthetic oligonucleotide
guaauauagcguucuccaa

SEQ ID NO: 492079 - RNA, 19 nt, Artificial Sequence
  Description of Artificial Sequence: Synthetic oligonucleotide
ucacuuucguggguaauau

SEQ ID NO: 492080 - RNA, 19 nt, Artificial Sequence
  Description of Artificial Sequence: Synthetic oligonucleotide
gucagaggaugcugacacg

SEQ ID NO: 492081 - RNA, 19 nt, Artificial Sequence
  Description of Artificial Sequence: Synthetic oligonucleotide
aggacugucgcuguggcua

SEQ ID NO: 492082 - RNA, 19 nt, Artificial Sequence
  Description of Artificial Sequence: Synthetic oligonucleotide
uguggcuagcgcucaggcu

SEQ ID NO: 492083 - RNA, 19 nt, Artificial Sequence
  Description of Artificial Sequence: Synthetic oligonucleotide
gcgucucaaacauacacuc

SEQ ID NO: 492084 - RNA, 19 nt, Artificial Sequence
  Description of Artificial Sequence: Synthetic oligonucleotide
gaagagugugaugcacuug

SEQ ID NO: 492085 - RNA, 19 nt, Artificial Sequence
  Description of Artificial Sequence: Synthetic oligonucleotide
ggcggauacaugaaggcug

SEQ ID NO: 492086 - RNA, 19 nt, Artificial Sequence
  Description of Artificial Sequence: Synthetic oligonucleotide
gguuucgcagguuccagac

SEQ ID NO: 492087 - RNA, 19 nt, Artificial Sequence
  Description of Artificial Sequence: Synthetic oligonucleotide
cauacuguucccaccucga

SEQ ID NO: 492088 - RNA, 19 nt, Artificial Sequence
  Description of Artificial Sequence: Synthetic oligonucleotide
ggguaauauagcguucucc

SEQ ID NO: 492089 - RNA, 19 nt, Artificial Sequence
  Description of Artificial Sequence: Synthetic oligonucleotide
agacagguuuaauguauua

SEQ ID NO: 492090 - RNA, 19 nt, Artificial Sequence
  Description of Artificial Sequence: Synthetic oligonucleotide
gaagcugacuuucuuguuu

SEQ ID NO: 492091 - RNA, 19 nt, Artificial Sequence
  Description of Artificial Sequence: Synthetic oligonucleotide
aacucaaucuuaggacuuu

SEQ ID NO: 492092 - RNA, 19 nt, Artificial Sequence
  Description of Artificial Sequence: Synthetic oligonucleotide
acugucgcuguggcuagcg

SEQ ID NO: 492093 - RNA, 19 nt, Artificial Sequence
  Description of Artificial Sequence: Synthetic oligonucleotide
agcgauuauagcccuuguu

SEQ ID NO: 492094 - RNA, 19 nt, Artificial Sequence
  Description of Artificial Sequence: Synthetic oligonucleotide
aaggaucggcagaugccag

SEQ ID NO: 492095 - RNA, 19 nt, Artificial Sequence
  Description of Artificial Sequence: Synthetic oligonucleotide
aacacucuuucaggcgucu

SEQ ID NO: 492096 - RNA, 19 nt, Artificial Sequence
  Description of Artificial Sequence: Synthetic oligonucleotide
gggaguuuaaauacacuga

SEQ ID NO: 492097 - RNA, 19 nt, Artificial Sequence
  Description of Artificial Sequence: Synthetic oligonucleotide
cuaacaguuuaacagcuuu

SEQ ID NO: 492098 - RNA, 19 nt, Artificial Sequence
  Description of Artificial Sequence: Synthetic oligonucleotide
uuaccaaaacgaggcucug

SEQ ID NO: 492099 - RNA, 19 nt, Artificial Sequence
  Description of Artificial Sequence: Synthetic oligonucleotide
agguuucgcagguuccaga

SEQ ID NO: 492100 - RNA, 19 nt, Artificial Sequence
  Description of Artificial Sequence: Synthetic oligonucleotide
accucauuacgaagcugac

SEQ ID NO: 492101 - RNA, 19 nt, Artificial Sequence
  Description of Artificial Sequence: Synthetic oligonucleotide
caguaaugucuuuuccgca

SEQ ID NO: 492102 - RNA, 19 nt, Artificial Sequence
  Description of Artificial Sequence: Synthetic oligonucleotide
acggauugggcggauacau

SEQ ID NO: 492103 - RNA, 19 nt, Artificial Sequence
  Description of Artificial Sequence: Synthetic oligonucleotide
uuaggcuuuugaggggcac

SEQ ID NO: 492104 - RNA, 19 nt, Artificial Sequence
  Description of Artificial Sequence: Synthetic oligonucleotide
ggcugaucaggugugcggg

SEQ ID NO: 492105 - RNA, 19 nt, Artificial Sequence
  Description of Artificial Sequence: Synthetic oligonucleotide
agguuuuguccacacugua

SEQ ID NO: 492106 - RNA, 19 nt, Artificial Sequence
  Description of Artificial Sequence: Synthetic oligonucleotide
agcugacuuucuuguuuug

SEQ ID NO: 492107 - RNA, 19 nt, Artificial Sequence
  Description of Artificial Sequence: Synthetic oligonucleotide
cagcucucguaaaucuaac

SEQ ID NO: 492108 - RNA, 19 nt, Artificial Sequence
  Description of Artificial Sequence: Synthetic oligonucleotide
augccgcaaagccacuagu

SEQ ID NO: 492109 - RNA, 19 nt, Artificial Sequence
  Description of Artificial Sequence: Synthetic oligonucleotide
gcaaguuaucuacuccuca

SEQ ID NO: 492110 - RNA, 19 nt, Artificial Sequence
  Description of Artificial Sequence: Synthetic oligonucleotide
uaguguuucugggaacuuu

SEQ ID NO: 492111 - RNA, 19 nt, Artificial Sequence
  Description of Artificial Sequence: Synthetic oligonucleotide
caggcugaucaggugugcg

SEQ ID NO: 492112 - RNA, 19 nt, Artificial Sequence
  Description of Artificial Sequence: Synthetic oligonucleotide
ccuguuuuacgauguuuac

SEQ ID NO: 492113 - RNA, 19 nt, Artificial Sequence
  Description of Artificial Sequence: Synthetic oligonucleotide
cguaaaucuaaccaggucu

SEQ ID NO: 492114 - RNA, 19 nt, Artificial Sequence
  Description of Artificial Sequence: Synthetic oligonucleotide
ucuuggcaacucagauaca

SEQ ID NO: 492115 - RNA, 19 nt, Artificial Sequence
  Description of Artificial Sequence: Synthetic oligonucleotide
uggcuagcgcucaggcuga

SEQ ID NO: 492116 - RNA, 19 nt, Artificial Sequence
  Description of Artificial Sequence: Synthetic oligonucleotide
aaaucuccuuccacggauu

SEQ ID NO: 492117 - RNA, 19 nt, Artificial Sequence
  Description of Artificial Sequence: Synthetic oligonucleotide
uggucaccggcauacuguu

SEQ ID NO: 492118 - RNA, 19 nt, Artificial Sequence
  Description of Artificial Sequence: Synthetic oligonucleotide
aaucuccaguaaugucuuu

SEQ ID NO: 492119 - RNA, 19 nt, Artificial Sequence
  Description of Artificial Sequence: Synthetic oligonucleotide
acgaggcucugguaggaaa

SEQ ID NO: 492120 - RNA, 19 nt, Artificial Sequence
  Description of Artificial Sequence: Synthetic oligonucleotide
uuuccgcagugugucuuug

SEQ ID NO: 492121 - RNA, 19 nt, Artificial Sequence
  Description of Artificial Sequence: Synthetic oligonucleotide
ucuggcaaccugcccuuuu

SEQ ID NO: 492122 - RNA, 19 nt, Artificial Sequence
  Description of Artificial Sequence: Synthetic oligonucleotide
uuacgauguuuaccuccau

SEQ ID NO: 492123 - RNA, 19 nt, Artificial Sequence
  Description of Artificial Sequence: Synthetic oligonucleotide
caacagugcuaacaguuua

SEQ ID NO: 492124 - RNA, 19 nt, Artificial Sequence
  Description of Artificial Sequence: Synthetic oligonucleotide
cucguaaaucuaaccaggu

SEQ ID NO: 492125 - RNA, 19 nt, Artificial Sequence
  Description of Artificial Sequence: Synthetic oligonucleotide
guaaugucuuuuccgcagu

SEQ ID NO: 492126 - RNA, 19 nt, Artificial Sequence
  Description of Artificial Sequence: Synthetic oligonucleotide
uguucccaccucgagucau

SEQ ID NO: 492127 - RNA, 19 nt, Artificial Sequence
  Description of Artificial Sequence: Synthetic oligonucleotide
gcauucuaaggcaguuagg

SEQ ID NO: 492128 - RNA, 19 nt, Artificial Sequence
  Description of Artificial Sequence: Synthetic oligonucleotide
ggaauuaaugcugaagguu

SEQ ID NO: 492129 - RNA, 19 nt, Artificial Sequence
  Description of Artificial Sequence: Synthetic oligonucleotide
uucaggcgucucaaacaua

SEQ ID NO: 492130 - RNA, 19 nt, Artificial Sequence
  Description of Artificial Sequence: Synthetic oligonucleotide
accaaauggccagaacauu

SEQ ID NO: 492131 - RNA, 19 nt, Artificial Sequence
  Description of Artificial Sequence: Synthetic oligonucleotide
caccaaauggccagaacau

SEQ ID NO: 492132 - RNA, 19 nt, Artificial Sequence
  Description of Artificial Sequence: Synthetic oligonucleotide
auguuaaaccugaccguau

SEQ ID NO: 492133 - RNA, 19 nt, Artificial Sequence
  Description of Artificial Sequence: Synthetic oligonucleotide
acgggaguuuaaauacacu

SEQ ID NO: 492134 - RNA, 19 nt, Artificial Sequence
  Description of Artificial Sequence: Synthetic oligonucleotide
ccgcaaagccacuaguauc

SEQ ID NO: 492135 - RNA, 19 nt, Artificial Sequence
  Description of Artificial Sequence: Synthetic oligonucleotide
agcuccaaugggaauuaau

SEQ ID NO: 492136 - RNA, 19 nt, Artificial Sequence
  Description of Artificial Sequence: Synthetic oligonucleotide
guaauggaccauccauccu

SEQ ID NO: 492137 - RNA, 19 nt, Artificial Sequence
  Description of Artificial Sequence: Synthetic oligonucleotide
cugggaacuuuuguuaaua

SEQ ID NO: 492138 - RNA, 19 nt, Artificial Sequence
  Description of Artificial Sequence: Synthetic oligonucleotide
aacgaggcucugguaggaa

SEQ ID NO: 492139 - RNA, 19 nt, Artificial Sequence
  Description of Artificial Sequence: Synthetic oligonucleotide
acucaaucuuaggacuuua

SEQ ID NO: 492140 - RNA, 19 nt, Artificial Sequence
  Description of Artificial Sequence: Synthetic oligonucleotide
cuguaacacaguugguacu

SEQ ID NO: 492141 - RNA, 19 nt, Artificial Sequence
  Description of Artificial Sequence: Synthetic oligonucleotide
cuucaugagaaaucuccuu

SEQ ID NO: 492142 - RNA, 19 nt, Artificial Sequence
  Description of Artificial Sequence: Synthetic oligonucleotide
uucgcagguuccagacaua

SEQ ID NO: 492143 - RNA, 19 nt, Artificial Sequence
  Description of Artificial Sequence: Synthetic oligonucleotide
gccaacguuugcugaguug

SEQ ID NO: 492144 - RNA, 19 nt, Artificial Sequence
  Description of Artificial Sequence: Synthetic oligonucleotide
uagccacgggugacucaag

SEQ ID NO: 492145 - RNA, 19 nt, Artificial Sequence
  Description of Artificial Sequence: Synthetic oligonucleotide
gcggauacaugaaggcugc

SEQ ID NO: 492146 - RNA, 19 nt, Artificial Sequence
  Description of Artificial Sequence: Synthetic oligonucleotide
guaccggcuuccuguguca

SEQ ID NO: 492147 - RNA, 19 nt, Artificial Sequence
  Description of Artificial Sequence: Synthetic oligonucleotide
ggacugucgcuguggcuag

SEQ ID NO: 492148 - RNA, 19 nt, Artificial Sequence
  Description of Artificial Sequence: Synthetic oligonucleotide
cugcaaggcaaauguuaaa

SEQ ID NO: 492149 - RNA, 19 nt, Artificial Sequence
  Description of Artificial Sequence: Synthetic oligonucleotide
ccaaugauccgggcaaaac

SEQ ID NO: 492150 - RNA, 19 nt, Artificial Sequence
  Description of Artificial Sequence: Synthetic oligonucleotide
ccacggauugggcggauac

SEQ ID NO: 492151 - RNA, 19 nt, Artificial Sequence
  Description of Artificial Sequence: Synthetic oligonucleotide
aagaugccgcaaagccacu

SEQ ID NO: 492152 - RNA, 19 nt, Artificial Sequence
  Description of Artificial Sequence: Synthetic oligonucleotide
caacucaaucuuaggacuu

SEQ ID NO: 492153 - RNA, 19 nt, Artificial Sequence
  Description of Artificial Sequence: Synthetic oligonucleotide
ggaucggcagaugccagca

SEQ ID NO: 492154 - RNA, 19 nt, Artificial Sequence
  Description of Artificial Sequence: Synthetic oligonucleotide
gugcgggauacugcagccc

SEQ ID NO: 492155 - RNA, 19 nt, Artificial Sequence
  Description of Artificial Sequence: Synthetic oligonucleotide
ccggcauacuguucccacc

SEQ ID NO: 492156 - RNA, 19 nt, Artificial Sequence
  Description of Artificial Sequence: Synthetic oligonucleotide
ggcaugagagcaugcugaa

SEQ ID NO: 492157 - RNA, 19 nt, Artificial Sequence
  Description of Artificial Sequence: Synthetic oligonucleotide
cucgagucaucacuuucgu

SEQ ID NO: 492158 - RNA, 19 nt, Artificial Sequence
  Description of Artificial Sequence: Synthetic oligonucleotide
gagcgauuauagcccuugu

SEQ ID NO: 492159 - RNA, 19 nt, Artificial Sequence
  Description of Artificial Sequence: Synthetic oligonucleotide
agaugccgcaaagccacua

SEQ ID NO: 492160 - RNA, 19 nt, Artificial Sequence
  Description of Artificial Sequence: Synthetic oligonucleotide
acgcucacugagggcuuuc

SEQ ID NO: 492161 - RNA, 19 nt, Artificial Sequence
  Description of Artificial Sequence: Synthetic oligonucleotide
aucuugcauuccagcucuc

SEQ ID NO: 492162 - RNA, 19 nt, Artificial Sequence
  Description of Artificial Sequence: Synthetic oligonucleotide
caggcgucucaaacauaca

SEQ ID NO: 492163 - RNA, 19 nt, Artificial Sequence
  Description of Artificial Sequence: Synthetic oligonucleotide
aggggcacuuacgggaguu

SEQ ID NO: 492164 - RNA, 19 nt, Artificial Sequence
  Description of Artificial Sequence: Synthetic oligonucleotide
ccaaauggccagaacauuu

SEQ ID NO: 492165 - RNA, 19 nt, Artificial Sequence
  Description of Artificial Sequence: Synthetic oligonucleotide
ggcgucucaaacauacacu

SEQ ID NO: 492166 - RNA, 19 nt, Artificial Sequence
  Description of Artificial Sequence: Synthetic oligonucleotide
cacuuacgggaguuuaaau

SEQ ID NO: 492167 - RNA, 19 nt, Artificial Sequence
  Description of Artificial Sequence: Synthetic oligonucleotide
cacgggugacucaagguuu

SEQ ID NO: 492168 - RNA, 19 nt, Artificial Sequence
  Description of Artificial Sequence: Synthetic oligonucleotide
cugggguacccaccacuga

SEQ ID NO: 492169 - RNA, 19 nt, Artificial Sequence
  Description of Artificial Sequence: Synthetic oligonucleotide
ccguauguauuuauuaauu

SEQ ID NO: 492170 - RNA, 19 nt, Artificial Sequence
  Description of Artificial Sequence: Synthetic oligonucleotide
gcacuuacgggaguuuaaa

SEQ ID NO: 492171 - RNA, 19 nt, Artificial Sequence
  Description of Artificial Sequence: Synthetic oligonucleotide
cacuuucguggguaauaua

SEQ ID NO: 492172 - RNA, 19 nt, Artificial Sequence
  Description of Artificial Sequence: Synthetic oligonucleotide
ggguuagcuccaaugggaa

SEQ ID NO: 492173 - RNA, 19 nt, Artificial Sequence
  Description of Artificial Sequence: Synthetic oligonucleotide
uagcuccaaugggaauuaa

SEQ ID NO: 492174 - RNA, 19 nt, Artificial Sequence
  Description of Artificial Sequence: Synthetic oligonucleotide
cacggauugggcggauaca

SEQ ID NO: 492175 - RNA, 19 nt, Artificial Sequence
  Description of Artificial Sequence: Synthetic oligonucleotide
acgggugacucaagguuuu

SEQ ID NO: 492176 - RNA, 19 nt, Artificial Sequence
  Description of Artificial Sequence: Synthetic oligonucleotide
gacugucgcuguggcuagc

SEQ ID NO: 492177 - RNA, 19 nt, Artificial Sequence
  Description of Artificial Sequence: Synthetic oligonucleotide
cuuccacggauugggcgga

SEQ ID NO: 492178 - RNA, 19 nt, Artificial Sequence
  Description of Artificial Sequence: Synthetic oligonucleotide
caacguuugcugaguugcu

SEQ ID NO: 492179 - RNA, 19 nt, Artificial Sequence
  Description of Artificial Sequence: Synthetic oligonucleotide
accggcuuccugugucauu

SEQ ID NO: 492180 - RNA, 19 nt, Artificial Sequence
  Description of Artificial Sequence: Synthetic oligonucleotide
cguggguaauauagcguuc

SEQ ID NO: 492181 - RNA, 19 nt, Artificial Sequence
  Description of Artificial Sequence: Synthetic oligonucleotide
uccacggauugggcggaua

SEQ ID NO: 492182 - RNA, 19 nt, Artificial Sequence
  Description of Artificial Sequence: Synthetic oligonucleotide
gccgcaaagccacuaguau

SEQ ID NO: 492183 - RNA, 19 nt, Artificial Sequence
  Description of Artificial Sequence: Synthetic oligonucleotide
gggaaaggaucggcagaug

SEQ ID NO: 492184 - RNA, 19 nt, Artificial Sequence
  Description of Artificial Sequence: Synthetic oligonucleotide
ggcacuuacgggaguuuaa

SEQ ID NO: 492185 - RNA, 19 nt, Artificial Sequence
  Description of Artificial Sequence: Synthetic oligonucleotide
ccaacguaauacacuacau

SEQ ID NO: 492186 - RNA, 19 nt, Artificial Sequence
  Description of Artificial Sequence: Synthetic oligonucleotide
ggauaggugcugccucuua

SEQ ID NO: 492187 - RNA, 19 nt, Artificial Sequence
  Description of Artificial Sequence: Synthetic oligonucleotide
gguuagcuccaaugggaau

SEQ ID NO: 492188 - RNA, 19 nt, Artificial Sequence
  Description of Artificial Sequence: Synthetic oligonucleotide
cuuuuccgcagugugucuu

SEQ ID NO: 492189 - RNA, 19 nt, Artificial Sequence
  Description of Artificial Sequence: Synthetic oligonucleotide
cggauugggcggauacaug

SEQ ID NO: 492190 - RNA, 19 nt, Artificial Sequence
  Description of Artificial Sequence: Synthetic oligonucleotide
gccacgggugacucaaggu

SEQ ID NO: 492191 - RNA, 19 nt, Artificial Sequence
  Description of Artificial Sequence: Synthetic oligonucleotide
ccuccggaaagacuucucu

SEQ ID NO: 492192 - RNA, 19 nt, Artificial Sequence
  Description of Artificial Sequence: Synthetic oligonucleotide
cugaucaggugugcgggau

SEQ ID NO: 492193 - RNA, 19 nt, Artificial Sequence
  Description of Artificial Sequence: Synthetic oligonucleotide
gggcacuuacgggaguuua

SEQ ID NO: 492194 - RNA, 19 nt, Artificial Sequence
  Description of Artificial Sequence: Synthetic oligonucleotide
uuccacggauugggcggau

SEQ ID NO: 492195 - RNA, 19 nt, Artificial Sequence
  Description of Artificial Sequence: Synthetic oligonucleotide
ggcucaccaaauggccaga

SEQ ID NO: 492196 - RNA, 19 nt, Artificial Sequence
  Description of Artificial Sequence: Synthetic oligonucleotide
ccacgggugacucaagguu

SEQ ID NO: 492197 - RNA, 19 nt, Artificial Sequence
  Description of Artificial Sequence: Synthetic oligonucleotide
ggucaccggcauacuguuc

SEQ ID NO: 492198 - RNA, 19 nt, Artificial Sequence
  Description of Artificial Sequence: Synthetic oligonucleotide
gcuaacaguuuaacagcuu

SEQ ID NO: 492199 - RNA, 19 nt, Artificial Sequence
  Description of Artificial Sequence: Synthetic oligonucleotide
gagagcgauuauagcccuu

SEQ ID NO: 492200 - RNA, 19 nt, Artificial Sequence
  Description of Artificial Sequence: Synthetic oligonucleotide
caccucgagucaucacuuu

SEQ ID NO: 492201 - RNA, 19 nt, Artificial Sequence
  Description of Artificial Sequence: Synthetic oligonucleotide
ccgcuggugaaaacacugu

SEQ ID NO: 492202 - RNA, 19 nt, Artificial Sequence
  Description of Artificial Sequence: Synthetic oligonucleotide
cggcauacuguucccaccu

SEQ ID NO: 492203 - RNA, 19 nt, Artificial Sequence
  Description of Artificial Sequence: Synthetic oligonucleotide
gcaugagagcaugcugaau

SEQ ID NO: 492204 - RNA, 19 nt, Artificial Sequence
  Description of Artificial Sequence: Synthetic oligonucleotide
ccggcuuccugugucauuu

SEQ ID NO: 492205 - RNA, 19 nt, Artificial Sequence
  Description of Artificial Sequence: Synthetic oligonucleotide
cccaugcauuuugaguugu

SEQ ID NO: 492206 - RNA, 19 nt, Artificial Sequence
  Description of Artificial Sequence: Synthetic oligonucleotide
cgggugacucaagguuuug

SEQ ID NO: 492207 - RNA, 19 nt, Artificial Sequence
  Description of Artificial Sequence: Synthetic oligonucleotide
cugcaccaaugccgcuggu

SEQ ID NO: 492208 - RNA, 19 nt, Artificial Sequence
  Description of Artificial Sequence: Synthetic oligonucleotide
cacgcucacugagggcuuu

SEQ ID NO: 492209 - RNA, 19 nt, Artificial Sequence
  Description of Artificial Sequence: Synthetic oligonucleotide
cggauacaugaaggcugca

SEQ ID NO: 492210 - RNA, 19 nt, Artificial Sequence
  Description of Artificial Sequence: Synthetic oligonucleotide
ggcuagcgcucaggcugau

SEQ ID NO: 492211 - RNA, 19 nt, Artificial Sequence
  Description of Artificial Sequence: Synthetic oligonucleotide
aaacauuuaaguuggauac

SEQ ID NO: 492212 - RNA, 19 nt, Artificial Sequence
  Description of Artificial Sequence: Synthetic oligonucleotide
uuaauuuucaguaauaugu

SEQ ID NO: 492213 - RNA, 19 nt, Artificial Sequence
  Description of Artificial Sequence: Synthetic oligonucleotide
uguaaaacauuuaaguugg

SEQ ID NO: 492214 - RNA, 19 nt, Artificial Sequence
  Description of Artificial Sequence: Synthetic oligonucleotide
uugauuucaauuuaaauag

SEQ ID NO: 492215 - RNA, 19 nt, Artificial Sequence
  Description of Artificial Sequence: Synthetic oligonucleotide
ucuaaaauaaauaacauuu

SEQ ID NO: 492216 - RNA, 19 nt, Artificial Sequence
  Description of Artificial Sequence: Synthetic oligonucleotide
uuaucuauuauacaaaaca

SEQ ID NO: 492217 - RNA, 19 nt, Artificial Sequence
  Description of Artificial Sequence: Synthetic oligonucleotide
aauaaaguuauuuuauucu

SEQ ID NO: 492218 - RNA, 19 nt, Artificial Sequence
  Description of Artificial Sequence: Synthetic oligonucleotide
aaaacauuaauuuucagua

SEQ ID NO: 492219 - RNA, 19 nt, Artificial Sequence
  Description of Artificial Sequence: Synthetic oligonucleotide
ugaacuauaaucaaacucu

SEQ ID NO: 492220 - RNA, 19 nt, Artificial Sequence
  Description of Artificial Sequence: Synthetic oligonucleotide
auaaagaaaguuaacaacc

SEQ ID NO: 492221 - RNA, 19 nt, Artificial Sequence
  Description of Artificial Sequence: Synthetic oligonucleotide
auuuaaguuggauacaaac

SEQ ID NO: 492222 - RNA, 19 nt, Artificial Sequence
  Description of Artificial Sequence: Synthetic oligonucleotide
aaguuaacaacccuuuaac

SEQ ID NO: 492223 - RNA, 19 nt, Artificial Sequence
  Description of Artificial Sequence: Synthetic oligonucleotide
aaauguauccguuagcucu

SEQ ID NO: 492224 - RNA, 19 nt, Artificial Sequence
  Description of Artificial Sequence: Synthetic oligonucleotide
ucaguaauauguaagaaac

SEQ ID NO: 492225 - RNA, 19 nt, Artificial Sequence
  Description of Artificial Sequence: Synthetic oligonucleotide
aacaucacacauuaugaac

SEQ ID NO: 492226 - RNA, 19 nt, Artificial Sequence
  Description of Artificial Sequence: Synthetic oligonucleotide
aguaauauguaagaaacac

SEQ ID NO: 492227 - RNA, 19 nt, Artificial Sequence
  Description of Artificial Sequence: Synthetic oligonucleotide
auuauucuaccauaucucc

SEQ ID NO: 492228 - RNA, 19 nt, Artificial Sequence
  Description of Artificial Sequence: Synthetic oligonucleotide
ucuauuauacaaaacauua

SEQ ID NO: 492229 - RNA, 19 nt, Artificial Sequence
  Description of Artificial Sequence: Synthetic oligonucleotide
cacauuaugaacuauaauc

SEQ ID NO: 492230 - RNA, 19 nt, Artificial Sequence
  Description of Artificial Sequence: Synthetic oligonucleotide
aaauaaauaacauuuccua

SEQ ID NO: 492231 - RNA, 19 nt, Artificial Sequence
  Description of Artificial Sequence: Synthetic oligonucleotide
aauauucaugauuagauua

SEQ ID NO: 492232 - RNA, 19 nt, Artificial Sequence
  Description of Artificial Sequence: Synthetic oligonucleotide
augaacuauaaucaaacuc

SEQ ID NO: 492233 - RNA, 19 nt, Artificial Sequence
  Description of Artificial Sequence: Synthetic oligonucleotide
uuaugaacuauaaucaaac

SEQ ID NO: 492234 - RNA, 19 nt, Artificial Sequence
  Description of Artificial Sequence: Synthetic oligonucleotide
uuggauacaaacaucacac

SEQ ID NO: 492235 - RNA, 19 nt, Artificial Sequence
  Description of Artificial Sequence: Synthetic oligonucleotide
uuuaacuuaucacuugaag

SEQ ID NO: 492236 - RNA, 19 nt, Artificial Sequence
  Description of Artificial Sequence: Synthetic oligonucleotide
uuuaaguuggauacaaaca

SEQ ID NO: 492237 - RNA, 19 nt, Artificial Sequence
  Description of Artificial Sequence: Synthetic oligonucleotide
uuauacaaaacauuaauuu

SEQ ID NO: 492238 - RNA, 19 nt, Artificial Sequence
  Description of Artificial Sequence: Synthetic oligonucleotide
acacugaccacguuaaacc

SEQ ID NO: 492239 - RNA, 19 nt, Artificial Sequence
  Description of Artificial Sequence: Synthetic oligonucleotide
uauuauacaaaacauuaau

SEQ ID NO: 492240 - RNA, 19 nt, Artificial Sequence
  Description of Artificial Sequence: Synthetic oligonucleotide
acaaacaucacacauuaug

SEQ ID NO: 492241 - RNA, 19 nt, Artificial Sequence
  Description of Artificial Sequence: Synthetic oligonucleotide
aaaacauuuaaguuggaua

SEQ ID NO: 492242 - RNA, 19 nt, Artificial Sequence
  Description of Artificial Sequence: Synthetic oligonucleotide
uuaacuuaucacuugaagu

SEQ ID NO: 492243 - RNA, 19 nt, Artificial Sequence
  Description of Artificial Sequence: Synthetic oligonucleotide
aaaacaaucaaggacuaug

SEQ ID NO: 492244 - RNA, 19 nt, Artificial Sequence
  Description of Artificial Sequence: Synthetic oligonucleotide
acuauaaucaaacucuuga

SEQ ID NO: 492245 - RNA, 19 nt, Artificial Sequence
  Description of Artificial Sequence: Synthetic oligonucleotide
uguaauaaaguuauuuuau

SEQ ID NO: 492246 - RNA, 19 nt, Artificial Sequence
  Description of Artificial Sequence: Synthetic oligonucleotide
aauuuaaauagcaaagcug

SEQ ID NO: 492247 - RNA, 19 nt, Artificial Sequence
  Description of Artificial Sequence: Synthetic oligonucleotide
aacccuuuaacuuaucacu

SEQ ID NO: 492248 - RNA, 19 nt, Artificial Sequence
  Description of Artificial Sequence: Synthetic oligonucleotide
aauaaauaacauuuccuaa

SEQ ID NO: 492249 - RNA, 19 nt, Artificial Sequence
  Description of Artificial Sequence: Synthetic oligonucleotide
aaacauguaaaacauuuaa

SEQ ID NO: 492250 - RNA, 19 nt, Artificial Sequence
  Description of Artificial Sequence: Synthetic oligonucleotide
accacguuaaaccauaaag

SEQ ID NO: 492251 - RNA, 19 nt, Artificial Sequence
  Description of Artificial Sequence: Synthetic oligonucleotide
auaacauuuccuaauauuc

SEQ ID NO: 492252 - RNA, 19 nt, Artificial Sequence
  Description of Artificial Sequence: Synthetic oligonucleotide
augauuagauuauucuacc

SEQ ID NO: 492253 - RNA, 19 nt, Artificial Sequence
  Description of Artificial Sequence: Synthetic oligonucleotide
uaaaccauaaagaaaguua

SEQ ID NO: 492254 - RNA, 19 nt, Artificial Sequence
  Description of Artificial Sequence: Synthetic oligonucleotide
cauaaagaaaguuaacaac

SEQ ID NO: 492255 - RNA, 19 nt, Artificial Sequence
  Description of Artificial Sequence: Synthetic oligonucleotide
aaaauaaauaacauuuccu

SEQ ID NO: 492256 - RNA, 19 nt, Artificial Sequence
  Description of Artificial Sequence: Synthetic oligonucleotide
agauuauucuaccauaucu

SEQ ID NO: 492257 - RNA, 19 nt, Artificial Sequence
  Description of Artificial Sequence: Synthetic oligonucleotide
  modified_base (5)..(5): a, c, u, g, unknown or other
uuuunuuccaagaucugcu

SEQ ID NO: 492258 - RNA, 19 nt, Artificial Sequence
  Description of Artificial Sequence: Synthetic oligonucleotide
aauaacauuuccuaauauu

SEQ ID NO: 492259 - RNA, 19 nt, Artificial Sequence
  Description of Artificial Sequence: Synthetic oligonucleotide
ucuuugucuacuuucuggg

SEQ ID NO: 492260 - RNA, 19 nt, Artificial Sequence
  Description of Artificial Sequence: Synthetic oligonucleotide
uuuucaguaauauguaaga

SEQ ID NO: 492261 - RNA, 19 nt, Artificial Sequence
  Description of Artificial Sequence: Synthetic oligonucleotide
caugauuagauuauucuac

SEQ ID NO: 492262 - RNA, 19 nt, Artificial Sequence
  Description of Artificial Sequence: Synthetic oligonucleotide
auacaaaacauuaauuuuc

SEQ ID NO: 492263 - RNA, 19 nt, Artificial Sequence
  Description of Artificial Sequence: Synthetic oligonucleotide
aacauuaauuuucaguaau

SEQ ID NO: 492264 - RNA, 19 nt, Artificial Sequence
  Description of Artificial Sequence: Synthetic oligonucleotide
aaaguuaacaacccuuuaa

SEQ ID NO: 492265 - RNA, 19 nt, Artificial Sequence
  Description of Artificial Sequence: Synthetic oligonucleotide
caaucaaggacuauggaac

SEQ ID NO: 492266 - RNA, 19 nt, Artificial Sequence
  Description of Artificial Sequence: Synthetic oligonucleotide
auuuaaauagcaaagcuga

SEQ ID NO: 492267 - RNA, 19 nt, Artificial Sequence
  Description of Artificial Sequence: Synthetic oligonucleotide
auaaucaaacucuugauuu

SEQ ID NO: 492268 - RNA, 19 nt, Artificial Sequence
  Description of Artificial Sequence: Synthetic oligonucleotide
uucaugauuagauuauucu

SEQ ID NO: 492269 - RNA, 19 nt, Artificial Sequence
  Description of Artificial Sequence: Synthetic oligonucleotide
ucaauuuaaauagcaaagc

SEQ ID NO: 492270 - RNA, 19 nt, Artificial Sequence
  Description of Artificial Sequence: Synthetic oligonucleotide
uuaaauguauccguuagcu

SEQ ID NO: 492271 - RNA, 19 nt, Artificial Sequence
  Description of Artificial Sequence: Synthetic oligonucleotide
uuuguaauaaaguuauuuu

SEQ ID NO: 492272 - RNA, 19 nt, Artificial Sequence
  Description of Artificial Sequence: Synthetic oligonucleotide
auaaauaacauuuccuaau

SEQ ID NO: 492273 - RNA, 19 nt, Artificial Sequence
  Description of Artificial Sequence: Synthetic oligonucleotide
aaacaaucaaggacuaugg

SEQ ID NO: 492274 - RNA, 19 nt, Artificial Sequence
  Description of Artificial Sequence: Synthetic oligonucleotide
uaucuauuauacaaaacau

SEQ ID NO: 492275 - RNA, 19 nt, Artificial Sequence
  Description of Artificial Sequence: Synthetic oligonucleotide
aagccaaccucccaccagc

SEQ ID NO: 492276 - RNA, 19 nt, Artificial Sequence
  Description of Artificial Sequence: Synthetic oligonucleotide
aaacucuugauuucaauuu

SEQ ID NO: 492277 - RNA, 19 nt, Artificial Sequence
  Description of Artificial Sequence: Synthetic oligonucleotide
aaagaaaguuaacaacccu

SEQ ID NO: 492278 - RNA, 19 nt, Artificial Sequence
  Description of Artificial Sequence: Synthetic oligonucleotide
uuccuaauauucaugauua

SEQ ID NO: 492279 - RNA, 19 nt, Artificial Sequence
  Description of Artificial Sequence: Synthetic oligonucleotide
cuuuaaauguauccguuag

SEQ ID NO: 492280 - RNA, 19 nt, Artificial Sequence
  Description of Artificial Sequence: Synthetic oligonucleotide
uuuaaauguauccguuagc

SEQ ID NO: 492281 - RNA, 19 nt, Artificial Sequence
  Description of Artificial Sequence: Synthetic oligonucleotide
aacauguaaaacauuuaag

SEQ ID NO: 492282 - RNA, 19 nt, Artificial Sequence
  Description of Artificial Sequence: Synthetic oligonucleotide
uaacauuuccuaauauuca

SEQ ID NO: 492283 - RNA, 19 nt, Artificial Sequence
  Description of Artificial Sequence: Synthetic oligonucleotide
uucaguaauauguaagaaa

SEQ ID NO: 492284 - RNA, 19 nt, Artificial Sequence
  Description of Artificial Sequence: Synthetic oligonucleotide
uuuccuaauauucaugauu

SEQ ID NO: 492285 - RNA, 19 nt, Artificial Sequence
  Description of Artificial Sequence: Synthetic oligonucleotide
uuaacaacccuuuaacuua

SEQ ID NO: 492286 - RNA, 19 nt, Artificial Sequence
  Description of Artificial Sequence: Synthetic oligonucleotide
  modified_base (3)..(3): a, c, u, g, unknown or other
uunuuccaagaucugcuag

SEQ ID NO: 492287 - RNA, 19 nt, Artificial Sequence
  Description of Artificial Sequence: Synthetic oligonucleotide
uuguaauaaaguuauuuua

SEQ ID NO: 492288 - RNA, 19 nt, Artificial Sequence
  Description of Artificial Sequence: Synthetic oligonucleotide
cguuaaaccauaaagaaag

SEQ ID NO: 492289 - RNA, 19 nt, Artificial Sequence
  Description of Artificial Sequence: Synthetic oligonucleotide
uuuaaauagcaaagcugag

SEQ ID NO: 492290 - RNA, 19 nt, Artificial Sequence
  Description of Artificial Sequence: Synthetic oligonucleotide
uauucuaccauaucucccu

SEQ ID NO: 492291 - RNA, 19 nt, Artificial Sequence
  Description of Artificial Sequence: Synthetic oligonucleotide
aacauuuccuaauauucau

SEQ ID NO: 492292 - RNA, 19 nt, Artificial Sequence
  Description of Artificial Sequence: Synthetic oligonucleotide
aauuuucaguaauauguaa

SEQ ID NO: 492293 - RNA, 19 nt, Artificial Sequence
  Description of Artificial Sequence: Synthetic oligonucleotide
uauaaucaaacucuugauu

SEQ ID NO: 492294 - RNA, 19 nt, Artificial Sequence
  Description of Artificial Sequence: Synthetic oligonucleotide
aauagcaaagcugaguuuu

SEQ ID NO: 492295 - RNA, 19 nt, Artificial Sequence
  Description of Artificial Sequence: Synthetic oligonucleotide
uugguguccaaacaucugc

SEQ ID NO: 492296 - RNA, 19 nt, Artificial Sequence
  Description of Artificial Sequence: Synthetic oligonucleotide
uaaauaacauuuccuaaua

SEQ ID NO: 492297 - RNA, 19 nt, Artificial Sequence
  Description of Artificial Sequence: Synthetic oligonucleotide
uauggaacucccaaaacau

SEQ ID NO: 492298 - RNA, 19 nt, Artificial Sequence
  Description of Artificial Sequence: Synthetic oligonucleotide
ucucccuuuaaauguaucc

SEQ ID NO: 492299 - RNA, 19 nt, Artificial Sequence
  Description of Artificial Sequence: Synthetic oligonucleotide
uuauucuaccauaucuccc

SEQ ID NO: 492300 - RNA, 19 nt, Artificial Sequence
  Description of Artificial Sequence: Synthetic oligonucleotide
acauuaugaacuauaauca

SEQ ID NO: 492301 - RNA, 19 nt, Artificial Sequence
  Description of Artificial Sequence: Synthetic oligonucleotide
uuuaguugguguccaaaca

SEQ ID NO: 492302 - RNA, 19 nt, Artificial Sequence
  Description of Artificial Sequence: Synthetic oligonucleotide
uuagauuauucuaccauau

SEQ ID NO: 492303 - RNA, 19 nt, Artificial Sequence
  Description of Artificial Sequence: Synthetic oligonucleotide
aaguuggauacaaacauca

SEQ ID NO: 492304 - RNA, 19 nt, Artificial Sequence
  Description of Artificial Sequence: Synthetic oligonucleotide
uggaacucccaaaacaugu

SEQ ID NO: 492305 - RNA, 19 nt, Artificial Sequence
  Description of Artificial Sequence: Synthetic oligonucleotide
auuuucaguaauauguaag

SEQ ID NO: 492306 - RNA, 19 nt, Artificial Sequence
  Description of Artificial Sequence: Synthetic oligonucleotide
cucuuugucuacuuucugg

SEQ ID NO: 492307 - RNA, 19 nt, Artificial Sequence
  Description of Artificial Sequence: Synthetic oligonucleotide
aaauaacauuuccuaauau

SEQ ID NO: 492308 - RNA, 19 nt, Artificial Sequence
  Description of Artificial Sequence: Synthetic oligonucleotide
acaaucaaggacuauggaa

SEQ ID NO: 492309 - RNA, 19 nt, Artificial Sequence
  Description of Artificial Sequence: Synthetic oligonucleotide
uuaguugguguccaaacau

SEQ ID NO: 492310 - RNA, 19 nt, Artificial Sequence
  Description of Artificial Sequence: Synthetic oligonucleotide
ugauuucaauuuaaauagc

SEQ ID NO: 492311 - RNA, 19 nt, Artificial Sequence
  Description of Artificial Sequence: Synthetic oligonucleotide
aaucaaggacuauggaacu

SEQ ID NO: 492312 - RNA, 19 nt, Artificial Sequence
  Description of Artificial Sequence: Synthetic oligonucleotide
aaacauuaauuuucaguaa

SEQ ID NO: 492313 - RNA, 19 nt, Artificial Sequence
  Description of Artificial Sequence: Synthetic oligonucleotide
aaacaucacacauuaugaa

SEQ ID NO: 492314 - RNA, 19 nt, Artificial Sequence
  Description of Artificial Sequence: Synthetic oligonucleotide
accauaaagaaaguuaaca

SEQ ID NO: 492315 - RNA, 19 nt, Artificial Sequence
  Description of Artificial Sequence: Synthetic oligonucleotide
acuauggaacucccaaaac

SEQ ID NO: 492316 - RNA, 19 nt, Artificial Sequence
  Description of Artificial Sequence: Synthetic oligonucleotide
gauuucaauuuaaauagca

SEQ ID NO: 492317 - RNA, 19 nt, Artificial Sequence
  Description of Artificial Sequence: Synthetic oligonucleotide
ucaugauuagauuauucua

SEQ ID NO: 492318 - RNA, 19 nt, Artificial Sequence
  Description of Artificial Sequence: Synthetic oligonucleotide
uaauuuucaguaauaugua

SEQ ID NO: 492319 - RNA, 19 nt, Artificial Sequence
  Description of Artificial Sequence: Synthetic oligonucleotide
  modified_base (2)..(2): a, c, u, g, unknown or other
unuuccaagaucugcuaga

SEQ ID NO: 492320 - RNA, 19 nt, Artificial Sequence
  Description of Artificial Sequence: Synthetic oligonucleotide
cuuaggacucgcaggaagg

SEQ ID NO: 492321 - RNA, 19 nt, Artificial Sequence
  Description of Artificial Sequence: Synthetic oligonucleotide
gauuauucuaccauaucuc

SEQ ID NO: 492322 - RNA, 19 nt, Artificial Sequence
  Description of Artificial Sequence: Synthetic oligonucleotide
auuagauuauucuaccaua

SEQ ID NO: 492323 - RNA, 19 nt, Artificial Sequence
  Description of Artificial Sequence: Synthetic oligonucleotide
caaacaucacacauuauga

SEQ ID NO: 492324 - RNA, 19 nt, Artificial Sequence
  Description of Artificial Sequence: Synthetic oligonucleotide
aaucaaacucuugauuuca

SEQ ID NO: 492325 - RNA, 19 nt, Artificial Sequence
  Description of Artificial Sequence: Synthetic oligonucleotide
aguuaacaacccuuuaacu

SEQ ID NO: 492326 - RNA, 19 nt, Artificial Sequence
  Description of Artificial Sequence: Synthetic oligonucleotide
uaugaacuauaaucaaacu

SEQ ID NO: 492327 - RNA, 19 nt, Artificial Sequence
  Description of Artificial Sequence: Synthetic oligonucleotide
ugauuagauuauucuacca

SEQ ID NO: 492328 - RNA, 19 nt, Artificial Sequence
  Description of Artificial Sequence: Synthetic oligonucleotide
aacaaucaaggacuaugga

SEQ ID NO: 492329 - RNA, 19 nt, Artificial Sequence
  Description of Artificial Sequence: Synthetic oligonucleotide
guuggauacaaacaucaca

SEQ ID NO: 492330 - RNA, 19 nt, Artificial Sequence
  Description of Artificial Sequence: Synthetic oligonucleotide
cauuuccuaauauucauga

SEQ ID NO: 492331 - RNA, 19 nt, Artificial Sequence
  Description of Artificial Sequence: Synthetic oligonucleotide
cuuuaguugguguccaaac

SEQ ID NO: 492332 - RNA, 19 nt, Artificial Sequence
  Description of Artificial Sequence: Synthetic oligonucleotide
aaccauaaagaaaguuaac

SEQ ID NO: 492333 - RNA, 19 nt, Artificial Sequence
  Description of Artificial Sequence: Synthetic oligonucleotide
ucaaggacuauggaacucc

SEQ ID NO: 492334 - RNA, 19 nt, Artificial Sequence
  Description of Artificial Sequence: Synthetic oligonucleotide
acuuaggacucgcaggaag

SEQ ID NO: 492335 - RNA, 19 nt, Artificial Sequence
  Description of Artificial Sequence: Synthetic oligonucleotide
acaaccgacgacugccacc

SEQ ID NO: 492336 - RNA, 19 nt, Artificial Sequence
  Description of Artificial Sequence: Synthetic oligonucleotide
uaauauucaugauuagauu

SEQ ID NO: 492337 - RNA, 19 nt, Artificial Sequence
  Description of Artificial Sequence: Synthetic oligonucleotide
cuaauauucaugauuagau

SEQ ID NO: 492338 - RNA, 19 nt, Artificial Sequence
  Description of Artificial Sequence: Synthetic oligonucleotide
uaaucaaacucuugauuuc

SEQ ID NO: 492339 - RNA, 19 nt, Artificial Sequence
  Description of Artificial Sequence: Synthetic oligonucleotide
aacucuugauuucaauuua

SEQ ID NO: 492340 - RNA, 19 nt, Artificial Sequence
  Description of Artificial Sequence: Synthetic oligonucleotide
acaucacacauuaugaacu

SEQ ID NO: 492341 - RNA, 19 nt, Artificial Sequence
  Description of Artificial Sequence: Synthetic oligonucleotide
uaccauaucucccuuuaaa

SEQ ID NO: 492342 - RNA, 19 nt, Artificial Sequence
  Description of Artificial Sequence: Synthetic oligonucleotide
aagaaaguuaacaacccuu

SEQ ID NO: 492343 - RNA, 19 nt, Artificial Sequence
  Description of Artificial Sequence: Synthetic oligonucleotide
aacaaccgacgacugccac

SEQ ID NO: 492344 - RNA, 19 nt, Artificial Sequence
  Description of Artificial Sequence: Synthetic oligonucleotide
auucaugauuagauuauuc

SEQ ID NO: 492345 - RNA, 19 nt, Artificial Sequence
  Description of Artificial Sequence: Synthetic oligonucleotide
cucccuuuaaauguauccg

SEQ ID NO: 492346 - RNA, 19 nt, Artificial Sequence
  Description of Artificial Sequence: Synthetic oligonucleotide
uauccguuagcucuuuguc

SEQ ID NO: 492347 - RNA, 19 nt, Artificial Sequence
  Description of Artificial Sequence: Synthetic oligonucleotide
caaaacauuaauuuucagu

SEQ ID NO: 492348 - RNA, 19 nt, Artificial Sequence
  Description of Artificial Sequence: Synthetic oligonucleotide
cuauggaacucccaaaaca

SEQ ID NO: 492349 - RNA, 19 nt, Artificial Sequence
  Description of Artificial Sequence: Synthetic oligonucleotide
caacccuuuaacuuaucac

SEQ ID NO: 492350 - RNA, 19 nt, Artificial Sequence
  Description of Artificial Sequence: Synthetic oligonucleotide
ucuaccauaucucccuuua

SEQ ID NO: 492351 - RNA, 19 nt, Artificial Sequence
  Description of Artificial Sequence: Synthetic oligonucleotide
uaaaacauuuaaguuggau

SEQ ID NO: 492352 - RNA, 19 nt, Artificial Sequence
  Description of Artificial Sequence: Synthetic oligonucleotide
ucccuuuaaauguauccgu

SEQ ID NO: 492353 - RNA, 19 nt, Artificial Sequence
  Description of Artificial Sequence: Synthetic oligonucleotide
auuauacaaaacauuaauu

SEQ ID NO: 492354 - RNA, 19 nt, Artificial Sequence
  Description of Artificial Sequence: Synthetic oligonucleotide
cacguuaaaccauaaagaa

SEQ ID NO: 492355 - RNA, 19 nt, Artificial Sequence
  Description of Artificial Sequence: Synthetic oligonucleotide
  modified_base (4)..(4): a, c, u, g, unknown or other
uuunuuccaagaucugcua

SEQ ID NO: 492356 - RNA, 19 nt, Artificial Sequence
  Description of Artificial Sequence: Synthetic oligonucleotide
cuuugucuacuuucugggg

SEQ ID NO: 492357 - RNA, 19 nt, Artificial Sequence
  Description of Artificial Sequence: Synthetic oligonucleotide
uuaaaccauaaagaaaguu

SEQ ID NO: 492358 - RNA, 19 nt, Artificial Sequence
  Description of Artificial Sequence: Synthetic oligonucleotide
gauuagauuauucuaccau

SEQ ID NO: 492359 - RNA, 19 nt, Artificial Sequence
  Description of Artificial Sequence: Synthetic oligonucleotide
acaacccuuuaacuuauca

SEQ ID NO: 492360 - RNA, 19 nt, Artificial Sequence
  Description of Artificial Sequence: Synthetic oligonucleotide
accauaucucccuuuaaau

SEQ ID NO: 492361 - RNA, 19 nt, Artificial Sequence
  Description of Artificial Sequence: Synthetic oligonucleotide
aggacuauggaacucccaa

SEQ ID NO: 492362 - RNA, 19 nt, Artificial Sequence
  Description of Artificial Sequence: Synthetic oligonucleotide
auuaugaacuauaaucaaa

SEQ ID NO: 492363 - RNA, 19 nt, Artificial Sequence
  Description of Artificial Sequence: Synthetic oligonucleotide
uuucaguaauauguaagaa

SEQ ID NO: 492364 - RNA, 19 nt, Artificial Sequence
  Description of Artificial Sequence: Synthetic oligonucleotide
cauaucucccuuuaaaugu

SEQ ID NO: 492365 - RNA, 19 nt, Artificial Sequence
  Description of Artificial Sequence: Synthetic oligonucleotide
uacacugaccacguuaaac

SEQ ID NO: 492366 - RNA, 19 nt, Artificial Sequence
  Description of Artificial Sequence: Synthetic oligonucleotide
aacauuuaaguuggauaca

SEQ ID NO: 492367 - RNA, 19 nt, Artificial Sequence
  Description of Artificial Sequence: Synthetic oligonucleotide
aacuauaaucaaacucuug

SEQ ID NO: 492368 - RNA, 19 nt, Artificial Sequence
  Description of Artificial Sequence: Synthetic oligonucleotide
uagauuauucuaccauauc

SEQ ID NO: 492369 - RNA, 19 nt, Artificial Sequence
  Description of Artificial Sequence: Synthetic oligonucleotide
agcuggaacaaccgacgac

SEQ ID NO: 492370 - RNA, 19 nt, Artificial Sequence
  Description of Artificial Sequence: Synthetic oligonucleotide
uaaauguauccguuagcuc

SEQ ID NO: 492371 - RNA, 19 nt, Artificial Sequence
  Description of Artificial Sequence: Synthetic oligonucleotide
caaaacauguaaaacauuu

SEQ ID NO: 492372 - RNA, 19 nt, Artificial Sequence
  Description of Artificial Sequence: Synthetic oligonucleotide
uccuaauauucaugauuag

SEQ ID NO: 492373 - RNA, 19 nt, Artificial Sequence
  Description of Artificial Sequence: Synthetic oligonucleotide
gacuauggaacucccaaaa

SEQ ID NO: 492374 - RNA, 19 nt, Artificial Sequence
  Description of Artificial Sequence: Synthetic oligonucleotide
aaauagcaaagcugaguuu

SEQ ID NO: 492375 - RNA, 19 nt, Artificial Sequence
  Description of Artificial Sequence: Synthetic oligonucleotide
aaaacauguaaaacauuua

SEQ ID NO: 492376 - RNA, 19 nt, Artificial Sequence
  Description of Artificial Sequence: Synthetic oligonucleotide
uccguuagcucuuugucua

SEQ ID NO: 492377 - RNA, 19 nt, Artificial Sequence
  Description of Artificial Sequence: Synthetic oligonucleotide
cuauuauacaaaacauuaa

SEQ ID NO: 492378 - RNA, 19 nt, Artificial Sequence
  Description of Artificial Sequence: Synthetic oligonucleotide
guaauauguaagaaacaca

SEQ ID NO: 492379 - RNA, 19 nt, Artificial Sequence
  Description of Artificial Sequence: Synthetic oligonucleotide
caccgugaagccaaccucc

SEQ ID NO: 492380 - RNA, 19 nt, Artificial Sequence
  Description of Artificial Sequence: Synthetic oligonucleotide
guuaacaacccuuuaacuu

SEQ ID NO: 492381 - RNA, 19 nt, Artificial Sequence
  Description of Artificial Sequence: Synthetic oligonucleotide
acauuuaaguuggauacaa

SEQ ID NO: 492382 - RNA, 19 nt, Artificial Sequence
  Description of Artificial Sequence: Synthetic oligonucleotide
caaccgacgacugccaccg

SEQ ID NO: 492383 - RNA, 19 nt, Artificial Sequence
  Description of Artificial Sequence: Synthetic oligonucleotide
caauuuaaauagcaaagcu

SEQ ID NO: 492384 - RNA, 19 nt, Artificial Sequence
  Description of Artificial Sequence: Synthetic oligonucleotide
auuucaauuuaaauagcaa

SEQ ID NO: 492385 - RNA, 19 nt, Artificial Sequence
  Description of Artificial Sequence: Synthetic oligonucleotide
accagcuggaacaaccgac

SEQ ID NO: 492386 - RNA, 19 nt, Artificial Sequence
  Description of Artificial Sequence: Synthetic oligonucleotide
uaguugguguccaaacauc

SEQ ID NO: 492387 - RNA, 19 nt, Artificial Sequence
  Description of Artificial Sequence: Synthetic oligonucleotide
ucaaacucuugauuucaau

SEQ ID NO: 492388 - RNA, 19 nt, Artificial Sequence
  Description of Artificial Sequence: Synthetic oligonucleotide
uagcucuuugucuacuuuc

SEQ ID NO: 492389 - RNA, 19 nt, Artificial Sequence
  Description of Artificial Sequence: Synthetic oligonucleotide
auauucaugauuagauuau

SEQ ID NO: 492390 - RNA, 19 nt, Artificial Sequence
  Description of Artificial Sequence: Synthetic oligonucleotide
auccguuagcucuuugucu

SEQ ID NO: 492391 - RNA, 19 nt, Artificial Sequence
  Description of Artificial Sequence: Synthetic oligonucleotide
ugguguccaaacaucugcu

SEQ ID NO: 492392 - RNA, 19 nt, Artificial Sequence
  Description of Artificial Sequence: Synthetic oligonucleotide
uaacaacccuuuaacuuau

SEQ ID NO: 492393 - RNA, 19 nt, Artificial Sequence
  Description of Artificial Sequence: Synthetic oligonucleotide
gaagccaaccucccaccag

SEQ ID NO: 492394 - RNA, 19 nt, Artificial Sequence
  Description of Artificial Sequence: Synthetic oligonucleotide
cauuaugaacuauaaucaa

SEQ ID NO: 492395 - RNA, 19 nt, Artificial Sequence
  Description of Artificial Sequence: Synthetic oligonucleotide
aguuggauacaaacaucac

SEQ ID NO: 492396 - RNA, 19 nt, Artificial Sequence
  Description of Artificial Sequence: Synthetic oligonucleotide
uggaacaaccgacgacugc

SEQ ID NO: 492397 - RNA, 19 nt, Artificial Sequence
  Description of Artificial Sequence: Synthetic oligonucleotide
ggaacaaccgacgacugcc

SEQ ID NO: 492398 - RNA, 19 nt, Artificial Sequence
  Description of Artificial Sequence: Synthetic oligonucleotide
acacauuaugaacuauaau

SEQ ID NO: 492399 - RNA, 19 nt, Artificial Sequence
  Description of Artificial Sequence: Synthetic oligonucleotide
aucuauuauacaaaacauu

SEQ ID NO: 492400 - RNA, 19 nt, Artificial Sequence
  Description of Artificial Sequence: Synthetic oligonucleotide
aggacucgcaggaaggcac

SEQ ID NO: 492401 - RNA, 19 nt, Artificial Sequence
  Description of Artificial Sequence: Synthetic oligonucleotide
ugaagccaaccucccacca

SEQ ID NO: 492402 - RNA, 19 nt, Artificial Sequence
  Description of Artificial Sequence: Synthetic oligonucleotide
auuuccuaauauucaugau

SEQ ID NO: 492403 - RNA, 19 nt, Artificial Sequence
  Description of Artificial Sequence: Synthetic oligonucleotide
uuaggacucgcaggaaggc

SEQ ID NO: 492404 - RNA, 19 nt, Artificial Sequence
  Description of Artificial Sequence: Synthetic oligonucleotide
caaacaucugcuuccaaua

SEQ ID NO: 492405 - RNA, 19 nt, Artificial Sequence
  Description of Artificial Sequence: Synthetic oligonucleotide
agaaaguuaacaacccuuu

SEQ ID NO: 492406 - RNA, 19 nt, Artificial Sequence
  Description of Artificial Sequence: Synthetic oligonucleotide
gaacucccaaaacauguaa

SEQ ID NO: 492407 - RNA, 19 nt, Artificial Sequence
  Description of Artificial Sequence: Synthetic oligonucleotide
aucaaggacuauggaacuc

SEQ ID NO: 492408 - RNA, 19 nt, Artificial Sequence
  Description of Artificial Sequence: Synthetic oligonucleotide
caaggacuauggaacuccc

SEQ ID NO: 492409 - RNA, 19 nt, Artificial Sequence
  Description of Artificial Sequence: Synthetic oligonucleotide
aguugguguccaaacaucu

SEQ ID NO: 492410 - RNA, 19 nt, Artificial Sequence
  Description of Artificial Sequence: Synthetic oligonucleotide
caggaaggcaccacucaag

SEQ ID NO: 492411 - RNA, 19 nt, Artificial Sequence
  Description of Artificial Sequence: Synthetic oligonucleotide
ccauaucucccuuuaaaug

SEQ ID NO: 492412 - RNA, 19 nt, Artificial Sequence
  Description of Artificial Sequence: Synthetic oligonucleotide
acauuuccuaauauucaug

SEQ ID NO: 492413 - RNA, 19 nt, Artificial Sequence
  Description of Artificial Sequence: Synthetic oligonucleotide
uuagcucuuugucuacuuu

SEQ ID NO: 492414 - RNA, 19 nt, Artificial Sequence
  Description of Artificial Sequence: Synthetic oligonucleotide
gaaaguuaacaacccuuua

SEQ ID NO: 492415 - RNA, 19 nt, Artificial Sequence
  Description of Artificial Sequence: Synthetic oligonucleotide
caguaauauguaagaaaca

SEQ ID NO: 492416 - RNA, 19 nt, Artificial Sequence
  Description of Artificial Sequence: Synthetic oligonucleotide
ccaaccucccaccagcugg

SEQ ID NO: 492417 - RNA, 19 nt, Artificial Sequence
  Description of Artificial Sequence: Synthetic oligonucleotide
guaauaaaguuauuuuauu

SEQ ID NO: 492418 - RNA, 19 nt, Artificial Sequence
  Description of Artificial Sequence: Synthetic oligonucleotide
uguauccguuagcucuuug

SEQ ID NO: 492419 - RNA, 19 nt, Artificial Sequence
  Description of Artificial Sequence: Synthetic oligonucleotide
uauucaugauuagauuauu

SEQ ID NO: 492420 - RNA, 19 nt, Artificial Sequence
  Description of Artificial Sequence: Synthetic oligonucleotide
ccauaaagaaaguuaacaa

SEQ ID NO: 492421 - RNA, 19 nt, Artificial Sequence
  Description of Artificial Sequence: Synthetic oligonucleotide
aauguauccguuagcucuu

SEQ ID NO: 492422 - RNA, 19 nt, Artificial Sequence
  Description of Artificial Sequence: Synthetic oligonucleotide
gauacaaacaucacacauu

SEQ ID NO: 492423 - RNA, 19 nt, Artificial Sequence
  Description of Artificial Sequence: Synthetic oligonucleotide
ccacguuaaaccauaaaga

SEQ ID NO: 492424 - RNA, 19 nt, Artificial Sequence
  Description of Artificial Sequence: Synthetic oligonucleotide
acguuaaaccauaaagaaa

SEQ ID NO: 492425 - RNA, 19 nt, Artificial Sequence
  Description of Artificial Sequence: Synthetic oligonucleotide
gugaagccaaccucccacc

SEQ ID NO: 492426 - RNA, 19 nt, Artificial Sequence
  Description of Artificial Sequence: Synthetic oligonucleotide
cuuuaacuuaucacuugaa

SEQ ID NO: 492427 - RNA, 19 nt, Artificial Sequence
  Description of Artificial Sequence: Synthetic oligonucleotide
acauuaauuuucaguaaua

SEQ ID NO: 492428 - RNA, 19 nt, Artificial Sequence
  Description of Artificial Sequence: Synthetic oligonucleotide
ccagcuggaacaaccgacg

SEQ ID NO: 492429 - RNA, 19 nt, Artificial Sequence
  Description of Artificial Sequence: Synthetic oligonucleotide
cuauaaucaaacucuugau

SEQ ID NO: 492430 - RNA, 19 nt, Artificial Sequence
  Description of Artificial Sequence: Synthetic oligonucleotide
caaacucuugauuucaauu

SEQ ID NO: 492431 - RNA, 19 nt, Artificial Sequence
  Description of Artificial Sequence: Synthetic oligonucleotide
agcucuuugucuacuuucu

SEQ ID NO: 492432 - RNA, 19 nt, Artificial Sequence
  Description of Artificial Sequence: Synthetic oligonucleotide
accucccaccagcuggaac

SEQ ID NO: 492433 - RNA, 19 nt, Artificial Sequence
  Description of Artificial Sequence: Synthetic oligonucleotide
accgugaagccaaccuccc

SEQ ID NO: 492434 - RNA, 19 nt, Artificial Sequence
  Description of Artificial Sequence: Synthetic oligonucleotide
cuggaacaaccgacgacug

SEQ ID NO: 492435 - RNA, 19 nt, Artificial Sequence
  Description of Artificial Sequence: Synthetic oligonucleotide
guugguguccaaacaucug

SEQ ID NO: 492436 - RNA, 19 nt, Artificial Sequence
  Description of Artificial Sequence: Synthetic oligonucleotide
aacaacccuuuaacuuauc

SEQ ID NO: 492437 - RNA, 19 nt, Artificial Sequence
  Description of Artificial Sequence: Synthetic oligonucleotide
cauuaauuuucaguaauau

SEQ ID NO: 492438 - RNA, 19 nt, Artificial Sequence
  Description of Artificial Sequence: Synthetic oligonucleotide
auggaacucccaaaacaug

SEQ ID NO: 492439 - RNA, 19 nt, Artificial Sequence
  Description of Artificial Sequence: Synthetic oligonucleotide
aucucccuuuaaauguauc

SEQ ID NO: 492440 - RNA, 19 nt, Artificial Sequence
  Description of Artificial Sequence: Synthetic oligonucleotide
cacugaccacguuaaacca

SEQ ID NO: 492441 - RNA, 19 nt, Artificial Sequence
  Description of Artificial Sequence: Synthetic oligonucleotide
cccaccagcuggaacaacc

SEQ ID NO: 492442 - RNA, 19 nt, Artificial Sequence
  Description of Artificial Sequence: Synthetic oligonucleotide
uaggacucgcaggaaggca

SEQ ID NO: 492443 - RNA, 19 nt, Artificial Sequence
  Description of Artificial Sequence: Synthetic oligonucleotide
acucuugauuucaauuuaa

SEQ ID NO: 492444 - RNA, 19 nt, Artificial Sequence
  Description of Artificial Sequence: Synthetic oligonucleotide
aaggacuauggaacuccca

SEQ ID NO: 492445 - RNA, 19 nt, Artificial Sequence
  Description of Artificial Sequence: Synthetic oligonucleotide
ucgcaggaaggcaccacuc

SEQ ID NO: 492446 - RNA, 19 nt, Artificial Sequence
  Description of Artificial Sequence: Synthetic oligonucleotide
guauccguuagcucuuugu

SEQ ID NO: 492447 - RNA, 19 nt, Artificial Sequence
  Description of Artificial Sequence: Synthetic oligonucleotide
ugaccacguuaaaccauaa

SEQ ID NO: 492448 - RNA, 19 nt, Artificial Sequence
  Description of Artificial Sequence: Synthetic oligonucleotide
ccuaauauucaugauuaga

SEQ ID NO: 492449 - RNA, 19 nt, Artificial Sequence
  Description of Artificial Sequence: Synthetic oligonucleotide
acuuaucacuugaaguuua

SEQ ID NO: 492450 - RNA, 19 nt, Artificial Sequence
  Description of Artificial Sequence: Synthetic oligonucleotide
cugaccacguuaaaccaua

SEQ ID NO: 492451 - RNA, 19 nt, Artificial Sequence
  Description of Artificial Sequence: Synthetic oligonucleotide
uucuaccauaucucccuuu

SEQ ID NO: 492452 - RNA, 19 nt, Artificial Sequence
  Description of Artificial Sequence: Synthetic oligonucleotide
caucacacauuaugaacua

SEQ ID NO: 492453 - RNA, 19 nt, Artificial Sequence
  Description of Artificial Sequence: Synthetic oligonucleotide
ccuuuaacuuaucacuuga

SEQ ID NO: 492454 - RNA, 19 nt, Artificial Sequence
  Description of Artificial Sequence: Synthetic oligonucleotide
uccaaacaucugcuuccaa

SEQ ID NO: 492455 - RNA, 19 nt, Artificial Sequence
  Description of Artificial Sequence: Synthetic oligonucleotide
gaccacguuaaaccauaaa

SEQ ID NO: 492456 - RNA, 19 nt, Artificial Sequence
  Description of Artificial Sequence: Synthetic oligonucleotide
auaucucccuuuaaaugua

SEQ ID NO: 492457 - RNA, 19 nt, Artificial Sequence
  Description of Artificial Sequence: Synthetic oligonucleotide
agcguaaugcugauguauu

SEQ ID NO: 492458 - RNA, 19 nt, Artificial Sequence
  Description of Artificial Sequence: Synthetic oligonucleotide
acucgcaggaaggcaccac

SEQ ID NO: 492459 - RNA, 19 nt, Artificial Sequence
  Description of Artificial Sequence: Synthetic oligonucleotide
acccuuuaacuuaucacuu

SEQ ID NO: 492460 - RNA, 19 nt, Artificial Sequence
  Description of Artificial Sequence: Synthetic oligonucleotide
gguacacugaccacguuaa

SEQ ID NO: 492461 - RNA, 19 nt, Artificial Sequence
  Description of Artificial Sequence: Synthetic oligonucleotide
auucuaccauaucucccuu

SEQ ID NO: 492462 - RNA, 19 nt, Artificial Sequence
  Description of Artificial Sequence: Synthetic oligonucleotide
cccuuuaacuuaucacuug

SEQ ID NO: 492463 - RNA, 19 nt, Artificial Sequence
  Description of Artificial Sequence: Synthetic oligonucleotide
aucacacauuaugaacuau

SEQ ID NO: 492464 - RNA, 19 nt, Artificial Sequence
  Description of Artificial Sequence: Synthetic oligonucleotide
acugaccacguuaaaccau

SEQ ID NO: 492465 - RNA, 19 nt, Artificial Sequence
  Description of Artificial Sequence: Synthetic oligonucleotide
ccaccagcuggaacaaccg

SEQ ID NO: 492466 - RNA, 19 nt, Artificial Sequence
  Description of Artificial Sequence: Synthetic oligonucleotide
gaacaaccgacgacugcca

SEQ ID NO: 492467 - RNA, 19 nt, Artificial Sequence
  Description of Artificial Sequence: Synthetic oligonucleotide
gaacuauaaucaaacucuu

SEQ ID NO: 492468 - RNA, 19 nt, Artificial Sequence
  Description of Artificial Sequence: Synthetic oligonucleotide
cgugaagccaaccucccac

SEQ ID NO: 492469 - RNA, 19 nt, Artificial Sequence
  Description of Artificial Sequence: Synthetic oligonucleotide
aucaaacucuugauuucaa

SEQ ID NO: 492470 - RNA, 19 nt, Artificial Sequence
  Description of Artificial Sequence: Synthetic oligonucleotide
guuaaaccauaaagaaagu

SEQ ID NO: 492471 - RNA, 19 nt, Artificial Sequence
  Description of Artificial Sequence: Synthetic oligonucleotide
gcuggaacaaccgacgacu

SEQ ID NO: 492472 - RNA, 19 nt, Artificial Sequence
  Description of Artificial Sequence: Synthetic oligonucleotide
ggguacacugaccacguua

SEQ ID NO: 492473 - RNA, 19 nt, Artificial Sequence
  Description of Artificial Sequence: Synthetic oligonucleotide
cccaaaacauguaaaacau

SEQ ID NO: 492474 - RNA, 19 nt, Artificial Sequence
  Description of Artificial Sequence: Synthetic oligonucleotide
guaaaacauuuaaguugga

SEQ ID NO: 492475 - RNA, 19 nt, Artificial Sequence
  Description of Artificial Sequence: Synthetic oligonucleotide
ggacuauggaacucccaaa

SEQ ID NO: 492476 - RNA, 19 nt, Artificial Sequence
  Description of Artificial Sequence: Synthetic oligonucleotide
uacuuaggacucgcaggaa

SEQ ID NO: 492477 - RNA, 19 nt, Artificial Sequence
  Description of Artificial Sequence: Synthetic oligonucleotide
caaccucccaccagcugga

SEQ ID NO: 492478 - RNA, 19 nt, Artificial Sequence
  Description of Artificial Sequence: Synthetic oligonucleotide
gcaccgugaagccaaccuc

SEQ ID NO: 492479 - RNA, 19 nt, Artificial Sequence
  Description of Artificial Sequence: Synthetic oligonucleotide
ccuuuaaauguauccguua

SEQ ID NO: 492480 - RNA, 19 nt, Artificial Sequence
  Description of Artificial Sequence: Synthetic oligonucleotide
guccaaacaucugcuucca

SEQ ID NO: 492481 - RNA, 19 nt, Artificial Sequence
  Description of Artificial Sequence: Synthetic oligonucleotide
cuaccauaucucccuuuaa

SEQ ID NO: 492482 - RNA, 19 nt, Artificial Sequence
  Description of Artificial Sequence: Synthetic oligonucleotide
guuagcucuuugucuacuu

SEQ ID NO: 492483 - RNA, 19 nt, Artificial Sequence
  Description of Artificial Sequence: Synthetic oligonucleotide
cagcuggaacaaccgacga

SEQ ID NO: 492484 - RNA, 19 nt, Artificial Sequence
  Description of Artificial Sequence: Synthetic oligonucleotide
gcaggaaggcaccacucaa

SEQ ID NO: 492485 - RNA, 19 nt, Artificial Sequence
  Description of Artificial Sequence: Synthetic oligonucleotide
caccagcuggaacaaccga

SEQ ID NO: 492486 - RNA, 19 nt, Artificial Sequence
  Description of Artificial Sequence: Synthetic oligonucleotide
cucgcaggaaggcaccacu

SEQ ID NO: 492487 - RNA, 19 nt, Artificial Sequence
  Description of Artificial Sequence: Synthetic oligonucleotide
gacucgcaggaaggcacca

SEQ ID NO: 492488 - RNA, 19 nt, Artificial Sequence
  Description of Artificial Sequence: Synthetic oligonucleotide
ccaaacaucugcuuccaau

SEQ ID NO: 492489 - RNA, 19 nt, Artificial Sequence
  Description of Artificial Sequence: Synthetic oligonucleotide
guacacugaccacguuaaa

SEQ ID NO: 492490 - RNA, 19 nt, Artificial Sequence
  Description of Artificial Sequence: Synthetic oligonucleotide
ggaacucccaaaacaugua

SEQ ID NO: 492491 - RNA, 19 nt, Artificial Sequence
  Description of Artificial Sequence: Synthetic oligonucleotide
ggacucgcaggaaggcacc

SEQ ID NO: 492492 - RNA, 19 nt, Artificial Sequence
  Description of Artificial Sequence: Synthetic oligonucleotide
agccaaccucccaccagcu

SEQ ID NO: 492493 - RNA, 19 nt, Artificial Sequence
  Description of Artificial Sequence: Synthetic oligonucleotide
ccguuagcucuuugucuac

SEQ ID NO: 492494 - RNA, 19 nt, Artificial Sequence
  Description of Artificial Sequence: Synthetic oligonucleotide
auguauccguuagcucuuu

SEQ ID NO: 492495 - RNA, 19 nt, Artificial Sequence
  Description of Artificial Sequence: Synthetic oligonucleotide
aaccucccaccagcuggaa

SEQ ID NO: 492496 - RNA, 19 nt, Artificial Sequence
  Description of Artificial Sequence: Synthetic oligonucleotide
gguguccaaacaucugcuu

SEQ ID NO: 492497 - RNA, 19 nt, Artificial Sequence
  Description of Artificial Sequence: Synthetic oligonucleotide
ccaaaacauguaaaacauu

SEQ ID NO: 492498 - RNA, 19 nt, Artificial Sequence
  Description of Artificial Sequence: Synthetic oligonucleotide
cccuuuaaauguauccguu

SEQ ID NO: 492499 - RNA, 19 nt, Artificial Sequence
  Description of Artificial Sequence: Synthetic oligonucleotide
gcguaaugcugauguauuu

SEQ ID NO: 492500 - RNA, 19 nt, Artificial Sequence
  Description of Artificial Sequence: Synthetic oligonucleotide
cgcaggaaggcaccacuca

SEQ ID NO: 492501 - RNA, 19 nt, Artificial Sequence
  Description of Artificial Sequence: Synthetic oligonucleotide
cguuagcucuuugucuacu

SEQ ID NO: 492502 - RNA, 19 nt, Artificial Sequence
  Description of Artificial Sequence: Synthetic oligonucleotide
gggguacacugaccacguu

SEQ ID NO: 492503 - RNA, 19 nt, Artificial Sequence
  Description of Artificial Sequence: Synthetic oligonucleotide
aauauagucacauagguaa

SEQ ID NO: 492504 - RNA, 19 nt, Artificial Sequence
  Description of Artificial Sequence: Synthetic oligonucleotide
aacacuaugacacuaaugu

SEQ ID NO: 492505 - RNA, 19 nt, Artificial Sequence
  Description of Artificial Sequence: Synthetic oligonucleotide
aacacuucaugacacaugc

SEQ ID NO: 492506 - RNA, 19 nt, Artificial Sequence
  Description of Artificial Sequence: Synthetic oligonucleotide
aauuacauuacaucugaac

SEQ ID NO: 492507 - RNA, 19 nt, Artificial Sequence
  Description of Artificial Sequence: Synthetic oligonucleotide
aaaucaguaggugagauac

SEQ ID NO: 492508 - RNA, 19 nt, Artificial Sequence
  Description of Artificial Sequence: Synthetic oligonucleotide
aaauaugugauccaugagu

SEQ ID NO: 492509 - RNA, 19 nt, Artificial Sequence
  Description of Artificial Sequence: Synthetic oligonucleotide
aaaacgguagcaccaaaac

SEQ ID NO: 492510 - RNA, 19 nt, Artificial Sequence
  Description of Artificial Sequence: Synthetic oligonucleotide
aacaaagauauccuuacug

SEQ ID NO: 492511 - RNA, 19 nt, Artificial Sequence
  Description of Artificial Sequence: Synthetic oligonucleotide
uguuaauugcauaauagga

SEQ ID NO: 492512 - RNA, 19 nt, Artificial Sequence
  Description of Artificial Sequence: Synthetic oligonucleotide
aauccaucgacuuguuacc

SEQ ID NO: 492513 - RNA, 19 nt, Artificial Sequence
  Description of Artificial Sequence: Synthetic oligonucleotide
uguuauucacaucuggucc

SEQ ID NO: 492514 - RNA, 19 nt, Artificial Sequence
  Description of Artificial Sequence: Synthetic oligonucleotide
uucccaaccaauaucaaag

SEQ ID NO: 492515 - RNA, 19 nt, Artificial Sequence
  Description of Artificial Sequence: Synthetic oligonucleotide
cauacuacuauauuccacc

SEQ ID NO: 492516 - RNA, 19 nt, Artificial Sequence
  Description of Artificial Sequence: Synthetic oligonucleotide
uggccuaugaaauuuagcc

SEQ ID NO: 492517 - RNA, 19 nt, Artificial Sequence
  Description of Artificial Sequence: Synthetic oligonucleotide
gugacugaaaccuagcagg

SEQ ID NO: 492518 - RNA, 19 nt, Artificial Sequence
  Description of Artificial Sequence: Synthetic oligonucleotide
auaaauaugugauccauga

SEQ ID NO: 492519 - RNA, 19 nt, Artificial Sequence
  Description of Artificial Sequence: Synthetic oligonucleotide
uuagguuucuuccaaggag

SEQ ID NO: 492520 - RNA, 19 nt, Artificial Sequence
  Description of Artificial Sequence: Synthetic oligonucleotide
uauagaacacuucaugaca

SEQ ID NO: 492521 - RNA, 19 nt, Artificial Sequence
  Description of Artificial Sequence: Synthetic oligonucleotide
caaaggaucauccugaguc

SEQ ID NO: 492522 - RNA, 19 nt, Artificial Sequence
  Description of Artificial Sequence: Synthetic oligonucleotide
uuaccuuaucaauagaaug

SEQ ID NO: 492523 - RNA, 19 nt, Artificial Sequence
  Description of Artificial Sequence: Synthetic oligonucleotide
ugugacagaaacgaagugg

SEQ ID NO: 492524 - RNA, 19 nt, Artificial Sequence
  Description of Artificial Sequence: Synthetic oligonucleotide
ugucucuagauuauccugg

SEQ ID NO: 492525 - RNA, 19 nt, Artificial Sequence
  Description of Artificial Sequence: Synthetic oligonucleotide
ugagauaucgugcagcaac

SEQ ID NO: 492526 - RNA, 19 nt, Artificial Sequence
  Description of Artificial Sequence: Synthetic oligonucleotide
ucuuguuacuguaauagcu

SEQ ID NO: 492527 - RNA, 19 nt, Artificial Sequence
  Description of Artificial Sequence: Synthetic oligonucleotide
uccugcagaaaucaguagg

SEQ ID NO: 492528 - RNA, 19 nt, Artificial Sequence
  Description of Artificial Sequence: Synthetic oligonucleotide
aaaucgucgaaggacaguc

SEQ ID NO: 492529 - RNA, 19 nt, Artificial Sequence
  Description of Artificial Sequence: Synthetic oligonucleotide
aaacauugauaauauacaa

SEQ ID NO: 492530 - RNA, 19 nt, Artificial Sequence
  Description of Artificial Sequence: Synthetic oligonucleotide
gucacaugcggauacaugg

SEQ ID NO: 492531 - RNA, 19 nt, Artificial Sequence
  Description of Artificial Sequence: Synthetic oligonucleotide
uaccuuaucaauagaaugu

SEQ ID NO: 492532 - RNA, 19 nt, Artificial Sequence
  Description of Artificial Sequence: Synthetic oligonucleotide
cuuaguuagaaauuccgac

SEQ ID NO: 492533 - RNA, 19 nt, Artificial Sequence
  Description of Artificial Sequence: Synthetic oligonucleotide
agauauagaacacuucaug

SEQ ID NO: 492534 - RNA, 19 nt, Artificial Sequence
  Description of Artificial Sequence: Synthetic oligonucleotide
cuugcucgaagccagaacg

SEQ ID NO: 492535 - RNA, 19 nt, Artificial Sequence
  Description of Artificial Sequence: Synthetic oligonucleotide
aaaaguguugucucuagau

SEQ ID NO: 492536 - RNA, 19 nt, Artificial Sequence
  Description of Artificial Sequence: Synthetic oligonucleotide
auacucgggcgucagaucc

SEQ ID NO: 492537 - RNA, 19 nt, Artificial Sequence
  Description of Artificial Sequence: Synthetic oligonucleotide
uauucaaaggacuugggau

SEQ ID NO: 492538 - RNA, 19 nt, Artificial Sequence
  Description of Artificial Sequence: Synthetic oligonucleotide
ugcagcuauagcaauauac

SEQ ID NO: 492539 - RNA, 19 nt, Artificial Sequence
  Description of Artificial Sequence: Synthetic oligonucleotide
uuaguuagaaauuccgacu

SEQ ID NO: 492540 - RNA, 19 nt, Artificial Sequence
  Description of Artificial Sequence: Synthetic oligonucleotide
gauuagugacaucauauac

SEQ ID NO: 492541 - RNA, 19 nt, Artificial Sequence
  Description of Artificial Sequence: Synthetic oligonucleotide
aguaacacaaucucuggug

SEQ ID NO: 492542 - RNA, 19 nt, Artificial Sequence
  Description of Artificial Sequence: Synthetic oligonucleotide
aacgaagugguuuuggaaa

SEQ ID NO: 492543 - RNA, 19 nt, Artificial Sequence
  Description of Artificial Sequence: Synthetic oligonucleotide
caaccaauaucaaaggcag

SEQ ID NO: 492544 - RNA, 19 nt, Artificial Sequence
  Description of Artificial Sequence: Synthetic oligonucleotide
uguuaccuuaucaauagaa

SEQ ID NO: 492545 - RNA, 19 nt, Artificial Sequence
  Description of Artificial Sequence: Synthetic oligonucleotide
cuccauacuacuauauucc

SEQ ID NO: 492546 - RNA, 19 nt, Artificial Sequence
  Description of Artificial Sequence: Synthetic oligonucleotide
acuacuauauuccaccaga

SEQ ID NO: 492547 - RNA, 19 nt, Artificial Sequence
  Description of Artificial Sequence: Synthetic oligonucleotide
agcuugagacucuuguucc

SEQ ID NO: 492548 - RNA, 19 nt, Artificial Sequence
  Description of Artificial Sequence: Synthetic oligonucleotide
aggacuuaugaucaucacg

SEQ ID NO: 492549 - RNA, 19 nt, Artificial Sequence
  Description of Artificial Sequence: Synthetic oligonucleotide
cuagauagcccaaauacuc

SEQ ID NO: 492550 - RNA, 19 nt, Artificial Sequence
  Description of Artificial Sequence: Synthetic oligonucleotide
uccaauuacauuacaucug

SEQ ID NO: 492551 - RNA, 19 nt, Artificial Sequence
  Description of Artificial Sequence: Synthetic oligonucleotide
uguuguuaacagcauaaac

SEQ ID NO: 492552 - RNA, 19 nt, Artificial Sequence
  Description of Artificial Sequence: Synthetic oligonucleotide
augagaggaauccaucgac

SEQ ID NO: 492553 - RNA, 19 nt, Artificial Sequence
  Description of Artificial Sequence: Synthetic oligonucleotide
aagaacuccgcuuuuccca

SEQ ID NO: 492554 - RNA, 19 nt, Artificial Sequence
  Description of Artificial Sequence: Synthetic oligonucleotide
aucucaauauuucuagcag

SEQ ID NO: 492555 - RNA, 19 nt, Artificial Sequence
  Description of Artificial Sequence: Synthetic oligonucleotide
ggacuuaugaucaucacgg

SEQ ID NO: 492556 - RNA, 19 nt, Artificial Sequence
  Description of Artificial Sequence: Synthetic oligonucleotide
uguugucucuagauuaucc

SEQ ID NO: 492557 - RNA, 19 nt, Artificial Sequence
  Description of Artificial Sequence: Synthetic oligonucleotide
ugaguaacacaaucucugg

SEQ ID NO: 492558 - RNA, 19 nt, Artificial Sequence
  Description of Artificial Sequence: Synthetic oligonucleotide
cuaauguagaaauguuugc

SEQ ID NO: 492559 - RNA, 19 nt, Artificial Sequence
  Description of Artificial Sequence: Synthetic oligonucleotide
uguuccgucaguauggaau

SEQ ID NO: 492560 - RNA, 19 nt, Artificial Sequence
  Description of Artificial Sequence: Synthetic oligonucleotide
uguguuauucacaucuggu

SEQ ID NO: 492561 - RNA, 19 nt, Artificial Sequence
  Description of Artificial Sequence: Synthetic oligonucleotide
ucuccauacuacuauauuc

SEQ ID NO: 492562 - RNA, 19 nt, Artificial Sequence
  Description of Artificial Sequence: Synthetic oligonucleotide
ucuagauuauccuggccag

SEQ ID NO: 492563 - RNA, 19 nt, Artificial Sequence
  Description of Artificial Sequence: Synthetic oligonucleotide
aucauaaccaaaucgucga

SEQ ID NO: 492564 - RNA, 19 nt, Artificial Sequence
  Description of Artificial Sequence: Synthetic oligonucleotide
aucgcuguuucaauaaugc

SEQ ID NO: 492565 - RNA, 19 nt, Artificial Sequence
  Description of Artificial Sequence: Synthetic oligonucleotide
aguguuaauugcauaauag

SEQ ID NO: 492566 - RNA, 19 nt, Artificial Sequence
  Description of Artificial Sequence: Synthetic oligonucleotide
uucaucaggcgacaaagca

SEQ ID NO: 492567 - RNA, 19 nt, Artificial Sequence
  Description of Artificial Sequence: Synthetic oligonucleotide
uauguaagggaaaacuuua

SEQ ID NO: 492568 - RNA, 19 nt, Artificial Sequence
  Description of Artificial Sequence: Synthetic oligonucleotide
aauuccgacucugagauau

SEQ ID NO: 492569 - RNA, 19 nt, Artificial Sequence
  Description of Artificial Sequence: Synthetic oligonucleotide
uuuguuuaaucaucgcugu

SEQ ID NO: 492570 - RNA, 19 nt, Artificial Sequence
  Description of Artificial Sequence: Synthetic oligonucleotide
aaacgguagcaccaaaacu

SEQ ID NO: 492571 - RNA, 19 nt, Artificial Sequence
  Description of Artificial Sequence: Synthetic oligonucleotide
uccaugaguaacacaaucu

SEQ ID NO: 492572 - RNA, 19 nt, Artificial Sequence
  Description of Artificial Sequence: Synthetic oligonucleotide
uggaauagccuagauagcc

SEQ ID NO: 492573 - RNA, 19 nt, Artificial Sequence
  Description of Artificial Sequence: Synthetic oligonucleotide
ucaguauggaauagccuag

SEQ ID NO: 492574 - RNA, 19 nt, Artificial Sequence
  Description of Artificial Sequence: Synthetic oligonucleotide
aaaguaacucugcauguau

SEQ ID NO: 492575 - RNA, 19 nt, Artificial Sequence
  Description of Artificial Sequence: Synthetic oligonucleotide
cauuagguuucuuccaagg

SEQ ID NO: 492576 - RNA, 19 nt, Artificial Sequence
  Description of Artificial Sequence: Synthetic oligonucleotide
uagguuucuuccaaggaga

SEQ ID NO: 492577 - RNA, 19 nt, Artificial Sequence
  Description of Artificial Sequence: Synthetic oligonucleotide
aauacugcagucauuacua

SEQ ID NO: 492578 - RNA, 19 nt, Artificial Sequence
  Description of Artificial Sequence: Synthetic oligonucleotide
ucgacuuguuaccuuauca

SEQ ID NO: 492579 - RNA, 19 nt, Artificial Sequence
  Description of Artificial Sequence: Synthetic oligonucleotide
aauauuucuagcagaauuu

SEQ ID NO: 492580 - RNA, 19 nt, Artificial Sequence
  Description of Artificial Sequence: Synthetic oligonucleotide
ucagcgucaaggauggucu

SEQ ID NO: 492581 - RNA, 19 nt, Artificial Sequence
  Description of Artificial Sequence: Synthetic oligonucleotide
ucucaauauuucuagcaga

SEQ ID NO: 492582 - RNA, 19 nt, Artificial Sequence
  Description of Artificial Sequence: Synthetic oligonucleotide
auagaacacuucaugacac

SEQ ID NO: 492583 - RNA, 19 nt, Artificial Sequence
  Description of Artificial Sequence: Synthetic oligonucleotide
gucucauuagguuucuucc

SEQ ID NO: 492584 - RNA, 19 nt, Artificial Sequence
  Description of Artificial Sequence: Synthetic oligonucleotide
uuaagcagggaauucugcu

SEQ ID NO: 492585 - RNA, 19 nt, Artificial Sequence
  Description of Artificial Sequence: Synthetic oligonucleotide
uaugugauccaugaguaac

SEQ ID NO: 492586 - RNA, 19 nt, Artificial Sequence
  Description of Artificial Sequence: Synthetic oligonucleotide
uguaagggaaaacuuuaaa

SEQ ID NO: 492587 - RNA, 19 nt, Artificial Sequence
  Description of Artificial Sequence: Synthetic oligonucleotide
aguucaucaggcgacaaag

SEQ ID NO: 492588 - RNA, 19 nt, Artificial Sequence
  Description of Artificial Sequence: Synthetic oligonucleotide
aaaggaucauccugaguca

SEQ ID NO: 492589 - RNA, 19 nt, Artificial Sequence
  Description of Artificial Sequence: Synthetic oligonucleotide
uagauagcccaaauacucc

SEQ ID NO: 492590 - RNA, 19 nt, Artificial Sequence
  Description of Artificial Sequence: Synthetic oligonucleotide
gauaucgugcagcaacaag

SEQ ID NO: 492591 - RNA, 19 nt, Artificial Sequence
  Description of Artificial Sequence: Synthetic oligonucleotide
aauacucgggcgucagauc

SEQ ID NO: 492592 - RNA, 19 nt, Artificial Sequence
  Description of Artificial Sequence: Synthetic oligonucleotide
guuauucacaucugguccc

SEQ ID NO: 492593 - RNA, 19 nt, Artificial Sequence
  Description of Artificial Sequence: Synthetic oligonucleotide
agcuacacaauuuucuaga

SEQ ID NO: 492594 - RNA, 19 nt, Artificial Sequence
  Description of Artificial Sequence: Synthetic oligonucleotide
uguaauagcugaagcuuga

SEQ ID NO: 492595 - RNA, 19 nt, Artificial Sequence
  Description of Artificial Sequence: Synthetic oligonucleotide
gaacguggagcucuugagg

SEQ ID NO: 492596 - RNA, 19 nt, Artificial Sequence
  Description of Artificial Sequence: Synthetic oligonucleotide
uuaaucaucgcuguuucaa

SEQ ID NO: 492597 - RNA, 19 nt, Artificial Sequence
  Description of Artificial Sequence: Synthetic oligonucleotide
auguauaaauaucucaaua

SEQ ID NO: 492598 - RNA, 19 nt, Artificial Sequence
  Description of Artificial Sequence: Synthetic oligonucleotide
caucuaaguagguugugag

SEQ ID NO: 492599 - RNA, 19 nt, Artificial Sequence
  Description of Artificial Sequence: Synthetic oligonucleotide
uuuggccuaugaaauuuag

SEQ ID NO: 492600 - RNA, 19 nt, Artificial Sequence
  Description of Artificial Sequence: Synthetic oligonucleotide
agcaauauagucacauagg

SEQ ID NO: 492601 - RNA, 19 nt, Artificial Sequence
  Description of Artificial Sequence: Synthetic oligonucleotide
ucucuggugacugaaaccu

SEQ ID NO: 492602 - RNA, 19 nt, Artificial Sequence
  Description of Artificial Sequence: Synthetic oligonucleotide
guuacuguaauagcugaag

SEQ ID NO: 492603 - RNA, 19 nt, Artificial Sequence
  Description of Artificial Sequence: Synthetic oligonucleotide
aauuaagcagggaauucug

SEQ ID NO: 492604 - RNA, 19 nt, Artificial Sequence
  Description of Artificial Sequence: Synthetic oligonucleotide
uauugugagaguuuauauu

SEQ ID NO: 492605 - RNA, 19 nt, Artificial Sequence
  Description of Artificial Sequence: Synthetic oligonucleotide
aaacgaagugguuuuggaa

SEQ ID NO: 492606 - RNA, 19 nt, Artificial Sequence
  Description of Artificial Sequence: Synthetic oligonucleotide
uugucucuagauuauccug

SEQ ID NO: 492607 - RNA, 19 nt, Artificial Sequence
  Description of Artificial Sequence: Synthetic oligonucleotide
auauaccaggcacacaaca

SEQ ID NO: 492608 - RNA, 19 nt, Artificial Sequence
  Description of Artificial Sequence: Synthetic oligonucleotide
uaauagcugaagcuugaga

SEQ ID NO: 492609 - RNA, 19 nt, Artificial Sequence
  Description of Artificial Sequence: Synthetic oligonucleotide
augaguaacacaaucucug

SEQ ID NO: 492610 - RNA, 19 nt, Artificial Sequence
  Description of Artificial Sequence: Synthetic oligonucleotide
uuuaauucaguaguacaau

SEQ ID NO: 492611 - RNA, 19 nt, Artificial Sequence
  Description of Artificial Sequence: Synthetic oligonucleotide
auuuaauucaguaguacaa

SEQ ID NO: 492612 - RNA, 19 nt, Artificial Sequence
  Description of Artificial Sequence: Synthetic oligonucleotide
auuaagcagggaauucugc

SEQ ID NO: 492613 - RNA, 19 nt, Artificial Sequence
  Description of Artificial Sequence: Synthetic oligonucleotide
agaauguacauaaaaguau

SEQ ID NO: 492614 - RNA, 19 nt, Artificial Sequence
  Description of Artificial Sequence: Synthetic oligonucleotide
cacacaacaucacaaauga

SEQ ID NO: 492615 - RNA, 19 nt, Artificial Sequence
  Description of Artificial Sequence: Synthetic oligonucleotide
aguugucucaugccucccc

SEQ ID NO: 492616 - RNA, 19 nt, Artificial Sequence
  Description of Artificial Sequence: Synthetic oligonucleotide
ucguuuugugcaaacugug

SEQ ID NO: 492617 - RNA, 19 nt, Artificial Sequence
  Description of Artificial Sequence: Synthetic oligonucleotide
aagguauguaagggaaaac

SEQ ID NO: 492618 - RNA, 19 nt, Artificial Sequence
  Description of Artificial Sequence: Synthetic oligonucleotide
uccugagucaaugugaaau

SEQ ID NO: 492619 - RNA, 19 nt, Artificial Sequence
  Description of Artificial Sequence: Synthetic oligonucleotide
uugaugcuagccuacugug

SEQ ID NO: 492620 - RNA, 19 nt, Artificial Sequence
  Description of Artificial Sequence: Synthetic oligonucleotide
uuaugaucaucacggauuu

SEQ ID NO: 492621 - RNA, 19 nt, Artificial Sequence
  Description of Artificial Sequence: Synthetic oligonucleotide
auuagguuucuuccaagga

SEQ ID NO: 492622 - RNA, 19 nt, Artificial Sequence
  Description of Artificial Sequence: Synthetic oligonucleotide
uuuaucucuuguuacugua

SEQ ID NO: 492623 - RNA, 19 nt, Artificial Sequence
  Description of Artificial Sequence: Synthetic oligonucleotide
aacgcugcacaucuaagua

SEQ ID NO: 492624 - RNA, 19 nt, Artificial Sequence
  Description of Artificial Sequence: Synthetic oligonucleotide
auaucgugcagcaacaagu

SEQ ID NO: 492625 - RNA, 19 nt, Artificial Sequence
  Description of Artificial Sequence: Synthetic oligonucleotide
ucucauuagguuucuucca

SEQ ID NO: 492626 - RNA, 19 nt, Artificial Sequence
  Description of Artificial Sequence: Synthetic oligonucleotide
cuguguuauucacaucugg

SEQ ID NO: 492627 - RNA, 19 nt, Artificial Sequence
  Description of Artificial Sequence: Synthetic oligonucleotide
agaacguggagcucuugag

SEQ ID NO: 492628 - RNA, 19 nt, Artificial Sequence
  Description of Artificial Sequence: Synthetic oligonucleotide
acaauuaagcagggaauuc

SEQ ID NO: 492629 - RNA, 19 nt, Artificial Sequence
  Description of Artificial Sequence: Synthetic oligonucleotide
aaauccuggcacaguauuc

SEQ ID NO: 492630 - RNA, 19 nt, Artificial Sequence
  Description of Artificial Sequence: Synthetic oligonucleotide
ugagaggaauccaucgacu

SEQ ID NO: 492631 - RNA, 19 nt, Artificial Sequence
  Description of Artificial Sequence: Synthetic oligonucleotide
agguauguaagggaaaacu

SEQ ID NO: 492632 - RNA, 19 nt, Artificial Sequence
  Description of Artificial Sequence: Synthetic oligonucleotide
ugagucaaugugaaauaaa

SEQ ID NO: 492633 - RNA, 19 nt, Artificial Sequence
  Description of Artificial Sequence: Synthetic oligonucleotide
ucauuagguuucuuccaag

SEQ ID NO: 492634 - RNA, 19 nt, Artificial Sequence
  Description of Artificial Sequence: Synthetic oligonucleotide
caguaggugagauacuaug

SEQ ID NO: 492635 - RNA, 19 nt, Artificial Sequence
  Description of Artificial Sequence: Synthetic oligonucleotide
uuggccuaugaaauuuagc

SEQ ID NO: 492636 - RNA, 19 nt, Artificial Sequence
  Description of Artificial Sequence: Synthetic oligonucleotide
uuuagccacuuaaguuugg

SEQ ID NO: 492637 - RNA, 19 nt, Artificial Sequence
  Description of Artificial Sequence: Synthetic oligonucleotide
ugacacaugcagcuauagc

SEQ ID NO: 492638 - RNA, 19 nt, Artificial Sequence
  Description of Artificial Sequence: Synthetic oligonucleotide
aauaaauacucgggcguca

SEQ ID NO: 492639 - RNA, 19 nt, Artificial Sequence
  Description of Artificial Sequence: Synthetic oligonucleotide
caauaucaaaggcagccug

SEQ ID NO: 492640 - RNA, 19 nt, Artificial Sequence
  Description of Artificial Sequence: Synthetic oligonucleotide
ugacugaaaccuagcagga

SEQ ID NO: 492641 - RNA, 19 nt, Artificial Sequence
  Description of Artificial Sequence: Synthetic oligonucleotide
ugcaucagcaguguuacaa

SEQ ID NO: 492642 - RNA, 19 nt, Artificial Sequence
  Description of Artificial Sequence: Synthetic oligonucleotide
aaucaucgcuguuucaaua

SEQ ID NO: 492643 - RNA, 19 nt, Artificial Sequence
  Description of Artificial Sequence: Synthetic oligonucleotide
uguuaacagcauaaacuau

SEQ ID NO: 492644 - RNA, 19 nt, Artificial Sequence
  Description of Artificial Sequence: Synthetic oligonucleotide
acuugcucgaagccagaac

SEQ ID NO: 492645 - RNA, 19 nt, Artificial Sequence
  Description of Artificial Sequence: Synthetic oligonucleotide
uucacaucugguccccaag

SEQ ID NO: 492646 - RNA, 19 nt, Artificial Sequence
  Description of Artificial Sequence: Synthetic oligonucleotide
uccauacuacuauauucca

SEQ ID NO: 492647 - RNA, 19 nt, Artificial Sequence
  Description of Artificial Sequence: Synthetic oligonucleotide
gccuagauagcccaaauac

SEQ ID NO: 492648 - RNA, 19 nt, Artificial Sequence
  Description of Artificial Sequence: Synthetic oligonucleotide
uuuggaaagcugaccuuga

SEQ ID NO: 492649 - RNA, 19 nt, Artificial Sequence
  Description of Artificial Sequence: Synthetic oligonucleotide
ugcaaacuguguuauucac

SEQ ID NO: 492650 - RNA, 19 nt, Artificial Sequence
  Description of Artificial Sequence: Synthetic oligonucleotide
ucacaugcggauacauggc

SEQ ID NO: 492651 - RNA, 19 nt, Artificial Sequence
  Description of Artificial Sequence: Synthetic oligonucleotide
ugucacaugcggauacaug

SEQ ID NO: 492652 - RNA, 19 nt, Artificial Sequence
  Description of Artificial Sequence: Synthetic oligonucleotide
acuuaugaucaucacggau

SEQ ID NO: 492653 - RNA, 19 nt, Artificial Sequence
  Description of Artificial Sequence: Synthetic oligonucleotide
aaccaauaucaaaggcagc

SEQ ID NO: 492654 - RNA, 19 nt, Artificial Sequence
  Description of Artificial Sequence: Synthetic oligonucleotide
aaguagguugugagcgucc

SEQ ID NO: 492655 - RNA, 19 nt, Artificial Sequence
  Description of Artificial Sequence: Synthetic oligonucleotide
aaucgucgaaggacagucc

SEQ ID NO: 492656 - RNA, 19 nt, Artificial Sequence
  Description of Artificial Sequence: Synthetic oligonucleotide
ugcuagccuacugugacag

SEQ ID NO: 492657 - RNA, 19 nt, Artificial Sequence
  Description of Artificial Sequence: Synthetic oligonucleotide
ucgugcagcaacaaguauu

SEQ ID NO: 492658 - RNA, 19 nt, Artificial Sequence
  Description of Artificial Sequence: Synthetic oligonucleotide
ucagccuuaguuagaaauu

SEQ ID NO: 492659 - RNA, 19 nt, Artificial Sequence
  Description of Artificial Sequence: Synthetic oligonucleotide
gccuaugaaauuuagccac

SEQ ID NO: 492660 - RNA, 19 nt, Artificial Sequence
  Description of Artificial Sequence: Synthetic oligonucleotide
guuuuguuuaaucaucgcu

SEQ ID NO: 492661 - RNA, 19 nt, Artificial Sequence
  Description of Artificial Sequence: Synthetic oligonucleotide
guauucaaaggacuuggga

SEQ ID NO: 492662 - RNA, 19 nt, Artificial Sequence
  Description of Artificial Sequence: Synthetic oligonucleotide
uacucuuaugcaugaauua

SEQ ID NO: 492663 - RNA, 19 nt, Artificial Sequence
  Description of Artificial Sequence: Synthetic oligonucleotide
agcaccaaaacuugcucga

SEQ ID NO: 492664 - RNA, 19 nt, Artificial Sequence
  Description of Artificial Sequence: Synthetic oligonucleotide
guaacacaaucucugguga

SEQ ID NO: 492665 - RNA, 19 nt, Artificial Sequence
  Description of Artificial Sequence: Synthetic oligonucleotide
acagaaacgaagugguuuu

SEQ ID NO: 492666 - RNA, 19 nt, Artificial Sequence
  Description of Artificial Sequence: Synthetic oligonucleotide
ggaaaccauaucuugcuug

SEQ ID NO: 492667 - RNA, 19 nt, Artificial Sequence
  Description of Artificial Sequence: Synthetic oligonucleotide
agccacuuaaguuuggcua

SEQ ID NO: 492668 - RNA, 19 nt, Artificial Sequence
  Description of Artificial Sequence: Synthetic oligonucleotide
uacaauuaagcagggaauu

SEQ ID NO: 492669 - RNA, 19 nt, Artificial Sequence
  Description of Artificial Sequence: Synthetic oligonucleotide
cauaaccaaaucgucgaag

SEQ ID NO: 492670 - RNA, 19 nt, Artificial Sequence
  Description of Artificial Sequence: Synthetic oligonucleotide
auauagucacauagguaac

SEQ ID NO: 492671 - RNA, 19 nt, Artificial Sequence
  Description of Artificial Sequence: Synthetic oligonucleotide
ucagugugggaaaccauau

SEQ ID NO: 492672 - RNA, 19 nt, Artificial Sequence
  Description of Artificial Sequence: Synthetic oligonucleotide
uugauugaaagggcuauaa

SEQ ID NO: 492673 - RNA, 19 nt, Artificial Sequence
  Description of Artificial Sequence: Synthetic oligonucleotide
uguuacuguaauagcugaa

SEQ ID NO: 492674 - RNA, 19 nt, Artificial Sequence
  Description of Artificial Sequence: Synthetic oligonucleotide
agaacucagugugggaaac

SEQ ID NO: 492675 - RNA, 19 nt, Artificial Sequence
  Description of Artificial Sequence: Synthetic oligonucleotide
caucaggcgacaaagcaca

SEQ ID NO: 492676 - RNA, 19 nt, Artificial Sequence
  Description of Artificial Sequence: Synthetic oligonucleotide
uaucgugcagcaacaagua

SEQ ID NO: 492677 - RNA, 19 nt, Artificial Sequence
  Description of Artificial Sequence: Synthetic oligonucleotide
auaucuugcuugaauauau

SEQ ID NO: 492678 - RNA, 19 nt, Artificial Sequence
  Description of Artificial Sequence: Synthetic oligonucleotide
guccauaaaauguugcuua

SEQ ID NO: 492679 - RNA, 19 nt, Artificial Sequence
  Description of Artificial Sequence: Synthetic oligonucleotide
ucucuagauuauccuggcc

SEQ ID NO: 492680 - RNA, 19 nt, Artificial Sequence
  Description of Artificial Sequence: Synthetic oligonucleotide
ucgaaggacaguccaaguu

SEQ ID NO: 492681 - RNA, 19 nt, Artificial Sequence
  Description of Artificial Sequence: Synthetic oligonucleotide
caucgcuguuucaauaaug

SEQ ID NO: 492682 - RNA, 19 nt, Artificial Sequence
  Description of Artificial Sequence: Synthetic oligonucleotide
agccuuaguuagaaauucc

SEQ ID NO: 492683 - RNA, 19 nt, Artificial Sequence
  Description of Artificial Sequence: Synthetic oligonucleotide
uugcagcuacaauuaagca

SEQ ID NO: 492684 - RNA, 19 nt, Artificial Sequence
  Description of Artificial Sequence: Synthetic oligonucleotide
aucaucgcuguuucaauaa

SEQ ID NO: 492685 - RNA, 19 nt, Artificial Sequence
  Description of Artificial Sequence: Synthetic oligonucleotide
aaguucaucaggcgacaaa

SEQ ID NO: 492686 - RNA, 19 nt, Artificial Sequence
  Description of Artificial Sequence: Synthetic oligonucleotide
aucgacuuguuaccuuauc

SEQ ID NO: 492687 - RNA, 19 nt, Artificial Sequence
  Description of Artificial Sequence: Synthetic oligonucleotide
uuagccacuuaaguuuggc

SEQ ID NO: 492688 - RNA, 19 nt, Artificial Sequence
  Description of Artificial Sequence: Synthetic oligonucleotide
cucuuaugcaugaauuaca

SEQ ID NO: 492689 - RNA, 19 nt, Artificial Sequence
  Description of Artificial Sequence: Synthetic oligonucleotide
cacaugcggauacauggcc

SEQ ID NO: 492690 - RNA, 19 nt, Artificial Sequence
  Description of Artificial Sequence: Synthetic oligonucleotide
uagguugugagcguccacu

SEQ ID NO: 492691 - RNA, 19 nt, Artificial Sequence
  Description of Artificial Sequence: Synthetic oligonucleotide
acagccuuuauagaauggu

SEQ ID NO: 492692 - RNA, 19 nt, Artificial Sequence
  Description of Artificial Sequence: Synthetic oligonucleotide
uaagguguuuucucuccac

SEQ ID NO: 492693 - RNA, 19 nt, Artificial Sequence
  Description of Artificial Sequence: Synthetic oligonucleotide
aguaggugagauacuaugu

SEQ ID NO: 492694 - RNA, 19 nt, Artificial Sequence
  Description of Artificial Sequence: Synthetic oligonucleotide
uaaucaucgcuguuucaau

SEQ ID NO: 492695 - RNA, 19 nt, Artificial Sequence
  Description of Artificial Sequence: Synthetic oligonucleotide
cuuaugaucaucacggauu

SEQ ID NO: 492696 - RNA, 19 nt, Artificial Sequence
  Description of Artificial Sequence: Synthetic oligonucleotide
uuguuaccuuaucaauaga

SEQ ID NO: 492697 - RNA, 19 nt, Artificial Sequence
  Description of Artificial Sequence: Synthetic oligonucleotide
ucauaaccaaaucgucgaa

SEQ ID NO: 492698 - RNA, 19 nt, Artificial Sequence
  Description of Artificial Sequence: Synthetic oligonucleotide
aauaccugaaaaggucaau

SEQ ID NO: 492699 - RNA, 19 nt, Artificial Sequence
  Description of Artificial Sequence: Synthetic oligonucleotide
auggaauagccuagauagc

SEQ ID NO: 492700 - RNA, 19 nt, Artificial Sequence
  Description of Artificial Sequence: Synthetic oligonucleotide
caaguauuucuccugucca

SEQ ID NO: 492701 - RNA, 19 nt, Artificial Sequence
  Description of Artificial Sequence: Synthetic oligonucleotide
uuauucacaucuggucccc

SEQ ID NO: 492702 - RNA, 19 nt, Artificial Sequence
  Description of Artificial Sequence: Synthetic oligonucleotide
ugugauccaugaguaacac

SEQ ID NO: 492703 - RNA, 19 nt, Artificial Sequence
  Description of Artificial Sequence: Synthetic oligonucleotide
uuauccagccucuuucguu

SEQ ID NO: 492704 - RNA, 19 nt, Artificial Sequence
  Description of Artificial Sequence: Synthetic oligonucleotide
guaacaccuuugcuaacug

SEQ ID NO: 492705 - RNA, 19 nt, Artificial Sequence
  Description of Artificial Sequence: Synthetic oligonucleotide
agcaguguuacaagugaag

SEQ ID NO: 492706 - RNA, 19 nt, Artificial Sequence
  Description of Artificial Sequence: Synthetic oligonucleotide
uaaaguaacucugcaugua

SEQ ID NO: 492707 - RNA, 19 nt, Artificial Sequence
  Description of Artificial Sequence: Synthetic oligonucleotide
auaaugcuuuguacauagc

SEQ ID NO: 492708 - RNA, 19 nt, Artificial Sequence
  Description of Artificial Sequence: Synthetic oligonucleotide
accaaaucgucgaaggaca

SEQ ID NO: 492709 - RNA, 19 nt, Artificial Sequence
  Description of Artificial Sequence: Synthetic oligonucleotide
aaauaccugaaaaggucaa

SEQ ID NO: 492710 - RNA, 19 nt, Artificial Sequence
  Description of Artificial Sequence: Synthetic oligonucleotide
uagauuauccuggccagau

SEQ ID NO: 492711 - RNA, 19 nt, Artificial Sequence
  Description of Artificial Sequence: Synthetic oligonucleotide
aaccuagcaggaugagcca

SEQ ID NO: 492712 - RNA, 19 nt, Artificial Sequence
  Description of Artificial Sequence: Synthetic oligonucleotide
gucucuagauuauccuggc

SEQ ID NO: 492713 - RNA, 19 nt, Artificial Sequence
  Description of Artificial Sequence: Synthetic oligonucleotide
uuggaaagcugaccuugac

SEQ ID NO: 492714 - RNA, 19 nt, Artificial Sequence
  Description of Artificial Sequence: Synthetic oligonucleotide
aucacggauuuucuucugu

SEQ ID NO: 492715 - RNA, 19 nt, Artificial Sequence
  Description of Artificial Sequence: Synthetic oligonucleotide
ccaaccaauaucaaaggca

SEQ ID NO: 492716 - RNA, 19 nt, Artificial Sequence
  Description of Artificial Sequence: Synthetic oligonucleotide
gccuuaguuagaaauuccg

SEQ ID NO: 492717 - RNA, 19 nt, Artificial Sequence
  Description of Artificial Sequence: Synthetic oligonucleotide
aguacaaucaggagguauu

SEQ ID NO: 492718 - RNA, 19 nt, Artificial Sequence
  Description of Artificial Sequence: Synthetic oligonucleotide
aguauggaauagccuagau

SEQ ID NO: 492719 - RNA, 19 nt, Artificial Sequence
  Description of Artificial Sequence: Synthetic oligonucleotide
auacucuuaugcaugaauu

SEQ ID NO: 492720 - RNA, 19 nt, Artificial Sequence
  Description of Artificial Sequence: Synthetic oligonucleotide
ugcuaacugcuucugccuc

SEQ ID NO: 492721 - RNA, 19 nt, Artificial Sequence
  Description of Artificial Sequence: Synthetic oligonucleotide
acuuguuaccuuaucaaua

SEQ ID NO: 492722 - RNA, 19 nt, Artificial Sequence
  Description of Artificial Sequence: Synthetic oligonucleotide
caccaaaacuugcucgaag

SEQ ID NO: 492723 - RNA, 19 nt, Artificial Sequence
  Description of Artificial Sequence: Synthetic oligonucleotide
gcuacuaagguguuuucuc

SEQ ID NO: 492724 - RNA, 19 nt, Artificial Sequence
  Description of Artificial Sequence: Synthetic oligonucleotide
ucaucgcuguuucaauaau

SEQ ID NO: 492725 - RNA, 19 nt, Artificial Sequence
  Description of Artificial Sequence: Synthetic oligonucleotide
uuuucacuucaggugaaau

SEQ ID NO: 492726 - RNA, 19 nt, Artificial Sequence
  Description of Artificial Sequence: Synthetic oligonucleotide
guauggaauagccuagaua

SEQ ID NO: 492727 - RNA, 19 nt, Artificial Sequence
  Description of Artificial Sequence: Synthetic oligonucleotide
ucgcuguuucaauaaugcu

SEQ ID NO: 492728 - RNA, 19 nt, Artificial Sequence
  Description of Artificial Sequence: Synthetic oligonucleotide
uaggacuuaugaucaucac

SEQ ID NO: 492729 - RNA, 19 nt, Artificial Sequence
  Description of Artificial Sequence: Synthetic oligonucleotide
gacaguccaaguugucuca

SEQ ID NO: 492730 - RNA, 19 nt, Artificial Sequence
  Description of Artificial Sequence: Synthetic oligonucleotide
gccucuuucguuuugugca

SEQ ID NO: 492731 - RNA, 19 nt, Artificial Sequence
  Description of Artificial Sequence: Synthetic oligonucleotide
gugagauacuauguucuug

SEQ ID NO: 492732 - RNA, 19 nt, Artificial Sequence
  Description of Artificial Sequence: Synthetic oligonucleotide
uugcucgaagccagaacgu

SEQ ID NO: 492733 - RNA, 19 nt, Artificial Sequence
  Description of Artificial Sequence: Synthetic oligonucleotide
ucgggcgucagauccagau

SEQ ID NO: 492734 - RNA, 19 nt, Artificial Sequence
  Description of Artificial Sequence: Synthetic oligonucleotide
uaguacaaucaggagguau

SEQ ID NO: 492735 - RNA, 19 nt, Artificial Sequence
  Description of Artificial Sequence: Synthetic oligonucleotide
ccuacugugacagaaacga

SEQ ID NO: 492736 - RNA, 19 nt, Artificial Sequence
  Description of Artificial Sequence: Synthetic oligonucleotide
uugcuugaauauauacauu

SEQ ID NO: 492737 - RNA, 19 nt, Artificial Sequence
  Description of Artificial Sequence: Synthetic oligonucleotide
gaaaucaguaggugagaua

SEQ ID NO: 492738 - RNA, 19 nt, Artificial Sequence
  Description of Artificial Sequence: Synthetic oligonucleotide
guaauagcugaagcuugag

SEQ ID NO: 492739 - RNA, 19 nt, Artificial Sequence
  Description of Artificial Sequence: Synthetic oligonucleotide
guugucaauuuaacaaaga

SEQ ID NO: 492740 - RNA, 19 nt, Artificial Sequence
  Description of Artificial Sequence: Synthetic oligonucleotide
agguaacaccuuugcuaac

SEQ ID NO: 492741 - RNA, 19 nt, Artificial Sequence
  Description of Artificial Sequence: Synthetic oligonucleotide
guugucucuagauuauccu

SEQ ID NO: 492742 - RNA, 19 nt, Artificial Sequence
  Description of Artificial Sequence: Synthetic oligonucleotide
uccgacucugagauaucgu

SEQ ID NO: 492743 - RNA, 19 nt, Artificial Sequence
  Description of Artificial Sequence: Synthetic oligonucleotide
ugcucgaagccagaacgug

SEQ ID NO: 492744 - RNA, 19 nt, Artificial Sequence
  Description of Artificial Sequence: Synthetic oligonucleotide
cagccuuaguuagaaauuc

SEQ ID NO: 492745 - RNA, 19 nt, Artificial Sequence
  Description of Artificial Sequence: Synthetic oligonucleotide
agauuuguucccaaccaau

SEQ ID NO: 492746 - RNA, 19 nt, Artificial Sequence
  Description of Artificial Sequence: Synthetic oligonucleotide
ggcgacaaagcacagucuc

SEQ ID NO: 492747 - RNA, 19 nt, Artificial Sequence
  Description of Artificial Sequence: Synthetic oligonucleotide
ucgaagccagaacguggag

SEQ ID NO: 492748 - RNA, 19 nt, Artificial Sequence
  Description of Artificial Sequence: Synthetic oligonucleotide
acguggagcucuugagguc

SEQ ID NO: 492749 - RNA, 19 nt, Artificial Sequence
  Description of Artificial Sequence: Synthetic oligonucleotide
gacuuaugaucaucacgga

SEQ ID NO: 492750 - RNA, 19 nt, Artificial Sequence
  Description of Artificial Sequence: Synthetic oligonucleotide
cucagcgucaaggaugguc

SEQ ID NO: 492751 - RNA, 19 nt, Artificial Sequence
  Description of Artificial Sequence: Synthetic oligonucleotide
cauuugauugaaagggcua

SEQ ID NO: 492752 - RNA, 19 nt, Artificial Sequence
  Description of Artificial Sequence: Synthetic oligonucleotide
cucgaagccagaacgugga

SEQ ID NO: 492753 - RNA, 19 nt, Artificial Sequence
  Description of Artificial Sequence: Synthetic oligonucleotide
uuguuuaaucaucgcuguu

SEQ ID NO: 492754 - RNA, 19 nt, Artificial Sequence
  Description of Artificial Sequence: Synthetic oligonucleotide
ugguccccaagguauguaa

SEQ ID NO: 492755 - RNA, 19 nt, Artificial Sequence
  Description of Artificial Sequence: Synthetic oligonucleotide
cugugacagaaacgaagug

SEQ ID NO: 492756 - RNA, 19 nt, Artificial Sequence
  Description of Artificial Sequence: Synthetic oligonucleotide
uuugauugaaagggcuaua

SEQ ID NO: 492757 - RNA, 19 nt, Artificial Sequence
  Description of Artificial Sequence: Synthetic oligonucleotide
ccaauuacauuacaucuga

SEQ ID NO: 492758 - RNA, 19 nt, Artificial Sequence
  Description of Artificial Sequence: Synthetic oligonucleotide
ccgucaguauggaauagcc

SEQ ID NO: 492759 - RNA, 19 nt, Artificial Sequence
  Description of Artificial Sequence: Synthetic oligonucleotide
gggcuauaaaaucccacac

SEQ ID NO: 492760 - RNA, 19 nt, Artificial Sequence
  Description of Artificial Sequence: Synthetic oligonucleotide
accuuaucaauagaauguu

SEQ ID NO: 492761 - RNA, 19 nt, Artificial Sequence
  Description of Artificial Sequence: Synthetic oligonucleotide
cucauuagguuucuuccaa

SEQ ID NO: 492762 - RNA, 19 nt, Artificial Sequence
  Description of Artificial Sequence: Synthetic oligonucleotide
agugaacacuaugacacua

SEQ ID NO: 492763 - RNA, 19 nt, Artificial Sequence
  Description of Artificial Sequence: Synthetic oligonucleotide
agccuuuauagaaugguuu

SEQ ID NO: 492764 - RNA, 19 nt, Artificial Sequence
  Description of Artificial Sequence: Synthetic oligonucleotide
caccuuugcuaacugcuuc

SEQ ID NO: 492765 - RNA, 19 nt, Artificial Sequence
  Description of Artificial Sequence: Synthetic oligonucleotide
cauccugagucaaugugaa

SEQ ID NO: 492766 - RNA, 19 nt, Artificial Sequence
  Description of Artificial Sequence: Synthetic oligonucleotide
ugugagcguccacugggaa

SEQ ID NO: 492767 - RNA, 19 nt, Artificial Sequence
  Description of Artificial Sequence: Synthetic oligonucleotide
ggccuaugaaauuuagcca

SEQ ID NO: 492768 - RNA, 19 nt, Artificial Sequence
  Description of Artificial Sequence: Synthetic oligonucleotide
aucucuuguuacuguaaua

SEQ ID NO: 492769 - RNA, 19 nt, Artificial Sequence
  Description of Artificial Sequence: Synthetic oligonucleotide
gggcgucagauccagauca

SEQ ID NO: 492770 - RNA, 19 nt, Artificial Sequence
  Description of Artificial Sequence: Synthetic oligonucleotide
ggaucauccugagucaaug

SEQ ID NO: 492771 - RNA, 19 nt, Artificial Sequence
  Description of Artificial Sequence: Synthetic oligonucleotide
cagcuacaauuaagcaggg

SEQ ID NO: 492772 - RNA, 19 nt, Artificial Sequence
  Description of Artificial Sequence: Synthetic oligonucleotide
gugacagaaacgaaguggu

SEQ ID NO: 492773 - RNA, 19 nt, Artificial Sequence
  Description of Artificial Sequence: Synthetic oligonucleotide
ggaauagccuagauagccc

SEQ ID NO: 492774 - RNA, 19 nt, Artificial Sequence
  Description of Artificial Sequence: Synthetic oligonucleotide
guguuuccugcagaaauca

SEQ ID NO: 492775 - RNA, 19 nt, Artificial Sequence
  Description of Artificial Sequence: Synthetic oligonucleotide
guuccgucaguauggaaua

SEQ ID NO: 492776 - RNA, 19 nt, Artificial Sequence
  Description of Artificial Sequence: Synthetic oligonucleotide
auucacaucugguccccaa

SEQ ID NO: 492777 - RNA, 19 nt, Artificial Sequence
  Description of Artificial Sequence: Synthetic oligonucleotide
acuguguuauucacaucug

SEQ ID NO: 492778 - RNA, 19 nt, Artificial Sequence
  Description of Artificial Sequence: Synthetic oligonucleotide
caggaugagccaagugaac

SEQ ID NO: 492779 - RNA, 19 nt, Artificial Sequence
  Description of Artificial Sequence: Synthetic oligonucleotide
agguuucuuccaaggagag

SEQ ID NO: 492780 - RNA, 19 nt, Artificial Sequence
  Description of Artificial Sequence: Synthetic oligonucleotide
cauuuaugagaggaaucca

SEQ ID NO: 492781 - RNA, 19 nt, Artificial Sequence
  Description of Artificial Sequence: Synthetic oligonucleotide
cuagccuacugugacagaa

SEQ ID NO: 492782 - RNA, 19 nt, Artificial Sequence
  Description of Artificial Sequence: Synthetic oligonucleotide
ugugucacaugcggauaca

SEQ ID NO: 492783 - RNA, 19 nt, Artificial Sequence
  Description of Artificial Sequence: Synthetic oligonucleotide
ccgacucugagauaucgug

SEQ ID NO: 492784 - RNA, 19 nt, Artificial Sequence
  Description of Artificial Sequence: Synthetic oligonucleotide
aacuugcucgaagccagaa

SEQ ID NO: 492785 - RNA, 19 nt, Artificial Sequence
  Description of Artificial Sequence: Synthetic oligonucleotide
auacugcagucauuacuau

SEQ ID NO: 492786 - RNA, 19 nt, Artificial Sequence
  Description of Artificial Sequence: Synthetic oligonucleotide
ccaagugaacacuaugaca

SEQ ID NO: 492787 - RNA, 19 nt, Artificial Sequence
  Description of Artificial Sequence: Synthetic oligonucleotide
guuacaagugaaggcuuga

SEQ ID NO: 492788 - RNA, 19 nt, Artificial Sequence
  Description of Artificial Sequence: Synthetic oligonucleotide
guuaccuuaucaauagaau

SEQ ID NO: 492789 - RNA, 19 nt, Artificial Sequence
  Description of Artificial Sequence: Synthetic oligonucleotide
ccagaucagauuuguuccc

SEQ ID NO: 492790 - RNA, 19 nt, Artificial Sequence
  Description of Artificial Sequence: Synthetic oligonucleotide
caauuaagcagggaauucu

SEQ ID NO: 492791 - RNA, 19 nt, Artificial Sequence
  Description of Artificial Sequence: Synthetic oligonucleotide
uuccgucaguauggaauag

SEQ ID NO: 492792 - RNA, 19 nt, Artificial Sequence
  Description of Artificial Sequence: Synthetic oligonucleotide
acacuaauguagaaauguu

SEQ ID NO: 492793 - RNA, 19 nt, Artificial Sequence
  Description of Artificial Sequence: Synthetic oligonucleotide
cagaacguggagcucuuga

SEQ ID NO: 492794 - RNA, 19 nt, Artificial Sequence
  Description of Artificial Sequence: Synthetic oligonucleotide
aaaccauaucuugcuugaa

SEQ ID NO: 492795 - RNA, 19 nt, Artificial Sequence
  Description of Artificial Sequence: Synthetic oligonucleotide
guauguaagggaaaacuuu

SEQ ID NO: 492796 - RNA, 19 nt, Artificial Sequence
  Description of Artificial Sequence: Synthetic oligonucleotide
cagucauuacuaucaguaa

SEQ ID NO: 492797 - RNA, 19 nt, Artificial Sequence
  Description of Artificial Sequence: Synthetic oligonucleotide
aaauuccgacucugagaua

SEQ ID NO: 492798 - RNA, 19 nt, Artificial Sequence
  Description of Artificial Sequence: Synthetic oligonucleotide
agacucuuguuccgucagu

SEQ ID NO: 492799 - RNA, 19 nt, Artificial Sequence
  Description of Artificial Sequence: Synthetic oligonucleotide
aucgugcagcaacaaguau

SEQ ID NO: 492800 - RNA, 19 nt, Artificial Sequence
  Description of Artificial Sequence: Synthetic oligonucleotide
acaugcggauacauggcca

SEQ ID NO: 492801 - RNA, 19 nt, Artificial Sequence
  Description of Artificial Sequence: Synthetic oligonucleotide
ccuuaguuagaaauuccga

SEQ ID NO: 492802 - RNA, 19 nt, Artificial Sequence
  Description of Artificial Sequence: Synthetic oligonucleotide
auguaagggaaaacuuuaa

SEQ ID NO: 492803 - RNA, 19 nt, Artificial Sequence
  Description of Artificial Sequence: Synthetic oligonucleotide
auagccuagauagcccaaa

SEQ ID NO: 492804 - RNA, 19 nt, Artificial Sequence
  Description of Artificial Sequence: Synthetic oligonucleotide
uccaucgacuuguuaccuu

SEQ ID NO: 492805 - RNA, 19 nt, Artificial Sequence
  Description of Artificial Sequence: Synthetic oligonucleotide
cagugugggaaaccauauc

SEQ ID NO: 492806 - RNA, 19 nt, Artificial Sequence
  Description of Artificial Sequence: Synthetic oligonucleotide
agauuauccuggccagaua

SEQ ID NO: 492807 - RNA, 19 nt, Artificial Sequence
  Description of Artificial Sequence: Synthetic oligonucleotide
cugagucaaugugaaauaa

SEQ ID NO: 492808 - RNA, 19 nt, Artificial Sequence
  Description of Artificial Sequence: Synthetic oligonucleotide
cuaugacacuaauguagaa

SEQ ID NO: 492809 - RNA, 19 nt, Artificial Sequence
  Description of Artificial Sequence: Synthetic oligonucleotide
cacaguauucaaaggacuu

SEQ ID NO: 492810 - RNA, 19 nt, Artificial Sequence
  Description of Artificial Sequence: Synthetic oligonucleotide
caauuacauuacaucugaa

SEQ ID NO: 492811 - RNA, 19 nt, Artificial Sequence
  Description of Artificial Sequence: Synthetic oligonucleotide
auccaucgacuuguuaccu

SEQ ID NO: 492812 - RNA, 19 nt, Artificial Sequence
  Description of Artificial Sequence: Synthetic oligonucleotide
acauuacaucugaacacau

SEQ ID NO: 492813 - RNA, 19 nt, Artificial Sequence
  Description of Artificial Sequence: Synthetic oligonucleotide
caacgcugcacaucuaagu

SEQ ID NO: 492814 - RNA, 19 nt, Artificial Sequence
  Description of Artificial Sequence: Synthetic oligonucleotide
cgacucugagauaucgugc

SEQ ID NO: 492815 - RNA, 19 nt, Artificial Sequence
  Description of Artificial Sequence: Synthetic oligonucleotide
uuguuccgucaguauggaa

SEQ ID NO: 492816 - RNA, 19 nt, Artificial Sequence
  Description of Artificial Sequence: Synthetic oligonucleotide
gcauaauaggacuuaugau

SEQ ID NO: 492817 - RNA, 19 nt, Artificial Sequence
  Description of Artificial Sequence: Synthetic oligonucleotide
gggauuagugacaucauau

SEQ ID NO: 492818 - RNA, 19 nt, Artificial Sequence
  Description of Artificial Sequence: Synthetic oligonucleotide
aagcugaccuugacuccug

SEQ ID NO: 492819 - RNA, 19 nt, Artificial Sequence
  Description of Artificial Sequence: Synthetic oligonucleotide
gugagcguccacugggaaa

SEQ ID NO: 492820 - RNA, 19 nt, Artificial Sequence
  Description of Artificial Sequence: Synthetic oligonucleotide
cccaagguauguaagggaa

SEQ ID NO: 492821 - RNA, 19 nt, Artificial Sequence
  Description of Artificial Sequence: Synthetic oligonucleotide
gguaacaccuuugcuaacu

SEQ ID NO: 492822 - RNA, 19 nt, Artificial Sequence
  Description of Artificial Sequence: Synthetic oligonucleotide
cuacugugacagaaacgaa

SEQ ID NO: 492823 - RNA, 19 nt, Artificial Sequence
  Description of Artificial Sequence: Synthetic oligonucleotide
gguccccaagguauguaag

SEQ ID NO: 492824 - RNA, 19 nt, Artificial Sequence
  Description of Artificial Sequence: Synthetic oligonucleotide
cagcaguguuacaagugaa

SEQ ID NO: 492825 - RNA, 19 nt, Artificial Sequence
  Description of Artificial Sequence: Synthetic oligonucleotide
cuagauuauccuggccaga

SEQ ID NO: 492826 - RNA, 19 nt, Artificial Sequence
  Description of Artificial Sequence: Synthetic oligonucleotide
cuuguuccgucaguaugga

SEQ ID NO: 492827 - RNA, 19 nt, Artificial Sequence
  Description of Artificial Sequence: Synthetic oligonucleotide
accuagcaggaugagccaa

SEQ ID NO: 492828 - RNA, 19 nt, Artificial Sequence
  Description of Artificial Sequence: Synthetic oligonucleotide
gcaacgcugcacaucuaag

SEQ ID NO: 492829 - RNA, 19 nt, Artificial Sequence
  Description of Artificial Sequence: Synthetic oligonucleotide
guguugucucuagauuauc

SEQ ID NO: 492830 - RNA, 19 nt, Artificial Sequence
  Description of Artificial Sequence: Synthetic oligonucleotide
cauuacaucugaacacauu

SEQ ID NO: 492831 - RNA, 19 nt, Artificial Sequence
  Description of Artificial Sequence: Synthetic oligonucleotide
caguauggaauagccuaga

SEQ ID NO: 492832 - RNA, 19 nt, Artificial Sequence
  Description of Artificial Sequence: Synthetic oligonucleotide
caugcagcuauagcaauau

SEQ ID NO: 492833 - RNA, 19 nt, Artificial Sequence
  Description of Artificial Sequence: Synthetic oligonucleotide
ccuagauagcccaaauacu

SEQ ID NO: 492834 - RNA, 19 nt, Artificial Sequence
  Description of Artificial Sequence: Synthetic oligonucleotide
gucuccauacuacuauauu

SEQ ID NO: 492835 - RNA, 19 nt, Artificial Sequence
  Description of Artificial Sequence: Synthetic oligonucleotide
aucaggcgacaaagcacag

SEQ ID NO: 492836 - RNA, 19 nt, Artificial Sequence
  Description of Artificial Sequence: Synthetic oligonucleotide
ccauuugauugaaagggcu

SEQ ID NO: 492837 - RNA, 19 nt, Artificial Sequence
  Description of Artificial Sequence: Synthetic oligonucleotide
augcagcuauagcaauaua

SEQ ID NO: 492838 - RNA, 19 nt, Artificial Sequence
  Description of Artificial Sequence: Synthetic oligonucleotide
agcguccacugggaaagga

SEQ ID NO: 492839 - RNA, 19 nt, Artificial Sequence
  Description of Artificial Sequence: Synthetic oligonucleotide
gcuugugucacaugcggau

SEQ ID NO: 492840 - RNA, 19 nt, Artificial Sequence
  Description of Artificial Sequence: Synthetic oligonucleotide
gucaggguggcuuguuuau

SEQ ID NO: 492841 - RNA, 19 nt, Artificial Sequence
  Description of Artificial Sequence: Synthetic oligonucleotide
gagcguccacugggaaagg

SEQ ID NO: 492842 - RNA, 19 nt, Artificial Sequence
  Description of Artificial Sequence: Synthetic oligonucleotide
gucgaaggacaguccaagu

SEQ ID NO: 492843 - RNA, 19 nt, Artificial Sequence
  Description of Artificial Sequence: Synthetic oligonucleotide
cuugugucacaugcggaua

SEQ ID NO: 492844 - RNA, 19 nt, Artificial Sequence
  Description of Artificial Sequence: Synthetic oligonucleotide
aggaucauccugagucaau

SEQ ID NO: 492845 - RNA, 19 nt, Artificial Sequence
  Description of Artificial Sequence: Synthetic oligonucleotide
ggcacacaacaucacaaau

SEQ ID NO: 492846 - RNA, 19 nt, Artificial Sequence
  Description of Artificial Sequence: Synthetic oligonucleotide
cgacuuguuaccuuaucaa

SEQ ID NO: 492847 - RNA, 19 nt, Artificial Sequence
  Description of Artificial Sequence: Synthetic oligonucleotide
ccauccaauacugcaguca

SEQ ID NO: 492848 - RNA, 19 nt, Artificial Sequence
  Description of Artificial Sequence: Synthetic oligonucleotide
aggcgacaaagcacagucu

SEQ ID NO: 492849 - RNA, 19 nt, Artificial Sequence
  Description of Artificial Sequence: Synthetic oligonucleotide
cagcgucaaggauggucuc

SEQ ID NO: 492850 - RNA, 19 nt, Artificial Sequence
  Description of Artificial Sequence: Synthetic oligonucleotide
cagccuuuauagaaugguu

SEQ ID NO: 492851 - RNA, 19 nt, Artificial Sequence
  Description of Artificial Sequence: Synthetic oligonucleotide
cgucgaaggacaguccaag

SEQ ID NO: 492852 - RNA, 19 nt, Artificial Sequence
  Description of Artificial Sequence: Synthetic oligonucleotide
guacaaucaggagguauuu

SEQ ID NO: 492853 - RNA, 19 nt, Artificial Sequence
  Description of Artificial Sequence: Synthetic oligonucleotide
ccaucgacuuguuaccuua

SEQ ID NO: 492854 - RNA, 19 nt, Artificial Sequence
  Description of Artificial Sequence: Synthetic oligonucleotide
cccuuuuggccuaugaaau

SEQ ID NO: 492855 - RNA, 19 nt, Artificial Sequence
  Description of Artificial Sequence: Synthetic oligonucleotide
gccuuucacuccaauuaca

SEQ ID NO: 492856 - RNA, 19 nt, Artificial Sequence
  Description of Artificial Sequence: Synthetic oligonucleotide
ccccaagguauguaaggga

SEQ ID NO: 492857 - RNA, 19 nt, Artificial Sequence
  Description of Artificial Sequence: Synthetic oligonucleotide
caaaucgucgaaggacagu

SEQ ID NO: 492858 - RNA, 19 nt, Artificial Sequence
  Description of Artificial Sequence: Synthetic oligonucleotide
ggugagauacuauguucuu

SEQ ID NO: 492859 - RNA, 19 nt, Artificial Sequence
  Description of Artificial Sequence: Synthetic oligonucleotide
gguagguuauccagccucu

SEQ ID NO: 492860 - RNA, 19 nt, Artificial Sequence
  Description of Artificial Sequence: Synthetic oligonucleotide
gugugggaaaccauaucuu

SEQ ID NO: 492861 - RNA, 19 nt, Artificial Sequence
  Description of Artificial Sequence: Synthetic oligonucleotide
ccuaugaaauuuagccacu

SEQ ID NO: 492862 - RNA, 19 nt, Artificial Sequence
  Description of Artificial Sequence: Synthetic oligonucleotide
cacuuaaguuuggcuacua

SEQ ID NO: 492863 - RNA, 19 nt, Artificial Sequence
  Description of Artificial Sequence: Synthetic oligonucleotide
gugcagcaacaaguauuuc

SEQ ID NO: 492864 - RNA, 19 nt, Artificial Sequence
  Description of Artificial Sequence: Synthetic oligonucleotide
guaguacaaucaggaggua

SEQ ID NO: 492865 - RNA, 19 nt, Artificial Sequence
  Description of Artificial Sequence: Synthetic oligonucleotide
ccucuuucguuuugugcaa

SEQ ID NO: 492866 - RNA, 19 nt, Artificial Sequence
  Description of Artificial Sequence: Synthetic oligonucleotide
gugucacaugcggauacau

SEQ ID NO: 492867 - RNA, 19 nt, Artificial Sequence
  Description of Artificial Sequence: Synthetic oligonucleotide
augcggauacauggccauu

SEQ ID NO: 492868 - RNA, 19 nt, Artificial Sequence
  Description of Artificial Sequence: Synthetic oligonucleotide
ccaggcaacgcugcacauc

SEQ ID NO: 492869 - RNA, 19 nt, Artificial Sequence
  Description of Artificial Sequence: Synthetic oligonucleotide
cugcacaucuaaguagguu

SEQ ID NO: 492870 - RNA, 19 nt, Artificial Sequence
  Description of Artificial Sequence: Synthetic oligonucleotide
ccuuaucaauagaauguuu

SEQ ID NO: 492871 - RNA, 19 nt, Artificial Sequence
  Description of Artificial Sequence: Synthetic oligonucleotide
gcguccacugggaaaggaa

SEQ ID NO: 492872 - RNA, 19 nt, Artificial Sequence
  Description of Artificial Sequence: Synthetic oligonucleotide
cgugcagcaacaaguauuu

SEQ ID NO: 492873 - RNA, 19 nt, Artificial Sequence
  Description of Artificial Sequence: Synthetic oligonucleotide
gcuagccuacugugacaga

SEQ ID NO: 492874 - RNA, 19 nt, Artificial Sequence
  Description of Artificial Sequence: Synthetic oligonucleotide
gcaccaaaacuugcucgaa

SEQ ID NO: 492875 - RNA, 19 nt, Artificial Sequence
  Description of Artificial Sequence: Synthetic oligonucleotide
gcgacaaagcacagucucu

SEQ ID NO: 492876 - RNA, 19 nt, Artificial Sequence
  Description of Artificial Sequence: Synthetic oligonucleotide
cucgggcgucagauccaga

SEQ ID NO: 492877 - RNA, 19 nt, Artificial Sequence
  Description of Artificial Sequence: Synthetic oligonucleotide
cgggcgucagauccagauc

SEQ ID NO: 492878 - RNA, 19 nt, Artificial Sequence
  Description of Artificial Sequence: Synthetic oligonucleotide
ccagaacguggagcucuug

SEQ ID NO: 492879 - RNA, 19 nt, Artificial Sequence
  Description of Artificial Sequence: Synthetic oligonucleotide
ccacuuaaguuuggcuacu

SEQ ID NO: 492880 - RNA, 19 nt, Artificial Sequence
  Description of Artificial Sequence: Synthetic oligonucleotide
aauaugacagcauagaccc

SEQ ID NO: 492881 - RNA, 19 nt, Artificial Sequence
  Description of Artificial Sequence: Synthetic oligonucleotide
agagucuuggcauagauac

SEQ ID NO: 492882 - RNA, 19 nt, Artificial Sequence
  Description of Artificial Sequence: Synthetic oligonucleotide
uccucaauaacagagaacg

SEQ ID NO: 492883 - RNA, 19 nt, Artificial Sequence
  Description of Artificial Sequence: Synthetic oligonucleotide
ucuauauaugaccaugugg

SEQ ID NO: 492884 - RNA, 19 nt, Artificial Sequence
  Description of Artificial Sequence: Synthetic oligonucleotide
aagaaaggagcguucauac

SEQ ID NO: 492885 - RNA, 19 nt, Artificial Sequence
  Description of Artificial Sequence: Synthetic oligonucleotide
uuuaauuuguacucugggg

SEQ ID NO: 492886 - RNA, 19 nt, Artificial Sequence
  Description of Artificial Sequence: Synthetic oligonucleotide
auuacaaacauucggagca

SEQ ID NO: 492887 - RNA, 19 nt, Artificial Sequence
  Description of Artificial Sequence: Synthetic oligonucleotide
aagagcgucgcuuagaacu

SEQ ID NO: 492888 - RNA, 19 nt, Artificial Sequence
  Description of Artificial Sequence: Synthetic oligonucleotide
uauuuaagguccucaaugg

SEQ ID NO: 492889 - RNA, 19 nt, Artificial Sequence
  Description of Artificial Sequence: Synthetic oligonucleotide
ucaauaacagagaacgugc

SEQ ID NO: 492890 - RNA, 19 nt, Artificial Sequence
  Description of Artificial Sequence: Synthetic oligonucleotide
gacaaaucuauauaugacc

SEQ ID NO: 492891 - RNA, 19 nt, Artificial Sequence
  Description of Artificial Sequence: Synthetic oligonucleotide
uaaugaugucugaagagcg

SEQ ID NO: 492892 - RNA, 19 nt, Artificial Sequence
  Description of Artificial Sequence: Synthetic oligonucleotide
aucuaguacacguaaugcc

SEQ ID NO: 492893 - RNA, 19 nt, Artificial Sequence
  Description of Artificial Sequence: Synthetic oligonucleotide
aauauagagagugaugaug

SEQ ID NO: 492894 - RNA, 19 nt, Artificial Sequence
  Description of Artificial Sequence: Synthetic oligonucleotide
uguccuaagguaucgacgg

SEQ ID NO: 492895 - RNA, 19 nt, Artificial Sequence
  Description of Artificial Sequence: Synthetic oligonucleotide
aaauaggcccuacagagcu

SEQ ID NO: 492896 - RNA, 19 nt, Artificial Sequence
  Description of Artificial Sequence: Synthetic oligonucleotide
uauaugaccaugugggucc

SEQ ID NO: 492897 - RNA, 19 nt, Artificial Sequence
  Description of Artificial Sequence: Synthetic oligonucleotide
gaugaugucacauguguug

SEQ ID NO: 492898 - RNA, 19 nt, Artificial Sequence
  Description of Artificial Sequence: Synthetic oligonucleotide
guauuuaagguccucaaug

SEQ ID NO: 492899 - RNA, 19 nt, Artificial Sequence
  Description of Artificial Sequence: Synthetic oligonucleotide
ucuacauccauugucacca

SEQ ID NO: 492900 - RNA, 19 nt, Artificial Sequence
  Description of Artificial Sequence: Synthetic oligonucleotide
aaauucacuggacaauaug

SEQ ID NO: 492901 - RNA, 19 nt, Artificial Sequence
  Description of Artificial Sequence: Synthetic oligonucleotide
aagguaucgacggaugggc

SEQ ID NO: 492902 - RNA, 19 nt, Artificial Sequence
  Description of Artificial Sequence: Synthetic oligonucleotide
ucuaguacacguaaugccu

SEQ ID NO: 492903 - RNA, 19 nt, Artificial Sequence
  Description of Artificial Sequence: Synthetic oligonucleotide
aaccaaucuacuuuaauuu

SEQ ID NO: 492904 - RNA, 19 nt, Artificial Sequence
  Description of Artificial Sequence: Synthetic oligonucleotide
aacucacgaagaaaggagc

SEQ ID NO: 492905 - RNA, 19 nt, Artificial Sequence
  Description of Artificial Sequence: Synthetic oligonucleotide
uuaagguccucaauggcug

SEQ ID NO: 492906 - RNA, 19 nt, Artificial Sequence
  Description of Artificial Sequence: Synthetic oligonucleotide
aggacaaaucuauauauga

SEQ ID NO: 492907 - RNA, 19 nt, Artificial Sequence
  Description of Artificial Sequence: Synthetic oligonucleotide
auuggguagccccauuacc

SEQ ID NO: 492908 - RNA, 19 nt, Artificial Sequence
  Description of Artificial Sequence: Synthetic oligonucleotide
cuuggcauagauacgguag

SEQ ID NO: 492909 - RNA, 19 nt, Artificial Sequence
  Description of Artificial Sequence: Synthetic oligonucleotide
acagagcuaaguuagggug

SEQ ID NO: 492910 - RNA, 19 nt, Artificial Sequence
  Description of Artificial Sequence: Synthetic oligonucleotide
uuacgaaucucccucucag

SEQ ID NO: 492911 - RNA, 19 nt, Artificial Sequence
  Description of Artificial Sequence: Synthetic oligonucleotide
uagcucacccucuaguucg

SEQ ID NO: 492912 - RNA, 19 nt, Artificial Sequence
  Description of Artificial Sequence: Synthetic oligonucleotide
uguauguccagaagagcag

SEQ ID NO: 492913 - RNA, 19 nt, Artificial Sequence
  Description of Artificial Sequence: Synthetic oligonucleotide
ugcaggaccagucauuaca

SEQ ID NO: 492914 - RNA, 19 nt, Artificial Sequence
  Description of Artificial Sequence: Synthetic oligonucleotide
gucgguaguaccuucggcg

SEQ ID NO: 492915 - RNA, 19 nt, Artificial Sequence
  Description of Artificial Sequence: Synthetic oligonucleotide
cauuacaaacauucggagc

SEQ ID NO: 492916 - RNA, 19 nt, Artificial Sequence
  Description of Artificial Sequence: Synthetic oligonucleotide
agaguagacgagcugcugg

SEQ ID NO: 492917 - RNA, 19 nt, Artificial Sequence
  Description of Artificial Sequence: Synthetic oligonucleotide
ucgggaaucugccaugucc

SEQ ID NO: 492918 - RNA, 19 nt, Artificial Sequence
  Description of Artificial Sequence: Synthetic oligonucleotide
acgaaucucccucucaggg

SEQ ID NO: 492919 - RNA, 19 nt, Artificial Sequence
  Description of Artificial Sequence: Synthetic oligonucleotide
agaggacaaaucuauauau

SEQ ID NO: 492920 - RNA, 19 nt, Artificial Sequence
  Description of Artificial Sequence: Synthetic oligonucleotide
uacgguagaagaaucucug

SEQ ID NO: 492921 - RNA, 19 nt, Artificial Sequence
  Description of Artificial Sequence: Synthetic oligonucleotide
guacucauugauaaagagg

SEQ ID NO: 492922 - RNA, 19 nt, Artificial Sequence
  Description of Artificial Sequence: Synthetic oligonucleotide
gaguaagccugguugauug

SEQ ID NO: 492923 - RNA, 19 nt, Artificial Sequence
  Description of Artificial Sequence: Synthetic oligonucleotide
auauaugaccauguggguc

SEQ ID NO: 492924 - RNA, 19 nt, Artificial Sequence
  Description of Artificial Sequence: Synthetic oligonucleotide
aagaaucucuguacguggc

SEQ ID NO: 492925 - RNA, 19 nt, Artificial Sequence
  Description of Artificial Sequence: Synthetic oligonucleotide
aguuaggguggccauagag

SEQ ID NO: 492926 - RNA, 19 nt, Artificial Sequence
  Description of Artificial Sequence: Synthetic oligonucleotide
gacggaugggcucacaagc

SEQ ID NO: 492927 - RNA, 19 nt, Artificial Sequence
  Description of Artificial Sequence: Synthetic oligonucleotide
gaggagucgagucucuagg

SEQ ID NO: 492928 - RNA, 19 nt, Artificial Sequence
  Description of Artificial Sequence: Synthetic oligonucleotide
aaaccgcagcuucaacagc

SEQ ID NO: 492929 - RNA, 19 nt, Artificial Sequence
  Description of Artificial Sequence: Synthetic oligonucleotide
gaacucacgaagaaaggag

SEQ ID NO: 492930 - RNA, 19 nt, Artificial Sequence
  Description of Artificial Sequence: Synthetic oligonucleotide
aaggaucuaguacacguaa

SEQ ID NO: 492931 - RNA, 19 nt, Artificial Sequence
  Description of Artificial Sequence: Synthetic oligonucleotide
gaucuaguacacguaaugc

SEQ ID NO: 492932 - RNA, 19 nt, Artificial Sequence
  Description of Artificial Sequence: Synthetic oligonucleotide
uucacuggacaauaugaca

SEQ ID NO: 492933 - RNA, 19 nt, Artificial Sequence
  Description of Artificial Sequence: Synthetic oligonucleotide
auaacagagaacgugccug

SEQ ID NO: 492934 - RNA, 19 nt, Artificial Sequence
  Description of Artificial Sequence: Synthetic oligonucleotide
acaaaucuauauaugacca

SEQ ID NO: 492935 - RNA, 19 nt, Artificial Sequence
  Description of Artificial Sequence: Synthetic oligonucleotide
uuggguagccccauuaccu

SEQ ID NO: 492936 - RNA, 19 nt, Artificial Sequence
  Description of Artificial Sequence: Synthetic oligonucleotide
uccacuuauggaacucacg

SEQ ID NO: 492937 - RNA, 19 nt, Artificial Sequence
  Description of Artificial Sequence: Synthetic oligonucleotide
uggacaauaugacagcaua

SEQ ID NO: 492938 - RNA, 19 nt, Artificial Sequence
  Description of Artificial Sequence: Synthetic oligonucleotide
aaauauagagagugaugau

SEQ ID NO: 492939 - RNA, 19 nt, Artificial Sequence
  Description of Artificial Sequence: Synthetic oligonucleotide
auauagagagugaugaugu

SEQ ID NO: 492940 - RNA, 19 nt, Artificial Sequence
  Description of Artificial Sequence: Synthetic oligonucleotide
accaaucuacuuuaauuug

SEQ ID NO: 492941 - RNA, 19 nt, Artificial Sequence
  Description of Artificial Sequence: Synthetic oligonucleotide
uaagguaucgacggauggg

SEQ ID NO: 492942 - RNA, 19 nt, Artificial Sequence
  Description of Artificial Sequence: Synthetic oligonucleotide
cagggucagucuuagauag

SEQ ID NO: 492943 - RNA, 19 nt, Artificial Sequence
  Description of Artificial Sequence: Synthetic oligonucleotide
caaaccgcagcuucaacag

SEQ ID NO: 492944 - RNA, 19 nt, Artificial Sequence
  Description of Artificial Sequence: Synthetic oligonucleotide
aaucuauauaugaccaugu

SEQ ID NO: 492945 - RNA, 19 nt, Artificial Sequence
  Description of Artificial Sequence: Synthetic oligonucleotide
ucuaugcaggaccuggcug

SEQ ID NO: 492946 - RNA, 19 nt, Artificial Sequence
  Description of Artificial Sequence: Synthetic oligonucleotide
uucuagguuggucaacaug

SEQ ID NO: 492947 - RNA, 19 nt, Artificial Sequence
  Description of Artificial Sequence: Synthetic oligonucleotide
guuaggguggccauagagg

SEQ ID NO: 492948 - RNA, 19 nt, Artificial Sequence
  Description of Artificial Sequence: Synthetic oligonucleotide
cacauuacgaaucucccuc

SEQ ID NO: 492949 - RNA, 19 nt, Artificial Sequence
  Description of Artificial Sequence: Synthetic oligonucleotide
ugguugauuggguagcccc

SEQ ID NO: 492950 - RNA, 19 nt, Artificial Sequence
  Description of Artificial Sequence: Synthetic oligonucleotide
uaaguuaggguggccauag

SEQ ID NO: 492951 - RNA, 19 nt, Artificial Sequence
  Description of Artificial Sequence: Synthetic oligonucleotide
gucuuagauagcucaacag

SEQ ID NO: 492952 - RNA, 19 nt, Artificial Sequence
  Description of Artificial Sequence: Synthetic oligonucleotide
ugaugcgucgggaaucugc

SEQ ID NO: 492953 - RNA, 19 nt, Artificial Sequence
  Description of Artificial Sequence: Synthetic oligonucleotide
ucuaguucggggucugugc

SEQ ID NO: 492954 - RNA, 19 nt, Artificial Sequence
  Description of Artificial Sequence: Synthetic oligonucleotide
cuaagguaucgacggaugg

SEQ ID NO: 492955 - RNA, 19 nt, Artificial Sequence
  Description of Artificial Sequence: Synthetic oligonucleotide
gaggccaaaauucacugga

SEQ ID NO: 492956 - RNA, 19 nt, Artificial Sequence
  Description of Artificial Sequence: Synthetic oligonucleotide
gagucgagucucuagggcc

SEQ ID NO: 492957 - RNA, 19 nt, Artificial Sequence
  Description of Artificial Sequence: Synthetic oligonucleotide
cagagaacgugccuggagg

SEQ ID NO: 492958 - RNA, 19 nt, Artificial Sequence
  Description of Artificial Sequence: Synthetic oligonucleotide
augcgcuccagagaaaggc

SEQ ID NO: 492959 - RNA, 19 nt, Artificial Sequence
  Description of Artificial Sequence: Synthetic oligonucleotide
agucuuagauagcucaaca

SEQ ID NO: 492960 - RNA, 19 nt, Artificial Sequence
  Description of Artificial Sequence: Synthetic oligonucleotide
guagacgagcugcuggucg

SEQ ID NO: 492961 - RNA, 19 nt, Artificial Sequence
  Description of Artificial Sequence: Synthetic oligonucleotide
uuggcauagauacgguaga

SEQ ID NO: 492962 - RNA, 19 nt, Artificial Sequence
  Description of Artificial Sequence: Synthetic oligonucleotide
uauauaugaccaugugggu

SEQ ID NO: 492963 - RNA, 19 nt, Artificial Sequence
  Description of Artificial Sequence: Synthetic oligonucleotide
ugcuguuugucacugccac

SEQ ID NO: 492964 - RNA, 19 nt, Artificial Sequence
  Description of Artificial Sequence: Synthetic oligonucleotide
gaugaaccaaucuacuuua

SEQ ID NO: 492965 - RNA, 19 nt, Artificial Sequence
  Description of Artificial Sequence: Synthetic oligonucleotide
ugaagagcgucgcuuagaa

SEQ ID NO: 492966 - RNA, 19 nt, Artificial Sequence
  Description of Artificial Sequence: Synthetic oligonucleotide
aucuauauaugaccaugug

SEQ ID NO: 492967 - RNA, 19 nt, Artificial Sequence
  Description of Artificial Sequence: Synthetic oligonucleotide
gguacucauugauaaagag

SEQ ID NO: 492968 - RNA, 19 nt, Artificial Sequence
  Description of Artificial Sequence: Synthetic oligonucleotide
auguauguccagaagagca

SEQ ID NO: 492969 - RNA, 19 nt, Artificial Sequence
  Description of Artificial Sequence: Synthetic oligonucleotide
agcguucauacucuccccg

SEQ ID NO: 492970 - RNA, 19 nt, Artificial Sequence
  Description of Artificial Sequence: Synthetic oligonucleotide
auagauacgguagaagaau

SEQ ID NO: 492971 - RNA, 19 nt, Artificial Sequence
  Description of Artificial Sequence: Synthetic oligonucleotide
auagacucucaggaaacgg

SEQ ID NO: 492972 - RNA, 19 nt, Artificial Sequence
  Description of Artificial Sequence: Synthetic oligonucleotide
auagaaggaucuaguacac

SEQ ID NO: 492973 - RNA, 19 nt, Artificial Sequence
  Description of Artificial Sequence: Synthetic oligonucleotide
uagguuggucaacauggcc

SEQ ID NO: 492974 - RNA, 19 nt, Artificial Sequence
  Description of Artificial Sequence: Synthetic oligonucleotide
uguacucugggguguuagg

SEQ ID NO: 492975 - RNA, 19 nt, Artificial Sequence
  Description of Artificial Sequence: Synthetic oligonucleotide
uagauacgguagaagaauc

SEQ ID NO: 492976 - RNA, 19 nt, Artificial Sequence
  Description of Artificial Sequence: Synthetic oligonucleotide
ugggguguuaggcagggaa

SEQ ID NO: 492977 - RNA, 19 nt, Artificial Sequence
  Description of Artificial Sequence: Synthetic oligonucleotide
caccuugagggacacaagc

SEQ ID NO: 492978 - RNA, 19 nt, Artificial Sequence
  Description of Artificial Sequence: Synthetic oligonucleotide
aggcuuucuagguugguca

SEQ ID NO: 492979 - RNA, 19 nt, Artificial Sequence
  Description of Artificial Sequence: Synthetic oligonucleotide
ugucacauguguugacacc

SEQ ID NO: 492980 - RNA, 19 nt, Artificial Sequence
  Description of Artificial Sequence: Synthetic oligonucleotide
ccugcuacugggaaaauag

SEQ ID NO: 492981 - RNA, 19 nt, Artificial Sequence
  Description of Artificial Sequence: Synthetic oligonucleotide
auaccggcugucuagcuca

SEQ ID NO: 492982 - RNA, 19 nt, Artificial Sequence
  Description of Artificial Sequence: Synthetic oligonucleotide
aggagucgagucucuaggg

SEQ ID NO: 492983 - RNA, 19 nt, Artificial Sequence
  Description of Artificial Sequence: Synthetic oligonucleotide
gauacgguagaagaaucuc

SEQ ID NO: 492984 - RNA, 19 nt, Artificial Sequence
  Description of Artificial Sequence: Synthetic oligonucleotide
cucuacauccauugucacc

SEQ ID NO: 492985 - RNA, 19 nt, Artificial Sequence
  Description of Artificial Sequence: Synthetic oligonucleotide
gauauuggcauugaugcgu

SEQ ID NO: 492986 - RNA, 19 nt, Artificial Sequence
  Description of Artificial Sequence: Synthetic oligonucleotide
gaggacaaaucuauauaug

SEQ ID NO: 492987 - RNA, 19 nt, Artificial Sequence
  Description of Artificial Sequence: Synthetic oligonucleotide
auucggagcaugcuguaga

SEQ ID NO: 492988 - RNA, 19 nt, Artificial Sequence
  Description of Artificial Sequence: Synthetic oligonucleotide
ggaucuaguacacguaaug

SEQ ID NO: 492989 - RNA, 19 nt, Artificial Sequence
  Description of Artificial Sequence: Synthetic oligonucleotide
auuacgaaucucccucuca

SEQ ID NO: 492990 - RNA, 19 nt, Artificial Sequence
  Description of Artificial Sequence: Synthetic oligonucleotide
accuucggcgggcauaccg

SEQ ID NO: 492991 - RNA, 19 nt, Artificial Sequence
  Description of Artificial Sequence: Synthetic oligonucleotide
cacguaaugccuugauggc

SEQ ID NO: 492992 - RNA, 19 nt, Artificial Sequence
  Description of Artificial Sequence: Synthetic oligonucleotide
gcauagauacgguagaaga

SEQ ID NO: 492993 - RNA, 19 nt, Artificial Sequence
  Description of Artificial Sequence: Synthetic oligonucleotide
aaaggagcguucauacucu

SEQ ID NO: 492994 - RNA, 19 nt, Artificial Sequence
  Description of Artificial Sequence: Synthetic oligonucleotide
gauuggguagccccauuac

SEQ ID NO: 492995 - RNA, 19 nt, Artificial Sequence
  Description of Artificial Sequence: Synthetic oligonucleotide
cucuguacguggcagcgcc

SEQ ID NO: 492996 - RNA, 19 nt, Artificial Sequence
  Description of Artificial Sequence: Synthetic oligonucleotide
cuaguucggggucugugcc

SEQ ID NO: 492997 - RNA, 19 nt, Artificial Sequence
  Description of Artificial Sequence: Synthetic oligonucleotide
auagcucaacagccaaguc

SEQ ID NO: 492998 - RNA, 19 nt, Artificial Sequence
  Description of Artificial Sequence: Synthetic oligonucleotide
acuugacuucccuggauca

SEQ ID NO: 492999 - RNA, 19 nt, Artificial Sequence
  Description of Artificial Sequence: Synthetic oligonucleotide
accucuaggaugaccauag

SEQ ID NO: 493000 - RNA, 19 nt, Artificial Sequence
  Description of Artificial Sequence: Synthetic oligonucleotide
guagcccugaaguuccugc

SEQ ID NO: 493001 - RNA, 19 nt, Artificial Sequence
  Description of Artificial Sequence: Synthetic oligonucleotide
gugguuacggccucagcgc

SEQ ID NO: 493002 - RNA, 19 nt, Artificial Sequence
  Description of Artificial Sequence: Synthetic oligonucleotide
gaugcgucgggaaucugcc

SEQ ID NO: 493003 - RNA, 19 nt, Artificial Sequence
  Description of Artificial Sequence: Synthetic oligonucleotide
aguucggggucugugcccc

SEQ ID NO: 493004 - RNA, 19 nt, Artificial Sequence
  Description of Artificial Sequence: Synthetic oligonucleotide
guguccuaagguaucgacg

SEQ ID NO: 493005 - RNA, 19 nt, Artificial Sequence
  Description of Artificial Sequence: Synthetic oligonucleotide
cauagauacgguagaagaa

SEQ ID NO: 493006 - RNA, 19 nt, Artificial Sequence
  Description of Artificial Sequence: Synthetic oligonucleotide
ugauuggguagccccauua

SEQ ID NO: 493007 - RNA, 19 nt, Artificial Sequence
  Description of Artificial Sequence: Synthetic oligonucleotide
cacauguguugacaccugg

SEQ ID NO: 493008 - RNA, 19 nt, Artificial Sequence
  Description of Artificial Sequence: Synthetic oligonucleotide
ggagaacuuggccugguag

SEQ ID NO: 493009 - RNA, 19 nt, Artificial Sequence
  Description of Artificial Sequence: Synthetic oligonucleotide
ucgcuuagaacuugacuuc

SEQ ID NO: 493010 - RNA, 19 nt, Artificial Sequence
  Description of Artificial Sequence: Synthetic oligonucleotide
uugccaagccaaccaacca

SEQ ID NO: 493011 - RNA, 19 nt, Artificial Sequence
  Description of Artificial Sequence: Synthetic oligonucleotide
gaucuguccucuccaagca

SEQ ID NO: 493012 - RNA, 19 nt, Artificial Sequence
  Description of Artificial Sequence: Synthetic oligonucleotide
caggaaacggccauagaga

SEQ ID NO: 493013 - RNA, 19 nt, Artificial Sequence
  Description of Artificial Sequence: Synthetic oligonucleotide
aggcaugaaugcuaugggu

SEQ ID NO: 493014 - RNA, 19 nt, Artificial Sequence
  Description of Artificial Sequence: Synthetic oligonucleotide
uccuccgcagcaaugccac

SEQ ID NO: 493015 - RNA, 19 nt, Artificial Sequence
  Description of Artificial Sequence: Synthetic oligonucleotide
uguguucccugcuucugga

SEQ ID NO: 493016 - RNA, 19 nt, Artificial Sequence
  Description of Artificial Sequence: Synthetic oligonucleotide
ggauauuggcauugaugcg

SEQ ID NO: 493017 - RNA, 19 nt, Artificial Sequence
  Description of Artificial Sequence: Synthetic oligonucleotide
gcaguaaacauccagggcu

SEQ ID NO: 493018 - RNA, 19 nt, Artificial Sequence
  Description of Artificial Sequence: Synthetic oligonucleotide
aaaauucacuggacaauau

SEQ ID NO: 493019 - RNA, 19 nt, Artificial Sequence
  Description of Artificial Sequence: Synthetic oligonucleotide
ucgggcaccagcacugcug

SEQ ID NO: 493020 - RNA, 19 nt, Artificial Sequence
  Description of Artificial Sequence: Synthetic oligonucleotide
auccgaguccccugucagc

SEQ ID NO: 493021 - RNA, 19 nt, Artificial Sequence
  Description of Artificial Sequence: Synthetic oligonucleotide
auauuggcauugaugcguc

SEQ ID NO: 493022 - RNA, 19 nt, Artificial Sequence
  Description of Artificial Sequence: Synthetic oligonucleotide
acauuacgaaucucccucu

SEQ ID NO: 493023 - RNA, 19 nt, Artificial Sequence
  Description of Artificial Sequence: Synthetic oligonucleotide
cagcagacugagucuaugc

SEQ ID NO: 493024 - RNA, 19 nt, Artificial Sequence
  Description of Artificial Sequence: Synthetic oligonucleotide
agaaaggagcguucauacu

SEQ ID NO: 493025 - RNA, 19 nt, Artificial Sequence
  Description of Artificial Sequence: Synthetic oligonucleotide
uauagagagugaugauguc

SEQ ID NO: 493026 - RNA, 19 nt, Artificial Sequence
  Description of Artificial Sequence: Synthetic oligonucleotide
agaacgugccuggaggcuc

SEQ ID NO: 493027 - RNA, 19 nt, Artificial Sequence
  Description of Artificial Sequence: Synthetic oligonucleotide
agagacgcuggaccauuuc

SEQ ID NO: 493028 - RNA, 19 nt, Artificial Sequence
  Description of Artificial Sequence: Synthetic oligonucleotide
cauggggucagaagguauc

SEQ ID NO: 493029 - RNA, 19 nt, Artificial Sequence
  Description of Artificial Sequence: Synthetic oligonucleotide
gaugcugaccagcaggcua

SEQ ID NO: 493030 - RNA, 19 nt, Artificial Sequence
  Description of Artificial Sequence: Synthetic oligonucleotide
agucuaugcaggaccuggc

SEQ ID NO: 493031 - RNA, 19 nt, Artificial Sequence
  Description of Artificial Sequence: Synthetic oligonucleotide
guacguggcagcgccaacg

SEQ ID NO: 493032 - RNA, 19 nt, Artificial Sequence
  Description of Artificial Sequence: Synthetic oligonucleotide
acggaugggcucacaagcc

SEQ ID NO: 493033 - RNA, 19 nt, Artificial Sequence
  Description of Artificial Sequence: Synthetic oligonucleotide
aggucaaucucagccagug

SEQ ID NO: 493034 - RNA, 19 nt, Artificial Sequence
  Description of Artificial Sequence: Synthetic oligonucleotide
guaguguuguccugaagaa

SEQ ID NO: 493035 - RNA, 19 nt, Artificial Sequence
  Description of Artificial Sequence: Synthetic oligonucleotide
auacgguagaagaaucucu

SEQ ID NO: 493036 - RNA, 19 nt, Artificial Sequence
  Description of Artificial Sequence: Synthetic oligonucleotide
cuagcucacccucuaguuc

SEQ ID NO: 493037 - RNA, 19 nt, Artificial Sequence
  Description of Artificial Sequence: Synthetic oligonucleotide
guagacaccugcagaguag

SEQ ID NO: 493038 - RNA, 19 nt, Artificial Sequence
  Description of Artificial Sequence: Synthetic oligonucleotide
guguuaggcagggaauggg

SEQ ID NO: 493039 - RNA, 19 nt, Artificial Sequence
  Description of Artificial Sequence: Synthetic oligonucleotide
gagucuuggcauagauacg

SEQ ID NO: 493040 - RNA, 19 nt, Artificial Sequence
  Description of Artificial Sequence: Synthetic oligonucleotide
guauccuagcugucuuucc

SEQ ID NO: 493041 - RNA, 19 nt, Artificial Sequence
  Description of Artificial Sequence: Synthetic oligonucleotide
caauggcuggccgagaguc

SEQ ID NO: 493042 - RNA, 19 nt, Artificial Sequence
  Description of Artificial Sequence: Synthetic oligonucleotide
guacucugggguguuaggc

SEQ ID NO: 493043 - RNA, 19 nt, Artificial Sequence
  Description of Artificial Sequence: Synthetic oligonucleotide
gauagcucaacagccaagu

SEQ ID NO: 493044 - RNA, 19 nt, Artificial Sequence
  Description of Artificial Sequence: Synthetic oligonucleotide
ucucguguccuaagguauc

SEQ ID NO: 493045 - RNA, 19 nt, Artificial Sequence
  Description of Artificial Sequence: Synthetic oligonucleotide
caaucucagccagugcagg

SEQ ID NO: 493046 - RNA, 19 nt, Artificial Sequence
  Description of Artificial Sequence: Synthetic oligonucleotide
gaugcgcuccagagaaagg

SEQ ID NO: 493047 - RNA, 19 nt, Artificial Sequence
  Description of Artificial Sequence: Synthetic oligonucleotide
ugguuacggccucagcgcu

SEQ ID NO: 493048 - RNA, 19 nt, Artificial Sequence
  Description of Artificial Sequence: Synthetic oligonucleotide
acgguagaagaaucucugu

SEQ ID NO: 493049 - RNA, 19 nt, Artificial Sequence
  Description of Artificial Sequence: Synthetic oligonucleotide
uccuaagguaucgacggau

SEQ ID NO: 493050 - RNA, 19 nt, Artificial Sequence
  Description of Artificial Sequence: Synthetic oligonucleotide
agccccauuaccugcuacu

SEQ ID NO: 493051 - RNA, 19 nt, Artificial Sequence
  Description of Artificial Sequence: Synthetic oligonucleotide
gcgguagacaccugcagag

SEQ ID NO: 493052 - RNA, 19 nt, Artificial Sequence
  Description of Artificial Sequence: Synthetic oligonucleotide
cagcgagcgguacucauug

SEQ ID NO: 493053 - RNA, 19 nt, Artificial Sequence
  Description of Artificial Sequence: Synthetic oligonucleotide
cucguguccuaagguaucg

SEQ ID NO: 493054 - RNA, 19 nt, Artificial Sequence
  Description of Artificial Sequence: Synthetic oligonucleotide
gagcguucauacucucccc

SEQ ID NO: 493055 - RNA, 19 nt, Artificial Sequence
  Description of Artificial Sequence: Synthetic oligonucleotide
agcauagaccccaaauggu

SEQ ID NO: 493056 - RNA, 19 nt, Artificial Sequence
  Description of Artificial Sequence: Synthetic oligonucleotide
agcaguauuuaagguccuc

SEQ ID NO: 493057 - RNA, 19 nt, Artificial Sequence
  Description of Artificial Sequence: Synthetic oligonucleotide
cugucgggcaccagcacug

SEQ ID NO: 493058 - RNA, 19 nt, Artificial Sequence
  Description of Artificial Sequence: Synthetic oligonucleotide
uuggcagggucagucuuag

SEQ ID NO: 493059 - RNA, 19 nt, Artificial Sequence
  Description of Artificial Sequence: Synthetic oligonucleotide
ggcuucaccaaaccgcagc

SEQ ID NO: 493060 - RNA, 19 nt, Artificial Sequence
  Description of Artificial Sequence: Synthetic oligonucleotide
cauaccggcugucuagcuc

SEQ ID NO: 493061 - RNA, 19 nt, Artificial Sequence
  Description of Artificial Sequence: Synthetic oligonucleotide
cagggugugcuuccaacug

SEQ ID NO: 493062 - RNA, 19 nt, Artificial Sequence
  Description of Artificial Sequence: Synthetic oligonucleotide
aggccaaaauucacuggac

SEQ ID NO: 493063 - RNA, 19 nt, Artificial Sequence
  Description of Artificial Sequence: Synthetic oligonucleotide
auaugacagcauagacccc

SEQ ID NO: 493064 - RNA, 19 nt, Artificial Sequence
  Description of Artificial Sequence: Synthetic oligonucleotide
uaguucggggucugugccc

SEQ ID NO: 493065 - RNA, 19 nt, Artificial Sequence
  Description of Artificial Sequence: Synthetic oligonucleotide
uucggagcaugcuguagau

SEQ ID NO: 493066 - RNA, 19 nt, Artificial Sequence
  Description of Artificial Sequence: Synthetic oligonucleotide
ucgcggaccuucuucugca

SEQ ID NO: 493067 - RNA, 19 nt, Artificial Sequence
  Description of Artificial Sequence: Synthetic oligonucleotide
cuugacuucccuggaucag

SEQ ID NO: 493068 - RNA, 19 nt, Artificial Sequence
  Description of Artificial Sequence: Synthetic oligonucleotide
ggagucgagucucuagggc

SEQ ID NO: 493069 - RNA, 19 nt, Artificial Sequence
  Description of Artificial Sequence: Synthetic oligonucleotide
agauagcucaacagccaag

SEQ ID NO: 493070 - RNA, 19 nt, Artificial Sequence
  Description of Artificial Sequence: Synthetic oligonucleotide
gaagagcgucgcuuagaac

SEQ ID NO: 493071 - RNA, 19 nt, Artificial Sequence
  Description of Artificial Sequence: Synthetic oligonucleotide
cguaaugccuugauggcag

SEQ ID NO: 493072 - RNA, 19 nt, Artificial Sequence
  Description of Artificial Sequence: Synthetic oligonucleotide
gguguuaggcagggaaugg

SEQ ID NO: 493073 - RNA, 19 nt, Artificial Sequence
  Description of Artificial Sequence: Synthetic oligonucleotide
gucgcggaccuucuucugc

SEQ ID NO: 493074 - RNA, 19 nt, Artificial Sequence
  Description of Artificial Sequence: Synthetic oligonucleotide
gagguccuugcugccauag

SEQ ID NO: 493075 - RNA, 19 nt, Artificial Sequence
  Description of Artificial Sequence: Synthetic oligonucleotide
ggcaugaaugcuauggguc

SEQ ID NO: 493076 - RNA, 19 nt, Artificial Sequence
  Description of Artificial Sequence: Synthetic oligonucleotide
ggaccagucauuacaaaca

SEQ ID NO: 493077 - RNA, 19 nt, Artificial Sequence
  Description of Artificial Sequence: Synthetic oligonucleotide
gcauagaccccaaauggug

SEQ ID NO: 493078 - RNA, 19 nt, Artificial Sequence
  Description of Artificial Sequence: Synthetic oligonucleotide
agccacaaucugccgaacu

SEQ ID NO: 493079 - RNA, 19 nt, Artificial Sequence
  Description of Artificial Sequence: Synthetic oligonucleotide
acguaaugccuugauggca

SEQ ID NO: 493080 - RNA, 19 nt, Artificial Sequence
  Description of Artificial Sequence: Synthetic oligonucleotide
gaugaccauagaaggaucu

SEQ ID NO: 493081 - RNA, 19 nt, Artificial Sequence
  Description of Artificial Sequence: Synthetic oligonucleotide
ccacuuauggaacucacga

SEQ ID NO: 493082 - RNA, 19 nt, Artificial Sequence
  Description of Artificial Sequence: Synthetic oligonucleotide
caguauuuaagguccucaa

SEQ ID NO: 493083 - RNA, 19 nt, Artificial Sequence
  Description of Artificial Sequence: Synthetic oligonucleotide
agcggucuuccauccuuuc

SEQ ID NO: 493084 - RNA, 19 nt, Artificial Sequence
  Description of Artificial Sequence: Synthetic oligonucleotide
ggcauagauacgguagaag

SEQ ID NO: 493085 - RNA, 19 nt, Artificial Sequence
  Description of Artificial Sequence: Synthetic oligonucleotide
cagucuuagauagcucaac

SEQ ID NO: 493086 - RNA, 19 nt, Artificial Sequence
  Description of Artificial Sequence: Synthetic oligonucleotide
agcaggcuaaugaugucug

SEQ ID NO: 493087 - RNA, 19 nt, Artificial Sequence
  Description of Artificial Sequence: Synthetic oligonucleotide
caaaaggaugaaccaaucu

SEQ ID NO: 493088 - RNA, 19 nt, Artificial Sequence
  Description of Artificial Sequence: Synthetic oligonucleotide
uuacaaacauucggagcau

SEQ ID NO: 493089 - RNA, 19 nt, Artificial Sequence
  Description of Artificial Sequence: Synthetic oligonucleotide
gugccugucgggcaccagc

SEQ ID NO: 493090 - RNA, 19 nt, Artificial Sequence
  Description of Artificial Sequence: Synthetic oligonucleotide
cuucggcgggcauaccggc

SEQ ID NO: 493091 - RNA, 19 nt, Artificial Sequence
  Description of Artificial Sequence: Synthetic oligonucleotide
caagcagcgagcgguacuc

SEQ ID NO: 493092 - RNA, 19 nt, Artificial Sequence
  Description of Artificial Sequence: Synthetic oligonucleotide
auaggcccuacagagcuaa

SEQ ID NO: 493093 - RNA, 19 nt, Artificial Sequence
  Description of Artificial Sequence: Synthetic oligonucleotide
ggccaaaauucacuggaca

SEQ ID NO: 493094 - RNA, 19 nt, Artificial Sequence
  Description of Artificial Sequence: Synthetic oligonucleotide
aacucuuaggcaggcggua

SEQ ID NO: 493095 - RNA, 19 nt, Artificial Sequence
  Description of Artificial Sequence: Synthetic oligonucleotide
ucuguacguggcagcgcca

SEQ ID NO: 493096 - RNA, 19 nt, Artificial Sequence
  Description of Artificial Sequence: Synthetic oligonucleotide
guaucgacggaugggcuca

SEQ ID NO: 493097 - RNA, 19 nt, Artificial Sequence
  Description of Artificial Sequence: Synthetic oligonucleotide
ucccauccgaguccccugu

SEQ ID NO: 493098 - RNA, 19 nt, Artificial Sequence
  Description of Artificial Sequence: Synthetic oligonucleotide
acauggccuggauguaugu

SEQ ID NO: 493099 - RNA, 19 nt, Artificial Sequence
  Description of Artificial Sequence: Synthetic oligonucleotide
gaguagacgagcugcuggu

SEQ ID NO: 493100 - RNA, 19 nt, Artificial Sequence
  Description of Artificial Sequence: Synthetic oligonucleotide
cuuagaacuugacuucccu

SEQ ID NO: 493101 - RNA, 19 nt, Artificial Sequence
  Description of Artificial Sequence: Synthetic oligonucleotide
ugagucuaugcaggaccug

SEQ ID NO: 493102 - RNA, 19 nt, Artificial Sequence
  Description of Artificial Sequence: Synthetic oligonucleotide
auccuugcacauagagggg

SEQ ID NO: 493103 - RNA, 19 nt, Artificial Sequence
  Description of Artificial Sequence: Synthetic oligonucleotide
cauguguugacaccugggu

SEQ ID NO: 493104 - RNA, 19 nt, Artificial Sequence
  Description of Artificial Sequence: Synthetic oligonucleotide
cacuuauggaacucacgaa

SEQ ID NO: 493105 - RNA, 19 nt, Artificial Sequence
  Description of Artificial Sequence: Synthetic oligonucleotide
gaaggaucuaguacacgua

SEQ ID NO: 493106 - RNA, 19 nt, Artificial Sequence
  Description of Artificial Sequence: Synthetic oligonucleotide
gguaucgacggaugggcuc

SEQ ID NO: 493107 - RNA, 19 nt, Artificial Sequence
  Description of Artificial Sequence: Synthetic oligonucleotide
cuggucgcggaccuucuuc

SEQ ID NO: 493108 - RNA, 19 nt, Artificial Sequence
  Description of Artificial Sequence: Synthetic oligonucleotide
ccuacagagcuaaguuagg

SEQ ID NO: 493109 - RNA, 19 nt, Artificial Sequence
  Description of Artificial Sequence: Synthetic oligonucleotide
caacggcgcaguguguucc

SEQ ID NO: 493110 - RNA, 19 nt, Artificial Sequence
  Description of Artificial Sequence: Synthetic oligonucleotide
uguacguggcagcgccaac

SEQ ID NO: 493111 - RNA, 19 nt, Artificial Sequence
  Description of Artificial Sequence: Synthetic oligonucleotide
cauuaccugcuacugggaa

SEQ ID NO: 493112 - RNA, 19 nt, Artificial Sequence
  Description of Artificial Sequence: Synthetic oligonucleotide
gcguucauacucuccccgg

SEQ ID NO: 493113 - RNA, 19 nt, Artificial Sequence
  Description of Artificial Sequence: Synthetic oligonucleotide
ggaaacggccauagagacg

SEQ ID NO: 493114 - RNA, 19 nt, Artificial Sequence
  Description of Artificial Sequence: Synthetic oligonucleotide
agucgagucucuagggcca

SEQ ID NO: 493115 - RNA, 19 nt, Artificial Sequence
  Description of Artificial Sequence: Synthetic oligonucleotide
cugcaacagacagggugcg

SEQ ID NO: 493116 - RNA, 19 nt, Artificial Sequence
  Description of Artificial Sequence: Synthetic oligonucleotide
aauggcuggccgagagucu

SEQ ID NO: 493117 - RNA, 19 nt, Artificial Sequence
  Description of Artificial Sequence: Synthetic oligonucleotide
uaaugccuugauggcagaa

SEQ ID NO: 493118 - RNA, 19 nt, Artificial Sequence
  Description of Artificial Sequence: Synthetic oligonucleotide
ggucacugcaacagacagg

SEQ ID NO: 493119 - RNA, 19 nt, Artificial Sequence
  Description of Artificial Sequence: Synthetic oligonucleotide
aagcaguauuuaagguccu

SEQ ID NO: 493120 - RNA, 19 nt, Artificial Sequence
  Description of Artificial Sequence: Synthetic oligonucleotide
ucucuguacguggcagcgc

SEQ ID NO: 493121 - RNA, 19 nt, Artificial Sequence
  Description of Artificial Sequence: Synthetic oligonucleotide
aaccaaccacucucucgau

SEQ ID NO: 493122 - RNA, 19 nt, Artificial Sequence
  Description of Artificial Sequence: Synthetic oligonucleotide
guaccuucggcgggcauac

SEQ ID NO: 493123 - RNA, 19 nt, Artificial Sequence
  Description of Artificial Sequence: Synthetic oligonucleotide
gguaguaccuucggcgggc

SEQ ID NO: 493124 - RNA, 19 nt, Artificial Sequence
  Description of Artificial Sequence: Synthetic oligonucleotide
cucccguagcacacccugc

SEQ ID NO: 493125 - RNA, 19 nt, Artificial Sequence
  Description of Artificial Sequence: Synthetic oligonucleotide
ucggagcaugcuguagaug

SEQ ID NO: 493126 - RNA, 19 nt, Artificial Sequence
  Description of Artificial Sequence: Synthetic oligonucleotide
uggaguaagccugguugau

SEQ ID NO: 493127 - RNA, 19 nt, Artificial Sequence
  Description of Artificial Sequence: Synthetic oligonucleotide
uucggcgggcauaccggcu

SEQ ID NO: 493128 - RNA, 19 nt, Artificial Sequence
  Description of Artificial Sequence: Synthetic oligonucleotide
ccuccucacggauauuggc

SEQ ID NO: 493129 - RNA, 19 nt, Artificial Sequence
  Description of Artificial Sequence: Synthetic oligonucleotide
ggguguuaggcagggaaug

SEQ ID NO: 493130 - RNA, 19 nt, Artificial Sequence
  Description of Artificial Sequence: Synthetic oligonucleotide
ccuucggcgggcauaccgg

SEQ ID NO: 493131 - RNA, 19 nt, Artificial Sequence
  Description of Artificial Sequence: Synthetic oligonucleotide
aguaccuucggcgggcaua

SEQ ID NO: 493132 - RNA, 19 nt, Artificial Sequence
  Description of Artificial Sequence: Synthetic oligonucleotide
auagagacgcuggaccauu

SEQ ID NO: 493133 - RNA, 19 nt, Artificial Sequence
  Description of Artificial Sequence: Synthetic oligonucleotide
gucugaagagcgucgcuua

SEQ ID NO: 493134 - RNA, 19 nt, Artificial Sequence
  Description of Artificial Sequence: Synthetic oligonucleotide
gguauccuagcugucuuuc

SEQ ID NO: 493135 - RNA, 19 nt, Artificial Sequence
  Description of Artificial Sequence: Synthetic oligonucleotide
uggggucagaagguauccu

SEQ ID NO: 493136 - RNA, 19 nt, Artificial Sequence
  Description of Artificial Sequence: Synthetic oligonucleotide
guuacggccucagcgcuga

SEQ ID NO: 493137 - RNA, 19 nt, Artificial Sequence
  Description of Artificial Sequence: Synthetic oligonucleotide
agguauccuagcugucuuu

SEQ ID NO: 493138 - RNA, 19 nt, Artificial Sequence
  Description of Artificial Sequence: Synthetic oligonucleotide
cugcaagagucgguaguac

SEQ ID NO: 493139 - RNA, 19 nt, Artificial Sequence
  Description of Artificial Sequence: Synthetic oligonucleotide
cauggccuggauguauguc

SEQ ID NO: 493140 - RNA, 19 nt, Artificial Sequence
  Description of Artificial Sequence: Synthetic oligonucleotide
ggcgguagacaccugcaga

SEQ ID NO: 493141 - RNA, 19 nt, Artificial Sequence
  Description of Artificial Sequence: Synthetic oligonucleotide
ggucaaucucagccagugc

SEQ ID NO: 493142 - RNA, 19 nt, Artificial Sequence
  Description of Artificial Sequence: Synthetic oligonucleotide
augaccauagaaggaucua

SEQ ID NO: 493143 - RNA, 19 nt, Artificial Sequence
  Description of Artificial Sequence: Synthetic oligonucleotide
auccuuucccgagucacuu

SEQ ID NO: 493144 - RNA, 19 nt, Artificial Sequence
  Description of Artificial Sequence: Synthetic oligonucleotide
uagagacgcuggaccauuu

SEQ ID NO: 493145 - RNA, 19 nt, Artificial Sequence
  Description of Artificial Sequence: Synthetic oligonucleotide
gcgccaacggcgcagugug

SEQ ID NO: 493146 - RNA, 19 nt, Artificial Sequence
  Description of Artificial Sequence: Synthetic oligonucleotide
ucguguccuaagguaucga

SEQ ID NO: 493147 - RNA, 19 nt, Artificial Sequence
  Description of Artificial Sequence: Synthetic oligonucleotide
aggaucuaguacacguaau

SEQ ID NO: 493148 - RNA, 19 nt, Artificial Sequence
  Description of Artificial Sequence: Synthetic oligonucleotide
agcaugcuguagaugcgcu

SEQ ID NO: 493149 - RNA, 19 nt, Artificial Sequence
  Description of Artificial Sequence: Synthetic oligonucleotide
gucccauccgaguccccug

SEQ ID NO: 493150 - RNA, 19 nt, Artificial Sequence
  Description of Artificial Sequence: Synthetic oligonucleotide
cacccucuaguucgggguc

SEQ ID NO: 493151 - RNA, 19 nt, Artificial Sequence
  Description of Artificial Sequence: Synthetic oligonucleotide
cugagucuaugcaggaccu

SEQ ID NO: 493152 - RNA, 19 nt, Artificial Sequence
  Description of Artificial Sequence: Synthetic oligonucleotide
guaaugccuugauggcaga

SEQ ID NO: 493153 - RNA, 19 nt, Artificial Sequence
  Description of Artificial Sequence: Synthetic oligonucleotide
cuccuccgcagcaaugcca

SEQ ID NO: 493154 - RNA, 19 nt, Artificial Sequence
  Description of Artificial Sequence: Synthetic oligonucleotide
agguccuugcugccauaga

SEQ ID NO: 493155 - RNA, 19 nt, Artificial Sequence
  Description of Artificial Sequence: Synthetic oligonucleotide
ugcuggucgcggaccuucu

SEQ ID NO: 493156 - RNA, 19 nt, Artificial Sequence
  Description of Artificial Sequence: Synthetic oligonucleotide
ugccgaacuguguccucuc

SEQ ID NO: 493157 - RNA, 19 nt, Artificial Sequence
  Description of Artificial Sequence: Synthetic oligonucleotide
ccaaucuacuuuaauuugu

SEQ ID NO: 493158 - RNA, 19 nt, Artificial Sequence
  Description of Artificial Sequence: Synthetic oligonucleotide
uguugacaccuggguggag

SEQ ID NO: 493159 - RNA, 19 nt, Artificial Sequence
  Description of Artificial Sequence: Synthetic oligonucleotide
gucuaugcaggaccuggcu

SEQ ID NO: 493160 - RNA, 19 nt, Artificial Sequence
  Description of Artificial Sequence: Synthetic oligonucleotide
ccauagaggacaaaucuau

SEQ ID NO: 493161 - RNA, 19 nt, Artificial Sequence
  Description of Artificial Sequence: Synthetic oligonucleotide
gccgaacuguguccucucg

SEQ ID NO: 493162 - RNA, 19 nt, Artificial Sequence
  Description of Artificial Sequence: Synthetic oligonucleotide
aauaggcccuacagagcua

SEQ ID NO: 493163 - RNA, 19 nt, Artificial Sequence
  Description of Artificial Sequence: Synthetic oligonucleotide
acgagcugcuggucgcgga

SEQ ID NO: 493164 - RNA, 19 nt, Artificial Sequence
  Description of Artificial Sequence: Synthetic oligonucleotide
caaacauucggagcaugcu

SEQ ID NO: 493165 - RNA, 19 nt, Artificial Sequence
  Description of Artificial Sequence: Synthetic oligonucleotide
cguguccuaagguaucgac

SEQ ID NO: 493166 - RNA, 19 nt, Artificial Sequence
  Description of Artificial Sequence: Synthetic oligonucleotide
uguccucuccaagcaguau

SEQ ID NO: 493167 - RNA, 19 nt, Artificial Sequence
  Description of Artificial Sequence: Synthetic oligonucleotide
cuaguacacguaaugccuu

SEQ ID NO: 493168 - RNA, 19 nt, Artificial Sequence
  Description of Artificial Sequence: Synthetic oligonucleotide
gagcgucgcuuagaacuug

SEQ ID NO: 493169 - RNA, 19 nt, Artificial Sequence
  Description of Artificial Sequence: Synthetic oligonucleotide
gcucuacauccauugucac

SEQ ID NO: 493170 - RNA, 19 nt, Artificial Sequence
  Description of Artificial Sequence: Synthetic oligonucleotide
guccuaagguaucgacgga

SEQ ID NO: 493171 - RNA, 19 nt, Artificial Sequence
  Description of Artificial Sequence: Synthetic oligonucleotide
gcugccucagaucuguccu

SEQ ID NO: 493172 - RNA, 19 nt, Artificial Sequence
  Description of Artificial Sequence: Synthetic oligonucleotide
cugaagagcgucgcuuaga

SEQ ID NO: 493173 - RNA, 19 nt, Artificial Sequence
  Description of Artificial Sequence: Synthetic oligonucleotide
agagcgucgcuuagaacuu

SEQ ID NO: 493174 - RNA, 19 nt, Artificial Sequence
  Description of Artificial Sequence: Synthetic oligonucleotide
cuggcuugguccuggaaau

SEQ ID NO: 493175 - RNA, 19 nt, Artificial Sequence
  Description of Artificial Sequence: Synthetic oligonucleotide
gguugauuggguagcccca

SEQ ID NO: 493176 - RNA, 19 nt, Artificial Sequence
  Description of Artificial Sequence: Synthetic oligonucleotide
caacucuuaggcaggcggu

SEQ ID NO: 493177 - RNA, 19 nt, Artificial Sequence
  Description of Artificial Sequence: Synthetic oligonucleotide
agcgagcgguacucauuga

SEQ ID NO: 493178 - RNA, 19 nt, Artificial Sequence
  Description of Artificial Sequence: Synthetic oligonucleotide
agcgucgcuuagaacuuga

SEQ ID NO: 493179 - RNA, 19 nt, Artificial Sequence
  Description of Artificial Sequence: Synthetic oligonucleotide
agguaucgacggaugggcu

SEQ ID NO: 493180 - RNA, 19 nt, Artificial Sequence
  Description of Artificial Sequence: Synthetic oligonucleotide
cuuaggcaggcgguagaca

SEQ ID NO: 493181 - RNA, 19 nt, Artificial Sequence
  Description of Artificial Sequence: Synthetic oligonucleotide
gccuugauggcagaaauau

SEQ ID NO: 493182 - RNA, 19 nt, Artificial Sequence
  Description of Artificial Sequence: Synthetic oligonucleotide
cguucauacucuccccggc

SEQ ID NO: 493183 - RNA, 19 nt, Artificial Sequence
  Description of Artificial Sequence: Synthetic oligonucleotide
cuaaguuaggguggccaua

SEQ ID NO: 493184 - RNA, 19 nt, Artificial Sequence
  Description of Artificial Sequence: Synthetic oligonucleotide
aggccgcuccuccucaaua

SEQ ID NO: 493185 - RNA, 19 nt, Artificial Sequence
  Description of Artificial Sequence: Synthetic oligonucleotide
uaccggcugucuagcucac

SEQ ID NO: 493186 - RNA, 19 nt, Artificial Sequence
  Description of Artificial Sequence: Synthetic oligonucleotide
caugccugagucgcucuca

SEQ ID NO: 493187 - RNA, 19 nt, Artificial Sequence
  Description of Artificial Sequence: Synthetic oligonucleotide
ucgagucucuagggccacc

SEQ ID NO: 493188 - RNA, 19 nt, Artificial Sequence
  Description of Artificial Sequence: Synthetic oligonucleotide
ucggggucugugccccuuc

SEQ ID NO: 493189 - RNA, 19 nt, Artificial Sequence
  Description of Artificial Sequence: Synthetic oligonucleotide
uugaugcgucgggaaucug

SEQ ID NO: 493190 - RNA, 19 nt, Artificial Sequence
  Description of Artificial Sequence: Synthetic oligonucleotide
cuggacaauaugacagcau

SEQ ID NO: 493191 - RNA, 19 nt, Artificial Sequence
  Description of Artificial Sequence: Synthetic oligonucleotide
ggcuuucuagguuggucaa

SEQ ID NO: 493192 - RNA, 19 nt, Artificial Sequence
  Description of Artificial Sequence: Synthetic oligonucleotide
cucacgaagaaaggagcgu

SEQ ID NO: 493193 - RNA, 19 nt, Artificial Sequence
  Description of Artificial Sequence: Synthetic oligonucleotide
gcuguuugucacugccaca

SEQ ID NO: 493194 - RNA, 19 nt, Artificial Sequence
  Description of Artificial Sequence: Synthetic oligonucleotide
gccauagaggacaaaucua

SEQ ID NO: 493195 - RNA, 19 nt, Artificial Sequence
  Description of Artificial Sequence: Synthetic oligonucleotide
cacucucucgauccacuua

SEQ ID NO: 493196 - RNA, 19 nt, Artificial Sequence
  Description of Artificial Sequence: Synthetic oligonucleotide
cauccuuucccgagucacu

SEQ ID NO: 493197 - RNA, 19 nt, Artificial Sequence
  Description of Artificial Sequence: Synthetic oligonucleotide
gccgagagucuuggcauag

SEQ ID NO: 493198 - RNA, 19 nt, Artificial Sequence
  Description of Artificial Sequence: Synthetic oligonucleotide
cugucuagcucacccucua

SEQ ID NO: 493199 - RNA, 19 nt, Artificial Sequence
  Description of Artificial Sequence: Synthetic oligonucleotide
gucgggaaucugccauguc

SEQ ID NO: 493200 - RNA, 19 nt, Artificial Sequence
  Description of Artificial Sequence: Synthetic oligonucleotide
uaucgacggaugggcucac

SEQ ID NO: 493201 - RNA, 19 nt, Artificial Sequence
  Description of Artificial Sequence: Synthetic oligonucleotide
cgacggaugggcucacaag

SEQ ID NO: 493202 - RNA, 19 nt, Artificial Sequence
  Description of Artificial Sequence: Synthetic oligonucleotide
gcgucgggaaucugccaug

SEQ ID NO: 493203 - RNA, 19 nt, Artificial Sequence
  Description of Artificial Sequence: Synthetic oligonucleotide
uggcuugguccuggaaaua

SEQ ID NO: 493204 - RNA, 19 nt, Artificial Sequence
  Description of Artificial Sequence: Synthetic oligonucleotide
gcuaaguuaggguggccau

SEQ ID NO: 493205 - RNA, 19 nt, Artificial Sequence
  Description of Artificial Sequence: Synthetic oligonucleotide
ccgcagcaaugccacaggc

SEQ ID NO: 493206 - RNA, 19 nt, Artificial Sequence
  Description of Artificial Sequence: Synthetic oligonucleotide
ccugguaguguuguccuga

SEQ ID NO: 493207 - RNA, 19 nt, Artificial Sequence
  Description of Artificial Sequence: Synthetic oligonucleotide
cuguacguggcagcgccaa

SEQ ID NO: 493208 - RNA, 19 nt, Artificial Sequence
  Description of Artificial Sequence: Synthetic oligonucleotide
ccucucguguccuaaggua

SEQ ID NO: 493209 - RNA, 19 nt, Artificial Sequence
  Description of Artificial Sequence: Synthetic oligonucleotide
gguuacggccucagcgcug

SEQ ID NO: 493210 - RNA, 19 nt, Artificial Sequence
  Description of Artificial Sequence: Synthetic oligonucleotide
guaguaccuucggcgggca

SEQ ID NO: 493211 - RNA, 19 nt, Artificial Sequence
  Description of Artificial Sequence: Synthetic oligonucleotide
aaacggccauagagacgcu

SEQ ID NO: 493212 - RNA, 19 nt, Artificial Sequence
  Description of Artificial Sequence: Synthetic oligonucleotide
agugccugucgggcaccag

SEQ ID NO: 493213 - RNA, 19 nt, Artificial Sequence
  Description of Artificial Sequence: Synthetic oligonucleotide
guugauuggguagccccau

SEQ ID NO: 493214 - RNA, 19 nt, Artificial Sequence
  Description of Artificial Sequence: Synthetic oligonucleotide
caccucuaggaugaccaua

SEQ ID NO: 493215 - RNA, 19 nt, Artificial Sequence
  Description of Artificial Sequence: Synthetic oligonucleotide
ccaacggcgcaguguguuc

SEQ ID NO: 493216 - RNA, 19 nt, Artificial Sequence
  Description of Artificial Sequence: Synthetic oligonucleotide
cgguagaagaaucucugua

SEQ ID NO: 493217 - RNA, 19 nt, Artificial Sequence
  Description of Artificial Sequence: Synthetic oligonucleotide
uucggggucugugccccuu

SEQ ID NO: 493218 - RNA, 19 nt, Artificial Sequence
  Description of Artificial Sequence: Synthetic oligonucleotide
guagccccauuaccugcua

SEQ ID NO: 493219 - RNA, 19 nt, Artificial Sequence
  Description of Artificial Sequence: Synthetic oligonucleotide
uaccugcuacugggaaaau

SEQ ID NO: 493220 - RNA, 19 nt, Artificial Sequence
  Description of Artificial Sequence: Synthetic oligonucleotide
cacggauauuggcauugau

SEQ ID NO: 493221 - RNA, 19 nt, Artificial Sequence
  Description of Artificial Sequence: Synthetic oligonucleotide
gcgagcgguacucauugau

SEQ ID NO: 493222 - RNA, 19 nt, Artificial Sequence
  Description of Artificial Sequence: Synthetic oligonucleotide
cucucaggaaacggccaua

SEQ ID NO: 493223 - RNA, 19 nt, Artificial Sequence
  Description of Artificial Sequence: Synthetic oligonucleotide
uaccuucggcgggcauacc

SEQ ID NO: 493224 - RNA, 19 nt, Artificial Sequence
  Description of Artificial Sequence: Synthetic oligonucleotide
ccaacugaggguccucaua

SEQ ID NO: 493225 - RNA, 19 nt, Artificial Sequence
  Description of Artificial Sequence: Synthetic oligonucleotide
ucucccucucagggcugaa

SEQ ID NO: 493226 - RNA, 19 nt, Artificial Sequence
  Description of Artificial Sequence: Synthetic oligonucleotide
cgauccacuuauggaacuc

SEQ ID NO: 493227 - RNA, 19 nt, Artificial Sequence
  Description of Artificial Sequence: Synthetic oligonucleotide
ccucaauaacagagaacgu

SEQ ID NO: 493228 - RNA, 19 nt, Artificial Sequence
  Description of Artificial Sequence: Synthetic oligonucleotide
gcagcggucuuccauccuu

SEQ ID NO: 493229 - RNA, 19 nt, Artificial Sequence
  Description of Artificial Sequence: Synthetic oligonucleotide
gcgucgcuuagaacuugac

SEQ ID NO: 493230 - RNA, 19 nt, Artificial Sequence
  Description of Artificial Sequence: Synthetic oligonucleotide
cggcagcggucuuccaucc

SEQ ID NO: 493231 - RNA, 19 nt, Artificial Sequence
  Description of Artificial Sequence: Synthetic oligonucleotide
ggaguaagccugguugauu

SEQ ID NO: 493232 - RNA, 19 nt, Artificial Sequence
  Description of Artificial Sequence: Synthetic oligonucleotide
gggguguuaggcagggaau

SEQ ID NO: 493233 - RNA, 19 nt, Artificial Sequence
  Description of Artificial Sequence: Synthetic oligonucleotide
cagcggucuuccauccuuu

SEQ ID NO: 493234 - RNA, 19 nt, Artificial Sequence
  Description of Artificial Sequence: Synthetic oligonucleotide
ccgaacuguguccucucgu

SEQ ID NO: 493235 - RNA, 19 nt, Artificial Sequence
  Description of Artificial Sequence: Synthetic oligonucleotide
cccauccgaguccccuguc

SEQ ID NO: 493236 - RNA, 19 nt, Artificial Sequence
  Description of Artificial Sequence: Synthetic oligonucleotide
cggcgcaguguguucccug

SEQ ID NO: 493237 - RNA, 19 nt, Artificial Sequence
  Description of Artificial Sequence: Synthetic oligonucleotide
cugucagcccagccacaau

SEQ ID NO: 493238 - RNA, 19 nt, Artificial Sequence
  Description of Artificial Sequence: Synthetic oligonucleotide
gccaacggcgcaguguguu

SEQ ID NO: 493239 - RNA, 19 nt, Artificial Sequence
  Description of Artificial Sequence: Synthetic oligonucleotide
ccgagagucuuggcauaga

SEQ ID NO: 493240 - RNA, 19 nt, Artificial Sequence
  Description of Artificial Sequence: Synthetic oligonucleotide
gcccgucuccagguuggca

SEQ ID NO: 493241 - RNA, 19 nt, Artificial Sequence
  Description of Artificial Sequence: Synthetic oligonucleotide
ggcgggcauaccggcuguc

SEQ ID NO: 493242 - RNA, 19 nt, Artificial Sequence
  Description of Artificial Sequence: Synthetic oligonucleotide
gcgcuccagagaaaggcuu

SEQ ID NO: 493243 - RNA, 19 nt, Artificial Sequence
  Description of Artificial Sequence: Synthetic oligonucleotide
cgggcauaccggcugucua

SEQ ID NO: 493244 - RNA, 19 nt, Artificial Sequence
  Description of Artificial Sequence: Synthetic oligonucleotide
ccaccucuaggaugaccau

SEQ ID NO: 493245 - RNA, 19 nt, Artificial Sequence
  Description of Artificial Sequence: Synthetic oligonucleotide
gcuggucgcggaccuucuu

SEQ ID NO: 493246 - RNA, 19 nt, Artificial Sequence
  Description of Artificial Sequence: Synthetic oligonucleotide
cgucgggaaucugccaugu

SEQ ID NO: 493247 - RNA, 19 nt, Artificial Sequence
  Description of Artificial Sequence: Synthetic oligonucleotide
cgccaacggcgcagugugu

SEQ ID NO: 493248 - RNA, 19 nt, Artificial Sequence
  Description of Artificial Sequence: Synthetic oligonucleotide
cggcgggcauaccggcugu

SEQ ID NO: 493249 - RNA, 19 nt, Artificial Sequence
  Description of Artificial Sequence: Synthetic oligonucleotide
uguuauaaugccaaggagg

SEQ ID NO: 493250 - RNA, 19 nt, Artificial Sequence
  Description of Artificial Sequence: Synthetic oligonucleotide
aaguaaucccucuagaaac

SEQ ID NO: 493251 - RNA, 19 nt, Artificial Sequence
  Description of Artificial Sequence: Synthetic oligonucleotide
uguaaaagggcucauauca

SEQ ID NO: 493252 - RNA, 19 nt, Artificial Sequence
  Description of Artificial Sequence: Synthetic oligonucleotide
uuaacuauacguuucauga

SEQ ID NO: 493253 - RNA, 19 nt, Artificial Sequence
  Description of Artificial Sequence: Synthetic oligonucleotide
aacaauauauuccaagccu

SEQ ID NO: 493254 - RNA, 19 nt, Artificial Sequence
  Description of Artificial Sequence: Synthetic oligonucleotide
ugaacauuauugaagcggg

SEQ ID NO: 493255 - RNA, 19 nt, Artificial Sequence
  Description of Artificial Sequence: Synthetic oligonucleotide
ggauaaacaagccugaugg

SEQ ID NO: 493256 - RNA, 19 nt, Artificial Sequence
  Description of Artificial Sequence: Synthetic oligonucleotide
acaauaaugacuucgagaa

SEQ ID NO: 493257 - RNA, 19 nt, Artificial Sequence
  Description of Artificial Sequence: Synthetic oligonucleotide
aacaauaaugacuucgaga

SEQ ID NO: 493258 - RNA, 19 nt, Artificial Sequence
  Description of Artificial Sequence: Synthetic oligonucleotide
ucuaccacaaucuccauug

SEQ ID NO: 493259 - RNA, 19 nt, Artificial Sequence
  Description of Artificial Sequence: Synthetic oligonucleotide
ugugcuauucaacaaacga

SEQ ID NO: 493260 - RNA, 19 nt, Artificial Sequence
  Description of Artificial Sequence: Synthetic oligonucleotide
uugcagucauaauagaugg

SEQ ID NO: 493261 - RNA, 19 nt, Artificial Sequence
  Description of Artificial Sequence: Synthetic oligonucleotide
aaacauacccgagaacugc

SEQ ID NO: 493262 - RNA, 19 nt, Artificial Sequence
  Description of Artificial Sequence: Synthetic oligonucleotide
auaauagauggcucaauuc

SEQ ID NO: 493263 - RNA, 19 nt, Artificial Sequence
  Description of Artificial Sequence: Synthetic oligonucleotide
aacuauacguuucaugagu

SEQ ID NO: 493264 - RNA, 19 nt, Artificial Sequence
  Description of Artificial Sequence: Synthetic oligonucleotide
aacuugguggacuugcguc

SEQ ID NO: 493265 - RNA, 19 nt, Artificial Sequence
  Description of Artificial Sequence: Synthetic oligonucleotide
ugcuauucaacaaacgaac

SEQ ID NO: 493266 - RNA, 19 nt, Artificial Sequence
  Description of Artificial Sequence: Synthetic oligonucleotide
ucuucgaggucucaugacg

SEQ ID NO: 493267 - RNA, 19 nt, Artificial Sequence
  Description of Artificial Sequence: Synthetic oligonucleotide
acaacugccagauagcuga

SEQ ID NO: 493268 - RNA, 19 nt, Artificial Sequence
  Description of Artificial Sequence: Synthetic oligonucleotide
ugaauauacuccaacgccu

SEQ ID NO: 493269 - RNA, 19 nt, Artificial Sequence
  Description of Artificial Sequence: Synthetic oligonucleotide
  modified_base (5)..(5): a, c, u, g, unknown or other
ucuunagggcgaaauaccc

SEQ ID NO: 493270 - RNA, 19 nt, Artificial Sequence
  Description of Artificial Sequence: Synthetic oligonucleotide
gaagauaaaccagucgugg

SEQ ID NO: 493271 - RNA, 19 nt, Artificial Sequence
  Description of Artificial Sequence: Synthetic oligonucleotide
aguuacaaggcacugccuc

SEQ ID NO: 493272 - RNA, 19 nt, Artificial Sequence
  Description of Artificial Sequence: Synthetic oligonucleotide
aaugcuuaacuauacguuu

SEQ ID NO: 493273 - RNA, 19 nt, Artificial Sequence
  Description of Artificial Sequence: Synthetic oligonucleotide
caugaguuaaacagaacag

SEQ ID NO: 493274 - RNA, 19 nt, Artificial Sequence
  Description of Artificial Sequence: Synthetic oligonucleotide
cugaauauacuccaacgcc

SEQ ID NO: 493275 - RNA, 19 nt, Artificial Sequence
  Description of Artificial Sequence: Synthetic oligonucleotide
aaaccagucguggugauag

SEQ ID NO: 493276 - RNA, 19 nt, Artificial Sequence
  Description of Artificial Sequence: Synthetic oligonucleotide
aguuuuaauggccgagggc

SEQ ID NO: 493277 - RNA, 19 nt, Artificial Sequence
  Description of Artificial Sequence: Synthetic oligonucleotide
uuuucggaagauaucuacc

SEQ ID NO: 493278 - RNA, 19 nt, Artificial Sequence
  Description of Artificial Sequence: Synthetic oligonucleotide
uuguuauaaugccaaggag

SEQ ID NO: 493279 - RNA, 19 nt, Artificial Sequence
  Description of Artificial Sequence: Synthetic oligonucleotide
aauaugagaaaggacugcu

SEQ ID NO: 493280 - RNA, 19 nt, Artificial Sequence
  Description of Artificial Sequence: Synthetic oligonucleotide
uguaccaacuacaugguua

SEQ ID NO: 493281 - RNA, 19 nt, Artificial Sequence
  Description of Artificial Sequence: Synthetic oligonucleotide
agaacugccaacaauaccu

SEQ ID NO: 493282 - RNA, 19 nt, Artificial Sequence
  Description of Artificial Sequence: Synthetic oligonucleotide
guuauaaugccaaggaggc

SEQ ID NO: 493283 - RNA, 19 nt, Artificial Sequence
  Description of Artificial Sequence: Synthetic oligonucleotide
ucaucuacugucauauugu

SEQ ID NO: 493284 - RNA, 19 nt, Artificial Sequence
  Description of Artificial Sequence: Synthetic oligonucleotide
  modified_base (6)..(6): a, c, u, g, unknown or other
uucuunagggcgaaauacc

SEQ ID NO: 493285 - RNA, 19 nt, Artificial Sequence
  Description of Artificial Sequence: Synthetic oligonucleotide
  modified_base (3)..(3): a, c, u, g, unknown or other
uunagggcgaaauacccac

SEQ ID NO: 493286 - RNA, 19 nt, Artificial Sequence
  Description of Artificial Sequence: Synthetic oligonucleotide
gaacgugucacuguggugc

SEQ ID NO: 493287 - RNA, 19 nt, Artificial Sequence
  Description of Artificial Sequence: Synthetic oligonucleotide
gauaucuaccacaaucucc

SEQ ID NO: 493288 - RNA, 19 nt, Artificial Sequence
  Description of Artificial Sequence: Synthetic oligonucleotide
aaauacccaccuaauacuc

SEQ ID NO: 493289 - RNA, 19 nt, Artificial Sequence
  Description of Artificial Sequence: Synthetic oligonucleotide
aauacccaccuaauacucc

SEQ ID NO: 493290 - RNA, 19 nt, Artificial Sequence
  Description of Artificial Sequence: Synthetic oligonucleotide
  modified_base (7)..(7): a, c, u, g, unknown or other
cuucuunagggcgaaauac

SEQ ID NO: 493291 - RNA, 19 nt, Artificial Sequence
  Description of Artificial Sequence: Synthetic oligonucleotide
aggguacccauuuagucgg

SEQ ID NO: 493292 - RNA, 19 nt, Artificial Sequence
  Description of Artificial Sequence: Synthetic oligonucleotide
uaaugcuuaacuauacguu

SEQ ID NO: 493293 - RNA, 19 nt, Artificial Sequence
  Description of Artificial Sequence: Synthetic oligonucleotide
acucaguugaacauuauug

SEQ ID NO: 493294 - RNA, 19 nt, Artificial Sequence
  Description of Artificial Sequence: Synthetic oligonucleotide
aacauuauugaagcggggu

SEQ ID NO: 493295 - RNA, 19 nt, Artificial Sequence
  Description of Artificial Sequence: Synthetic oligonucleotide
auuacggcagccauaagag

SEQ ID NO: 493296 - RNA, 19 nt, Artificial Sequence
  Description of Artificial Sequence: Synthetic oligonucleotide
uaacuauacguuucaugag

SEQ ID NO: 493297 - RNA, 19 nt, Artificial Sequence
  Description of Artificial Sequence: Synthetic oligonucleotide
aacauacccgagaacugcc

SEQ ID NO: 493298 - RNA, 19 nt, Artificial Sequence
  Description of Artificial Sequence: Synthetic oligonucleotide
cauaagaggaacaauauau

SEQ ID NO: 493299 - RNA, 19 nt, Artificial Sequence
  Description of Artificial Sequence: Synthetic oligonucleotide
caugcuggggauaaacaag

SEQ ID NO: 493300 - RNA, 19 nt, Artificial Sequence
  Description of Artificial Sequence: Synthetic oligonucleotide
cauuuagucggaugugugc

SEQ ID NO: 493301 - RNA, 19 nt, Artificial Sequence
  Description of Artificial Sequence: Synthetic oligonucleotide
ccaacuacaugguuaaugg

SEQ ID NO: 493302 - RNA, 19 nt, Artificial Sequence
  Description of Artificial Sequence: Synthetic oligonucleotide
guuuucggaagauaucuac

SEQ ID NO: 493303 - RNA, 19 nt, Artificial Sequence
  Description of Artificial Sequence: Synthetic oligonucleotide
ucgagaacaggauacuuuc

SEQ ID NO: 493304 - RNA, 19 nt, Artificial Sequence
  Description of Artificial Sequence: Synthetic oligonucleotide
ucggaugugugcuucauaa

SEQ ID NO: 493305 - RNA, 19 nt, Artificial Sequence
  Description of Artificial Sequence: Synthetic oligonucleotide
uauugaagcggggucuugg

SEQ ID NO: 493306 - RNA, 19 nt, Artificial Sequence
  Description of Artificial Sequence: Synthetic oligonucleotide
ugcuuaacuauacguuuca

SEQ ID NO: 493307 - RNA, 19 nt, Artificial Sequence
  Description of Artificial Sequence: Synthetic oligonucleotide
aaaacauacccgagaacug

SEQ ID NO: 493308 - RNA, 19 nt, Artificial Sequence
  Description of Artificial Sequence: Synthetic oligonucleotide
gagccuaguguauggauug

SEQ ID NO: 493309 - RNA, 19 nt, Artificial Sequence
  Description of Artificial Sequence: Synthetic oligonucleotide
aaacugauuagaguccagu

SEQ ID NO: 493310 - RNA, 19 nt, Artificial Sequence
  Description of Artificial Sequence: Synthetic oligonucleotide
ugcagaucgacaugagaug

SEQ ID NO: 493311 - RNA, 19 nt, Artificial Sequence
  Description of Artificial Sequence: Synthetic oligonucleotide
gguaaugcuuaacuauacg

SEQ ID NO: 493312 - RNA, 19 nt, Artificial Sequence
  Description of Artificial Sequence: Synthetic oligonucleotide
acaauucucccagcaaucg

SEQ ID NO: 493313 - RNA, 19 nt, Artificial Sequence
  Description of Artificial Sequence: Synthetic oligonucleotide
cacaguacgucucaauaug

SEQ ID NO: 493314 - RNA, 19 nt, Artificial Sequence
  Description of Artificial Sequence: Synthetic oligonucleotide
ugauguguaccaacuacau

SEQ ID NO: 493315 - RNA, 19 nt, Artificial Sequence
  Description of Artificial Sequence: Synthetic oligonucleotide
gaguaugcugugcaaaaca

SEQ ID NO: 493316 - RNA, 19 nt, Artificial Sequence
  Description of Artificial Sequence: Synthetic oligonucleotide
gagugcuaggcacaacugc

SEQ ID NO: 493317 - RNA, 19 nt, Artificial Sequence
  Description of Artificial Sequence: Synthetic oligonucleotide
aguuugucauaguaggaau

SEQ ID NO: 493318 - RNA, 19 nt, Artificial Sequence
  Description of Artificial Sequence: Synthetic oligonucleotide
gaauauacuccaacgccug

SEQ ID NO: 493319 - RNA, 19 nt, Artificial Sequence
  Description of Artificial Sequence: Synthetic oligonucleotide
gacuucgagaacaggauac

SEQ ID NO: 493320 - RNA, 19 nt, Artificial Sequence
  Description of Artificial Sequence: Synthetic oligonucleotide
accaacuacaugguuaaug

SEQ ID NO: 493321 - RNA, 19 nt, Artificial Sequence
  Description of Artificial Sequence: Synthetic oligonucleotide
uuguaugagugaauucuuc

SEQ ID NO: 493322 - RNA, 19 nt, Artificial Sequence
  Description of Artificial Sequence: Synthetic oligonucleotide
aagguuguaugagugaauu

SEQ ID NO: 493323 - RNA, 19 nt, Artificial Sequence
  Description of Artificial Sequence: Synthetic oligonucleotide
uuauaaugccaaggaggcg

SEQ ID NO: 493324 - RNA, 19 nt, Artificial Sequence
  Description of Artificial Sequence: Synthetic oligonucleotide
auaaacaagccugauggaa

SEQ ID NO: 493325 - RNA, 19 nt, Artificial Sequence
  Description of Artificial Sequence: Synthetic oligonucleotide
cauaaaugccuucccuacc

SEQ ID NO: 493326 - RNA, 19 nt, Artificial Sequence
  Description of Artificial Sequence: Synthetic oligonucleotide
agauggaguaugcugugca

SEQ ID NO: 493327 - RNA, 19 nt, Artificial Sequence
  Description of Artificial Sequence: Synthetic oligonucleotide
auacccgagaacugccaac

SEQ ID NO: 493328 - RNA, 19 nt, Artificial Sequence
  Description of Artificial Sequence: Synthetic oligonucleotide
uaccccuaagagaauaaaa

SEQ ID NO: 493329 - RNA, 19 nt, Artificial Sequence
  Description of Artificial Sequence: Synthetic oligonucleotide
ccaaauaccccuaagagaa

SEQ ID NO: 493330 - RNA, 19 nt, Artificial Sequence
  Description of Artificial Sequence: Synthetic oligonucleotide
uguguaccaacuacauggu

SEQ ID NO: 493331 - RNA, 19 nt, Artificial Sequence
  Description of Artificial Sequence: Synthetic oligonucleotide
ggugauaguaggcaagcug

SEQ ID NO: 493332 - RNA, 19 nt, Artificial Sequence
  Description of Artificial Sequence: Synthetic oligonucleotide
guuuuaauggccgagggcu

SEQ ID NO: 493333 - RNA, 19 nt, Artificial Sequence
  Description of Artificial Sequence: Synthetic oligonucleotide
agggcucauaucaagaaug

SEQ ID NO: 493334 - RNA, 19 nt, Artificial Sequence
  Description of Artificial Sequence: Synthetic oligonucleotide
agguuguaugagugaauuc

SEQ ID NO: 493335 - RNA, 19 nt, Artificial Sequence
  Description of Artificial Sequence: Synthetic oligonucleotide
caaaacauacccgagaacu

SEQ ID NO: 493336 - RNA, 19 nt, Artificial Sequence
  Description of Artificial Sequence: Synthetic oligonucleotide
ugguguugagccuagugua

SEQ ID NO: 493337 - RNA, 19 nt, Artificial Sequence
  Description of Artificial Sequence: Synthetic oligonucleotide
aaggcuaccacagcaguaa

SEQ ID NO: 493338 - RNA, 19 nt, Artificial Sequence
  Description of Artificial Sequence: Synthetic oligonucleotide
ucccaucucaagauuuuac

SEQ ID NO: 493339 - RNA, 19 nt, Artificial Sequence
  Description of Artificial Sequence: Synthetic oligonucleotide
agguaaugcuuaacuauac

SEQ ID NO: 493340 - RNA, 19 nt, Artificial Sequence
  Description of Artificial Sequence: Synthetic oligonucleotide
cagucguggugauaguagg

SEQ ID NO: 493341 - RNA, 19 nt, Artificial Sequence
  Description of Artificial Sequence: Synthetic oligonucleotide
caauaugagaaaggacugc

SEQ ID NO: 493342 - RNA, 19 nt, Artificial Sequence
  Description of Artificial Sequence: Synthetic oligonucleotide
ugcgucgacgacaccaggc

SEQ ID NO: 493343 - RNA, 19 nt, Artificial Sequence
  Description of Artificial Sequence: Synthetic oligonucleotide
uccaagaaaggguacccau

SEQ ID NO: 493344 - RNA, 19 nt, Artificial Sequence
  Description of Artificial Sequence: Synthetic oligonucleotide
acggcaauccccacaauuc

SEQ ID NO: 493345 - RNA, 19 nt, Artificial Sequence
  Description of Artificial Sequence: Synthetic oligonucleotide
ccccuaagagaauaaaagg

SEQ ID NO: 493346 - RNA, 19 nt, Artificial Sequence
  Description of Artificial Sequence: Synthetic oligonucleotide
ugagccuaguguauggauu

SEQ ID NO: 493347 - RNA, 19 nt, Artificial Sequence
  Description of Artificial Sequence: Synthetic oligonucleotide
aacaaacgaacuuccucuu

SEQ ID NO: 493348 - RNA, 19 nt, Artificial Sequence
  Description of Artificial Sequence: Synthetic oligonucleotide
aaguaggacgaguccuuca

SEQ ID NO: 493349 - RNA, 19 nt, Artificial Sequence
  Description of Artificial Sequence: Synthetic oligonucleotide
uggacuugcgucgacgaca

SEQ ID NO: 493350 - RNA, 19 nt, Artificial Sequence
  Description of Artificial Sequence: Synthetic oligonucleotide
acuugcgucgacgacacca

SEQ ID NO: 493351 - RNA, 19 nt, Artificial Sequence
  Description of Artificial Sequence: Synthetic oligonucleotide
gaacauuauugaagcgggg

SEQ ID NO: 493352 - RNA, 19 nt, Artificial Sequence
  Description of Artificial Sequence: Synthetic oligonucleotide
guacgucucaauaugagaa

SEQ ID NO: 493353 - RNA, 19 nt, Artificial Sequence
  Description of Artificial Sequence: Synthetic oligonucleotide
aucgcuccaauggccaugc

SEQ ID NO: 493354 - RNA, 19 nt, Artificial Sequence
  Description of Artificial Sequence: Synthetic oligonucleotide
  modified_base (4)..(4): a, c, u, g, unknown or other
cuunagggcgaaauaccca

SEQ ID NO: 493355 - RNA, 19 nt, Artificial Sequence
  Description of Artificial Sequence: Synthetic oligonucleotide
ugugaguuacaaggcacug

SEQ ID NO: 493356 - RNA, 19 nt, Artificial Sequence
  Description of Artificial Sequence: Synthetic oligonucleotide
agugcagaucgacaugaga

SEQ ID NO: 493357 - RNA, 19 nt, Artificial Sequence
  Description of Artificial Sequence: Synthetic oligonucleotide
  modified_base (2)..(2): a, c, u, g, unknown or other
unagggcgaaauacccacc

SEQ ID NO: 493358 - RNA, 19 nt, Artificial Sequence
  Description of Artificial Sequence: Synthetic oligonucleotide
agucguggugauaguaggc

SEQ ID NO: 493359 - RNA, 19 nt, Artificial Sequence
  Description of Artificial Sequence: Synthetic oligonucleotide
caacaaacgaacuuccucu

SEQ ID NO: 493360 - RNA, 19 nt, Artificial Sequence
  Description of Artificial Sequence: Synthetic oligonucleotide
cacaauucucccagcaauc

SEQ ID NO: 493361 - RNA, 19 nt, Artificial Sequence
  Description of Artificial Sequence: Synthetic oligonucleotide
ugacuucgagaacaggaua

SEQ ID NO: 493362 - RNA, 19 nt, Artificial Sequence
  Description of Artificial Sequence: Synthetic oligonucleotide
cuugcgucgacgacaccag

SEQ ID NO: 493363 - RNA, 19 nt, Artificial Sequence
  Description of Artificial Sequence: Synthetic oligonucleotide
aaccucgcaccacuccuug

SEQ ID NO: 493364 - RNA, 19 nt, Artificial Sequence
  Description of Artificial Sequence: Synthetic oligonucleotide
cauccaagaaaggguaccc

SEQ ID NO: 493365 - RNA, 19 nt, Artificial Sequence
  Description of Artificial Sequence: Synthetic oligonucleotide
acgaguccuucauuaaaga

SEQ ID NO: 493366 - RNA, 19 nt, Artificial Sequence
  Description of Artificial Sequence: Synthetic oligonucleotide
aacgugucacuguggugcu

SEQ ID NO: 493367 - RNA, 19 nt, Artificial Sequence
  Description of Artificial Sequence: Synthetic oligonucleotide
auugaagcggggucuuggu

SEQ ID NO: 493368 - RNA, 19 nt, Artificial Sequence
  Description of Artificial Sequence: Synthetic oligonucleotide
aguaaucccucuagaaaca

SEQ ID NO: 493369 - RNA, 19 nt, Artificial Sequence
  Description of Artificial Sequence: Synthetic oligonucleotide
gacggucaggaauaucauc

SEQ ID NO: 493370 - RNA, 19 nt, Artificial Sequence
  Description of Artificial Sequence: Synthetic oligonucleotide
uugagccuaguguauggau

SEQ ID NO: 493371 - RNA, 19 nt, Artificial Sequence
  Description of Artificial Sequence: Synthetic oligonucleotide
cagcaaucgcuccaauggc

SEQ ID NO: 493372 - RNA, 19 nt, Artificial Sequence
  Description of Artificial Sequence: Synthetic oligonucleotide
agccagugcagaucgacau

SEQ ID NO: 493373 - RNA, 19 nt, Artificial Sequence
  Description of Artificial Sequence: Synthetic oligonucleotide
uucuucgaggucucaugac

SEQ ID NO: 493374 - RNA, 19 nt, Artificial Sequence
  Description of Artificial Sequence: Synthetic oligonucleotide
auaaagcccaggcgugaug

SEQ ID NO: 493375 - RNA, 19 nt, Artificial Sequence
  Description of Artificial Sequence: Synthetic oligonucleotide
uucacugguguugagccua

SEQ ID NO: 493376 - RNA, 19 nt, Artificial Sequence
  Description of Artificial Sequence: Synthetic oligonucleotide
augcagucagccccaaccu

SEQ ID NO: 493377 - RNA, 19 nt, Artificial Sequence
  Description of Artificial Sequence: Synthetic oligonucleotide
cuaagcacgcagcggcacc

SEQ ID NO: 493378 - RNA, 19 nt, Artificial Sequence
  Description of Artificial Sequence: Synthetic oligonucleotide
cauaugacggaggauaucu

SEQ ID NO: 493379 - RNA, 19 nt, Artificial Sequence
  Description of Artificial Sequence: Synthetic oligonucleotide
ugccagauagcugaauaua

SEQ ID NO: 493380 - RNA, 19 nt, Artificial Sequence
  Description of Artificial Sequence: Synthetic oligonucleotide
ugguguguaugcacauuuc

SEQ ID NO: 493381 - RNA, 19 nt, Artificial Sequence
  Description of Artificial Sequence: Synthetic oligonucleotide
cacaacugccagauagcug

SEQ ID NO: 493382 - RNA, 19 nt, Artificial Sequence
  Description of Artificial Sequence: Synthetic oligonucleotide
ugguggacuugcgucgacg

SEQ ID NO: 493383 - RNA, 19 nt, Artificial Sequence
  Description of Artificial Sequence: Synthetic oligonucleotide
ucauaauagauggcucaau

SEQ ID NO: 493384 - RNA, 19 nt, Artificial Sequence
  Description of Artificial Sequence: Synthetic oligonucleotide
uuagucggaugugugcuuc

SEQ ID NO: 493385 - RNA, 19 nt, Artificial Sequence
  Description of Artificial Sequence: Synthetic oligonucleotide
ucgaggucucaugacguca

SEQ ID NO: 493386 - RNA, 19 nt, Artificial Sequence
  Description of Artificial Sequence: Synthetic oligonucleotide
cagucacuuagagaaguac

SEQ ID NO: 493387 - RNA, 19 nt, Artificial Sequence
  Description of Artificial Sequence: Synthetic oligonucleotide
gauggaguaugcugugcaa

SEQ ID NO: 493388 - RNA, 19 nt, Artificial Sequence
  Description of Artificial Sequence: Synthetic oligonucleotide
ucguggugauaguaggcaa

SEQ ID NO: 493389 - RNA, 19 nt, Artificial Sequence
  Description of Artificial Sequence: Synthetic oligonucleotide
guguauggauuggggaagg

SEQ ID NO: 493390 - RNA, 19 nt, Artificial Sequence
  Description of Artificial Sequence: Synthetic oligonucleotide
guagaaagguaaugcuuaa

SEQ ID NO: 493391 - RNA, 19 nt, Artificial Sequence
  Description of Artificial Sequence: Synthetic oligonucleotide
uugcgucgacgacaccagg

SEQ ID NO: 493392 - RNA, 19 nt, Artificial Sequence
  Description of Artificial Sequence: Synthetic oligonucleotide
ucacaccaccuaagcacgc

SEQ ID NO: 493393 - RNA, 19 nt, Artificial Sequence
  Description of Artificial Sequence: Synthetic oligonucleotide
cucagacccaguuuucgga

SEQ ID NO: 493394 - RNA, 19 nt, Artificial Sequence
  Description of Artificial Sequence: Synthetic oligonucleotide
agaacucaguugaacauua

SEQ ID NO: 493395 - RNA, 19 nt, Artificial Sequence
  Description of Artificial Sequence: Synthetic oligonucleotide
agaucgacaugagaugaau

SEQ ID NO: 493396 - RNA, 19 nt, Artificial Sequence
  Description of Artificial Sequence: Synthetic oligonucleotide
augacuucgagaacaggau

SEQ ID NO: 493397 - RNA, 19 nt, Artificial Sequence
  Description of Artificial Sequence: Synthetic oligonucleotide
agccaagguuguaugagug

SEQ ID NO: 493398 - RNA, 19 nt, Artificial Sequence
  Description of Artificial Sequence: Synthetic oligonucleotide
acaguacgucucaauauga

SEQ ID NO: 493399 - RNA, 19 nt, Artificial Sequence
  Description of Artificial Sequence: Synthetic oligonucleotide
aaaucacaguacgucucaa

SEQ ID NO: 493400 - RNA, 19 nt, Artificial Sequence
  Description of Artificial Sequence: Synthetic oligonucleotide
uaagcacgcagcggcacca

SEQ ID NO: 493401 - RNA, 19 nt, Artificial Sequence
  Description of Artificial Sequence: Synthetic oligonucleotide
auagauggcucaauucaaa

SEQ ID NO: 493402 - RNA, 19 nt, Artificial Sequence
  Description of Artificial Sequence: Synthetic oligonucleotide
acuucgagaacaggauacu

SEQ ID NO: 493403 - RNA, 19 nt, Artificial Sequence
  Description of Artificial Sequence: Synthetic oligonucleotide
cuugugaugaaaccucagu

SEQ ID NO: 493404 - RNA, 19 nt, Artificial Sequence
  Description of Artificial Sequence: Synthetic oligonucleotide
uucgaggucucaugacguc

SEQ ID NO: 493405 - RNA, 19 nt, Artificial Sequence
  Description of Artificial Sequence: Synthetic oligonucleotide
uuauugaagcggggucuug

SEQ ID NO: 493406 - RNA, 19 nt, Artificial Sequence
  Description of Artificial Sequence: Synthetic oligonucleotide
gggacugagaacgugucac

SEQ ID NO: 493407 - RNA, 19 nt, Artificial Sequence
  Description of Artificial Sequence: Synthetic oligonucleotide
gucguggugauaguaggca

SEQ ID NO: 493408 - RNA, 19 nt, Artificial Sequence
  Description of Artificial Sequence: Synthetic oligonucleotide
caguuuucggaagauaucu

SEQ ID NO: 493409 - RNA, 19 nt, Artificial Sequence
  Description of Artificial Sequence: Synthetic oligonucleotide
ucauuacggcagccauaag

SEQ ID NO: 493410 - RNA, 19 nt, Artificial Sequence
  Description of Artificial Sequence: Synthetic oligonucleotide
accuaauacuccugagauu

SEQ ID NO: 493411 - RNA, 19 nt, Artificial Sequence
  Description of Artificial Sequence: Synthetic oligonucleotide
auggaguaugcugugcaaa

SEQ ID NO: 493412 - RNA, 19 nt, Artificial Sequence
  Description of Artificial Sequence: Synthetic oligonucleotide
cuaccaaaggcaucaccaa

SEQ ID NO: 493413 - RNA, 19 nt, Artificial Sequence
  Description of Artificial Sequence: Synthetic oligonucleotide
uugaagcggggucuugguu

SEQ ID NO: 493414 - RNA, 19 nt, Artificial Sequence
  Description of Artificial Sequence: Synthetic oligonucleotide
caccuaauacuccugagau

SEQ ID NO: 493415 - RNA, 19 nt, Artificial Sequence
  Description of Artificial Sequence: Synthetic oligonucleotide
auaaaccagucguggugau

SEQ ID NO: 493416 - RNA, 19 nt, Artificial Sequence
  Description of Artificial Sequence: Synthetic oligonucleotide
cuauucaacaaacgaacuu

SEQ ID NO: 493417 - RNA, 19 nt, Artificial Sequence
  Description of Artificial Sequence: Synthetic oligonucleotide
auuauugaagcggggucuu

SEQ ID NO: 493418 - RNA, 19 nt, Artificial Sequence
  Description of Artificial Sequence: Synthetic oligonucleotide
uacuguaaaagggcucaua

SEQ ID NO: 493419 - RNA, 19 nt, Artificial Sequence
  Description of Artificial Sequence: Synthetic oligonucleotide
agccuaguguauggauugg

SEQ ID NO: 493420 - RNA, 19 nt, Artificial Sequence
  Description of Artificial Sequence: Synthetic oligonucleotide
acgacaccaggcaauauuu

SEQ ID NO: 493421 - RNA, 19 nt, Artificial Sequence
  Description of Artificial Sequence: Synthetic oligonucleotide
aaccagucguggugauagu

SEQ ID NO: 493422 - RNA, 19 nt, Artificial Sequence
  Description of Artificial Sequence: Synthetic oligonucleotide
auacguuucaugaguuaaa

SEQ ID NO: 493423 - RNA, 19 nt, Artificial Sequence
  Description of Artificial Sequence: Synthetic oligonucleotide
uagucggaugugugcuuca

SEQ ID NO: 493424 - RNA, 19 nt, Artificial Sequence
  Description of Artificial Sequence: Synthetic oligonucleotide
auaugagugcuaggcacaa

SEQ ID NO: 493425 - RNA, 19 nt, Artificial Sequence
  Description of Artificial Sequence: Synthetic oligonucleotide
acauucccuucuugugaug

SEQ ID NO: 493426 - RNA, 19 nt, Artificial Sequence
  Description of Artificial Sequence: Synthetic oligonucleotide
gacgacaccaggcaauauu

SEQ ID NO: 493427 - RNA, 19 nt, Artificial Sequence
  Description of Artificial Sequence: Synthetic oligonucleotide
uggugauaguaggcaagcu

SEQ ID NO: 493428 - RNA, 19 nt, Artificial Sequence
  Description of Artificial Sequence: Synthetic oligonucleotide
ccauuuagucggaugugug

SEQ ID NO: 493429 - RNA, 19 nt, Artificial Sequence
  Description of Artificial Sequence: Synthetic oligonucleotide
cuauacguuucaugaguua

SEQ ID NO: 493430 - RNA, 19 nt, Artificial Sequence
  Description of Artificial Sequence: Synthetic oligonucleotide
uuaauggccgagggcuuuc

SEQ ID NO: 493431 - RNA, 19 nt, Artificial Sequence
  Description of Artificial Sequence: Synthetic oligonucleotide
acccauuuagucggaugug

SEQ ID NO: 493432 - RNA, 19 nt, Artificial Sequence
  Description of Artificial Sequence: Synthetic oligonucleotide
auauuccaagccucccgua

SEQ ID NO: 493433 - RNA, 19 nt, Artificial Sequence
  Description of Artificial Sequence: Synthetic oligonucleotide
gguguguaugcacauuucu

SEQ ID NO: 493434 - RNA, 19 nt, Artificial Sequence
  Description of Artificial Sequence: Synthetic oligonucleotide
gggcucauaucaagaaugc

SEQ ID NO: 493435 - RNA, 19 nt, Artificial Sequence
  Description of Artificial Sequence: Synthetic oligonucleotide
ucccagcauuauuugcaaa

SEQ ID NO: 493436 - RNA, 19 nt, Artificial Sequence
  Description of Artificial Sequence: Synthetic oligonucleotide
cagugcagaucgacaugag

SEQ ID NO: 493437 - RNA, 19 nt, Artificial Sequence
  Description of Artificial Sequence: Synthetic oligonucleotide
gcagaucgacaugagauga

SEQ ID NO: 493438 - RNA, 19 nt, Artificial Sequence
  Description of Artificial Sequence: Synthetic oligonucleotide
gggcgaaauacccaccuaa

SEQ ID NO: 493439 - RNA, 19 nt, Artificial Sequence
  Description of Artificial Sequence: Synthetic oligonucleotide
cuucgaggucucaugacgu

SEQ ID NO: 493440 - RNA, 19 nt, Artificial Sequence
  Description of Artificial Sequence: Synthetic oligonucleotide
cacgcagcggcaccaacca

SEQ ID NO: 493441 - RNA, 19 nt, Artificial Sequence
  Description of Artificial Sequence: Synthetic oligonucleotide
gccuaguguauggauuggg

SEQ ID NO: 493442 - RNA, 19 nt, Artificial Sequence
  Description of Artificial Sequence: Synthetic oligonucleotide
uaaaccagucguggugaua

SEQ ID NO: 493443 - RNA, 19 nt, Artificial Sequence
  Description of Artificial Sequence: Synthetic oligonucleotide
guauggauuggggaaggcu

SEQ ID NO: 493444 - RNA, 19 nt, Artificial Sequence
  Description of Artificial Sequence: Synthetic oligonucleotide
acauacccgagaacugcca

SEQ ID NO: 493445 - RNA, 19 nt, Artificial Sequence
  Description of Artificial Sequence: Synthetic oligonucleotide
gcuaagggaggaucacuuc

SEQ ID NO: 493446 - RNA, 19 nt, Artificial Sequence
  Description of Artificial Sequence: Synthetic oligonucleotide
  modified_base (9)..(9): a, c, u, g, unknown or other
gucuucuunagggcgaaau

SEQ ID NO: 493447 - RNA, 19 nt, Artificial Sequence
  Description of Artificial Sequence: Synthetic oligonucleotide
accagucguggugauagua

SEQ ID NO: 493448 - RNA, 19 nt, Artificial Sequence
  Description of Artificial Sequence: Synthetic oligonucleotide
cagaucgacaugagaugaa

SEQ ID NO: 493449 - RNA, 19 nt, Artificial Sequence
  Description of Artificial Sequence: Synthetic oligonucleotide
uaauggccgagggcuuucu

SEQ ID NO: 493450 - RNA, 19 nt, Artificial Sequence
  Description of Artificial Sequence: Synthetic oligonucleotide
ccaccuaauacuccugaga

SEQ ID NO: 493451 - RNA, 19 nt, Artificial Sequence
  Description of Artificial Sequence: Synthetic oligonucleotide
guuugucauaguaggaauu

SEQ ID NO: 493452 - RNA, 19 nt, Artificial Sequence
  Description of Artificial Sequence: Synthetic oligonucleotide
agggcgaaauacccaccua

SEQ ID NO: 493453 - RNA, 19 nt, Artificial Sequence
  Description of Artificial Sequence: Synthetic oligonucleotide
ggacuugcgucgacgacac

SEQ ID NO: 493454 - RNA, 19 nt, Artificial Sequence
  Description of Artificial Sequence: Synthetic oligonucleotide
gugcuaggcacaacugcca

SEQ ID NO: 493455 - RNA, 19 nt, Artificial Sequence
  Description of Artificial Sequence: Synthetic oligonucleotide
guuguaugagugaauucuu

SEQ ID NO: 493456 - RNA, 19 nt, Artificial Sequence
  Description of Artificial Sequence: Synthetic oligonucleotide
cgaggucucaugacgucag

SEQ ID NO: 493457 - RNA, 19 nt, Artificial Sequence
  Description of Artificial Sequence: Synthetic oligonucleotide
auaugacggaggauaucuu

SEQ ID NO: 493458 - RNA, 19 nt, Artificial Sequence
  Description of Artificial Sequence: Synthetic oligonucleotide
cuugguggacuugcgucga

SEQ ID NO: 493459 - RNA, 19 nt, Artificial Sequence
  Description of Artificial Sequence: Synthetic oligonucleotide
gcgucgacgacaccaggca

SEQ ID NO: 493460 - RNA, 19 nt, Artificial Sequence
  Description of Artificial Sequence: Synthetic oligonucleotide
accucgcaccacuccuuga

SEQ ID NO: 493461 - RNA, 19 nt, Artificial Sequence
  Description of Artificial Sequence: Synthetic oligonucleotide
gaggcgcccauugugaguu

SEQ ID NO: 493462 - RNA, 19 nt, Artificial Sequence
  Description of Artificial Sequence: Synthetic oligonucleotide
agucggaugugugcuucau

SEQ ID NO: 493463 - RNA, 19 nt, Artificial Sequence
  Description of Artificial Sequence: Synthetic oligonucleotide
cccaaccucgcaccacucc

SEQ ID NO: 493464 - RNA, 19 nt, Artificial Sequence
  Description of Artificial Sequence: Synthetic oligonucleotide
cacggcaauccccacaauu

SEQ ID NO: 493465 - RNA, 19 nt, Artificial Sequence
  Description of Artificial Sequence: Synthetic oligonucleotide
cacaccaccuaagcacgca

SEQ ID NO: 493466 - RNA, 19 nt, Artificial Sequence
  Description of Artificial Sequence: Synthetic oligonucleotide
gucggaugugugcuucaua

SEQ ID NO: 493467 - RNA, 19 nt, Artificial Sequence
  Description of Artificial Sequence: Synthetic oligonucleotide
gacuugcgucgacgacacc

SEQ ID NO: 493468 - RNA, 19 nt, Artificial Sequence
  Description of Artificial Sequence: Synthetic oligonucleotide
gaaguaccucacuccuuuu

SEQ ID NO: 493469 - RNA, 19 nt, Artificial Sequence
  Description of Artificial Sequence: Synthetic oligonucleotide
gaguuacaaggcacugccu

SEQ ID NO: 493470 - RNA, 19 nt, Artificial Sequence
  Description of Artificial Sequence: Synthetic oligonucleotide
aagcacgcagcggcaccaa

SEQ ID NO: 493471 - RNA, 19 nt, Artificial Sequence
  Description of Artificial Sequence: Synthetic oligonucleotide
gccuucccuaccaaaggca

SEQ ID NO: 493472 - RNA, 19 nt, Artificial Sequence
  Description of Artificial Sequence: Synthetic oligonucleotide
gucgacgacaccaggcaau

SEQ ID NO: 493473 - RNA, 19 nt, Artificial Sequence
  Description of Artificial Sequence: Synthetic oligonucleotide
ggacugagaacgugucacu

SEQ ID NO: 493474 - RNA, 19 nt, Artificial Sequence
  Description of Artificial Sequence: Synthetic oligonucleotide
guaggacgaguccuucauu

SEQ ID NO: 493475 - RNA, 19 nt, Artificial Sequence
  Description of Artificial Sequence: Synthetic oligonucleotide
gccucccguaaguucaaaa

SEQ ID NO: 493476 - RNA, 19 nt, Artificial Sequence
  Description of Artificial Sequence: Synthetic oligonucleotide
ucgcuccaauggccaugcu

SEQ ID NO: 493477 - RNA, 19 nt, Artificial Sequence
  Description of Artificial Sequence: Synthetic oligonucleotide
ccauaugacggaggauauc

SEQ ID NO: 493478 - RNA, 19 nt, Artificial Sequence
  Description of Artificial Sequence: Synthetic oligonucleotide
cuucgagaacaggauacuu

SEQ ID NO: 493479 - RNA, 19 nt, Artificial Sequence
  Description of Artificial Sequence: Synthetic oligonucleotide
ggaagauaucuaccacaau

SEQ ID NO: 493480 - RNA, 19 nt, Artificial Sequence
  Description of Artificial Sequence: Synthetic oligonucleotide
ggcgcccauugugaguuac

SEQ ID NO: 493481 - RNA, 19 nt, Artificial Sequence
  Description of Artificial Sequence: Synthetic oligonucleotide
cagugguguguaugcacau

SEQ ID NO: 493482 - RNA, 19 nt, Artificial Sequence
  Description of Artificial Sequence: Synthetic oligonucleotide
ccaaccucgcaccacuccu

SEQ ID NO: 493483 - RNA, 19 nt, Artificial Sequence
  Description of Artificial Sequence: Synthetic oligonucleotide
ccuucccuaccaaaggcau

SEQ ID NO: 493484 - RNA, 19 nt, Artificial Sequence
  Description of Artificial Sequence: Synthetic oligonucleotide
cccauuuagucggaugugu

SEQ ID NO: 493485 - RNA, 19 nt, Artificial Sequence
  Description of Artificial Sequence: Synthetic oligonucleotide
caaccucgcaccacuccuu

SEQ ID NO: 493486 - RNA, 19 nt, Artificial Sequence
  Description of Artificial Sequence: Synthetic oligonucleotide
gcuuaacuauacguuucau

SEQ ID NO: 493487 - RNA, 19 nt, Artificial Sequence
  Description of Artificial Sequence: Synthetic oligonucleotide
agccucccguaaguucaaa

SEQ ID NO: 493488 - RNA, 19 nt, Artificial Sequence
  Description of Artificial Sequence: Synthetic oligonucleotide
ggacggucaggaauaucau

SEQ ID NO: 493489 - RNA, 19 nt, Artificial Sequence
  Description of Artificial Sequence: Synthetic oligonucleotide
gcgcccauugugaguuaca

SEQ ID NO: 493490 - RNA, 19 nt, Artificial Sequence
  Description of Artificial Sequence: Synthetic oligonucleotide
cgucgacgacaccaggcaa

SEQ ID NO: 493491 - RNA, 19 nt, Artificial Sequence
  Description of Artificial Sequence: Synthetic oligonucleotide
cacugguguugagccuagu

SEQ ID NO: 493492 - RNA, 19 nt, Artificial Sequence
  Description of Artificial Sequence: Synthetic oligonucleotide
uguauaauggcagucaggg

SEQ ID NO: 493493 - RNA, 19 nt, Artificial Sequence
  Description of Artificial Sequence: Synthetic oligonucleotide
ucuuuaaugagggucaugg

SEQ ID NO: 493494 - RNA, 19 nt, Artificial Sequence
  Description of Artificial Sequence: Synthetic oligonucleotide
ugagugcugagcaaaaccg

SEQ ID NO: 493495 - RNA, 19 nt, Artificial Sequence
  Description of Artificial Sequence: Synthetic oligonucleotide
gauaacuuccucuuucgag

SEQ ID NO: 493496 - RNA, 19 nt, Artificial Sequence
  Description of Artificial Sequence: Synthetic oligonucleotide
uuuaugaccccacacugcc

SEQ ID NO: 493497 - RNA, 19 nt, Artificial Sequence
  Description of Artificial Sequence: Synthetic oligonucleotide
uuuacgagccaucuuucgg

SEQ ID NO: 493498 - RNA, 19 nt, Artificial Sequence
  Description of Artificial Sequence: Synthetic oligonucleotide
ucuugcgacgcacagagca

SEQ ID NO: 493499 - RNA, 19 nt, Artificial Sequence
  Description of Artificial Sequence: Synthetic oligonucleotide
auaguaucaucaaaguuac

SEQ ID NO: 493500 - RNA, 19 nt, Artificial Sequence
  Description of Artificial Sequence: Synthetic oligonucleotide
uccucuuucgagaaggggc

SEQ ID NO: 493501 - RNA, 19 nt, Artificial Sequence
  Description of Artificial Sequence: Synthetic oligonucleotide
auaaagcuugcugaggggc

SEQ ID NO: 493502 - RNA, 19 nt, Artificial Sequence
  Description of Artificial Sequence: Synthetic oligonucleotide
augggaauaggccuggauc

SEQ ID NO: 493503 - RNA, 19 nt, Artificial Sequence
  Description of Artificial Sequence: Synthetic oligonucleotide
cuuaguacuuggcugagag

SEQ ID NO: 493504 - RNA, 19 nt, Artificial Sequence
  Description of Artificial Sequence: Synthetic oligonucleotide
gaagccuugacugguaugg

SEQ ID NO: 493505 - RNA, 19 nt, Artificial Sequence
  Description of Artificial Sequence: Synthetic oligonucleotide
gaccccgacagccagaggg

SEQ ID NO: 493506 - RNA, 19 nt, Artificial Sequence
  Description of Artificial Sequence: Synthetic oligonucleotide
gauggcaggaccuuagcug

SEQ ID NO: 493507 - RNA, 19 nt, Artificial Sequence
  Description of Artificial Sequence: Synthetic oligonucleotide
ugggaauaggccuggaucc

SEQ ID NO: 493508 - RNA, 19 nt, Artificial Sequence
  Description of Artificial Sequence: Synthetic oligonucleotide
ugggaaguacacaguaugg

SEQ ID NO: 493509 - RNA, 19 nt, Artificial Sequence
  Description of Artificial Sequence: Synthetic oligonucleotide
uccaaaugugcaaaacgcc

SEQ ID NO: 493510 - RNA, 19 nt, Artificial Sequence
  Description of Artificial Sequence: Synthetic oligonucleotide
aguacgucaaaguccuugg

SEQ ID NO: 493511 - RNA, 19 nt, Artificial Sequence
  Description of Artificial Sequence: Synthetic oligonucleotide
uugucuuaguacuuggcug

SEQ ID NO: 493512 - RNA, 19 nt, Artificial Sequence
  Description of Artificial Sequence: Synthetic oligonucleotide
cuucuugcgacgcacagag

SEQ ID NO: 493513 - RNA, 19 nt, Artificial Sequence
  Description of Artificial Sequence: Synthetic oligonucleotide
ucuccuuuacgagagcugg

SEQ ID NO: 493514 - RNA, 19 nt, Artificial Sequence
  Description of Artificial Sequence: Synthetic oligonucleotide
uuuuguuacucuccuccag

SEQ ID NO: 493515 - RNA, 19 nt, Artificial Sequence
  Description of Artificial Sequence: Synthetic oligonucleotide
ugucuuaguacuuggcuga

SEQ ID NO: 493516 - RNA, 19 nt, Artificial Sequence
  Description of Artificial Sequence: Synthetic oligonucleotide
cuuagaacgagcagaggug

SEQ ID NO: 493517 - RNA, 19 nt, Artificial Sequence
  Description of Artificial Sequence: Synthetic oligonucleotide
uccauuaagccccaugcuc

SEQ ID NO: 493518 - RNA, 19 nt, Artificial Sequence
  Description of Artificial Sequence: Synthetic oligonucleotide
uuacacucagcuucucagg

SEQ ID NO: 493519 - RNA, 19 nt, Artificial Sequence
  Description of Artificial Sequence: Synthetic oligonucleotide
gagguaauagccuggcuac

SEQ ID NO: 493520 - RNA, 19 nt, Artificial Sequence
  Description of Artificial Sequence: Synthetic oligonucleotide
uacauacaaccaaauagaa

SEQ ID NO: 493521 - RNA, 19 nt, Artificial Sequence
  Description of Artificial Sequence: Synthetic oligonucleotide
agugguuacauacaaccaa

SEQ ID NO: 493522 - RNA, 19 nt, Artificial Sequence
  Description of Artificial Sequence: Synthetic oligonucleotide
gguaggccugcuuagaacg

SEQ ID NO: 493523 - RNA, 19 nt, Artificial Sequence
  Description of Artificial Sequence: Synthetic oligonucleotide
uccguuugaaagugguagg

SEQ ID NO: 493524 - RNA, 19 nt, Artificial Sequence
  Description of Artificial Sequence: Synthetic oligonucleotide
caguucagccacuaguacg

SEQ ID NO: 493525 - RNA, 19 nt, Artificial Sequence
  Description of Artificial Sequence: Synthetic oligonucleotide
aaugaggggaaccccgaca

SEQ ID NO: 493526 - RNA, 19 nt, Artificial Sequence
  Description of Artificial Sequence: Synthetic oligonucleotide
auuuaugaccccacacugc

SEQ ID NO: 493527 - RNA, 19 nt, Artificial Sequence
  Description of Artificial Sequence: Synthetic oligonucleotide
uggauuuaugaccccacac

SEQ ID NO: 493528 - RNA, 19 nt, Artificial Sequence
  Description of Artificial Sequence: Synthetic oligonucleotide
uguuccauuaagccccaug

SEQ ID NO: 493529 - RNA, 19 nt, Artificial Sequence
  Description of Artificial Sequence: Synthetic oligonucleotide
gacucaggggaucagauaa

SEQ ID NO: 493530 - RNA, 19 nt, Artificial Sequence
  Description of Artificial Sequence: Synthetic oligonucleotide
cuagcauggagcugagugc

SEQ ID NO: 493531 - RNA, 19 nt, Artificial Sequence
  Description of Artificial Sequence: Synthetic oligonucleotide
augaggggaaccccgacag

SEQ ID NO: 493532 - RNA, 19 nt, Artificial Sequence
  Description of Artificial Sequence: Synthetic oligonucleotide
acuaguacgucaaaguccu

SEQ ID NO: 493533 - RNA, 19 nt, Artificial Sequence
  Description of Artificial Sequence: Synthetic oligonucleotide
uaaagcuugcugaggggcc

SEQ ID NO: 493534 - RNA, 19 nt, Artificial Sequence
  Description of Artificial Sequence: Synthetic oligonucleotide
uuacgagccaucuuucggu

SEQ ID NO: 493535 - RNA, 19 nt, Artificial Sequence
  Description of Artificial Sequence: Synthetic oligonucleotide
aaccgguccagccggcggc

SEQ ID NO: 493536 - RNA, 19 nt, Artificial Sequence
  Description of Artificial Sequence: Synthetic oligonucleotide
uggacgacuuggcuggccg

SEQ ID NO: 493537 - RNA, 19 nt, Artificial Sequence
  Description of Artificial Sequence: Synthetic oligonucleotide
cacgaaaaggcagagguug

SEQ ID NO: 493538 - RNA, 19 nt, Artificial Sequence
  Description of Artificial Sequence: Synthetic oligonucleotide
cuuuacgagccaucuuucg

SEQ ID NO: 493539 - RNA, 19 nt, Artificial Sequence
  Description of Artificial Sequence: Synthetic oligonucleotide
guccguuugaaagugguag

SEQ ID NO: 493540 - RNA, 19 nt, Artificial Sequence
  Description of Artificial Sequence: Synthetic oligonucleotide
aucagguguccccuccucc

SEQ ID NO: 493541 - RNA, 19 nt, Artificial Sequence
  Description of Artificial Sequence: Synthetic oligonucleotide
cauaaagcuugcugagggg

SEQ ID NO: 493542 - RNA, 19 nt, Artificial Sequence
  Description of Artificial Sequence: Synthetic oligonucleotide
cacucagcuucucaggucc

SEQ ID NO: 493543 - RNA, 19 nt, Artificial Sequence
  Description of Artificial Sequence: Synthetic oligonucleotide
caguguagagcacuucucc

SEQ ID NO: 493544 - RNA, 19 nt, Artificial Sequence
  Description of Artificial Sequence: Synthetic oligonucleotide
uaguacgucaaaguccuug

SEQ ID NO: 493545 - RNA, 19 nt, Artificial Sequence
  Description of Artificial Sequence: Synthetic oligonucleotide
ucacccgggauuaacucca

SEQ ID NO: 493546 - RNA, 19 nt, Artificial Sequence
  Description of Artificial Sequence: Synthetic oligonucleotide
ucuuucgguggguuuuagg

SEQ ID NO: 493547 - RNA, 19 nt, Artificial Sequence
  Description of Artificial Sequence: Synthetic oligonucleotide
gacaagaugggauggaggu

SEQ ID NO: 493548 - RNA, 19 nt, Artificial Sequence
  Description of Artificial Sequence: Synthetic oligonucleotide
cugcuuagaacgagcagag

SEQ ID NO: 493549 - RNA, 19 nt, Artificial Sequence
  Description of Artificial Sequence: Synthetic oligonucleotide
uaauagccuggcuaccgcc

SEQ ID NO: 493550 - RNA, 19 nt, Artificial Sequence
  Description of Artificial Sequence: Synthetic oligonucleotide
gaggcaguuggauggcagg

SEQ ID NO: 493551 - RNA, 19 nt, Artificial Sequence
  Description of Artificial Sequence: Synthetic oligonucleotide
augaaugaggggaaccccg

SEQ ID NO: 493552 - RNA, 19 nt, Artificial Sequence
  Description of Artificial Sequence: Synthetic oligonucleotide
gagacucuccuuuacgaga

SEQ ID NO: 493553 - RNA, 19 nt, Artificial Sequence
  Description of Artificial Sequence: Synthetic oligonucleotide
gaugaaugaggggaacccc

SEQ ID NO: 493554 - RNA, 19 nt, Artificial Sequence
  Description of Artificial Sequence: Synthetic oligonucleotide
aggaccuuagcuggguggc

SEQ ID NO: 493555 - RNA, 19 nt, Artificial Sequence
  Description of Artificial Sequence: Synthetic oligonucleotide
cacuacauggcauuucuga

SEQ ID NO: 493556 - RNA, 19 nt, Artificial Sequence
  Description of Artificial Sequence: Synthetic oligonucleotide
guacagaucuucuuggucu

SEQ ID NO: 493557 - RNA, 19 nt, Artificial Sequence
  Description of Artificial Sequence: Synthetic oligonucleotide
uucaccaccuggcugcagu

SEQ ID NO: 493558 - RNA, 19 nt, Artificial Sequence
  Description of Artificial Sequence: Synthetic oligonucleotide
cugagagaccccgacagcc

SEQ ID NO: 493559 - RNA, 19 nt, Artificial Sequence
  Description of Artificial Sequence: Synthetic oligonucleotide
guacuuggcugagagaccc

SEQ ID NO: 493560 - RNA, 19 nt, Artificial Sequence
  Description of Artificial Sequence: Synthetic oligonucleotide
uucuuuucguccagggcuc

SEQ ID NO: 493561 - RNA, 19 nt, Artificial Sequence
  Description of Artificial Sequence: Synthetic oligonucleotide
guggugagguaauagccug

SEQ ID NO: 493562 - RNA, 19 nt, Artificial Sequence
  Description of Artificial Sequence: Synthetic oligonucleotide
cucacccgggauuaacucc

SEQ ID NO: 493563 - RNA, 19 nt, Artificial Sequence
  Description of Artificial Sequence: Synthetic oligonucleotide
uacgagagcuggcuuucag

SEQ ID NO: 493564 - RNA, 19 nt, Artificial Sequence
  Description of Artificial Sequence: Synthetic oligonucleotide
aguccuugguccugccugg

SEQ ID NO: 493565 - RNA, 19 nt, Artificial Sequence
  Description of Artificial Sequence: Synthetic oligonucleotide
aaacgccuguggccuaggg

SEQ ID NO: 493566 - RNA, 19 nt, Artificial Sequence
  Description of Artificial Sequence: Synthetic oligonucleotide
cucgcuggaggccugggcc

SEQ ID NO: 493567 - RNA, 19 nt, Artificial Sequence
  Description of Artificial Sequence: Synthetic oligonucleotide
ucucguuaauggcuuugac

SEQ ID NO: 493568 - RNA, 19 nt, Artificial Sequence
  Description of Artificial Sequence: Synthetic oligonucleotide
aaaaccgguccagccggcg

SEQ ID NO: 493569 - RNA, 19 nt, Artificial Sequence
  Description of Artificial Sequence: Synthetic oligonucleotide
uuaccagccggcuuccaaa

SEQ ID NO: 493570 - RNA, 19 nt, Artificial Sequence
  Description of Artificial Sequence: Synthetic oligonucleotide
gggaaguacacaguauggg

SEQ ID NO: 493571 - RNA, 19 nt, Artificial Sequence
  Description of Artificial Sequence: Synthetic oligonucleotide
uucagccacuaguacguca

SEQ ID NO: 493572 - RNA, 19 nt, Artificial Sequence
  Description of Artificial Sequence: Synthetic oligonucleotide
uuucucguuaauggcuuug

SEQ ID NO: 493573 - RNA, 19 nt, Artificial Sequence
  Description of Artificial Sequence: Synthetic oligonucleotide
ugguuacauacaaccaaau

SEQ ID NO: 493574 - RNA, 19 nt, Artificial Sequence
  Description of Artificial Sequence: Synthetic oligonucleotide
agacucuccuuuacgagag

SEQ ID NO: 493575 - RNA, 19 nt, Artificial Sequence
  Description of Artificial Sequence: Synthetic oligonucleotide
uggaccuggcuucuugcga

SEQ ID NO: 493576 - RNA, 19 nt, Artificial Sequence
  Description of Artificial Sequence: Synthetic oligonucleotide
ucacuacauggcauuucug

SEQ ID NO: 493577 - RNA, 19 nt, Artificial Sequence
  Description of Artificial Sequence: Synthetic oligonucleotide
ggcggcuaaacacauagca

SEQ ID NO: 493578 - RNA, 19 nt, Artificial Sequence
  Description of Artificial Sequence: Synthetic oligonucleotide
agaacgagcagagguguug

SEQ ID NO: 493579 - RNA, 19 nt, Artificial Sequence
  Description of Artificial Sequence: Synthetic oligonucleotide
cuugcgacgcacagagcag

SEQ ID NO: 493580 - RNA, 19 nt, Artificial Sequence
  Description of Artificial Sequence: Synthetic oligonucleotide
uacgagccaucuuucggug

SEQ ID NO: 493581 - RNA, 19 nt, Artificial Sequence
  Description of Artificial Sequence: Synthetic oligonucleotide
gcagagguuguccuucugg

SEQ ID NO: 493582 - RNA, 19 nt, Artificial Sequence
  Description of Artificial Sequence: Synthetic oligonucleotide
uugcgacgcacagagcagg

SEQ ID NO: 493583 - RNA, 19 nt, Artificial Sequence
  Description of Artificial Sequence: Synthetic oligonucleotide
uuuacgagagcuggcuuuc

SEQ ID NO: 493584 - RNA, 19 nt, Artificial Sequence
  Description of Artificial Sequence: Synthetic oligonucleotide
ucgguggguuuuaggaggc

SEQ ID NO: 493585 - RNA, 19 nt, Artificial Sequence
  Description of Artificial Sequence: Synthetic oligonucleotide
aguggugagguaauagccu

SEQ ID NO: 493586 - RNA, 19 nt, Artificial Sequence
  Description of Artificial Sequence: Synthetic oligonucleotide
uagcaucccgggcuuacca

SEQ ID NO: 493587 - RNA, 19 nt, Artificial Sequence
  Description of Artificial Sequence: Synthetic oligonucleotide
ggaucagauaaggaggggc

SEQ ID NO: 493588 - RNA, 19 nt, Artificial Sequence
  Description of Artificial Sequence: Synthetic oligonucleotide
agguaauagccuggcuacc

SEQ ID NO: 493589 - RNA, 19 nt, Artificial Sequence
  Description of Artificial Sequence: Synthetic oligonucleotide
agcugguucuuuucgucca

SEQ ID NO: 493590 - RNA, 19 nt, Artificial Sequence
  Description of Artificial Sequence: Synthetic oligonucleotide
cuuccuugccuuuggacga

SEQ ID NO: 493591 - RNA, 19 nt, Artificial Sequence
  Description of Artificial Sequence: Synthetic oligonucleotide
uucucguuaauggcuuuga

SEQ ID NO: 493592 - RNA, 19 nt, Artificial Sequence
  Description of Artificial Sequence: Synthetic oligonucleotide
gaggugccguucuagcaug

SEQ ID NO: 493593 - RNA, 19 nt, Artificial Sequence
  Description of Artificial Sequence: Synthetic oligonucleotide
aggucaacaggcguguaca

SEQ ID NO: 493594 - RNA, 19 nt, Artificial Sequence
  Description of Artificial Sequence: Synthetic oligonucleotide
auagcaucccgggcuuacc

SEQ ID NO: 493595 - RNA, 19 nt, Artificial Sequence
  Description of Artificial Sequence: Synthetic oligonucleotide
ggaugaaugaggggaaccc

SEQ ID NO: 493596 - RNA, 19 nt, Artificial Sequence
  Description of Artificial Sequence: Synthetic oligonucleotide
ggcuaaacacauagcaucc

SEQ ID NO: 493597 - RNA, 19 nt, Artificial Sequence
  Description of Artificial Sequence: Synthetic oligonucleotide
acgagccaucuuucggugg

SEQ ID NO: 493598 - RNA, 19 nt, Artificial Sequence
  Description of Artificial Sequence: Synthetic oligonucleotide
uggguaggccugcuuagaa

SEQ ID NO: 493599 - RNA, 19 nt, Artificial Sequence
  Description of Artificial Sequence: Synthetic oligonucleotide
uuaugaccccacacugccu

SEQ ID NO: 493600 - RNA, 19 nt, Artificial Sequence
  Description of Artificial Sequence: Synthetic oligonucleotide
acgagagcuggcuuucagu

SEQ ID NO: 493601 - RNA, 19 nt, Artificial Sequence
  Description of Artificial Sequence: Synthetic oligonucleotide
gcuuagaacgagcagaggu

SEQ ID NO: 493602 - RNA, 19 nt, Artificial Sequence
  Description of Artificial Sequence: Synthetic oligonucleotide
gccuguuaaggucaaacuc

SEQ ID NO: 493603 - RNA, 19 nt, Artificial Sequence
  Description of Artificial Sequence: Synthetic oligonucleotide
agugcccgaagauggacau

SEQ ID NO: 493604 - RNA, 19 nt, Artificial Sequence
  Description of Artificial Sequence: Synthetic oligonucleotide
ucuacaagcugggcccugc

SEQ ID NO: 493605 - RNA, 19 nt, Artificial Sequence
  Description of Artificial Sequence: Synthetic oligonucleotide
gcguguacagaucuucuug

SEQ ID NO: 493606 - RNA, 19 nt, Artificial Sequence
  Description of Artificial Sequence: Synthetic oligonucleotide
acagugcuuggccuugacu

SEQ ID NO: 493607 - RNA, 19 nt, Artificial Sequence
  Description of Artificial Sequence: Synthetic oligonucleotide
aggggcguucaagagcugg

SEQ ID NO: 493608 - RNA, 19 nt, Artificial Sequence
  Description of Artificial Sequence: Synthetic oligonucleotide
ccucuuucgagaaggggcc

SEQ ID NO: 493609 - RNA, 19 nt, Artificial Sequence
  Description of Artificial Sequence: Synthetic oligonucleotide
ugcuuagaacgagcagagg

SEQ ID NO: 493610 - RNA, 19 nt, Artificial Sequence
  Description of Artificial Sequence: Synthetic oligonucleotide
gaaugaggggaaccccgac

SEQ ID NO: 493611 - RNA, 19 nt, Artificial Sequence
  Description of Artificial Sequence: Synthetic oligonucleotide
cucguuaauggcuuugacu

SEQ ID NO: 493612 - RNA, 19 nt, Artificial Sequence
  Description of Artificial Sequence: Synthetic oligonucleotide
gggcauaaagcuugcugag

SEQ ID NO: 493613 - RNA, 19 nt, Artificial Sequence
  Description of Artificial Sequence: Synthetic oligonucleotide
ggauuuaugaccccacacu

SEQ ID NO: 493614 - RNA, 19 nt, Artificial Sequence
  Description of Artificial Sequence: Synthetic oligonucleotide
gaccuggcuucuugcgacg

SEQ ID NO: 493615 - RNA, 19 nt, Artificial Sequence
  Description of Artificial Sequence: Synthetic oligonucleotide
gguuguauaauggcaguca

SEQ ID NO: 493616 - RNA, 19 nt, Artificial Sequence
  Description of Artificial Sequence: Synthetic oligonucleotide
uguuaaggucaaacucuuu

SEQ ID NO: 493617 - RNA, 19 nt, Artificial Sequence
  Description of Artificial Sequence: Synthetic oligonucleotide
gcacuuucucguuaauggc

SEQ ID NO: 493618 - RNA, 19 nt, Artificial Sequence
  Description of Artificial Sequence: Synthetic oligonucleotide
cuuucgagaaggggccucc

SEQ ID NO: 493619 - RNA, 19 nt, Artificial Sequence
  Description of Artificial Sequence: Synthetic oligonucleotide
aaaacgccuguggccuagg

SEQ ID NO: 493620 - RNA, 19 nt, Artificial Sequence
  Description of Artificial Sequence: Synthetic oligonucleotide
cuccuuuacgagagcuggc

SEQ ID NO: 493621 - RNA, 19 nt, Artificial Sequence
  Description of Artificial Sequence: Synthetic oligonucleotide
caggucaacaggcguguac

SEQ ID NO: 493622 - RNA, 19 nt, Artificial Sequence
  Description of Artificial Sequence: Synthetic oligonucleotide
ccggguuguauaauggcag

SEQ ID NO: 493623 - RNA, 19 nt, Artificial Sequence
  Description of Artificial Sequence: Synthetic oligonucleotide
ggcauaaagcuugcugagg

SEQ ID NO: 493624 - RNA, 19 nt, Artificial Sequence
  Description of Artificial Sequence: Synthetic oligonucleotide
uuccccgguucucuagcug

SEQ ID NO: 493625 - RNA, 19 nt, Artificial Sequence
  Description of Artificial Sequence: Synthetic oligonucleotide
gaaccccgacaguccaggg

SEQ ID NO: 493626 - RNA, 19 nt, Artificial Sequence
  Description of Artificial Sequence: Synthetic oligonucleotide
gcaguuggauggcaggacc

SEQ ID NO: 493627 - RNA, 19 nt, Artificial Sequence
  Description of Artificial Sequence: Synthetic oligonucleotide
acaggcacgaaaaggcaga

SEQ ID NO: 493628 - RNA, 19 nt, Artificial Sequence
  Description of Artificial Sequence: Synthetic oligonucleotide
cuuucggcccggugacugg

SEQ ID NO: 493629 - RNA, 19 nt, Artificial Sequence
  Description of Artificial Sequence: Synthetic oligonucleotide
guggccagccauuccccgg

SEQ ID NO: 493630 - RNA, 19 nt, Artificial Sequence
  Description of Artificial Sequence: Synthetic oligonucleotide
gacgcacagagcagguccc

SEQ ID NO: 493631 - RNA, 19 nt, Artificial Sequence
  Description of Artificial Sequence: Synthetic oligonucleotide
ucgcuggaggccugggccc

SEQ ID NO: 493632 - RNA, 19 nt, Artificial Sequence
  Description of Artificial Sequence: Synthetic oligonucleotide
ccggcggcuaaacacauag

SEQ ID NO: 493633 - RNA, 19 nt, Artificial Sequence
  Description of Artificial Sequence: Synthetic oligonucleotide
uccguugcagugggcaggc

SEQ ID NO: 493634 - RNA, 19 nt, Artificial Sequence
  Description of Artificial Sequence: Synthetic oligonucleotide
accuuagcuggguggccag

SEQ ID NO: 493635 - RNA, 19 nt, Artificial Sequence
  Description of Artificial Sequence: Synthetic oligonucleotide
ccauuaagccccaugcuca

SEQ ID NO: 493636 - RNA, 19 nt, Artificial Sequence
  Description of Artificial Sequence: Synthetic oligonucleotide
cacccugacuccaugucca

SEQ ID NO: 493637 - RNA, 19 nt, Artificial Sequence
  Description of Artificial Sequence: Synthetic oligonucleotide
uggccguuggaagguggcg

SEQ ID NO: 493638 - RNA, 19 nt, Artificial Sequence
  Description of Artificial Sequence: Synthetic oligonucleotide
ugcgacgcacagagcaggu

SEQ ID NO: 493639 - RNA, 19 nt, Artificial Sequence
  Description of Artificial Sequence: Synthetic oligonucleotide
cuccguugcagugggcagg

SEQ ID NO: 493640 - RNA, 19 nt, Artificial Sequence
  Description of Artificial Sequence: Synthetic oligonucleotide
gacuggccggcaguaagug

SEQ ID NO: 493641 - RNA, 19 nt, Artificial Sequence
  Description of Artificial Sequence: Synthetic oligonucleotide
uggcuaccgcccaugcacu

SEQ ID NO: 493642 - RNA, 19 nt, Artificial Sequence
  Description of Artificial Sequence: Synthetic oligonucleotide
ggugagguaauagccuggc

SEQ ID NO: 493643 - RNA, 19 nt, Artificial Sequence
  Description of Artificial Sequence: Synthetic oligonucleotide
auuccccgguucucuagcu

SEQ ID NO: 493644 - RNA, 19 nt, Artificial Sequence
  Description of Artificial Sequence: Synthetic oligonucleotide
guggggcccgggcauaaag

SEQ ID NO: 493645 - RNA, 19 nt, Artificial Sequence
  Description of Artificial Sequence: Synthetic oligonucleotide
gggauuaacuccauguucu

SEQ ID NO: 493646 - RNA, 19 nt, Artificial Sequence
  Description of Artificial Sequence: Synthetic oligonucleotide
uggggacguuuuccagggg

SEQ ID NO: 493647 - RNA, 19 nt, Artificial Sequence
  Description of Artificial Sequence: Synthetic oligonucleotide
ccagccggcggcuaaacac

SEQ ID NO: 493648 - RNA, 19 nt, Artificial Sequence
  Description of Artificial Sequence: Synthetic oligonucleotide
ggaccuggcuucuugcgac

SEQ ID NO: 493649 - RNA, 19 nt, Artificial Sequence
  Description of Artificial Sequence: Synthetic oligonucleotide
caaaacgccuguggccuag

SEQ ID NO: 493650 - RNA, 19 nt, Artificial Sequence
  Description of Artificial Sequence: Synthetic oligonucleotide
cuggauuuaugaccccaca

SEQ ID NO: 493651 - RNA, 19 nt, Artificial Sequence
  Description of Artificial Sequence: Synthetic oligonucleotide
cuacaagcugggcccugcc

SEQ ID NO: 493652 - RNA, 19 nt, Artificial Sequence
  Description of Artificial Sequence: Synthetic oligonucleotide
ggucaacaggcguguacag

SEQ ID NO: 493653 - RNA, 19 nt, Artificial Sequence
  Description of Artificial Sequence: Synthetic oligonucleotide
gacucuccuuuacgagagc

SEQ ID NO: 493654 - RNA, 19 nt, Artificial Sequence
  Description of Artificial Sequence: Synthetic oligonucleotide
ggcugacaagaugggaugg

SEQ ID NO: 493655 - RNA, 19 nt, Artificial Sequence
  Description of Artificial Sequence: Synthetic oligonucleotide
ccguuugaaagugguaggg

SEQ ID NO: 493656 - RNA, 19 nt, Artificial Sequence
  Description of Artificial Sequence: Synthetic oligonucleotide
uucuugcgacgcacagagc

SEQ ID NO: 493657 - RNA, 19 nt, Artificial Sequence
  Description of Artificial Sequence: Synthetic oligonucleotide
gaauaggccuggaucccca

SEQ ID NO: 493658 - RNA, 19 nt, Artificial Sequence
  Description of Artificial Sequence: Synthetic oligonucleotide
ccugcuuagaacgagcaga

SEQ ID NO: 493659 - RNA, 19 nt, Artificial Sequence
  Description of Artificial Sequence: Synthetic oligonucleotide
acucaggggaucagauaag

SEQ ID NO: 493660 - RNA, 19 nt, Artificial Sequence
  Description of Artificial Sequence: Synthetic oligonucleotide
uaccagccggcuuccaaau

SEQ ID NO: 493661 - RNA, 19 nt, Artificial Sequence
  Description of Artificial Sequence: Synthetic oligonucleotide
ucggcccggugacuggagc

SEQ ID NO: 493662 - RNA, 19 nt, Artificial Sequence
  Description of Artificial Sequence: Synthetic oligonucleotide
gggaugaaugaggggaacc

SEQ ID NO: 493663 - RNA, 19 nt, Artificial Sequence
  Description of Artificial Sequence: Synthetic oligonucleotide
gguagcuagggacaaggcu

SEQ ID NO: 493664 - RNA, 19 nt, Artificial Sequence
  Description of Artificial Sequence: Synthetic oligonucleotide
aacgagcagagguguuguu

SEQ ID NO: 493665 - RNA, 19 nt, Artificial Sequence
  Description of Artificial Sequence: Synthetic oligonucleotide
uucagccccauaguaucau

SEQ ID NO: 493666 - RNA, 19 nt, Artificial Sequence
  Description of Artificial Sequence: Synthetic oligonucleotide
gaccuuagcuggguggcca

SEQ ID NO: 493667 - RNA, 19 nt, Artificial Sequence
  Description of Artificial Sequence: Synthetic oligonucleotide
gcuaaacacauagcauccc

SEQ ID NO: 493668 - RNA, 19 nt, Artificial Sequence
  Description of Artificial Sequence: Synthetic oligonucleotide
ggccggguuguauaauggc

SEQ ID NO: 493669 - RNA, 19 nt, Artificial Sequence
  Description of Artificial Sequence: Synthetic oligonucleotide
acgaaaaggcagagguugu

SEQ ID NO: 493670 - RNA, 19 nt, Artificial Sequence
  Description of Artificial Sequence: Synthetic oligonucleotide
ggcuucgggagacuggaca

SEQ ID NO: 493671 - RNA, 19 nt, Artificial Sequence
  Description of Artificial Sequence: Synthetic oligonucleotide
uuucggcccggugacugga

SEQ ID NO: 493672 - RNA, 19 nt, Artificial Sequence
  Description of Artificial Sequence: Synthetic oligonucleotide
cacaugugugagcugaggu

SEQ ID NO: 493673 - RNA, 19 nt, Artificial Sequence
  Description of Artificial Sequence: Synthetic oligonucleotide
ggggccggguuguauaaug

SEQ ID NO: 493674 - RNA, 19 nt, Artificial Sequence
  Description of Artificial Sequence: Synthetic oligonucleotide
cugacagugcuuggccuug

SEQ ID NO: 493675 - RNA, 19 nt, Artificial Sequence
  Description of Artificial Sequence: Synthetic oligonucleotide
cuuuacgagagcuggcuuu

SEQ ID NO: 493676 - RNA, 19 nt, Artificial Sequence
  Description of Artificial Sequence: Synthetic oligonucleotide
cgacgcacagagcaggucc

SEQ ID NO: 493677 - RNA, 19 nt, Artificial Sequence
  Description of Artificial Sequence: Synthetic oligonucleotide
cagugcccgaagauggaca

SEQ ID NO: 493678 - RNA, 19 nt, Artificial Sequence
  Description of Artificial Sequence: Synthetic oligonucleotide
ggaauaggccuggaucccc

SEQ ID NO: 493679 - RNA, 19 nt, Artificial Sequence
  Description of Artificial Sequence: Synthetic oligonucleotide
gggcuuaccagccggcuuc

SEQ ID NO: 493680 - RNA, 19 nt, Artificial Sequence
  Description of Artificial Sequence: Synthetic oligonucleotide
ccgggcauaaagcuugcug

SEQ ID NO: 493681 - RNA, 19 nt, Artificial Sequence
  Description of Artificial Sequence: Synthetic oligonucleotide
uuucgagaaggggccucca

SEQ ID NO: 493682 - RNA, 19 nt, Artificial Sequence
  Description of Artificial Sequence: Synthetic oligonucleotide
uuacgagagcuggcuuuca

SEQ ID NO: 493683 - RNA, 19 nt, Artificial Sequence
  Description of Artificial Sequence: Synthetic oligonucleotide
gggacguuuuccaggggag

SEQ ID NO: 493684 - RNA, 19 nt, Artificial Sequence
  Description of Artificial Sequence: Synthetic oligonucleotide
cgagccaucuuucgguggg

SEQ ID NO: 493685 - RNA, 19 nt, Artificial Sequence
  Description of Artificial Sequence: Synthetic oligonucleotide
cagccggcggcuaaacaca

SEQ ID NO: 493686 - RNA, 19 nt, Artificial Sequence
  Description of Artificial Sequence: Synthetic oligonucleotide
aucuuucgguggguuuuag

SEQ ID NO: 493687 - RNA, 19 nt, Artificial Sequence
  Description of Artificial Sequence: Synthetic oligonucleotide
gagccacccugacuccaug

SEQ ID NO: 493688 - RNA, 19 nt, Artificial Sequence
  Description of Artificial Sequence: Synthetic oligonucleotide
cuugggagacucuccuuua

SEQ ID NO: 493689 - RNA, 19 nt, Artificial Sequence
  Description of Artificial Sequence: Synthetic oligonucleotide
cgggcauaaagcuugcuga

SEQ ID NO: 493690 - RNA, 19 nt, Artificial Sequence
  Description of Artificial Sequence: Synthetic oligonucleotide
auggguaggccugcuuaga

SEQ ID NO: 493691 - RNA, 19 nt, Artificial Sequence
  Description of Artificial Sequence: Synthetic oligonucleotide
uggcggcuccguugcagug

SEQ ID NO: 493692 - RNA, 19 nt, Artificial Sequence
  Description of Artificial Sequence: Synthetic oligonucleotide
acccgggauuaacuccaug

SEQ ID NO: 493693 - RNA, 19 nt, Artificial Sequence
  Description of Artificial Sequence: Synthetic oligonucleotide
gggccggguuguauaaugg

SEQ ID NO: 493694 - RNA, 19 nt, Artificial Sequence
  Description of Artificial Sequence: Synthetic oligonucleotide
gcagugggcaggcacuuuc

SEQ ID NO: 493695 - RNA, 19 nt, Artificial Sequence
  Description of Artificial Sequence: Synthetic oligonucleotide
aguuggauggcaggaccuu

SEQ ID NO: 493696 - RNA, 19 nt, Artificial Sequence
  Description of Artificial Sequence: Synthetic oligonucleotide
gccugcuuagaacgagcag

SEQ ID NO: 493697 - RNA, 19 nt, Artificial Sequence
  Description of Artificial Sequence: Synthetic oligonucleotide
aggcguguacagaucuucu

SEQ ID NO: 493698 - RNA, 19 nt, Artificial Sequence
  Description of Artificial Sequence: Synthetic oligonucleotide
cgggauuaacuccauguuc

SEQ ID NO: 493699 - RNA, 19 nt, Artificial Sequence
  Description of Artificial Sequence: Synthetic oligonucleotide
cuguuaaggucaaacucuu

SEQ ID NO: 493700 - RNA, 19 nt, Artificial Sequence
  Description of Artificial Sequence: Synthetic oligonucleotide
gggaauaggccuggauccc

SEQ ID NO: 493701 - RNA, 19 nt, Artificial Sequence
  Description of Artificial Sequence: Synthetic oligonucleotide
cguuugaaagugguagggc

SEQ ID NO: 493702 - RNA, 19 nt, Artificial Sequence
  Description of Artificial Sequence: Synthetic oligonucleotide
gcugagagaccccgacagc

SEQ ID NO: 493703 - RNA, 19 nt, Artificial Sequence
  Description of Artificial Sequence: Synthetic oligonucleotide
gcaguaaguggccagguuu

SEQ ID NO: 493704 - RNA, 19 nt, Artificial Sequence
  Description of Artificial Sequence: Synthetic oligonucleotide
cuucgggagacuggacauc

SEQ ID NO: 493705 - RNA, 19 nt, Artificial Sequence
  Description of Artificial Sequence: Synthetic oligonucleotide
cguucuagcauggagcuga

SEQ ID NO: 493706 - RNA, 19 nt, Artificial Sequence
  Description of Artificial Sequence: Synthetic oligonucleotide
cuuggcugagagaccccga

SEQ ID NO: 493707 - RNA, 19 nt, Artificial Sequence
  Description of Artificial Sequence: Synthetic oligonucleotide
acgacuuggcuggccguug

SEQ ID NO: 493708 - RNA, 19 nt, Artificial Sequence
  Description of Artificial Sequence: Synthetic oligonucleotide
ggaggggcguucaagagcu

SEQ ID NO: 493709 - RNA, 19 nt, Artificial Sequence
  Description of Artificial Sequence: Synthetic oligonucleotide
aggugccguucuagcaugg

SEQ ID NO: 493710 - RNA, 19 nt, Artificial Sequence
  Description of Artificial Sequence: Synthetic oligonucleotide
agaccccgacagccagagg

SEQ ID NO: 493711 - RNA, 19 nt, Artificial Sequence
  Description of Artificial Sequence: Synthetic oligonucleotide
guaggccugcuuagaacga

SEQ ID NO: 493712 - RNA, 19 nt, Artificial Sequence
  Description of Artificial Sequence: Synthetic oligonucleotide
ggcggcuccguugcagugg

SEQ ID NO: 493713 - RNA, 19 nt, Artificial Sequence
  Description of Artificial Sequence: Synthetic oligonucleotide
uggccccacuguuccauua

SEQ ID NO: 493714 - RNA, 19 nt, Artificial Sequence
  Description of Artificial Sequence: Synthetic oligonucleotide
uucuagcauggagcugagu

SEQ ID NO: 493715 - RNA, 19 nt, Artificial Sequence
  Description of Artificial Sequence: Synthetic oligonucleotide
gccggcaguaaguggccag

SEQ ID NO: 493716 - RNA, 19 nt, Artificial Sequence
  Description of Artificial Sequence: Synthetic oligonucleotide
caguuggauggcaggaccu

SEQ ID NO: 493717 - RNA, 19 nt, Artificial Sequence
  Description of Artificial Sequence: Synthetic oligonucleotide
guacgucaaaguccuuggu

SEQ ID NO: 493718 - RNA, 19 nt, Artificial Sequence
  Description of Artificial Sequence: Synthetic oligonucleotide
ccucacccgggauuaacuc

SEQ ID NO: 493719 - RNA, 19 nt, Artificial Sequence
  Description of Artificial Sequence: Synthetic oligonucleotide
uggagcccucacccgggau

SEQ ID NO: 493720 - RNA, 19 nt, Artificial Sequence
  Description of Artificial Sequence: Synthetic oligonucleotide
gugagcugaggugccguuc

SEQ ID NO: 493721 - RNA, 19 nt, Artificial Sequence
  Description of Artificial Sequence: Synthetic oligonucleotide
gccguucuagcauggagcu

SEQ ID NO: 493722 - RNA, 19 nt, Artificial Sequence
  Description of Artificial Sequence: Synthetic oligonucleotide
uccuugccuuuggacgacu

SEQ ID NO: 493723 - RNA, 19 nt, Artificial Sequence
  Description of Artificial Sequence: Synthetic oligonucleotide
cguugcagugggcaggcac

SEQ ID NO: 493724 - RNA, 19 nt, Artificial Sequence
  Description of Artificial Sequence: Synthetic oligonucleotide
ggccuugacuggccggcag

SEQ ID NO: 493725 - RNA, 19 nt, Artificial Sequence
  Description of Artificial Sequence: Synthetic oligonucleotide
ucgggagacuggacaucuu

SEQ ID NO: 493726 - RNA, 19 nt, Artificial Sequence
  Description of Artificial Sequence: Synthetic oligonucleotide
gcugagugcugagcaaaac

SEQ ID NO: 493727 - RNA, 19 nt, Artificial Sequence
  Description of Artificial Sequence: Synthetic oligonucleotide
cccgggauuaacuccaugu

SEQ ID NO: 493728 - RNA, 19 nt, Artificial Sequence
  Description of Artificial Sequence: Synthetic oligonucleotide
gcuggccguuggaaggugg

SEQ ID NO: 493729 - RNA, 19 nt, Artificial Sequence
  Description of Artificial Sequence: Synthetic oligonucleotide
ggggaaccccgacagucca

SEQ ID NO: 493730 - RNA, 19 nt, Artificial Sequence
  Description of Artificial Sequence: Synthetic oligonucleotide
gcuaccgcccaugcacucc

SEQ ID NO: 493731 - RNA, 19 nt, Artificial Sequence
  Description of Artificial Sequence: Synthetic oligonucleotide
ggguagcuagggacaaggc

SEQ ID NO: 493732 - RNA, 19 nt, Artificial Sequence
  Description of Artificial Sequence: Synthetic oligonucleotide
gguggcgagcuugcugaag

SEQ ID NO: 493733 - RNA, 19 nt, Artificial Sequence
  Description of Artificial Sequence: Synthetic oligonucleotide
accccgacagccagagggu

SEQ ID NO: 493734 - RNA, 19 nt, Artificial Sequence
  Description of Artificial Sequence: Synthetic oligonucleotide
gagcccucacccgggauua

SEQ ID NO: 493735 - RNA, 19 nt, Artificial Sequence
  Description of Artificial Sequence: Synthetic oligonucleotide
ggccguggggacguuuucc

SEQ ID NO: 493736 - RNA, 19 nt, Artificial Sequence
  Description of Artificial Sequence: Synthetic oligonucleotide
gccggcuuccaaaugugca

SEQ ID NO: 493737 - RNA, 19 nt, Artificial Sequence
  Description of Artificial Sequence: Synthetic oligonucleotide
ccggcaguaaguggccagg

SEQ ID NO: 493738 - RNA, 19 nt, Artificial Sequence
  Description of Artificial Sequence: Synthetic oligonucleotide
gugagguaauagccuggcu

SEQ ID NO: 493739 - RNA, 19 nt, Artificial Sequence
  Description of Artificial Sequence: Synthetic oligonucleotide
cgguucucuagcugagaag

SEQ ID NO: 493740 - RNA, 19 nt, Artificial Sequence
  Description of Artificial Sequence: Synthetic oligonucleotide
ggccugcuuagaacgagca

SEQ ID NO: 493741 - RNA, 19 nt, Artificial Sequence
  Description of Artificial Sequence: Synthetic oligonucleotide
guucagccacuaguacguc

SEQ ID NO: 493742 - RNA, 19 nt, Artificial Sequence
  Description of Artificial Sequence: Synthetic oligonucleotide
gcagugcccgaagauggac

SEQ ID NO: 493743 - RNA, 19 nt, Artificial Sequence
  Description of Artificial Sequence: Synthetic oligonucleotide
guagggccaggggauaacu

SEQ ID NO: 493744 - RNA, 19 nt, Artificial Sequence
  Description of Artificial Sequence: Synthetic oligonucleotide
ggacucaggggaucagaua

SEQ ID NO: 493745 - RNA, 19 nt, Artificial Sequence
  Description of Artificial Sequence: Synthetic oligonucleotide
agccaucuuucgguggguu

SEQ ID NO: 493746 - RNA, 19 nt, Artificial Sequence
  Description of Artificial Sequence: Synthetic oligonucleotide
ccaggggauaacuuccucu

SEQ ID NO: 493747 - RNA, 19 nt, Artificial Sequence
  Description of Artificial Sequence: Synthetic oligonucleotide
gcuucuugcgacgcacaga

SEQ ID NO: 493748 - RNA, 19 nt, Artificial Sequence
  Description of Artificial Sequence: Synthetic oligonucleotide
gcuucgggagacuggacau

SEQ ID NO: 493749 - RNA, 19 nt, Artificial Sequence
  Description of Artificial Sequence: Synthetic oligonucleotide
ggcccggugacuggagccc

SEQ ID NO: 493750 - RNA, 19 nt, Artificial Sequence
  Description of Artificial Sequence: Synthetic oligonucleotide
gugcccgaagauggacaug

SEQ ID NO: 493751 - RNA, 19 nt, Artificial Sequence
  Description of Artificial Sequence: Synthetic oligonucleotide
ggaccuuagcuggguggcc

SEQ ID NO: 493752 - RNA, 19 nt, Artificial Sequence
  Description of Artificial Sequence: Synthetic oligonucleotide
ccggcuuccaaaugugcaa

SEQ ID NO: 493753 - RNA, 19 nt, Artificial Sequence
  Description of Artificial Sequence: Synthetic oligonucleotide
cagccauuccccgguucuc

SEQ ID NO: 493754 - RNA, 19 nt, Artificial Sequence
  Description of Artificial Sequence: Synthetic oligonucleotide
cuaccgcccaugcacuccu

SEQ ID NO: 493755 - RNA, 19 nt, Artificial Sequence
  Description of Artificial Sequence: Synthetic oligonucleotide
ccgguucucuagcugagaa

SEQ ID NO: 493756 - RNA, 19 nt, Artificial Sequence
  Description of Artificial Sequence: Synthetic oligonucleotide
caucuuucgguggguuuua

SEQ ID NO: 493757 - RNA, 19 nt, Artificial Sequence
  Description of Artificial Sequence: Synthetic oligonucleotide
cacauagcaucccgggcuu

SEQ ID NO: 493758 - RNA, 19 nt, Artificial Sequence
  Description of Artificial Sequence: Synthetic oligonucleotide
gagcugaggugccguucua

SEQ ID NO: 493759 - RNA, 19 nt, Artificial Sequence
  Description of Artificial Sequence: Synthetic oligonucleotide
ccccgguucucuagcugag

SEQ ID NO: 493760 - RNA, 19 nt, Artificial Sequence
  Description of Artificial Sequence: Synthetic oligonucleotide
cgacuuggcuggccguugg

SEQ ID NO: 493761 - RNA, 19 nt, Artificial Sequence
  Description of Artificial Sequence: Synthetic oligonucleotide
gacgacuuggcuggccguu

SEQ ID NO: 493762 - RNA, 19 nt, Artificial Sequence
  Description of Artificial Sequence: Synthetic oligonucleotide
accgguccagccggcggcu

SEQ ID NO: 493763 - RNA, 19 nt, Artificial Sequence
  Description of Artificial Sequence: Synthetic oligonucleotide
gaggggcguucaagagcug

SEQ ID NO: 493764 - RNA, 19 nt, Artificial Sequence
  Description of Artificial Sequence: Synthetic oligonucleotide
ggcuaccgcccaugcacuc

SEQ ID NO: 493765 - RNA, 19 nt, Artificial Sequence
  Description of Artificial Sequence: Synthetic oligonucleotide
cuggagcccucacccggga

SEQ ID NO: 493766 - RNA, 19 nt, Artificial Sequence
  Description of Artificial Sequence: Synthetic oligonucleotide
cccgggcuuaccagccggc

SEQ ID NO: 493767 - RNA, 19 nt, Artificial Sequence
  Description of Artificial Sequence: Synthetic oligonucleotide
ggcguguacagaucuucuu

SEQ ID NO: 493768 - RNA, 19 nt, Artificial Sequence
  Description of Artificial Sequence: Synthetic oligonucleotide
ggggcugcuuucggcccgg

SEQ ID NO: 493769 - RNA, 19 nt, Artificial Sequence
  Description of Artificial Sequence: Synthetic oligonucleotide
ggagcccucacccgggauu

SEQ ID NO: 493770 - RNA, 19 nt, Artificial Sequence
  Description of Artificial Sequence: Synthetic oligonucleotide
gccagccauuccccgguuc

SEQ ID NO: 493771 - RNA, 19 nt, Artificial Sequence
  Description of Artificial Sequence: Synthetic oligonucleotide
cggcggcuaaacacauagc

SEQ ID NO: 493772 - RNA, 19 nt, Artificial Sequence
  Description of Artificial Sequence: Synthetic oligonucleotide
gagccaucuuucggugggu

SEQ ID NO: 493773 - RNA, 19 nt, Artificial Sequence
  Description of Artificial Sequence: Synthetic oligonucleotide
ccguuggaagguggcgagc

SEQ ID NO: 493774 - RNA, 19 nt, Artificial Sequence
  Description of Artificial Sequence: Synthetic oligonucleotide
ggacguuuuccaggggagu

SEQ ID NO: 493775 - RNA, 19 nt, Artificial Sequence
  Description of Artificial Sequence: Synthetic oligonucleotide
gcccucacccgggauuaac

SEQ ID NO: 493776 - RNA, 19 nt, Artificial Sequence
  Description of Artificial Sequence: Synthetic oligonucleotide
ccuggcuaccgcccaugca

SEQ ID NO: 493777 - RNA, 19 nt, Artificial Sequence
  Description of Artificial Sequence: Synthetic oligonucleotide
ggacgacuuggcuggccgu

SEQ ID NO: 493778 - RNA, 19 nt, Artificial Sequence
  Description of Artificial Sequence: Synthetic oligonucleotide
ccguucuagcauggagcug

SEQ ID NO: 493779 - RNA, 19 nt, Artificial Sequence
  Description of Artificial Sequence: Synthetic oligonucleotide
gcgacgcacagagcagguc

SEQ ID NO: 493780 - RNA, 19 nt, Artificial Sequence
  Description of Artificial Sequence: Synthetic oligonucleotide
ggacaaggcuguccuucau

SEQ ID NO: 493781 - RNA, 19 nt, Artificial Sequence
  Description of Artificial Sequence: Synthetic oligonucleotide
ccgggauuaacuccauguu

SEQ ID NO: 493782 - RNA, 19 nt, Artificial Sequence
  Description of Artificial Sequence: Synthetic oligonucleotide
gcccgggcauaaagcuugc

SEQ ID NO: 493783 - RNA, 19 nt, Artificial Sequence
  Description of Artificial Sequence: Synthetic oligonucleotide
gguccagccggcggcuaaa

SEQ ID NO: 493784 - RNA, 19 nt, Artificial Sequence
  Description of Artificial Sequence: Synthetic oligonucleotide
cguuggaagguggcgagcu

SEQ ID NO: 493785 - RNA, 19 nt, Artificial Sequence
  Description of Artificial Sequence: Synthetic oligonucleotide
gcacgaaaaggcagagguu

SEQ ID NO: 493786 - RNA, 19 nt, Artificial Sequence
  Description of Artificial Sequence: Synthetic oligonucleotide
cccggugacuggagcccuc

SEQ ID NO: 493787 - RNA, 19 nt, Artificial Sequence
  Description of Artificial Sequence: Synthetic oligonucleotide
ccuuuacgagagcuggcuu

SEQ ID NO: 493788 - RNA, 19 nt, Artificial Sequence
  Description of Artificial Sequence: Synthetic oligonucleotide
cacccgggauuaacuccau

SEQ ID NO: 493789 - RNA, 19 nt, Artificial Sequence
  Description of Artificial Sequence: Synthetic oligonucleotide
gggcguucaagagcugguu

SEQ ID NO: 493790 - RNA, 19 nt, Artificial Sequence
  Description of Artificial Sequence: Synthetic oligonucleotide
cccgguucucuagcugaga

SEQ ID NO: 493791 - RNA, 19 nt, Artificial Sequence
  Description of Artificial Sequence: Synthetic oligonucleotide
ggaggccucguggcugacu

SEQ ID NO: 493792 - RNA, 19 nt, Artificial Sequence
  Description of Artificial Sequence: Synthetic oligonucleotide
gguggggcccgggcauaaa

SEQ ID NO: 493793 - RNA, 19 nt, Artificial Sequence
  Description of Artificial Sequence: Synthetic oligonucleotide
gccccaugcucaggguugu

SEQ ID NO: 493794 - RNA, 19 nt, Artificial Sequence
  Description of Artificial Sequence: Synthetic oligonucleotide
gcccggugacuggagcccu

SEQ ID NO: 493795 - RNA, 19 nt, Artificial Sequence
  Description of Artificial Sequence: Synthetic oligonucleotide
ccgggcuuaccagccggcu

SEQ ID NO: 493796 - RNA, 19 nt, Artificial Sequence
  Description of Artificial Sequence: Synthetic oligonucleotide
cgggcuuaccagccggcuu

SEQ ID NO: 493797 - RNA, 19 nt, Artificial Sequence
  Description of Artificial Sequence: Synthetic oligonucleotide
ccccgacagccagaggguu

SEQ ID NO: 493798 - RNA, 19 nt, Artificial Sequence
  Description of Artificial Sequence: Synthetic oligonucleotide
gggcugcuuucggcccggu

SEQ ID NO: 493799 - RNA, 19 nt, Artificial Sequence
  Description of Artificial Sequence: Synthetic oligonucleotide
ccgguccagccggcggcua

SEQ ID NO: 493800 - RNA, 19 nt, Artificial Sequence
  Description of Artificial Sequence: Synthetic oligonucleotide
uauauauauauauauauag

SEQ ID NO: 493801 - RNA, 19 nt, Artificial Sequence
  Description of Artificial Sequence: Synthetic oligonucleotide
ucuaauaaggcaaauagcc

SEQ ID NO: 493802 - RNA, 19 nt, Artificial Sequence
  Description of Artificial Sequence: Synthetic oligonucleotide
auuauugcugaucuaauac

SEQ ID NO: 493803 - RNA, 19 nt, Artificial Sequence
  Description of Artificial Sequence: Synthetic oligonucleotide
uauauauauauauauauau

SEQ ID NO: 493804 - RNA, 19 nt, Artificial Sequence
  Description of Artificial Sequence: Synthetic oligonucleotide
aaugcaauaaugcauucug

SEQ ID NO: 493805 - RNA, 19 nt, Artificial Sequence
  Description of Artificial Sequence: Synthetic oligonucleotide
aaaacuaugggucccagug

SEQ ID NO: 493806 - RNA, 19 nt, Artificial Sequence
  Description of Artificial Sequence: Synthetic oligonucleotide
uguauauauauauauauau

SEQ ID NO: 493807 - RNA, 19 nt, Artificial Sequence
  Description of Artificial Sequence: Synthetic oligonucleotide
guagcuagaaaucagagug

SEQ ID NO: 493808 - RNA, 19 nt, Artificial Sequence
  Description of Artificial Sequence: Synthetic oligonucleotide
aaggcaaauagccaccuac

SEQ ID NO: 493809 - RNA, 19 nt, Artificial Sequence
  Description of Artificial Sequence: Synthetic oligonucleotide
uauaagagaauauagccac

SEQ ID NO: 493810 - RNA, 19 nt, Artificial Sequence
  Description of Artificial Sequence: Synthetic oligonucleotide
agaauccuuaaacagaagg

SEQ ID NO: 493811 - RNA, 19 nt, Artificial Sequence
  Description of Artificial Sequence: Synthetic oligonucleotide
uauauauguauauauauau

SEQ ID NO: 493812 - RNA, 19 nt, Artificial Sequence
  Description of Artificial Sequence: Synthetic oligonucleotide
ucuuuuauaaugcuggagu

SEQ ID NO: 493813 - RNA, 19 nt, Artificial Sequence
  Description of Artificial Sequence: Synthetic oligonucleotide
uauauguauauauauauau

SEQ ID NO: 493814 - RNA, 19 nt, Artificial Sequence
  Description of Artificial Sequence: Synthetic oligonucleotide
uauguauauauauauauau

SEQ ID NO: 493815 - RNA, 19 nt, Artificial Sequence
  Description of Artificial Sequence: Synthetic oligonucleotide
uauauauauauauauaguu

SEQ ID NO: 493816 - RNA, 19 nt, Artificial Sequence
  Description of Artificial Sequence: Synthetic oligonucleotide
aauugaauaucuuugugaa

SEQ ID NO: 493817 - RNA, 19 nt, Artificial Sequence
  Description of Artificial Sequence: Synthetic oligonucleotide
uauauauauauauaguuua

SEQ ID NO: 493818 - RNA, 19 nt, Artificial Sequence
  Description of Artificial Sequence: Synthetic oligonucleotide
aaacgguccaguuaaauga

SEQ ID NO: 493819 - RNA, 19 nt, Artificial Sequence
  Description of Artificial Sequence: Synthetic oligonucleotide
uuauaagagaauauagcca

SEQ ID NO: 493820 - RNA, 19 nt, Artificial Sequence
  Description of Artificial Sequence: Synthetic oligonucleotide
agcacuauccacaugaagc

SEQ ID NO: 493821 - RNA, 19 nt, Artificial Sequence
  Description of Artificial Sequence: Synthetic oligonucleotide
uauaccaucuaauaaggca

SEQ ID NO: 493822 - RNA, 19 nt, Artificial Sequence
  Description of Artificial Sequence: Synthetic oligonucleotide
uuugagauuacauagucau

SEQ ID NO: 493823 - RNA, 19 nt, Artificial Sequence
  Description of Artificial Sequence: Synthetic oligonucleotide
uguauauauguauauauau

SEQ ID NO: 493824 - RNA, 19 nt, Artificial Sequence
  Description of Artificial Sequence: Synthetic oligonucleotide
agaauauagccacagauga

SEQ ID NO: 493825 - RNA, 19 nt, Artificial Sequence
  Description of Artificial Sequence: Synthetic oligonucleotide
uccuuauaagagaauauag

SEQ ID NO: 493826 - RNA, 19 nt, Artificial Sequence
  Description of Artificial Sequence: Synthetic oligonucleotide
aauagauucacggcaacag

SEQ ID NO: 493827 - RNA, 19 nt, Artificial Sequence
  Description of Artificial Sequence: Synthetic oligonucleotide
gguauuaagaucauggagg

SEQ ID NO: 493828 - RNA, 19 nt, Artificial Sequence
  Description of Artificial Sequence: Synthetic oligonucleotide
agagguauuaagaucaugg

SEQ ID NO: 493829 - RNA, 19 nt, Artificial Sequence
  Description of Artificial Sequence: Synthetic oligonucleotide
cugaacagaguuuaguggg

SEQ ID NO: 493830 - RNA, 19 nt, Artificial Sequence
  Description of Artificial Sequence: Synthetic oligonucleotide
ugaucuaauacaaucacuu

SEQ ID NO: 493831 - RNA, 19 nt, Artificial Sequence
  Description of Artificial Sequence: Synthetic oligonucleotide
uagaaaacgguccaguuaa

SEQ ID NO: 493832 - RNA, 19 nt, Artificial Sequence
  Description of Artificial Sequence: Synthetic oligonucleotide
uucauugcagauaagcggu

SEQ ID NO: 493833 - RNA, 19 nt, Artificial Sequence
  Description of Artificial Sequence: Synthetic oligonucleotide
gaauugaauaucuuuguga

SEQ ID NO: 493834 - RNA, 19 nt, Artificial Sequence
  Description of Artificial Sequence: Synthetic oligonucleotide
augagguucaaacucguuc

SEQ ID NO: 493835 - RNA, 19 nt, Artificial Sequence
  Description of Artificial Sequence: Synthetic oligonucleotide
uguuuauauuacuagcucu

SEQ ID NO: 493836 - RNA, 19 nt, Artificial Sequence
  Description of Artificial Sequence: Synthetic oligonucleotide
uaccuagagauaaucagcc

SEQ ID NO: 493837 - RNA, 19 nt, Artificial Sequence
  Description of Artificial Sequence: Synthetic oligonucleotide
cauaccuagagauaaucag

SEQ ID NO: 493838 - RNA, 19 nt, Artificial Sequence
  Description of Artificial Sequence: Synthetic oligonucleotide
acuuagacauaaaauuucc

SEQ ID NO: 493839 - RNA, 19 nt, Artificial Sequence
  Description of Artificial Sequence: Synthetic oligonucleotide
uuuagugggguuagaaagc

SEQ ID NO: 493840 - RNA, 19 nt, Artificial Sequence
  Description of Artificial Sequence: Synthetic oligonucleotide
aaaggaaacaauguuucca

SEQ ID NO: 493841 - RNA, 19 nt, Artificial Sequence
  Description of Artificial Sequence: Synthetic oligonucleotide
agauaagcgguaugugucc

SEQ ID NO: 493842 - RNA, 19 nt, Artificial Sequence
  Description of Artificial Sequence: Synthetic oligonucleotide
aaaagagaucccaguaggc

SEQ ID NO: 493843 - RNA, 19 nt, Artificial Sequence
  Description of Artificial Sequence: Synthetic oligonucleotide
uuaauucugaggaaaccac

SEQ ID NO: 493844 - RNA, 19 nt, Artificial Sequence
  Description of Artificial Sequence: Synthetic oligonucleotide
aguuucagaaagcacuauc

SEQ ID NO: 493845 - RNA, 19 nt, Artificial Sequence
  Description of Artificial Sequence: Synthetic oligonucleotide
gaagcaaaacuaugggucc

SEQ ID NO: 493846 - RNA, 19 nt, Artificial Sequence
  Description of Artificial Sequence: Synthetic oligonucleotide
uccuuaaacagaaggggcc

SEQ ID NO: 493847 - RNA, 19 nt, Artificial Sequence
  Description of Artificial Sequence: Synthetic oligonucleotide
auaccuagagauaaucagc

SEQ ID NO: 493848 - RNA, 19 nt, Artificial Sequence
  Description of Artificial Sequence: Synthetic oligonucleotide
agugcgugagaucuccucc

SEQ ID NO: 493849 - RNA, 19 nt, Artificial Sequence
  Description of Artificial Sequence: Synthetic oligonucleotide
ugucaauauauaauuugcu

SEQ ID NO: 493850 - RNA, 19 nt, Artificial Sequence
  Description of Artificial Sequence: Synthetic oligonucleotide
aguuuccauaagcacagcg

SEQ ID NO: 493851 - RNA, 19 nt, Artificial Sequence
  Description of Artificial Sequence: Synthetic oligonucleotide
uuauugcugaucuaauaca

SEQ ID NO: 493852 - RNA, 19 nt, Artificial Sequence
  Description of Artificial Sequence: Synthetic oligonucleotide
auuucauugcagauaagcg

SEQ ID NO: 493853 - RNA, 19 nt, Artificial Sequence
  Description of Artificial Sequence: Synthetic oligonucleotide
uauauauauauaguuuaga

SEQ ID NO: 493854 - RNA, 19 nt, Artificial Sequence
  Description of Artificial Sequence: Synthetic oligonucleotide
ucuagcaaacaccuuugcc

SEQ ID NO: 493855 - RNA, 19 nt, Artificial Sequence
  Description of Artificial Sequence: Synthetic oligonucleotide
guauuaagaucauggaggc

SEQ ID NO: 493856 - RNA, 19 nt, Artificial Sequence
  Description of Artificial Sequence: Synthetic oligonucleotide
uuuauaaauccagugcgug

SEQ ID NO: 493857 - RNA, 19 nt, Artificial Sequence
  Description of Artificial Sequence: Synthetic oligonucleotide
agauaaucagccuucuucu

SEQ ID NO: 493858 - RNA, 19 nt, Artificial Sequence
  Description of Artificial Sequence: Synthetic oligonucleotide
agcucuuuuauaaugcugg

SEQ ID NO: 493859 - RNA, 19 nt, Artificial Sequence
  Description of Artificial Sequence: Synthetic oligonucleotide
uauggucuuccuuauaaga

SEQ ID NO: 493860 - RNA, 19 nt, Artificial Sequence
  Description of Artificial Sequence: Synthetic oligonucleotide
aucuaauaaggcaaauagc

SEQ ID NO: 493861 - RNA, 19 nt, Artificial Sequence
  Description of Artificial Sequence: Synthetic oligonucleotide
auugaauaucuuugugaac

SEQ ID NO: 493862 - RNA, 19 nt, Artificial Sequence
  Description of Artificial Sequence: Synthetic oligonucleotide
uuuugagauuacauaguca

SEQ ID NO: 493863 - RNA, 19 nt, Artificial Sequence
  Description of Artificial Sequence: Synthetic oligonucleotide
ugcugaucuaauacaauca

SEQ ID NO: 493864 - RNA, 19 nt, Artificial Sequence
  Description of Artificial Sequence: Synthetic oligonucleotide
uauugcugaucuaauacaa

SEQ ID NO: 493865 - RNA, 19 nt, Artificial Sequence
  Description of Artificial Sequence: Synthetic oligonucleotide
ugaacagaguuuagugggg

SEQ ID NO: 493866 - RNA, 19 nt, Artificial Sequence
  Description of Artificial Sequence: Synthetic oligonucleotide
ugugaagaauccauuuucu

SEQ ID NO: 493867 - RNA, 19 nt, Artificial Sequence
  Description of Artificial Sequence: Synthetic oligonucleotide
agaauugaauaucuuugug

SEQ ID NO: 493868 - RNA, 19 nt, Artificial Sequence
  Description of Artificial Sequence: Synthetic oligonucleotide
auaauuugcugguguuacc

SEQ ID NO: 493869 - RNA, 19 nt, Artificial Sequence
  Description of Artificial Sequence: Synthetic oligonucleotide
uuacauagucauuauugcu

SEQ ID NO: 493870 - RNA, 19 nt, Artificial Sequence
  Description of Artificial Sequence: Synthetic oligonucleotide
uguugggguacuuuuauaa

SEQ ID NO: 493871 - RNA, 19 nt, Artificial Sequence
  Description of Artificial Sequence: Synthetic oligonucleotide
uagagguuaucaaauuucu

SEQ ID NO: 493872 - RNA, 19 nt, Artificial Sequence
  Description of Artificial Sequence: Synthetic oligonucleotide
aacuaugggucccagugga

SEQ ID NO: 493873 - RNA, 19 nt, Artificial Sequence
  Description of Artificial Sequence: Synthetic oligonucleotide
uguuuagugacugagucau

SEQ ID NO: 493874 - RNA, 19 nt, Artificial Sequence
  Description of Artificial Sequence: Synthetic oligonucleotide
agcaaagaaagaugagauc

SEQ ID NO: 493875 - RNA, 19 nt, Artificial Sequence
  Description of Artificial Sequence: Synthetic oligonucleotide
agauguuacaggcagccca

SEQ ID NO: 493876 - RNA, 19 nt, Artificial Sequence
  Description of Artificial Sequence: Synthetic oligonucleotide
auauauauauauauauagu

SEQ ID NO: 493877 - RNA, 19 nt, Artificial Sequence
  Description of Artificial Sequence: Synthetic oligonucleotide
auauauauauauaguuuag

SEQ ID NO: 493878 - RNA, 19 nt, Artificial Sequence
  Description of Artificial Sequence: Synthetic oligonucleotide
guuuccauaagcacagcgg

SEQ ID NO: 493879 - RNA, 19 nt, Artificial Sequence
  Description of Artificial Sequence: Synthetic oligonucleotide
auccuuaaacagaaggggc

SEQ ID NO: 493880 - RNA, 19 nt, Artificial Sequence
  Description of Artificial Sequence: Synthetic oligonucleotide
aaauccagugcgugagauc

SEQ ID NO: 493881 - RNA, 19 nt, Artificial Sequence
  Description of Artificial Sequence: Synthetic oligonucleotide
aagcaaaacuauggguccc

SEQ ID NO: 493882 - RNA, 19 nt, Artificial Sequence
  Description of Artificial Sequence: Synthetic oligonucleotide
aauaaugcauucugauuuu

SEQ ID NO: 493883 - RNA, 19 nt, Artificial Sequence
  Description of Artificial Sequence: Synthetic oligonucleotide
uucacggcaacaguagagg

SEQ ID NO: 493884 - RNA, 19 nt, Artificial Sequence
  Description of Artificial Sequence: Synthetic oligonucleotide
uugcuuuccaccaaacauc

SEQ ID NO: 493885 - RNA, 19 nt, Artificial Sequence
  Description of Artificial Sequence: Synthetic oligonucleotide
ugagaaauuucacacuguu

SEQ ID NO: 493886 - RNA, 19 nt, Artificial Sequence
  Description of Artificial Sequence: Synthetic oligonucleotide
aaacagaaggggccagauc

SEQ ID NO: 493887 - RNA, 19 nt, Artificial Sequence
  Description of Artificial Sequence: Synthetic oligonucleotide
cuagagauaaucagccuuc

SEQ ID NO: 493888 - RNA, 19 nt, Artificial Sequence
  Description of Artificial Sequence: Synthetic oligonucleotide
aagaacuagaugauuauuu

SEQ ID NO: 493889 - RNA, 19 nt, Artificial Sequence
  Description of Artificial Sequence: Synthetic oligonucleotide
uacagcagcagcagcagca

SEQ ID NO: 493890 - RNA, 19 nt, Artificial Sequence
  Description of Artificial Sequence: Synthetic oligonucleotide
agaauagauucacggcaac

SEQ ID NO: 493891 - RNA, 19 nt, Artificial Sequence
  Description of Artificial Sequence: Synthetic oligonucleotide
aucauguuuggcugccagc

SEQ ID NO: 493892 - RNA, 19 nt, Artificial Sequence
  Description of Artificial Sequence: Synthetic oligonucleotide
ggaagcauuaaaaugaaca

SEQ ID NO: 493893 - RNA, 19 nt, Artificial Sequence
  Description of Artificial Sequence: Synthetic oligonucleotide
auauauauauauauaguuu

SEQ ID NO: 493894 - RNA, 19 nt, Artificial Sequence
  Description of Artificial Sequence: Synthetic oligonucleotide
ugagccuauauauaccauc

SEQ ID NO: 493895 - RNA, 19 nt, Artificial Sequence
  Description of Artificial Sequence: Synthetic oligonucleotide
uuacaggcagcccaucggc

SEQ ID NO: 493896 - RNA, 19 nt, Artificial Sequence
  Description of Artificial Sequence: Synthetic oligonucleotide
gaucccaguaggcacagac

SEQ ID NO: 493897 - RNA, 19 nt, Artificial Sequence
  Description of Artificial Sequence: Synthetic oligonucleotide
ugggguacuuuuauaaauc

SEQ ID NO: 493898 - RNA, 19 nt, Artificial Sequence
  Description of Artificial Sequence: Synthetic oligonucleotide
uuucagaucuguucagaga

SEQ ID NO: 493899 - RNA, 19 nt, Artificial Sequence
  Description of Artificial Sequence: Synthetic oligonucleotide
agaguuuccauaagcacag

SEQ ID NO: 493900 - RNA, 19 nt, Artificial Sequence
  Description of Artificial Sequence: Synthetic oligonucleotide
uuagacuugucaauauaua

SEQ ID NO: 493901 - RNA, 19 nt, Artificial Sequence
  Description of Artificial Sequence: Synthetic oligonucleotide
uagauucacggcaacagua

SEQ ID NO: 493902 - RNA, 19 nt, Artificial Sequence
  Description of Artificial Sequence: Synthetic oligonucleotide
ucagauugcagaucucacu

SEQ ID NO: 493903 - RNA, 19 nt, Artificial Sequence
  Description of Artificial Sequence: Synthetic oligonucleotide
cagauaagcgguauguguc

SEQ ID NO: 493904 - RNA, 19 nt, Artificial Sequence
  Description of Artificial Sequence: Synthetic oligonucleotide
auauaccaucuaauaaggc

SEQ ID NO: 493905 - RNA, 19 nt, Artificial Sequence
  Description of Artificial Sequence: Synthetic oligonucleotide
aacgguccaguuaaaugac

SEQ ID NO: 493906 - RNA, 19 nt, Artificial Sequence
  Description of Artificial Sequence: Synthetic oligonucleotide
aucucuagcaaacaccuuu

SEQ ID NO: 493907 - RNA, 19 nt, Artificial Sequence
  Description of Artificial Sequence: Synthetic oligonucleotide
guuacaggcagcccaucgg

SEQ ID NO: 493908 - RNA, 19 nt, Artificial Sequence
  Description of Artificial Sequence: Synthetic oligonucleotide
uuaccuauuuucuuuccau

SEQ ID NO: 493909 - RNA, 19 nt, Artificial Sequence
  Description of Artificial Sequence: Synthetic oligonucleotide
auaagcgguaugugucccc

SEQ ID NO: 493910 - RNA, 19 nt, Artificial Sequence
  Description of Artificial Sequence: Synthetic oligonucleotide
ggaauuuuguuuaacaaga

SEQ ID NO: 493911 - RNA, 19 nt, Artificial Sequence
  Description of Artificial Sequence: Synthetic oligonucleotide
uggaguuacuuaagaaacu

SEQ ID NO: 493912 - RNA, 19 nt, Artificial Sequence
  Description of Artificial Sequence: Synthetic oligonucleotide
aggaagcaaaacuaugggu

SEQ ID NO: 493913 - RNA, 19 nt, Artificial Sequence
  Description of Artificial Sequence: Synthetic oligonucleotide
uccagacuagcuuccaggc

SEQ ID NO: 493914 - RNA, 19 nt, Artificial Sequence
  Description of Artificial Sequence: Synthetic oligonucleotide
uugggguacuuuuauaaau

SEQ ID NO: 493915 - RNA, 19 nt, Artificial Sequence
  Description of Artificial Sequence: Synthetic oligonucleotide
aauaagccauuuccagacu

SEQ ID NO: 493916 - RNA, 19 nt, Artificial Sequence
  Description of Artificial Sequence: Synthetic oligonucleotide
gaugagaucucagauugca

SEQ ID NO: 493917 - RNA, 19 nt, Artificial Sequence
  Description of Artificial Sequence: Synthetic oligonucleotide
cuguuuauauuacuagcuc

SEQ ID NO: 493918 - RNA, 19 nt, Artificial Sequence
  Description of Artificial Sequence: Synthetic oligonucleotide
auaagcacagcggucugcg

SEQ ID NO: 493919 - RNA, 19 nt, Artificial Sequence
  Description of Artificial Sequence: Synthetic oligonucleotide
uguuaccuauuuucuuucc

SEQ ID NO: 493920 - RNA, 19 nt, Artificial Sequence
  Description of Artificial Sequence: Synthetic oligonucleotide
auauauauauauauauaua

SEQ ID NO: 493921 - RNA, 19 nt, Artificial Sequence
  Description of Artificial Sequence: Synthetic oligonucleotide
agcuucucagaacugguga

SEQ ID NO: 493922 - RNA, 19 nt, Artificial Sequence
  Description of Artificial Sequence: Synthetic oligonucleotide
auagauucacggcaacagu

SEQ ID NO: 493923 - RNA, 19 nt, Artificial Sequence
  Description of Artificial Sequence: Synthetic oligonucleotide
agcuagaaaucagagugag

SEQ ID NO: 493924 - RNA, 19 nt, Artificial Sequence
  Description of Artificial Sequence: Synthetic oligonucleotide
acuucguugagaguggagu

SEQ ID NO: 493925 - RNA, 19 nt, Artificial Sequence
  Description of Artificial Sequence: Synthetic oligonucleotide
uagcuagaaaucagaguga

SEQ ID NO: 493926 - RNA, 19 nt, Artificial Sequence
  Description of Artificial Sequence: Synthetic oligonucleotide
ggaagcaaaacuauggguc

SEQ ID NO: 493927 - RNA, 19 nt, Artificial Sequence
  Description of Artificial Sequence: Synthetic oligonucleotide
uuagugggguuagaaagca

SEQ ID NO: 493928 - RNA, 19 nt, Artificial Sequence
  Description of Artificial Sequence: Synthetic oligonucleotide
auaccaucuaauaaggcaa

SEQ ID NO: 493929 - RNA, 19 nt, Artificial Sequence
  Description of Artificial Sequence: Synthetic oligonucleotide
aggcaaauagccaccuacc

SEQ ID NO: 493930 - RNA, 19 nt, Artificial Sequence
  Description of Artificial Sequence: Synthetic oligonucleotide
uuagugacugagucauuga

SEQ ID NO: 493931 - RNA, 19 nt, Artificial Sequence
  Description of Artificial Sequence: Synthetic oligonucleotide
auugcagauaagcgguaug

SEQ ID NO: 493932 - RNA, 19 nt, Artificial Sequence
  Description of Artificial Sequence: Synthetic oligonucleotide
uuaaugcaauaaugcauuc

SEQ ID NO: 493933 - RNA, 19 nt, Artificial Sequence
  Description of Artificial Sequence: Synthetic oligonucleotide
uucguugagaguggaguag

SEQ ID NO: 493934 - RNA, 19 nt, Artificial Sequence
  Description of Artificial Sequence: Synthetic oligonucleotide
uguguguacaacccacaau

SEQ ID NO: 493935 - RNA, 19 nt, Artificial Sequence
  Description of Artificial Sequence: Synthetic oligonucleotide
aguuuagacuugucaauau

SEQ ID NO: 493936 - RNA, 19 nt, Artificial Sequence
  Description of Artificial Sequence: Synthetic oligonucleotide
uugcagauaagcgguaugu

SEQ ID NO: 493937 - RNA, 19 nt, Artificial Sequence
  Description of Artificial Sequence: Synthetic oligonucleotide
uggccuagaggaauuuugu

SEQ ID NO: 493938 - RNA, 19 nt, Artificial Sequence
  Description of Artificial Sequence: Synthetic oligonucleotide
guauauauauauauauaua

SEQ ID NO: 493939 - RNA, 19 nt, Artificial Sequence
  Description of Artificial Sequence: Synthetic oligonucleotide
gggguuagaaagcaaaaca

SEQ ID NO: 493940 - RNA, 19 nt, Artificial Sequence
  Description of Artificial Sequence: Synthetic oligonucleotide
gcugguguuaccuauuuuc

SEQ ID NO: 493941 - RNA, 19 nt, Artificial Sequence
  Description of Artificial Sequence: Synthetic oligonucleotide
caaacucguucccaccucc

SEQ ID NO: 493942 - RNA, 19 nt, Artificial Sequence
  Description of Artificial Sequence: Synthetic oligonucleotide
auauguauauauauauaua

SEQ ID NO: 493943 - RNA, 19 nt, Artificial Sequence
  Description of Artificial Sequence: Synthetic oligonucleotide
cucuuuuauaaugcuggag

SEQ ID NO: 493944 - RNA, 19 nt, Artificial Sequence
  Description of Artificial Sequence: Synthetic oligonucleotide
agauucacggcaacaguag

SEQ ID NO: 493945 - RNA, 19 nt, Artificial Sequence
  Description of Artificial Sequence: Synthetic oligonucleotide
auuugcugguguuaccuau

SEQ ID NO: 493946 - RNA, 19 nt, Artificial Sequence
  Description of Artificial Sequence: Synthetic oligonucleotide
guauauauguauauauaua

SEQ ID NO: 493947 - RNA, 19 nt, Artificial Sequence
  Description of Artificial Sequence: Synthetic oligonucleotide
uacaacccacaauuuuggc

SEQ ID NO: 493948 - RNA, 19 nt, Artificial Sequence
  Description of Artificial Sequence: Synthetic oligonucleotide
ugggguuagaaagcaaaac

SEQ ID NO: 493949 - RNA, 19 nt, Artificial Sequence
  Description of Artificial Sequence: Synthetic oligonucleotide
uaguuuagacuugucaaua

SEQ ID NO: 493950 - RNA, 19 nt, Artificial Sequence
  Description of Artificial Sequence: Synthetic oligonucleotide
cucagauugcagaucucac

SEQ ID NO: 493951 - RNA, 19 nt, Artificial Sequence
  Description of Artificial Sequence: Synthetic oligonucleotide
ugcgcagugauguguguac

SEQ ID NO: 493952 - RNA, 19 nt, Artificial Sequence
  Description of Artificial Sequence: Synthetic oligonucleotide
auucacggcaacaguagag

SEQ ID NO: 493953 - RNA, 19 nt, Artificial Sequence
  Description of Artificial Sequence: Synthetic oligonucleotide
augauuauuuauauagaua

SEQ ID NO: 493954 - RNA, 19 nt, Artificial Sequence
  Description of Artificial Sequence: Synthetic oligonucleotide
uuauaaugcuggaguuacu

SEQ ID NO: 493955 - RNA, 19 nt, Artificial Sequence
  Description of Artificial Sequence: Synthetic oligonucleotide
uaccaucuaauaaggcaaa

SEQ ID NO: 493956 - RNA, 19 nt, Artificial Sequence
  Description of Artificial Sequence: Synthetic oligonucleotide
gcugaucuaauacaaucac

SEQ ID NO: 493957 - RNA, 19 nt, Artificial Sequence
  Description of Artificial Sequence: Synthetic oligonucleotide
agauuacauagucauuauu

SEQ ID NO: 493958 - RNA, 19 nt, Artificial Sequence
  Description of Artificial Sequence: Synthetic oligonucleotide
uuuauauuacuagcucuuu

SEQ ID NO: 493959 - RNA, 19 nt, Artificial Sequence
  Description of Artificial Sequence: Synthetic oligonucleotide
gauaagcgguauguguccc

SEQ ID NO: 493960 - RNA, 19 nt, Artificial Sequence
  Description of Artificial Sequence: Synthetic oligonucleotide
aucggcauugcgcucccag

SEQ ID NO: 493961 - RNA, 19 nt, Artificial Sequence
  Description of Artificial Sequence: Synthetic oligonucleotide
auauauguauauauauaua

SEQ ID NO: 493962 - RNA, 19 nt, Artificial Sequence
  Description of Artificial Sequence: Synthetic oligonucleotide
guguguacaacccacaauu

SEQ ID NO: 493963 - RNA, 19 nt, Artificial Sequence
  Description of Artificial Sequence: Synthetic oligonucleotide
caauguuuccaccaagaaa

SEQ ID NO: 493964 - RNA, 19 nt, Artificial Sequence
  Description of Artificial Sequence: Synthetic oligonucleotide
cugaguucuuggcagagca

SEQ ID NO: 493965 - RNA, 19 nt, Artificial Sequence
  Description of Artificial Sequence: Synthetic oligonucleotide
auguauauauauauauaua

SEQ ID NO: 493966 - RNA, 19 nt, Artificial Sequence
  Description of Artificial Sequence: Synthetic oligonucleotide
aacagaguuuagugggguu

SEQ ID NO: 493967 - RNA, 19 nt, Artificial Sequence
  Description of Artificial Sequence: Synthetic oligonucleotide
aggaagaacuagaugauua

SEQ ID NO: 493968 - RNA, 19 nt, Artificial Sequence
  Description of Artificial Sequence: Synthetic oligonucleotide
acauaccuagagauaauca

SEQ ID NO: 493969 - RNA, 19 nt, Artificial Sequence
  Description of Artificial Sequence: Synthetic oligonucleotide
ugcagauaagcgguaugug

SEQ ID NO: 493970 - RNA, 19 nt, Artificial Sequence
  Description of Artificial Sequence: Synthetic oligonucleotide
gauucacggcaacaguaga

SEQ ID NO: 493971 - RNA, 19 nt, Artificial Sequence
  Description of Artificial Sequence: Synthetic oligonucleotide
uaccuauuuucuuuccaua

SEQ ID NO: 493972 - RNA, 19 nt, Artificial Sequence
  Description of Artificial Sequence: Synthetic oligonucleotide
ucaaacucguucccaccuc

SEQ ID NO: 493973 - RNA, 19 nt, Artificial Sequence
  Description of Artificial Sequence: Synthetic oligonucleotide
ggcaaauagccaccuaccc

SEQ ID NO: 493974 - RNA, 19 nt, Artificial Sequence
  Description of Artificial Sequence: Synthetic oligonucleotide
caccagagguauuaagauc

SEQ ID NO: 493975 - RNA, 19 nt, Artificial Sequence
  Description of Artificial Sequence: Synthetic oligonucleotide
cacauaccuagagauaauc

SEQ ID NO: 493976 - RNA, 19 nt, Artificial Sequence
  Description of Artificial Sequence: Synthetic oligonucleotide
auagccaccuaccccaguu

SEQ ID NO: 493977 - RNA, 19 nt, Artificial Sequence
  Description of Artificial Sequence: Synthetic oligonucleotide
agaugagaucucagauugc

SEQ ID NO: 493978 - RNA, 19 nt, Artificial Sequence
  Description of Artificial Sequence: Synthetic oligonucleotide
auaaauccagugcgugaga

SEQ ID NO: 493979 - RNA, 19 nt, Artificial Sequence
  Description of Artificial Sequence: Synthetic oligonucleotide
agugggguuagaaagcaaa

SEQ ID NO: 493980 - RNA, 19 nt, Artificial Sequence
  Description of Artificial Sequence: Synthetic oligonucleotide
caguaagaugacaggaaga

SEQ ID NO: 493981 - RNA, 19 nt, Artificial Sequence
  Description of Artificial Sequence: Synthetic oligonucleotide
aggucuuguuccuuucagu

SEQ ID NO: 493982 - RNA, 19 nt, Artificial Sequence
  Description of Artificial Sequence: Synthetic oligonucleotide
agcgguauguguccccaug

SEQ ID NO: 493983 - RNA, 19 nt, Artificial Sequence
  Description of Artificial Sequence: Synthetic oligonucleotide
ucugggcugagccuauaua

SEQ ID NO: 493984 - RNA, 19 nt, Artificial Sequence
  Description of Artificial Sequence: Synthetic oligonucleotide
uaagcgguaugugucccca

SEQ ID NO: 493985 - RNA, 19 nt, Artificial Sequence
  Description of Artificial Sequence: Synthetic oligonucleotide
ggaguuacuuaagaaacuc

SEQ ID NO: 493986 - RNA, 19 nt, Artificial Sequence
  Description of Artificial Sequence: Synthetic oligonucleotide
auaaggcaaauagccaccu

SEQ ID NO: 493987 - RNA, 19 nt, Artificial Sequence
  Description of Artificial Sequence: Synthetic oligonucleotide
cuagaaaacgguccaguua

SEQ ID NO: 493988 - RNA, 19 nt, Artificial Sequence
  Description of Artificial Sequence: Synthetic oligonucleotide
guggccuagaggaauuuug

SEQ ID NO: 493989 - RNA, 19 nt, Artificial Sequence
  Description of Artificial Sequence: Synthetic oligonucleotide
ugggcugagccuauauaua

SEQ ID NO: 493990 - RNA, 19 nt, Artificial Sequence
  Description of Artificial Sequence: Synthetic oligonucleotide
cagaguuuagugggguuag

SEQ ID NO: 493991 - RNA, 19 nt, Artificial Sequence
  Description of Artificial Sequence: Synthetic oligonucleotide
cuguuuagugacugaguca

SEQ ID NO: 493992 - RNA, 19 nt, Artificial Sequence
  Description of Artificial Sequence: Synthetic oligonucleotide
gcugagccuauauauacca

SEQ ID NO: 493993 - RNA, 19 nt, Artificial Sequence
  Description of Artificial Sequence: Synthetic oligonucleotide
cauguuuggcugccagccc

SEQ ID NO: 493994 - RNA, 19 nt, Artificial Sequence
  Description of Artificial Sequence: Synthetic oligonucleotide
gagccuauauauaccaucu

SEQ ID NO: 493995 - RNA, 19 nt, Artificial Sequence
  Description of Artificial Sequence: Synthetic oligonucleotide
ugguguuaccuauuuucuu

SEQ ID NO: 493996 - RNA, 19 nt, Artificial Sequence
  Description of Artificial Sequence: Synthetic oligonucleotide
gauguguguacaacccaca

SEQ ID NO: 493997 - RNA, 19 nt, Artificial Sequence
  Description of Artificial Sequence: Synthetic oligonucleotide
gccuauauauaccaucuaa

SEQ ID NO: 493998 - RNA, 19 nt, Artificial Sequence
  Description of Artificial Sequence: Synthetic oligonucleotide
aaauagccaccuaccccag

SEQ ID NO: 493999 - RNA, 19 nt, Artificial Sequence
  Description of Artificial Sequence: Synthetic oligonucleotide
cuuggaaccaggaagcauu

SEQ ID NO: 494000 - RNA, 19 nt, Artificial Sequence
  Description of Artificial Sequence: Synthetic oligonucleotide
gcaacaguagagguuauca

SEQ ID NO: 494001 - RNA, 19 nt, Artificial Sequence
  Description of Artificial Sequence: Synthetic oligonucleotide
cauaagcacagcggucugc

SEQ ID NO: 494002 - RNA, 19 nt, Artificial Sequence
  Description of Artificial Sequence: Synthetic oligonucleotide
ucauugcagauaagcggua

SEQ ID NO: 494003 - RNA, 19 nt, Artificial Sequence
  Description of Artificial Sequence: Synthetic oligonucleotide
gcucuuuaggaugucaaac

SEQ ID NO: 494004 - RNA, 19 nt, Artificial Sequence
  Description of Artificial Sequence: Synthetic oligonucleotide
gaguuuagugggguuagaa

SEQ ID NO: 494005 - RNA, 19 nt, Artificial Sequence
  Description of Artificial Sequence: Synthetic oligonucleotide
agcagcagcagcagcagca

SEQ ID NO: 494006 - RNA, 19 nt, Artificial Sequence
  Description of Artificial Sequence: Synthetic oligonucleotide
gaguggaguagauguuaca

SEQ ID NO: 494007 - RNA, 19 nt, Artificial Sequence
  Description of Artificial Sequence: Synthetic oligonucleotide
ccugguagcuagaaaucag

SEQ ID NO: 494008 - RNA, 19 nt, Artificial Sequence
  Description of Artificial Sequence: Synthetic oligonucleotide
gagcuucucagaacuggug

SEQ ID NO: 494009 - RNA, 19 nt, Artificial Sequence
  Description of Artificial Sequence: Synthetic oligonucleotide
ggucuuguuccuuucagua

SEQ ID NO: 494010 - RNA, 19 nt, Artificial Sequence
  Description of Artificial Sequence: Synthetic oligonucleotide
aaagcacuauccacaugaa

SEQ ID NO: 494011 - RNA, 19 nt, Artificial Sequence
  Description of Artificial Sequence: Synthetic oligonucleotide
agauugcagaucucacuuu

SEQ ID NO: 494012 - RNA, 19 nt, Artificial Sequence
  Description of Artificial Sequence: Synthetic oligonucleotide
uucugggcugagccuauau

SEQ ID NO: 494013 - RNA, 19 nt, Artificial Sequence
  Description of Artificial Sequence: Synthetic oligonucleotide
caacaguagagguuaucaa

SEQ ID NO: 494014 - RNA, 19 nt, Artificial Sequence
  Description of Artificial Sequence: Synthetic oligonucleotide
cugaucuaauacaaucacu

SEQ ID NO: 494015 - RNA, 19 nt, Artificial Sequence
  Description of Artificial Sequence: Synthetic oligonucleotide
gagauuacauagucauuau

SEQ ID NO: 494016 - RNA, 19 nt, Artificial Sequence
  Description of Artificial Sequence: Synthetic oligonucleotide
acagcagcagcagcagcag

SEQ ID NO: 494017 - RNA, 19 nt, Artificial Sequence
  Description of Artificial Sequence: Synthetic oligonucleotide
agcaaaacuauggguccca

SEQ ID NO: 494018 - RNA, 19 nt, Artificial Sequence
  Description of Artificial Sequence: Synthetic oligonucleotide
cuuguuccuuucaguaaga

SEQ ID NO: 494019 - RNA, 19 nt, Artificial Sequence
  Description of Artificial Sequence: Synthetic oligonucleotide
auugcugaucuaauacaau

SEQ ID NO: 494020 - RNA, 19 nt, Artificial Sequence
  Description of Artificial Sequence: Synthetic oligonucleotide
ccuagaggaauuuuguuua

SEQ ID NO: 494021 - RNA, 19 nt, Artificial Sequence
  Description of Artificial Sequence: Synthetic oligonucleotide
gggcucucuuccuuaaggc

SEQ ID NO: 494022 - RNA, 19 nt, Artificial Sequence
  Description of Artificial Sequence: Synthetic oligonucleotide
gccaacucaguuccagaag

SEQ ID NO: 494023 - RNA, 19 nt, Artificial Sequence
  Description of Artificial Sequence: Synthetic oligonucleotide
cuucguugagaguggagua

SEQ ID NO: 494024 - RNA, 19 nt, Artificial Sequence
  Description of Artificial Sequence: Synthetic oligonucleotide
uagugggguuagaaagcaa

SEQ ID NO: 494025 - RNA, 19 nt, Artificial Sequence
  Description of Artificial Sequence: Synthetic oligonucleotide
cagugcgugagaucuccuc

SEQ ID NO: 494026 - RNA, 19 nt, Artificial Sequence
  Description of Artificial Sequence: Synthetic oligonucleotide
cugguguuaccuauuuucu

SEQ ID NO: 494027 - RNA, 19 nt, Artificial Sequence
  Description of Artificial Sequence: Synthetic oligonucleotide
cuagaggaauuuuguuuaa

SEQ ID NO: 494028 - RNA, 19 nt, Artificial Sequence
  Description of Artificial Sequence: Synthetic oligonucleotide
gaccacuacuugcuuucca

SEQ ID NO: 494029 - RNA, 19 nt, Artificial Sequence
  Description of Artificial Sequence: Synthetic oligonucleotide
aggggccagaucauaaaga

SEQ ID NO: 494030 - RNA, 19 nt, Artificial Sequence
  Description of Artificial Sequence: Synthetic oligonucleotide
caccccucuuggaaccagg

SEQ ID NO: 494031 - RNA, 19 nt, Artificial Sequence
  Description of Artificial Sequence: Synthetic oligonucleotide
gccacauaccuagagauaa

SEQ ID NO: 494032 - RNA, 19 nt, Artificial Sequence
  Description of Artificial Sequence: Synthetic oligonucleotide
ugcgugagaucuccuccau

SEQ ID NO: 494033 - RNA, 19 nt, Artificial Sequence
  Description of Artificial Sequence: Synthetic oligonucleotide
agaaggggccagaucauaa

SEQ ID NO: 494034 - RNA, 19 nt, Artificial Sequence
  Description of Artificial Sequence: Synthetic oligonucleotide
ccuggaaacaaacagacuu

SEQ ID NO: 494035 - RNA, 19 nt, Artificial Sequence
  Description of Artificial Sequence: Synthetic oligonucleotide
gguagcuagaaaucagagu

SEQ ID NO: 494036 - RNA, 19 nt, Artificial Sequence
  Description of Artificial Sequence: Synthetic oligonucleotide
cugggcugagccuauauau

SEQ ID NO: 494037 - RNA, 19 nt, Artificial Sequence
  Description of Artificial Sequence: Synthetic oligonucleotide
gugcgugagaucuccucca

SEQ ID NO: 494038 - RNA, 19 nt, Artificial Sequence
  Description of Artificial Sequence: Synthetic oligonucleotide
acggaugucugaugagguu

SEQ ID NO: 494039 - RNA, 19 nt, Artificial Sequence
  Description of Artificial Sequence: Synthetic oligonucleotide
gucugcgcagugaugugug

SEQ ID NO: 494040 - RNA, 19 nt, Artificial Sequence
  Description of Artificial Sequence: Synthetic oligonucleotide
gaagaacuagaugauuauu

SEQ ID NO: 494041 - RNA, 19 nt, Artificial Sequence
  Description of Artificial Sequence: Synthetic oligonucleotide
cacuauccacaugaagcuc

SEQ ID NO: 494042 - RNA, 19 nt, Artificial Sequence
  Description of Artificial Sequence: Synthetic oligonucleotide
uaaacauguugggguacuu

SEQ ID NO: 494043 - RNA, 19 nt, Artificial Sequence
  Description of Artificial Sequence: Synthetic oligonucleotide
gaacagaguuuaguggggu

SEQ ID NO: 494044 - RNA, 19 nt, Artificial Sequence
  Description of Artificial Sequence: Synthetic oligonucleotide
gcacuauccacaugaagcu

SEQ ID NO: 494045 - RNA, 19 nt, Artificial Sequence
  Description of Artificial Sequence: Synthetic oligonucleotide
agcgcccagaguuuccaua

SEQ ID NO: 494046 - RNA, 19 nt, Artificial Sequence
  Description of Artificial Sequence: Synthetic oligonucleotide
gaauauagccacagaugau

SEQ ID NO: 494047 - RNA, 19 nt, Artificial Sequence
  Description of Artificial Sequence: Synthetic oligonucleotide
ggcugagccuauauauacc

SEQ ID NO: 494048 - RNA, 19 nt, Artificial Sequence
  Description of Artificial Sequence: Synthetic oligonucleotide
ugcucucaugggaggggaa

SEQ ID NO: 494049 - RNA, 19 nt, Artificial Sequence
  Description of Artificial Sequence: Synthetic oligonucleotide
gacggaugucugaugaggu

SEQ ID NO: 494050 - RNA, 19 nt, Artificial Sequence
  Description of Artificial Sequence: Synthetic oligonucleotide
aagcgguauguguccccau

SEQ ID NO: 494051 - RNA, 19 nt, Artificial Sequence
  Description of Artificial Sequence: Synthetic oligonucleotide
gcucuuuuauaaugcugga

SEQ ID NO: 494052 - RNA, 19 nt, Artificial Sequence
  Description of Artificial Sequence: Synthetic oligonucleotide
gagaaauuucacacuguuu

SEQ ID NO: 494053 - RNA, 19 nt, Artificial Sequence
  Description of Artificial Sequence: Synthetic oligonucleotide
aaacaggaucccacuccaa

SEQ ID NO: 494054 - RNA, 19 nt, Artificial Sequence
  Description of Artificial Sequence: Synthetic oligonucleotide
uugcgcucccagagcgccc

SEQ ID NO: 494055 - RNA, 19 nt, Artificial Sequence
  Description of Artificial Sequence: Synthetic oligonucleotide
agaguuuagugggguuaga

SEQ ID NO: 494056 - RNA, 19 nt, Artificial Sequence
  Description of Artificial Sequence: Synthetic oligonucleotide
gaggcacaccccucuugga

SEQ ID NO: 494057 - RNA, 19 nt, Artificial Sequence
  Description of Artificial Sequence: Synthetic oligonucleotide
cagcagcagcagcagcagc

SEQ ID NO: 494058 - RNA, 19 nt, Artificial Sequence
  Description of Artificial Sequence: Synthetic oligonucleotide
ggaugucaaacaggauccc

SEQ ID NO: 494059 - RNA, 19 nt, Artificial Sequence
  Description of Artificial Sequence: Synthetic oligonucleotide
agacuagcuuccaggcaca

SEQ ID NO: 494060 - RNA, 19 nt, Artificial Sequence
  Description of Artificial Sequence: Synthetic oligonucleotide
auacaaucacuuagacaua

SEQ ID NO: 494061 - RNA, 19 nt, Artificial Sequence
  Description of Artificial Sequence: Synthetic oligonucleotide
acgguccaguuaaaugaca

SEQ ID NO: 494062 - RNA, 19 nt, Artificial Sequence
  Description of Artificial Sequence: Synthetic oligonucleotide
acaccccucuuggaaccag

SEQ ID NO: 494063 - RNA, 19 nt, Artificial Sequence
  Description of Artificial Sequence: Synthetic oligonucleotide
gcagcaauuucagaucugu

SEQ ID NO: 494064 - RNA, 19 nt, Artificial Sequence
  Description of Artificial Sequence: Synthetic oligonucleotide
ggcuuccuagaaaacgguc

SEQ ID NO: 494065 - RNA, 19 nt, Artificial Sequence
  Description of Artificial Sequence: Synthetic oligonucleotide
auccagugcgugagaucuc

SEQ ID NO: 494066 - RNA, 19 nt, Artificial Sequence
  Description of Artificial Sequence: Synthetic oligonucleotide
gacaguugguacagccugu

SEQ ID NO: 494067 - RNA, 19 nt, Artificial Sequence
  Description of Artificial Sequence: Synthetic oligonucleotide
agaaaacgguccaguuaaa

SEQ ID NO: 494068 - RNA, 19 nt, Artificial Sequence
  Description of Artificial Sequence: Synthetic oligonucleotide
caguugguacagccuguga

SEQ ID NO: 494069 - RNA, 19 nt, Artificial Sequence
  Description of Artificial Sequence: Synthetic oligonucleotide
ucuugccuccugguagcua

SEQ ID NO: 494070 - RNA, 19 nt, Artificial Sequence
  Description of Artificial Sequence: Synthetic oligonucleotide
ccuagagauaaucagccuu

SEQ ID NO: 494071 - RNA, 19 nt, Artificial Sequence
  Description of Artificial Sequence: Synthetic oligonucleotide
cacagcggucugcgcagug

SEQ ID NO: 494072 - RNA, 19 nt, Artificial Sequence
  Description of Artificial Sequence: Synthetic oligonucleotide
caugggagcugugcucuca

SEQ ID NO: 494073 - RNA, 19 nt, Artificial Sequence
  Description of Artificial Sequence: Synthetic oligonucleotide
ccauaagcacagcggucug

SEQ ID NO: 494074 - RNA, 19 nt, Artificial Sequence
  Description of Artificial Sequence: Synthetic oligonucleotide
gaugagguucaaacucguu

SEQ ID NO: 494075 - RNA, 19 nt, Artificial Sequence
  Description of Artificial Sequence: Synthetic oligonucleotide
cugagccuauauauaccau

SEQ ID NO: 494076 - RNA, 19 nt, Artificial Sequence
  Description of Artificial Sequence: Synthetic oligonucleotide
cauugcagauaagcgguau

SEQ ID NO: 494077 - RNA, 19 nt, Artificial Sequence
  Description of Artificial Sequence: Synthetic oligonucleotide
ggaucccacuccaaagucu

SEQ ID NO: 494078 - RNA, 19 nt, Artificial Sequence
  Description of Artificial Sequence: Synthetic oligonucleotide
cgguccaguuaaaugacaa

SEQ ID NO: 494079 - RNA, 19 nt, Artificial Sequence
  Description of Artificial Sequence: Synthetic oligonucleotide
gcggucugcgcagugaugu

SEQ ID NO: 494080 - RNA, 19 nt, Artificial Sequence
  Description of Artificial Sequence: Synthetic oligonucleotide
cugcgcagugaugugugua

SEQ ID NO: 494081 - RNA, 19 nt, Artificial Sequence
  Description of Artificial Sequence: Synthetic oligonucleotide
cccaguaggcacagacaca

SEQ ID NO: 494082 - RNA, 19 nt, Artificial Sequence
  Description of Artificial Sequence: Synthetic oligonucleotide
gagguggccuagaggaauu

SEQ ID NO: 494083 - RNA, 19 nt, Artificial Sequence
  Description of Artificial Sequence: Synthetic oligonucleotide
ggccuagaggaauuuuguu

SEQ ID NO: 494084 - RNA, 19 nt, Artificial Sequence
  Description of Artificial Sequence: Synthetic oligonucleotide
cuuagaggucuuguuccuu

SEQ ID NO: 494085 - RNA, 19 nt, Artificial Sequence
  Description of Artificial Sequence: Synthetic oligonucleotide
cagcagcagcagcagcaaa

SEQ ID NO: 494086 - RNA, 19 nt, Artificial Sequence
  Description of Artificial Sequence: Synthetic oligonucleotide
ccuuagaggucuuguuccu

SEQ ID NO: 494087 - RNA, 19 nt, Artificial Sequence
  Description of Artificial Sequence: Synthetic oligonucleotide
ggccacauaccuagagaua

SEQ ID NO: 494088 - RNA, 19 nt, Artificial Sequence
  Description of Artificial Sequence: Synthetic oligonucleotide
gcagcagcagcagcagcaa

SEQ ID NO: 494089 - RNA, 19 nt, Artificial Sequence
  Description of Artificial Sequence: Synthetic oligonucleotide
cacagaccacuacuugcuu

SEQ ID NO: 494090 - RNA, 19 nt, Artificial Sequence
  Description of Artificial Sequence: Synthetic oligonucleotide
cagcggucugcgcagugau

SEQ ID NO: 494091 - RNA, 19 nt, Artificial Sequence
  Description of Artificial Sequence: Synthetic oligonucleotide
caucggcauugcgcuccca

SEQ ID NO: 494092 - RNA, 19 nt, Artificial Sequence
  Description of Artificial Sequence: Synthetic oligonucleotide
ccagugcgugagaucuccu

SEQ ID NO: 494093 - RNA, 19 nt, Artificial Sequence
  Description of Artificial Sequence: Synthetic oligonucleotide
aauaauauccaacagcuuc

SEQ ID NO: 494094 - RNA, 19 nt, Artificial Sequence
  Description of Artificial Sequence: Synthetic oligonucleotide
aaaagaucguaguaaaucc

SEQ ID NO: 494095 - RNA, 19 nt, Artificial Sequence
  Description of Artificial Sequence: Synthetic oligonucleotide
aauagugauaacuucuggc

SEQ ID NO: 494096 - RNA, 19 nt, Artificial Sequence
  Description of Artificial Sequence: Synthetic oligonucleotide
uaaaauagcaaguagggag

SEQ ID NO: 494097 - RNA, 19 nt, Artificial Sequence
  Description of Artificial Sequence: Synthetic oligonucleotide
aaaaguauaacaccugaag

SEQ ID NO: 494098 - RNA, 19 nt, Artificial Sequence
  Description of Artificial Sequence: Synthetic oligonucleotide
auacaaauuagucaugccc

SEQ ID NO: 494099 - RNA, 19 nt, Artificial Sequence
  Description of Artificial Sequence: Synthetic oligonucleotide
uucuuaugaagauagaagg

SEQ ID NO: 494100 - RNA, 19 nt, Artificial Sequence
  Description of Artificial Sequence: Synthetic oligonucleotide
agagagaccaauaauaucc

SEQ ID NO: 494101 - RNA, 19 nt, Artificial Sequence
  Description of Artificial Sequence: Synthetic oligonucleotide
aauaaaggaguguugaucu

SEQ ID NO: 494102 - RNA, 19 nt, Artificial Sequence
  Description of Artificial Sequence: Synthetic oligonucleotide
ucuauuuucaacaaaugcu

SEQ ID NO: 494103 - RNA, 19 nt, Artificial Sequence
  Description of Artificial Sequence: Synthetic oligonucleotide
uuuaauauauacacaagga

SEQ ID NO: 494104 - RNA, 19 nt, Artificial Sequence
  Description of Artificial Sequence: Synthetic oligonucleotide
uuuaacagaagcaguauag

SEQ ID NO: 494105 - RNA, 19 nt, Artificial Sequence
  Description of Artificial Sequence: Synthetic oligonucleotide
augaguauagaagagauac

SEQ ID NO: 494106 - RNA, 19 nt, Artificial Sequence
  Description of Artificial Sequence: Synthetic oligonucleotide
uuuaucuaguucuagacug

SEQ ID NO: 494107 - RNA, 19 nt, Artificial Sequence
  Description of Artificial Sequence: Synthetic oligonucleotide
aaaccauauguucugcacc

SEQ ID NO: 494108 - RNA, 19 nt, Artificial Sequence
  Description of Artificial Sequence: Synthetic oligonucleotide
uaauuacuccaaaauaugg

SEQ ID NO: 494109 - RNA, 19 nt, Artificial Sequence
  Description of Artificial Sequence: Synthetic oligonucleotide
uaucaaauaagagacuucg

SEQ ID NO: 494110 - RNA, 19 nt, Artificial Sequence
  Description of Artificial Sequence: Synthetic oligonucleotide
acagaagcaguauagugcc

SEQ ID NO: 494111 - RNA, 19 nt, Artificial Sequence
  Description of Artificial Sequence: Synthetic oligonucleotide
acuuuaccaauguuuaucc

SEQ ID NO: 494112 - RNA, 19 nt, Artificial Sequence
  Description of Artificial Sequence: Synthetic oligonucleotide
aaauaagagacuucgcucu

SEQ ID NO: 494113 - RNA, 19 nt, Artificial Sequence
  Description of Artificial Sequence: Synthetic oligonucleotide
ugugggaucagucuggugc

SEQ ID NO: 494114 - RNA, 19 nt, Artificial Sequence
  Description of Artificial Sequence: Synthetic oligonucleotide
accuauuucacacaacugg

SEQ ID NO: 494115 - RNA, 19 nt, Artificial Sequence
  Description of Artificial Sequence: Synthetic oligonucleotide
ucuuaugaagauagaaggg

SEQ ID NO: 494116 - RNA, 19 nt, Artificial Sequence
  Description of Artificial Sequence: Synthetic oligonucleotide
ucauuuaguaccuauacaa

SEQ ID NO: 494117 - RNA, 19 nt, Artificial Sequence
  Description of Artificial Sequence: Synthetic oligonucleotide
aguaucauuaguuucagaa

SEQ ID NO: 494118 - RNA, 19 nt, Artificial Sequence
  Description of Artificial Sequence: Synthetic oligonucleotide
accauaacaaucaaacucc

SEQ ID NO: 494119 - RNA, 19 nt, Artificial Sequence
  Description of Artificial Sequence: Synthetic oligonucleotide
aaguauaacaccugaagaa

SEQ ID NO: 494120 - RNA, 19 nt, Artificial Sequence
  Description of Artificial Sequence: Synthetic oligonucleotide
uacaaauuagucaugccca

SEQ ID NO: 494121 - RNA, 19 nt, Artificial Sequence
  Description of Artificial Sequence: Synthetic oligonucleotide
aaaagaucgacuagaguac

SEQ ID NO: 494122 - RNA, 19 nt, Artificial Sequence
  Description of Artificial Sequence: Synthetic oligonucleotide
auauacuuacuauaauuuc

SEQ ID NO: 494123 - RNA, 19 nt, Artificial Sequence
  Description of Artificial Sequence: Synthetic oligonucleotide
aaauagugauaacuucugg

SEQ ID NO: 494124 - RNA, 19 nt, Artificial Sequence
  Description of Artificial Sequence: Synthetic oligonucleotide
uguuucuaaacuuuacuug

SEQ ID NO: 494125 - RNA, 19 nt, Artificial Sequence
  Description of Artificial Sequence: Synthetic oligonucleotide
aggucuguuuaauauauac

SEQ ID NO: 494126 - RNA, 19 nt, Artificial Sequence
  Description of Artificial Sequence: Synthetic oligonucleotide
aaugguaaugccacugugc

SEQ ID NO: 494127 - RNA, 19 nt, Artificial Sequence
  Description of Artificial Sequence: Synthetic oligonucleotide
uguacucucauuuucagaa

SEQ ID NO: 494128 - RNA, 19 nt, Artificial Sequence
  Description of Artificial Sequence: Synthetic oligonucleotide
uaagaggcgucaauaaagg

SEQ ID NO: 494129 - RNA, 19 nt, Artificial Sequence
  Description of Artificial Sequence: Synthetic oligonucleotide
uauaaaagccuagagagac

SEQ ID NO: 494130 - RNA, 19 nt, Artificial Sequence
  Description of Artificial Sequence: Synthetic oligonucleotide
uccaugacuauuauaaaac

SEQ ID NO: 494131 - RNA, 19 nt, Artificial Sequence
  Description of Artificial Sequence: Synthetic oligonucleotide
acuucacuaacguucacac

SEQ ID NO: 494132 - RNA, 19 nt, Artificial Sequence
  Description of Artificial Sequence: Synthetic oligonucleotide
aggucagugacuuuaacag

SEQ ID NO: 494133 - RNA, 19 nt, Artificial Sequence
  Description of Artificial Sequence: Synthetic oligonucleotide
uucuagacuguuaagguca

SEQ ID NO: 494134 - RNA, 19 nt, Artificial Sequence
  Description of Artificial Sequence: Synthetic oligonucleotide
acuauauaaaagccuagag

SEQ ID NO: 494135 - RNA, 19 nt, Artificial Sequence
  Description of Artificial Sequence: Synthetic oligonucleotide
agauacaaauuagucaugc

SEQ ID NO: 494136 - RNA, 19 nt, Artificial Sequence
  Description of Artificial Sequence: Synthetic oligonucleotide
accaccauaacaaucaaac

SEQ ID NO: 494137 - RNA, 19 nt, Artificial Sequence
  Description of Artificial Sequence: Synthetic oligonucleotide
uuagucaugcccaaaagau

SEQ ID NO: 494138 - RNA, 19 nt, Artificial Sequence
  Description of Artificial Sequence: Synthetic oligonucleotide
uagauaauuacuccaaaau

SEQ ID NO: 494139 - RNA, 19 nt, Artificial Sequence
  Description of Artificial Sequence: Synthetic oligonucleotide
aucacaacagcaaauaauc

SEQ ID NO: 494140 - RNA, 19 nt, Artificial Sequence
  Description of Artificial Sequence: Synthetic oligonucleotide
caaagaaucuucuuugcag

SEQ ID NO: 494141 - RNA, 19 nt, Artificial Sequence
  Description of Artificial Sequence: Synthetic oligonucleotide
auagaagagauacaaauua

SEQ ID NO: 494142 - RNA, 19 nt, Artificial Sequence
  Description of Artificial Sequence: Synthetic oligonucleotide
aaccuuaucaggauuggac

SEQ ID NO: 494143 - RNA, 19 nt, Artificial Sequence
  Description of Artificial Sequence: Synthetic oligonucleotide
ucuaguucuagacuguuaa

SEQ ID NO: 494144 - RNA, 19 nt, Artificial Sequence
  Description of Artificial Sequence: Synthetic oligonucleotide
ucauaaucugcuuugcucu

SEQ ID NO: 494145 - RNA, 19 nt, Artificial Sequence
  Description of Artificial Sequence: Synthetic oligonucleotide
cauauaagcucauaacuug

SEQ ID NO: 494146 - RNA, 19 nt, Artificial Sequence
  Description of Artificial Sequence: Synthetic oligonucleotide
cuucacuucacuaacguuc

SEQ ID NO: 494147 - RNA, 19 nt, Artificial Sequence
  Description of Artificial Sequence: Synthetic oligonucleotide
gacuuugugccucugauac

SEQ ID NO: 494148 - RNA, 19 nt, Artificial Sequence
  Description of Artificial Sequence: Synthetic oligonucleotide
aaauuagucaugcccaaaa

SEQ ID NO: 494149 - RNA, 19 nt, Artificial Sequence
  Description of Artificial Sequence: Synthetic oligonucleotide
aguuauucaaggcacaaaa

SEQ ID NO: 494150 - RNA, 19 nt, Artificial Sequence
  Description of Artificial Sequence: Synthetic oligonucleotide
uauaacaccugaagaauac

SEQ ID NO: 494151 - RNA, 19 nt, Artificial Sequence
  Description of Artificial Sequence: Synthetic oligonucleotide
aaauccauucauguuaaug

SEQ ID NO: 494152 - RNA, 19 nt, Artificial Sequence
  Description of Artificial Sequence: Synthetic oligonucleotide
gguguaaugaacuuuacca

SEQ ID NO: 494153 - RNA, 19 nt, Artificial Sequence
  Description of Artificial Sequence: Synthetic oligonucleotide
ucucuacuaaggaaaauga

SEQ ID NO: 494154 - RNA, 19 nt, Artificial Sequence
  Description of Artificial Sequence: Synthetic oligonucleotide
aucaaguagauaauuacuc

SEQ ID NO: 494155 - RNA, 19 nt, Artificial Sequence
  Description of Artificial Sequence: Synthetic oligonucleotide
aaggucagugacuuuaaca

SEQ ID NO: 494156 - RNA, 19 nt, Artificial Sequence
  Description of Artificial Sequence: Synthetic oligonucleotide
agucaugcccaaaagaucg

SEQ ID NO: 494157 - RNA, 19 nt, Artificial Sequence
  Description of Artificial Sequence: Synthetic oligonucleotide
accuuaucaggauuggacg

SEQ ID NO: 494158 - RNA, 19 nt, Artificial Sequence
  Description of Artificial Sequence: Synthetic oligonucleotide
agguguaaugaacuuuacc

SEQ ID NO: 494159 - RNA, 19 nt, Artificial Sequence
  Description of Artificial Sequence: Synthetic oligonucleotide
cuaacguucacacugcuuc

SEQ ID NO: 494160 - RNA, 19 nt, Artificial Sequence
  Description of Artificial Sequence: Synthetic oligonucleotide
agacuuauaaacaucaagu

SEQ ID NO: 494161 - RNA, 19 nt, Artificial Sequence
  Description of Artificial Sequence: Synthetic oligonucleotide
gugaauauacacauucugg

SEQ ID NO: 494162 - RNA, 19 nt, Artificial Sequence
  Description of Artificial Sequence: Synthetic oligonucleotide
caccauaacaaucaaacuc

SEQ ID NO: 494163 - RNA, 19 nt, Artificial Sequence
  Description of Artificial Sequence: Synthetic oligonucleotide
aacucuaauugacacuuca

SEQ ID NO: 494164 - RNA, 19 nt, Artificial Sequence
  Description of Artificial Sequence: Synthetic oligonucleotide
uauaagcucauaacuugcc

SEQ ID NO: 494165 - RNA, 19 nt, Artificial Sequence
  Description of Artificial Sequence: Synthetic oligonucleotide
uuuaguaccuauacaaguu

SEQ ID NO: 494166 - RNA, 19 nt, Artificial Sequence
  Description of Artificial Sequence: Synthetic oligonucleotide
ucaacaaaugcugucccgg

SEQ ID NO: 494167 - RNA, 19 nt, Artificial Sequence
  Description of Artificial Sequence: Synthetic oligonucleotide
uuagguguaaugaacuuua

SEQ ID NO: 494168 - RNA, 19 nt, Artificial Sequence
  Description of Artificial Sequence: Synthetic oligonucleotide
uuuaucaaauaagagacuu

SEQ ID NO: 494169 - RNA, 19 nt, Artificial Sequence
  Description of Artificial Sequence: Synthetic oligonucleotide
agaugaaauagugauaacu

SEQ ID NO: 494170 - RNA, 19 nt, Artificial Sequence
  Description of Artificial Sequence: Synthetic oligonucleotide
ucucacuauauaaaagccu

SEQ ID NO: 494171 - RNA, 19 nt, Artificial Sequence
  Description of Artificial Sequence: Synthetic oligonucleotide
auauaagcucauaacuugc

SEQ ID NO: 494172 - RNA, 19 nt, Artificial Sequence
  Description of Artificial Sequence: Synthetic oligonucleotide
aucucacuauauaaaagcc

SEQ ID NO: 494173 - RNA, 19 nt, Artificial Sequence
  Description of Artificial Sequence: Synthetic oligonucleotide
ucugauuagagucauccuu

SEQ ID NO: 494174 - RNA, 19 nt, Artificial Sequence
  Description of Artificial Sequence: Synthetic oligonucleotide
aacacaaaagaucguagua

SEQ ID NO: 494175 - RNA, 19 nt, Artificial Sequence
  Description of Artificial Sequence: Synthetic oligonucleotide
uuguuuaugggcuucacuu

SEQ ID NO: 494176 - RNA, 19 nt, Artificial Sequence
  Description of Artificial Sequence: Synthetic oligonucleotide
agauagaagggacugccag

SEQ ID NO: 494177 - RNA, 19 nt, Artificial Sequence
  Description of Artificial Sequence: Synthetic oligonucleotide
cugaccuugaaauaauuuc

SEQ ID NO: 494178 - RNA, 19 nt, Artificial Sequence
  Description of Artificial Sequence: Synthetic oligonucleotide
agauaauuacuccaaaaua

SEQ ID NO: 494179 - RNA, 19 nt, Artificial Sequence
  Description of Artificial Sequence: Synthetic oligonucleotide
cuuaguuguagacuuuagc

SEQ ID NO: 494180 - RNA, 19 nt, Artificial Sequence
  Description of Artificial Sequence: Synthetic oligonucleotide
auagcugucauuaguuggc

SEQ ID NO: 494181 - RNA, 19 nt, Artificial Sequence
  Description of Artificial Sequence: Synthetic oligonucleotide
uguaaugaacuuuaccaau

SEQ ID NO: 494182 - RNA, 19 nt, Artificial Sequence
  Description of Artificial Sequence: Synthetic oligonucleotide
uauacaaguuuguucccag

SEQ ID NO: 494183 - RNA, 19 nt, Artificial Sequence
  Description of Artificial Sequence: Synthetic oligonucleotide
aaaauagcaaguagggagu

SEQ ID NO: 494184 - RNA, 19 nt, Artificial Sequence
  Description of Artificial Sequence: Synthetic oligonucleotide
guuaaugccugcuugguca

SEQ ID NO: 494185 - RNA, 19 nt, Artificial Sequence
  Description of Artificial Sequence: Synthetic oligonucleotide
aguccuuaauacuagcuga

SEQ ID NO: 494186 - RNA, 19 nt, Artificial Sequence
  Description of Artificial Sequence: Synthetic oligonucleotide
uuaauacuagcugaccuug

SEQ ID NO: 494187 - RNA, 19 nt, Artificial Sequence
  Description of Artificial Sequence: Synthetic oligonucleotide
uguuaagcagucgucuugg

SEQ ID NO: 494188 - RNA, 19 nt, Artificial Sequence
  Description of Artificial Sequence: Synthetic oligonucleotide
uguauauuucucuggauuu

SEQ ID NO: 494189 - RNA, 19 nt, Artificial Sequence
  Description of Artificial Sequence: Synthetic oligonucleotide
uuacuccaaaauauggaga

SEQ ID NO: 494190 - RNA, 19 nt, Artificial Sequence
  Description of Artificial Sequence: Synthetic oligonucleotide
aagcuuaugcaccacuagu

SEQ ID NO: 494191 - RNA, 19 nt, Artificial Sequence
  Description of Artificial Sequence: Synthetic oligonucleotide
gaacuuagaaagaaugcug

SEQ ID NO: 494192 - RNA, 19 nt, Artificial Sequence
  Description of Artificial Sequence: Synthetic oligonucleotide
ugucccggcaaccuuauca

SEQ ID NO: 494193 - RNA, 19 nt, Artificial Sequence
  Description of Artificial Sequence: Synthetic oligonucleotide
auauacaccauugugaaua

SEQ ID NO: 494194 - RNA, 19 nt, Artificial Sequence
  Description of Artificial Sequence: Synthetic oligonucleotide
uaaaagccuagagagacca

SEQ ID NO: 494195 - RNA, 19 nt, Artificial Sequence
  Description of Artificial Sequence: Synthetic oligonucleotide
aguucuagacuguuaaggu

SEQ ID NO: 494196 - RNA, 19 nt, Artificial Sequence
  Description of Artificial Sequence: Synthetic oligonucleotide
caaaagaucguaguaaauc

SEQ ID NO: 494197 - RNA, 19 nt, Artificial Sequence
  Description of Artificial Sequence: Synthetic oligonucleotide
agaacuuagaaagaaugcu

SEQ ID NO: 494198 - RNA, 19 nt, Artificial Sequence
  Description of Artificial Sequence: Synthetic oligonucleotide
aauaagagacuucgcucug

SEQ ID NO: 494199 - RNA, 19 nt, Artificial Sequence
  Description of Artificial Sequence: Synthetic oligonucleotide
gaguccuuaauacuagcug

SEQ ID NO: 494200 - RNA, 19 nt, Artificial Sequence
  Description of Artificial Sequence: Synthetic oligonucleotide
gaaauagugauaacuucug

SEQ ID NO: 494201 - RNA, 19 nt, Artificial Sequence
  Description of Artificial Sequence: Synthetic oligonucleotide
uccccuagaaagcucaucu

SEQ ID NO: 494202 - RNA, 19 nt, Artificial Sequence
  Description of Artificial Sequence: Synthetic oligonucleotide
cuuuguacuacauaagaaa

SEQ ID NO: 494203 - RNA, 19 nt, Artificial Sequence
  Description of Artificial Sequence: Synthetic oligonucleotide
gauaauuacuccaaaauau

SEQ ID NO: 494204 - RNA, 19 nt, Artificial Sequence
  Description of Artificial Sequence: Synthetic oligonucleotide
uaauauuaaauaagugcuu

SEQ ID NO: 494205 - RNA, 19 nt, Artificial Sequence
  Description of Artificial Sequence: Synthetic oligonucleotide
cuagaguacagucaucuuc

SEQ ID NO: 494206 - RNA, 19 nt, Artificial Sequence
  Description of Artificial Sequence: Synthetic oligonucleotide
gaguguugaucuuggaaag

SEQ ID NO: 494207 - RNA, 19 nt, Artificial Sequence
  Description of Artificial Sequence: Synthetic oligonucleotide
uguauaaugauggcaauuu

SEQ ID NO: 494208 - RNA, 19 nt, Artificial Sequence
  Description of Artificial Sequence: Synthetic oligonucleotide
uucacuucacuaacguuca

SEQ ID NO: 494209 - RNA, 19 nt, Artificial Sequence
  Description of Artificial Sequence: Synthetic oligonucleotide
uaauugacacuucaucauc

SEQ ID NO: 494210 - RNA, 19 nt, Artificial Sequence
  Description of Artificial Sequence: Synthetic oligonucleotide
ucacuauauaaaagccuag

SEQ ID NO: 494211 - RNA, 19 nt, Artificial Sequence
  Description of Artificial Sequence: Synthetic oligonucleotide
ucgacuagaguacagucau

SEQ ID NO: 494212 - RNA, 19 nt, Artificial Sequence
  Description of Artificial Sequence: Synthetic oligonucleotide
cucauaaucugcuuugcuc

SEQ ID NO: 494213 - RNA, 19 nt, Artificial Sequence
  Description of Artificial Sequence: Synthetic oligonucleotide
auaauuacuccaaaauaug

SEQ ID NO: 494214 - RNA, 19 nt, Artificial Sequence
  Description of Artificial Sequence: Synthetic oligonucleotide
aguuguagacuuuagccaa

SEQ ID NO: 494215 - RNA, 19 nt, Artificial Sequence
  Description of Artificial Sequence: Synthetic oligonucleotide
acuacuaaugguaaugcca

SEQ ID NO: 494216 - RNA, 19 nt, Artificial Sequence
  Description of Artificial Sequence: Synthetic oligonucleotide
augacuauuauaaaacuaa

SEQ ID NO: 494217 - RNA, 19 nt, Artificial Sequence
  Description of Artificial Sequence: Synthetic oligonucleotide
uggcuuaccuauuucacac

SEQ ID NO: 494218 - RNA, 19 nt, Artificial Sequence
  Description of Artificial Sequence: Synthetic oligonucleotide
ugugcaucacaacagcaaa

SEQ ID NO: 494219 - RNA, 19 nt, Artificial Sequence
  Description of Artificial Sequence: Synthetic oligonucleotide
uacaaguuuguucccagaa

SEQ ID NO: 494220 - RNA, 19 nt, Artificial Sequence
  Description of Artificial Sequence: Synthetic oligonucleotide
cuguuaagcuuucacauuc

SEQ ID NO: 494221 - RNA, 19 nt, Artificial Sequence
  Description of Artificial Sequence: Synthetic oligonucleotide
uaaugguaaugccacugug

SEQ ID NO: 494222 - RNA, 19 nt, Artificial Sequence
  Description of Artificial Sequence: Synthetic oligonucleotide
aauacuagcugaccuugaa

SEQ ID NO: 494223 - RNA, 19 nt, Artificial Sequence
  Description of Artificial Sequence: Synthetic oligonucleotide
guagacugcauauaagcuc

SEQ ID NO: 494224 - RNA, 19 nt, Artificial Sequence
  Description of Artificial Sequence: Synthetic oligonucleotide
accacuagucucuacuaag

SEQ ID NO: 494225 - RNA, 19 nt, Artificial Sequence
  Description of Artificial Sequence: Synthetic oligonucleotide
ugcaccacuagucucuacu

SEQ ID NO: 494226 - RNA, 19 nt, Artificial Sequence
  Description of Artificial Sequence: Synthetic oligonucleotide
uauagugcccacuacuaau

SEQ ID NO: 494227 - RNA, 19 nt, Artificial Sequence
  Description of Artificial Sequence: Synthetic oligonucleotide
aucauuuaguaccuauaca

SEQ ID NO: 494228 - RNA, 19 nt, Artificial Sequence
  Description of Artificial Sequence: Synthetic oligonucleotide
uguuaagcuuucacauucc

SEQ ID NO: 494229 - RNA, 19 nt, Artificial Sequence
  Description of Artificial Sequence: Synthetic oligonucleotide
ugaguauagaagagauaca

SEQ ID NO: 494230 - RNA, 19 nt, Artificial Sequence
  Description of Artificial Sequence: Synthetic oligonucleotide
ucauaacuugccaaagaau

SEQ ID NO: 494231 - RNA, 19 nt, Artificial Sequence
  Description of Artificial Sequence: Synthetic oligonucleotide
gaccaauaauauccaacag

SEQ ID NO: 494232 - RNA, 19 nt, Artificial Sequence
  Description of Artificial Sequence: Synthetic oligonucleotide
gaguauagaagagauacaa

SEQ ID NO: 494233 - RNA, 19 nt, Artificial Sequence
  Description of Artificial Sequence: Synthetic oligonucleotide
cugcauauaagcucauaac

SEQ ID NO: 494234 - RNA, 19 nt, Artificial Sequence
  Description of Artificial Sequence: Synthetic oligonucleotide
gucucuacuaaggaaaaug

SEQ ID NO: 494235 - RNA, 19 nt, Artificial Sequence
  Description of Artificial Sequence: Synthetic oligonucleotide
acucuuagguguaaugaac

SEQ ID NO: 494236 - RNA, 19 nt, Artificial Sequence
  Description of Artificial Sequence: Synthetic oligonucleotide
uuaguaccuauacaaguuu

SEQ ID NO: 494237 - RNA, 19 nt, Artificial Sequence
  Description of Artificial Sequence: Synthetic oligonucleotide
aaagaucguaguaaaucca

SEQ ID NO: 494238 - RNA, 19 nt, Artificial Sequence
  Description of Artificial Sequence: Synthetic oligonucleotide
uuaucuaguucuagacugu

SEQ ID NO: 494239 - RNA, 19 nt, Artificial Sequence
  Description of Artificial Sequence: Synthetic oligonucleotide
uuaaggacuguagacugca

SEQ ID NO: 494240 - RNA, 19 nt, Artificial Sequence
  Description of Artificial Sequence: Synthetic oligonucleotide
accaauguuuauccagguc

SEQ ID NO: 494241 - RNA, 19 nt, Artificial Sequence
  Description of Artificial Sequence: Synthetic oligonucleotide
cuuguacucucauuuucag

SEQ ID NO: 494242 - RNA, 19 nt, Artificial Sequence
  Description of Artificial Sequence: Synthetic oligonucleotide
gaucguaguaaauccaaaa

SEQ ID NO: 494243 - RNA, 19 nt, Artificial Sequence
  Description of Artificial Sequence: Synthetic oligonucleotide
auaagcucauaacuugcca

SEQ ID NO: 494244 - RNA, 19 nt, Artificial Sequence
  Description of Artificial Sequence: Synthetic oligonucleotide
aucaaauaagagacuucgc

SEQ ID NO: 494245 - RNA, 19 nt, Artificial Sequence
  Description of Artificial Sequence: Synthetic oligonucleotide
uagugcccacuacuaaugg

SEQ ID NO: 494246 - RNA, 19 nt, Artificial Sequence
  Description of Artificial Sequence: Synthetic oligonucleotide
uguuuacugcuuccaagcu

SEQ ID NO: 494247 - RNA, 19 nt, Artificial Sequence
  Description of Artificial Sequence: Synthetic oligonucleotide
ucacuaacguucacacugc

SEQ ID NO: 494248 - RNA, 19 nt, Artificial Sequence
  Description of Artificial Sequence: Synthetic oligonucleotide
ucuagacuguuaaggucag

SEQ ID NO: 494249 - RNA, 19 nt, Artificial Sequence
  Description of Artificial Sequence: Synthetic oligonucleotide
accacuuccccucguacuc

SEQ ID NO: 494250 - RNA, 19 nt, Artificial Sequence
  Description of Artificial Sequence: Synthetic oligonucleotide
auaagaaauuuuguucuca

SEQ ID NO: 494251 - RNA, 19 nt, Artificial Sequence
  Description of Artificial Sequence: Synthetic oligonucleotide
caucaucguaauuuucagc

SEQ ID NO: 494252 - RNA, 19 nt, Artificial Sequence
  Description of Artificial Sequence: Synthetic oligonucleotide
cuucuagugacaguuuaag

SEQ ID NO: 494253 - RNA, 19 nt, Artificial Sequence
  Description of Artificial Sequence: Synthetic oligonucleotide
gaucgacuagaguacaguc

SEQ ID NO: 494254 - RNA, 19 nt, Artificial Sequence
  Description of Artificial Sequence: Synthetic oligonucleotide
acuagucucuacuaaggaa

SEQ ID NO: 494255 - RNA, 19 nt, Artificial Sequence
  Description of Artificial Sequence: Synthetic oligonucleotide
auaauauccaacagcuuca

SEQ ID NO: 494256 - RNA, 19 nt, Artificial Sequence
  Description of Artificial Sequence: Synthetic oligonucleotide
auaaaagccuagagagacc

SEQ ID NO: 494257 - RNA, 19 nt, Artificial Sequence
  Description of Artificial Sequence: Synthetic oligonucleotide
auaaaauagcaaguaggga

SEQ ID NO: 494258 - RNA, 19 nt, Artificial Sequence
  Description of Artificial Sequence: Synthetic oligonucleotide
agcuuaugcaccacuaguc

SEQ ID NO: 494259 - RNA, 19 nt, Artificial Sequence
  Description of Artificial Sequence: Synthetic oligonucleotide
aacaucaaguagauaauua

SEQ ID NO: 494260 - RNA, 19 nt, Artificial Sequence
  Description of Artificial Sequence: Synthetic oligonucleotide
uccaacagcuucaaagaua

SEQ ID NO: 494261 - RNA, 19 nt, Artificial Sequence
  Description of Artificial Sequence: Synthetic oligonucleotide
ugauuagagucauccuuca

SEQ ID NO: 494262 - RNA, 19 nt, Artificial Sequence
  Description of Artificial Sequence: Synthetic oligonucleotide
agugacuuuaacagaagca

SEQ ID NO: 494263 - RNA, 19 nt, Artificial Sequence
  Description of Artificial Sequence: Synthetic oligonucleotide
aaccacuuccccucguacu

SEQ ID NO: 494264 - RNA, 19 nt, Artificial Sequence
  Description of Artificial Sequence: Synthetic oligonucleotide
gauuagagucauccuucag

SEQ ID NO: 494265 - RNA, 19 nt, Artificial Sequence
  Description of Artificial Sequence: Synthetic oligonucleotide
ugcccaaaagaucgacuag

SEQ ID NO: 494266 - RNA, 19 nt, Artificial Sequence
  Description of Artificial Sequence: Synthetic oligonucleotide
agacacuuuacaaaguuau

SEQ ID NO: 494267 - RNA, 19 nt, Artificial Sequence
  Description of Artificial Sequence: Synthetic oligonucleotide
aagaggcgucaauaaagga

SEQ ID NO: 494268 - RNA, 19 nt, Artificial Sequence
  Description of Artificial Sequence: Synthetic oligonucleotide
ucguaauuuucagccaucc

SEQ ID NO: 494269 - RNA, 19 nt, Artificial Sequence
  Description of Artificial Sequence: Synthetic oligonucleotide
caugggucccauuaguauc

SEQ ID NO: 494270 - RNA, 19 nt, Artificial Sequence
  Description of Artificial Sequence: Synthetic oligonucleotide
aaacaucaaguagauaauu

SEQ ID NO: 494271 - RNA, 19 nt, Artificial Sequence
  Description of Artificial Sequence: Synthetic oligonucleotide
aaagaucgacuagaguaca

SEQ ID NO: 494272 - RNA, 19 nt, Artificial Sequence
  Description of Artificial Sequence: Synthetic oligonucleotide
ucaauaaaggaguguugau

SEQ ID NO: 494273 - RNA, 19 nt, Artificial Sequence
  Description of Artificial Sequence: Synthetic oligonucleotide
ucaucguaauuuucagcca

SEQ ID NO: 494274 - RNA, 19 nt, Artificial Sequence
  Description of Artificial Sequence: Synthetic oligonucleotide
cuucagaugaaauagugau

SEQ ID NO: 494275 - RNA, 19 nt, Artificial Sequence
  Description of Artificial Sequence: Synthetic oligonucleotide
guuuaugggcuucacuuca

SEQ ID NO: 494276 - RNA, 19 nt, Artificial Sequence
  Description of Artificial Sequence: Synthetic oligonucleotide
auuagcugugggaucaguc

SEQ ID NO: 494277 - RNA, 19 nt, Artificial Sequence
  Description of Artificial Sequence: Synthetic oligonucleotide
aaggacuguagacugcaua

SEQ ID NO: 494278 - RNA, 19 nt, Artificial Sequence
  Description of Artificial Sequence: Synthetic oligonucleotide
uagucaugcccaaaagauc

SEQ ID NO: 494279 - RNA, 19 nt, Artificial Sequence
  Description of Artificial Sequence: Synthetic oligonucleotide
caccaacucuaauugacac

SEQ ID NO: 494280 - RNA, 19 nt, Artificial Sequence
  Description of Artificial Sequence: Synthetic oligonucleotide
uggaucauuuaguaccuau

SEQ ID NO: 494281 - RNA, 19 nt, Artificial Sequence
  Description of Artificial Sequence: Synthetic oligonucleotide
aagaucguaguaaauccaa

SEQ ID NO: 494282 - RNA, 19 nt, Artificial Sequence
  Description of Artificial Sequence: Synthetic oligonucleotide
auagcaaguagggaguaga

SEQ ID NO: 494283 - RNA, 19 nt, Artificial Sequence
  Description of Artificial Sequence: Synthetic oligonucleotide
auacagcccaaagauuugg

SEQ ID NO: 494284 - RNA, 19 nt, Artificial Sequence
  Description of Artificial Sequence: Synthetic oligonucleotide
cuaguucuagacuguuaag

SEQ ID NO: 494285 - RNA, 19 nt, Artificial Sequence
  Description of Artificial Sequence: Synthetic oligonucleotide
ucguacuccuuuaagcuuu

SEQ ID NO: 494286 - RNA, 19 nt, Artificial Sequence
  Description of Artificial Sequence: Synthetic oligonucleotide
uagauguaggagacgugga

SEQ ID NO: 494287 - RNA, 19 nt, Artificial Sequence
  Description of Artificial Sequence: Synthetic oligonucleotide
uggacuuugugccucugau

SEQ ID NO: 494288 - RNA, 19 nt, Artificial Sequence
  Description of Artificial Sequence: Synthetic oligonucleotide
uuguacucucauuuucaga

SEQ ID NO: 494289 - RNA, 19 nt, Artificial Sequence
  Description of Artificial Sequence: Synthetic oligonucleotide
guucuagacuguuaagguc

SEQ ID NO: 494290 - RNA, 19 nt, Artificial Sequence
  Description of Artificial Sequence: Synthetic oligonucleotide
ggaguguugaucuuggaaa

SEQ ID NO: 494291 - RNA, 19 nt, Artificial Sequence
  Description of Artificial Sequence: Synthetic oligonucleotide
uaauacuagcugaccuuga

SEQ ID NO: 494292 - RNA, 19 nt, Artificial Sequence
  Description of Artificial Sequence: Synthetic oligonucleotide
agauaaacuaaagacucuu

SEQ ID NO: 494293 - RNA, 19 nt, Artificial Sequence
  Description of Artificial Sequence: Synthetic oligonucleotide
aguguguuaagcagucguc

SEQ ID NO: 494294 - RNA, 19 nt, Artificial Sequence
  Description of Artificial Sequence: Synthetic oligonucleotide
cucauaacuugccaaagaa

SEQ ID NO: 494295 - RNA, 19 nt, Artificial Sequence
  Description of Artificial Sequence: Synthetic oligonucleotide
guguaaugaacuuuaccaa

SEQ ID NO: 494296 - RNA, 19 nt, Artificial Sequence
  Description of Artificial Sequence: Synthetic oligonucleotide
agcucauaaucugcuuugc

SEQ ID NO: 494297 - RNA, 19 nt, Artificial Sequence
  Description of Artificial Sequence: Synthetic oligonucleotide
auugacacuucaucaucgu

SEQ ID NO: 494298 - RNA, 19 nt, Artificial Sequence
  Description of Artificial Sequence: Synthetic oligonucleotide
accaacucuaauugacacu

SEQ ID NO: 494299 - RNA, 19 nt, Artificial Sequence
  Description of Artificial Sequence: Synthetic oligonucleotide
guguuaagcagucgucuug

SEQ ID NO: 494300 - RNA, 19 nt, Artificial Sequence
  Description of Artificial Sequence: Synthetic oligonucleotide
ccuuuaucuaguucuagac

SEQ ID NO: 494301 - RNA, 19 nt, Artificial Sequence
  Description of Artificial Sequence: Synthetic oligonucleotide
uccuuaauacuagcugacc

SEQ ID NO: 494302 - RNA, 19 nt, Artificial Sequence
  Description of Artificial Sequence: Synthetic oligonucleotide
gacguggaaggggaaagag

SEQ ID NO: 494303 - RNA, 19 nt, Artificial Sequence
  Description of Artificial Sequence: Synthetic oligonucleotide
ucuguauaaugauggcaau

SEQ ID NO: 494304 - RNA, 19 nt, Artificial Sequence
  Description of Artificial Sequence: Synthetic oligonucleotide
gacaguuuaagaggcguca

SEQ ID NO: 494305 - RNA, 19 nt, Artificial Sequence
  Description of Artificial Sequence: Synthetic oligonucleotide
gagacguggaaggggaaag

SEQ ID NO: 494306 - RNA, 19 nt, Artificial Sequence
  Description of Artificial Sequence: Synthetic oligonucleotide
gaaacuagccugaagcugu

SEQ ID NO: 494307 - RNA, 19 nt, Artificial Sequence
  Description of Artificial Sequence: Synthetic oligonucleotide
gacuuuaacagaagcagua

SEQ ID NO: 494308 - RNA, 19 nt, Artificial Sequence
  Description of Artificial Sequence: Synthetic oligonucleotide
ucuuagguguaaugaacuu

SEQ ID NO: 494309 - RNA, 19 nt, Artificial Sequence
  Description of Artificial Sequence: Synthetic oligonucleotide
cauucauguuaaugccugc

SEQ ID NO: 494310 - RNA, 19 nt, Artificial Sequence
  Description of Artificial Sequence: Synthetic oligonucleotide
gcaaguagggaguagaugu

SEQ ID NO: 494311 - RNA, 19 nt, Artificial Sequence
  Description of Artificial Sequence: Synthetic oligonucleotide
gauacagcccaaagauuug

SEQ ID NO: 494312 - RNA, 19 nt, Artificial Sequence
  Description of Artificial Sequence: Synthetic oligonucleotide
uauacaccauugugaauau

SEQ ID NO: 494313 - RNA, 19 nt, Artificial Sequence
  Description of Artificial Sequence: Synthetic oligonucleotide
aagaucgacuagaguacag

SEQ ID NO: 494314 - RNA, 19 nt, Artificial Sequence
  Description of Artificial Sequence: Synthetic oligonucleotide
uaaggucagugacuuuaac

SEQ ID NO: 494315 - RNA, 19 nt, Artificial Sequence
  Description of Artificial Sequence: Synthetic oligonucleotide
guagggaguagauguagga

SEQ ID NO: 494316 - RNA, 19 nt, Artificial Sequence
  Description of Artificial Sequence: Synthetic oligonucleotide
uguguuaagcagucgucuu

SEQ ID NO: 494317 - RNA, 19 nt, Artificial Sequence
  Description of Artificial Sequence: Synthetic oligonucleotide
guugcuuaguuguagacuu

SEQ ID NO: 494318 - RNA, 19 nt, Artificial Sequence
  Description of Artificial Sequence: Synthetic oligonucleotide
gucgucuuggcuguguagc

SEQ ID NO: 494319 - RNA, 19 nt, Artificial Sequence
  Description of Artificial Sequence: Synthetic oligonucleotide
ggauuggacgcuuuguuga

SEQ ID NO: 494320 - RNA, 19 nt, Artificial Sequence
  Description of Artificial Sequence: Synthetic oligonucleotide
gucccggcaaccuuaucag

SEQ ID NO: 494321 - RNA, 19 nt, Artificial Sequence
  Description of Artificial Sequence: Synthetic oligonucleotide
gacuagaguacagucaucu

SEQ ID NO: 494322 - RNA, 19 nt, Artificial Sequence
  Description of Artificial Sequence: Synthetic oligonucleotide
auagugcccacuacuaaug

SEQ ID NO: 494323 - RNA, 19 nt, Artificial Sequence
  Description of Artificial Sequence: Synthetic oligonucleotide
auacuagcugaccuugaaa

SEQ ID NO: 494324 - RNA, 19 nt, Artificial Sequence
  Description of Artificial Sequence: Synthetic oligonucleotide
aaguuauucaaggcacaaa

SEQ ID NO: 494325 - RNA, 19 nt, Artificial Sequence
  Description of Artificial Sequence: Synthetic oligonucleotide
aaugaguauagaagagaua

SEQ ID NO: 494326 - RNA, 19 nt, Artificial Sequence
  Description of Artificial Sequence: Synthetic oligonucleotide
caaaaguauaacaccugaa

SEQ ID NO: 494327 - RNA, 19 nt, Artificial Sequence
  Description of Artificial Sequence: Synthetic oligonucleotide
acuacagaacuuagaaaga

SEQ ID NO: 494328 - RNA, 19 nt, Artificial Sequence
  Description of Artificial Sequence: Synthetic oligonucleotide
auacaaguuuguucccaga

SEQ ID NO: 494329 - RNA, 19 nt, Artificial Sequence
  Description of Artificial Sequence: Synthetic oligonucleotide
agccacuagcagcaaagca

SEQ ID NO: 494330 - RNA, 19 nt, Artificial Sequence
  Description of Artificial Sequence: Synthetic oligonucleotide
cuagcugaccuugaaauaa

SEQ ID NO: 494331 - RNA, 19 nt, Artificial Sequence
  Description of Artificial Sequence: Synthetic oligonucleotide
ccuuaucaggauuggacgc

SEQ ID NO: 494332 - RNA, 19 nt, Artificial Sequence
  Description of Artificial Sequence: Synthetic oligonucleotide
uagguguaaugaacuuuac

SEQ ID NO: 494333 - RNA, 19 nt, Artificial Sequence
  Description of Artificial Sequence: Synthetic oligonucleotide
cuucuguauaaugauggca

SEQ ID NO: 494334 - RNA, 19 nt, Artificial Sequence
  Description of Artificial Sequence: Synthetic oligonucleotide
auuggacgcuuuguugaac

SEQ ID NO: 494335 - RNA, 19 nt, Artificial Sequence
  Description of Artificial Sequence: Synthetic oligonucleotide
agccuagagagaccaauaa

SEQ ID NO: 494336 - RNA, 19 nt, Artificial Sequence
  Description of Artificial Sequence: Synthetic oligonucleotide
agaucgacuagaguacagu

SEQ ID NO: 494337 - RNA, 19 nt, Artificial Sequence
  Description of Artificial Sequence: Synthetic oligonucleotide
agugcccacuacuaauggu

SEQ ID NO: 494338 - RNA, 19 nt, Artificial Sequence
  Description of Artificial Sequence: Synthetic oligonucleotide
ugcccacuacuaaugguaa

SEQ ID NO: 494339 - RNA, 19 nt, Artificial Sequence
  Description of Artificial Sequence: Synthetic oligonucleotide
agcaaguagggaguagaug

SEQ ID NO: 494340 - RNA, 19 nt, Artificial Sequence
  Description of Artificial Sequence: Synthetic oligonucleotide
aucgacuagaguacaguca

SEQ ID NO: 494341 - RNA, 19 nt, Artificial Sequence
  Description of Artificial Sequence: Synthetic oligonucleotide
uguagacuuuagccaauuu

SEQ ID NO: 494342 - RNA, 19 nt, Artificial Sequence
  Description of Artificial Sequence: Synthetic oligonucleotide
ccuagagagaccaauaaua

SEQ ID NO: 494343 - RNA, 19 nt, Artificial Sequence
  Description of Artificial Sequence: Synthetic oligonucleotide
aagauagaagggacugcca

SEQ ID NO: 494344 - RNA, 19 nt, Artificial Sequence
  Description of Artificial Sequence: Synthetic oligonucleotide
aaauagcaaguagggagua

SEQ ID NO: 494345 - RNA, 19 nt, Artificial Sequence
  Description of Artificial Sequence: Synthetic oligonucleotide
uuauccaggucuguuuaau

SEQ ID NO: 494346 - RNA, 19 nt, Artificial Sequence
  Description of Artificial Sequence: Synthetic oligonucleotide
uucccuaaguccucuucaa

SEQ ID NO: 494347 - RNA, 19 nt, Artificial Sequence
  Description of Artificial Sequence: Synthetic oligonucleotide
gaggcgucaauaaaggagu

SEQ ID NO: 494348 - RNA, 19 nt, Artificial Sequence
  Description of Artificial Sequence: Synthetic oligonucleotide
acuagcugaccuugaaaua

SEQ ID NO: 494349 - RNA, 19 nt, Artificial Sequence
  Description of Artificial Sequence: Synthetic oligonucleotide
aucguaauuuucagccauc

SEQ ID NO: 494350 - RNA, 19 nt, Artificial Sequence
  Description of Artificial Sequence: Synthetic oligonucleotide
cuuuaucuaguucuagacu

SEQ ID NO: 494351 - RNA, 19 nt, Artificial Sequence
  Description of Artificial Sequence: Synthetic oligonucleotide
aaacagccgaguccuuaau

SEQ ID NO: 494352 - RNA, 19 nt, Artificial Sequence
  Description of Artificial Sequence: Synthetic oligonucleotide
aguauagugcccacuacua

SEQ ID NO: 494353 - RNA, 19 nt, Artificial Sequence
  Description of Artificial Sequence: Synthetic oligonucleotide
ucgucuuggcuguguagca

SEQ ID NO: 494354 - RNA, 19 nt, Artificial Sequence
  Description of Artificial Sequence: Synthetic oligonucleotide
acuccaguauaccaccauu

SEQ ID NO: 494355 - RNA, 19 nt, Artificial Sequence
  Description of Artificial Sequence: Synthetic oligonucleotide
ugcuuaguuguagacuuua

SEQ ID NO: 494356 - RNA, 19 nt, Artificial Sequence
  Description of Artificial Sequence: Synthetic oligonucleotide
ucccggcaaccuuaucagg

SEQ ID NO: 494357 - RNA, 19 nt, Artificial Sequence
  Description of Artificial Sequence: Synthetic oligonucleotide
cuggcuuaccuauuucaca

SEQ ID NO: 494358 - RNA, 19 nt, Artificial Sequence
  Description of Artificial Sequence: Synthetic oligonucleotide
gccacuagcagcaaagcac

SEQ ID NO: 494359 - RNA, 19 nt, Artificial Sequence
  Description of Artificial Sequence: Synthetic oligonucleotide
acagaucgugcagaaugag

SEQ ID NO: 494360 - RNA, 19 nt, Artificial Sequence
  Description of Artificial Sequence: Synthetic oligonucleotide
cucuuagguguaaugaacu

SEQ ID NO: 494361 - RNA, 19 nt, Artificial Sequence
  Description of Artificial Sequence: Synthetic oligonucleotide
cuauacaaguuuguuccca

SEQ ID NO: 494362 - RNA, 19 nt, Artificial Sequence
  Description of Artificial Sequence: Synthetic oligonucleotide
cugugcaucacaacagcaa

SEQ ID NO: 494363 - RNA, 19 nt, Artificial Sequence
  Description of Artificial Sequence: Synthetic oligonucleotide
aucgcugguuuguuguuau

SEQ ID NO: 494364 - RNA, 19 nt, Artificial Sequence
  Description of Artificial Sequence: Synthetic oligonucleotide
ucccagacuacagaacuua

SEQ ID NO: 494365 - RNA, 19 nt, Artificial Sequence
  Description of Artificial Sequence: Synthetic oligonucleotide
gauuggacgcuuuguugaa

SEQ ID NO: 494366 - RNA, 19 nt, Artificial Sequence
  Description of Artificial Sequence: Synthetic oligonucleotide
cuggguugcuuaguuguag

SEQ ID NO: 494367 - RNA, 19 nt, Artificial Sequence
  Description of Artificial Sequence: Synthetic oligonucleotide
auaaaggaguguugaucuu

SEQ ID NO: 494368 - RNA, 19 nt, Artificial Sequence
  Description of Artificial Sequence: Synthetic oligonucleotide
ggcaaccuuaucaggauug

SEQ ID NO: 494369 - RNA, 19 nt, Artificial Sequence
  Description of Artificial Sequence: Synthetic oligonucleotide
cuaggcuguccccuggauc

SEQ ID NO: 494370 - RNA, 19 nt, Artificial Sequence
  Description of Artificial Sequence: Synthetic oligonucleotide
gcuucuguauaaugauggc

SEQ ID NO: 494371 - RNA, 19 nt, Artificial Sequence
  Description of Artificial Sequence: Synthetic oligonucleotide
guauagugcccacuacuaa

SEQ ID NO: 494372 - RNA, 19 nt, Artificial Sequence
  Description of Artificial Sequence: Synthetic oligonucleotide
cccaaaagaucgacuagag

SEQ ID NO: 494373 - RNA, 19 nt, Artificial Sequence
  Description of Artificial Sequence: Synthetic oligonucleotide
cugucauuaguuggcuuug

SEQ ID NO: 494374 - RNA, 19 nt, Artificial Sequence
  Description of Artificial Sequence: Synthetic oligonucleotide
ggucuguuuaauauauaca

SEQ ID NO: 494375 - RNA, 19 nt, Artificial Sequence
  Description of Artificial Sequence: Synthetic oligonucleotide
ugcugucccggcaaccuua

SEQ ID NO: 494376 - RNA, 19 nt, Artificial Sequence
  Description of Artificial Sequence: Synthetic oligonucleotide
ggacaaaaguauaacaccu

SEQ ID NO: 494377 - RNA, 19 nt, Artificial Sequence
  Description of Artificial Sequence: Synthetic oligonucleotide
ccaaagauuugguuccaug

SEQ ID NO: 494378 - RNA, 19 nt, Artificial Sequence
  Description of Artificial Sequence: Synthetic oligonucleotide
cuguauauuucucuggauu

SEQ ID NO: 494379 - RNA, 19 nt, Artificial Sequence
  Description of Artificial Sequence: Synthetic oligonucleotide
auaauccauagcugucauu

SEQ ID NO: 494380 - RNA, 19 nt, Artificial Sequence
  Description of Artificial Sequence: Synthetic oligonucleotide
gaucagucuggugcuuccc

SEQ ID NO: 494381 - RNA, 19 nt, Artificial Sequence
  Description of Artificial Sequence: Synthetic oligonucleotide
ugucauuaguuggcuuugu

SEQ ID NO: 494382 - RNA, 19 nt, Artificial Sequence
  Description of Artificial Sequence: Synthetic oligonucleotide
cccuagaaagcucaucuuc

SEQ ID NO: 494383 - RNA, 19 nt, Artificial Sequence
  Description of Artificial Sequence: Synthetic oligonucleotide
agaagcuuaugcaccacua

SEQ ID NO: 494384 - RNA, 19 nt, Artificial Sequence
  Description of Artificial Sequence: Synthetic oligonucleotide
uaaggacuguagacugcau

SEQ ID NO: 494385 - RNA, 19 nt, Artificial Sequence
  Description of Artificial Sequence: Synthetic oligonucleotide
aagggacugccagguuuuc

SEQ ID NO: 494386 - RNA, 19 nt, Artificial Sequence
  Description of Artificial Sequence: Synthetic oligonucleotide
caaacagccgaguccuuaa

SEQ ID NO: 494387 - RNA, 19 nt, Artificial Sequence
  Description of Artificial Sequence: Synthetic oligonucleotide
cacuucacuaacguucaca

SEQ ID NO: 494388 - RNA, 19 nt, Artificial Sequence
  Description of Artificial Sequence: Synthetic oligonucleotide
gagacuucgcucugcuucu

SEQ ID NO: 494389 - RNA, 19 nt, Artificial Sequence
  Description of Artificial Sequence: Synthetic oligonucleotide
ucacuucacuaacguucac

SEQ ID NO: 494390 - RNA, 19 nt, Artificial Sequence
  Description of Artificial Sequence: Synthetic oligonucleotide
gcaaccuuaucaggauugg

SEQ ID NO: 494391 - RNA, 19 nt, Artificial Sequence
  Description of Artificial Sequence: Synthetic oligonucleotide
gcuuaccuauuucacacaa

SEQ ID NO: 494392 - RNA, 19 nt, Artificial Sequence
  Description of Artificial Sequence: Synthetic oligonucleotide
cccacuacuaaugguaaug

SEQ ID NO: 494393 - RNA, 19 nt, Artificial Sequence
  Description of Artificial Sequence: Synthetic oligonucleotide
agaucguaguaaauccaaa

SEQ ID NO: 494394 - RNA, 19 nt, Artificial Sequence
  Description of Artificial Sequence: Synthetic oligonucleotide
uugcuuaguuguagacuuu

SEQ ID NO: 494395 - RNA, 19 nt, Artificial Sequence
  Description of Artificial Sequence: Synthetic oligonucleotide
agaguacagucaucuucau

SEQ ID NO: 494396 - RNA, 19 nt, Artificial Sequence
  Description of Artificial Sequence: Synthetic oligonucleotide
gcucauaacuugccaaaga

SEQ ID NO: 494397 - RNA, 19 nt, Artificial Sequence
  Description of Artificial Sequence: Synthetic oligonucleotide
uaucaggauuggacgcuuu

SEQ ID NO: 494398 - RNA, 19 nt, Artificial Sequence
  Description of Artificial Sequence: Synthetic oligonucleotide
cccuaaguccucuucaaga

SEQ ID NO: 494399 - RNA, 19 nt, Artificial Sequence
  Description of Artificial Sequence: Synthetic oligonucleotide
gaucgugcagaaugaguau

SEQ ID NO: 494400 - RNA, 19 nt, Artificial Sequence
  Description of Artificial Sequence: Synthetic oligonucleotide
acguggaaggggaaagaga

SEQ ID NO: 494401 - RNA, 19 nt, Artificial Sequence
  Description of Artificial Sequence: Synthetic oligonucleotide
gugcccacuacuaauggua

SEQ ID NO: 494402 - RNA, 19 nt, Artificial Sequence
  Description of Artificial Sequence: Synthetic oligonucleotide
cucuacuaaggaaaaugau

SEQ ID NO: 494403 - RNA, 19 nt, Artificial Sequence
  Description of Artificial Sequence: Synthetic oligonucleotide
ggguugcuuaguuguagac

SEQ ID NO: 494404 - RNA, 19 nt, Artificial Sequence
  Description of Artificial Sequence: Synthetic oligonucleotide
caucaaagagcaaccacuu

SEQ ID NO: 494405 - RNA, 19 nt, Artificial Sequence
  Description of Artificial Sequence: Synthetic oligonucleotide
acauuccaaacagccgagu

SEQ ID NO: 494406 - RNA, 19 nt, Artificial Sequence
  Description of Artificial Sequence: Synthetic oligonucleotide
gcuuaguuguagacuuuag

SEQ ID NO: 494407 - RNA, 19 nt, Artificial Sequence
  Description of Artificial Sequence: Synthetic oligonucleotide
guuuacugcuuccaagcuu

SEQ ID NO: 494408 - RNA, 19 nt, Artificial Sequence
  Description of Artificial Sequence: Synthetic oligonucleotide
auaaucugcuuugcucuuu

SEQ ID NO: 494409 - RNA, 19 nt, Artificial Sequence
  Description of Artificial Sequence: Synthetic oligonucleotide
guguguuaagcagucgucu

SEQ ID NO: 494410 - RNA, 19 nt, Artificial Sequence
  Description of Artificial Sequence: Synthetic oligonucleotide
uuccccuagaaagcucauc

SEQ ID NO: 494411 - RNA, 19 nt, Artificial Sequence
  Description of Artificial Sequence: Synthetic oligonucleotide
gcuuaugcaccacuagucu

SEQ ID NO: 494412 - RNA, 19 nt, Artificial Sequence
  Description of Artificial Sequence: Synthetic oligonucleotide
gaaagaaugcuggguugcu

SEQ ID NO: 494413 - RNA, 19 nt, Artificial Sequence
  Description of Artificial Sequence: Synthetic oligonucleotide
cguaauuuucagccauccc

SEQ ID NO: 494414 - RNA, 19 nt, Artificial Sequence
  Description of Artificial Sequence: Synthetic oligonucleotide
cuuaucaggauuggacgcu

SEQ ID NO: 494415 - RNA, 19 nt, Artificial Sequence
  Description of Artificial Sequence: Synthetic oligonucleotide
gcccaaaagaucgacuaga

SEQ ID NO: 494416 - RNA, 19 nt, Artificial Sequence
  Description of Artificial Sequence: Synthetic oligonucleotide
ccuauuucacacaacuggu

SEQ ID NO: 494417 - RNA, 19 nt, Artificial Sequence
  Description of Artificial Sequence: Synthetic oligonucleotide
acacuucaucaucguaauu

SEQ ID NO: 494418 - RNA, 19 nt, Artificial Sequence
  Description of Artificial Sequence: Synthetic oligonucleotide
cagaucgugcagaaugagu

SEQ ID NO: 494419 - RNA, 19 nt, Artificial Sequence
  Description of Artificial Sequence: Synthetic oligonucleotide
cuuagguguaaugaacuuu

SEQ ID NO: 494420 - RNA, 19 nt, Artificial Sequence
  Description of Artificial Sequence: Synthetic oligonucleotide
caaauuagucaugcccaaa

SEQ ID NO: 494421 - RNA, 19 nt, Artificial Sequence
  Description of Artificial Sequence: Synthetic oligonucleotide
ccuagaaagcucaucuucu

SEQ ID NO: 494422 - RNA, 19 nt, Artificial Sequence
  Description of Artificial Sequence: Synthetic oligonucleotide
caccacuagucucuacuaa

SEQ ID NO: 494423 - RNA, 19 nt, Artificial Sequence
  Description of Artificial Sequence: Synthetic oligonucleotide
aaacuagccugaagcuguu

SEQ ID NO: 494424 - RNA, 19 nt, Artificial Sequence
  Description of Artificial Sequence: Synthetic oligonucleotide
ggaucauuuaguaccuaua

SEQ ID NO: 494425 - RNA, 19 nt, Artificial Sequence
  Description of Artificial Sequence: Synthetic oligonucleotide
gaucgcugguuuguuguua

SEQ ID NO: 494426 - RNA, 19 nt, Artificial Sequence
  Description of Artificial Sequence: Synthetic oligonucleotide
gggcauuuccaccaacucu

SEQ ID NO: 494427 - RNA, 19 nt, Artificial Sequence
  Description of Artificial Sequence: Synthetic oligonucleotide
uuggaucauuuaguaccua

SEQ ID NO: 494428 - RNA, 19 nt, Artificial Sequence
  Description of Artificial Sequence: Synthetic oligonucleotide
aggcgucaauaaaggagug

SEQ ID NO: 494429 - RNA, 19 nt, Artificial Sequence
  Description of Artificial Sequence: Synthetic oligonucleotide
ggcuucacuucacuaacgu

SEQ ID NO: 494430 - RNA, 19 nt, Artificial Sequence
  Description of Artificial Sequence: Synthetic oligonucleotide
caaccuuaucaggauugga

SEQ ID NO: 494431 - RNA, 19 nt, Artificial Sequence
  Description of Artificial Sequence: Synthetic oligonucleotide
gcugucauuaguuggcuuu

SEQ ID NO: 494432 - RNA, 19 nt, Artificial Sequence
  Description of Artificial Sequence: Synthetic oligonucleotide
gcaccuuuguuuaugggcu

SEQ ID NO: 494433 - RNA, 19 nt, Artificial Sequence
  Description of Artificial Sequence: Synthetic oligonucleotide
cagucuggugcuucccuaa

SEQ ID NO: 494434 - RNA, 19 nt, Artificial Sequence
  Description of Artificial Sequence: Synthetic oligonucleotide
cccggcaaccuuaucagga

SEQ ID NO: 494435 - RNA, 19 nt, Artificial Sequence
  Description of Artificial Sequence: Synthetic oligonucleotide
acgcuuuguugaacagcuc

SEQ ID NO: 494436 - RNA, 19 nt, Artificial Sequence
  Description of Artificial Sequence: Synthetic oligonucleotide
cuucacuaacguucacacu

SEQ ID NO: 494437 - RNA, 19 nt, Artificial Sequence
  Description of Artificial Sequence: Synthetic oligonucleotide
ggcuuaccuauuucacaca

SEQ ID NO: 494438 - RNA, 19 nt, Artificial Sequence
  Description of Artificial Sequence: Synthetic oligonucleotide
guaccuauacaaguuuguu

SEQ ID NO: 494439 - RNA, 19 nt, Artificial Sequence
  Description of Artificial Sequence: Synthetic oligonucleotide
ccaggucuguuuaauauau

SEQ ID NO: 494440 - RNA, 19 nt, Artificial Sequence
  Description of Artificial Sequence: Synthetic oligonucleotide
caggucuguuuaauauaua

SEQ ID NO: 494441 - RNA, 19 nt, Artificial Sequence
  Description of Artificial Sequence: Synthetic oligonucleotide
caggauuggacgcuuuguu

SEQ ID NO: 494442 - RNA, 19 nt, Artificial Sequence
  Description of Artificial Sequence: Synthetic oligonucleotide
cagccgaguccuuaauacu

SEQ ID NO: 494443 - RNA, 19 nt, Artificial Sequence
  Description of Artificial Sequence: Synthetic oligonucleotide
ucgcugguuuguuguuauu

SEQ ID NO: 494444 - RNA, 19 nt, Artificial Sequence
  Description of Artificial Sequence: Synthetic oligonucleotide
gcgucaauaaaggaguguu

SEQ ID NO: 494445 - RNA, 19 nt, Artificial Sequence
  Description of Artificial Sequence: Synthetic oligonucleotide
gcaccacuagucucuacua

SEQ ID NO: 494446 - RNA, 19 nt, Artificial Sequence
  Description of Artificial Sequence: Synthetic oligonucleotide
ccaagcuuccauuuuggau

SEQ ID NO: 494447 - RNA, 19 nt, Artificial Sequence
  Description of Artificial Sequence: Synthetic oligonucleotide
gugcaucacaacagcaaau

SEQ ID NO: 494448 - RNA, 19 nt, Artificial Sequence
  Description of Artificial Sequence: Synthetic oligonucleotide
cacuaacguucacacugcu

SEQ ID NO: 494449 - RNA, 19 nt, Artificial Sequence
  Description of Artificial Sequence: Synthetic oligonucleotide
gcaaccacuuccccucgua

SEQ ID NO: 494450 - RNA, 19 nt, Artificial Sequence
  Description of Artificial Sequence: Synthetic oligonucleotide
agacugcauauaagcucau

SEQ ID NO: 494451 - RNA, 19 nt, Artificial Sequence
  Description of Artificial Sequence: Synthetic oligonucleotide
ccaaaagaucgacuagagu

SEQ ID NO: 494452 - RNA, 19 nt, Artificial Sequence
  Description of Artificial Sequence: Synthetic oligonucleotide
cguacuccuuuaagcuuug

SEQ ID NO: 494453 - RNA, 19 nt, Artificial Sequence
  Description of Artificial Sequence: Synthetic oligonucleotide
gcugaccuugaaauaauuu

SEQ ID NO: 494454 - RNA, 19 nt, Artificial Sequence
  Description of Artificial Sequence: Synthetic oligonucleotide
ggcgucaauaaaggagugu

SEQ ID NO: 494455 - RNA, 19 nt, Artificial Sequence
  Description of Artificial Sequence: Synthetic oligonucleotide
ggucacuggacuccuuguu

SEQ ID NO: 494456 - RNA, 19 nt, Artificial Sequence
  Description of Artificial Sequence: Synthetic oligonucleotide
cgaguccuuaauacuagcu

SEQ ID NO: 494457 - RNA, 19 nt, Artificial Sequence
  Description of Artificial Sequence: Synthetic oligonucleotide
cugucccggcaaccuuauc

SEQ ID NO: 494458 - RNA, 19 nt, Artificial Sequence
  Description of Artificial Sequence: Synthetic oligonucleotide
cuuccccuagaaagcucau

SEQ ID NO: 494459 - RNA, 19 nt, Artificial Sequence
  Description of Artificial Sequence: Synthetic oligonucleotide
caccuuuguuuaugggcuu

SEQ ID NO: 494460 - RNA, 19 nt, Artificial Sequence
  Description of Artificial Sequence: Synthetic oligonucleotide
gccucugauacagcccaaa

SEQ ID NO: 494461 - RNA, 19 nt, Artificial Sequence
  Description of Artificial Sequence: Synthetic oligonucleotide
ccauauguucugcaccuuu

SEQ ID NO: 494462 - RNA, 19 nt, Artificial Sequence
  Description of Artificial Sequence: Synthetic oligonucleotide
cuagacuguuaaggucagu

SEQ ID NO: 494463 - RNA, 19 nt, Artificial Sequence
  Description of Artificial Sequence: Synthetic oligonucleotide
cgugcagaaugaguauaga

SEQ ID NO: 494464 - RNA, 19 nt, Artificial Sequence
  Description of Artificial Sequence: Synthetic oligonucleotide
gugcuucacuccagacuua

SEQ ID NO: 494465 - RNA, 19 nt, Artificial Sequence
  Description of Artificial Sequence: Synthetic oligonucleotide
gcccacuacuaaugguaau

SEQ ID NO: 494466 - RNA, 19 nt, Artificial Sequence
  Description of Artificial Sequence: Synthetic oligonucleotide
ccggcaaccuuaucaggau

SEQ ID NO: 494467 - RNA, 19 nt, Artificial Sequence
  Description of Artificial Sequence: Synthetic oligonucleotide
gggucccauuaguaucauu

SEQ ID NO: 494468 - RNA, 19 nt, Artificial Sequence
  Description of Artificial Sequence: Synthetic oligonucleotide
cggcaaccuuaucaggauu

SEQ ID NO: 494469 - RNA, 19 nt, Artificial Sequence
  Description of Artificial Sequence: Synthetic oligonucleotide
aaucucuaugauuauaaac

SEQ ID NO: 494470 - RNA, 19 nt, Artificial Sequence
  Description of Artificial Sequence: Synthetic oligonucleotide
aacgcuguuauaaauaugc

SEQ ID NO: 494471 - RNA, 19 nt, Artificial Sequence
  Description of Artificial Sequence: Synthetic oligonucleotide
uuuauugugacaagaacgc

SEQ ID NO: 494472 - RNA, 19 nt, Artificial Sequence
  Description of Artificial Sequence: Synthetic oligonucleotide
uguuauuccaucuagcuac

SEQ ID NO: 494473 - RNA, 19 nt, Artificial Sequence
  Description of Artificial Sequence: Synthetic oligonucleotide
auuuauugugacaagaacg

SEQ ID NO: 494474 - RNA, 19 nt, Artificial Sequence
  Description of Artificial Sequence: Synthetic oligonucleotide
gaguuuugcgcuuucaagg

SEQ ID NO: 494475 - RNA, 19 nt, Artificial Sequence
  Description of Artificial Sequence: Synthetic oligonucleotide
aauguuaacgaaaagucca

SEQ ID NO: 494476 - RNA, 19 nt, Artificial Sequence
  Description of Artificial Sequence: Synthetic oligonucleotide
aaucuacagucucuauugc

SEQ ID NO: 494477 - RNA, 19 nt, Artificial Sequence
  Description of Artificial Sequence: Synthetic oligonucleotide
ugauuauaaacgagcacag

SEQ ID NO: 494478 - RNA, 19 nt, Artificial Sequence
  Description of Artificial Sequence: Synthetic oligonucleotide
ucuauuccuacaaucaaac

SEQ ID NO: 494479 - RNA, 19 nt, Artificial Sequence
  Description of Artificial Sequence: Synthetic oligonucleotide
uauugcuaaaucucuauga

SEQ ID NO: 494480 - RNA, 19 nt, Artificial Sequence
  Description of Artificial Sequence: Synthetic oligonucleotide
aacguuugcaacugcugcg

SEQ ID NO: 494481 - RNA, 19 nt, Artificial Sequence
  Description of Artificial Sequence: Synthetic oligonucleotide
uuauaaacgagcacagcac

SEQ ID NO: 494482 - RNA, 19 nt, Artificial Sequence
  Description of Artificial Sequence: Synthetic oligonucleotide
gaguaugacccuaugauag

SEQ ID NO: 494483 - RNA, 19 nt, Artificial Sequence
  Description of Artificial Sequence: Synthetic oligonucleotide
gagaucgaauguuaggucc

SEQ ID NO: 494484 - RNA, 19 nt, Artificial Sequence
  Description of Artificial Sequence: Synthetic oligonucleotide
uauaaacgagcacagcaca

SEQ ID NO: 494485 - RNA, 19 nt, Artificial Sequence
  Description of Artificial Sequence: Synthetic oligonucleotide
ucgaauguuagguccaugc

SEQ ID NO: 494486 - RNA, 19 nt, Artificial Sequence
  Description of Artificial Sequence: Synthetic oligonucleotide
uaugcacaagcaaaggcca

SEQ ID NO: 494487 - RNA, 19 nt, Artificial Sequence
  Description of Artificial Sequence: Synthetic oligonucleotide
ucuuggucaauguuaacga

SEQ ID NO: 494488 - RNA, 19 nt, Artificial Sequence
  Description of Artificial Sequence: Synthetic oligonucleotide
uuaacgaaaaguccaucgu

SEQ ID NO: 494489 - RNA, 19 nt, Artificial Sequence
  Description of Artificial Sequence: Synthetic oligonucleotide
gauaaugcagcaaagaggu

SEQ ID NO: 494490 - RNA, 19 nt, Artificial Sequence
  Description of Artificial Sequence: Synthetic oligonucleotide
uuuaauacugaaugagauc

SEQ ID NO: 494491 - RNA, 19 nt, Artificial Sequence
  Description of Artificial Sequence: Synthetic oligonucleotide
aguaugacccuaugauagc

SEQ ID NO: 494492 - RNA, 19 nt, Artificial Sequence
  Description of Artificial Sequence: Synthetic oligonucleotide
acucuagcgaauuugacau

SEQ ID NO: 494493 - RNA, 19 nt, Artificial Sequence
  Description of Artificial Sequence: Synthetic oligonucleotide
agaacggucggucaguuca

SEQ ID NO: 494494 - RNA, 19 nt, Artificial Sequence
  Description of Artificial Sequence: Synthetic oligonucleotide
ggaauugucagauuccaag

SEQ ID NO: 494495 - RNA, 19 nt, Artificial Sequence
  Description of Artificial Sequence: Synthetic oligonucleotide
cagauuccaaguuggaagg

SEQ ID NO: 494496 - RNA, 19 nt, Artificial Sequence
  Description of Artificial Sequence: Synthetic oligonucleotide
uacucuagcgaauuugaca

SEQ ID NO: 494497 - RNA, 19 nt, Artificial Sequence
  Description of Artificial Sequence: Synthetic oligonucleotide
uuuuacucuagcgaauuug

SEQ ID NO: 494498 - RNA, 19 nt, Artificial Sequence
  Description of Artificial Sequence: Synthetic oligonucleotide
uuaacgugguucaugacuu

SEQ ID NO: 494499 - RNA, 19 nt, Artificial Sequence
  Description of Artificial Sequence: Synthetic oligonucleotide
uuugcagucauagaacggu

SEQ ID NO: 494500 - RNA, 19 nt, Artificial Sequence
  Description of Artificial Sequence: Synthetic oligonucleotide
uuccuacaaucaaacagag

SEQ ID NO: 494501 - RNA, 19 nt, Artificial Sequence
  Description of Artificial Sequence: Synthetic oligonucleotide
uuugcaacugcugcguuag

SEQ ID NO: 494502 - RNA, 19 nt, Artificial Sequence
  Description of Artificial Sequence: Synthetic oligonucleotide
uuggcacccacuguuaacg

SEQ ID NO: 494503 - RNA, 19 nt, Artificial Sequence
  Description of Artificial Sequence: Synthetic oligonucleotide
ucuagcuacuauuaucuau

SEQ ID NO: 494504 - RNA, 19 nt, Artificial Sequence
  Description of Artificial Sequence: Synthetic oligonucleotide
cuugagcaacccaacgucg

SEQ ID NO: 494505 - RNA, 19 nt, Artificial Sequence
  Description of Artificial Sequence: Synthetic oligonucleotide
uuggucaauguuaacgaaa

SEQ ID NO: 494506 - RNA, 19 nt, Artificial Sequence
  Description of Artificial Sequence: Synthetic oligonucleotide
ugacauucagcuguuauuc

SEQ ID NO: 494507 - RNA, 19 nt, Artificial Sequence
  Description of Artificial Sequence: Synthetic oligonucleotide
agcgaauuugacauucagc

SEQ ID NO: 494508 - RNA, 19 nt, Artificial Sequence
  Description of Artificial Sequence: Synthetic oligonucleotide
ggauaaugcagcaaagagg

SEQ ID NO: 494509 - RNA, 19 nt, Artificial Sequence
  Description of Artificial Sequence: Synthetic oligonucleotide
ucuuucgcaaccagucaag

SEQ ID NO: 494510 - RNA, 19 nt, Artificial Sequence
  Description of Artificial Sequence: Synthetic oligonucleotide
uacuauuaucuauggauaa

SEQ ID NO: 494511 - RNA, 19 nt, Artificial Sequence
  Description of Artificial Sequence: Synthetic oligonucleotide
uccucaaaacguuugcaac

SEQ ID NO: 494512 - RNA, 19 nt, Artificial Sequence
  Description of Artificial Sequence: Synthetic oligonucleotide
agaacgcuguuauaaauau

SEQ ID NO: 494513 - RNA, 19 nt, Artificial Sequence
  Description of Artificial Sequence: Synthetic oligonucleotide
aaaacguuugcaacugcug

SEQ ID NO: 494514 - RNA, 19 nt, Artificial Sequence
  Description of Artificial Sequence: Synthetic oligonucleotide
ccuaugauagcaugcaggg

SEQ ID NO: 494515 - RNA, 19 nt, Artificial Sequence
  Description of Artificial Sequence: Synthetic oligonucleotide
uagcuacuauuaucuaugg

SEQ ID NO: 494516 - RNA, 19 nt, Artificial Sequence
  Description of Artificial Sequence: Synthetic oligonucleotide
aguuuugcgcuuucaaggu

SEQ ID NO: 494517 - RNA, 19 nt, Artificial Sequence
  Description of Artificial Sequence: Synthetic oligonucleotide
ucggucacguucuuggggc

SEQ ID NO: 494518 - RNA, 19 nt, Artificial Sequence
  Description of Artificial Sequence: Synthetic oligonucleotide
cuggcuaugcaguucggcc

SEQ ID NO: 494519 - RNA, 19 nt, Artificial Sequence
  Description of Artificial Sequence: Synthetic oligonucleotide
cuugauccgcuccugagac

SEQ ID NO: 494520 - RNA, 19 nt, Artificial Sequence
  Description of Artificial Sequence: Synthetic oligonucleotide
cuauugcuaaaucucuaug

SEQ ID NO: 494521 - RNA, 19 nt, Artificial Sequence
  Description of Artificial Sequence: Synthetic oligonucleotide
uuuugcgcuuucaagguuu

SEQ ID NO: 494522 - RNA, 19 nt, Artificial Sequence
  Description of Artificial Sequence: Synthetic oligonucleotide
guuuguaaccccucccgcc

SEQ ID NO: 494523 - RNA, 19 nt, Artificial Sequence
  Description of Artificial Sequence: Synthetic oligonucleotide
aucguucuggucucgcggg

SEQ ID NO: 494524 - RNA, 19 nt, Artificial Sequence
  Description of Artificial Sequence: Synthetic oligonucleotide
ugugccgccgacgugacgc

SEQ ID NO: 494525 - RNA, 19 nt, Artificial Sequence
  Description of Artificial Sequence: Synthetic oligonucleotide
guuggcguagaccggaggc

SEQ ID NO: 494526 - RNA, 19 nt, Artificial Sequence
  Description of Artificial Sequence: Synthetic oligonucleotide
ugcguuagcaugaguuggc

SEQ ID NO: 494527 - RNA, 19 nt, Artificial Sequence
  Description of Artificial Sequence: Synthetic oligonucleotide
uguguucuuaaggagcacu

SEQ ID NO: 494528 - RNA, 19 nt, Artificial Sequence
  Description of Artificial Sequence: Synthetic oligonucleotide
auuccaucuagcuacuauu

SEQ ID NO: 494529 - RNA, 19 nt, Artificial Sequence
  Description of Artificial Sequence: Synthetic oligonucleotide
cuuuuccggcacuuggagg

SEQ ID NO: 494530 - RNA, 19 nt, Artificial Sequence
  Description of Artificial Sequence: Synthetic oligonucleotide
uaggaauugucagauucca

SEQ ID NO: 494531 - RNA, 19 nt, Artificial Sequence
  Description of Artificial Sequence: Synthetic oligonucleotide
agcccugacacucuguccu

SEQ ID NO: 494532 - RNA, 19 nt, Artificial Sequence
  Description of Artificial Sequence: Synthetic oligonucleotide
guuaacgugguucaugacu

SEQ ID NO: 494533 - RNA, 19 nt, Artificial Sequence
  Description of Artificial Sequence: Synthetic oligonucleotide
acgagcacagcacaugcca

SEQ ID NO: 494534 - RNA, 19 nt, Artificial Sequence
  Description of Artificial Sequence: Synthetic oligonucleotide
agcuugagcaacccaacgu

SEQ ID NO: 494535 - RNA, 19 nt, Artificial Sequence
  Description of Artificial Sequence: Synthetic oligonucleotide
uuacucuagcgaauuugac

SEQ ID NO: 494536 - RNA, 19 nt, Artificial Sequence
  Description of Artificial Sequence: Synthetic oligonucleotide
uuccaucuagcuacuauua

SEQ ID NO: 494537 - RNA, 19 nt, Artificial Sequence
  Description of Artificial Sequence: Synthetic oligonucleotide
aagaacgcuguuauaaaua

SEQ ID NO: 494538 - RNA, 19 nt, Artificial Sequence
  Description of Artificial Sequence: Synthetic oligonucleotide
gcgaauuugacauucagcu

SEQ ID NO: 494539 - RNA, 19 nt, Artificial Sequence
  Description of Artificial Sequence: Synthetic oligonucleotide
ucgcaaccagucaaguucu

SEQ ID NO: 494540 - RNA, 19 nt, Artificial Sequence
  Description of Artificial Sequence: Synthetic oligonucleotide
aucucguguacccuuggcu

SEQ ID NO: 494541 - RNA, 19 nt, Artificial Sequence
  Description of Artificial Sequence: Synthetic oligonucleotide
cuguuaacgugguucauga

SEQ ID NO: 494542 - RNA, 19 nt, Artificial Sequence
  Description of Artificial Sequence: Synthetic oligonucleotide
acggucggucaguucacgc

SEQ ID NO: 494543 - RNA, 19 nt, Artificial Sequence
  Description of Artificial Sequence: Synthetic oligonucleotide
cugcguuagcaugaguugg

SEQ ID NO: 494544 - RNA, 19 nt, Artificial Sequence
  Description of Artificial Sequence: Synthetic oligonucleotide
uccaucuagcuacuauuau

SEQ ID NO: 494545 - RNA, 19 nt, Artificial Sequence
  Description of Artificial Sequence: Synthetic oligonucleotide
gagguccgaguucuuggcg

SEQ ID NO: 494546 - RNA, 19 nt, Artificial Sequence
  Description of Artificial Sequence: Synthetic oligonucleotide
cccuaugauagcaugcagg

SEQ ID NO: 494547 - RNA, 19 nt, Artificial Sequence
  Description of Artificial Sequence: Synthetic oligonucleotide
uccuacaaucaaacagaga

SEQ ID NO: 494548 - RNA, 19 nt, Artificial Sequence
  Description of Artificial Sequence: Synthetic oligonucleotide
uuauugugacaagaacgcu

SEQ ID NO: 494549 - RNA, 19 nt, Artificial Sequence
  Description of Artificial Sequence: Synthetic oligonucleotide
uaugacccuaugauagcau

SEQ ID NO: 494550 - RNA, 19 nt, Artificial Sequence
  Description of Artificial Sequence: Synthetic oligonucleotide
uggucucgcgggcacagcc

SEQ ID NO: 494551 - RNA, 19 nt, Artificial Sequence
  Description of Artificial Sequence: Synthetic oligonucleotide
uguucuuaaggagcacuac

SEQ ID NO: 494552 - RNA, 19 nt, Artificial Sequence
  Description of Artificial Sequence: Synthetic oligonucleotide
cagcuguuauuccaucuag

SEQ ID NO: 494553 - RNA, 19 nt, Artificial Sequence
  Description of Artificial Sequence: Synthetic oligonucleotide
ugcucgucggucacguucu

SEQ ID NO: 494554 - RNA, 19 nt, Artificial Sequence
  Description of Artificial Sequence: Synthetic oligonucleotide
uccaucucguguacccuug

SEQ ID NO: 494555 - RNA, 19 nt, Artificial Sequence
  Description of Artificial Sequence: Synthetic oligonucleotide
agcuacuauuaucuaugga

SEQ ID NO: 494556 - RNA, 19 nt, Artificial Sequence
  Description of Artificial Sequence: Synthetic oligonucleotide
gacggaaaggccagcccgg

SEQ ID NO: 494557 - RNA, 19 nt, Artificial Sequence
  Description of Artificial Sequence: Synthetic oligonucleotide
cuguuuaagcugugccacc

SEQ ID NO: 494558 - RNA, 19 nt, Artificial Sequence
  Description of Artificial Sequence: Synthetic oligonucleotide
gguuacuguagccguaggc

SEQ ID NO: 494559 - RNA, 19 nt, Artificial Sequence
  Description of Artificial Sequence: Synthetic oligonucleotide
cacaugccacuugauauag

SEQ ID NO: 494560 - RNA, 19 nt, Artificial Sequence
  Description of Artificial Sequence: Synthetic oligonucleotide
ucguguacccuuggcuucg

SEQ ID NO: 494561 - RNA, 19 nt, Artificial Sequence
  Description of Artificial Sequence: Synthetic oligonucleotide
ucgcuguguaggcuggcgc

SEQ ID NO: 494562 - RNA, 19 nt, Artificial Sequence
  Description of Artificial Sequence: Synthetic oligonucleotide
uguuaacgaaaaguccauc

SEQ ID NO: 494563 - RNA, 19 nt, Artificial Sequence
  Description of Artificial Sequence: Synthetic oligonucleotide
acccuaugauagcaugcag

SEQ ID NO: 494564 - RNA, 19 nt, Artificial Sequence
  Description of Artificial Sequence: Synthetic oligonucleotide
aacgucgggcgacgugagg

SEQ ID NO: 494565 - RNA, 19 nt, Artificial Sequence
  Description of Artificial Sequence: Synthetic oligonucleotide
aucuguuggggcaaguggu

SEQ ID NO: 494566 - RNA, 19 nt, Artificial Sequence
  Description of Artificial Sequence: Synthetic oligonucleotide
agcgcacccggguugaagu

SEQ ID NO: 494567 - RNA, 19 nt, Artificial Sequence
  Description of Artificial Sequence: Synthetic oligonucleotide
gucguagaaggucguuucc

SEQ ID NO: 494568 - RNA, 19 nt, Artificial Sequence
  Description of Artificial Sequence: Synthetic oligonucleotide
cuaugauagcaugcagggc

SEQ ID NO: 494569 - RNA, 19 nt, Artificial Sequence
  Description of Artificial Sequence: Synthetic oligonucleotide
uagaccggaggcucgcugu

SEQ ID NO: 494570 - RNA, 19 nt, Artificial Sequence
  Description of Artificial Sequence: Synthetic oligonucleotide
ugcugcgggagagaguaug

SEQ ID NO: 494571 - RNA, 19 nt, Artificial Sequence
  Description of Artificial Sequence: Synthetic oligonucleotide
uguuaacgugguucaugac

SEQ ID NO: 494572 - RNA, 19 nt, Artificial Sequence
  Description of Artificial Sequence: Synthetic oligonucleotide
gcgggagagaguaugaccc

SEQ ID NO: 494573 - RNA, 19 nt, Artificial Sequence
  Description of Artificial Sequence: Synthetic oligonucleotide
guaggcgccgcucucggac

SEQ ID NO: 494574 - RNA, 19 nt, Artificial Sequence
  Description of Artificial Sequence: Synthetic oligonucleotide
aggagcacuacagaagcaa

SEQ ID NO: 494575 - RNA, 19 nt, Artificial Sequence
  Description of Artificial Sequence: Synthetic oligonucleotide
uuaagcugugccaccuguu

SEQ ID NO: 494576 - RNA, 19 nt, Artificial Sequence
  Description of Artificial Sequence: Synthetic oligonucleotide
guagaaggucguuuccauc

SEQ ID NO: 494577 - RNA, 19 nt, Artificial Sequence
  Description of Artificial Sequence: Synthetic oligonucleotide
ccaucuagcuacuauuauc

SEQ ID NO: 494578 - RNA, 19 nt, Artificial Sequence
  Description of Artificial Sequence: Synthetic oligonucleotide
guaugacccuaugauagca

SEQ ID NO: 494579 - RNA, 19 nt, Artificial Sequence
  Description of Artificial Sequence: Synthetic oligonucleotide
gugaguugcugcgggagag

SEQ ID NO: 494580 - RNA, 19 nt, Artificial Sequence
  Description of Artificial Sequence: Synthetic oligonucleotide
cugcucgucggucacguuc

SEQ ID NO: 494581 - RNA, 19 nt, Artificial Sequence
  Description of Artificial Sequence: Synthetic oligonucleotide
aacccaacgucgggcgacg

SEQ ID NO: 494582 - RNA, 19 nt, Artificial Sequence
  Description of Artificial Sequence: Synthetic oligonucleotide
agaucgaauguuaggucca

SEQ ID NO: 494583 - RNA, 19 nt, Artificial Sequence
  Description of Artificial Sequence: Synthetic oligonucleotide
cuggcacucacgagccucc

SEQ ID NO: 494584 - RNA, 19 nt, Artificial Sequence
  Description of Artificial Sequence: Synthetic oligonucleotide
ugcagggcaucuauuccua

SEQ ID NO: 494585 - RNA, 19 nt, Artificial Sequence
  Description of Artificial Sequence: Synthetic oligonucleotide
gcugcguuagcaugaguug

SEQ ID NO: 494586 - RNA, 19 nt, Artificial Sequence
  Description of Artificial Sequence: Synthetic oligonucleotide
gcguguucuggcuaugcag

SEQ ID NO: 494587 - RNA, 19 nt, Artificial Sequence
  Description of Artificial Sequence: Synthetic oligonucleotide
cucguguacccuuggcuuc

SEQ ID NO: 494588 - RNA, 19 nt, Artificial Sequence
  Description of Artificial Sequence: Synthetic oligonucleotide
ugcgacggaaaggccagcc

SEQ ID NO: 494589 - RNA, 19 nt, Artificial Sequence
  Description of Artificial Sequence: Synthetic oligonucleotide
gacgugacgcugggcagcg

SEQ ID NO: 494590 - RNA, 19 nt, Artificial Sequence
  Description of Artificial Sequence: Synthetic oligonucleotide
gacgcaacccaguccaucu

SEQ ID NO: 494591 - RNA, 19 nt, Artificial Sequence
  Description of Artificial Sequence: Synthetic oligonucleotide
agcguguucuggcuaugca

SEQ ID NO: 494592 - RNA, 19 nt, Artificial Sequence
  Description of Artificial Sequence: Synthetic oligonucleotide
uggggcugcgacggaaagg

SEQ ID NO: 494593 - RNA, 19 nt, Artificial Sequence
  Description of Artificial Sequence: Synthetic oligonucleotide
cuuggucaauguuaacgaa

SEQ ID NO: 494594 - RNA, 19 nt, Artificial Sequence
  Description of Artificial Sequence: Synthetic oligonucleotide
ucggcgaaacccuccugcu

SEQ ID NO: 494595 - RNA, 19 nt, Artificial Sequence
  Description of Artificial Sequence: Synthetic oligonucleotide
auaaacgagcacagcacau

SEQ ID NO: 494596 - RNA, 19 nt, Artificial Sequence
  Description of Artificial Sequence: Synthetic oligonucleotide
gucaggacgcaacccaguc

SEQ ID NO: 494597 - RNA, 19 nt, Artificial Sequence
  Description of Artificial Sequence: Synthetic oligonucleotide
ucguucuggucucgcgggc

SEQ ID NO: 494598 - RNA, 19 nt, Artificial Sequence
  Description of Artificial Sequence: Synthetic oligonucleotide
agucuggacuugugaguug

SEQ ID NO: 494599 - RNA, 19 nt, Artificial Sequence
  Description of Artificial Sequence: Synthetic oligonucleotide
auguuaacgaaaaguccau

SEQ ID NO: 494600 - RNA, 19 nt, Artificial Sequence
  Description of Artificial Sequence: Synthetic oligonucleotide
gguccgaguucuuggcgcg

SEQ ID NO: 494601 - RNA, 19 nt, Artificial Sequence
  Description of Artificial Sequence: Synthetic oligonucleotide
acguuugcaacugcugcgu

SEQ ID NO: 494602 - RNA, 19 nt, Artificial Sequence
  Description of Artificial Sequence: Synthetic oligonucleotide
guagaccggaggcucgcug

SEQ ID NO: 494603 - RNA, 19 nt, Artificial Sequence
  Description of Artificial Sequence: Synthetic oligonucleotide
ggcuaccgaagccaccgcg

SEQ ID NO: 494604 - RNA, 19 nt, Artificial Sequence
  Description of Artificial Sequence: Synthetic oligonucleotide
uagccgggcgauccucucc

SEQ ID NO: 494605 - RNA, 19 nt, Artificial Sequence
  Description of Artificial Sequence: Synthetic oligonucleotide
guaggagggcgccccgccg

SEQ ID NO: 494606 - RNA, 19 nt, Artificial Sequence
  Description of Artificial Sequence: Synthetic oligonucleotide
ggaacgaggcguugagggc

SEQ ID NO: 494607 - RNA, 19 nt, Artificial Sequence
  Description of Artificial Sequence: Synthetic oligonucleotide
cacucacgagccucccucc

SEQ ID NO: 494608 - RNA, 19 nt, Artificial Sequence
  Description of Artificial Sequence: Synthetic oligonucleotide
ggagguccgaguucuuggc

SEQ ID NO: 494609 - RNA, 19 nt, Artificial Sequence
  Description of Artificial Sequence: Synthetic oligonucleotide
acgucgggcgacgugagga

SEQ ID NO: 494610 - RNA, 19 nt, Artificial Sequence
  Description of Artificial Sequence: Synthetic oligonucleotide
acgugaggagguccgaguu

SEQ ID NO: 494611 - RNA, 19 nt, Artificial Sequence
  Description of Artificial Sequence: Synthetic oligonucleotide
ucucggacuggaggaacga

SEQ ID NO: 494612 - RNA, 19 nt, Artificial Sequence
  Description of Artificial Sequence: Synthetic oligonucleotide
ucgggcgacgccagcuuga

SEQ ID NO: 494613 - RNA, 19 nt, Artificial Sequence
  Description of Artificial Sequence: Synthetic oligonucleotide
ugacaagaacgcuguuaua

SEQ ID NO: 494614 - RNA, 19 nt, Artificial Sequence
  Description of Artificial Sequence: Synthetic oligonucleotide
uccaucguucuggucucgc

SEQ ID NO: 494615 - RNA, 19 nt, Artificial Sequence
  Description of Artificial Sequence: Synthetic oligonucleotide
guuugcaacugcugcguua

SEQ ID NO: 494616 - RNA, 19 nt, Artificial Sequence
  Description of Artificial Sequence: Synthetic oligonucleotide
ccucuagaaacaccauagc

SEQ ID NO: 494617 - RNA, 19 nt, Artificial Sequence
  Description of Artificial Sequence: Synthetic oligonucleotide
agaaggucguuuccaucuu

SEQ ID NO: 494618 - RNA, 19 nt, Artificial Sequence
  Description of Artificial Sequence: Synthetic oligonucleotide
ucgucguagaaggucguuu

SEQ ID NO: 494619 - RNA, 19 nt, Artificial Sequence
  Description of Artificial Sequence: Synthetic oligonucleotide
caagaacgcuguuauaaau

SEQ ID NO: 494620 - RNA, 19 nt, Artificial Sequence
  Description of Artificial Sequence: Synthetic oligonucleotide
gcuaccgaagccaccgcgg

SEQ ID NO: 494621 - RNA, 19 nt, Artificial Sequence
  Description of Artificial Sequence: Synthetic oligonucleotide
augccaaggcaaggcgcgc

SEQ ID NO: 494622 - RNA, 19 nt, Artificial Sequence
  Description of Artificial Sequence: Synthetic oligonucleotide
auguuagguccaugcaguu

SEQ ID NO: 494623 - RNA, 19 nt, Artificial Sequence
  Description of Artificial Sequence: Synthetic oligonucleotide
uugauccgcuccugagacu

SEQ ID NO: 494624 - RNA, 19 nt, Artificial Sequence
  Description of Artificial Sequence: Synthetic oligonucleotide
agcccgaucgcaaagccua

SEQ ID NO: 494625 - RNA, 19 nt, Artificial Sequence
  Description of Artificial Sequence: Synthetic oligonucleotide
uccgaguuuugcgcuuuca

SEQ ID NO: 494626 - RNA, 19 nt, Artificial Sequence
  Description of Artificial Sequence: Synthetic oligonucleotide
ugggguuacuguagccgua

SEQ ID NO: 494627 - RNA, 19 nt, Artificial Sequence
  Description of Artificial Sequence: Synthetic oligonucleotide
uggcacccacuguuaacgu

SEQ ID NO: 494628 - RNA, 19 nt, Artificial Sequence
  Description of Artificial Sequence: Synthetic oligonucleotide
aucgaauguuagguccaug

SEQ ID NO: 494629 - RNA, 19 nt, Artificial Sequence
  Description of Artificial Sequence: Synthetic oligonucleotide
acgcuguuauaaauaugca

SEQ ID NO: 494630 - RNA, 19 nt, Artificial Sequence
  Description of Artificial Sequence: Synthetic oligonucleotide
cgacggaaaggccagcccg

SEQ ID NO: 494631 - RNA, 19 nt, Artificial Sequence
  Description of Artificial Sequence: Synthetic oligonucleotide
uagaacggucggucaguuc

SEQ ID NO: 494632 - RNA, 19 nt, Artificial Sequence
  Description of Artificial Sequence: Synthetic oligonucleotide
uccgaguucuuggcgcgga

SEQ ID NO: 494633 - RNA, 19 nt, Artificial Sequence
  Description of Artificial Sequence: Synthetic oligonucleotide
caaagccuagcagccaaca

SEQ ID NO: 494634 - RNA, 19 nt, Artificial Sequence
  Description of Artificial Sequence: Synthetic oligonucleotide
ggcacccacuguuaacgug

SEQ ID NO: 494635 - RNA, 19 nt, Artificial Sequence
  Description of Artificial Sequence: Synthetic oligonucleotide
cucggacuggaggaacgag

SEQ ID NO: 494636 - RNA, 19 nt, Artificial Sequence
  Description of Artificial Sequence: Synthetic oligonucleotide
caacgucgggcgacgugag

SEQ ID NO: 494637 - RNA, 19 nt, Artificial Sequence
  Description of Artificial Sequence: Synthetic oligonucleotide
agcccggccgcgccguagg

SEQ ID NO: 494638 - RNA, 19 nt, Artificial Sequence
  Description of Artificial Sequence: Synthetic oligonucleotide
ggcgacgugaggagguccg

SEQ ID NO: 494639 - RNA, 19 nt, Artificial Sequence
  Description of Artificial Sequence: Synthetic oligonucleotide
gaacggucggucaguucac

SEQ ID NO: 494640 - RNA, 19 nt, Artificial Sequence
  Description of Artificial Sequence: Synthetic oligonucleotide
ucgcaaagccuagcagcca

SEQ ID NO: 494641 - RNA, 19 nt, Artificial Sequence
  Description of Artificial Sequence: Synthetic oligonucleotide
cuggcgccggcuaccgaag

SEQ ID NO: 494642 - RNA, 19 nt, Artificial Sequence
  Description of Artificial Sequence: Synthetic oligonucleotide
uaggcgccgcucucggacu

SEQ ID NO: 494643 - RNA, 19 nt, Artificial Sequence
  Description of Artificial Sequence: Synthetic oligonucleotide
caccaugcccgcaccgcug

SEQ ID NO: 494644 - RNA, 19 nt, Artificial Sequence
  Description of Artificial Sequence: Synthetic oligonucleotide
ccggcuaccgaagccaccg

SEQ ID NO: 494645 - RNA, 19 nt, Artificial Sequence
  Description of Artificial Sequence: Synthetic oligonucleotide
ggguuacuguagccguagg

SEQ ID NO: 494646 - RNA, 19 nt, Artificial Sequence
  Description of Artificial Sequence: Synthetic oligonucleotide
ccagcuugagcaacccaac

SEQ ID NO: 494647 - RNA, 19 nt, Artificial Sequence
  Description of Artificial Sequence: Synthetic oligonucleotide
auagaacggucggucaguu

SEQ ID NO: 494648 - RNA, 19 nt, Artificial Sequence
  Description of Artificial Sequence: Synthetic oligonucleotide
gcugcgacggaaaggccag

SEQ ID NO: 494649 - RNA, 19 nt, Artificial Sequence
  Description of Artificial Sequence: Synthetic oligonucleotide
gucgggcgacgugaggagg

SEQ ID NO: 494650 - RNA, 19 nt, Artificial Sequence
  Description of Artificial Sequence: Synthetic oligonucleotide
cagcguguucuggcuaugc

SEQ ID NO: 494651 - RNA, 19 nt, Artificial Sequence
  Description of Artificial Sequence: Synthetic oligonucleotide
uugugacaagaacgcuguu

SEQ ID NO: 494652 - RNA, 19 nt, Artificial Sequence
  Description of Artificial Sequence: Synthetic oligonucleotide
aacgaggcguugagggcau

SEQ ID NO: 494653 - RNA, 19 nt, Artificial Sequence
  Description of Artificial Sequence: Synthetic oligonucleotide
gccgucaggacgcaaccca

SEQ ID NO: 494654 - RNA, 19 nt, Artificial Sequence
  Description of Artificial Sequence: Synthetic oligonucleotide
uucgguacucgggcuacuu

SEQ ID NO: 494655 - RNA, 19 nt, Artificial Sequence
  Description of Artificial Sequence: Synthetic oligonucleotide
cuagccgggcgauccucuc

SEQ ID NO: 494656 - RNA, 19 nt, Artificial Sequence
  Description of Artificial Sequence: Synthetic oligonucleotide
ggggcuacuuuucaauagu

SEQ ID NO: 494657 - RNA, 19 nt, Artificial Sequence
  Description of Artificial Sequence: Synthetic oligonucleotide
ccggccgcgccguaggagg

SEQ ID NO: 494658 - RNA, 19 nt, Artificial Sequence
  Description of Artificial Sequence: Synthetic oligonucleotide
ggcugcgacggaaaggcca

SEQ ID NO: 494659 - RNA, 19 nt, Artificial Sequence
  Description of Artificial Sequence: Synthetic oligonucleotide
gcgacggaaaggccagccc

SEQ ID NO: 494660 - RNA, 19 nt, Artificial Sequence
  Description of Artificial Sequence: Synthetic oligonucleotide
guccgaguucuuggcgcgg

SEQ ID NO: 494661 - RNA, 19 nt, Artificial Sequence
  Description of Artificial Sequence: Synthetic oligonucleotide
ucccuagcccucccugcuu

SEQ ID NO: 494662 - RNA, 19 nt, Artificial Sequence
  Description of Artificial Sequence: Synthetic oligonucleotide
gcucagcgcacccggguug

SEQ ID NO: 494663 - RNA, 19 nt, Artificial Sequence
  Description of Artificial Sequence: Synthetic oligonucleotide
caaguggugcggcggcuga

SEQ ID NO: 494664 - RNA, 19 nt, Artificial Sequence
  Description of Artificial Sequence: Synthetic oligonucleotide
cguuagcaugaguuggcac

SEQ ID NO: 494665 - RNA, 19 nt, Artificial Sequence
  Description of Artificial Sequence: Synthetic oligonucleotide
cauagaacggucggucagu

SEQ ID NO: 494666 - RNA, 19 nt, Artificial Sequence
  Description of Artificial Sequence: Synthetic oligonucleotide
ccgucaggacgcaacccag

SEQ ID NO: 494667 - RNA, 19 nt, Artificial Sequence
  Description of Artificial Sequence: Synthetic oligonucleotide
augcacaagcaaaggccau

SEQ ID NO: 494668 - RNA, 19 nt, Artificial Sequence
  Description of Artificial Sequence: Synthetic oligonucleotide
guccaucguucuggucucg

SEQ ID NO: 494669 - RNA, 19 nt, Artificial Sequence
  Description of Artificial Sequence: Synthetic oligonucleotide
ggcgccggcuaccgaagcc

SEQ ID NO: 494670 - RNA, 19 nt, Artificial Sequence
  Description of Artificial Sequence: Synthetic oligonucleotide
ccuugauccgcuccugaga

SEQ ID NO: 494671 - RNA, 19 nt, Artificial Sequence
  Description of Artificial Sequence: Synthetic oligonucleotide
guuuugcgcuuucaagguu

SEQ ID NO: 494672 - RNA, 19 nt, Artificial Sequence
  Description of Artificial Sequence: Synthetic oligonucleotide
auaaugcagcaaagagguu

SEQ ID NO: 494673 - RNA, 19 nt, Artificial Sequence
  Description of Artificial Sequence: Synthetic oligonucleotide
cuuucgcaaccagucaagu

SEQ ID NO: 494674 - RNA, 19 nt, Artificial Sequence
  Description of Artificial Sequence: Synthetic oligonucleotide
gaucgaauguuagguccau

SEQ ID NO: 494675 - RNA, 19 nt, Artificial Sequence
  Description of Artificial Sequence: Synthetic oligonucleotide
cagcgcacccggguugaag

SEQ ID NO: 494676 - RNA, 19 nt, Artificial Sequence
  Description of Artificial Sequence: Synthetic oligonucleotide
ccaacgucgggcgacguga

SEQ ID NO: 494677 - RNA, 19 nt, Artificial Sequence
  Description of Artificial Sequence: Synthetic oligonucleotide
cacguucuuggggcacaag

SEQ ID NO: 494678 - RNA, 19 nt, Artificial Sequence
  Description of Artificial Sequence: Synthetic oligonucleotide
ggcacagcccgaucgcaaa

SEQ ID NO: 494679 - RNA, 19 nt, Artificial Sequence
  Description of Artificial Sequence: Synthetic oligonucleotide
cuccgaguuuugcgcuuuc

SEQ ID NO: 494680 - RNA, 19 nt, Artificial Sequence
  Description of Artificial Sequence: Synthetic oligonucleotide
cugugccgccgacgugacg

SEQ ID NO: 494681 - RNA, 19 nt, Artificial Sequence
  Description of Artificial Sequence: Synthetic oligonucleotide
uugcugcgggagagaguau

SEQ ID NO: 494682 - RNA, 19 nt, Artificial Sequence
  Description of Artificial Sequence: Synthetic oligonucleotide
gccgccgacgugacgcugg

SEQ ID NO: 494683 - RNA, 19 nt, Artificial Sequence
  Description of Artificial Sequence: Synthetic oligonucleotide
ggcgcggagaugcggcuuc

SEQ ID NO: 494684 - RNA, 19 nt, Artificial Sequence
  Description of Artificial Sequence: Synthetic oligonucleotide
gcacuacagaagcaaucua

SEQ ID NO: 494685 - RNA, 19 nt, Artificial Sequence
  Description of Artificial Sequence: Synthetic oligonucleotide
gcgggcacagcccgaucgc

SEQ ID NO: 494686 - RNA, 19 nt, Artificial Sequence
  Description of Artificial Sequence: Synthetic oligonucleotide
cuggucucgcgggcacagc

SEQ ID NO: 494687 - RNA, 19 nt, Artificial Sequence
  Description of Artificial Sequence: Synthetic oligonucleotide
ccgaguuuugcgcuuucaa

SEQ ID NO: 494688 - RNA, 19 nt, Artificial Sequence
  Description of Artificial Sequence: Synthetic oligonucleotide
cggaggcucgcuguguagg

SEQ ID NO: 494689 - RNA, 19 nt, Artificial Sequence
  Description of Artificial Sequence: Synthetic oligonucleotide
cgcgccacguccuucccac

SEQ ID NO: 494690 - RNA, 19 nt, Artificial Sequence
  Description of Artificial Sequence: Synthetic oligonucleotide
gccaaggcaaggcgcgcca

SEQ ID NO: 494691 - RNA, 19 nt, Artificial Sequence
  Description of Artificial Sequence: Synthetic oligonucleotide
cccaguccaucucguguac

SEQ ID NO: 494692 - RNA, 19 nt, Artificial Sequence
  Description of Artificial Sequence: Synthetic oligonucleotide
gcaguucggccagggcgcg

SEQ ID NO: 494693 - RNA, 19 nt, Artificial Sequence
  Description of Artificial Sequence: Synthetic oligonucleotide
gcguuagcaugaguuggca

SEQ ID NO: 494694 - RNA, 19 nt, Artificial Sequence
  Description of Artificial Sequence: Synthetic oligonucleotide
cagcuccgaguuuugcgcu

SEQ ID NO: 494695 - RNA, 19 nt, Artificial Sequence
  Description of Artificial Sequence: Synthetic oligonucleotide
cugcgacggaaaggccagc

SEQ ID NO: 494696 - RNA, 19 nt, Artificial Sequence
  Description of Artificial Sequence: Synthetic oligonucleotide
gggagagaguaugacccua

SEQ ID NO: 494697 - RNA, 19 nt, Artificial Sequence
  Description of Artificial Sequence: Synthetic oligonucleotide
ucgcgggcacagcccgauc

SEQ ID NO: 494698 - RNA, 19 nt, Artificial Sequence
  Description of Artificial Sequence: Synthetic oligonucleotide
ccggaggcucgcuguguag

SEQ ID NO: 494699 - RNA, 19 nt, Artificial Sequence
  Description of Artificial Sequence: Synthetic oligonucleotide
gggcgacgugaggaggucc

SEQ ID NO: 494700 - RNA, 19 nt, Artificial Sequence
  Description of Artificial Sequence: Synthetic oligonucleotide
acgaggcguugagggcauc

SEQ ID NO: 494701 - RNA, 19 nt, Artificial Sequence
  Description of Artificial Sequence: Synthetic oligonucleotide
cccaacgucgggcgacgug

SEQ ID NO: 494702 - RNA, 19 nt, Artificial Sequence
  Description of Artificial Sequence: Synthetic oligonucleotide
gcucuaaacugaagugccu

SEQ ID NO: 494703 - RNA, 19 nt, Artificial Sequence
  Description of Artificial Sequence: Synthetic oligonucleotide
ucagcgcacccggguugaa

SEQ ID NO: 494704 - RNA, 19 nt, Artificial Sequence
  Description of Artificial Sequence: Synthetic oligonucleotide
cucuagcgaauuugacauu

SEQ ID NO: 494705 - RNA, 19 nt, Artificial Sequence
  Description of Artificial Sequence: Synthetic oligonucleotide
cauugccccucagcccuga

SEQ ID NO: 494706 - RNA, 19 nt, Artificial Sequence
  Description of Artificial Sequence: Synthetic oligonucleotide
cgacgugacgcugggcagc

SEQ ID NO: 494707 - RNA, 19 nt, Artificial Sequence
  Description of Artificial Sequence: Synthetic oligonucleotide
gcgccggcuaccgaagcca

SEQ ID NO: 494708 - RNA, 19 nt, Artificial Sequence
  Description of Artificial Sequence: Synthetic oligonucleotide
acccaacgucgggcgacgu

SEQ ID NO: 494709 - RNA, 19 nt, Artificial Sequence
  Description of Artificial Sequence: Synthetic oligonucleotide
aggacgcaacccaguccau

SEQ ID NO: 494710 - RNA, 19 nt, Artificial Sequence
  Description of Artificial Sequence: Synthetic oligonucleotide
gggcaucuauuccuacaau

SEQ ID NO: 494711 - RNA, 19 nt, Artificial Sequence
  Description of Artificial Sequence: Synthetic oligonucleotide
ggcgcgccacguccuuccc

SEQ ID NO: 494712 - RNA, 19 nt, Artificial Sequence
  Description of Artificial Sequence: Synthetic oligonucleotide
ccucuccgccuugauccgc

SEQ ID NO: 494713 - RNA, 19 nt, Artificial Sequence
  Description of Artificial Sequence: Synthetic oligonucleotide
ccgccgacgugacgcuggg

SEQ ID NO: 494714 - RNA, 19 nt, Artificial Sequence
  Description of Artificial Sequence: Synthetic oligonucleotide
ccauugccccucagcccug

SEQ ID NO: 494715 - RNA, 19 nt, Artificial Sequence
  Description of Artificial Sequence: Synthetic oligonucleotide
ccaaggcaaggcgcgccac

SEQ ID NO: 494716 - RNA, 19 nt, Artificial Sequence
  Description of Artificial Sequence: Synthetic oligonucleotide
ccacguccuucccacucca

SEQ ID NO: 494717 - RNA, 19 nt, Artificial Sequence
  Description of Artificial Sequence: Synthetic oligonucleotide
gccggcuaccgaagccacc

SEQ ID NO: 494718 - RNA, 19 nt, Artificial Sequence
  Description of Artificial Sequence: Synthetic oligonucleotide
cggcgaaacccuccugcuc

SEQ ID NO: 494719 - RNA, 19 nt, Artificial Sequence
  Description of Artificial Sequence: Synthetic oligonucleotide
cguggacgccagcuccgag

SEQ ID NO: 494720 - RNA, 19 nt, Artificial Sequence
  Description of Artificial Sequence: Synthetic oligonucleotide
ccguaggagggcgccccgc

SEQ ID NO: 494721 - RNA, 19 nt, Artificial Sequence
  Description of Artificial Sequence: Synthetic oligonucleotide
cgcaaccagucaaguucuc

SEQ ID NO: 494722 - RNA, 19 nt, Artificial Sequence
  Description of Artificial Sequence: Synthetic oligonucleotide
cgccggcuaccgaagccac

SEQ ID NO: 494723 - RNA, 19 nt, Artificial Sequence
  Description of Artificial Sequence: Synthetic oligonucleotide
cgcgccguaggagggcgcc

SEQ ID NO: 494724 - RNA, 19 nt, Artificial Sequence
  Description of Artificial Sequence: Synthetic oligonucleotide
cgccgucaggacgcaaccc

SEQ ID NO: 494725 - RNA, 19 nt, Artificial Sequence
  Description of Artificial Sequence: Synthetic oligonucleotide
cuucgguacucgggcuacu

SEQ ID NO: 494726 - RNA, 19 nt, Artificial Sequence
  Description of Artificial Sequence: Synthetic oligonucleotide
gcgacgugaggagguccga

SEQ ID NO: 494727 - RNA, 19 nt, Artificial Sequence
  Description of Artificial Sequence: Synthetic oligonucleotide
cgggcgacgccagcuugag

SEQ ID NO: 494728 - RNA, 19 nt, Artificial Sequence
  Description of Artificial Sequence: Synthetic oligonucleotide
caaggcgcgccacguccuu

SEQ ID NO: 494729 - RNA, 19 nt, Artificial Sequence
  Description of Artificial Sequence: Synthetic oligonucleotide
ccgcgccguaggagggcgc

SEQ ID NO: 494730 - RNA, 19 nt, Artificial Sequence
  Description of Artificial Sequence: Synthetic oligonucleotide
cgucaggacgcaacccagu

SEQ ID NO: 494731 - RNA, 19 nt, Artificial Sequence
  Description of Artificial Sequence: Synthetic oligonucleotide
ccgcaccgcugaccggcug

SEQ ID NO: 494732 - RNA, 19 nt, Artificial Sequence
  Description of Artificial Sequence: Synthetic oligonucleotide
gcuccgaguuuugcgcuuu

SEQ ID NO: 494733 - RNA, 19 nt, Artificial Sequence
  Description of Artificial Sequence: Synthetic oligonucleotide
gcgcggagaugcggcuuca

SEQ ID NO: 494734 - RNA, 19 nt, Artificial Sequence
  Description of Artificial Sequence: Synthetic oligonucleotide
gcgcacccggguugaaguu

SEQ ID NO: 494735 - RNA, 19 nt, Artificial Sequence
  Description of Artificial Sequence: Synthetic oligonucleotide
cccuagcccucccugcuuu

SEQ ID NO: 494736 - RNA, 19 nt, Artificial Sequence
  Description of Artificial Sequence: Synthetic oligonucleotide
ccguggacgccagcuccga

SEQ ID NO: 494737 - RNA, 19 nt, Artificial Sequence
  Description of Artificial Sequence: Synthetic oligonucleotide
gcgccacguccuucccacu

SEQ ID NO: 494738 - RNA, 19 nt, Artificial Sequence
  Description of Artificial Sequence: Synthetic oligonucleotide
cgccgacgugacgcugggc

SEQ ID NO: 494739 - RNA, 19 nt, Artificial Sequence
  Description of Artificial Sequence: Synthetic oligonucleotide
gcucgucggucacguucuu

SEQ ID NO: 494740 - RNA, 19 nt, Artificial Sequence
  Description of Artificial Sequence: Synthetic oligonucleotide
cccgcaccgcugaccggcu

SEQ ID NO: 494741 - RNA, 19 nt, Artificial Sequence
  Description of Artificial Sequence: Synthetic oligonucleotide
gggcgccgucaggacgcaa

SEQ ID NO: 494742 - RNA, 19 nt, Artificial Sequence
  Description of Artificial Sequence: Synthetic oligonucleotide
cguagaccggaggcucgcu

SEQ ID NO: 494743 - RNA, 19 nt, Artificial Sequence
  Description of Artificial Sequence: Synthetic oligonucleotide
aauacggggaaauauaucc

SEQ ID NO: 494744 - RNA, 19 nt, Artificial Sequence
  Description of Artificial Sequence: Synthetic oligonucleotide
aaauaaauuaucuguaggc

SEQ ID NO: 494745 - RNA, 19 nt, Artificial Sequence
  Description of Artificial Sequence: Synthetic oligonucleotide
aaaguugucacauaauugg

SEQ ID NO: 494746 - RNA, 19 nt, Artificial Sequence
  Description of Artificial Sequence: Synthetic oligonucleotide
aauuguagcaaccugagca

SEQ ID NO: 494747 - RNA, 19 nt, Artificial Sequence
  Description of Artificial Sequence: Synthetic oligonucleotide
aaugauucccuuuuccacc

SEQ ID NO: 494748 - RNA, 19 nt, Artificial Sequence
  Description of Artificial Sequence: Synthetic oligonucleotide
uuuaauaauuucuauaccu

SEQ ID NO: 494749 - RNA, 19 nt, Artificial Sequence
  Description of Artificial Sequence: Synthetic oligonucleotide
aauagaacgugccagaaca

SEQ ID NO: 494750 - RNA, 19 nt, Artificial Sequence
  Description of Artificial Sequence: Synthetic oligonucleotide
uguguuaauaaaauacggg

SEQ ID NO: 494751 - RNA, 19 nt, Artificial Sequence
  Description of Artificial Sequence: Synthetic oligonucleotide
ugauguguuaauaaaauac

SEQ ID NO: 494752 - RNA, 19 nt, Artificial Sequence
  Description of Artificial Sequence: Synthetic oligonucleotide
aauauauccucugucaaac

SEQ ID NO: 494753 - RNA, 19 nt, Artificial Sequence
  Description of Artificial Sequence: Synthetic oligonucleotide
auuagaacaugccaccucc

SEQ ID NO: 494754 - RNA, 19 nt, Artificial Sequence
  Description of Artificial Sequence: Synthetic oligonucleotide
agcaauaaugaccaagggc

SEQ ID NO: 494755 - RNA, 19 nt, Artificial Sequence
  Description of Artificial Sequence: Synthetic oligonucleotide
auuucuacuggauuagccc

SEQ ID NO: 494756 - RNA, 19 nt, Artificial Sequence
  Description of Artificial Sequence: Synthetic oligonucleotide
ucuaacucaucauucaggg

SEQ ID NO: 494757 - RNA, 19 nt, Artificial Sequence
  Description of Artificial Sequence: Synthetic oligonucleotide
gauguguuaauaaaauacg

SEQ ID NO: 494758 - RNA, 19 nt, Artificial Sequence
  Description of Artificial Sequence: Synthetic oligonucleotide
uuagcaauugucauugcag

SEQ ID NO: 494759 - RNA, 19 nt, Artificial Sequence
  Description of Artificial Sequence: Synthetic oligonucleotide
uacacaauuauucucacuc

SEQ ID NO: 494760 - RNA, 19 nt, Artificial Sequence
  Description of Artificial Sequence: Synthetic oligonucleotide
uguacaaaugucuuuauuc

SEQ ID NO: 494761 - RNA, 19 nt, Artificial Sequence
  Description of Artificial Sequence: Synthetic oligonucleotide
aucauaaccaauuuccgag

SEQ ID NO: 494762 - RNA, 19 nt, Artificial Sequence
  Description of Artificial Sequence: Synthetic oligonucleotide
aguugugauuucuagcugc

SEQ ID NO: 494763 - RNA, 19 nt, Artificial Sequence
  Description of Artificial Sequence: Synthetic oligonucleotide
uauaccuauuuucugaucu

SEQ ID NO: 494764 - RNA, 19 nt, Artificial Sequence
  Description of Artificial Sequence: Synthetic oligonucleotide
caagauuuagauuuagccc

SEQ ID NO: 494765 - RNA, 19 nt, Artificial Sequence
  Description of Artificial Sequence: Synthetic oligonucleotide
ucaaagauccuucaacacc

SEQ ID NO: 494766 - RNA, 19 nt, Artificial Sequence
  Description of Artificial Sequence: Synthetic oligonucleotide
uguauugucaaugggaacc

SEQ ID NO: 494767 - RNA, 19 nt, Artificial Sequence
  Description of Artificial Sequence: Synthetic oligonucleotide
ucuuaaguuaucaccgagg

SEQ ID NO: 494768 - RNA, 19 nt, Artificial Sequence
  Description of Artificial Sequence: Synthetic oligonucleotide
aagaccaacuuuuagccug

SEQ ID NO: 494769 - RNA, 19 nt, Artificial Sequence
  Description of Artificial Sequence: Synthetic oligonucleotide
uaaaacaaugccuucuuca

SEQ ID NO: 494770 - RNA, 19 nt, Artificial Sequence
  Description of Artificial Sequence: Synthetic oligonucleotide
aauuauucucacucuccac

SEQ ID NO: 494771 - RNA, 19 nt, Artificial Sequence
  Description of Artificial Sequence: Synthetic oligonucleotide
aauuagaacaugccaccuc

SEQ ID NO: 494772 - RNA, 19 nt, Artificial Sequence
  Description of Artificial Sequence: Synthetic oligonucleotide
ugauuuaaguugaaagcag

SEQ ID NO: 494773 - RNA, 19 nt, Artificial Sequence
  Description of Artificial Sequence: Synthetic oligonucleotide
guaacugaugguuauagug

SEQ ID NO: 494774 - RNA, 19 nt, Artificial Sequence
  Description of Artificial Sequence: Synthetic oligonucleotide
cuuacgaugagcauuagca

SEQ ID NO: 494775 - RNA, 19 nt, Artificial Sequence
  Description of Artificial Sequence: Synthetic oligonucleotide
auugauaagggcaaagcac

SEQ ID NO: 494776 - RNA, 19 nt, Artificial Sequence
  Description of Artificial Sequence: Synthetic oligonucleotide
uguucaauaaucacuguuc

SEQ ID NO: 494777 - RNA, 19 nt, Artificial Sequence
  Description of Artificial Sequence: Synthetic oligonucleotide
uucuaacucaucauucagg

SEQ ID NO: 494778 - RNA, 19 nt, Artificial Sequence
  Description of Artificial Sequence: Synthetic oligonucleotide
ucguuucucaaucugagcu

SEQ ID NO: 494779 - RNA, 19 nt, Artificial Sequence
  Description of Artificial Sequence: Synthetic oligonucleotide
aaguuuagcgagucuuucg

SEQ ID NO: 494780 - RNA, 19 nt, Artificial Sequence
  Description of Artificial Sequence: Synthetic oligonucleotide
aaccagugugcuuagagcu

SEQ ID NO: 494781 - RNA, 19 nt, Artificial Sequence
  Description of Artificial Sequence: Synthetic oligonucleotide
aauuggauacuucucuacu

SEQ ID NO: 494782 - RNA, 19 nt, Artificial Sequence
  Description of Artificial Sequence: Synthetic oligonucleotide
uaggaauuagaacaugcca

SEQ ID NO: 494783 - RNA, 19 nt, Artificial Sequence
  Description of Artificial Sequence: Synthetic oligonucleotide
aacgugccagaacaguagc

SEQ ID NO: 494784 - RNA, 19 nt, Artificial Sequence
  Description of Artificial Sequence: Synthetic oligonucleotide
ucuuuaggaauuucgguca

SEQ ID NO: 494785 - RNA, 19 nt, Artificial Sequence
  Description of Artificial Sequence: Synthetic oligonucleotide
acaaguuuagcuccgauau

SEQ ID NO: 494786 - RNA, 19 nt, Artificial Sequence
  Description of Artificial Sequence: Synthetic oligonucleotide
aaaacaaugccuucuucaa

SEQ ID NO: 494787 - RNA, 19 nt, Artificial Sequence
  Description of Artificial Sequence: Synthetic oligonucleotide
uucucaacuaucaaagauc

SEQ ID NO: 494788 - RNA, 19 nt, Artificial Sequence
  Description of Artificial Sequence: Synthetic oligonucleotide
uucuauaccuauuuucuga

SEQ ID NO: 494789 - RNA, 19 nt, Artificial Sequence
  Description of Artificial Sequence: Synthetic oligonucleotide
uucuuuaggaauuucgguc

SEQ ID NO: 494790 - RNA, 19 nt, Artificial Sequence
  Description of Artificial Sequence: Synthetic oligonucleotide
cacucaacagaacauaggc

SEQ ID NO: 494791 - RNA, 19 nt, Artificial Sequence
  Description of Artificial Sequence: Synthetic oligonucleotide
ugucauugcaggaauuuug

SEQ ID NO: 494792 - RNA, 19 nt, Artificial Sequence
  Description of Artificial Sequence: Synthetic oligonucleotide
aucaaagauccuucaacac

SEQ ID NO: 494793 - RNA, 19 nt, Artificial Sequence
  Description of Artificial Sequence: Synthetic oligonucleotide
uucacucaacagaacauag

SEQ ID NO: 494794 - RNA, 19 nt, Artificial Sequence
  Description of Artificial Sequence: Synthetic oligonucleotide
uaaaauacggggaaauaua

SEQ ID NO: 494795 - RNA, 19 nt, Artificial Sequence
  Description of Artificial Sequence: Synthetic oligonucleotide
uucaacaucacuuguuccu

SEQ ID NO: 494796 - RNA, 19 nt, Artificial Sequence
  Description of Artificial Sequence: Synthetic oligonucleotide
uccuauuguccccaaaacc

SEQ ID NO: 494797 - RNA, 19 nt, Artificial Sequence
  Description of Artificial Sequence: Synthetic oligonucleotide
ucauaaccaauuuccgagg

SEQ ID NO: 494798 - RNA, 19 nt, Artificial Sequence
  Description of Artificial Sequence: Synthetic oligonucleotide
guuacuuugggacuucccc

SEQ ID NO: 494799 - RNA, 19 nt, Artificial Sequence
  Description of Artificial Sequence: Synthetic oligonucleotide
aaucuccgagcauagcauc

SEQ ID NO: 494800 - RNA, 19 nt, Artificial Sequence
  Description of Artificial Sequence: Synthetic oligonucleotide
uauuguccccaaaaccugg

SEQ ID NO: 494801 - RNA, 19 nt, Artificial Sequence
  Description of Artificial Sequence: Synthetic oligonucleotide
cuaggaauuagaacaugcc

SEQ ID NO: 494802 - RNA, 19 nt, Artificial Sequence
  Description of Artificial Sequence: Synthetic oligonucleotide
augauuuaaguugaaagca

SEQ ID NO: 494803 - RNA, 19 nt, Artificial Sequence
  Description of Artificial Sequence: Synthetic oligonucleotide
uucugcuguaguuagcaag

SEQ ID NO: 494804 - RNA, 19 nt, Artificial Sequence
  Description of Artificial Sequence: Synthetic oligonucleotide
uuagauuuagccccucuuc

SEQ ID NO: 494805 - RNA, 19 nt, Artificial Sequence
  Description of Artificial Sequence: Synthetic oligonucleotide
aggaauuucggucacuaca

SEQ ID NO: 494806 - RNA, 19 nt, Artificial Sequence
  Description of Artificial Sequence: Synthetic oligonucleotide
agucgaagcauuucugcgg

SEQ ID NO: 494807 - RNA, 19 nt, Artificial Sequence
  Description of Artificial Sequence: Synthetic oligonucleotide
auagugaucagccagccuu

SEQ ID NO: 494808 - RNA, 19 nt, Artificial Sequence
  Description of Artificial Sequence: Synthetic oligonucleotide
uguaacagaauaguagaac

SEQ ID NO: 494809 - RNA, 19 nt, Artificial Sequence
  Description of Artificial Sequence: Synthetic oligonucleotide
ucauuuguguuauuggcaa

SEQ ID NO: 494810 - RNA, 19 nt, Artificial Sequence
  Description of Artificial Sequence: Synthetic oligonucleotide
uagucgaagcauuucugcg

SEQ ID NO: 494811 - RNA, 19 nt, Artificial Sequence
  Description of Artificial Sequence: Synthetic oligonucleotide
uguagcauugagagcaucu

SEQ ID NO: 494812 - RNA, 19 nt, Artificial Sequence
  Description of Artificial Sequence: Synthetic oligonucleotide
ugagcauuagcaauuucaa

SEQ ID NO: 494813 - RNA, 19 nt, Artificial Sequence
  Description of Artificial Sequence: Synthetic oligonucleotide
acuagaaauuuucuuuuca

SEQ ID NO: 494814 - RNA, 19 nt, Artificial Sequence
  Description of Artificial Sequence: Synthetic oligonucleotide
uuuagaucaauugccuuug

SEQ ID NO: 494815 - RNA, 19 nt, Artificial Sequence
  Description of Artificial Sequence: Synthetic oligonucleotide
ucuugcacccaguaucagg

SEQ ID NO: 494816 - RNA, 19 nt, Artificial Sequence
  Description of Artificial Sequence: Synthetic oligonucleotide
agaucaauugccuuugcaa

SEQ ID NO: 494817 - RNA, 19 nt, Artificial Sequence
  Description of Artificial Sequence: Synthetic oligonucleotide
uuuaaguugaaagcaggac

SEQ ID NO: 494818 - RNA, 19 nt, Artificial Sequence
  Description of Artificial Sequence: Synthetic oligonucleotide
gguacaauggacuggacac

SEQ ID NO: 494819 - RNA, 19 nt, Artificial Sequence
  Description of Artificial Sequence: Synthetic oligonucleotide
gguuauagugaucagccag

SEQ ID NO: 494820 - RNA, 19 nt, Artificial Sequence
  Description of Artificial Sequence: Synthetic oligonucleotide
aacaucacaccucuccgga

SEQ ID NO: 494821 - RNA, 19 nt, Artificial Sequence
  Description of Artificial Sequence: Synthetic oligonucleotide
ucugcaccaaauuuuacau

SEQ ID NO: 494822 - RNA, 19 nt, Artificial Sequence
  Description of Artificial Sequence: Synthetic oligonucleotide
aaccauuauguauugucaa

SEQ ID NO: 494823 - RNA, 19 nt, Artificial Sequence
  Description of Artificial Sequence: Synthetic oligonucleotide
aauuucaagagcagguaca

SEQ ID NO: 494824 - RNA, 19 nt, Artificial Sequence
  Description of Artificial Sequence: Synthetic oligonucleotide
uuaucaccgaggaaccugc

SEQ ID NO: 494825 - RNA, 19 nt, Artificial Sequence
  Description of Artificial Sequence: Synthetic oligonucleotide
uuucuauaccuauuuucug

SEQ ID NO: 494826 - RNA, 19 nt, Artificial Sequence
  Description of Artificial Sequence: Synthetic oligonucleotide
cuugaagcauuaaggcucg

SEQ ID NO: 494827 - RNA, 19 nt, Artificial Sequence
  Description of Artificial Sequence: Synthetic oligonucleotide
uuuucacucaacagaacau

SEQ ID NO: 494828 - RNA, 19 nt, Artificial Sequence
  Description of Artificial Sequence: Synthetic oligonucleotide
uaaggcucgagcaucugca

SEQ ID NO: 494829 - RNA, 19 nt, Artificial Sequence
  Description of Artificial Sequence: Synthetic oligonucleotide
caguucagcaauuacagca

SEQ ID NO: 494830 - RNA, 19 nt, Artificial Sequence
  Description of Artificial Sequence: Synthetic oligonucleotide
uugagugcucuuuuaauaa

SEQ ID NO: 494831 - RNA, 19 nt, Artificial Sequence
  Description of Artificial Sequence: Synthetic oligonucleotide
uuagccuguucaaaaccag

SEQ ID NO: 494832 - RNA, 19 nt, Artificial Sequence
  Description of Artificial Sequence: Synthetic oligonucleotide
aaauacggggaaauauauc

SEQ ID NO: 494833 - RNA, 19 nt, Artificial Sequence
  Description of Artificial Sequence: Synthetic oligonucleotide
uuaaggcucgagcaucugc

SEQ ID NO: 494834 - RNA, 19 nt, Artificial Sequence
  Description of Artificial Sequence: Synthetic oligonucleotide
uccgcuaaaaggucuacac

SEQ ID NO: 494835 - RNA, 19 nt, Artificial Sequence
  Description of Artificial Sequence: Synthetic oligonucleotide
uaauuggauacuucucuac

SEQ ID NO: 494836 - RNA, 19 nt, Artificial Sequence
  Description of Artificial Sequence: Synthetic oligonucleotide
aguuuagcgagucuuucgu

SEQ ID NO: 494837 - RNA, 19 nt, Artificial Sequence
  Description of Artificial Sequence: Synthetic oligonucleotide
uauccucugucaaacuuca

SEQ ID NO: 494838 - RNA, 19 nt, Artificial Sequence
  Description of Artificial Sequence: Synthetic oligonucleotide
cuuaaguuaucaccgagga

SEQ ID NO: 494839 - RNA, 19 nt, Artificial Sequence
  Description of Artificial Sequence: Synthetic oligonucleotide
uuacuuugggacuucccca

SEQ ID NO: 494840 - RNA, 19 nt, Artificial Sequence
  Description of Artificial Sequence: Synthetic oligonucleotide
gcuguaguuagcaaggagg

SEQ ID NO: 494841 - RNA, 19 nt, Artificial Sequence
  Description of Artificial Sequence: Synthetic oligonucleotide
aauccugacuguaacagaa

SEQ ID NO: 494842 - RNA, 19 nt, Artificial Sequence
  Description of Artificial Sequence: Synthetic oligonucleotide
guauauggcucuugcaccc

SEQ ID NO: 494843 - RNA, 19 nt, Artificial Sequence
  Description of Artificial Sequence: Synthetic oligonucleotide
auaaugaccaagggcuuac

SEQ ID NO: 494844 - RNA, 19 nt, Artificial Sequence
  Description of Artificial Sequence: Synthetic oligonucleotide
ucugaacucaucuggucac

SEQ ID NO: 494845 - RNA, 19 nt, Artificial Sequence
  Description of Artificial Sequence: Synthetic oligonucleotide
ugaaaguuuagcgagucuu

SEQ ID NO: 494846 - RNA, 19 nt, Artificial Sequence
  Description of Artificial Sequence: Synthetic oligonucleotide
ucuauaccuauuuucugau

SEQ ID NO: 494847 - RNA, 19 nt, Artificial Sequence
  Description of Artificial Sequence: Synthetic oligonucleotide
uuuagauuuagccccucuu

SEQ ID NO: 494848 - RNA, 19 nt, Artificial Sequence
  Description of Artificial Sequence: Synthetic oligonucleotide
ugcuacuccaucugaaagu

SEQ ID NO: 494849 - RNA, 19 nt, Artificial Sequence
  Description of Artificial Sequence: Synthetic oligonucleotide
uagaucaauugccuuugca

SEQ ID NO: 494850 - RNA, 19 nt, Artificial Sequence
  Description of Artificial Sequence: Synthetic oligonucleotide
uucauugauaagggcaaag

SEQ ID NO: 494851 - RNA, 19 nt, Artificial Sequence
  Description of Artificial Sequence: Synthetic oligonucleotide
augagcauuagcaauuuca

SEQ ID NO: 494852 - RNA, 19 nt, Artificial Sequence
  Description of Artificial Sequence: Synthetic oligonucleotide
ugcuguaguuagcaaggag

SEQ ID NO: 494853 - RNA, 19 nt, Artificial Sequence
  Description of Artificial Sequence: Synthetic oligonucleotide
ugucuuugucuccauucgc

SEQ ID NO: 494854 - RNA, 19 nt, Artificial Sequence
  Description of Artificial Sequence: Synthetic oligonucleotide
uuccgaggaacucugcaga

SEQ ID NO: 494855 - RNA, 19 nt, Artificial Sequence
  Description of Artificial Sequence: Synthetic oligonucleotide
uacaaccuuuguuggauca

SEQ ID NO: 494856 - RNA, 19 nt, Artificial Sequence
  Description of Artificial Sequence: Synthetic oligonucleotide
uuuagcgagucuuucguuu

SEQ ID NO: 494857 - RNA, 19 nt, Artificial Sequence
  Description of Artificial Sequence: Synthetic oligonucleotide
aauugccuuugcaacagug

SEQ ID NO: 494858 - RNA, 19 nt, Artificial Sequence
  Description of Artificial Sequence: Synthetic oligonucleotide
guaguuagcaaggaggcca

SEQ ID NO: 494859 - RNA, 19 nt, Artificial Sequence
  Description of Artificial Sequence: Synthetic oligonucleotide
cuaguugugauuucuagcu

SEQ ID NO: 494860 - RNA, 19 nt, Artificial Sequence
  Description of Artificial Sequence: Synthetic oligonucleotide
uggcaauagaacgugccag

SEQ ID NO: 494861 - RNA, 19 nt, Artificial Sequence
  Description of Artificial Sequence: Synthetic oligonucleotide
auggcgucaucuuugguga

SEQ ID NO: 494862 - RNA, 19 nt, Artificial Sequence
  Description of Artificial Sequence: Synthetic oligonucleotide
cacuaguugugauuucuag

SEQ ID NO: 494863 - RNA, 19 nt, Artificial Sequence
  Description of Artificial Sequence: Synthetic oligonucleotide
ucuuacaaccuuuguugga

SEQ ID NO: 494864 - RNA, 19 nt, Artificial Sequence
  Description of Artificial Sequence: Synthetic oligonucleotide
uguuacuuugggacuuccc

SEQ ID NO: 494865 - RNA, 19 nt, Artificial Sequence
  Description of Artificial Sequence: Synthetic oligonucleotide
caacuaucaaagauccuuc

SEQ ID NO: 494866 - RNA, 19 nt, Artificial Sequence
  Description of Artificial Sequence: Synthetic oligonucleotide
ccucugucaaacuucaugc

SEQ ID NO: 494867 - RNA, 19 nt, Artificial Sequence
  Description of Artificial Sequence: Synthetic oligonucleotide
cauugauaagggcaaagca

SEQ ID NO: 494868 - RNA, 19 nt, Artificial Sequence
  Description of Artificial Sequence: Synthetic oligonucleotide
cuauuguccccaaaaccug

SEQ ID NO: 494869 - RNA, 19 nt, Artificial Sequence
  Description of Artificial Sequence: Synthetic oligonucleotide
auucucacucuccacagaa

SEQ ID NO: 494870 - RNA, 19 nt, Artificial Sequence
  Description of Artificial Sequence: Synthetic oligonucleotide
auuguagcaaccugagcaa

SEQ ID NO: 494871 - RNA, 19 nt, Artificial Sequence
  Description of Artificial Sequence: Synthetic oligonucleotide
agguacaauggacuggaca

SEQ ID NO: 494872 - RNA, 19 nt, Artificial Sequence
  Description of Artificial Sequence: Synthetic oligonucleotide
uuaagcugauucuuccuau

SEQ ID NO: 494873 - RNA, 19 nt, Artificial Sequence
  Description of Artificial Sequence: Synthetic oligonucleotide
uagaacaugccaccuccca

SEQ ID NO: 494874 - RNA, 19 nt, Artificial Sequence
  Description of Artificial Sequence: Synthetic oligonucleotide
uuggauacuucucuacuuu

SEQ ID NO: 494875 - RNA, 19 nt, Artificial Sequence
  Description of Artificial Sequence: Synthetic oligonucleotide
uuacgaugagcauuagcaa

SEQ ID NO: 494876 - RNA, 19 nt, Artificial Sequence
  Description of Artificial Sequence: Synthetic oligonucleotide
cucuuaaguuaucaccgag

SEQ ID NO: 494877 - RNA, 19 nt, Artificial Sequence
  Description of Artificial Sequence: Synthetic oligonucleotide
uccuccaaccuucaacacu

SEQ ID NO: 494878 - RNA, 19 nt, Artificial Sequence
  Description of Artificial Sequence: Synthetic oligonucleotide
uaguugugauuucuagcug

SEQ ID NO: 494879 - RNA, 19 nt, Artificial Sequence
  Description of Artificial Sequence: Synthetic oligonucleotide
uuaaguuaucaccgaggaa

SEQ ID NO: 494880 - RNA, 19 nt, Artificial Sequence
  Description of Artificial Sequence: Synthetic oligonucleotide
uuauuacacaaaaguuguc

SEQ ID NO: 494881 - RNA, 19 nt, Artificial Sequence
  Description of Artificial Sequence: Synthetic oligonucleotide
ucucuuaaguuaucaccga

SEQ ID NO: 494882 - RNA, 19 nt, Artificial Sequence
  Description of Artificial Sequence: Synthetic oligonucleotide
ucaguucagcaauuacagc

SEQ ID NO: 494883 - RNA, 19 nt, Artificial Sequence
  Description of Artificial Sequence: Synthetic oligonucleotide
ucaacagaacauaggcauc

SEQ ID NO: 494884 - RNA, 19 nt, Artificial Sequence
  Description of Artificial Sequence: Synthetic oligonucleotide
uuagaacaugccaccuccc

SEQ ID NO: 494885 - RNA, 19 nt, Artificial Sequence
  Description of Artificial Sequence: Synthetic oligonucleotide
aauuuccgaggaacucugc

SEQ ID NO: 494886 - RNA, 19 nt, Artificial Sequence
  Description of Artificial Sequence: Synthetic oligonucleotide
auuuccgaggaacucugca

SEQ ID NO: 494887 - RNA, 19 nt, Artificial Sequence
  Description of Artificial Sequence: Synthetic oligonucleotide
acacaauuauucucacucu

SEQ ID NO: 494888 - RNA, 19 nt, Artificial Sequence
  Description of Artificial Sequence: Synthetic oligonucleotide
auaauuggauacuucucua

SEQ ID NO: 494889 - RNA, 19 nt, Artificial Sequence
  Description of Artificial Sequence: Synthetic oligonucleotide
uacggggaaauauauccuc

SEQ ID NO: 494890 - RNA, 19 nt, Artificial Sequence
  Description of Artificial Sequence: Synthetic oligonucleotide
uuagccccuuugcugaucu

SEQ ID NO: 494891 - RNA, 19 nt, Artificial Sequence
  Description of Artificial Sequence: Synthetic oligonucleotide
uccgagcauagcaucauaa

SEQ ID NO: 494892 - RNA, 19 nt, Artificial Sequence
  Description of Artificial Sequence: Synthetic oligonucleotide
ggaauuucggucacuacag

SEQ ID NO: 494893 - RNA, 19 nt, Artificial Sequence
  Description of Artificial Sequence: Synthetic oligonucleotide
auaggcccgagugagauga

SEQ ID NO: 494894 - RNA, 19 nt, Artificial Sequence
  Description of Artificial Sequence: Synthetic oligonucleotide
cauaauuggauacuucucu

SEQ ID NO: 494895 - RNA, 19 nt, Artificial Sequence
  Description of Artificial Sequence: Synthetic oligonucleotide
gaacgugccagaacaguag

SEQ ID NO: 494896 - RNA, 19 nt, Artificial Sequence
  Description of Artificial Sequence: Synthetic oligonucleotide
auagcaucauaaccaauuu

SEQ ID NO: 494897 - RNA, 19 nt, Artificial Sequence
  Description of Artificial Sequence: Synthetic oligonucleotide
uuagaucaauugccuuugc

SEQ ID NO: 494898 - RNA, 19 nt, Artificial Sequence
  Description of Artificial Sequence: Synthetic oligonucleotide
acaccgcaccaccaguagc

SEQ ID NO: 494899 - RNA, 19 nt, Artificial Sequence
  Description of Artificial Sequence: Synthetic oligonucleotide
caauuuccgaggaacucug

SEQ ID NO: 494900 - RNA, 19 nt, Artificial Sequence
  Description of Artificial Sequence: Synthetic oligonucleotide
ugccucaaugauuuaaguu

SEQ ID NO: 494901 - RNA, 19 nt, Artificial Sequence
  Description of Artificial Sequence: Synthetic oligonucleotide
gaauuucggucacuacagc

SEQ ID NO: 494902 - RNA, 19 nt, Artificial Sequence
  Description of Artificial Sequence: Synthetic oligonucleotide
cauuccacccauugcgccc

SEQ ID NO: 494903 - RNA, 19 nt, Artificial Sequence
  Description of Artificial Sequence: Synthetic oligonucleotide
aauaaugaccaagggcuua

SEQ ID NO: 494904 - RNA, 19 nt, Artificial Sequence
  Description of Artificial Sequence: Synthetic oligonucleotide
caaagauccuucaacaccu

SEQ ID NO: 494905 - RNA, 19 nt, Artificial Sequence
  Description of Artificial Sequence: Synthetic oligonucleotide
cugcuacuccaucugaaag

SEQ ID NO: 494906 - RNA, 19 nt, Artificial Sequence
  Description of Artificial Sequence: Synthetic oligonucleotide
caucauaaccaauuuccga

SEQ ID NO: 494907 - RNA, 19 nt, Artificial Sequence
  Description of Artificial Sequence: Synthetic oligonucleotide
uuaggaauuucggucacua

SEQ ID NO: 494908 - RNA, 19 nt, Artificial Sequence
  Description of Artificial Sequence: Synthetic oligonucleotide
uccauucgcagaaauugua

SEQ ID NO: 494909 - RNA, 19 nt, Artificial Sequence
  Description of Artificial Sequence: Synthetic oligonucleotide
accaauuuccgaggaacuc

SEQ ID NO: 494910 - RNA, 19 nt, Artificial Sequence
  Description of Artificial Sequence: Synthetic oligonucleotide
aaguugucacauaauugga

SEQ ID NO: 494911 - RNA, 19 nt, Artificial Sequence
  Description of Artificial Sequence: Synthetic oligonucleotide
cucaacagaacauaggcau

SEQ ID NO: 494912 - RNA, 19 nt, Artificial Sequence
  Description of Artificial Sequence: Synthetic oligonucleotide
accauuauguauugucaau

SEQ ID NO: 494913 - RNA, 19 nt, Artificial Sequence
  Description of Artificial Sequence: Synthetic oligonucleotide
guuaucaccgaggaaccug

SEQ ID NO: 494914 - RNA, 19 nt, Artificial Sequence
  Description of Artificial Sequence: Synthetic oligonucleotide
ucgcagaaauuguagcaac

SEQ ID NO: 494915 - RNA, 19 nt, Artificial Sequence
  Description of Artificial Sequence: Synthetic oligonucleotide
ucgagcaucugcaccaaau

SEQ ID NO: 494916 - RNA, 19 nt, Artificial Sequence
  Description of Artificial Sequence: Synthetic oligonucleotide
uucuacuggauuagccccu

SEQ ID NO: 494917 - RNA, 19 nt, Artificial Sequence
  Description of Artificial Sequence: Synthetic oligonucleotide
caauuauucucacucucca

SEQ ID NO: 494918 - RNA, 19 nt, Artificial Sequence
  Description of Artificial Sequence: Synthetic oligonucleotide
uuuuguuacuuugggacuu

SEQ ID NO: 494919 - RNA, 19 nt, Artificial Sequence
  Description of Artificial Sequence: Synthetic oligonucleotide
uggcauaggcccgagugag

SEQ ID NO: 494920 - RNA, 19 nt, Artificial Sequence
  Description of Artificial Sequence: Synthetic oligonucleotide
uccaguaaagcaguucuua

SEQ ID NO: 494921 - RNA, 19 nt, Artificial Sequence
  Description of Artificial Sequence: Synthetic oligonucleotide
caagggcuuacgaugagca

SEQ ID NO: 494922 - RNA, 19 nt, Artificial Sequence
  Description of Artificial Sequence: Synthetic oligonucleotide
ugagugcucuuuuaauaau

SEQ ID NO: 494923 - RNA, 19 nt, Artificial Sequence
  Description of Artificial Sequence: Synthetic oligonucleotide
uggagcuuugacugcuacc

SEQ ID NO: 494924 - RNA, 19 nt, Artificial Sequence
  Description of Artificial Sequence: Synthetic oligonucleotide
acauaggcaucuuggaauu

SEQ ID NO: 494925 - RNA, 19 nt, Artificial Sequence
  Description of Artificial Sequence: Synthetic oligonucleotide
guuagcaaggaggccaccc

SEQ ID NO: 494926 - RNA, 19 nt, Artificial Sequence
  Description of Artificial Sequence: Synthetic oligonucleotide
gugugcuuagagcuucucc

SEQ ID NO: 494927 - RNA, 19 nt, Artificial Sequence
  Description of Artificial Sequence: Synthetic oligonucleotide
uucaaaagcauggcgucau

SEQ ID NO: 494928 - RNA, 19 nt, Artificial Sequence
  Description of Artificial Sequence: Synthetic oligonucleotide
uguagcaaccugagcaauu

SEQ ID NO: 494929 - RNA, 19 nt, Artificial Sequence
  Description of Artificial Sequence: Synthetic oligonucleotide
aggaauccaaggcugggau

SEQ ID NO: 494930 - RNA, 19 nt, Artificial Sequence
  Description of Artificial Sequence: Synthetic oligonucleotide
ugguuauagugaucagcca

SEQ ID NO: 494931 - RNA, 19 nt, Artificial Sequence
  Description of Artificial Sequence: Synthetic oligonucleotide
ucuccggauuucuacugga

SEQ ID NO: 494932 - RNA, 19 nt, Artificial Sequence
  Description of Artificial Sequence: Synthetic oligonucleotide
uuagcgagucuuucguuua

SEQ ID NO: 494933 - RNA, 19 nt, Artificial Sequence
  Description of Artificial Sequence: Synthetic oligonucleotide
caguaaagcaguucuuaca

SEQ ID NO: 494934 - RNA, 19 nt, Artificial Sequence
  Description of Artificial Sequence: Synthetic oligonucleotide
cuuuaggaauuucggucac

SEQ ID NO: 494935 - RNA, 19 nt, Artificial Sequence
  Description of Artificial Sequence: Synthetic oligonucleotide
uccugucacaguucauuga

SEQ ID NO: 494936 - RNA, 19 nt, Artificial Sequence
  Description of Artificial Sequence: Synthetic oligonucleotide
uagcgagucuuucguuuag

SEQ ID NO: 494937 - RNA, 19 nt, Artificial Sequence
  Description of Artificial Sequence: Synthetic oligonucleotide
cauagcaucauaaccaauu

SEQ ID NO: 494938 - RNA, 19 nt, Artificial Sequence
  Description of Artificial Sequence: Synthetic oligonucleotide
uccaaccuucaacacugcu

SEQ ID NO: 494939 - RNA, 19 nt, Artificial Sequence
  Description of Artificial Sequence: Synthetic oligonucleotide
ugauaagggcaaagcacua

SEQ ID NO: 494940 - RNA, 19 nt, Artificial Sequence
  Description of Artificial Sequence: Synthetic oligonucleotide
agaacaugccaccucccau

SEQ ID NO: 494941 - RNA, 19 nt, Artificial Sequence
  Description of Artificial Sequence: Synthetic oligonucleotide
cuuccuauuguccccaaaa

SEQ ID NO: 494942 - RNA, 19 nt, Artificial Sequence
  Description of Artificial Sequence: Synthetic oligonucleotide
gugagaugaggagccagcg

SEQ ID NO: 494943 - RNA, 19 nt, Artificial Sequence
  Description of Artificial Sequence: Synthetic oligonucleotide
cucuccggauuucuacugg

SEQ ID NO: 494944 - RNA, 19 nt, Artificial Sequence
  Description of Artificial Sequence: Synthetic oligonucleotide
uuguguuauuggcaacauc

SEQ ID NO: 494945 - RNA, 19 nt, Artificial Sequence
  Description of Artificial Sequence: Synthetic oligonucleotide
ccuccaaccuucaacacug

SEQ ID NO: 494946 - RNA, 19 nt, Artificial Sequence
  Description of Artificial Sequence: Synthetic oligonucleotide
uagaacgugccagaacagu

SEQ ID NO: 494947 - RNA, 19 nt, Artificial Sequence
  Description of Artificial Sequence: Synthetic oligonucleotide
ugcuuagagcuucuccauc

SEQ ID NO: 494948 - RNA, 19 nt, Artificial Sequence
  Description of Artificial Sequence: Synthetic oligonucleotide
cucaucuggcgaaggacug

SEQ ID NO: 494949 - RNA, 19 nt, Artificial Sequence
  Description of Artificial Sequence: Synthetic oligonucleotide
auauggcucuugcacccag

SEQ ID NO: 494950 - RNA, 19 nt, Artificial Sequence
  Description of Artificial Sequence: Synthetic oligonucleotide
uaccuauuuucugaucuuc

SEQ ID NO: 494951 - RNA, 19 nt, Artificial Sequence
  Description of Artificial Sequence: Synthetic oligonucleotide
caccgaggaaccugcauug

SEQ ID NO: 494952 - RNA, 19 nt, Artificial Sequence
  Description of Artificial Sequence: Synthetic oligonucleotide
ggauuagccccuuugcuga

SEQ ID NO: 494953 - RNA, 19 nt, Artificial Sequence
  Description of Artificial Sequence: Synthetic oligonucleotide
ggagcuuugacugcuacca

SEQ ID NO: 494954 - RNA, 19 nt, Artificial Sequence
  Description of Artificial Sequence: Synthetic oligonucleotide
uauugucaaugggaaccag

SEQ ID NO: 494955 - RNA, 19 nt, Artificial Sequence
  Description of Artificial Sequence: Synthetic oligonucleotide
uuacaaccuuuguuggauc

SEQ ID NO: 494956 - RNA, 19 nt, Artificial Sequence
  Description of Artificial Sequence: Synthetic oligonucleotide
uaaucacuguucuucccuu

SEQ ID NO: 494957 - RNA, 19 nt, Artificial Sequence
  Description of Artificial Sequence: Synthetic oligonucleotide
ucuuagcaauugucauugc

SEQ ID NO: 494958 - RNA, 19 nt, Artificial Sequence
  Description of Artificial Sequence: Synthetic oligonucleotide
auugccuuugcaacaguga

SEQ ID NO: 494959 - RNA, 19 nt, Artificial Sequence
  Description of Artificial Sequence: Synthetic oligonucleotide
uuuguguuauuggcaacau

SEQ ID NO: 494960 - RNA, 19 nt, Artificial Sequence
  Description of Artificial Sequence: Synthetic oligonucleotide
uaggaauuucggucacuac

SEQ ID NO: 494961 - RNA, 19 nt, Artificial Sequence
  Description of Artificial Sequence: Synthetic oligonucleotide
ucuacaccuugaagcauua

SEQ ID NO: 494962 - RNA, 19 nt, Artificial Sequence
  Description of Artificial Sequence: Synthetic oligonucleotide
gcugauucuuccuauuguc

SEQ ID NO: 494963 - RNA, 19 nt, Artificial Sequence
  Description of Artificial Sequence: Synthetic oligonucleotide
aguugucacauaauuggau

SEQ ID NO: 494964 - RNA, 19 nt, Artificial Sequence
  Description of Artificial Sequence: Synthetic oligonucleotide
uuuaggaauuucggucacu

SEQ ID NO: 494965 - RNA, 19 nt, Artificial Sequence
  Description of Artificial Sequence: Synthetic oligonucleotide
ccauucgcagaaauuguag

SEQ ID NO: 494966 - RNA, 19 nt, Artificial Sequence
  Description of Artificial Sequence: Synthetic oligonucleotide
gaugagcauuagcaauuuc

SEQ ID NO: 494967 - RNA, 19 nt, Artificial Sequence
  Description of Artificial Sequence: Synthetic oligonucleotide
caaugggaaccaguaacug

SEQ ID NO: 494968 - RNA, 19 nt, Artificial Sequence
  Description of Artificial Sequence: Synthetic oligonucleotide
auaccuauuuucugaucuu

SEQ ID NO: 494969 - RNA, 19 nt, Artificial Sequence
  Description of Artificial Sequence: Synthetic oligonucleotide
ugacugcuaccaccugaag

SEQ ID NO: 494970 - RNA, 19 nt, Artificial Sequence
  Description of Artificial Sequence: Synthetic oligonucleotide
caccucuccggauuucuac

SEQ ID NO: 494971 - RNA, 19 nt, Artificial Sequence
  Description of Artificial Sequence: Synthetic oligonucleotide
aucagccagccuucucuuc

SEQ ID NO: 494972 - RNA, 19 nt, Artificial Sequence
  Description of Artificial Sequence: Synthetic oligonucleotide
aagggcuuacgaugagcau

SEQ ID NO: 494973 - RNA, 19 nt, Artificial Sequence
  Description of Artificial Sequence: Synthetic oligonucleotide
ucaaaagcauggcgucauc

SEQ ID NO: 494974 - RNA, 19 nt, Artificial Sequence
  Description of Artificial Sequence: Synthetic oligonucleotide
gugguagugccauccccag

SEQ ID NO: 494975 - RNA, 19 nt, Artificial Sequence
  Description of Artificial Sequence: Synthetic oligonucleotide
gcuuagagcuucuccauca

SEQ ID NO: 494976 - RNA, 19 nt, Artificial Sequence
  Description of Artificial Sequence: Synthetic oligonucleotide
caauggacuggacacuaga

SEQ ID NO: 494977 - RNA, 19 nt, Artificial Sequence
  Description of Artificial Sequence: Synthetic oligonucleotide
agugcucuuuuaauaauuu

SEQ ID NO: 494978 - RNA, 19 nt, Artificial Sequence
  Description of Artificial Sequence: Synthetic oligonucleotide
ucuuccuauuguccccaaa

SEQ ID NO: 494979 - RNA, 19 nt, Artificial Sequence
  Description of Artificial Sequence: Synthetic oligonucleotide
uuguuacuuugggacuucc

SEQ ID NO: 494980 - RNA, 19 nt, Artificial Sequence
  Description of Artificial Sequence: Synthetic oligonucleotide
agauuuagauuuagccccu

SEQ ID NO: 494981 - RNA, 19 nt, Artificial Sequence
  Description of Artificial Sequence: Synthetic oligonucleotide
aaccuucaacacugcuacu

SEQ ID NO: 494982 - RNA, 19 nt, Artificial Sequence
  Description of Artificial Sequence: Synthetic oligonucleotide
guugucacagguuuagauu

SEQ ID NO: 494983 - RNA, 19 nt, Artificial Sequence
  Description of Artificial Sequence: Synthetic oligonucleotide
auacggggaaauauauccu

SEQ ID NO: 494984 - RNA, 19 nt, Artificial Sequence
  Description of Artificial Sequence: Synthetic oligonucleotide
cuacagcauccgcuaaaag

SEQ ID NO: 494985 - RNA, 19 nt, Artificial Sequence
  Description of Artificial Sequence: Synthetic oligonucleotide
ccuauuguccccaaaaccu

SEQ ID NO: 494986 - RNA, 19 nt, Artificial Sequence
  Description of Artificial Sequence: Synthetic oligonucleotide
uggccccauuguaacagcu

SEQ ID NO: 494987 - RNA, 19 nt, Artificial Sequence
  Description of Artificial Sequence: Synthetic oligonucleotide
agcuacagcauccgcuaaa

SEQ ID NO: 494988 - RNA, 19 nt, Artificial Sequence
  Description of Artificial Sequence: Synthetic oligonucleotide
ucccuuuggccccauugua

SEQ ID NO: 494989 - RNA, 19 nt, Artificial Sequence
  Description of Artificial Sequence: Synthetic oligonucleotide
aggaauuuugagugcucuu

SEQ ID NO: 494990 - RNA, 19 nt, Artificial Sequence
  Description of Artificial Sequence: Synthetic oligonucleotide
gaagaccaacuuuuagccu

SEQ ID NO: 494991 - RNA, 19 nt, Artificial Sequence
  Description of Artificial Sequence: Synthetic oligonucleotide
ccugaagaccaacuuuuag

SEQ ID NO: 494992 - RNA, 19 nt, Artificial Sequence
  Description of Artificial Sequence: Synthetic oligonucleotide
uuuagccccucuucuccaa

SEQ ID NO: 494993 - RNA, 19 nt, Artificial Sequence
  Description of Artificial Sequence: Synthetic oligonucleotide
aaccaguaacugaugguua

SEQ ID NO: 494994 - RNA, 19 nt, Artificial Sequence
  Description of Artificial Sequence: Synthetic oligonucleotide
gcuuacgaugagcauuagc

SEQ ID NO: 494995 - RNA, 19 nt, Artificial Sequence
  Description of Artificial Sequence: Synthetic oligonucleotide
uggucucaucuggcgaagg

SEQ ID NO: 494996 - RNA, 19 nt, Artificial Sequence
  Description of Artificial Sequence: Synthetic oligonucleotide
acgaugagcauuagcaauu

SEQ ID NO: 494997 - RNA, 19 nt, Artificial Sequence
  Description of Artificial Sequence: Synthetic oligonucleotide
agaacgugccagaacagua

SEQ ID NO: 494998 - RNA, 19 nt, Artificial Sequence
  Description of Artificial Sequence: Synthetic oligonucleotide
gaauuagaacaugccaccu

SEQ ID NO: 494999 - RNA, 19 nt, Artificial Sequence
  Description of Artificial Sequence: Synthetic oligonucleotide
caauccugacuguaacaga

SEQ ID NO: 495000 - RNA, 19 nt, Artificial Sequence
  Description of Artificial Sequence: Synthetic oligonucleotide
ccucaaugauuuaaguuga

SEQ ID NO: 495001 - RNA, 19 nt, Artificial Sequence
  Description of Artificial Sequence: Synthetic oligonucleotide
auuagccccuuugcugauc

SEQ ID NO: 495002 - RNA, 19 nt, Artificial Sequence
  Description of Artificial Sequence: Synthetic oligonucleotide
ugcgcccauuccagggucc

SEQ ID NO: 495003 - RNA, 19 nt, Artificial Sequence
  Description of Artificial Sequence: Synthetic oligonucleotide
agcuucugcuguaguuagc

SEQ ID NO: 495004 - RNA, 19 nt, Artificial Sequence
  Description of Artificial Sequence: Synthetic oligonucleotide
guagcaauagccauaucuu

SEQ ID NO: 495005 - RNA, 19 nt, Artificial Sequence
  Description of Artificial Sequence: Synthetic oligonucleotide
acggggaaauauauccucu

SEQ ID NO: 495006 - RNA, 19 nt, Artificial Sequence
  Description of Artificial Sequence: Synthetic oligonucleotide
ucaucuggcgaaggacugu

SEQ ID NO: 495007 - RNA, 19 nt, Artificial Sequence
  Description of Artificial Sequence: Synthetic oligonucleotide
ugacgccuuuccuuccaac

SEQ ID NO: 495008 - RNA, 19 nt, Artificial Sequence
  Description of Artificial Sequence: Synthetic oligonucleotide
cucuacuuuguacacaauu

SEQ ID NO: 495009 - RNA, 19 nt, Artificial Sequence
  Description of Artificial Sequence: Synthetic oligonucleotide
ggaugcaucgaagcagagc

SEQ ID NO: 495010 - RNA, 19 nt, Artificial Sequence
  Description of Artificial Sequence: Synthetic oligonucleotide
aguuaucaccgaggaaccu

SEQ ID NO: 495011 - RNA, 19 nt, Artificial Sequence
  Description of Artificial Sequence: Synthetic oligonucleotide
cuuacaaccuuuguuggau

SEQ ID NO: 495012 - RNA, 19 nt, Artificial Sequence
  Description of Artificial Sequence: Synthetic oligonucleotide
uugcgcccauuccaggguc

SEQ ID NO: 495013 - RNA, 19 nt, Artificial Sequence
  Description of Artificial Sequence: Synthetic oligonucleotide
aacagaacauaggcaucuu

SEQ ID NO: 495014 - RNA, 19 nt, Artificial Sequence
  Description of Artificial Sequence: Synthetic oligonucleotide
caucaacagccaacaucac

SEQ ID NO: 495015 - RNA, 19 nt, Artificial Sequence
  Description of Artificial Sequence: Synthetic oligonucleotide
auuccacccauugcgccca

SEQ ID NO: 495016 - RNA, 19 nt, Artificial Sequence
  Description of Artificial Sequence: Synthetic oligonucleotide
augcaucgaagcagagcac

SEQ ID NO: 495017 - RNA, 19 nt, Artificial Sequence
  Description of Artificial Sequence: Synthetic oligonucleotide
aucuccgagcauagcauca

SEQ ID NO: 495018 - RNA, 19 nt, Artificial Sequence
  Description of Artificial Sequence: Synthetic oligonucleotide
auuaaggcucgagcaucug

SEQ ID NO: 495019 - RNA, 19 nt, Artificial Sequence
  Description of Artificial Sequence: Synthetic oligonucleotide
ccgcuaaaaggucuacacc

SEQ ID NO: 495020 - RNA, 19 nt, Artificial Sequence
  Description of Artificial Sequence: Synthetic oligonucleotide
cauaggcccgagugagaug

SEQ ID NO: 495021 - RNA, 19 nt, Artificial Sequence
  Description of Artificial Sequence: Synthetic oligonucleotide
guagaacugccucaaugau

SEQ ID NO: 495022 - RNA, 19 nt, Artificial Sequence
  Description of Artificial Sequence: Synthetic oligonucleotide
gcagguacaauggacugga

SEQ ID NO: 495023 - RNA, 19 nt, Artificial Sequence
  Description of Artificial Sequence: Synthetic oligonucleotide
gcaaagcacuauucuagga

SEQ ID NO: 495024 - RNA, 19 nt, Artificial Sequence
  Description of Artificial Sequence: Synthetic oligonucleotide
gaccuuuugauguguuaau

SEQ ID NO: 495025 - RNA, 19 nt, Artificial Sequence
  Description of Artificial Sequence: Synthetic oligonucleotide
auccgcuaaaaggucuaca

SEQ ID NO: 495026 - RNA, 19 nt, Artificial Sequence
  Description of Artificial Sequence: Synthetic oligonucleotide
cuguucaauaaucacuguu

SEQ ID NO: 495027 - RNA, 19 nt, Artificial Sequence
  Description of Artificial Sequence: Synthetic oligonucleotide
accaguagcaauagccaua

SEQ ID NO: 495028 - RNA, 19 nt, Artificial Sequence
  Description of Artificial Sequence: Synthetic oligonucleotide
aggcccgagugagaugagg

SEQ ID NO: 495029 - RNA, 19 nt, Artificial Sequence
  Description of Artificial Sequence: Synthetic oligonucleotide
ccgagcauagcaucauaac

SEQ ID NO: 495030 - RNA, 19 nt, Artificial Sequence
  Description of Artificial Sequence: Synthetic oligonucleotide
acaaccuuuguuggaucaa

SEQ ID NO: 495031 - RNA, 19 nt, Artificial Sequence
  Description of Artificial Sequence: Synthetic oligonucleotide
cccauugcgcccauuccag

SEQ ID NO: 495032 - RNA, 19 nt, Artificial Sequence
  Description of Artificial Sequence: Synthetic oligonucleotide
gaaaguuuagcgagucuuu

SEQ ID NO: 495033 - RNA, 19 nt, Artificial Sequence
  Description of Artificial Sequence: Synthetic oligonucleotide
cugcagaauuuucucaacu

SEQ ID NO: 495034 - RNA, 19 nt, Artificial Sequence
  Description of Artificial Sequence: Synthetic oligonucleotide
ccauuccacccauugcgcc

SEQ ID NO: 495035 - RNA, 19 nt, Artificial Sequence
  Description of Artificial Sequence: Synthetic oligonucleotide
agaccaacuuuuagccugu

SEQ ID NO: 495036 - RNA, 19 nt, Artificial Sequence
  Description of Artificial Sequence: Synthetic oligonucleotide
cuuagagcuucuccaucaa

SEQ ID NO: 495037 - RNA, 19 nt, Artificial Sequence
  Description of Artificial Sequence: Synthetic oligonucleotide
uuguagcauugagagcauc

SEQ ID NO: 495038 - RNA, 19 nt, Artificial Sequence
  Description of Artificial Sequence: Synthetic oligonucleotide
cacuggucucaucuggcga

SEQ ID NO: 495039 - RNA, 19 nt, Artificial Sequence
  Description of Artificial Sequence: Synthetic oligonucleotide
ggcgaaggacuguggguag

SEQ ID NO: 495040 - RNA, 19 nt, Artificial Sequence
  Description of Artificial Sequence: Synthetic oligonucleotide
cuaccaccugaagaccaac

SEQ ID NO: 495041 - RNA, 19 nt, Artificial Sequence
  Description of Artificial Sequence: Synthetic oligonucleotide
agcgagucuuucguuuagu

SEQ ID NO: 495042 - RNA, 19 nt, Artificial Sequence
  Description of Artificial Sequence: Synthetic oligonucleotide
ucuacuggauuagccccuu

SEQ ID NO: 495043 - RNA, 19 nt, Artificial Sequence
  Description of Artificial Sequence: Synthetic oligonucleotide
cauccgcuaaaaggucuac

SEQ ID NO: 495044 - RNA, 19 nt, Artificial Sequence
  Description of Artificial Sequence: Synthetic oligonucleotide
cuccauucgcagaaauugu

SEQ ID NO: 495045 - RNA, 19 nt, Artificial Sequence
  Description of Artificial Sequence: Synthetic oligonucleotide
gagugcucuuuuaauaauu

SEQ ID NO: 495046 - RNA, 19 nt, Artificial Sequence
  Description of Artificial Sequence: Synthetic oligonucleotide
ggguagucgaagcauuucu

SEQ ID NO: 495047 - RNA, 19 nt, Artificial Sequence
  Description of Artificial Sequence: Synthetic oligonucleotide
cuggucucaucuggcgaag

SEQ ID NO: 495048 - RNA, 19 nt, Artificial Sequence
  Description of Artificial Sequence: Synthetic oligonucleotide
uucuuccuauuguccccaa

SEQ ID NO: 495049 - RNA, 19 nt, Artificial Sequence
  Description of Artificial Sequence: Synthetic oligonucleotide
guugugauuucuagcugcu

SEQ ID NO: 495050 - RNA, 19 nt, Artificial Sequence
  Description of Artificial Sequence: Synthetic oligonucleotide
cgcuaaaaggucuacaccu

SEQ ID NO: 495051 - RNA, 19 nt, Artificial Sequence
  Description of Artificial Sequence: Synthetic oligonucleotide
gucacauaauuggauacuu

SEQ ID NO: 495052 - RNA, 19 nt, Artificial Sequence
  Description of Artificial Sequence: Synthetic oligonucleotide
cagccaacaucacaccucu

SEQ ID NO: 495053 - RNA, 19 nt, Artificial Sequence
  Description of Artificial Sequence: Synthetic oligonucleotide
ccgaggaaccugcauugag

SEQ ID NO: 495054 - RNA, 19 nt, Artificial Sequence
  Description of Artificial Sequence: Synthetic oligonucleotide
cagguacaauggacuggac

SEQ ID NO: 495055 - RNA, 19 nt, Artificial Sequence
  Description of Artificial Sequence: Synthetic oligonucleotide
cuucugcuguaguuagcaa

SEQ ID NO: 495056 - RNA, 19 nt, Artificial Sequence
  Description of Artificial Sequence: Synthetic oligonucleotide
uggcgucaucuuuggugac

SEQ ID NO: 495057 - RNA, 19 nt, Artificial Sequence
  Description of Artificial Sequence: Synthetic oligonucleotide
ggacacuagaaauuuucuu

SEQ ID NO: 495058 - RNA, 19 nt, Artificial Sequence
  Description of Artificial Sequence: Synthetic oligonucleotide
guagcaaccugagcaauuu

SEQ ID NO: 495059 - RNA, 19 nt, Artificial Sequence
  Description of Artificial Sequence: Synthetic oligonucleotide
caauaaugaccaagggcuu

SEQ ID NO: 495060 - RNA, 19 nt, Artificial Sequence
  Description of Artificial Sequence: Synthetic oligonucleotide
guaaaccauuauguauugu

SEQ ID NO: 495061 - RNA, 19 nt, Artificial Sequence
  Description of Artificial Sequence: Synthetic oligonucleotide
guacaauggacuggacacu

SEQ ID NO: 495062 - RNA, 19 nt, Artificial Sequence
  Description of Artificial Sequence: Synthetic oligonucleotide
accgaggaaccugcauuga

SEQ ID NO: 495063 - RNA, 19 nt, Artificial Sequence
  Description of Artificial Sequence: Synthetic oligonucleotide
ggcccgagugagaugagga

SEQ ID NO: 495064 - RNA, 19 nt, Artificial Sequence
  Description of Artificial Sequence: Synthetic oligonucleotide
gauuagccccuuugcugau

SEQ ID NO: 495065 - RNA, 19 nt, Artificial Sequence
  Description of Artificial Sequence: Synthetic oligonucleotide
caguucuuacaaccuuugu

SEQ ID NO: 495066 - RNA, 19 nt, Artificial Sequence
  Description of Artificial Sequence: Synthetic oligonucleotide
cugcuguaguuagcaagga

SEQ ID NO: 495067 - RNA, 19 nt, Artificial Sequence
  Description of Artificial Sequence: Synthetic oligonucleotide
ggagggacacgaggcgaag

SEQ ID NO: 495068 - RNA, 19 nt, Artificial Sequence
  Description of Artificial Sequence: Synthetic oligonucleotide
caaaaccagugugcuuaga

SEQ ID NO: 495069 - RNA, 19 nt, Artificial Sequence
  Description of Artificial Sequence: Synthetic oligonucleotide
cuuguagcauugagagcau

SEQ ID NO: 495070 - RNA, 19 nt, Artificial Sequence
  Description of Artificial Sequence: Synthetic oligonucleotide
gccuuccuuggcaauagaa

SEQ ID NO: 495071 - RNA, 19 nt, Artificial Sequence
  Description of Artificial Sequence: Synthetic oligonucleotide
caguagcaauagccauauc

SEQ ID NO: 495072 - RNA, 19 nt, Artificial Sequence
  Description of Artificial Sequence: Synthetic oligonucleotide
caaguuuagcuccgauauu

SEQ ID NO: 495073 - RNA, 19 nt, Artificial Sequence
  Description of Artificial Sequence: Synthetic oligonucleotide
accgcaccaccaguagcaa

SEQ ID NO: 495074 - RNA, 19 nt, Artificial Sequence
  Description of Artificial Sequence: Synthetic oligonucleotide
cuccggauuucuacuggau

SEQ ID NO: 495075 - RNA, 19 nt, Artificial Sequence
  Description of Artificial Sequence: Synthetic oligonucleotide
ccccauuguaacagcuaca

SEQ ID NO: 495076 - RNA, 19 nt, Artificial Sequence
  Description of Artificial Sequence: Synthetic oligonucleotide
caccugcauucuuagcaau

SEQ ID NO: 495077 - RNA, 19 nt, Artificial Sequence
  Description of Artificial Sequence: Synthetic oligonucleotide
ggcuuacgaugagcauuag

SEQ ID NO: 495078 - RNA, 19 nt, Artificial Sequence
  Description of Artificial Sequence: Synthetic oligonucleotide
gcgagucuuucguuuaguu

SEQ ID NO: 495079 - RNA, 19 nt, Artificial Sequence
  Description of Artificial Sequence: Synthetic oligonucleotide
cgaaggacuguggguaguc

SEQ ID NO: 495080 - RNA, 19 nt, Artificial Sequence
  Description of Artificial Sequence: Synthetic oligonucleotide
cgagucuuucguuuaguuu

SEQ ID NO: 495081 - RNA, 19 nt, Artificial Sequence
  Description of Artificial Sequence: Synthetic oligonucleotide
gcauagcaucauaaccaau

SEQ ID NO: 495082 - RNA, 19 nt, Artificial Sequence
  Description of Artificial Sequence: Synthetic oligonucleotide
gcgaaggacuguggguagu

SEQ ID NO: 495083 - RNA, 19 nt, Artificial Sequence
  Description of Artificial Sequence: Synthetic oligonucleotide
gcgcccauuccaggguccu

SEQ ID NO: 495084 - RNA, 19 nt, Artificial Sequence
  Description of Artificial Sequence: Synthetic oligonucleotide
cgaugagcauuagcaauuu

SEQ ID NO: 495085 - RNA, 19 nt, Artificial Sequence
  Description of Artificial Sequence: Synthetic oligonucleotide
cgccuuuccuuccaaccuu

SEQ ID NO: 495086 - RNA, 19 nt, Artificial Sequence
  Description of Artificial Sequence: Synthetic oligonucleotide
ccgcaccaccaguagcaau

SEQ ID NO: 495087 - RNA, 19 nt, Artificial Sequence
  Description of Artificial Sequence: Synthetic oligonucleotide
aauacuaaaugcuagcacc

SEQ ID NO: 495088 - RNA, 19 nt, Artificial Sequence
  Description of Artificial Sequence: Synthetic oligonucleotide
aacuaaaucuguuugauag

SEQ ID NO: 495089 - RNA, 19 nt, Artificial Sequence
  Description of Artificial Sequence: Synthetic oligonucleotide
aaagaccucaaauagauca

SEQ ID NO: 495090 - RNA, 19 nt, Artificial Sequence
  Description of Artificial Sequence: Synthetic oligonucleotide
aagguuauagucccguacc

SEQ ID NO: 495091 - RNA, 19 nt, Artificial Sequence
  Description of Artificial Sequence: Synthetic oligonucleotide
uuaugggaaacucaaauca

SEQ ID NO: 495092 - RNA, 19 nt, Artificial Sequence
  Description of Artificial Sequence: Synthetic oligonucleotide
acuaauacuaaaugcuagc

SEQ ID NO: 495093 - RNA, 19 nt, Artificial Sequence
  Description of Artificial Sequence: Synthetic oligonucleotide
aaggcuauuaaauaauccu

SEQ ID NO: 495094 - RNA, 19 nt, Artificial Sequence
  Description of Artificial Sequence: Synthetic oligonucleotide
aauuugguuagcugaagag

SEQ ID NO: 495095 - RNA, 19 nt, Artificial Sequence
  Description of Artificial Sequence: Synthetic oligonucleotide
aaacuaguaucacugucac

SEQ ID NO: 495096 - RNA, 19 nt, Artificial Sequence
  Description of Artificial Sequence: Synthetic oligonucleotide
uguuaacuaaaucuguuug

SEQ ID NO: 495097 - RNA, 19 nt, Artificial Sequence
  Description of Artificial Sequence: Synthetic oligonucleotide
cuuauuuagacuguguucc

SEQ ID NO: 495098 - RNA, 19 nt, Artificial Sequence
  Description of Artificial Sequence: Synthetic oligonucleotide
uagguaaugggcaagacgu

SEQ ID NO: 495099 - RNA, 19 nt, Artificial Sequence
  Description of Artificial Sequence: Synthetic oligonucleotide
uaaaugcuagcaccgaugg

SEQ ID NO: 495100 - RNA, 19 nt, Artificial Sequence
  Description of Artificial Sequence: Synthetic oligonucleotide
aaaguggucaaugacugac

SEQ ID NO: 495101 - RNA, 19 nt, Artificial Sequence
  Description of Artificial Sequence: Synthetic oligonucleotide
ucuauuauaagcacuuuaa

SEQ ID NO: 495102 - RNA, 19 nt, Artificial Sequence
  Description of Artificial Sequence: Synthetic oligonucleotide
agaauaagagacugggugg

SEQ ID NO: 495103 - RNA, 19 nt, Artificial Sequence
  Description of Artificial Sequence: Synthetic oligonucleotide
uggaacauaacccacuugu

SEQ ID NO: 495104 - RNA, 19 nt, Artificial Sequence
  Description of Artificial Sequence: Synthetic oligonucleotide
aaaaucuuaaaacacccuu

SEQ ID NO: 495105 - RNA, 19 nt, Artificial Sequence
  Description of Artificial Sequence: Synthetic oligonucleotide
uguuugauaguaucggucc

SEQ ID NO: 495106 - RNA, 19 nt, Artificial Sequence
  Description of Artificial Sequence: Synthetic oligonucleotide
aacauaacccacuugucca

SEQ ID NO: 495107 - RNA, 19 nt, Artificial Sequence
  Description of Artificial Sequence: Synthetic oligonucleotide
uuagcugaagagaauaaga

SEQ ID NO: 495108 - RNA, 19 nt, Artificial Sequence
  Description of Artificial Sequence: Synthetic oligonucleotide
ucagcuauggucauucuca

SEQ ID NO: 495109 - RNA, 19 nt, Artificial Sequence
  Description of Artificial Sequence: Synthetic oligonucleotide
uccaaauucauggagaaga

SEQ ID NO: 495110 - RNA, 19 nt, Artificial Sequence
  Description of Artificial Sequence: Synthetic oligonucleotide
aauuguagguacuuuucug

SEQ ID NO: 495111 - RNA, 19 nt, Artificial Sequence
  Description of Artificial Sequence: Synthetic oligonucleotide
acaaccugauaucugggcc

SEQ ID NO: 495112 - RNA, 19 nt, Artificial Sequence
  Description of Artificial Sequence: Synthetic oligonucleotide
cuuggagauaaaauaauac

SEQ ID NO: 495113 - RNA, 19 nt, Artificial Sequence
  Description of Artificial Sequence: Synthetic oligonucleotide
uucucuuguagaaacagcu

SEQ ID NO: 495114 - RNA, 19 nt, Artificial Sequence
  Description of Artificial Sequence: Synthetic oligonucleotide
aguugggcggcuuuuaaac

SEQ ID NO: 495115 - RNA, 19 nt, Artificial Sequence
  Description of Artificial Sequence: Synthetic oligonucleotide
auauccaccaguugggcgg

SEQ ID NO: 495116 - RNA, 19 nt, Artificial Sequence
  Description of Artificial Sequence: Synthetic oligonucleotide
ucaaaucaagcacaauuug

SEQ ID NO: 495117 - RNA, 19 nt, Artificial Sequence
  Description of Artificial Sequence: Synthetic oligonucleotide
uucacgauacggauaauug

SEQ ID NO: 495118 - RNA, 19 nt, Artificial Sequence
  Description of Artificial Sequence: Synthetic oligonucleotide
aaauuguagguacuuuucu

SEQ ID NO: 495119 - RNA, 19 nt, Artificial Sequence
  Description of Artificial Sequence: Synthetic oligonucleotide
uggagaagauucaucagag

SEQ ID NO: 495120 - RNA, 19 nt, Artificial Sequence
  Description of Artificial Sequence: Synthetic oligonucleotide
gauaguaucgguccugaug

SEQ ID NO: 495121 - RNA, 19 nt, Artificial Sequence
  Description of Artificial Sequence: Synthetic oligonucleotide
auaauguuaacuaaaucug

SEQ ID NO: 495122 - RNA, 19 nt, Artificial Sequence
  Description of Artificial Sequence: Synthetic oligonucleotide
gaacauaacccacuugucc

SEQ ID NO: 495123 - RNA, 19 nt, Artificial Sequence
  Description of Artificial Sequence: Synthetic oligonucleotide
uuauuucgagccuuuaccc

SEQ ID NO: 495124 - RNA, 19 nt, Artificial Sequence
  Description of Artificial Sequence: Synthetic oligonucleotide
gaaaacgccaauucgcccc

SEQ ID NO: 495125 - RNA, 19 nt, Artificial Sequence
  Description of Artificial Sequence: Synthetic oligonucleotide
aagccuuauaggaauaaac

SEQ ID NO: 495126 - RNA, 19 nt, Artificial Sequence
  Description of Artificial Sequence: Synthetic oligonucleotide
agauucucaggagagaugg

SEQ ID NO: 495127 - RNA, 19 nt, Artificial Sequence
  Description of Artificial Sequence: Synthetic oligonucleotide
gauaauugcucccucagga

SEQ ID NO: 495128 - RNA, 19 nt, Artificial Sequence
  Description of Artificial Sequence: Synthetic oligonucleotide
uaacugucgacucucagcu

SEQ ID NO: 495129 - RNA, 19 nt, Artificial Sequence
  Description of Artificial Sequence: Synthetic oligonucleotide
ucguacaaccuuuaaaucu

SEQ ID NO: 495130 - RNA, 19 nt, Artificial Sequence
  Description of Artificial Sequence: Synthetic oligonucleotide
gacgcuagcaucuccauug

SEQ ID NO: 495131 - RNA, 19 nt, Artificial Sequence
  Description of Artificial Sequence: Synthetic oligonucleotide
agaauuggcaaacauuacu

SEQ ID NO: 495132 - RNA, 19 nt, Artificial Sequence
  Description of Artificial Sequence: Synthetic oligonucleotide
gcuauggucauucucaggg

SEQ ID NO: 495133 - RNA, 19 nt, Artificial Sequence
  Description of Artificial Sequence: Synthetic oligonucleotide
uggaauguguucuguauag

SEQ ID NO: 495134 - RNA, 19 nt, Artificial Sequence
  Description of Artificial Sequence: Synthetic oligonucleotide
agaacauuaaaguggcuca

SEQ ID NO: 495135 - RNA, 19 nt, Artificial Sequence
  Description of Artificial Sequence: Synthetic oligonucleotide
aggcuugugaaauacagca

SEQ ID NO: 495136 - RNA, 19 nt, Artificial Sequence
  Description of Artificial Sequence: Synthetic oligonucleotide
gaaauuucaaaacaucgua

SEQ ID NO: 495137 - RNA, 19 nt, Artificial Sequence
  Description of Artificial Sequence: Synthetic oligonucleotide
uacuagucuagguaauggg

SEQ ID NO: 495138 - RNA, 19 nt, Artificial Sequence
  Description of Artificial Sequence: Synthetic oligonucleotide
ugcuaguguaagaagauaa

SEQ ID NO: 495139 - RNA, 19 nt, Artificial Sequence
  Description of Artificial Sequence: Synthetic oligonucleotide
ugggaaacucaaaucaagc

SEQ ID NO: 495140 - RNA, 19 nt, Artificial Sequence
  Description of Artificial Sequence: Synthetic oligonucleotide
acuagucuagguaaugggc

SEQ ID NO: 495141 - RNA, 19 nt, Artificial Sequence
  Description of Artificial Sequence: Synthetic oligonucleotide
aacucaucaucugucuggc

SEQ ID NO: 495142 - RNA, 19 nt, Artificial Sequence
  Description of Artificial Sequence: Synthetic oligonucleotide
auaagcacuuuaaagauca

SEQ ID NO: 495143 - RNA, 19 nt, Artificial Sequence
  Description of Artificial Sequence: Synthetic oligonucleotide
aaauaauacaagggccuuc

SEQ ID NO: 495144 - RNA, 19 nt, Artificial Sequence
  Description of Artificial Sequence: Synthetic oligonucleotide
ugugguaccaguuucugau

SEQ ID NO: 495145 - RNA, 19 nt, Artificial Sequence
  Description of Artificial Sequence: Synthetic oligonucleotide
uuguucacgauacggauaa

SEQ ID NO: 495146 - RNA, 19 nt, Artificial Sequence
  Description of Artificial Sequence: Synthetic oligonucleotide
agggaaacacccaaaagac

SEQ ID NO: 495147 - RNA, 19 nt, Artificial Sequence
  Description of Artificial Sequence: Synthetic oligonucleotide
cuagguaaugggcaagacg

SEQ ID NO: 495148 - RNA, 19 nt, Artificial Sequence
  Description of Artificial Sequence: Synthetic oligonucleotide
ugugaaauacagcauucuc

SEQ ID NO: 495149 - RNA, 19 nt, Artificial Sequence
  Description of Artificial Sequence: Synthetic oligonucleotide
guuauagucccguaccacc

SEQ ID NO: 495150 - RNA, 19 nt, Artificial Sequence
  Description of Artificial Sequence: Synthetic oligonucleotide
caacucaucaucugucugg

SEQ ID NO: 495151 - RNA, 19 nt, Artificial Sequence
  Description of Artificial Sequence: Synthetic oligonucleotide
aagaccuacaguccagugu

SEQ ID NO: 495152 - RNA, 19 nt, Artificial Sequence
  Description of Artificial Sequence: Synthetic oligonucleotide
cuaacugucgacucucagc

SEQ ID NO: 495153 - RNA, 19 nt, Artificial Sequence
  Description of Artificial Sequence: Synthetic oligonucleotide
auuucgagccuuuacccag

SEQ ID NO: 495154 - RNA, 19 nt, Artificial Sequence
  Description of Artificial Sequence: Synthetic oligonucleotide
cacuaauacuaaaugcuag

SEQ ID NO: 495155 - RNA, 19 nt, Artificial Sequence
  Description of Artificial Sequence: Synthetic oligonucleotide
uuggcaaguuucuagcuca

SEQ ID NO: 495156 - RNA, 19 nt, Artificial Sequence
  Description of Artificial Sequence: Synthetic oligonucleotide
gauacggauaauugcuccc

SEQ ID NO: 495157 - RNA, 19 nt, Artificial Sequence
  Description of Artificial Sequence: Synthetic oligonucleotide
aacggcacauggcucuccc

SEQ ID NO: 495158 - RNA, 19 nt, Artificial Sequence
  Description of Artificial Sequence: Synthetic oligonucleotide
gaugggaaaacgccaauuc

SEQ ID NO: 495159 - RNA, 19 nt, Artificial Sequence
  Description of Artificial Sequence: Synthetic oligonucleotide
ugagguuaugggaaacuca

SEQ ID NO: 495160 - RNA, 19 nt, Artificial Sequence
  Description of Artificial Sequence: Synthetic oligonucleotide
aacucaucugguugagaag

SEQ ID NO: 495161 - RNA, 19 nt, Artificial Sequence
  Description of Artificial Sequence: Synthetic oligonucleotide
aauucgccccauugaacuc

SEQ ID NO: 495162 - RNA, 19 nt, Artificial Sequence
  Description of Artificial Sequence: Synthetic oligonucleotide
uauaagcacuuuaaagauc

SEQ ID NO: 495163 - RNA, 19 nt, Artificial Sequence
  Description of Artificial Sequence: Synthetic oligonucleotide
cuaaaugcuagcaccgaug

SEQ ID NO: 495164 - RNA, 19 nt, Artificial Sequence
  Description of Artificial Sequence: Synthetic oligonucleotide
uuaacuaaaucuguuugau

SEQ ID NO: 495165 - RNA, 19 nt, Artificial Sequence
  Description of Artificial Sequence: Synthetic oligonucleotide
agccuccuuauuuagacug

SEQ ID NO: 495166 - RNA, 19 nt, Artificial Sequence
  Description of Artificial Sequence: Synthetic oligonucleotide
gaagguuauagucccguac

SEQ ID NO: 495167 - RNA, 19 nt, Artificial Sequence
  Description of Artificial Sequence: Synthetic oligonucleotide
uaugggaaacucaaaucaa

SEQ ID NO: 495168 - RNA, 19 nt, Artificial Sequence
  Description of Artificial Sequence: Synthetic oligonucleotide
aaaugcuagcaccgauggg

SEQ ID NO: 495169 - RNA, 19 nt, Artificial Sequence
  Description of Artificial Sequence: Synthetic oligonucleotide
agagaauuggcaaacauua

SEQ ID NO: 495170 - RNA, 19 nt, Artificial Sequence
  Description of Artificial Sequence: Synthetic oligonucleotide
aaauagaucaacagauaaa

SEQ ID NO: 495171 - RNA, 19 nt, Artificial Sequence
  Description of Artificial Sequence: Synthetic oligonucleotide
aguaucgguccugaugugc

SEQ ID NO: 495172 - RNA, 19 nt, Artificial Sequence
  Description of Artificial Sequence: Synthetic oligonucleotide
uuauagucccguaccaccu

SEQ ID NO: 495173 - RNA, 19 nt, Artificial Sequence
  Description of Artificial Sequence: Synthetic oligonucleotide
auaaccucccucuacuagu

SEQ ID NO: 495174 - RNA, 19 nt, Artificial Sequence
  Description of Artificial Sequence: Synthetic oligonucleotide
gaauaagagacuggguggc

SEQ ID NO: 495175 - RNA, 19 nt, Artificial Sequence
  Description of Artificial Sequence: Synthetic oligonucleotide
ugcucuauuauaagcacuu

SEQ ID NO: 495176 - RNA, 19 nt, Artificial Sequence
  Description of Artificial Sequence: Synthetic oligonucleotide
guagguacuuuucuggaac

SEQ ID NO: 495177 - RNA, 19 nt, Artificial Sequence
  Description of Artificial Sequence: Synthetic oligonucleotide
aucauugcuaaagugguca

SEQ ID NO: 495178 - RNA, 19 nt, Artificial Sequence
  Description of Artificial Sequence: Synthetic oligonucleotide
aaggacaacucaucaucug

SEQ ID NO: 495179 - RNA, 19 nt, Artificial Sequence
  Description of Artificial Sequence: Synthetic oligonucleotide
ucgacucucagcuaugguc

SEQ ID NO: 495180 - RNA, 19 nt, Artificial Sequence
  Description of Artificial Sequence: Synthetic oligonucleotide
ucucccaccaccugaaggu

SEQ ID NO: 495181 - RNA, 19 nt, Artificial Sequence
  Description of Artificial Sequence: Synthetic oligonucleotide
uucagguuagcccacuaau

SEQ ID NO: 495182 - RNA, 19 nt, Artificial Sequence
  Description of Artificial Sequence: Synthetic oligonucleotide
uccuuauuuagacuguguu

SEQ ID NO: 495183 - RNA, 19 nt, Artificial Sequence
  Description of Artificial Sequence: Synthetic oligonucleotide
cuugugaaauacagcauuc

SEQ ID NO: 495184 - RNA, 19 nt, Artificial Sequence
  Description of Artificial Sequence: Synthetic oligonucleotide
uauuucgagccuuuaccca

SEQ ID NO: 495185 - RNA, 19 nt, Artificial Sequence
  Description of Artificial Sequence: Synthetic oligonucleotide
agguaaagagaauuggcaa

SEQ ID NO: 495186 - RNA, 19 nt, Artificial Sequence
  Description of Artificial Sequence: Synthetic oligonucleotide
aauguuaacuaaaucuguu

SEQ ID NO: 495187 - RNA, 19 nt, Artificial Sequence
  Description of Artificial Sequence: Synthetic oligonucleotide
uaaucacaaccugauaucu

SEQ ID NO: 495188 - RNA, 19 nt, Artificial Sequence
  Description of Artificial Sequence: Synthetic oligonucleotide
ucuaacugucgacucucag

SEQ ID NO: 495189 - RNA, 19 nt, Artificial Sequence
  Description of Artificial Sequence: Synthetic oligonucleotide
ugaaaugaguucugcuucu

SEQ ID NO: 495190 - RNA, 19 nt, Artificial Sequence
  Description of Artificial Sequence: Synthetic oligonucleotide
aggaaaggacaacucauca

SEQ ID NO: 495191 - RNA, 19 nt, Artificial Sequence
  Description of Artificial Sequence: Synthetic oligonucleotide
auuggaauguguucuguau

SEQ ID NO: 495192 - RNA, 19 nt, Artificial Sequence
  Description of Artificial Sequence: Synthetic oligonucleotide
aaaacaucguacaaccuuu

SEQ ID NO: 495193 - RNA, 19 nt, Artificial Sequence
  Description of Artificial Sequence: Synthetic oligonucleotide
gaaauuguagguacuuuuc

SEQ ID NO: 495194 - RNA, 19 nt, Artificial Sequence
  Description of Artificial Sequence: Synthetic oligonucleotide
agcacaauuugguuagcug

SEQ ID NO: 495195 - RNA, 19 nt, Artificial Sequence
  Description of Artificial Sequence: Synthetic oligonucleotide
guaaagagaauuggcaaac

SEQ ID NO: 495196 - RNA, 19 nt, Artificial Sequence
  Description of Artificial Sequence: Synthetic oligonucleotide
auucuaacugucgacucuc

SEQ ID NO: 495197 - RNA, 19 nt, Artificial Sequence
  Description of Artificial Sequence: Synthetic oligonucleotide
guuagcugaagagaauaag

SEQ ID NO: 495198 - RNA, 19 nt, Artificial Sequence
  Description of Artificial Sequence: Synthetic oligonucleotide
aauucauggagaagauuca

SEQ ID NO: 495199 - RNA, 19 nt, Artificial Sequence
  Description of Artificial Sequence: Synthetic oligonucleotide
aggacaacucaucaucugu

SEQ ID NO: 495200 - RNA, 19 nt, Artificial Sequence
  Description of Artificial Sequence: Synthetic oligonucleotide
ucuaacaccucauguuccu

SEQ ID NO: 495201 - RNA, 19 nt, Artificial Sequence
  Description of Artificial Sequence: Synthetic oligonucleotide
uuugauaguaucgguccug

SEQ ID NO: 495202 - RNA, 19 nt, Artificial Sequence
  Description of Artificial Sequence: Synthetic oligonucleotide
aaaauaauacaagggccuu

SEQ ID NO: 495203 - RNA, 19 nt, Artificial Sequence
  Description of Artificial Sequence: Synthetic oligonucleotide
ucaaaacaucguacaaccu

SEQ ID NO: 495204 - RNA, 19 nt, Artificial Sequence
  Description of Artificial Sequence: Synthetic oligonucleotide
cauaaccucccucuacuag

SEQ ID NO: 495205 - RNA, 19 nt, Artificial Sequence
  Description of Artificial Sequence: Synthetic oligonucleotide
uuuguucacgauacggaua

SEQ ID NO: 495206 - RNA, 19 nt, Artificial Sequence
  Description of Artificial Sequence: Synthetic oligonucleotide
acaucguacaaccuuuaaa

SEQ ID NO: 495207 - RNA, 19 nt, Artificial Sequence
  Description of Artificial Sequence: Synthetic oligonucleotide
caagacguggccucagccc

SEQ ID NO: 495208 - RNA, 19 nt, Artificial Sequence
  Description of Artificial Sequence: Synthetic oligonucleotide
agcaccgaugggaaaacgc

SEQ ID NO: 495209 - RNA, 19 nt, Artificial Sequence
  Description of Artificial Sequence: Synthetic oligonucleotide
aguaggcuguuugaagugg

SEQ ID NO: 495210 - RNA, 19 nt, Artificial Sequence
  Description of Artificial Sequence: Synthetic oligonucleotide
aaaacgccaauucgcccca

SEQ ID NO: 495211 - RNA, 19 nt, Artificial Sequence
  Description of Artificial Sequence: Synthetic oligonucleotide
cauaggcaacggcacaugg

SEQ ID NO: 495212 - RNA, 19 nt, Artificial Sequence
  Description of Artificial Sequence: Synthetic oligonucleotide
ucuacuagucuagguaaug

SEQ ID NO: 495213 - RNA, 19 nt, Artificial Sequence
  Description of Artificial Sequence: Synthetic oligonucleotide
gagcaucauugcuaaagug

SEQ ID NO: 495214 - RNA, 19 nt, Artificial Sequence
  Description of Artificial Sequence: Synthetic oligonucleotide
ugauucuaacugucgacuc

SEQ ID NO: 495215 - RNA, 19 nt, Artificial Sequence
  Description of Artificial Sequence: Synthetic oligonucleotide
cauuaaaguggcucauuuc

SEQ ID NO: 495216 - RNA, 19 nt, Artificial Sequence
  Description of Artificial Sequence: Synthetic oligonucleotide
ucagguuagcccacuaaua

SEQ ID NO: 495217 - RNA, 19 nt, Artificial Sequence
  Description of Artificial Sequence: Synthetic oligonucleotide
uuuagacuguguuccucug

SEQ ID NO: 495218 - RNA, 19 nt, Artificial Sequence
  Description of Artificial Sequence: Synthetic oligonucleotide
cacaaccugauaucugggc

SEQ ID NO: 495219 - RNA, 19 nt, Artificial Sequence
  Description of Artificial Sequence: Synthetic oligonucleotide
ugguaccaguuucugauuc

SEQ ID NO: 495220 - RNA, 19 nt, Artificial Sequence
  Description of Artificial Sequence: Synthetic oligonucleotide
guucccuaggucaagaaga

SEQ ID NO: 495221 - RNA, 19 nt, Artificial Sequence
  Description of Artificial Sequence: Synthetic oligonucleotide
ugggcggcuuuuaaacuag

SEQ ID NO: 495222 - RNA, 19 nt, Artificial Sequence
  Description of Artificial Sequence: Synthetic oligonucleotide
uuauuuagacuguguuccu

SEQ ID NO: 495223 - RNA, 19 nt, Artificial Sequence
  Description of Artificial Sequence: Synthetic oligonucleotide
caucguacaaccuuuaaau

SEQ ID NO: 495224 - RNA, 19 nt, Artificial Sequence
  Description of Artificial Sequence: Synthetic oligonucleotide
aacaucguacaaccuuuaa

SEQ ID NO: 495225 - RNA, 19 nt, Artificial Sequence
  Description of Artificial Sequence: Synthetic oligonucleotide
uguggcccauuuccgagcc

SEQ ID NO: 495226 - RNA, 19 nt, Artificial Sequence
  Description of Artificial Sequence: Synthetic oligonucleotide
cuuuaucuguuccacagaa

SEQ ID NO: 495227 - RNA, 19 nt, Artificial Sequence
  Description of Artificial Sequence: Synthetic oligonucleotide
cuaauacuaaaugcuagca

SEQ ID NO: 495228 - RNA, 19 nt, Artificial Sequence
  Description of Artificial Sequence: Synthetic oligonucleotide
uucccuaggucaagaagac

SEQ ID NO: 495229 - RNA, 19 nt, Artificial Sequence
  Description of Artificial Sequence: Synthetic oligonucleotide
agccuuuacccagucuucc

SEQ ID NO: 495230 - RNA, 19 nt, Artificial Sequence
  Description of Artificial Sequence: Synthetic oligonucleotide
augggaaacucaaaucaag

SEQ ID NO: 495231 - RNA, 19 nt, Artificial Sequence
  Description of Artificial Sequence: Synthetic oligonucleotide
uccugaugugcauucgcug

SEQ ID NO: 495232 - RNA, 19 nt, Artificial Sequence
  Description of Artificial Sequence: Synthetic oligonucleotide
acuaaaugcuagcaccgau

SEQ ID NO: 495233 - RNA, 19 nt, Artificial Sequence
  Description of Artificial Sequence: Synthetic oligonucleotide
aaaucccacggggacaugu

SEQ ID NO: 495234 - RNA, 19 nt, Artificial Sequence
  Description of Artificial Sequence: Synthetic oligonucleotide
gguaaugggcaagacgugg

SEQ ID NO: 495235 - RNA, 19 nt, Artificial Sequence
  Description of Artificial Sequence: Synthetic oligonucleotide
ugaugccggguuaugcagc

SEQ ID NO: 495236 - RNA, 19 nt, Artificial Sequence
  Description of Artificial Sequence: Synthetic oligonucleotide
cuggcuuggagauaaaaua

SEQ ID NO: 495237 - RNA, 19 nt, Artificial Sequence
  Description of Artificial Sequence: Synthetic oligonucleotide
auaagagacuggguggcag

SEQ ID NO: 495238 - RNA, 19 nt, Artificial Sequence
  Description of Artificial Sequence: Synthetic oligonucleotide
aagaagaccuacaguccag

SEQ ID NO: 495239 - RNA, 19 nt, Artificial Sequence
  Description of Artificial Sequence: Synthetic oligonucleotide
cauagacauuuccaucaag

SEQ ID NO: 495240 - RNA, 19 nt, Artificial Sequence
  Description of Artificial Sequence: Synthetic oligonucleotide
acaacuuuguucccuuaaa

SEQ ID NO: 495241 - RNA, 19 nt, Artificial Sequence
  Description of Artificial Sequence: Synthetic oligonucleotide
ugugugugaccgacugucc

SEQ ID NO: 495242 - RNA, 19 nt, Artificial Sequence
  Description of Artificial Sequence: Synthetic oligonucleotide
aacuaguaucacugucaca

SEQ ID NO: 495243 - RNA, 19 nt, Artificial Sequence
  Description of Artificial Sequence: Synthetic oligonucleotide
ucccacggggacaugugag

SEQ ID NO: 495244 - RNA, 19 nt, Artificial Sequence
  Description of Artificial Sequence: Synthetic oligonucleotide
gaagaccuacaguccagug

SEQ ID NO: 495245 - RNA, 19 nt, Artificial Sequence
  Description of Artificial Sequence: Synthetic oligonucleotide
uaacuaaaucuguuugaua

SEQ ID NO: 495246 - RNA, 19 nt, Artificial Sequence
  Description of Artificial Sequence: Synthetic oligonucleotide
agguuagcccacuaauacu

SEQ ID NO: 495247 - RNA, 19 nt, Artificial Sequence
  Description of Artificial Sequence: Synthetic oligonucleotide
gagguuaugggaaacucaa

SEQ ID NO: 495248 - RNA, 19 nt, Artificial Sequence
  Description of Artificial Sequence: Synthetic oligonucleotide
caacucaucugguugagaa

SEQ ID NO: 495249 - RNA, 19 nt, Artificial Sequence
  Description of Artificial Sequence: Synthetic oligonucleotide
caagaagaccuacagucca

SEQ ID NO: 495250 - RNA, 19 nt, Artificial Sequence
  Description of Artificial Sequence: Synthetic oligonucleotide
uugauaguaucgguccuga

SEQ ID NO: 495251 - RNA, 19 nt, Artificial Sequence
  Description of Artificial Sequence: Synthetic oligonucleotide
aaccugauaucugggccag

SEQ ID NO: 495252 - RNA, 19 nt, Artificial Sequence
  Description of Artificial Sequence: Synthetic oligonucleotide
ugucgacucucagcuaugg

SEQ ID NO: 495253 - RNA, 19 nt, Artificial Sequence
  Description of Artificial Sequence: Synthetic oligonucleotide
agcuauggucauucucagg

SEQ ID NO: 495254 - RNA, 19 nt, Artificial Sequence
  Description of Artificial Sequence: Synthetic oligonucleotide
cuaguaucacugucacaag

SEQ ID NO: 495255 - RNA, 19 nt, Artificial Sequence
  Description of Artificial Sequence: Synthetic oligonucleotide
ugugagcauuucaaguuuu

SEQ ID NO: 495256 - RNA, 19 nt, Artificial Sequence
  Description of Artificial Sequence: Synthetic oligonucleotide
gugaugccggguuaugcag

SEQ ID NO: 495257 - RNA, 19 nt, Artificial Sequence
  Description of Artificial Sequence: Synthetic oligonucleotide
gcacaauuugguuagcuga

SEQ ID NO: 495258 - RNA, 19 nt, Artificial Sequence
  Description of Artificial Sequence: Synthetic oligonucleotide
aauaagagacuggguggca

SEQ ID NO: 495259 - RNA, 19 nt, Artificial Sequence
  Description of Artificial Sequence: Synthetic oligonucleotide
ccaaccaagguaaagagaa

SEQ ID NO: 495260 - RNA, 19 nt, Artificial Sequence
  Description of Artificial Sequence: Synthetic oligonucleotide
agguuauagucccguacca

SEQ ID NO: 495261 - RNA, 19 nt, Artificial Sequence
  Description of Artificial Sequence: Synthetic oligonucleotide
uccgagccuccuuauuuag

SEQ ID NO: 495262 - RNA, 19 nt, Artificial Sequence
  Description of Artificial Sequence: Synthetic oligonucleotide
uggguucaaaggucagaag

SEQ ID NO: 495263 - RNA, 19 nt, Artificial Sequence
  Description of Artificial Sequence: Synthetic oligonucleotide
ugccauaaccucccucuac

SEQ ID NO: 495264 - RNA, 19 nt, Artificial Sequence
  Description of Artificial Sequence: Synthetic oligonucleotide
ggcccucauaaucauaaag

SEQ ID NO: 495265 - RNA, 19 nt, Artificial Sequence
  Description of Artificial Sequence: Synthetic oligonucleotide
gaggcuugugaaauacagc

SEQ ID NO: 495266 - RNA, 19 nt, Artificial Sequence
  Description of Artificial Sequence: Synthetic oligonucleotide
ugugugaccgacuguccaa

SEQ ID NO: 495267 - RNA, 19 nt, Artificial Sequence
  Description of Artificial Sequence: Synthetic oligonucleotide
auagucccguaccaccuug

SEQ ID NO: 495268 - RNA, 19 nt, Artificial Sequence
  Description of Artificial Sequence: Synthetic oligonucleotide
uaaccucccucuacuaguc

SEQ ID NO: 495269 - RNA, 19 nt, Artificial Sequence
  Description of Artificial Sequence: Synthetic oligonucleotide
acaauuugguuagcugaag

SEQ ID NO: 495270 - RNA, 19 nt, Artificial Sequence
  Description of Artificial Sequence: Synthetic oligonucleotide
uugggcggcuuuuaaacua

SEQ ID NO: 495271 - RNA, 19 nt, Artificial Sequence
  Description of Artificial Sequence: Synthetic oligonucleotide
cacgauacggauaauugcu

SEQ ID NO: 495272 - RNA, 19 nt, Artificial Sequence
  Description of Artificial Sequence: Synthetic oligonucleotide
guaaugggcaagacguggc

SEQ ID NO: 495273 - RNA, 19 nt, Artificial Sequence
  Description of Artificial Sequence: Synthetic oligonucleotide
acggauaauugcucccuca

SEQ ID NO: 495274 - RNA, 19 nt, Artificial Sequence
  Description of Artificial Sequence: Synthetic oligonucleotide
gugcauucgcugcugcuag

SEQ ID NO: 495275 - RNA, 19 nt, Artificial Sequence
  Description of Artificial Sequence: Synthetic oligonucleotide
ucauugcuaaaguggucaa

SEQ ID NO: 495276 - RNA, 19 nt, Artificial Sequence
  Description of Artificial Sequence: Synthetic oligonucleotide
acgauacggauaauugcuc

SEQ ID NO: 495277 - RNA, 19 nt, Artificial Sequence
  Description of Artificial Sequence: Synthetic oligonucleotide
uucuaacugucgacucuca

SEQ ID NO: 495278 - RNA, 19 nt, Artificial Sequence
  Description of Artificial Sequence: Synthetic oligonucleotide
ggguuaugcagcuuggaga

SEQ ID NO: 495279 - RNA, 19 nt, Artificial Sequence
  Description of Artificial Sequence: Synthetic oligonucleotide
gagaauuggcaaacauuac

SEQ ID NO: 495280 - RNA, 19 nt, Artificial Sequence
  Description of Artificial Sequence: Synthetic oligonucleotide
acgccaauucgccccauug

SEQ ID NO: 495281 - RNA, 19 nt, Artificial Sequence
  Description of Artificial Sequence: Synthetic oligonucleotide
gaaaugaguucugcuucug

SEQ ID NO: 495282 - RNA, 19 nt, Artificial Sequence
  Description of Artificial Sequence: Synthetic oligonucleotide
cucagcuauggucauucuc

SEQ ID NO: 495283 - RNA, 19 nt, Artificial Sequence
  Description of Artificial Sequence: Synthetic oligonucleotide
aacauuaaaguggcucauu

SEQ ID NO: 495284 - RNA, 19 nt, Artificial Sequence
  Description of Artificial Sequence: Synthetic oligonucleotide
uggcaaguuucuagcucag

SEQ ID NO: 495285 - RNA, 19 nt, Artificial Sequence
  Description of Artificial Sequence: Synthetic oligonucleotide
cucuauuauaagcacuuua

SEQ ID NO: 495286 - RNA, 19 nt, Artificial Sequence
  Description of Artificial Sequence: Synthetic oligonucleotide
auacggauaauugcucccu

SEQ ID NO: 495287 - RNA, 19 nt, Artificial Sequence
  Description of Artificial Sequence: Synthetic oligonucleotide
caguaggcuguuugaagug

SEQ ID NO: 495288 - RNA, 19 nt, Artificial Sequence
  Description of Artificial Sequence: Synthetic oligonucleotide
ugugaccgacuguccaaag

SEQ ID NO: 495289 - RNA, 19 nt, Artificial Sequence
  Description of Artificial Sequence: Synthetic oligonucleotide
cguacaaccuuuaaaucug

SEQ ID NO: 495290 - RNA, 19 nt, Artificial Sequence
  Description of Artificial Sequence: Synthetic oligonucleotide
uuucgagccuuuacccagu

SEQ ID NO: 495291 - RNA, 19 nt, Artificial Sequence
  Description of Artificial Sequence: Synthetic oligonucleotide
caaccugauaucugggcca

SEQ ID NO: 495292 - RNA, 19 nt, Artificial Sequence
  Description of Artificial Sequence: Synthetic oligonucleotide
caauucgccccauugaacu

SEQ ID NO: 495293 - RNA, 19 nt, Artificial Sequence
  Description of Artificial Sequence: Synthetic oligonucleotide
caauauccaccaguugggc

SEQ ID NO: 495294 - RNA, 19 nt, Artificial Sequence
  Description of Artificial Sequence: Synthetic oligonucleotide
cacaauuugguuagcugaa

SEQ ID NO: 495295 - RNA, 19 nt, Artificial Sequence
  Description of Artificial Sequence: Synthetic oligonucleotide
acauaacccacuuguccaa

SEQ ID NO: 495296 - RNA, 19 nt, Artificial Sequence
  Description of Artificial Sequence: Synthetic oligonucleotide
ugugcauucgcugcugcua

SEQ ID NO: 495297 - RNA, 19 nt, Artificial Sequence
  Description of Artificial Sequence: Synthetic oligonucleotide
acgugccacacguguggcc

SEQ ID NO: 495298 - RNA, 19 nt, Artificial Sequence
  Description of Artificial Sequence: Synthetic oligonucleotide
ggaaaacgccaauucgccc

SEQ ID NO: 495299 - RNA, 19 nt, Artificial Sequence
  Description of Artificial Sequence: Synthetic oligonucleotide
aggcuauuaaauaauccuu

SEQ ID NO: 495300 - RNA, 19 nt, Artificial Sequence
  Description of Artificial Sequence: Synthetic oligonucleotide
uacggauaauugcucccuc

SEQ ID NO: 495301 - RNA, 19 nt, Artificial Sequence
  Description of Artificial Sequence: Synthetic oligonucleotide
ucuagguaaugggcaagac

SEQ ID NO: 495302 - RNA, 19 nt, Artificial Sequence
  Description of Artificial Sequence: Synthetic oligonucleotide
agccuucauaauguuaacu

SEQ ID NO: 495303 - RNA, 19 nt, Artificial Sequence
  Description of Artificial Sequence: Synthetic oligonucleotide
caucauugcuaaagugguc

SEQ ID NO: 495304 - RNA, 19 nt, Artificial Sequence
  Description of Artificial Sequence: Synthetic oligonucleotide
caguacucuggcuuggaga

SEQ ID NO: 495305 - RNA, 19 nt, Artificial Sequence
  Description of Artificial Sequence: Synthetic oligonucleotide
uaacccacuuguccaacuu

SEQ ID NO: 495306 - RNA, 19 nt, Artificial Sequence
  Description of Artificial Sequence: Synthetic oligonucleotide
cuggaugugugugaccgac

SEQ ID NO: 495307 - RNA, 19 nt, Artificial Sequence
  Description of Artificial Sequence: Synthetic oligonucleotide
ucaccugugcaggugugca

SEQ ID NO: 495308 - RNA, 19 nt, Artificial Sequence
  Description of Artificial Sequence: Synthetic oligonucleotide
ugaagguuauagucccgua

SEQ ID NO: 495309 - RNA, 19 nt, Artificial Sequence
  Description of Artificial Sequence: Synthetic oligonucleotide
agucuagguaaugggcaag

SEQ ID NO: 495310 - RNA, 19 nt, Artificial Sequence
  Description of Artificial Sequence: Synthetic oligonucleotide
uguguuccucugugguacc

SEQ ID NO: 495311 - RNA, 19 nt, Artificial Sequence
  Description of Artificial Sequence: Synthetic oligonucleotide
uucgccccauugaacuccc

SEQ ID NO: 495312 - RNA, 19 nt, Artificial Sequence
  Description of Artificial Sequence: Synthetic oligonucleotide
gagcucaauauccaccagu

SEQ ID NO: 495313 - RNA, 19 nt, Artificial Sequence
  Description of Artificial Sequence: Synthetic oligonucleotide
gaccgacuguccaaagcag

SEQ ID NO: 495314 - RNA, 19 nt, Artificial Sequence
  Description of Artificial Sequence: Synthetic oligonucleotide
ugggaaauuguagguacuu

SEQ ID NO: 495315 - RNA, 19 nt, Artificial Sequence
  Description of Artificial Sequence: Synthetic oligonucleotide
aaucccacggggacaugug

SEQ ID NO: 495316 - RNA, 19 nt, Artificial Sequence
  Description of Artificial Sequence: Synthetic oligonucleotide
ucgguccugaugugcauuc

SEQ ID NO: 495317 - RNA, 19 nt, Artificial Sequence
  Description of Artificial Sequence: Synthetic oligonucleotide
uauagucccguaccaccuu

SEQ ID NO: 495318 - RNA, 19 nt, Artificial Sequence
  Description of Artificial Sequence: Synthetic oligonucleotide
uuccgagccuccuuauuua

SEQ ID NO: 495319 - RNA, 19 nt, Artificial Sequence
  Description of Artificial Sequence: Synthetic oligonucleotide
uguugcucacgugccacac

SEQ ID NO: 495320 - RNA, 19 nt, Artificial Sequence
  Description of Artificial Sequence: Synthetic oligonucleotide
agcucaauauccaccaguu

SEQ ID NO: 495321 - RNA, 19 nt, Artificial Sequence
  Description of Artificial Sequence: Synthetic oligonucleotide
gaagccuuauaggaauaaa

SEQ ID NO: 495322 - RNA, 19 nt, Artificial Sequence
  Description of Artificial Sequence: Synthetic oligonucleotide
aacuuuauuucgagccuuu

SEQ ID NO: 495323 - RNA, 19 nt, Artificial Sequence
  Description of Artificial Sequence: Synthetic oligonucleotide
ggucaacucaucugguuga

SEQ ID NO: 495324 - RNA, 19 nt, Artificial Sequence
  Description of Artificial Sequence: Synthetic oligonucleotide
ggugaugccggguuaugca

SEQ ID NO: 495325 - RNA, 19 nt, Artificial Sequence
  Description of Artificial Sequence: Synthetic oligonucleotide
ucaacucaucugguugaga

SEQ ID NO: 495326 - RNA, 19 nt, Artificial Sequence
  Description of Artificial Sequence: Synthetic oligonucleotide
cuucaccccagacaaaugu

SEQ ID NO: 495327 - RNA, 19 nt, Artificial Sequence
  Description of Artificial Sequence: Synthetic oligonucleotide
uagcaccgaugggaaaacg

SEQ ID NO: 495328 - RNA, 19 nt, Artificial Sequence
  Description of Artificial Sequence: Synthetic oligonucleotide
uaguaucgguccugaugug

SEQ ID NO: 495329 - RNA, 19 nt, Artificial Sequence
  Description of Artificial Sequence: Synthetic oligonucleotide
gcugcucugcauuaaucac

SEQ ID NO: 495330 - RNA, 19 nt, Artificial Sequence
  Description of Artificial Sequence: Synthetic oligonucleotide
ccagacaaaugucagggca

SEQ ID NO: 495331 - RNA, 19 nt, Artificial Sequence
  Description of Artificial Sequence: Synthetic oligonucleotide
guaucgguccugaugugca

SEQ ID NO: 495332 - RNA, 19 nt, Artificial Sequence
  Description of Artificial Sequence: Synthetic oligonucleotide
acguguggcccauuuccga

SEQ ID NO: 495333 - RNA, 19 nt, Artificial Sequence
  Description of Artificial Sequence: Synthetic oligonucleotide
cgauacggauaauugcucc

SEQ ID NO: 495334 - RNA, 19 nt, Artificial Sequence
  Description of Artificial Sequence: Synthetic oligonucleotide
gguuagcccacuaauacua

SEQ ID NO: 495335 - RNA, 19 nt, Artificial Sequence
  Description of Artificial Sequence: Synthetic oligonucleotide
aaacaucguacaaccuuua

SEQ ID NO: 495336 - RNA, 19 nt, Artificial Sequence
  Description of Artificial Sequence: Synthetic oligonucleotide
ggaaauuguagguacuuuu

SEQ ID NO: 495337 - RNA, 19 nt, Artificial Sequence
  Description of Artificial Sequence: Synthetic oligonucleotide
agucccguaccaccuugcu

SEQ ID NO: 495338 - RNA, 19 nt, Artificial Sequence
  Description of Artificial Sequence: Synthetic oligonucleotide
gcaagacguggccucagcc

SEQ ID NO: 495339 - RNA, 19 nt, Artificial Sequence
  Description of Artificial Sequence: Synthetic oligonucleotide
gcaccgaugggaaaacgcc

SEQ ID NO: 495340 - RNA, 19 nt, Artificial Sequence
  Description of Artificial Sequence: Synthetic oligonucleotide
ucccuaggucaagaagacc

SEQ ID NO: 495341 - RNA, 19 nt, Artificial Sequence
  Description of Artificial Sequence: Synthetic oligonucleotide
ggcaaacauuacuuuguuc

SEQ ID NO: 495342 - RNA, 19 nt, Artificial Sequence
  Description of Artificial Sequence: Synthetic oligonucleotide
gaccuacaguccagugugg

SEQ ID NO: 495343 - RNA, 19 nt, Artificial Sequence
  Description of Artificial Sequence: Synthetic oligonucleotide
caccgaugggaaaacgcca

SEQ ID NO: 495344 - RNA, 19 nt, Artificial Sequence
  Description of Artificial Sequence: Synthetic oligonucleotide
ucgagccuuuacccagucu

SEQ ID NO: 495345 - RNA, 19 nt, Artificial Sequence
  Description of Artificial Sequence: Synthetic oligonucleotide
uauccaccaguugggcggc

SEQ ID NO: 495346 - RNA, 19 nt, Artificial Sequence
  Description of Artificial Sequence: Synthetic oligonucleotide
guuugauaguaucgguccu

SEQ ID NO: 495347 - RNA, 19 nt, Artificial Sequence
  Description of Artificial Sequence: Synthetic oligonucleotide
cuagcaccgaugggaaaac

SEQ ID NO: 495348 - RNA, 19 nt, Artificial Sequence
  Description of Artificial Sequence: Synthetic oligonucleotide
ugauaguaucgguccugau

SEQ ID NO: 495349 - RNA, 19 nt, Artificial Sequence
  Description of Artificial Sequence: Synthetic oligonucleotide
ggaauguguucuguauagc

SEQ ID NO: 495350 - RNA, 19 nt, Artificial Sequence
  Description of Artificial Sequence: Synthetic oligonucleotide
auuuccgagccuccuuauu

SEQ ID NO: 495351 - RNA, 19 nt, Artificial Sequence
  Description of Artificial Sequence: Synthetic oligonucleotide
uucgagccuuuacccaguc

SEQ ID NO: 495352 - RNA, 19 nt, Artificial Sequence
  Description of Artificial Sequence: Synthetic oligonucleotide
gguuauagucccguaccac

SEQ ID NO: 495353 - RNA, 19 nt, Artificial Sequence
  Description of Artificial Sequence: Synthetic oligonucleotide
gucuagguaaugggcaaga

SEQ ID NO: 495354 - RNA, 19 nt, Artificial Sequence
  Description of Artificial Sequence: Synthetic oligonucleotide
cgagccuccuuauuuagac

SEQ ID NO: 495355 - RNA, 19 nt, Artificial Sequence
  Description of Artificial Sequence: Synthetic oligonucleotide
ggcuguuugaagugggaaa

SEQ ID NO: 495356 - RNA, 19 nt, Artificial Sequence
  Description of Artificial Sequence: Synthetic oligonucleotide
guuugaagugggaaauugu

SEQ ID NO: 495357 - RNA, 19 nt, Artificial Sequence
  Description of Artificial Sequence: Synthetic oligonucleotide
gaugccggguuaugcagcu

SEQ ID NO: 495358 - RNA, 19 nt, Artificial Sequence
  Description of Artificial Sequence: Synthetic oligonucleotide
aacgccaauucgccccauu

SEQ ID NO: 495359 - RNA, 19 nt, Artificial Sequence
  Description of Artificial Sequence: Synthetic oligonucleotide
gagaaggauuauauuuacu

SEQ ID NO: 495360 - RNA, 19 nt, Artificial Sequence
  Description of Artificial Sequence: Synthetic oligonucleotide
cuucagguuagcccacuaa

SEQ ID NO: 495361 - RNA, 19 nt, Artificial Sequence
  Description of Artificial Sequence: Synthetic oligonucleotide
uaucgguccugaugugcau

SEQ ID NO: 495362 - RNA, 19 nt, Artificial Sequence
  Description of Artificial Sequence: Synthetic oligonucleotide
aguuucuagcucaguccug

SEQ ID NO: 495363 - RNA, 19 nt, Artificial Sequence
  Description of Artificial Sequence: Synthetic oligonucleotide
cugucgacucucagcuaug

SEQ ID NO: 495364 - RNA, 19 nt, Artificial Sequence
  Description of Artificial Sequence: Synthetic oligonucleotide
gagccuuuacccagucuuc

SEQ ID NO: 495365 - RNA, 19 nt, Artificial Sequence
  Description of Artificial Sequence: Synthetic oligonucleotide
acgcuagcaucuccauuga

SEQ ID NO: 495366 - RNA, 19 nt, Artificial Sequence
  Description of Artificial Sequence: Synthetic oligonucleotide
gcucaauauccaccaguug

SEQ ID NO: 495367 - RNA, 19 nt, Artificial Sequence
  Description of Artificial Sequence: Synthetic oligonucleotide
guguucuguauagcuuggc

SEQ ID NO: 495368 - RNA, 19 nt, Artificial Sequence
  Description of Artificial Sequence: Synthetic oligonucleotide
ccaauucgccccauugaac

SEQ ID NO: 495369 - RNA, 19 nt, Artificial Sequence
  Description of Artificial Sequence: Synthetic oligonucleotide
agacgcuagcaucuccauu

SEQ ID NO: 495370 - RNA, 19 nt, Artificial Sequence
  Description of Artificial Sequence: Synthetic oligonucleotide
aggcuguuugaagugggaa

SEQ ID NO: 495371 - RNA, 19 nt, Artificial Sequence
  Description of Artificial Sequence: Synthetic oligonucleotide
agguaaugggcaagacgug

SEQ ID NO: 495372 - RNA, 19 nt, Artificial Sequence
  Description of Artificial Sequence: Synthetic oligonucleotide
gccaauucgccccauugaa

SEQ ID NO: 495373 - RNA, 19 nt, Artificial Sequence
  Description of Artificial Sequence: Synthetic oligonucleotide
agguacuuuucuggaacau

SEQ ID NO: 495374 - RNA, 19 nt, Artificial Sequence
  Description of Artificial Sequence: Synthetic oligonucleotide
ccucuacuagucuagguaa

SEQ ID NO: 495375 - RNA, 19 nt, Artificial Sequence
  Description of Artificial Sequence: Synthetic oligonucleotide
accgaugggaaaacgccaa

SEQ ID NO: 495376 - RNA, 19 nt, Artificial Sequence
  Description of Artificial Sequence: Synthetic oligonucleotide
ggaacauaacccacuuguc

SEQ ID NO: 495377 - RNA, 19 nt, Artificial Sequence
  Description of Artificial Sequence: Synthetic oligonucleotide
guugggcggcuuuuaaacu

SEQ ID NO: 495378 - RNA, 19 nt, Artificial Sequence
  Description of Artificial Sequence: Synthetic oligonucleotide
gaacauuaaaguggcucau

SEQ ID NO: 495379 - RNA, 19 nt, Artificial Sequence
  Description of Artificial Sequence: Synthetic oligonucleotide
caagcacaauuugguuagc

SEQ ID NO: 495380 - RNA, 19 nt, Artificial Sequence
  Description of Artificial Sequence: Synthetic oligonucleotide
ugcuagcaccgaugggaaa

SEQ ID NO: 495381 - RNA, 19 nt, Artificial Sequence
  Description of Artificial Sequence: Synthetic oligonucleotide
gguuucaccugugcaggug

SEQ ID NO: 495382 - RNA, 19 nt, Artificial Sequence
  Description of Artificial Sequence: Synthetic oligonucleotide
gcuagcaccgaugggaaaa

SEQ ID NO: 495383 - RNA, 19 nt, Artificial Sequence
  Description of Artificial Sequence: Synthetic oligonucleotide
guggaauugcuggaugugu

SEQ ID NO: 495384 - RNA, 19 nt, Artificial Sequence
  Description of Artificial Sequence: Synthetic oligonucleotide
gcggcuuuuaaacuaguau

SEQ ID NO: 495385 - RNA, 19 nt, Artificial Sequence
  Description of Artificial Sequence: Synthetic oligonucleotide
guucacgauacggauaauu

SEQ ID NO: 495386 - RNA, 19 nt, Artificial Sequence
  Description of Artificial Sequence: Synthetic oligonucleotide
gagaagccuuauaggaaua

SEQ ID NO: 495387 - RNA, 19 nt, Artificial Sequence
  Description of Artificial Sequence: Synthetic oligonucleotide
gguuagcugaagagaauaa

SEQ ID NO: 495388 - RNA, 19 nt, Artificial Sequence
  Description of Artificial Sequence: Synthetic oligonucleotide
cugagcccugaccugugca

SEQ ID NO: 495389 - RNA, 19 nt, Artificial Sequence
  Description of Artificial Sequence: Synthetic oligonucleotide
cggguuaugcagcuuggag

SEQ ID NO: 495390 - RNA, 19 nt, Artificial Sequence
  Description of Artificial Sequence: Synthetic oligonucleotide
gagccuccuuauuuagacu

SEQ ID NO: 495391 - RNA, 19 nt, Artificial Sequence
  Description of Artificial Sequence: Synthetic oligonucleotide
cacgugccacacguguggc

SEQ ID NO: 495392 - RNA, 19 nt, Artificial Sequence
  Description of Artificial Sequence: Synthetic oligonucleotide
cugaagguuauagucccgu

SEQ ID NO: 495393 - RNA, 19 nt, Artificial Sequence
  Description of Artificial Sequence: Synthetic oligonucleotide
gcacauggcucucccacca

SEQ ID NO: 495394 - RNA, 19 nt, Artificial Sequence
  Description of Artificial Sequence: Synthetic oligonucleotide
ggcaagacguggccucagc

SEQ ID NO: 495395 - RNA, 19 nt, Artificial Sequence
  Description of Artificial Sequence: Synthetic oligonucleotide
ggcaacggcacauggcucu

SEQ ID NO: 495396 - RNA, 19 nt, Artificial Sequence
  Description of Artificial Sequence: Synthetic oligonucleotide
agguuaugggaaacucaaa

SEQ ID NO: 495397 - RNA, 19 nt, Artificial Sequence
  Description of Artificial Sequence: Synthetic oligonucleotide
cguguggcccauuuccgag

SEQ ID NO: 495398 - RNA, 19 nt, Artificial Sequence
  Description of Artificial Sequence: Synthetic oligonucleotide
acggcacauggcucuccca

SEQ ID NO: 495399 - RNA, 19 nt, Artificial Sequence
  Description of Artificial Sequence: Synthetic oligonucleotide
cuagcucaguccugcugaa

SEQ ID NO: 495400 - RNA, 19 nt, Artificial Sequence
  Description of Artificial Sequence: Synthetic oligonucleotide
ggucuggucuccuugguuu

SEQ ID NO: 495401 - RNA, 19 nt, Artificial Sequence
  Description of Artificial Sequence: Synthetic oligonucleotide
aucugcacggaggcuuccu

SEQ ID NO: 495402 - RNA, 19 nt, Artificial Sequence
  Description of Artificial Sequence: Synthetic oligonucleotide
caacggcacauggcucucc

SEQ ID NO: 495403 - RNA, 19 nt, Artificial Sequence
  Description of Artificial Sequence: Synthetic oligonucleotide
cccucuacuagucuaggua

SEQ ID NO: 495404 - RNA, 19 nt, Artificial Sequence
  Description of Artificial Sequence: Synthetic oligonucleotide
ccccauugaacuccccuuc

SEQ ID NO: 495405 - RNA, 19 nt, Artificial Sequence
  Description of Artificial Sequence: Synthetic oligonucleotide
cugcuaguguaagaagaua

SEQ ID NO: 495406 - RNA, 19 nt, Artificial Sequence
  Description of Artificial Sequence: Synthetic oligonucleotide
acggugaugccggguuaug

SEQ ID NO: 495407 - RNA, 19 nt, Artificial Sequence
  Description of Artificial Sequence: Synthetic oligonucleotide
gggcccacagguucuucac

SEQ ID NO: 495408 - RNA, 19 nt, Artificial Sequence
  Description of Artificial Sequence: Synthetic oligonucleotide
gugugaccgacuguccaaa

SEQ ID NO: 495409 - RNA, 19 nt, Artificial Sequence
  Description of Artificial Sequence: Synthetic oligonucleotide
ggucagaagggcauacacu

SEQ ID NO: 495410 - RNA, 19 nt, Artificial Sequence
  Description of Artificial Sequence: Synthetic oligonucleotide
uguucacgauacggauaau

SEQ ID NO: 495411 - RNA, 19 nt, Artificial Sequence
  Description of Artificial Sequence: Synthetic oligonucleotide
gcucacgugccacacgugu

SEQ ID NO: 495412 - RNA, 19 nt, Artificial Sequence
  Description of Artificial Sequence: Synthetic oligonucleotide
ucgccccauugaacucccc

SEQ ID NO: 495413 - RNA, 19 nt, Artificial Sequence
  Description of Artificial Sequence: Synthetic oligonucleotide
gccggguuaugcagcuugg

SEQ ID NO: 495414 - RNA, 19 nt, Artificial Sequence
  Description of Artificial Sequence: Synthetic oligonucleotide
gugggaaauuguagguacu

SEQ ID NO: 495415 - RNA, 19 nt, Artificial Sequence
  Description of Artificial Sequence: Synthetic oligonucleotide
cauucgcugcugcuagugu

SEQ ID NO: 495416 - RNA, 19 nt, Artificial Sequence
  Description of Artificial Sequence: Synthetic oligonucleotide
gcuaguguaagaagauaau

SEQ ID NO: 495417 - RNA, 19 nt, Artificial Sequence
  Description of Artificial Sequence: Synthetic oligonucleotide
cggcacauggcucucccac

SEQ ID NO: 495418 - RNA, 19 nt, Artificial Sequence
  Description of Artificial Sequence: Synthetic oligonucleotide
cacagaaagcagguuuccu

SEQ ID NO: 495419 - RNA, 19 nt, Artificial Sequence
  Description of Artificial Sequence: Synthetic oligonucleotide
aaacgccaauucgccccau

SEQ ID NO: 495420 - RNA, 19 nt, Artificial Sequence
  Description of Artificial Sequence: Synthetic oligonucleotide
ggggacaugugagcauuuc

SEQ ID NO: 495421 - RNA, 19 nt, Artificial Sequence
  Description of Artificial Sequence: Synthetic oligonucleotide
gcugcuaguguaagaagau

SEQ ID NO: 495422 - RNA, 19 nt, Artificial Sequence
  Description of Artificial Sequence: Synthetic oligonucleotide
ccauuuccgagccuccuua

SEQ ID NO: 495423 - RNA, 19 nt, Artificial Sequence
  Description of Artificial Sequence: Synthetic oligonucleotide
cauugcuaaaguggucaau

SEQ ID NO: 495424 - RNA, 19 nt, Artificial Sequence
  Description of Artificial Sequence: Synthetic oligonucleotide
ugccacacguguggcccau

SEQ ID NO: 495425 - RNA, 19 nt, Artificial Sequence
  Description of Artificial Sequence: Synthetic oligonucleotide
ggcggcuuuuaaacuagua

SEQ ID NO: 495426 - RNA, 19 nt, Artificial Sequence
  Description of Artificial Sequence: Synthetic oligonucleotide
cggugaugccggguuaugc

SEQ ID NO: 495427 - RNA, 19 nt, Artificial Sequence
  Description of Artificial Sequence: Synthetic oligonucleotide
cagacgcuagcaucuccau

SEQ ID NO: 495428 - RNA, 19 nt, Artificial Sequence
  Description of Artificial Sequence: Synthetic oligonucleotide
cgagccuuuacccagucuu

SEQ ID NO: 495429 - RNA, 19 nt, Artificial Sequence
  Description of Artificial Sequence: Synthetic oligonucleotide
cgcuagcaucuccauugag

SEQ ID NO: 495430 - RNA, 19 nt, Artificial Sequence
  Description of Artificial Sequence: Synthetic oligonucleotide
ccauaaccucccucuacua

SEQ ID NO: 495431 - RNA, 19 nt, Artificial Sequence
  Description of Artificial Sequence: Synthetic oligonucleotide
gugcaguccuuuaucuguu

SEQ ID NO: 495432 - RNA, 19 nt, Artificial Sequence
  Description of Artificial Sequence: Synthetic oligonucleotide
guacucuggcuuggagaua

SEQ ID NO: 495433 - RNA, 19 nt, Artificial Sequence
  Description of Artificial Sequence: Synthetic oligonucleotide
ccuuuacccagucuuccau

SEQ ID NO: 495434 - RNA, 19 nt, Artificial Sequence
  Description of Artificial Sequence: Synthetic oligonucleotide
gccccauugaacuccccuu

SEQ ID NO: 495435 - RNA, 19 nt, Artificial Sequence
  Description of Artificial Sequence: Synthetic oligonucleotide
gcaacggcacauggcucuc

SEQ ID NO: 495436 - RNA, 19 nt, Artificial Sequence
  Description of Artificial Sequence: Synthetic oligonucleotide
ggcaaguuucuagcucagu

SEQ ID NO: 495437 - RNA, 19 nt, Artificial Sequence
  Description of Artificial Sequence: Synthetic oligonucleotide
cacggugaugccggguuau

SEQ ID NO: 495438 - RNA, 19 nt, Artificial Sequence
  Description of Artificial Sequence: Synthetic oligonucleotide
gccuccuuauuuagacugu

SEQ ID NO: 495439 - RNA, 19 nt, Artificial Sequence
  Description of Artificial Sequence: Synthetic oligonucleotide
augccggguuaugcagcuu

SEQ ID NO: 495440 - RNA, 19 nt, Artificial Sequence
  Description of Artificial Sequence: Synthetic oligonucleotide
gcucuauuauaagcacuuu

SEQ ID NO: 495441 - RNA, 19 nt, Artificial Sequence
  Description of Artificial Sequence: Synthetic oligonucleotide
ccggguuaugcagcuugga

SEQ ID NO: 495442 - RNA, 19 nt, Artificial Sequence
  Description of Artificial Sequence: Synthetic oligonucleotide
cccguaccaccuugcugga

SEQ ID NO: 495443 - RNA, 19 nt, Artificial Sequence
  Description of Artificial Sequence: Synthetic oligonucleotide
cgccccauugaacuccccu

SEQ ID NO: 495444 - RNA, 19 nt, Artificial Sequence
  Description of Artificial Sequence: Synthetic oligonucleotide
gggcggcuuuuaaacuagu

SEQ ID NO: 495445 - RNA, 19 nt, Artificial Sequence
  Description of Artificial Sequence: Synthetic oligonucleotide
ccccuuccccagaagccau

SEQ ID NO: 495446 - RNA, 19 nt, Artificial Sequence
  Description of Artificial Sequence: Synthetic oligonucleotide
ccaccaguugggcggcuuu

SEQ ID NO: 495447 - RNA, 19 nt, Artificial Sequence
  Description of Artificial Sequence: Synthetic oligonucleotide
acaaauagacaucugaaac

SEQ ID NO: 495448 - RNA, 19 nt, Artificial Sequence
  Description of Artificial Sequence: Synthetic oligonucleotide
uauacaagcacucaugcgc

SEQ ID NO: 495449 - RNA, 19 nt, Artificial Sequence
  Description of Artificial Sequence: Synthetic oligonucleotide
auaaggacacuccauacgc

SEQ ID NO: 495450 - RNA, 19 nt, Artificial Sequence
  Description of Artificial Sequence: Synthetic oligonucleotide
aauaaggacacuccauacg

SEQ ID NO: 495451 - RNA, 19 nt, Artificial Sequence
  Description of Artificial Sequence: Synthetic oligonucleotide
agaccuagagaacaggugc

SEQ ID NO: 495452 - RNA, 19 nt, Artificial Sequence
  Description of Artificial Sequence: Synthetic oligonucleotide
ugaagagugacucacagau

SEQ ID NO: 495453 - RNA, 19 nt, Artificial Sequence
  Description of Artificial Sequence: Synthetic oligonucleotide
ggugggaugagauagaagg

SEQ ID NO: 495454 - RNA, 19 nt, Artificial Sequence
  Description of Artificial Sequence: Synthetic oligonucleotide
uugucuuuauucaucagag

SEQ ID NO: 495455 - RNA, 19 nt, Artificial Sequence
  Description of Artificial Sequence: Synthetic oligonucleotide
agaaaagcgaagcagcagg

SEQ ID NO: 495456 - RNA, 19 nt, Artificial Sequence
  Description of Artificial Sequence: Synthetic oligonucleotide
ucgacaauaaaggaggagg

SEQ ID NO: 495457 - RNA, 19 nt, Artificial Sequence
  Description of Artificial Sequence: Synthetic oligonucleotide
aacuacuuaacauuuacuu

SEQ ID NO: 495458 - RNA, 19 nt, Artificial Sequence
  Description of Artificial Sequence: Synthetic oligonucleotide
aauuagccuacagaaaggg

SEQ ID NO: 495459 - RNA, 19 nt, Artificial Sequence
  Description of Artificial Sequence: Synthetic oligonucleotide
aaccuaauguccuauacau

SEQ ID NO: 495460 - RNA, 19 nt, Artificial Sequence
  Description of Artificial Sequence: Synthetic oligonucleotide
accgugaucacuuuugaag

SEQ ID NO: 495461 - RNA, 19 nt, Artificial Sequence
  Description of Artificial Sequence: Synthetic oligonucleotide
aguuaaaacacaagcauag

SEQ ID NO: 495462 - RNA, 19 nt, Artificial Sequence
  Description of Artificial Sequence: Synthetic oligonucleotide
ggaauuagccuacagaaag

SEQ ID NO: 495463 - RNA, 19 nt, Artificial Sequence
  Description of Artificial Sequence: Synthetic oligonucleotide
aaacggggaacccaucagg

SEQ ID NO: 495464 - RNA, 19 nt, Artificial Sequence
  Description of Artificial Sequence: Synthetic oligonucleotide
ugaaauccgagucuagcug

SEQ ID NO: 495465 - RNA, 19 nt, Artificial Sequence
  Description of Artificial Sequence: Synthetic oligonucleotide
aauuugcccaaaccacuac

SEQ ID NO: 495466 - RNA, 19 nt, Artificial Sequence
  Description of Artificial Sequence: Synthetic oligonucleotide
aaagaauuauucuucucuu

SEQ ID NO: 495467 - RNA, 19 nt, Artificial Sequence
  Description of Artificial Sequence: Synthetic oligonucleotide
caccuuagcagaaagcucc

SEQ ID NO: 495468 - RNA, 19 nt, Artificial Sequence
  Description of Artificial Sequence: Synthetic oligonucleotide
gaggaauuagccuacagaa

SEQ ID NO: 495469 - RNA, 19 nt, Artificial Sequence
  Description of Artificial Sequence: Synthetic oligonucleotide
aaauagacaucugaaacau

SEQ ID NO: 495470 - RNA, 19 nt, Artificial Sequence
  Description of Artificial Sequence: Synthetic oligonucleotide
uagggaacugcacucauug

SEQ ID NO: 495471 - RNA, 19 nt, Artificial Sequence
  Description of Artificial Sequence: Synthetic oligonucleotide
aauugugcugacucguuca

SEQ ID NO: 495472 - RNA, 19 nt, Artificial Sequence
  Description of Artificial Sequence: Synthetic oligonucleotide
aguuccacccugcagcagc

SEQ ID NO: 495473 - RNA, 19 nt, Artificial Sequence
  Description of Artificial Sequence: Synthetic oligonucleotide
aaagcgaagcagcaggaga

SEQ ID NO: 495474 - RNA, 19 nt, Artificial Sequence
  Description of Artificial Sequence: Synthetic oligonucleotide
agcaauugauuauuuagcu

SEQ ID NO: 495475 - RNA, 19 nt, Artificial Sequence
  Description of Artificial Sequence: Synthetic oligonucleotide
uggacuugaaauccgaguc

SEQ ID NO: 495476 - RNA, 19 nt, Artificial Sequence
  Description of Artificial Sequence: Synthetic oligonucleotide
gagcuaaucaccacaaaag

SEQ ID NO: 495477 - RNA, 19 nt, Artificial Sequence
  Description of Artificial Sequence: Synthetic oligonucleotide
uacaacacgggcacagagg

SEQ ID NO: 495478 - RNA, 19 nt, Artificial Sequence
  Description of Artificial Sequence: Synthetic oligonucleotide
cucaguugagcuaaucacc

SEQ ID NO: 495479 - RNA, 19 nt, Artificial Sequence
  Description of Artificial Sequence: Synthetic oligonucleotide
ugugcugacucguucaccc

SEQ ID NO: 495480 - RNA, 19 nt, Artificial Sequence
  Description of Artificial Sequence: Synthetic oligonucleotide
uaggucauucuuuucaugu

SEQ ID NO: 495481 - RNA, 19 nt, Artificial Sequence
  Description of Artificial Sequence: Synthetic oligonucleotide
agcucgacaauaaaggagg

SEQ ID NO: 495482 - RNA, 19 nt, Artificial Sequence
  Description of Artificial Sequence: Synthetic oligonucleotide
uaccucaccaccuuagcag

SEQ ID NO: 495483 - RNA, 19 nt, Artificial Sequence
  Description of Artificial Sequence: Synthetic oligonucleotide
acugaagagugacucacag

SEQ ID NO: 495484 - RNA, 19 nt, Artificial Sequence
  Description of Artificial Sequence: Synthetic oligonucleotide
ugucagaaggaaccuaaug

SEQ ID NO: 495485 - RNA, 19 nt, Artificial Sequence
  Description of Artificial Sequence: Synthetic oligonucleotide
aacacgguggagaugagug

SEQ ID NO: 495486 - RNA, 19 nt, Artificial Sequence
  Description of Artificial Sequence: Synthetic oligonucleotide
ccuaauguccuauacauac

SEQ ID NO: 495487 - RNA, 19 nt, Artificial Sequence
  Description of Artificial Sequence: Synthetic oligonucleotide
uugaaauccgagucuagcu

SEQ ID NO: 495488 - RNA, 19 nt, Artificial Sequence
  Description of Artificial Sequence: Synthetic oligonucleotide
uaugacugcucacugcgca

SEQ ID NO: 495489 - RNA, 19 nt, Artificial Sequence
  Description of Artificial Sequence: Synthetic oligonucleotide
cuuagcagaaagcuccgcc

SEQ ID NO: 495490 - RNA, 19 nt, Artificial Sequence
  Description of Artificial Sequence: Synthetic oligonucleotide
cucggagacaacacggugg

SEQ ID NO: 495491 - RNA, 19 nt, Artificial Sequence
  Description of Artificial Sequence: Synthetic oligonucleotide
aagaggaauuagccuacag

SEQ ID NO: 495492 - RNA, 19 nt, Artificial Sequence
  Description of Artificial Sequence: Synthetic oligonucleotide
gaauuagccuacagaaagg

SEQ ID NO: 495493 - RNA, 19 nt, Artificial Sequence
  Description of Artificial Sequence: Synthetic oligonucleotide
gacgaaugugccaagggag

SEQ ID NO: 495494 - RNA, 19 nt, Artificial Sequence
  Description of Artificial Sequence: Synthetic oligonucleotide
aguugagcuaaucaccaca

SEQ ID NO: 495495 - RNA, 19 nt, Artificial Sequence
  Description of Artificial Sequence: Synthetic oligonucleotide
gaaccugcgaccgugauca

SEQ ID NO: 495496 - RNA, 19 nt, Artificial Sequence
  Description of Artificial Sequence: Synthetic oligonucleotide
acuacugugacaugccagu

SEQ ID NO: 495497 - RNA, 19 nt, Artificial Sequence
  Description of Artificial Sequence: Synthetic oligonucleotide
acaacacgggcacagaggu

SEQ ID NO: 495498 - RNA, 19 nt, Artificial Sequence
  Description of Artificial Sequence: Synthetic oligonucleotide
gaaguaugacugcucacug

SEQ ID NO: 495499 - RNA, 19 nt, Artificial Sequence
  Description of Artificial Sequence: Synthetic oligonucleotide
uacgcugccgggcaagagg

SEQ ID NO: 495500 - RNA, 19 nt, Artificial Sequence
  Description of Artificial Sequence: Synthetic oligonucleotide
acuacuuaacauuuacuua

SEQ ID NO: 495501 - RNA, 19 nt, Artificial Sequence
  Description of Artificial Sequence: Synthetic oligonucleotide
gaguccgacgguuuccugg

SEQ ID NO: 495502 - RNA, 19 nt, Artificial Sequence
  Description of Artificial Sequence: Synthetic oligonucleotide
ugagcaagucaagaaaaca

SEQ ID NO: 495503 - RNA, 19 nt, Artificial Sequence
  Description of Artificial Sequence: Synthetic oligonucleotide
ugagaagacuucagguccc

SEQ ID NO: 495504 - RNA, 19 nt, Artificial Sequence
  Description of Artificial Sequence: Synthetic oligonucleotide
ucagcucgacaauaaagga

SEQ ID NO: 495505 - RNA, 19 nt, Artificial Sequence
  Description of Artificial Sequence: Synthetic oligonucleotide
ugaaucuucuauguggguc

SEQ ID NO: 495506 - RNA, 19 nt, Artificial Sequence
  Description of Artificial Sequence: Synthetic oligonucleotide
uaguaagugcagcaauuga

SEQ ID NO: 495507 - RNA, 19 nt, Artificial Sequence
  Description of Artificial Sequence: Synthetic oligonucleotide
auugugcugacucguucac

SEQ ID NO: 495508 - RNA, 19 nt, Artificial Sequence
  Description of Artificial Sequence: Synthetic oligonucleotide
gaaauccgagucuagcuga

SEQ ID NO: 495509 - RNA, 19 nt, Artificial Sequence
  Description of Artificial Sequence: Synthetic oligonucleotide
ugaucacuuuugaaguaug

SEQ ID NO: 495510 - RNA, 19 nt, Artificial Sequence
  Description of Artificial Sequence: Synthetic oligonucleotide
cucacacacacacacacuc

SEQ ID NO: 495511 - RNA, 19 nt, Artificial Sequence
  Description of Artificial Sequence: Synthetic oligonucleotide
cuugaaauccgagucuagc

SEQ ID NO: 495512 - RNA, 19 nt, Artificial Sequence
  Description of Artificial Sequence: Synthetic oligonucleotide
gaaccuaauguccuauaca

SEQ ID NO: 495513 - RNA, 19 nt, Artificial Sequence
  Description of Artificial Sequence: Synthetic oligonucleotide
gaaucagggaggaagaaaa

SEQ ID NO: 495514 - RNA, 19 nt, Artificial Sequence
  Description of Artificial Sequence: Synthetic oligonucleotide
cucaugcgcacacacacgc

SEQ ID NO: 495515 - RNA, 19 nt, Artificial Sequence
  Description of Artificial Sequence: Synthetic oligonucleotide
cagcucgacaauaaaggag

SEQ ID NO: 495516 - RNA, 19 nt, Artificial Sequence
  Description of Artificial Sequence: Synthetic oligonucleotide
ugggagccgaguccgacgg

SEQ ID NO: 495517 - RNA, 19 nt, Artificial Sequence
  Description of Artificial Sequence: Synthetic oligonucleotide
gaaacggggaacccaucag

SEQ ID NO: 495518 - RNA, 19 nt, Artificial Sequence
  Description of Artificial Sequence: Synthetic oligonucleotide
agagucaagggacgaaugu

SEQ ID NO: 495519 - RNA, 19 nt, Artificial Sequence
  Description of Artificial Sequence: Synthetic oligonucleotide
auggacuugaaauccgagu

SEQ ID NO: 495520 - RNA, 19 nt, Artificial Sequence
  Description of Artificial Sequence: Synthetic oligonucleotide
cacucacacacacacacac

SEQ ID NO: 495521 - RNA, 19 nt, Artificial Sequence
  Description of Artificial Sequence: Synthetic oligonucleotide
accaccuuagcagaaagcu

SEQ ID NO: 495522 - RNA, 19 nt, Artificial Sequence
  Description of Artificial Sequence: Synthetic oligonucleotide
uuuguacacuuugggaugc

SEQ ID NO: 495523 - RNA, 19 nt, Artificial Sequence
  Description of Artificial Sequence: Synthetic oligonucleotide
ucggagacaacacggugga

SEQ ID NO: 495524 - RNA, 19 nt, Artificial Sequence
  Description of Artificial Sequence: Synthetic oligonucleotide
agaccugcggaaauuugcc

SEQ ID NO: 495525 - RNA, 19 nt, Artificial Sequence
  Description of Artificial Sequence: Synthetic oligonucleotide
ugcccaaaccacuacugug

SEQ ID NO: 495526 - RNA, 19 nt, Artificial Sequence
  Description of Artificial Sequence: Synthetic oligonucleotide
uuugggaugcuuagggcau

SEQ ID NO: 495527 - RNA, 19 nt, Artificial Sequence
  Description of Artificial Sequence: Synthetic oligonucleotide
cauggugaaccugcgaccg

SEQ ID NO: 495528 - RNA, 19 nt, Artificial Sequence
  Description of Artificial Sequence: Synthetic oligonucleotide
uguuggcuaccucaccacc

SEQ ID NO: 495529 - RNA, 19 nt, Artificial Sequence
  Description of Artificial Sequence: Synthetic oligonucleotide
ugacucacagaucaagcuu

SEQ ID NO: 495530 - RNA, 19 nt, Artificial Sequence
  Description of Artificial Sequence: Synthetic oligonucleotide
uaugugggucugcaugaag

SEQ ID NO: 495531 - RNA, 19 nt, Artificial Sequence
  Description of Artificial Sequence: Synthetic oligonucleotide
uccaauucgccaccauagc

SEQ ID NO: 495532 - RNA, 19 nt, Artificial Sequence
  Description of Artificial Sequence: Synthetic oligonucleotide
uaauugugcugacucguuc

SEQ ID NO: 495533 - RNA, 19 nt, Artificial Sequence
  Description of Artificial Sequence: Synthetic oligonucleotide
uccgagucuagcugaguag

SEQ ID NO: 495534 - RNA, 19 nt, Artificial Sequence
  Description of Artificial Sequence: Synthetic oligonucleotide
cacacacacacacacucag

SEQ ID NO: 495535 - RNA, 19 nt, Artificial Sequence
  Description of Artificial Sequence: Synthetic oligonucleotide
ugacaugccaguguuggcu

SEQ ID NO: 495536 - RNA, 19 nt, Artificial Sequence
  Description of Artificial Sequence: Synthetic oligonucleotide
gcaagucaagaaaacaagg

SEQ ID NO: 495537 - RNA, 19 nt, Artificial Sequence
  Description of Artificial Sequence: Synthetic oligonucleotide
aaguccgcuggaugacugg

SEQ ID NO: 495538 - RNA, 19 nt, Artificial Sequence
  Description of Artificial Sequence: Synthetic oligonucleotide
acacacacacacucagguc

SEQ ID NO: 495539 - RNA, 19 nt, Artificial Sequence
  Description of Artificial Sequence: Synthetic oligonucleotide
cuacagaaagggucuuggg

SEQ ID NO: 495540 - RNA, 19 nt, Artificial Sequence
  Description of Artificial Sequence: Synthetic oligonucleotide
acagaccgagcucccaaac

SEQ ID NO: 495541 - RNA, 19 nt, Artificial Sequence
  Description of Artificial Sequence: Synthetic oligonucleotide
guacaacacgggcacagag

SEQ ID NO: 495542 - RNA, 19 nt, Artificial Sequence
  Description of Artificial Sequence: Synthetic oligonucleotide
caauucgccaccauagcca

SEQ ID NO: 495543 - RNA, 19 nt, Artificial Sequence
  Description of Artificial Sequence: Synthetic oligonucleotide
aguaagugcagcaauugau

SEQ ID NO: 495544 - RNA, 19 nt, Artificial Sequence
  Description of Artificial Sequence: Synthetic oligonucleotide
gaguuagggaacugcacuc

SEQ ID NO: 495545 - RNA, 19 nt, Artificial Sequence
  Description of Artificial Sequence: Synthetic oligonucleotide
cuuccgaucccuuggccag

SEQ ID NO: 495546 - RNA, 19 nt, Artificial Sequence
  Description of Artificial Sequence: Synthetic oligonucleotide
gagugacucacagaucaag

SEQ ID NO: 495547 - RNA, 19 nt, Artificial Sequence
  Description of Artificial Sequence: Synthetic oligonucleotide
uccuuugguuuccucguca

SEQ ID NO: 495548 - RNA, 19 nt, Artificial Sequence
  Description of Artificial Sequence: Synthetic oligonucleotide
gguccgaacagcuggcugg

SEQ ID NO: 495549 - RNA, 19 nt, Artificial Sequence
  Description of Artificial Sequence: Synthetic oligonucleotide
ucacacacacacacacuca

SEQ ID NO: 495550 - RNA, 19 nt, Artificial Sequence
  Description of Artificial Sequence: Synthetic oligonucleotide
uugguucccuagcagcuca

SEQ ID NO: 495551 - RNA, 19 nt, Artificial Sequence
  Description of Artificial Sequence: Synthetic oligonucleotide
acccucuuuugaaaguacc

SEQ ID NO: 495552 - RNA, 19 nt, Artificial Sequence
  Description of Artificial Sequence: Synthetic oligonucleotide
gguuuuggaaucagggagg

SEQ ID NO: 495553 - RNA, 19 nt, Artificial Sequence
  Description of Artificial Sequence: Synthetic oligonucleotide
gagauagaagggcaggcaa

SEQ ID NO: 495554 - RNA, 19 nt, Artificial Sequence
  Description of Artificial Sequence: Synthetic oligonucleotide
uccgacgguuuccuggaag

SEQ ID NO: 495555 - RNA, 19 nt, Artificial Sequence
  Description of Artificial Sequence: Synthetic oligonucleotide
gucccgaguguucucaugc

SEQ ID NO: 495556 - RNA, 19 nt, Artificial Sequence
  Description of Artificial Sequence: Synthetic oligonucleotide
ucaagggacgaaugugcca

SEQ ID NO: 495557 - RNA, 19 nt, Artificial Sequence
  Description of Artificial Sequence: Synthetic oligonucleotide
agaucaagcuuuugaacuu

SEQ ID NO: 495558 - RNA, 19 nt, Artificial Sequence
  Description of Artificial Sequence: Synthetic oligonucleotide
cccuaaaggagacagaauc

SEQ ID NO: 495559 - RNA, 19 nt, Artificial Sequence
  Description of Artificial Sequence: Synthetic oligonucleotide
accugcggaaauuugccca

SEQ ID NO: 495560 - RNA, 19 nt, Artificial Sequence
  Description of Artificial Sequence: Synthetic oligonucleotide
acuccauacgcugccgggc

SEQ ID NO: 495561 - RNA, 19 nt, Artificial Sequence
  Description of Artificial Sequence: Synthetic oligonucleotide
ugguguuaggucauucuuu

SEQ ID NO: 495562 - RNA, 19 nt, Artificial Sequence
  Description of Artificial Sequence: Synthetic oligonucleotide
agaaggaaccuaauguccu

SEQ ID NO: 495563 - RNA, 19 nt, Artificial Sequence
  Description of Artificial Sequence: Synthetic oligonucleotide
gaaagcuccgccugaccac

SEQ ID NO: 495564 - RNA, 19 nt, Artificial Sequence
  Description of Artificial Sequence: Synthetic oligonucleotide
ucgucagcuugccacagaa

SEQ ID NO: 495565 - RNA, 19 nt, Artificial Sequence
  Description of Artificial Sequence: Synthetic oligonucleotide
ugaguaguaagugcagcaa

SEQ ID NO: 495566 - RNA, 19 nt, Artificial Sequence
  Description of Artificial Sequence: Synthetic oligonucleotide
ugcuacaguccuaucuggu

SEQ ID NO: 495567 - RNA, 19 nt, Artificial Sequence
  Description of Artificial Sequence: Synthetic oligonucleotide
uuaauugugcugacucguu

SEQ ID NO: 495568 - RNA, 19 nt, Artificial Sequence
  Description of Artificial Sequence: Synthetic oligonucleotide
uggagcaaggcagaagagu

SEQ ID NO: 495569 - RNA, 19 nt, Artificial Sequence
  Description of Artificial Sequence: Synthetic oligonucleotide
uaggcaguugccgacggug

SEQ ID NO: 495570 - RNA, 19 nt, Artificial Sequence
  Description of Artificial Sequence: Synthetic oligonucleotide
gcacucauugucuuuauuc

SEQ ID NO: 495571 - RNA, 19 nt, Artificial Sequence
  Description of Artificial Sequence: Synthetic oligonucleotide
gagaccuagagaacaggug

SEQ ID NO: 495572 - RNA, 19 nt, Artificial Sequence
  Description of Artificial Sequence: Synthetic oligonucleotide
caaguauaauuauacaaau

SEQ ID NO: 495573 - RNA, 19 nt, Artificial Sequence
  Description of Artificial Sequence: Synthetic oligonucleotide
aaaaguccgcuggaugacu

SEQ ID NO: 495574 - RNA, 19 nt, Artificial Sequence
  Description of Artificial Sequence: Synthetic oligonucleotide
aaauccgagucuagcugag

SEQ ID NO: 495575 - RNA, 19 nt, Artificial Sequence
  Description of Artificial Sequence: Synthetic oligonucleotide
aguccgcuggaugacuggc

SEQ ID NO: 495576 - RNA, 19 nt, Artificial Sequence
  Description of Artificial Sequence: Synthetic oligonucleotide
acacuguaaccucuccucu

SEQ ID NO: 495577 - RNA, 19 nt, Artificial Sequence
  Description of Artificial Sequence: Synthetic oligonucleotide
gaccuagagaacaggugcc

SEQ ID NO: 495578 - RNA, 19 nt, Artificial Sequence
  Description of Artificial Sequence: Synthetic oligonucleotide
ugcggaaauuugcccaaac

SEQ ID NO: 495579 - RNA, 19 nt, Artificial Sequence
  Description of Artificial Sequence: Synthetic oligonucleotide
aacggggaacccaucaggu

SEQ ID NO: 495580 - RNA, 19 nt, Artificial Sequence
  Description of Artificial Sequence: Synthetic oligonucleotide
ugcagcaauugauuauuua

SEQ ID NO: 495581 - RNA, 19 nt, Artificial Sequence
  Description of Artificial Sequence: Synthetic oligonucleotide
ggaaccuaauguccuauac

SEQ ID NO: 495582 - RNA, 19 nt, Artificial Sequence
  Description of Artificial Sequence: Synthetic oligonucleotide
aaagcuccgccugaccacu

SEQ ID NO: 495583 - RNA, 19 nt, Artificial Sequence
  Description of Artificial Sequence: Synthetic oligonucleotide
gauagaagggcaggcaaaa

SEQ ID NO: 495584 - RNA, 19 nt, Artificial Sequence
  Description of Artificial Sequence: Synthetic oligonucleotide
auaaaggaggagggugggg

SEQ ID NO: 495585 - RNA, 19 nt, Artificial Sequence
  Description of Artificial Sequence: Synthetic oligonucleotide
ugaaccugcgaccgugauc

SEQ ID NO: 495586 - RNA, 19 nt, Artificial Sequence
  Description of Artificial Sequence: Synthetic oligonucleotide
gaccugcggaaauuugccc

SEQ ID NO: 495587 - RNA, 19 nt, Artificial Sequence
  Description of Artificial Sequence: Synthetic oligonucleotide
ccucaguugagcuaaucac

SEQ ID NO: 495588 - RNA, 19 nt, Artificial Sequence
  Description of Artificial Sequence: Synthetic oligonucleotide
ggaugcuuagggcaucugc

SEQ ID NO: 495589 - RNA, 19 nt, Artificial Sequence
  Description of Artificial Sequence: Synthetic oligonucleotide
acucguucacccaugguga

SEQ ID NO: 495590 - RNA, 19 nt, Artificial Sequence
  Description of Artificial Sequence: Synthetic oligonucleotide
aaucuucuaugugggucug

SEQ ID NO: 495591 - RNA, 19 nt, Artificial Sequence
  Description of Artificial Sequence: Synthetic oligonucleotide
aaggaaccuaauguccuau

SEQ ID NO: 495592 - RNA, 19 nt, Artificial Sequence
  Description of Artificial Sequence: Synthetic oligonucleotide
aaaccacuacugugacaug

SEQ ID NO: 495593 - RNA, 19 nt, Artificial Sequence
  Description of Artificial Sequence: Synthetic oligonucleotide
acggggaacccaucagguc

SEQ ID NO: 495594 - RNA, 19 nt, Artificial Sequence
  Description of Artificial Sequence: Synthetic oligonucleotide
aagggccgaccuuuguggu

SEQ ID NO: 495595 - RNA, 19 nt, Artificial Sequence
  Description of Artificial Sequence: Synthetic oligonucleotide
cucacugcgcaggucaccc

SEQ ID NO: 495596 - RNA, 19 nt, Artificial Sequence
  Description of Artificial Sequence: Synthetic oligonucleotide
aguccgacgguuuccugga

SEQ ID NO: 495597 - RNA, 19 nt, Artificial Sequence
  Description of Artificial Sequence: Synthetic oligonucleotide
gggacgaaugugccaaggg

SEQ ID NO: 495598 - RNA, 19 nt, Artificial Sequence
  Description of Artificial Sequence: Synthetic oligonucleotide
ugcuuagggcaucugccau

SEQ ID NO: 495599 - RNA, 19 nt, Artificial Sequence
  Description of Artificial Sequence: Synthetic oligonucleotide
ugcugacucguucacccau

SEQ ID NO: 495600 - RNA, 19 nt, Artificial Sequence
  Description of Artificial Sequence: Synthetic oligonucleotide
ccaauucgccaccauagcc

SEQ ID NO: 495601 - RNA, 19 nt, Artificial Sequence
  Description of Artificial Sequence: Synthetic oligonucleotide
agcagcucggagacaacac

SEQ ID NO: 495602 - RNA, 19 nt, Artificial Sequence
  Description of Artificial Sequence: Synthetic oligonucleotide
ugagacccuccuuugguuu

SEQ ID NO: 495603 - RNA, 19 nt, Artificial Sequence
  Description of Artificial Sequence: Synthetic oligonucleotide
aguaguaagugcagcaauu

SEQ ID NO: 495604 - RNA, 19 nt, Artificial Sequence
  Description of Artificial Sequence: Synthetic oligonucleotide
uggugaaccugcgaccgug

SEQ ID NO: 495605 - RNA, 19 nt, Artificial Sequence
  Description of Artificial Sequence: Synthetic oligonucleotide
auccgagucuagcugagua

SEQ ID NO: 495606 - RNA, 19 nt, Artificial Sequence
  Description of Artificial Sequence: Synthetic oligonucleotide
caccaccuuagcagaaagc

SEQ ID NO: 495607 - RNA, 19 nt, Artificial Sequence
  Description of Artificial Sequence: Synthetic oligonucleotide
gcagcucggagacaacacg

SEQ ID NO: 495608 - RNA, 19 nt, Artificial Sequence
  Description of Artificial Sequence: Synthetic oligonucleotide
aguuuagucuuugguuucu

SEQ ID NO: 495609 - RNA, 19 nt, Artificial Sequence
  Description of Artificial Sequence: Synthetic oligonucleotide
gcauagugcauuuggaaaa

SEQ ID NO: 495610 - RNA, 19 nt, Artificial Sequence
  Description of Artificial Sequence: Synthetic oligonucleotide
guagaucaaguauaauuau

SEQ ID NO: 495611 - RNA, 19 nt, Artificial Sequence
  Description of Artificial Sequence: Synthetic oligonucleotide
uuagggaacugcacucauu

SEQ ID NO: 495612 - RNA, 19 nt, Artificial Sequence
  Description of Artificial Sequence: Synthetic oligonucleotide
cucgggucucccaacucag

SEQ ID NO: 495613 - RNA, 19 nt, Artificial Sequence
  Description of Artificial Sequence: Synthetic oligonucleotide
ugagaagcucagcuugguu

SEQ ID NO: 495614 - RNA, 19 nt, Artificial Sequence
  Description of Artificial Sequence: Synthetic oligonucleotide
aacugcacucauugucuuu

SEQ ID NO: 495615 - RNA, 19 nt, Artificial Sequence
  Description of Artificial Sequence: Synthetic oligonucleotide
gucaagggacgaaugugcc

SEQ ID NO: 495616 - RNA, 19 nt, Artificial Sequence
  Description of Artificial Sequence: Synthetic oligonucleotide
gcggaaauuugcccaaacc

SEQ ID NO: 495617 - RNA, 19 nt, Artificial Sequence
  Description of Artificial Sequence: Synthetic oligonucleotide
aacaaggacucuggaucca

SEQ ID NO: 495618 - RNA, 19 nt, Artificial Sequence
  Description of Artificial Sequence: Synthetic oligonucleotide
ucgggaucuugucuggguu

SEQ ID NO: 495619 - RNA, 19 nt, Artificial Sequence
  Description of Artificial Sequence: Synthetic oligonucleotide
ucccuaaaggagacagaau

SEQ ID NO: 495620 - RNA, 19 nt, Artificial Sequence
  Description of Artificial Sequence: Synthetic oligonucleotide
cacuguaaccucuccucuc

SEQ ID NO: 495621 - RNA, 19 nt, Artificial Sequence
  Description of Artificial Sequence: Synthetic oligonucleotide
gacuugaaauccgagucua

SEQ ID NO: 495622 - RNA, 19 nt, Artificial Sequence
  Description of Artificial Sequence: Synthetic oligonucleotide
agggacgaaugugccaagg

SEQ ID NO: 495623 - RNA, 19 nt, Artificial Sequence
  Description of Artificial Sequence: Synthetic oligonucleotide
uacaguccuaucugguguu

SEQ ID NO: 495624 - RNA, 19 nt, Artificial Sequence
  Description of Artificial Sequence: Synthetic oligonucleotide
acacacacacacacucagg

SEQ ID NO: 495625 - RNA, 19 nt, Artificial Sequence
  Description of Artificial Sequence: Synthetic oligonucleotide
gacucuggauccaaagaaa

SEQ ID NO: 495626 - RNA, 19 nt, Artificial Sequence
  Description of Artificial Sequence: Synthetic oligonucleotide
auuagccuacagaaagggu

SEQ ID NO: 495627 - RNA, 19 nt, Artificial Sequence
  Description of Artificial Sequence: Synthetic oligonucleotide
ggacgaaugugccaaggga

SEQ ID NO: 495628 - RNA, 19 nt, Artificial Sequence
  Description of Artificial Sequence: Synthetic oligonucleotide
acucaugcgcacacacacg

SEQ ID NO: 495629 - RNA, 19 nt, Artificial Sequence
  Description of Artificial Sequence: Synthetic oligonucleotide
gagacccuccuuugguuuc

SEQ ID NO: 495630 - RNA, 19 nt, Artificial Sequence
  Description of Artificial Sequence: Synthetic oligonucleotide
cuaccucaccaccuuagca

SEQ ID NO: 495631 - RNA, 19 nt, Artificial Sequence
  Description of Artificial Sequence: Synthetic oligonucleotide
guuuuggaaucagggagga

SEQ ID NO: 495632 - RNA, 19 nt, Artificial Sequence
  Description of Artificial Sequence: Synthetic oligonucleotide
cuuaauugugcugacucgu

SEQ ID NO: 495633 - RNA, 19 nt, Artificial Sequence
  Description of Artificial Sequence: Synthetic oligonucleotide
agccgaguccgacgguuuc

SEQ ID NO: 495634 - RNA, 19 nt, Artificial Sequence
  Description of Artificial Sequence: Synthetic oligonucleotide
caagggacgaaugugccaa

SEQ ID NO: 495635 - RNA, 19 nt, Artificial Sequence
  Description of Artificial Sequence: Synthetic oligonucleotide
acgaaugugccaagggaga

SEQ ID NO: 495636 - RNA, 19 nt, Artificial Sequence
  Description of Artificial Sequence: Synthetic oligonucleotide
cuaccuugguucccuagca

SEQ ID NO: 495637 - RNA, 19 nt, Artificial Sequence
  Description of Artificial Sequence: Synthetic oligonucleotide
agguaggcaguugccgacg

SEQ ID NO: 495638 - RNA, 19 nt, Artificial Sequence
  Description of Artificial Sequence: Synthetic oligonucleotide
gaguaguaagugcagcaau

SEQ ID NO: 495639 - RNA, 19 nt, Artificial Sequence
  Description of Artificial Sequence: Synthetic oligonucleotide
acuugaaauccgagucuag

SEQ ID NO: 495640 - RNA, 19 nt, Artificial Sequence
  Description of Artificial Sequence: Synthetic oligonucleotide
uacaagcacucaugcgcac

SEQ ID NO: 495641 - RNA, 19 nt, Artificial Sequence
  Description of Artificial Sequence: Synthetic oligonucleotide
cugcucacugcgcagguca

SEQ ID NO: 495642 - RNA, 19 nt, Artificial Sequence
  Description of Artificial Sequence: Synthetic oligonucleotide
guugccgacggugggauga

SEQ ID NO: 495643 - RNA, 19 nt, Artificial Sequence
  Description of Artificial Sequence: Synthetic oligonucleotide
cacacacacacacucaggu

SEQ ID NO: 495644 - RNA, 19 nt, Artificial Sequence
  Description of Artificial Sequence: Synthetic oligonucleotide
cugaagagugacucacaga

SEQ ID NO: 495645 - RNA, 19 nt, Artificial Sequence
  Description of Artificial Sequence: Synthetic oligonucleotide
caguugagcuaaucaccac

SEQ ID NO: 495646 - RNA, 19 nt, Artificial Sequence
  Description of Artificial Sequence: Synthetic oligonucleotide
ugacucguucacccauggu

SEQ ID NO: 495647 - RNA, 19 nt, Artificial Sequence
  Description of Artificial Sequence: Synthetic oligonucleotide
agauagaagggcaggcaaa

SEQ ID NO: 495648 - RNA, 19 nt, Artificial Sequence
  Description of Artificial Sequence: Synthetic oligonucleotide
aggaauuagccuacagaaa

SEQ ID NO: 495649 - RNA, 19 nt, Artificial Sequence
  Description of Artificial Sequence: Synthetic oligonucleotide
agggaacugcacucauugu

SEQ ID NO: 495650 - RNA, 19 nt, Artificial Sequence
  Description of Artificial Sequence: Synthetic oligonucleotide
gggguaccagcauuucucc

SEQ ID NO: 495651 - RNA, 19 nt, Artificial Sequence
  Description of Artificial Sequence: Synthetic oligonucleotide
gcgcaggucacccuucucc

SEQ ID NO: 495652 - RNA, 19 nt, Artificial Sequence
  Description of Artificial Sequence: Synthetic oligonucleotide
aauccgagucuagcugagu

SEQ ID NO: 495653 - RNA, 19 nt, Artificial Sequence
  Description of Artificial Sequence: Synthetic oligonucleotide
cacuguguagaucaaguau

SEQ ID NO: 495654 - RNA, 19 nt, Artificial Sequence
  Description of Artificial Sequence: Synthetic oligonucleotide
caccacaaaagccugaguu

SEQ ID NO: 495655 - RNA, 19 nt, Artificial Sequence
  Description of Artificial Sequence: Synthetic oligonucleotide
gacaugccaguguuggcua

SEQ ID NO: 495656 - RNA, 19 nt, Artificial Sequence
  Description of Artificial Sequence: Synthetic oligonucleotide
ucccgaguguucucaugcu

SEQ ID NO: 495657 - RNA, 19 nt, Artificial Sequence
  Description of Artificial Sequence: Synthetic oligonucleotide
cacccauggugaaccugcg

SEQ ID NO: 495658 - RNA, 19 nt, Artificial Sequence
  Description of Artificial Sequence: Synthetic oligonucleotide
cgcacucacacacacacac

SEQ ID NO: 495659 - RNA, 19 nt, Artificial Sequence
  Description of Artificial Sequence: Synthetic oligonucleotide
cacauucugaaucuucuau

SEQ ID NO: 495660 - RNA, 19 nt, Artificial Sequence
  Description of Artificial Sequence: Synthetic oligonucleotide
cuucccugugucagaagga

SEQ ID NO: 495661 - RNA, 19 nt, Artificial Sequence
  Description of Artificial Sequence: Synthetic oligonucleotide
aggcaguugccgacggugg

SEQ ID NO: 495662 - RNA, 19 nt, Artificial Sequence
  Description of Artificial Sequence: Synthetic oligonucleotide
guuuccucgucagcuugcc

SEQ ID NO: 495663 - RNA, 19 nt, Artificial Sequence
  Description of Artificial Sequence: Synthetic oligonucleotide
gaguguucucaugcuuggc

SEQ ID NO: 495664 - RNA, 19 nt, Artificial Sequence
  Description of Artificial Sequence: Synthetic oligonucleotide
gaccgugaucacuuuugaa

SEQ ID NO: 495665 - RNA, 19 nt, Artificial Sequence
  Description of Artificial Sequence: Synthetic oligonucleotide
cuacugugacaugccagug

SEQ ID NO: 495666 - RNA, 19 nt, Artificial Sequence
  Description of Artificial Sequence: Synthetic oligonucleotide
aaccugcgaccgugaucac

SEQ ID NO: 495667 - RNA, 19 nt, Artificial Sequence
  Description of Artificial Sequence: Synthetic oligonucleotide
aggaaccuaauguccuaua

SEQ ID NO: 495668 - RNA, 19 nt, Artificial Sequence
  Description of Artificial Sequence: Synthetic oligonucleotide
ugaccacugucagucugcu

SEQ ID NO: 495669 - RNA, 19 nt, Artificial Sequence
  Description of Artificial Sequence: Synthetic oligonucleotide
uuccgaucccuuggccagg

SEQ ID NO: 495670 - RNA, 19 nt, Artificial Sequence
  Description of Artificial Sequence: Synthetic oligonucleotide
ugcgaccgugaucacuuuu

SEQ ID NO: 495671 - RNA, 19 nt, Artificial Sequence
  Description of Artificial Sequence: Synthetic oligonucleotide
caguccuaucugguguuag

SEQ ID NO: 495672 - RNA, 19 nt, Artificial Sequence
  Description of Artificial Sequence: Synthetic oligonucleotide
ggcaguugccgacgguggg

SEQ ID NO: 495673 - RNA, 19 nt, Artificial Sequence
  Description of Artificial Sequence: Synthetic oligonucleotide
uucacaccuucaggaaggu

SEQ ID NO: 495674 - RNA, 19 nt, Artificial Sequence
  Description of Artificial Sequence: Synthetic oligonucleotide
cuucccuaaaggagacaga

SEQ ID NO: 495675 - RNA, 19 nt, Artificial Sequence
  Description of Artificial Sequence: Synthetic oligonucleotide
gaaggggcaaaaguccgcu

SEQ ID NO: 495676 - RNA, 19 nt, Artificial Sequence
  Description of Artificial Sequence: Synthetic oligonucleotide
guaagugcagcaauugauu

SEQ ID NO: 495677 - RNA, 19 nt, Artificial Sequence
  Description of Artificial Sequence: Synthetic oligonucleotide
gcuaccucaccaccuuagc

SEQ ID NO: 495678 - RNA, 19 nt, Artificial Sequence
  Description of Artificial Sequence: Synthetic oligonucleotide
guacacuuugggaugcuua

SEQ ID NO: 495679 - RNA, 19 nt, Artificial Sequence
  Description of Artificial Sequence: Synthetic oligonucleotide
ucguucacccauggugaac

SEQ ID NO: 495680 - RNA, 19 nt, Artificial Sequence
  Description of Artificial Sequence: Synthetic oligonucleotide
acucacacacacacacacu

SEQ ID NO: 495681 - RNA, 19 nt, Artificial Sequence
  Description of Artificial Sequence: Synthetic oligonucleotide
guucccuagcagcucagcu

SEQ ID NO: 495682 - RNA, 19 nt, Artificial Sequence
  Description of Artificial Sequence: Synthetic oligonucleotide
gcucggagacaacacggug

SEQ ID NO: 495683 - RNA, 19 nt, Artificial Sequence
  Description of Artificial Sequence: Synthetic oligonucleotide
agcugcauucggcucuuuu

SEQ ID NO: 495684 - RNA, 19 nt, Artificial Sequence
  Description of Artificial Sequence: Synthetic oligonucleotide
gcaagaggaauuagccuac

SEQ ID NO: 495685 - RNA, 19 nt, Artificial Sequence
  Description of Artificial Sequence: Synthetic oligonucleotide
cguucacccauggugaacc

SEQ ID NO: 495686 - RNA, 19 nt, Artificial Sequence
  Description of Artificial Sequence: Synthetic oligonucleotide
gucucugcggcaggagcag

SEQ ID NO: 495687 - RNA, 19 nt, Artificial Sequence
  Description of Artificial Sequence: Synthetic oligonucleotide
gaccgagcucccaaacuga

SEQ ID NO: 495688 - RNA, 19 nt, Artificial Sequence
  Description of Artificial Sequence: Synthetic oligonucleotide
gugacaagcugagaagacu

SEQ ID NO: 495689 - RNA, 19 nt, Artificial Sequence
  Description of Artificial Sequence: Synthetic oligonucleotide
caacacgggcacagaggug

SEQ ID NO: 495690 - RNA, 19 nt, Artificial Sequence
  Description of Artificial Sequence: Synthetic oligonucleotide
ggcuaccucaccaccuuag

SEQ ID NO: 495691 - RNA, 19 nt, Artificial Sequence
  Description of Artificial Sequence: Synthetic oligonucleotide
auggugaaccugcgaccgu

SEQ ID NO: 495692 - RNA, 19 nt, Artificial Sequence
  Description of Artificial Sequence: Synthetic oligonucleotide
cacucugcuccccaccgga

SEQ ID NO: 495693 - RNA, 19 nt, Artificial Sequence
  Description of Artificial Sequence: Synthetic oligonucleotide
gcgaccgugaucacuuuug

SEQ ID NO: 495694 - RNA, 19 nt, Artificial Sequence
  Description of Artificial Sequence: Synthetic oligonucleotide
agcucggagacaacacggu

SEQ ID NO: 495695 - RNA, 19 nt, Artificial Sequence
  Description of Artificial Sequence: Synthetic oligonucleotide
ggaaucagggaggaagaaa

SEQ ID NO: 495696 - RNA, 19 nt, Artificial Sequence
  Description of Artificial Sequence: Synthetic oligonucleotide
gugaucacuuuugaaguau

SEQ ID NO: 495697 - RNA, 19 nt, Artificial Sequence
  Description of Artificial Sequence: Synthetic oligonucleotide
aggagaccugcggaaauuu

SEQ ID NO: 495698 - RNA, 19 nt, Artificial Sequence
  Description of Artificial Sequence: Synthetic oligonucleotide
cagaagagucaagggacga

SEQ ID NO: 495699 - RNA, 19 nt, Artificial Sequence
  Description of Artificial Sequence: Synthetic oligonucleotide
acggugggaugagauagaa

SEQ ID NO: 495700 - RNA, 19 nt, Artificial Sequence
  Description of Artificial Sequence: Synthetic oligonucleotide
gaacugcuacaguccuauc

SEQ ID NO: 495701 - RNA, 19 nt, Artificial Sequence
  Description of Artificial Sequence: Synthetic oligonucleotide
gucugcaugaagggccgac

SEQ ID NO: 495702 - RNA, 19 nt, Artificial Sequence
  Description of Artificial Sequence: Synthetic oligonucleotide
ccaccuuagcagaaagcuc

SEQ ID NO: 495703 - RNA, 19 nt, Artificial Sequence
  Description of Artificial Sequence: Synthetic oligonucleotide
cgacggugggaugagauag

SEQ ID NO: 495704 - RNA, 19 nt, Artificial Sequence
  Description of Artificial Sequence: Synthetic oligonucleotide
aggaaacggggaacccauc

SEQ ID NO: 495705 - RNA, 19 nt, Artificial Sequence
  Description of Artificial Sequence: Synthetic oligonucleotide
auacgcugccgggcaagag

SEQ ID NO: 495706 - RNA, 19 nt, Artificial Sequence
  Description of Artificial Sequence: Synthetic oligonucleotide
gcuuagggcaucugccauc

SEQ ID NO: 495707 - RNA, 19 nt, Artificial Sequence
  Description of Artificial Sequence: Synthetic oligonucleotide
agggucuuggggugccaaa

SEQ ID NO: 495708 - RNA, 19 nt, Artificial Sequence
  Description of Artificial Sequence: Synthetic oligonucleotide
accuaauguccuauacaua

SEQ ID NO: 495709 - RNA, 19 nt, Artificial Sequence
  Description of Artificial Sequence: Synthetic oligonucleotide
ccgaccuuugugguuuugg

SEQ ID NO: 495710 - RNA, 19 nt, Artificial Sequence
  Description of Artificial Sequence: Synthetic oligonucleotide
guuagggaacugcacucau

SEQ ID NO: 495711 - RNA, 19 nt, Artificial Sequence
  Description of Artificial Sequence: Synthetic oligonucleotide
ggguccgaacagcuggcug

SEQ ID NO: 495712 - RNA, 19 nt, Artificial Sequence
  Description of Artificial Sequence: Synthetic oligonucleotide
gcaauugauuauuuagcuu

SEQ ID NO: 495713 - RNA, 19 nt, Artificial Sequence
  Description of Artificial Sequence: Synthetic oligonucleotide
accugcgaccgugaucacu

SEQ ID NO: 495714 - RNA, 19 nt, Artificial Sequence
  Description of Artificial Sequence: Synthetic oligonucleotide
caggaaacggggaacccau

SEQ ID NO: 495715 - RNA, 19 nt, Artificial Sequence
  Description of Artificial Sequence: Synthetic oligonucleotide
ugccgggcaagaggaauua

SEQ ID NO: 495716 - RNA, 19 nt, Artificial Sequence
  Description of Artificial Sequence: Synthetic oligonucleotide
cgaucccuuggccaggaag

SEQ ID NO: 495717 - RNA, 19 nt, Artificial Sequence
  Description of Artificial Sequence: Synthetic oligonucleotide
ugccaguguuggcuaccuc

SEQ ID NO: 495718 - RNA, 19 nt, Artificial Sequence
  Description of Artificial Sequence: Synthetic oligonucleotide
gaacugcacucauugucuu

SEQ ID NO: 495719 - RNA, 19 nt, Artificial Sequence
  Description of Artificial Sequence: Synthetic oligonucleotide
ccuuccgaucccuuggcca

SEQ ID NO: 495720 - RNA, 19 nt, Artificial Sequence
  Description of Artificial Sequence: Synthetic oligonucleotide
ccaacugauuuguaucaaa

SEQ ID NO: 495721 - RNA, 19 nt, Artificial Sequence
  Description of Artificial Sequence: Synthetic oligonucleotide
cugguguuaggucauucuu

SEQ ID NO: 495722 - RNA, 19 nt, Artificial Sequence
  Description of Artificial Sequence: Synthetic oligonucleotide
gugggguaccagcauuucu

SEQ ID NO: 495723 - RNA, 19 nt, Artificial Sequence
  Description of Artificial Sequence: Synthetic oligonucleotide
cugcaugaagggccgaccu

SEQ ID NO: 495724 - RNA, 19 nt, Artificial Sequence
  Description of Artificial Sequence: Synthetic oligonucleotide
gugcugacucguucaccca

SEQ ID NO: 495725 - RNA, 19 nt, Artificial Sequence
  Description of Artificial Sequence: Synthetic oligonucleotide
cucguucacccauggugaa

SEQ ID NO: 495726 - RNA, 19 nt, Artificial Sequence
  Description of Artificial Sequence: Synthetic oligonucleotide
ccgugaucacuuuugaagu

SEQ ID NO: 495727 - RNA, 19 nt, Artificial Sequence
  Description of Artificial Sequence: Synthetic oligonucleotide
caagaggaauuagccuaca

SEQ ID NO: 495728 - RNA, 19 nt, Artificial Sequence
  Description of Artificial Sequence: Synthetic oligonucleotide
gucgggaucuugucugggu

SEQ ID NO: 495729 - RNA, 19 nt, Artificial Sequence
  Description of Artificial Sequence: Synthetic oligonucleotide
agggccgaccuuugugguu

SEQ ID NO: 495730 - RNA, 19 nt, Artificial Sequence
  Description of Artificial Sequence: Synthetic oligonucleotide
accgagcucccaaacugaa

SEQ ID NO: 495731 - RNA, 19 nt, Artificial Sequence
  Description of Artificial Sequence: Synthetic oligonucleotide
ccgagcucccaaacugaag

SEQ ID NO: 495732 - RNA, 19 nt, Artificial Sequence
  Description of Artificial Sequence: Synthetic oligonucleotide
ggcacagaggugggguacc

SEQ ID NO: 495733 - RNA, 19 nt, Artificial Sequence
  Description of Artificial Sequence: Synthetic oligonucleotide
aggcaaaagggaggcugau

SEQ ID NO: 495734 - RNA, 19 nt, Artificial Sequence
  Description of Artificial Sequence: Synthetic oligonucleotide
gcugacucguucacccaug

SEQ ID NO: 495735 - RNA, 19 nt, Artificial Sequence
  Description of Artificial Sequence: Synthetic oligonucleotide
ggggagucgggaucuuguc

SEQ ID NO: 495736 - RNA, 19 nt, Artificial Sequence
  Description of Artificial Sequence: Synthetic oligonucleotide
ggguaccagcauuucucca

SEQ ID NO: 495737 - RNA, 19 nt, Artificial Sequence
  Description of Artificial Sequence: Synthetic oligonucleotide
gguucccuagcagcucagc

SEQ ID NO: 495738 - RNA, 19 nt, Artificial Sequence
  Description of Artificial Sequence: Synthetic oligonucleotide
cagaccgagcucccaaacu

SEQ ID NO: 495739 - RNA, 19 nt, Artificial Sequence
  Description of Artificial Sequence: Synthetic oligonucleotide
ggggaacccaucaggucac

SEQ ID NO: 495740 - RNA, 19 nt, Artificial Sequence
  Description of Artificial Sequence: Synthetic oligonucleotide
cuaugugggucugcaugaa

SEQ ID NO: 495741 - RNA, 19 nt, Artificial Sequence
  Description of Artificial Sequence: Synthetic oligonucleotide
cucgucagcuugccacaga

SEQ ID NO: 495742 - RNA, 19 nt, Artificial Sequence
  Description of Artificial Sequence: Synthetic oligonucleotide
gugccucgggucucccaac

SEQ ID NO: 495743 - RNA, 19 nt, Artificial Sequence
  Description of Artificial Sequence: Synthetic oligonucleotide
cauacgcugccgggcaaga

SEQ ID NO: 495744 - RNA, 19 nt, Artificial Sequence
  Description of Artificial Sequence: Synthetic oligonucleotide
gcucugagucagcucgaca

SEQ ID NO: 495745 - RNA, 19 nt, Artificial Sequence
  Description of Artificial Sequence: Synthetic oligonucleotide
acgcacucacacacacaca

SEQ ID NO: 495746 - RNA, 19 nt, Artificial Sequence
  Description of Artificial Sequence: Synthetic oligonucleotide
ccugcggaaauuugcccaa

SEQ ID NO: 495747 - RNA, 19 nt, Artificial Sequence
  Description of Artificial Sequence: Synthetic oligonucleotide
ccacuacugugacaugcca

SEQ ID NO: 495748 - RNA, 19 nt, Artificial Sequence
  Description of Artificial Sequence: Synthetic oligonucleotide
cccuuccgaucccuuggcc

SEQ ID NO: 495749 - RNA, 19 nt, Artificial Sequence
  Description of Artificial Sequence: Synthetic oligonucleotide
gcucgacaauaaaggagga

SEQ ID NO: 495750 - RNA, 19 nt, Artificial Sequence
  Description of Artificial Sequence: Synthetic oligonucleotide
ccauacgcugccgggcaag

SEQ ID NO: 495751 - RNA, 19 nt, Artificial Sequence
  Description of Artificial Sequence: Synthetic oligonucleotide
cgaccuuugugguuuugga

SEQ ID NO: 495752 - RNA, 19 nt, Artificial Sequence
  Description of Artificial Sequence: Synthetic oligonucleotide
cggugggaugagauagaag

SEQ ID NO: 495753 - RNA, 19 nt, Artificial Sequence
  Description of Artificial Sequence: Synthetic oligonucleotide
gcaguugccgacgguggga

SEQ ID NO: 495754 - RNA, 19 nt, Artificial Sequence
  Description of Artificial Sequence: Synthetic oligonucleotide
ggugaaccugcgaccguga

SEQ ID NO: 495755 - RNA, 19 nt, Artificial Sequence
  Description of Artificial Sequence: Synthetic oligonucleotide
guaggcaguugccgacggu

SEQ ID NO: 495756 - RNA, 19 nt, Artificial Sequence
  Description of Artificial Sequence: Synthetic oligonucleotide
uccccaccggaaggggcaa

SEQ ID NO: 495757 - RNA, 19 nt, Artificial Sequence
  Description of Artificial Sequence: Synthetic oligonucleotide
ggugcagggcuggcugagc

SEQ ID NO: 495758 - RNA, 19 nt, Artificial Sequence
  Description of Artificial Sequence: Synthetic oligonucleotide
gcacucacacacacacaca

SEQ ID NO: 495759 - RNA, 19 nt, Artificial Sequence
  Description of Artificial Sequence: Synthetic oligonucleotide
ccgugucacugccacucug

SEQ ID NO: 495760 - RNA, 19 nt, Artificial Sequence
  Description of Artificial Sequence: Synthetic oligonucleotide
ccugcgaccgugaucacuu

SEQ ID NO: 495761 - RNA, 19 nt, Artificial Sequence
  Description of Artificial Sequence: Synthetic oligonucleotide
gugaaccugcgaccgugau

SEQ ID NO: 495762 - RNA, 19 nt, Artificial Sequence
  Description of Artificial Sequence: Synthetic oligonucleotide
gccgggcaagaggaauuag

SEQ ID NO: 495763 - RNA, 19 nt, Artificial Sequence
  Description of Artificial Sequence: Synthetic oligonucleotide
gcaugaagggccgaccuuu

SEQ ID NO: 495764 - RNA, 19 nt, Artificial Sequence
  Description of Artificial Sequence: Synthetic oligonucleotide
ccaccggaaggggcaaaag

SEQ ID NO: 495765 - RNA, 19 nt, Artificial Sequence
  Description of Artificial Sequence: Synthetic oligonucleotide
cugccgggcaagaggaauu

SEQ ID NO: 495766 - RNA, 19 nt, Artificial Sequence
  Description of Artificial Sequence: Synthetic oligonucleotide
ccgacgguuuccuggaagu

SEQ ID NO: 495767 - RNA, 19 nt, Artificial Sequence
  Description of Artificial Sequence: Synthetic oligonucleotide
cuuccgauucuugcuuaau

SEQ ID NO: 495768 - RNA, 19 nt, Artificial Sequence
  Description of Artificial Sequence: Synthetic oligonucleotide
cacugcgcaggucacccuu

SEQ ID NO: 495769 - RNA, 19 nt, Artificial Sequence
  Description of Artificial Sequence: Synthetic oligonucleotide
cugcggaaauuugcccaaa

SEQ ID NO: 495770 - RNA, 19 nt, Artificial Sequence
  Description of Artificial Sequence: Synthetic oligonucleotide
ccgagucuagcugaguagu

SEQ ID NO: 495771 - RNA, 19 nt, Artificial Sequence
  Description of Artificial Sequence: Synthetic oligonucleotide
cgaaugugccaagggagaa

SEQ ID NO: 495772 - RNA, 19 nt, Artificial Sequence
  Description of Artificial Sequence: Synthetic oligonucleotide
ccgacggugggaugagaua

SEQ ID NO: 495773 - RNA, 19 nt, Artificial Sequence
  Description of Artificial Sequence: Synthetic oligonucleotide
gcugccgggcaagaggaau

SEQ ID NO: 495774 - RNA, 19 nt, Artificial Sequence
  Description of Artificial Sequence: Synthetic oligonucleotide
gagccgaguccgacgguuu

SEQ ID NO: 495775 - RNA, 19 nt, Artificial Sequence
  Description of Artificial Sequence: Synthetic oligonucleotide
gggccgaccuuugugguuu

SEQ ID NO: 495776 - RNA, 19 nt, Artificial Sequence
  Description of Artificial Sequence: Synthetic oligonucleotide
gccgaccuuugugguuuug

SEQ ID NO: 495777 - RNA, 19 nt, Artificial Sequence
  Description of Artificial Sequence: Synthetic oligonucleotide
cccaacucaggucuaccuu

SEQ ID NO: 495778 - RNA, 19 nt, Artificial Sequence
  Description of Artificial Sequence: Synthetic oligonucleotide
cgaguccgacgguuuccug

SEQ ID NO: 495779 - RNA, 19 nt, Artificial Sequence
  Description of Artificial Sequence: Synthetic oligonucleotide
cccaccggaaggggcaaaa

SEQ ID NO: 495780 - RNA, 19 nt, Artificial Sequence
  Description of Artificial Sequence: Synthetic oligonucleotide
cugcgaccgugaucacuuu

SEQ ID NO: 495781 - RNA, 19 nt, Artificial Sequence
  Description of Artificial Sequence: Synthetic oligonucleotide
ccgaguccgacgguuuccu

SEQ ID NO: 495782 - RNA, 19 nt, Artificial Sequence
  Description of Artificial Sequence: Synthetic oligonucleotide
cccuagcagcucagcuugu

SEQ ID NO: 495783 - RNA, 19 nt, Artificial Sequence
  Description of Artificial Sequence: Synthetic oligonucleotide
ccccaccggaaggggcaaa

SEQ ID NO: 495784 - RNA, 19 nt, Artificial Sequence
  Description of Artificial Sequence: Synthetic oligonucleotide
aaaucuauggugaauaucc

SEQ ID NO: 495785 - RNA, 19 nt, Artificial Sequence
  Description of Artificial Sequence: Synthetic oligonucleotide
  modified_base (4)..(4): a, c, u, g, unknown or other
agunuuauuuuccauaauc

SEQ ID NO: 495786 - RNA, 19 nt, Artificial Sequence
  Description of Artificial Sequence: Synthetic oligonucleotide
  modified_base (10)..(10): a, c, u, g, unknown or other
uuauaaagunuuauuuucc

SEQ ID NO: 495787 - RNA, 19 nt, Artificial Sequence
  Description of Artificial Sequence: Synthetic oligonucleotide
uuuacuuacuaccacauac

SEQ ID NO: 495788 - RNA, 19 nt, Artificial Sequence
  Description of Artificial Sequence: Synthetic oligonucleotide
cuguauguaaauaagagug

SEQ ID NO: 495789 - RNA, 19 nt, Artificial Sequence
  Description of Artificial Sequence: Synthetic oligonucleotide
guaauuuccauuuaagagc

SEQ ID NO: 495790 - RNA, 19 nt, Artificial Sequence
  Description of Artificial Sequence: Synthetic oligonucleotide
uaaauaagagugcuguagg

SEQ ID NO: 495791 - RNA, 19 nt, Artificial Sequence
  Description of Artificial Sequence: Synthetic oligonucleotide
agaaauuuaacucuaugca

SEQ ID NO: 495792 - RNA, 19 nt, Artificial Sequence
  Description of Artificial Sequence: Synthetic oligonucleotide
uuugacugcagacucaucc

SEQ ID NO: 495793 - RNA, 19 nt, Artificial Sequence
  Description of Artificial Sequence: Synthetic oligonucleotide
  modified_base (2)..(2): a, c, u, g, unknown or other
unuuauuuuccauaaucag

SEQ ID NO: 495794 - RNA, 19 nt, Artificial Sequence
  Description of Artificial Sequence: Synthetic oligonucleotide
  modified_base (6)..(6): a, c, u, g, unknown or other
aaagunuuauuuuccauaa

SEQ ID NO: 495795 - RNA, 19 nt, Artificial Sequence
  Description of Artificial Sequence: Synthetic oligonucleotide
ugagugaugaagaaacuug

SEQ ID NO: 495796 - RNA, 19 nt, Artificial Sequence
  Description of Artificial Sequence: Synthetic oligonucleotide
uuacuuacuaccacauacg

SEQ ID NO: 495797 - RNA, 19 nt, Artificial Sequence
  Description of Artificial Sequence: Synthetic oligonucleotide
aauuagcauuucuuucugc

SEQ ID NO: 495798 - RNA, 19 nt, Artificial Sequence
  Description of Artificial Sequence: Synthetic oligonucleotide
  modified_base (7)..(7): a, c, u, g, unknown or other
uaaagunuuauuuuccaua

SEQ ID NO: 495799 - RNA, 19 nt, Artificial Sequence
  Description of Artificial Sequence: Synthetic oligonucleotide
aauauccccacacauagaa

SEQ ID NO: 495800 - RNA, 19 nt, Artificial Sequence
  Description of Artificial Sequence: Synthetic oligonucleotide
ucagcauaacucauaauug

SEQ ID NO: 495801 - RNA, 19 nt, Artificial Sequence
  Description of Artificial Sequence: Synthetic oligonucleotide
gaggaggucagaaagaucc

SEQ ID NO: 495802 - RNA, 19 nt, Artificial Sequence
  Description of Artificial Sequence: Synthetic oligonucleotide
aguggcuuauuuuacuuac

SEQ ID NO: 495803 - RNA, 19 nt, Artificial Sequence
  Description of Artificial Sequence: Synthetic oligonucleotide
aaauuuacuugucagggua

SEQ ID NO: 495804 - RNA, 19 nt, Artificial Sequence
  Description of Artificial Sequence: Synthetic oligonucleotide
aucuauggugaauaucccc

SEQ ID NO: 495805 - RNA, 19 nt, Artificial Sequence
  Description of Artificial Sequence: Synthetic oligonucleotide
aaaaucuauggugaauauc

SEQ ID NO: 495806 - RNA, 19 nt, Artificial Sequence
  Description of Artificial Sequence: Synthetic oligonucleotide
aagaucccgauagucaagc

SEQ ID NO: 495807 - RNA, 19 nt, Artificial Sequence
  Description of Artificial Sequence: Synthetic oligonucleotide
ucacagucggcuuaggaag

SEQ ID NO: 495808 - RNA, 19 nt, Artificial Sequence
  Description of Artificial Sequence: Synthetic oligonucleotide
gcuuauuuuacuuacuacc

SEQ ID NO: 495809 - RNA, 19 nt, Artificial Sequence
  Description of Artificial Sequence: Synthetic oligonucleotide
auuggauugucuauuaauc

SEQ ID NO: 495810 - RNA, 19 nt, Artificial Sequence
  Description of Artificial Sequence: Synthetic oligonucleotide
auuucuaccuccugaaucu

SEQ ID NO: 495811 - RNA, 19 nt, Artificial Sequence
  Description of Artificial Sequence: Synthetic oligonucleotide
ucaacugaacucuggcucg

SEQ ID NO: 495812 - RNA, 19 nt, Artificial Sequence
  Description of Artificial Sequence: Synthetic oligonucleotide
gauagucaagcaaaggaag

SEQ ID NO: 495813 - RNA, 19 nt, Artificial Sequence
  Description of Artificial Sequence: Synthetic oligonucleotide
uucuucuacuuuuaggcgc

SEQ ID NO: 495814 - RNA, 19 nt, Artificial Sequence
  Description of Artificial Sequence: Synthetic oligonucleotide
guaaauaagagugcuguag

SEQ ID NO: 495815 - RNA, 19 nt, Artificial Sequence
  Description of Artificial Sequence: Synthetic oligonucleotide
guacauuugacugaaggag

SEQ ID NO: 495816 - RNA, 19 nt, Artificial Sequence
  Description of Artificial Sequence: Synthetic oligonucleotide
agguaauuugacugcagac

SEQ ID NO: 495817 - RNA, 19 nt, Artificial Sequence
  Description of Artificial Sequence: Synthetic oligonucleotide
agaaagcaccuuuuccucc

SEQ ID NO: 495818 - RNA, 19 nt, Artificial Sequence
  Description of Artificial Sequence: Synthetic oligonucleotide
caaagggauaaccaguuag

SEQ ID NO: 495819 - RNA, 19 nt, Artificial Sequence
  Description of Artificial Sequence: Synthetic oligonucleotide
ucaagcaaaggaaggauaa

SEQ ID NO: 495820 - RNA, 19 nt, Artificial Sequence
  Description of Artificial Sequence: Synthetic oligonucleotide
aagguaauuugacugcaga

SEQ ID NO: 495821 - RNA, 19 nt, Artificial Sequence
  Description of Artificial Sequence: Synthetic oligonucleotide
acuaccacauacguuaggg

SEQ ID NO: 495822 - RNA, 19 nt, Artificial Sequence
  Description of Artificial Sequence: Synthetic oligonucleotide
guauacaacagugaacugc

SEQ ID NO: 495823 - RNA, 19 nt, Artificial Sequence
  Description of Artificial Sequence: Synthetic oligonucleotide
ucagcuuuguauuacuuau

SEQ ID NO: 495824 - RNA, 19 nt, Artificial Sequence
  Description of Artificial Sequence: Synthetic oligonucleotide
aaucuauggugaauauccc

SEQ ID NO: 495825 - RNA, 19 nt, Artificial Sequence
  Description of Artificial Sequence: Synthetic oligonucleotide
agaacuaccaauaguagcu

SEQ ID NO: 495826 - RNA, 19 nt, Artificial Sequence
  Description of Artificial Sequence: Synthetic oligonucleotide
aauagcuaguugauaaucu

SEQ ID NO: 495827 - RNA, 19 nt, Artificial Sequence
  Description of Artificial Sequence: Synthetic oligonucleotide
uguuuaaagugaccuuucc

SEQ ID NO: 495828 - RNA, 19 nt, Artificial Sequence
  Description of Artificial Sequence: Synthetic oligonucleotide
auaaucagcuuuguauuac

SEQ ID NO: 495829 - RNA, 19 nt, Artificial Sequence
  Description of Artificial Sequence: Synthetic oligonucleotide
ucuugcucgccaauccucg

SEQ ID NO: 495830 - RNA, 19 nt, Artificial Sequence
  Description of Artificial Sequence: Synthetic oligonucleotide
aguggcaugagugaugaag

SEQ ID NO: 495831 - RNA, 19 nt, Artificial Sequence
  Description of Artificial Sequence: Synthetic oligonucleotide
uggugugcaauucccauug

SEQ ID NO: 495832 - RNA, 19 nt, Artificial Sequence
  Description of Artificial Sequence: Synthetic oligonucleotide
aaguuugggagauuggauu

SEQ ID NO: 495833 - RNA, 19 nt, Artificial Sequence
  Description of Artificial Sequence: Synthetic oligonucleotide
uaccaauaguagcugaucu

SEQ ID NO: 495834 - RNA, 19 nt, Artificial Sequence
  Description of Artificial Sequence: Synthetic oligonucleotide
guaauuugacugcagacuc

SEQ ID NO: 495835 - RNA, 19 nt, Artificial Sequence
  Description of Artificial Sequence: Synthetic oligonucleotide
uccaagguaauuugacugc

SEQ ID NO: 495836 - RNA, 19 nt, Artificial Sequence
  Description of Artificial Sequence: Synthetic oligonucleotide
agcgguaagacaaugaaga

SEQ ID NO: 495837 - RNA, 19 nt, Artificial Sequence
  Description of Artificial Sequence: Synthetic oligonucleotide
guagaaauuuaacucuaug

SEQ ID NO: 495838 - RNA, 19 nt, Artificial Sequence
  Description of Artificial Sequence: Synthetic oligonucleotide
guccaagguaauuugacug

SEQ ID NO: 495839 - RNA, 19 nt, Artificial Sequence
  Description of Artificial Sequence: Synthetic oligonucleotide
aaaggaguauccuccucug

SEQ ID NO: 495840 - RNA, 19 nt, Artificial Sequence
  Description of Artificial Sequence: Synthetic oligonucleotide
ugccaaaacuauguguugg

SEQ ID NO: 495841 - RNA, 19 nt, Artificial Sequence
  Description of Artificial Sequence: Synthetic oligonucleotide
ugucuuugguuaacuauug

SEQ ID NO: 495842 - RNA, 19 nt, Artificial Sequence
  Description of Artificial Sequence: Synthetic oligonucleotide
uucucaacacuugaggggc

SEQ ID NO: 495843 - RNA, 19 nt, Artificial Sequence
  Description of Artificial Sequence: Synthetic oligonucleotide
  modified_base (3)..(3): a, c, u, g, unknown or other
gunuuauuuuccauaauca

SEQ ID NO: 495844 - RNA, 19 nt, Artificial Sequence
  Description of Artificial Sequence: Synthetic oligonucleotide
ggaaggauaacagagcugc

SEQ ID NO: 495845 - RNA, 19 nt, Artificial Sequence
  Description of Artificial Sequence: Synthetic oligonucleotide
uuugccaguucuccaaucu

SEQ ID NO: 495846 - RNA, 19 nt, Artificial Sequence
  Description of Artificial Sequence: Synthetic oligonucleotide
aauaagagugcuguaggau

SEQ ID NO: 495847 - RNA, 19 nt, Artificial Sequence
  Description of Artificial Sequence: Synthetic oligonucleotide
aaagagaaccuguggaauu

SEQ ID NO: 495848 - RNA, 19 nt, Artificial Sequence
  Description of Artificial Sequence: Synthetic oligonucleotide
ucguuuuagguaauuucca

SEQ ID NO: 495849 - RNA, 19 nt, Artificial Sequence
  Description of Artificial Sequence: Synthetic oligonucleotide
accaauaguagcugaucuc

SEQ ID NO: 495850 - RNA, 19 nt, Artificial Sequence
  Description of Artificial Sequence: Synthetic oligonucleotide
cuuaggaagaaucucaucu

SEQ ID NO: 495851 - RNA, 19 nt, Artificial Sequence
  Description of Artificial Sequence: Synthetic oligonucleotide
aauucccauugcuugguga

SEQ ID NO: 495852 - RNA, 19 nt, Artificial Sequence
  Description of Artificial Sequence: Synthetic oligonucleotide
ugaagcacggguacauuug

SEQ ID NO: 495853 - RNA, 19 nt, Artificial Sequence
  Description of Artificial Sequence: Synthetic oligonucleotide
uacuuacuaccacauacgu

SEQ ID NO: 495854 - RNA, 19 nt, Artificial Sequence
  Description of Artificial Sequence: Synthetic oligonucleotide
agggauaaccaguuagaag

SEQ ID NO: 495855 - RNA, 19 nt, Artificial Sequence
  Description of Artificial Sequence: Synthetic oligonucleotide
caguucucaacacuugagg

SEQ ID NO: 495856 - RNA, 19 nt, Artificial Sequence
  Description of Artificial Sequence: Synthetic oligonucleotide
auagucaagcaaaggaagg

SEQ ID NO: 495857 - RNA, 19 nt, Artificial Sequence
  Description of Artificial Sequence: Synthetic oligonucleotide
gaaagcaccuuuuccuccc

SEQ ID NO: 495858 - RNA, 19 nt, Artificial Sequence
  Description of Artificial Sequence: Synthetic oligonucleotide
uuaggaagaaucucaucuc

SEQ ID NO: 495859 - RNA, 19 nt, Artificial Sequence
  Description of Artificial Sequence: Synthetic oligonucleotide
gaaagaucccgauagucaa

SEQ ID NO: 495860 - RNA, 19 nt, Artificial Sequence
  Description of Artificial Sequence: Synthetic oligonucleotide
  modified_base (8)..(8): a, c, u, g, unknown or other
auaaagunuuauuuuccau

SEQ ID NO: 495861 - RNA, 19 nt, Artificial Sequence
  Description of Artificial Sequence: Synthetic oligonucleotide
uuuuaggcgcuauuuggac

SEQ ID NO: 495862 - RNA, 19 nt, Artificial Sequence
  Description of Artificial Sequence: Synthetic oligonucleotide
ugaagcgguaagacaauga

SEQ ID NO: 495863 - RNA, 19 nt, Artificial Sequence
  Description of Artificial Sequence: Synthetic oligonucleotide
aaagggauaaccaguuaga

SEQ ID NO: 495864 - RNA, 19 nt, Artificial Sequence
  Description of Artificial Sequence: Synthetic oligonucleotide
ugcuuggugugccaucccg

SEQ ID NO: 495865 - RNA, 19 nt, Artificial Sequence
  Description of Artificial Sequence: Synthetic oligonucleotide
uuagggguuggauuucuca

SEQ ID NO: 495866 - RNA, 19 nt, Artificial Sequence
  Description of Artificial Sequence: Synthetic oligonucleotide
ucuuuaccaaagauggcau

SEQ ID NO: 495867 - RNA, 19 nt, Artificial Sequence
  Description of Artificial Sequence: Synthetic oligonucleotide
agaaucucaucucuaacuu

SEQ ID NO: 495868 - RNA, 19 nt, Artificial Sequence
  Description of Artificial Sequence: Synthetic oligonucleotide
ugauugcaauacaacagaa

SEQ ID NO: 495869 - RNA, 19 nt, Artificial Sequence
  Description of Artificial Sequence: Synthetic oligonucleotide
caaggaucugaacaccugc

SEQ ID NO: 495870 - RNA, 19 nt, Artificial Sequence
  Description of Artificial Sequence: Synthetic oligonucleotide
uuguagaaauuuaacucua

SEQ ID NO: 495871 - RNA, 19 nt, Artificial Sequence
  Description of Artificial Sequence: Synthetic oligonucleotide
aacuaccaauaguagcuga

SEQ ID NO: 495872 - RNA, 19 nt, Artificial Sequence
  Description of Artificial Sequence: Synthetic oligonucleotide
ucaaggaucugaacaccug

SEQ ID NO: 495873 - RNA, 19 nt, Artificial Sequence
  Description of Artificial Sequence: Synthetic oligonucleotide
uaaguggcaugagugauga

SEQ ID NO: 495874 - RNA, 19 nt, Artificial Sequence
  Description of Artificial Sequence: Synthetic oligonucleotide
uugacugcagacucauccc

SEQ ID NO: 495875 - RNA, 19 nt, Artificial Sequence
  Description of Artificial Sequence: Synthetic oligonucleotide
aauccccaggaauucaaau

SEQ ID NO: 495876 - RNA, 19 nt, Artificial Sequence
  Description of Artificial Sequence: Synthetic oligonucleotide
uacguuagggguuggauuu

SEQ ID NO: 495877 - RNA, 19 nt, Artificial Sequence
  Description of Artificial Sequence: Synthetic oligonucleotide
uuaagagccccuucccgcc

SEQ ID NO: 495878 - RNA, 19 nt, Artificial Sequence
  Description of Artificial Sequence: Synthetic oligonucleotide
uggcucguuacaaccgugg

SEQ ID NO: 495879 - RNA, 19 nt, Artificial Sequence
  Description of Artificial Sequence: Synthetic oligonucleotide
guugauaaucuuuauuugu

SEQ ID NO: 495880 - RNA, 19 nt, Artificial Sequence
  Description of Artificial Sequence: Synthetic oligonucleotide
gugcaauucccauugcuug

SEQ ID NO: 495881 - RNA, 19 nt, Artificial Sequence
  Description of Artificial Sequence: Synthetic oligonucleotide
acauuugacugaaggaggg

SEQ ID NO: 495882 - RNA, 19 nt, Artificial Sequence
  Description of Artificial Sequence: Synthetic oligonucleotide
gaagcgguaagacaaugaa

SEQ ID NO: 495883 - RNA, 19 nt, Artificial Sequence
  Description of Artificial Sequence: Synthetic oligonucleotide
acuguaauacaaaaguaaa

SEQ ID NO: 495884 - RNA, 19 nt, Artificial Sequence
  Description of Artificial Sequence: Synthetic oligonucleotide
uuuaggcgcuauuuggacu

SEQ ID NO: 495885 - RNA, 19 nt, Artificial Sequence
  Description of Artificial Sequence: Synthetic oligonucleotide
uuaauccccaggaauucaa

SEQ ID NO: 495886 - RNA, 19 nt, Artificial Sequence
  Description of Artificial Sequence: Synthetic oligonucleotide
aagggaguaaguggcauga

SEQ ID NO: 495887 - RNA, 19 nt, Artificial Sequence
  Description of Artificial Sequence: Synthetic oligonucleotide
uuucacagucggcuuagga

SEQ ID NO: 495888 - RNA, 19 nt, Artificial Sequence
  Description of Artificial Sequence: Synthetic oligonucleotide
agugaugaagaaacuugac

SEQ ID NO: 495889 - RNA, 19 nt, Artificial Sequence
  Description of Artificial Sequence: Synthetic oligonucleotide
uggcuuauuuuacuuacua

SEQ ID NO: 495890 - RNA, 19 nt, Artificial Sequence
  Description of Artificial Sequence: Synthetic oligonucleotide
aguccaagguaauuugacu

SEQ ID NO: 495891 - RNA, 19 nt, Artificial Sequence
  Description of Artificial Sequence: Synthetic oligonucleotide
acuauugucuuugguuaac

SEQ ID NO: 495892 - RNA, 19 nt, Artificial Sequence
  Description of Artificial Sequence: Synthetic oligonucleotide
agaaagaucccgauaguca

SEQ ID NO: 495893 - RNA, 19 nt, Artificial Sequence
  Description of Artificial Sequence: Synthetic oligonucleotide
aacuucgugugcuuggcuu

SEQ ID NO: 495894 - RNA, 19 nt, Artificial Sequence
  Description of Artificial Sequence: Synthetic oligonucleotide
acaaccguggucuguguug

SEQ ID NO: 495895 - RNA, 19 nt, Artificial Sequence
  Description of Artificial Sequence: Synthetic oligonucleotide
cuaccacauacguuagggg

SEQ ID NO: 495896 - RNA, 19 nt, Artificial Sequence
  Description of Artificial Sequence: Synthetic oligonucleotide
ucuaaaggaggagguggcg

SEQ ID NO: 495897 - RNA, 19 nt, Artificial Sequence
  Description of Artificial Sequence: Synthetic oligonucleotide
ugaacucuggcucguuaca

SEQ ID NO: 495898 - RNA, 19 nt, Artificial Sequence
  Description of Artificial Sequence: Synthetic oligonucleotide
uagaaucaacugaacucug

SEQ ID NO: 495899 - RNA, 19 nt, Artificial Sequence
  Description of Artificial Sequence: Synthetic oligonucleotide
caauucgagucucagucug

SEQ ID NO: 495900 - RNA, 19 nt, Artificial Sequence
  Description of Artificial Sequence: Synthetic oligonucleotide
acucuaugcaaauuacaaa

SEQ ID NO: 495901 - RNA, 19 nt, Artificial Sequence
  Description of Artificial Sequence: Synthetic oligonucleotide
cugcuuuaguggauggagg

SEQ ID NO: 495902 - RNA, 19 nt, Artificial Sequence
  Description of Artificial Sequence: Synthetic oligonucleotide
aauggugguugaagcacgg

SEQ ID NO: 495903 - RNA, 19 nt, Artificial Sequence
  Description of Artificial Sequence: Synthetic oligonucleotide
aagcgguaagacaaugaag

SEQ ID NO: 495904 - RNA, 19 nt, Artificial Sequence
  Description of Artificial Sequence: Synthetic oligonucleotide
agagcugccaaaacuaugu

SEQ ID NO: 495905 - RNA, 19 nt, Artificial Sequence
  Description of Artificial Sequence: Synthetic oligonucleotide
  modified_base (5)..(5): a, c, u, g, unknown or other
aagunuuauuuuccauaau

SEQ ID NO: 495906 - RNA, 19 nt, Artificial Sequence
  Description of Artificial Sequence: Synthetic oligonucleotide
uuuagguaauuuccauuua

SEQ ID NO: 495907 - RNA, 19 nt, Artificial Sequence
  Description of Artificial Sequence: Synthetic oligonucleotide
guaauggugguugaagcac

SEQ ID NO: 495908 - RNA, 19 nt, Artificial Sequence
  Description of Artificial Sequence: Synthetic oligonucleotide
aauugggacagaacauuca

SEQ ID NO: 495909 - RNA, 19 nt, Artificial Sequence
  Description of Artificial Sequence: Synthetic oligonucleotide
cuagaaagcaccuuuuccu

SEQ ID NO: 495910 - RNA, 19 nt, Artificial Sequence
  Description of Artificial Sequence: Synthetic oligonucleotide
gugaccugcaguuauagcu

SEQ ID NO: 495911 - RNA, 19 nt, Artificial Sequence
  Description of Artificial Sequence: Synthetic oligonucleotide
gaagggaguaaguggcaug

SEQ ID NO: 495912 - RNA, 19 nt, Artificial Sequence
  Description of Artificial Sequence: Synthetic oligonucleotide
uauuaauccccaggaauuc

SEQ ID NO: 495913 - RNA, 19 nt, Artificial Sequence
  Description of Artificial Sequence: Synthetic oligonucleotide
uuuaguggauggaggacua

SEQ ID NO: 495914 - RNA, 19 nt, Artificial Sequence
  Description of Artificial Sequence: Synthetic oligonucleotide
caauugggacagaacauuc

SEQ ID NO: 495915 - RNA, 19 nt, Artificial Sequence
  Description of Artificial Sequence: Synthetic oligonucleotide
agcacggguacauuugacu

SEQ ID NO: 495916 - RNA, 19 nt, Artificial Sequence
  Description of Artificial Sequence: Synthetic oligonucleotide
uggugaauauccccacaca

SEQ ID NO: 495917 - RNA, 19 nt, Artificial Sequence
  Description of Artificial Sequence: Synthetic oligonucleotide
ucagaaagaucccgauagu

SEQ ID NO: 495918 - RNA, 19 nt, Artificial Sequence
  Description of Artificial Sequence: Synthetic oligonucleotide
ggaguaaguggcaugagug

SEQ ID NO: 495919 - RNA, 19 nt, Artificial Sequence
  Description of Artificial Sequence: Synthetic oligonucleotide
ugggagauuggauugucua

SEQ ID NO: 495920 - RNA, 19 nt, Artificial Sequence
  Description of Artificial Sequence: Synthetic oligonucleotide
gauuggauugucuauuaau

SEQ ID NO: 495921 - RNA, 19 nt, Artificial Sequence
  Description of Artificial Sequence: Synthetic oligonucleotide
auagcuaguugauaaucuu

SEQ ID NO: 495922 - RNA, 19 nt, Artificial Sequence
  Description of Artificial Sequence: Synthetic oligonucleotide
auagcugacuggcuguaga

SEQ ID NO: 495923 - RNA, 19 nt, Artificial Sequence
  Description of Artificial Sequence: Synthetic oligonucleotide
gguacauuugacugaagga

SEQ ID NO: 495924 - RNA, 19 nt, Artificial Sequence
  Description of Artificial Sequence: Synthetic oligonucleotide
cauggcuaacugauacugc

SEQ ID NO: 495925 - RNA, 19 nt, Artificial Sequence
  Description of Artificial Sequence: Synthetic oligonucleotide
cuuuuaggcgcuauuugga

SEQ ID NO: 495926 - RNA, 19 nt, Artificial Sequence
  Description of Artificial Sequence: Synthetic oligonucleotide
gaggugguggugguggugg

SEQ ID NO: 495927 - RNA, 19 nt, Artificial Sequence
  Description of Artificial Sequence: Synthetic oligonucleotide
aagggauaaccaguuagaa

SEQ ID NO: 495928 - RNA, 19 nt, Artificial Sequence
  Description of Artificial Sequence: Synthetic oligonucleotide
aguauacaacagugaacug

SEQ ID NO: 495929 - RNA, 19 nt, Artificial Sequence
  Description of Artificial Sequence: Synthetic oligonucleotide
ugucuucucaggugguggc

SEQ ID NO: 495930 - RNA, 19 nt, Artificial Sequence
  Description of Artificial Sequence: Synthetic oligonucleotide
uagcuaguugauaaucuuu

SEQ ID NO: 495931 - RNA, 19 nt, Artificial Sequence
  Description of Artificial Sequence: Synthetic oligonucleotide
ucuacuuuuaggcgcuauu

SEQ ID NO: 495932 - RNA, 19 nt, Artificial Sequence
  Description of Artificial Sequence: Synthetic oligonucleotide
  modified_base (19)..(19): a, c, u, g, unknown or other
cuauugugauuauaaagun

SEQ ID NO: 495933 - RNA, 19 nt, Artificial Sequence
  Description of Artificial Sequence: Synthetic oligonucleotide
ucuggcucguuacaaccgu

SEQ ID NO: 495934 - RNA, 19 nt, Artificial Sequence
  Description of Artificial Sequence: Synthetic oligonucleotide
agucggcuuaggaagaauc

SEQ ID NO: 495935 - RNA, 19 nt, Artificial Sequence
  Description of Artificial Sequence: Synthetic oligonucleotide
ucccgauagucaagcaaag

SEQ ID NO: 495936 - RNA, 19 nt, Artificial Sequence
  Description of Artificial Sequence: Synthetic oligonucleotide
cugcaguuauagcugacug

SEQ ID NO: 495937 - RNA, 19 nt, Artificial Sequence
  Description of Artificial Sequence: Synthetic oligonucleotide
uuugaagcgguaagacaau

SEQ ID NO: 495938 - RNA, 19 nt, Artificial Sequence
  Description of Artificial Sequence: Synthetic oligonucleotide
gaggacuagaggcuguaga

SEQ ID NO: 495939 - RNA, 19 nt, Artificial Sequence
  Description of Artificial Sequence: Synthetic oligonucleotide
cugaacucuggcucguuac

SEQ ID NO: 495940 - RNA, 19 nt, Artificial Sequence
  Description of Artificial Sequence: Synthetic oligonucleotide
cucgaugcgcuucugagca

SEQ ID NO: 495941 - RNA, 19 nt, Artificial Sequence
  Description of Artificial Sequence: Synthetic oligonucleotide
aauuuacuugucaggguau

SEQ ID NO: 495942 - RNA, 19 nt, Artificial Sequence
  Description of Artificial Sequence: Synthetic oligonucleotide
gucacuccaauugggacag

SEQ ID NO: 495943 - RNA, 19 nt, Artificial Sequence
  Description of Artificial Sequence: Synthetic oligonucleotide
ucgagccugaacuggcugc

SEQ ID NO: 495944 - RNA, 19 nt, Artificial Sequence
  Description of Artificial Sequence: Synthetic oligonucleotide
ggauugucuauuaaucccc

SEQ ID NO: 495945 - RNA, 19 nt, Artificial Sequence
  Description of Artificial Sequence: Synthetic oligonucleotide
cuauggugaauauccccac

SEQ ID NO: 495946 - RNA, 19 nt, Artificial Sequence
  Description of Artificial Sequence: Synthetic oligonucleotide
ucgggaagggcuucaaaau

SEQ ID NO: 495947 - RNA, 19 nt, Artificial Sequence
  Description of Artificial Sequence: Synthetic oligonucleotide
ugagcaguugacucccggu

SEQ ID NO: 495948 - RNA, 19 nt, Artificial Sequence
  Description of Artificial Sequence: Synthetic oligonucleotide
agcagacucgaggaggagg

SEQ ID NO: 495949 - RNA, 19 nt, Artificial Sequence
  Description of Artificial Sequence: Synthetic oligonucleotide
auuuuacuuacuaccacau

SEQ ID NO: 495950 - RNA, 19 nt, Artificial Sequence
  Description of Artificial Sequence: Synthetic oligonucleotide
ugcuacuccugcuguaugu

SEQ ID NO: 495951 - RNA, 19 nt, Artificial Sequence
  Description of Artificial Sequence: Synthetic oligonucleotide
guagcugaucucuggacca

SEQ ID NO: 495952 - RNA, 19 nt, Artificial Sequence
  Description of Artificial Sequence: Synthetic oligonucleotide
auacguuagggguuggauu

SEQ ID NO: 495953 - RNA, 19 nt, Artificial Sequence
  Description of Artificial Sequence: Synthetic oligonucleotide
ccauuuaagagccccuucc

SEQ ID NO: 495954 - RNA, 19 nt, Artificial Sequence
  Description of Artificial Sequence: Synthetic oligonucleotide
caauaguagcugaucucug

SEQ ID NO: 495955 - RNA, 19 nt, Artificial Sequence
  Description of Artificial Sequence: Synthetic oligonucleotide
aggaguauccuccucuguu

SEQ ID NO: 495956 - RNA, 19 nt, Artificial Sequence
  Description of Artificial Sequence: Synthetic oligonucleotide
aguuuggaucaaugcaggu

SEQ ID NO: 495957 - RNA, 19 nt, Artificial Sequence
  Description of Artificial Sequence: Synthetic oligonucleotide
gccaaaacuauguguuggg

SEQ ID NO: 495958 - RNA, 19 nt, Artificial Sequence
  Description of Artificial Sequence: Synthetic oligonucleotide
gaagcacggguacauuuga

SEQ ID NO: 495959 - RNA, 19 nt, Artificial Sequence
  Description of Artificial Sequence: Synthetic oligonucleotide
cagaaagaucccgauaguc

SEQ ID NO: 495960 - RNA, 19 nt, Artificial Sequence
  Description of Artificial Sequence: Synthetic oligonucleotide
guucuacaacggcaggugc

SEQ ID NO: 495961 - RNA, 19 nt, Artificial Sequence
  Description of Artificial Sequence: Synthetic oligonucleotide
gcuaguccaagguaauuug

SEQ ID NO: 495962 - RNA, 19 nt, Artificial Sequence
  Description of Artificial Sequence: Synthetic oligonucleotide
cuaacuucgugugcuuggc

SEQ ID NO: 495963 - RNA, 19 nt, Artificial Sequence
  Description of Artificial Sequence: Synthetic oligonucleotide
aagcacggguacauuugac

SEQ ID NO: 495964 - RNA, 19 nt, Artificial Sequence
  Description of Artificial Sequence: Synthetic oligonucleotide
uugaagcgguaagacaaug

SEQ ID NO: 495965 - RNA, 19 nt, Artificial Sequence
  Description of Artificial Sequence: Synthetic oligonucleotide
auuaauccccaggaauuca

SEQ ID NO: 495966 - RNA, 19 nt, Artificial Sequence
  Description of Artificial Sequence: Synthetic oligonucleotide
aacauucagcauaacucau

SEQ ID NO: 495967 - RNA, 19 nt, Artificial Sequence
  Description of Artificial Sequence: Synthetic oligonucleotide
gagcaguugacucccgguc

SEQ ID NO: 495968 - RNA, 19 nt, Artificial Sequence
  Description of Artificial Sequence: Synthetic oligonucleotide
gugguugaagcacggguac

SEQ ID NO: 495969 - RNA, 19 nt, Artificial Sequence
  Description of Artificial Sequence: Synthetic oligonucleotide
uaauccccaggaauucaaa

SEQ ID NO: 495970 - RNA, 19 nt, Artificial Sequence
  Description of Artificial Sequence: Synthetic oligonucleotide
ggcuuauuuuacuuacuac

SEQ ID NO: 495971 - RNA, 19 nt, Artificial Sequence
  Description of Artificial Sequence: Synthetic oligonucleotide
cuaguccaagguaauuuga

SEQ ID NO: 495972 - RNA, 19 nt, Artificial Sequence
  Description of Artificial Sequence: Synthetic oligonucleotide
ugguucuacaacggcaggu

SEQ ID NO: 495973 - RNA, 19 nt, Artificial Sequence
  Description of Artificial Sequence: Synthetic oligonucleotide
augagugaugaagaaacuu

SEQ ID NO: 495974 - RNA, 19 nt, Artificial Sequence
  Description of Artificial Sequence: Synthetic oligonucleotide
cucguuacaaccguggucu

SEQ ID NO: 495975 - RNA, 19 nt, Artificial Sequence
  Description of Artificial Sequence: Synthetic oligonucleotide
agccuggugugcaauuccc

SEQ ID NO: 495976 - RNA, 19 nt, Artificial Sequence
  Description of Artificial Sequence: Synthetic oligonucleotide
aucccgacagccuggugug

SEQ ID NO: 495977 - RNA, 19 nt, Artificial Sequence
  Description of Artificial Sequence: Synthetic oligonucleotide
agauuggauugucuauuaa

SEQ ID NO: 495978 - RNA, 19 nt, Artificial Sequence
  Description of Artificial Sequence: Synthetic oligonucleotide
gauugucuauuaaucccca

SEQ ID NO: 495979 - RNA, 19 nt, Artificial Sequence
  Description of Artificial Sequence: Synthetic oligonucleotide
aauccucgggaagggcuuc

SEQ ID NO: 495980 - RNA, 19 nt, Artificial Sequence
  Description of Artificial Sequence: Synthetic oligonucleotide
gcacggguacauuugacug

SEQ ID NO: 495981 - RNA, 19 nt, Artificial Sequence
  Description of Artificial Sequence: Synthetic oligonucleotide
cuauuaauccccaggaauu

SEQ ID NO: 495982 - RNA, 19 nt, Artificial Sequence
  Description of Artificial Sequence: Synthetic oligonucleotide
guaaguggcaugagugaug

SEQ ID NO: 495983 - RNA, 19 nt, Artificial Sequence
  Description of Artificial Sequence: Synthetic oligonucleotide
cucgggaagggcuucaaaa

SEQ ID NO: 495984 - RNA, 19 nt, Artificial Sequence
  Description of Artificial Sequence: Synthetic oligonucleotide
cugccaaaacuauguguug

SEQ ID NO: 495985 - RNA, 19 nt, Artificial Sequence
  Description of Artificial Sequence: Synthetic oligonucleotide
agcuaguugauaaucuuua

SEQ ID NO: 495986 - RNA, 19 nt, Artificial Sequence
  Description of Artificial Sequence: Synthetic oligonucleotide
ggagaacuaccaauaguag

SEQ ID NO: 495987 - RNA, 19 nt, Artificial Sequence
  Description of Artificial Sequence: Synthetic oligonucleotide
uaacuucgugugcuuggcu

SEQ ID NO: 495988 - RNA, 19 nt, Artificial Sequence
  Description of Artificial Sequence: Synthetic oligonucleotide
gcaugugaaaaguuuggga

SEQ ID NO: 495989 - RNA, 19 nt, Artificial Sequence
  Description of Artificial Sequence: Synthetic oligonucleotide
ucggcuuaggaagaaucuc

SEQ ID NO: 495990 - RNA, 19 nt, Artificial Sequence
  Description of Artificial Sequence: Synthetic oligonucleotide
cuaccaauaguagcugauc

SEQ ID NO: 495991 - RNA, 19 nt, Artificial Sequence
  Description of Artificial Sequence: Synthetic oligonucleotide
guggugguucuacaacggc

SEQ ID NO: 495992 - RNA, 19 nt, Artificial Sequence
  Description of Artificial Sequence: Synthetic oligonucleotide
guuccucgagccugaacug

SEQ ID NO: 495993 - RNA, 19 nt, Artificial Sequence
  Description of Artificial Sequence: Synthetic oligonucleotide
cuugcucgccaauccucgg

SEQ ID NO: 495994 - RNA, 19 nt, Artificial Sequence
  Description of Artificial Sequence: Synthetic oligonucleotide
uggaccacugcaguacuaa

SEQ ID NO: 495995 - RNA, 19 nt, Artificial Sequence
  Description of Artificial Sequence: Synthetic oligonucleotide
uuaguggauggaggacuag

SEQ ID NO: 495996 - RNA, 19 nt, Artificial Sequence
  Description of Artificial Sequence: Synthetic oligonucleotide
gacucgaggaggaggucag

SEQ ID NO: 495997 - RNA, 19 nt, Artificial Sequence
  Description of Artificial Sequence: Synthetic oligonucleotide
cucgccaauccucgggaag

SEQ ID NO: 495998 - RNA, 19 nt, Artificial Sequence
  Description of Artificial Sequence: Synthetic oligonucleotide
gcauggcuaacugauacug

SEQ ID NO: 495999 - RNA, 19 nt, Artificial Sequence
  Description of Artificial Sequence: Synthetic oligonucleotide
cugaaauuucaaauccugu

SEQ ID NO: 496000 - RNA, 19 nt, Artificial Sequence
  Description of Artificial Sequence: Synthetic oligonucleotide
acacuguaauacaaaagua

SEQ ID NO: 496001 - RNA, 19 nt, Artificial Sequence
  Description of Artificial Sequence: Synthetic oligonucleotide
aggucagaaagaucccgau

SEQ ID NO: 496002 - RNA, 19 nt, Artificial Sequence
  Description of Artificial Sequence: Synthetic oligonucleotide
uugacucccgguccucuuc

SEQ ID NO: 496003 - RNA, 19 nt, Artificial Sequence
  Description of Artificial Sequence: Synthetic oligonucleotide
uuuacuugucaggguauuu

SEQ ID NO: 496004 - RNA, 19 nt, Artificial Sequence
  Description of Artificial Sequence: Synthetic oligonucleotide
gguauuugccaguucucca

SEQ ID NO: 496005 - RNA, 19 nt, Artificial Sequence
  Description of Artificial Sequence: Synthetic oligonucleotide
gguucuacaacggcaggug

SEQ ID NO: 496006 - RNA, 19 nt, Artificial Sequence
  Description of Artificial Sequence: Synthetic oligonucleotide
acuaccaauaguagcugau

SEQ ID NO: 496007 - RNA, 19 nt, Artificial Sequence
  Description of Artificial Sequence: Synthetic oligonucleotide
agucugcaauucgagucuc

SEQ ID NO: 496008 - RNA, 19 nt, Artificial Sequence
  Description of Artificial Sequence: Synthetic oligonucleotide
gguaauuugacugcagacu

SEQ ID NO: 496009 - RNA, 19 nt, Artificial Sequence
  Description of Artificial Sequence: Synthetic oligonucleotide
ggaagggcuucaaaauuag

SEQ ID NO: 496010 - RNA, 19 nt, Artificial Sequence
  Description of Artificial Sequence: Synthetic oligonucleotide
cuuccacuccucgaugcgc

SEQ ID NO: 496011 - RNA, 19 nt, Artificial Sequence
  Description of Artificial Sequence: Synthetic oligonucleotide
auacuagaauaaaauccaa

SEQ ID NO: 496012 - RNA, 19 nt, Artificial Sequence
  Description of Artificial Sequence: Synthetic oligonucleotide
gcuguauguaaauaagagu

SEQ ID NO: 496013 - RNA, 19 nt, Artificial Sequence
  Description of Artificial Sequence: Synthetic oligonucleotide
ggguauuugccaguucucc

SEQ ID NO: 496014 - RNA, 19 nt, Artificial Sequence
  Description of Artificial Sequence: Synthetic oligonucleotide
gguggugguucuacaacgg

SEQ ID NO: 496015 - RNA, 19 nt, Artificial Sequence
  Description of Artificial Sequence: Synthetic oligonucleotide
uggcuaacugauacugcuu

SEQ ID NO: 496016 - RNA, 19 nt, Artificial Sequence
  Description of Artificial Sequence: Synthetic oligonucleotide
aucuaacucccgcuggaua

SEQ ID NO: 496017 - RNA, 19 nt, Artificial Sequence
  Description of Artificial Sequence: Synthetic oligonucleotide
uacaaccguggucuguguu

SEQ ID NO: 496018 - RNA, 19 nt, Artificial Sequence
  Description of Artificial Sequence: Synthetic oligonucleotide
cauaguuccucgagccuga

SEQ ID NO: 496019 - RNA, 19 nt, Artificial Sequence
  Description of Artificial Sequence: Synthetic oligonucleotide
ccucccaagaagagcaaag

SEQ ID NO: 496020 - RNA, 19 nt, Artificial Sequence
  Description of Artificial Sequence: Synthetic oligonucleotide
cuuuaguggauggaggacu

SEQ ID NO: 496021 - RNA, 19 nt, Artificial Sequence
  Description of Artificial Sequence: Synthetic oligonucleotide
cuugaauuaucuuccucau

SEQ ID NO: 496022 - RNA, 19 nt, Artificial Sequence
  Description of Artificial Sequence: Synthetic oligonucleotide
aagcuagaaagcaccuuuu

SEQ ID NO: 496023 - RNA, 19 nt, Artificial Sequence
  Description of Artificial Sequence: Synthetic oligonucleotide
ccaaaacuauguguugggg

SEQ ID NO: 496024 - RNA, 19 nt, Artificial Sequence
  Description of Artificial Sequence: Synthetic oligonucleotide
cacggguacauuugacuga

SEQ ID NO: 496025 - RNA, 19 nt, Artificial Sequence
  Description of Artificial Sequence: Synthetic oligonucleotide
uuacaaccguggucugugu

SEQ ID NO: 496026 - RNA, 19 nt, Artificial Sequence
  Description of Artificial Sequence: Synthetic oligonucleotide
agaucccgauagucaagca

SEQ ID NO: 496027 - RNA, 19 nt, Artificial Sequence
  Description of Artificial Sequence: Synthetic oligonucleotide
acugcuucuuaaauaccaa

SEQ ID NO: 496028 - RNA, 19 nt, Artificial Sequence
  Description of Artificial Sequence: Synthetic oligonucleotide
cucgagccugaacuggcug

SEQ ID NO: 496029 - RNA, 19 nt, Artificial Sequence
  Description of Artificial Sequence: Synthetic oligonucleotide
cuaguugauaaucuuuauu

SEQ ID NO: 496030 - RNA, 19 nt, Artificial Sequence
  Description of Artificial Sequence: Synthetic oligonucleotide
cucaacauuagcacaugau

SEQ ID NO: 496031 - RNA, 19 nt, Artificial Sequence
  Description of Artificial Sequence: Synthetic oligonucleotide
acggguacauuugacugaa

SEQ ID NO: 496032 - RNA, 19 nt, Artificial Sequence
  Description of Artificial Sequence: Synthetic oligonucleotide
ggugaauauccccacacau

SEQ ID NO: 496033 - RNA, 19 nt, Artificial Sequence
  Description of Artificial Sequence: Synthetic oligonucleotide
ugguugaagcacggguaca

SEQ ID NO: 496034 - RNA, 19 nt, Artificial Sequence
  Description of Artificial Sequence: Synthetic oligonucleotide
uggaucaaugcaggucuuc

SEQ ID NO: 496035 - RNA, 19 nt, Artificial Sequence
  Description of Artificial Sequence: Synthetic oligonucleotide
gaccuuuccugauugcaau

SEQ ID NO: 496036 - RNA, 19 nt, Artificial Sequence
  Description of Artificial Sequence: Synthetic oligonucleotide
acuuacuaccacauacguu

SEQ ID NO: 496037 - RNA, 19 nt, Artificial Sequence
  Description of Artificial Sequence: Synthetic oligonucleotide
cuggcucguuacaaccgug

SEQ ID NO: 496038 - RNA, 19 nt, Artificial Sequence
  Description of Artificial Sequence: Synthetic oligonucleotide
gaauauccccacacauaga

SEQ ID NO: 496039 - RNA, 19 nt, Artificial Sequence
  Description of Artificial Sequence: Synthetic oligonucleotide
caucccgacagccuggugu

SEQ ID NO: 496040 - RNA, 19 nt, Artificial Sequence
  Description of Artificial Sequence: Synthetic oligonucleotide
ucgaugcgcuucugagcag

SEQ ID NO: 496041 - RNA, 19 nt, Artificial Sequence
  Description of Artificial Sequence: Synthetic oligonucleotide
acauucagcauaacucaua

SEQ ID NO: 496042 - RNA, 19 nt, Artificial Sequence
  Description of Artificial Sequence: Synthetic oligonucleotide
ggcggaggagacucugggg

SEQ ID NO: 496043 - RNA, 19 nt, Artificial Sequence
  Description of Artificial Sequence: Synthetic oligonucleotide
ucguuacaaccguggucug

SEQ ID NO: 496044 - RNA, 19 nt, Artificial Sequence
  Description of Artificial Sequence: Synthetic oligonucleotide
uuggaucaaugcaggucuu

SEQ ID NO: 496045 - RNA, 19 nt, Artificial Sequence
  Description of Artificial Sequence: Synthetic oligonucleotide
acguuagggguuggauuuc

SEQ ID NO: 496046 - RNA, 19 nt, Artificial Sequence
  Description of Artificial Sequence: Synthetic oligonucleotide
acuugaccagaaaaugauu

SEQ ID NO: 496047 - RNA, 19 nt, Artificial Sequence
  Description of Artificial Sequence: Synthetic oligonucleotide
gagaaccuguggaauucuc

SEQ ID NO: 496048 - RNA, 19 nt, Artificial Sequence
  Description of Artificial Sequence: Synthetic oligonucleotide
gcgguaagacaaugaagac

SEQ ID NO: 496049 - RNA, 19 nt, Artificial Sequence
  Description of Artificial Sequence: Synthetic oligonucleotide
caaaaucuauggugaauau

SEQ ID NO: 496050 - RNA, 19 nt, Artificial Sequence
  Description of Artificial Sequence: Synthetic oligonucleotide
cuggagaacuaccaauagu

SEQ ID NO: 496051 - RNA, 19 nt, Artificial Sequence
  Description of Artificial Sequence: Synthetic oligonucleotide
aacggcaggugcugccaua

SEQ ID NO: 496052 - RNA, 19 nt, Artificial Sequence
  Description of Artificial Sequence: Synthetic oligonucleotide
gugguggugguggugguuc

SEQ ID NO: 496053 - RNA, 19 nt, Artificial Sequence
  Description of Artificial Sequence: Synthetic oligonucleotide
guggucacuccaauuggga

SEQ ID NO: 496054 - RNA, 19 nt, Artificial Sequence
  Description of Artificial Sequence: Synthetic oligonucleotide
cuaacugauacugcuuggu

SEQ ID NO: 496055 - RNA, 19 nt, Artificial Sequence
  Description of Artificial Sequence: Synthetic oligonucleotide
ccauaguuccucgagccug

SEQ ID NO: 496056 - RNA, 19 nt, Artificial Sequence
  Description of Artificial Sequence: Synthetic oligonucleotide
caugagugaugaagaaacu

SEQ ID NO: 496057 - RNA, 19 nt, Artificial Sequence
  Description of Artificial Sequence: Synthetic oligonucleotide
gggguuggauuucucaaaa

SEQ ID NO: 496058 - RNA, 19 nt, Artificial Sequence
  Description of Artificial Sequence: Synthetic oligonucleotide
acauacguuagggguugga

SEQ ID NO: 496059 - RNA, 19 nt, Artificial Sequence
  Description of Artificial Sequence: Synthetic oligonucleotide
gcucguuacaaccgugguc

SEQ ID NO: 496060 - RNA, 19 nt, Artificial Sequence
  Description of Artificial Sequence: Synthetic oligonucleotide
agaggauucuguggaguuu

SEQ ID NO: 496061 - RNA, 19 nt, Artificial Sequence
  Description of Artificial Sequence: Synthetic oligonucleotide
cuacuccugcuguauguaa

SEQ ID NO: 496062 - RNA, 19 nt, Artificial Sequence
  Description of Artificial Sequence: Synthetic oligonucleotide
agggaguaaguggcaugag

SEQ ID NO: 496063 - RNA, 19 nt, Artificial Sequence
  Description of Artificial Sequence: Synthetic oligonucleotide
cgauagucaagcaaaggaa

SEQ ID NO: 496064 - RNA, 19 nt, Artificial Sequence
  Description of Artificial Sequence: Synthetic oligonucleotide
cuucgugugcuuggcuuuc

SEQ ID NO: 496065 - RNA, 19 nt, Artificial Sequence
  Description of Artificial Sequence: Synthetic oligonucleotide
caccaucuucguuuuaggu

SEQ ID NO: 496066 - RNA, 19 nt, Artificial Sequence
  Description of Artificial Sequence: Synthetic oligonucleotide
agcaacaaaguggcuuauu

SEQ ID NO: 496067 - RNA, 19 nt, Artificial Sequence
  Description of Artificial Sequence: Synthetic oligonucleotide
uucgugugcuuggcuuucu

SEQ ID NO: 496068 - RNA, 19 nt, Artificial Sequence
  Description of Artificial Sequence: Synthetic oligonucleotide
aaccguggucuguguugaa

SEQ ID NO: 496069 - RNA, 19 nt, Artificial Sequence
  Description of Artificial Sequence: Synthetic oligonucleotide
gggaguaaguggcaugagu

SEQ ID NO: 496070 - RNA, 19 nt, Artificial Sequence
  Description of Artificial Sequence: Synthetic oligonucleotide
ggauaacagagcugccaaa

SEQ ID NO: 496071 - RNA, 19 nt, Artificial Sequence
  Description of Artificial Sequence: Synthetic oligonucleotide
ccaauaguagcugaucucu

SEQ ID NO: 496072 - RNA, 19 nt, Artificial Sequence
  Description of Artificial Sequence: Synthetic oligonucleotide
cacauacguuagggguugg

SEQ ID NO: 496073 - RNA, 19 nt, Artificial Sequence
  Description of Artificial Sequence: Synthetic oligonucleotide
uucccgccagucugcaauu

SEQ ID NO: 496074 - RNA, 19 nt, Artificial Sequence
  Description of Artificial Sequence: Synthetic oligonucleotide
guuagggguuggauuucuc

SEQ ID NO: 496075 - RNA, 19 nt, Artificial Sequence
  Description of Artificial Sequence: Synthetic oligonucleotide
acagucggcuuaggaagaa

SEQ ID NO: 496076 - RNA, 19 nt, Artificial Sequence
  Description of Artificial Sequence: Synthetic oligonucleotide
ccacauacguuagggguug

SEQ ID NO: 496077 - RNA, 19 nt, Artificial Sequence
  Description of Artificial Sequence: Synthetic oligonucleotide
guuugggagauuggauugu

SEQ ID NO: 496078 - RNA, 19 nt, Artificial Sequence
  Description of Artificial Sequence: Synthetic oligonucleotide
cauacguuagggguuggau

SEQ ID NO: 496079 - RNA, 19 nt, Artificial Sequence
  Description of Artificial Sequence: Synthetic oligonucleotide
agguggugguggugguggu

SEQ ID NO: 496080 - RNA, 19 nt, Artificial Sequence
  Description of Artificial Sequence: Synthetic oligonucleotide
ggaucaaugcaggucuucu

SEQ ID NO: 496081 - RNA, 19 nt, Artificial Sequence
  Description of Artificial Sequence: Synthetic oligonucleotide
ccgcuggauacucugccac

SEQ ID NO: 496082 - RNA, 19 nt, Artificial Sequence
  Description of Artificial Sequence: Synthetic oligonucleotide
gggagauuggauugucuau

SEQ ID NO: 496083 - RNA, 19 nt, Artificial Sequence
  Description of Artificial Sequence: Synthetic oligonucleotide
gcaauucgagucucagucu

SEQ ID NO: 496084 - RNA, 19 nt, Artificial Sequence
  Description of Artificial Sequence: Synthetic oligonucleotide
ggagauuggauugucuauu

SEQ ID NO: 496085 - RNA, 19 nt, Artificial Sequence
  Description of Artificial Sequence: Synthetic oligonucleotide
ccaagguaauuugacugca

SEQ ID NO: 496086 - RNA, 19 nt, Artificial Sequence
  Description of Artificial Sequence: Synthetic oligonucleotide
cugcugcuaguccaaggua

SEQ ID NO: 496087 - RNA, 19 nt, Artificial Sequence
  Description of Artificial Sequence: Synthetic oligonucleotide
caguuauagcugacuggcu

SEQ ID NO: 496088 - RNA, 19 nt, Artificial Sequence
  Description of Artificial Sequence: Synthetic oligonucleotide
uccucgggaagggcuucaa

SEQ ID NO: 496089 - RNA, 19 nt, Artificial Sequence
  Description of Artificial Sequence: Synthetic oligonucleotide
gcagacucgaggaggaggu

SEQ ID NO: 496090 - RNA, 19 nt, Artificial Sequence
  Description of Artificial Sequence: Synthetic oligonucleotide
caauccucgggaagggcuu

SEQ ID NO: 496091 - RNA, 19 nt, Artificial Sequence
  Description of Artificial Sequence: Synthetic oligonucleotide
ccaauccucgggaagggcu

SEQ ID NO: 496092 - RNA, 19 nt, Artificial Sequence
  Description of Artificial Sequence: Synthetic oligonucleotide
auccucgggaagggcuuca

SEQ ID NO: 496093 - RNA, 19 nt, Artificial Sequence
  Description of Artificial Sequence: Synthetic oligonucleotide
ucccgccagucugcaauuc

SEQ ID NO: 496094 - RNA, 19 nt, Artificial Sequence
  Description of Artificial Sequence: Synthetic oligonucleotide
cuggugugcaauucccauu

SEQ ID NO: 496095 - RNA, 19 nt, Artificial Sequence
  Description of Artificial Sequence: Synthetic oligonucleotide
gguugaagcacggguacau

SEQ ID NO: 496096 - RNA, 19 nt, Artificial Sequence
  Description of Artificial Sequence: Synthetic oligonucleotide
auaguuccucgagccugaa

SEQ ID NO: 496097 - RNA, 19 nt, Artificial Sequence
  Description of Artificial Sequence: Synthetic oligonucleotide
gcuuggugugccaucccga

SEQ ID NO: 496098 - RNA, 19 nt, Artificial Sequence
  Description of Artificial Sequence: Synthetic oligonucleotide
cagacucgaggaggagguc

SEQ ID NO: 496099 - RNA, 19 nt, Artificial Sequence
  Description of Artificial Sequence: Synthetic oligonucleotide
cuaacucccgcuggauacu

SEQ ID NO: 496100 - RNA, 19 nt, Artificial Sequence
  Description of Artificial Sequence: Synthetic oligonucleotide
caguugacucccgguccuc

SEQ ID NO: 496101 - RNA, 19 nt, Artificial Sequence
  Description of Artificial Sequence: Synthetic oligonucleotide
gucaggguauuugccaguu

SEQ ID NO: 496102 - RNA, 19 nt, Artificial Sequence
  Description of Artificial Sequence: Synthetic oligonucleotide
ggcucguuacaaccguggu

SEQ ID NO: 496103 - RNA, 19 nt, Artificial Sequence
  Description of Artificial Sequence: Synthetic oligonucleotide
uaggcgcuauuuggacuuu

SEQ ID NO: 496104 - RNA, 19 nt, Artificial Sequence
  Description of Artificial Sequence: Synthetic oligonucleotide
gguuaacuauugugauuau

SEQ ID NO: 496105 - RNA, 19 nt, Artificial Sequence
  Description of Artificial Sequence: Synthetic oligonucleotide
aggcgcuauuuggacuuuu

SEQ ID NO: 496106 - RNA, 19 nt, Artificial Sequence
  Description of Artificial Sequence: Synthetic oligonucleotide
gagccugaacuggcugcaa

SEQ ID NO: 496107 - RNA, 19 nt, Artificial Sequence
  Description of Artificial Sequence: Synthetic oligonucleotide
guugaagcacggguacauu

SEQ ID NO: 496108 - RNA, 19 nt, Artificial Sequence
  Description of Artificial Sequence: Synthetic oligonucleotide
ccaauugggacagaacauu

SEQ ID NO: 496109 - RNA, 19 nt, Artificial Sequence
  Description of Artificial Sequence: Synthetic oligonucleotide
caucuaacucccgcuggau

SEQ ID NO: 496110 - RNA, 19 nt, Artificial Sequence
  Description of Artificial Sequence: Synthetic oligonucleotide
caacugaacucuggcucgu

SEQ ID NO: 496111 - RNA, 19 nt, Artificial Sequence
  Description of Artificial Sequence: Synthetic oligonucleotide
ggaccacugcaguacuaau

SEQ ID NO: 496112 - RNA, 19 nt, Artificial Sequence
  Description of Artificial Sequence: Synthetic oligonucleotide
ccugcaguuauagcugacu

SEQ ID NO: 496113 - RNA, 19 nt, Artificial Sequence
  Description of Artificial Sequence: Synthetic oligonucleotide
gcucgccaauccucgggaa

SEQ ID NO: 496114 - RNA, 19 nt, Artificial Sequence
  Description of Artificial Sequence: Synthetic oligonucleotide
cuucuacuuuuaggcgcua

SEQ ID NO: 496115 - RNA, 19 nt, Artificial Sequence
  Description of Artificial Sequence: Synthetic oligonucleotide
gcugcuaguccaagguaau

SEQ ID NO: 496116 - RNA, 19 nt, Artificial Sequence
  Description of Artificial Sequence: Synthetic oligonucleotide
cggguacauuugacugaag

SEQ ID NO: 496117 - RNA, 19 nt, Artificial Sequence
  Description of Artificial Sequence: Synthetic oligonucleotide
cagucggcuuaggaagaau

SEQ ID NO: 496118 - RNA, 19 nt, Artificial Sequence
  Description of Artificial Sequence: Synthetic oligonucleotide
ccucgggaagggcuucaaa

SEQ ID NO: 496119 - RNA, 19 nt, Artificial Sequence
  Description of Artificial Sequence: Synthetic oligonucleotide
ccaucccgacagccuggug

SEQ ID NO: 496120 - RNA, 19 nt, Artificial Sequence
  Description of Artificial Sequence: Synthetic oligonucleotide
ccucgagccugaacuggcu

SEQ ID NO: 496121 - RNA, 19 nt, Artificial Sequence
  Description of Artificial Sequence: Synthetic oligonucleotide
ggugguggugguggugguu

SEQ ID NO: 496122 - RNA, 19 nt, Artificial Sequence
  Description of Artificial Sequence: Synthetic oligonucleotide
gccaucccgacagccuggu

SEQ ID NO: 496123 - RNA, 19 nt, Artificial Sequence
  Description of Artificial Sequence: Synthetic oligonucleotide
ccucaccaucuucguuuua

SEQ ID NO: 496124 - RNA, 19 nt, Artificial Sequence
  Description of Artificial Sequence: Synthetic oligonucleotide
aguggcuacauuuauuucc

SEQ ID NO: 496125 - RNA, 19 nt, Artificial Sequence
  Description of Artificial Sequence: Synthetic oligonucleotide
aaaugcacgccccacagac

SEQ ID NO: 496126 - RNA, 19 nt, Artificial Sequence
  Description of Artificial Sequence: Synthetic oligonucleotide
uauuauaggccucauacca

SEQ ID NO: 496127 - RNA, 19 nt, Artificial Sequence
  Description of Artificial Sequence: Synthetic oligonucleotide
auaccaauagucuucugcc

SEQ ID NO: 496128 - RNA, 19 nt, Artificial Sequence
  Description of Artificial Sequence: Synthetic oligonucleotide
uuuaauaguaguagccagg

SEQ ID NO: 496129 - RNA, 19 nt, Artificial Sequence
  Description of Artificial Sequence: Synthetic oligonucleotide
uaucuugacaccucuaacg

SEQ ID NO: 496130 - RNA, 19 nt, Artificial Sequence
  Description of Artificial Sequence: Synthetic oligonucleotide
uguucuuuggaugauaucc

SEQ ID NO: 496131 - RNA, 19 nt, Artificial Sequence
  Description of Artificial Sequence: Synthetic oligonucleotide
ucuaacgcugaucucaagg

SEQ ID NO: 496132 - RNA, 19 nt, Artificial Sequence
  Description of Artificial Sequence: Synthetic oligonucleotide
caaaccugaauauagcccg

SEQ ID NO: 496133 - RNA, 19 nt, Artificial Sequence
  Description of Artificial Sequence: Synthetic oligonucleotide
uaggauucggucucgaugg

SEQ ID NO: 496134 - RNA, 19 nt, Artificial Sequence
  Description of Artificial Sequence: Synthetic oligonucleotide
uugacugucauguauugcc

SEQ ID NO: 496135 - RNA, 19 nt, Artificial Sequence
  Description of Artificial Sequence: Synthetic oligonucleotide
aucuugacaccucuaacgc

SEQ ID NO: 496136 - RNA, 19 nt, Artificial Sequence
  Description of Artificial Sequence: Synthetic oligonucleotide
aguuguggaguacacagcg

SEQ ID NO: 496137 - RNA, 19 nt, Artificial Sequence
  Description of Artificial Sequence: Synthetic oligonucleotide
aaagacauggcaggcaaac

SEQ ID NO: 496138 - RNA, 19 nt, Artificial Sequence
  Description of Artificial Sequence: Synthetic oligonucleotide
gaaacaagacccaggaugg

SEQ ID NO: 496139 - RNA, 19 nt, Artificial Sequence
  Description of Artificial Sequence: Synthetic oligonucleotide
gacacaggagaauagcccg

SEQ ID NO: 496140 - RNA, 19 nt, Artificial Sequence
  Description of Artificial Sequence: Synthetic oligonucleotide
ugaaucuaaccccauauau

SEQ ID NO: 496141 - RNA, 19 nt, Artificial Sequence
  Description of Artificial Sequence: Synthetic oligonucleotide
cuuuaauaguaguagccag

SEQ ID NO: 496142 - RNA, 19 nt, Artificial Sequence
  Description of Artificial Sequence: Synthetic oligonucleotide
uguauugccauuuccuuac

SEQ ID NO: 496143 - RNA, 19 nt, Artificial Sequence
  Description of Artificial Sequence: Synthetic oligonucleotide
cuuccuagcgcacacaagc

SEQ ID NO: 496144 - RNA, 19 nt, Artificial Sequence
  Description of Artificial Sequence: Synthetic oligonucleotide
agagcuaacugacauccgg

SEQ ID NO: 496145 - RNA, 19 nt, Artificial Sequence
  Description of Artificial Sequence: Synthetic oligonucleotide
aauauagcccgaugggucu

SEQ ID NO: 496146 - RNA, 19 nt, Artificial Sequence
  Description of Artificial Sequence: Synthetic oligonucleotide
uucaugucgaggcacaaac

SEQ ID NO: 496147 - RNA, 19 nt, Artificial Sequence
  Description of Artificial Sequence: Synthetic oligonucleotide
acaaaccugaauauagccc

SEQ ID NO: 496148 - RNA, 19 nt, Artificial Sequence
  Description of Artificial Sequence: Synthetic oligonucleotide
ucggcuuugacaccuaucu

SEQ ID NO: 496149 - RNA, 19 nt, Artificial Sequence
  Description of Artificial Sequence: Synthetic oligonucleotide
cuagucgaagcccucaucc

SEQ ID NO: 496150 - RNA, 19 nt, Artificial Sequence
  Description of Artificial Sequence: Synthetic oligonucleotide
aaccccauauauuacaaua

SEQ ID NO: 496151 - RNA, 19 nt, Artificial Sequence
  Description of Artificial Sequence: Synthetic oligonucleotide
cacaaaccugaauauagcc

SEQ ID NO: 496152 - RNA, 19 nt, Artificial Sequence
  Description of Artificial Sequence: Synthetic oligonucleotide
agagcggccacucaugaag

SEQ ID NO: 496153 - RNA, 19 nt, Artificial Sequence
  Description of Artificial Sequence: Synthetic oligonucleotide
uccggugcgcauauuauag

SEQ ID NO: 496154 - RNA, 19 nt, Artificial Sequence
  Description of Artificial Sequence: Synthetic oligonucleotide
cugaauauagcccgauggg

SEQ ID NO: 496155 - RNA, 19 nt, Artificial Sequence
  Description of Artificial Sequence: Synthetic oligonucleotide
gacucauagggugaggagg

SEQ ID NO: 496156 - RNA, 19 nt, Artificial Sequence
  Description of Artificial Sequence: Synthetic oligonucleotide
aauggcacuuuaauaguag

SEQ ID NO: 496157 - RNA, 19 nt, Artificial Sequence
  Description of Artificial Sequence: Synthetic oligonucleotide
uuccuuacuggaaaguccu

SEQ ID NO: 496158 - RNA, 19 nt, Artificial Sequence
  Description of Artificial Sequence: Synthetic oligonucleotide
guggcaaucuuuugcauag

SEQ ID NO: 496159 - RNA, 19 nt, Artificial Sequence
  Description of Artificial Sequence: Synthetic oligonucleotide
ggugacaagacagugacag

SEQ ID NO: 496160 - RNA, 19 nt, Artificial Sequence
  Description of Artificial Sequence: Synthetic oligonucleotide
accaauggcugacucauag

SEQ ID NO: 496161 - RNA, 19 nt, Artificial Sequence
  Description of Artificial Sequence: Synthetic oligonucleotide
uuaauaguaguagccaggu

SEQ ID NO: 496162 - RNA, 19 nt, Artificial Sequence
  Description of Artificial Sequence: Synthetic oligonucleotide
agguagauaucuucuguag

SEQ ID NO: 496163 - RNA, 19 nt, Artificial Sequence
  Description of Artificial Sequence: Synthetic oligonucleotide
ggaugauauccacagaaag

SEQ ID NO: 496164 - RNA, 19 nt, Artificial Sequence
  Description of Artificial Sequence: Synthetic oligonucleotide
ugacauccggcucucagug

SEQ ID NO: 496165 - RNA, 19 nt, Artificial Sequence
  Description of Artificial Sequence: Synthetic oligonucleotide
acaguacuagucgaagccc

SEQ ID NO: 496166 - RNA, 19 nt, Artificial Sequence
  Description of Artificial Sequence: Synthetic oligonucleotide
uacuugaccgagucguagg

SEQ ID NO: 496167 - RNA, 19 nt, Artificial Sequence
  Description of Artificial Sequence: Synthetic oligonucleotide
uguaggacagguguacucc

SEQ ID NO: 496168 - RNA, 19 nt, Artificial Sequence
  Description of Artificial Sequence: Synthetic oligonucleotide
uguggaguacacagcgggg

SEQ ID NO: 496169 - RNA, 19 nt, Artificial Sequence
  Description of Artificial Sequence: Synthetic oligonucleotide
acuuuaauaguaguagcca

SEQ ID NO: 496170 - RNA, 19 nt, Artificial Sequence
  Description of Artificial Sequence: Synthetic oligonucleotide
guaggauucggucucgaug

SEQ ID NO: 496171 - RNA, 19 nt, Artificial Sequence
  Description of Artificial Sequence: Synthetic oligonucleotide
acucauagggugaggaggc

SEQ ID NO: 496172 - RNA, 19 nt, Artificial Sequence
  Description of Artificial Sequence: Synthetic oligonucleotide
ucuaggugaggugggaagg

SEQ ID NO: 496173 - RNA, 19 nt, Artificial Sequence
  Description of Artificial Sequence: Synthetic oligonucleotide
uaaagugcaccgugagccg

SEQ ID NO: 496174 - RNA, 19 nt, Artificial Sequence
  Description of Artificial Sequence: Synthetic oligonucleotide
agauguguucauguggagg

SEQ ID NO: 496175 - RNA, 19 nt, Artificial Sequence
  Description of Artificial Sequence: Synthetic oligonucleotide
accaauagucuucugccug

SEQ ID NO: 496176 - RNA, 19 nt, Artificial Sequence
  Description of Artificial Sequence: Synthetic oligonucleotide
ugaauauagcccgaugggu

SEQ ID NO: 496177 - RNA, 19 nt, Artificial Sequence
  Description of Artificial Sequence: Synthetic oligonucleotide
agauaucuucuguaggaca

SEQ ID NO: 496178 - RNA, 19 nt, Artificial Sequence
  Description of Artificial Sequence: Synthetic oligonucleotide
uagucuccgaagcauggcc

SEQ ID NO: 496179 - RNA, 19 nt, Artificial Sequence
  Description of Artificial Sequence: Synthetic oligonucleotide
ugguggagucuucagacac

SEQ ID NO: 496180 - RNA, 19 nt, Artificial Sequence
  Description of Artificial Sequence: Synthetic oligonucleotide
caaaccgguggucagcagg

SEQ ID NO: 496181 - RNA, 19 nt, Artificial Sequence
  Description of Artificial Sequence: Synthetic oligonucleotide
uguccgagcucagugaugc

SEQ ID NO: 496182 - RNA, 19 nt, Artificial Sequence
  Description of Artificial Sequence: Synthetic oligonucleotide
gauucggucucgaugggag

SEQ ID NO: 496183 - RNA, 19 nt, Artificial Sequence
  Description of Artificial Sequence: Synthetic oligonucleotide
ggcuuugacaccuaucuug

SEQ ID NO: 496184 - RNA, 19 nt, Artificial Sequence
  Description of Artificial Sequence: Synthetic oligonucleotide
aaaccgguggucagcaggg

SEQ ID NO: 496185 - RNA, 19 nt, Artificial Sequence
  Description of Artificial Sequence: Synthetic oligonucleotide
ugguaguaggauucggucu

SEQ ID NO: 496186 - RNA, 19 nt, Artificial Sequence
  Description of Artificial Sequence: Synthetic oligonucleotide
gaauauagcccgauggguc

SEQ ID NO: 496187 - RNA, 19 nt, Artificial Sequence
  Description of Artificial Sequence: Synthetic oligonucleotide
aggggaacccuuuguaguc

SEQ ID NO: 496188 - RNA, 19 nt, Artificial Sequence
  Description of Artificial Sequence: Synthetic oligonucleotide
guuaaagugcaccgugagc

SEQ ID NO: 496189 - RNA, 19 nt, Artificial Sequence
  Description of Artificial Sequence: Synthetic oligonucleotide
ggugguuggacucagccug

SEQ ID NO: 496190 - RNA, 19 nt, Artificial Sequence
  Description of Artificial Sequence: Synthetic oligonucleotide
uauugccauuuccuuacug

SEQ ID NO: 496191 - RNA, 19 nt, Artificial Sequence
  Description of Artificial Sequence: Synthetic oligonucleotide
ucgcuucuggggaugacag

SEQ ID NO: 496192 - RNA, 19 nt, Artificial Sequence
  Description of Artificial Sequence: Synthetic oligonucleotide
accaccaacguguacuuga

SEQ ID NO: 496193 - RNA, 19 nt, Artificial Sequence
  Description of Artificial Sequence: Synthetic oligonucleotide
gcuacauuuauuucccuug

SEQ ID NO: 496194 - RNA, 19 nt, Artificial Sequence
  Description of Artificial Sequence: Synthetic oligonucleotide
aauagcccgaaggacucag

SEQ ID NO: 496195 - RNA, 19 nt, Artificial Sequence
  Description of Artificial Sequence: Synthetic oligonucleotide
uguccuaguacuggccugg

SEQ ID NO: 496196 - RNA, 19 nt, Artificial Sequence
  Description of Artificial Sequence: Synthetic oligonucleotide
agagcuagaaaagccagga

SEQ ID NO: 496197 - RNA, 19 nt, Artificial Sequence
  Description of Artificial Sequence: Synthetic oligonucleotide
uaggggaacccuuuguagu

SEQ ID NO: 496198 - RNA, 19 nt, Artificial Sequence
  Description of Artificial Sequence: Synthetic oligonucleotide
cuggacggaacccaggaac

SEQ ID NO: 496199 - RNA, 19 nt, Artificial Sequence
  Description of Artificial Sequence: Synthetic oligonucleotide
uaaggaaccuggacggaac

SEQ ID NO: 496200 - RNA, 19 nt, Artificial Sequence
  Description of Artificial Sequence: Synthetic oligonucleotide
ucaugucgaggcacaaacc

SEQ ID NO: 496201 - RNA, 19 nt, Artificial Sequence
  Description of Artificial Sequence: Synthetic oligonucleotide
agucguaggacagagcgcu

SEQ ID NO: 496202 - RNA, 19 nt, Artificial Sequence
  Description of Artificial Sequence: Synthetic oligonucleotide
agaauagcccgaaggacuc

SEQ ID NO: 496203 - RNA, 19 nt, Artificial Sequence
  Description of Artificial Sequence: Synthetic oligonucleotide
aaucuuuugcauagcggca

SEQ ID NO: 496204 - RNA, 19 nt, Artificial Sequence
  Description of Artificial Sequence: Synthetic oligonucleotide
cuaacgcugaucucaagga

SEQ ID NO: 496205 - RNA, 19 nt, Artificial Sequence
  Description of Artificial Sequence: Synthetic oligonucleotide
uuccuagcgcacacaagcc

SEQ ID NO: 496206 - RNA, 19 nt, Artificial Sequence
  Description of Artificial Sequence: Synthetic oligonucleotide
cuaucuugacaccucuaac

SEQ ID NO: 496207 - RNA, 19 nt, Artificial Sequence
  Description of Artificial Sequence: Synthetic oligonucleotide
uggacggaacccaggaacu

SEQ ID NO: 496208 - RNA, 19 nt, Artificial Sequence
  Description of Artificial Sequence: Synthetic oligonucleotide
acuagucgaagcccucauc

SEQ ID NO: 496209 - RNA, 19 nt, Artificial Sequence
  Description of Artificial Sequence: Synthetic oligonucleotide
cucuaggugaggugggaag

SEQ ID NO: 496210 - RNA, 19 nt, Artificial Sequence
  Description of Artificial Sequence: Synthetic oligonucleotide
augggcuuugucaaggcag

SEQ ID NO: 496211 - RNA, 19 nt, Artificial Sequence
  Description of Artificial Sequence: Synthetic oligonucleotide
aaagacaccucgggcuccg

SEQ ID NO: 496212 - RNA, 19 nt, Artificial Sequence
  Description of Artificial Sequence: Synthetic oligonucleotide
ucuugacaccucuaacgcu

SEQ ID NO: 496213 - RNA, 19 nt, Artificial Sequence
  Description of Artificial Sequence: Synthetic oligonucleotide
uugugauaaggaaccugga

SEQ ID NO: 496214 - RNA, 19 nt, Artificial Sequence
  Description of Artificial Sequence: Synthetic oligonucleotide
aaacaagacccaggauggg

SEQ ID NO: 496215 - RNA, 19 nt, Artificial Sequence
  Description of Artificial Sequence: Synthetic oligonucleotide
agcccgaugggucugcuca

SEQ ID NO: 496216 - RNA, 19 nt, Artificial Sequence
  Description of Artificial Sequence: Synthetic oligonucleotide
augacaguacuagucgaag

SEQ ID NO: 496217 - RNA, 19 nt, Artificial Sequence
  Description of Artificial Sequence: Synthetic oligonucleotide
ucguaggacagagcgcugg

SEQ ID NO: 496218 - RNA, 19 nt, Artificial Sequence
  Description of Artificial Sequence: Synthetic oligonucleotide
agcugagaggccuccuuuc

SEQ ID NO: 496219 - RNA, 19 nt, Artificial Sequence
  Description of Artificial Sequence: Synthetic oligonucleotide
ucgcuuucgucacuguagu

SEQ ID NO: 496220 - RNA, 19 nt, Artificial Sequence
  Description of Artificial Sequence: Synthetic oligonucleotide
guaguagccaggugacaag

SEQ ID NO: 496221 - RNA, 19 nt, Artificial Sequence
  Description of Artificial Sequence: Synthetic oligonucleotide
uccuagcgcacacaagccu

SEQ ID NO: 496222 - RNA, 19 nt, Artificial Sequence
  Description of Artificial Sequence: Synthetic oligonucleotide
ccuaguacuggccuggggc

SEQ ID NO: 496223 - RNA, 19 nt, Artificial Sequence
  Description of Artificial Sequence: Synthetic oligonucleotide
aggaucccuggcaugaaac

SEQ ID NO: 496224 - RNA, 19 nt, Artificial Sequence
  Description of Artificial Sequence: Synthetic oligonucleotide
ggaggugccaucugaguag

SEQ ID NO: 496225 - RNA, 19 nt, Artificial Sequence
  Description of Artificial Sequence: Synthetic oligonucleotide
uaccaauagucuucugccu

SEQ ID NO: 496226 - RNA, 19 nt, Artificial Sequence
  Description of Artificial Sequence: Synthetic oligonucleotide
uggcucagcucgcuucugg

SEQ ID NO: 496227 - RNA, 19 nt, Artificial Sequence
  Description of Artificial Sequence: Synthetic oligonucleotide
agggauguggccgcccugc

SEQ ID NO: 496228 - RNA, 19 nt, Artificial Sequence
  Description of Artificial Sequence: Synthetic oligonucleotide
cucgaugggaggugggccc

SEQ ID NO: 496229 - RNA, 19 nt, Artificial Sequence
  Description of Artificial Sequence: Synthetic oligonucleotide
uccuuccuagcgcacacaa

SEQ ID NO: 496230 - RNA, 19 nt, Artificial Sequence
  Description of Artificial Sequence: Synthetic oligonucleotide
agcuugacccuucaccagu

SEQ ID NO: 496231 - RNA, 19 nt, Artificial Sequence
  Description of Artificial Sequence: Synthetic oligonucleotide
uccuaguacuggccugggg

SEQ ID NO: 496232 - RNA, 19 nt, Artificial Sequence
  Description of Artificial Sequence: Synthetic oligonucleotide
acagggauggcugggacca

SEQ ID NO: 496233 - RNA, 19 nt, Artificial Sequence
  Description of Artificial Sequence: Synthetic oligonucleotide
aggacagagcgcugguguc

SEQ ID NO: 496234 - RNA, 19 nt, Artificial Sequence
  Description of Artificial Sequence: Synthetic oligonucleotide
auucggucucgaugggagg

SEQ ID NO: 496235 - RNA, 19 nt, Artificial Sequence
  Description of Artificial Sequence: Synthetic oligonucleotide
uucucuuguggcagugcca

SEQ ID NO: 496236 - RNA, 19 nt, Artificial Sequence
  Description of Artificial Sequence: Synthetic oligonucleotide
acaagacagugacagggau

SEQ ID NO: 496237 - RNA, 19 nt, Artificial Sequence
  Description of Artificial Sequence: Synthetic oligonucleotide
gagcuaacugacauccggc

SEQ ID NO: 496238 - RNA, 19 nt, Artificial Sequence
  Description of Artificial Sequence: Synthetic oligonucleotide
acuugaccgagucguagga

SEQ ID NO: 496239 - RNA, 19 nt, Artificial Sequence
  Description of Artificial Sequence: Synthetic oligonucleotide
uagucagaggccugacccc

SEQ ID NO: 496240 - RNA, 19 nt, Artificial Sequence
  Description of Artificial Sequence: Synthetic oligonucleotide
uccgaagcauggccgcagg

SEQ ID NO: 496241 - RNA, 19 nt, Artificial Sequence
  Description of Artificial Sequence: Synthetic oligonucleotide
ggcauaguaggcaggaaag

SEQ ID NO: 496242 - RNA, 19 nt, Artificial Sequence
  Description of Artificial Sequence: Synthetic oligonucleotide
agcccucuccuuccuagcg

SEQ ID NO: 496243 - RNA, 19 nt, Artificial Sequence
  Description of Artificial Sequence: Synthetic oligonucleotide
augaaucuaaccccauaua

SEQ ID NO: 496244 - RNA, 19 nt, Artificial Sequence
  Description of Artificial Sequence: Synthetic oligonucleotide
aagugcaccgugagccggc

SEQ ID NO: 496245 - RNA, 19 nt, Artificial Sequence
  Description of Artificial Sequence: Synthetic oligonucleotide
cugccugguaguaggauuc

SEQ ID NO: 496246 - RNA, 19 nt, Artificial Sequence
  Description of Artificial Sequence: Synthetic oligonucleotide
gacaccucgggcuccggug

SEQ ID NO: 496247 - RNA, 19 nt, Artificial Sequence
  Description of Artificial Sequence: Synthetic oligonucleotide
gugacaagacagugacagg

SEQ ID NO: 496248 - RNA, 19 nt, Artificial Sequence
  Description of Artificial Sequence: Synthetic oligonucleotide
cuugacugucauguauugc

SEQ ID NO: 496249 - RNA, 19 nt, Artificial Sequence
  Description of Artificial Sequence: Synthetic oligonucleotide
cauagcggcacagaggaca

SEQ ID NO: 496250 - RNA, 19 nt, Artificial Sequence
  Description of Artificial Sequence: Synthetic oligonucleotide
ggcagagucgcuuucguca

SEQ ID NO: 496251 - RNA, 19 nt, Artificial Sequence
  Description of Artificial Sequence: Synthetic oligonucleotide
ucuccuuccuagcgcacac

SEQ ID NO: 496252 - RNA, 19 nt, Artificial Sequence
  Description of Artificial Sequence: Synthetic oligonucleotide
aucaucggcuuugacaccu

SEQ ID NO: 496253 - RNA, 19 nt, Artificial Sequence
  Description of Artificial Sequence: Synthetic oligonucleotide
gagaauagcccgaaggacu

SEQ ID NO: 496254 - RNA, 19 nt, Artificial Sequence
  Description of Artificial Sequence: Synthetic oligonucleotide
agucuccgaagcauggccg

SEQ ID NO: 496255 - RNA, 19 nt, Artificial Sequence
  Description of Artificial Sequence: Synthetic oligonucleotide
ugcugaaaugcacgcccca

SEQ ID NO: 496256 - RNA, 19 nt, Artificial Sequence
  Description of Artificial Sequence: Synthetic oligonucleotide
gacauccggcucucagugg

SEQ ID NO: 496257 - RNA, 19 nt, Artificial Sequence
  Description of Artificial Sequence: Synthetic oligonucleotide
gugccucgguccuuggugg

SEQ ID NO: 496258 - RNA, 19 nt, Artificial Sequence
  Description of Artificial Sequence: Synthetic oligonucleotide
cuaucaguagaggugccuc

SEQ ID NO: 496259 - RNA, 19 nt, Artificial Sequence
  Description of Artificial Sequence: Synthetic oligonucleotide
cucaagcugggcaugcuca

SEQ ID NO: 496260 - RNA, 19 nt, Artificial Sequence
  Description of Artificial Sequence: Synthetic oligonucleotide
caacguguacuugaccgag

SEQ ID NO: 496261 - RNA, 19 nt, Artificial Sequence
  Description of Artificial Sequence: Synthetic oligonucleotide
uggaguacacagcgggguc

SEQ ID NO: 496262 - RNA, 19 nt, Artificial Sequence
  Description of Artificial Sequence: Synthetic oligonucleotide
agaugaaucuaaccccaua

SEQ ID NO: 496263 - RNA, 19 nt, Artificial Sequence
  Description of Artificial Sequence: Synthetic oligonucleotide
cuguaggacagguguacuc

SEQ ID NO: 496264 - RNA, 19 nt, Artificial Sequence
  Description of Artificial Sequence: Synthetic oligonucleotide
cuuuguagucagaggccug

SEQ ID NO: 496265 - RNA, 19 nt, Artificial Sequence
  Description of Artificial Sequence: Synthetic oligonucleotide
uagucgaagcccucauccu

SEQ ID NO: 496266 - RNA, 19 nt, Artificial Sequence
  Description of Artificial Sequence: Synthetic oligonucleotide
ugguguccgagcucaguga

SEQ ID NO: 496267 - RNA, 19 nt, Artificial Sequence
  Description of Artificial Sequence: Synthetic oligonucleotide
gaugacaguacuagucgaa

SEQ ID NO: 496268 - RNA, 19 nt, Artificial Sequence
  Description of Artificial Sequence: Synthetic oligonucleotide
uucggucucgaugggaggu

SEQ ID NO: 496269 - RNA, 19 nt, Artificial Sequence
  Description of Artificial Sequence: Synthetic oligonucleotide
accgagucguaggacagag

SEQ ID NO: 496270 - RNA, 19 nt, Artificial Sequence
  Description of Artificial Sequence: Synthetic oligonucleotide
cugccaugugcucaggcuc

SEQ ID NO: 496271 - RNA, 19 nt, Artificial Sequence
  Description of Artificial Sequence: Synthetic oligonucleotide
auaaggaaccuggacggaa

SEQ ID NO: 496272 - RNA, 19 nt, Artificial Sequence
  Description of Artificial Sequence: Synthetic oligonucleotide
ucuguuccuaggggaaccc

SEQ ID NO: 496273 - RNA, 19 nt, Artificial Sequence
  Description of Artificial Sequence: Synthetic oligonucleotide
ugcgcauauuauaggccuc

SEQ ID NO: 496274 - RNA, 19 nt, Artificial Sequence
  Description of Artificial Sequence: Synthetic oligonucleotide
aguacuagucgaagcccuc

SEQ ID NO: 496275 - RNA, 19 nt, Artificial Sequence
  Description of Artificial Sequence: Synthetic oligonucleotide
uacuagucgaagcccucau

SEQ ID NO: 496276 - RNA, 19 nt, Artificial Sequence
  Description of Artificial Sequence: Synthetic oligonucleotide
uggggaugacaguacuagu

SEQ ID NO: 496277 - RNA, 19 nt, Artificial Sequence
  Description of Artificial Sequence: Synthetic oligonucleotide
gcaugaaacaagacccagg

SEQ ID NO: 496278 - RNA, 19 nt, Artificial Sequence
  Description of Artificial Sequence: Synthetic oligonucleotide
cacucaggcagauguguuc

SEQ ID NO: 496279 - RNA, 19 nt, Artificial Sequence
  Description of Artificial Sequence: Synthetic oligonucleotide
cagagcuaacugacauccg

SEQ ID NO: 496280 - RNA, 19 nt, Artificial Sequence
  Description of Artificial Sequence: Synthetic oligonucleotide
aaaccugaauauagcccga

SEQ ID NO: 496281 - RNA, 19 nt, Artificial Sequence
  Description of Artificial Sequence: Synthetic oligonucleotide
ccucauaccaauagucuuc

SEQ ID NO: 496282 - RNA, 19 nt, Artificial Sequence
  Description of Artificial Sequence: Synthetic oligonucleotide
ggaggguggguuaaagugc

SEQ ID NO: 496283 - RNA, 19 nt, Artificial Sequence
  Description of Artificial Sequence: Synthetic oligonucleotide
gaagacguucaggaacuuc

SEQ ID NO: 496284 - RNA, 19 nt, Artificial Sequence
  Description of Artificial Sequence: Synthetic oligonucleotide
ggugccucgguccuuggug

SEQ ID NO: 496285 - RNA, 19 nt, Artificial Sequence
  Description of Artificial Sequence: Synthetic oligonucleotide
acaccuaucuugacaccuc

SEQ ID NO: 496286 - RNA, 19 nt, Artificial Sequence
  Description of Artificial Sequence: Synthetic oligonucleotide
guaguaggauucggucucg

SEQ ID NO: 496287 - RNA, 19 nt, Artificial Sequence
  Description of Artificial Sequence: Synthetic oligonucleotide
cagauguguucauguggag

SEQ ID NO: 496288 - RNA, 19 nt, Artificial Sequence
  Description of Artificial Sequence: Synthetic oligonucleotide
agcgcugcggcgacaaggg

SEQ ID NO: 496289 - RNA, 19 nt, Artificial Sequence
  Description of Artificial Sequence: Synthetic oligonucleotide
gucuccgaagcauggccgc

SEQ ID NO: 496290 - RNA, 19 nt, Artificial Sequence
  Description of Artificial Sequence: Synthetic oligonucleotide
aguaggauucggucucgau

SEQ ID NO: 496291 - RNA, 19 nt, Artificial Sequence
  Description of Artificial Sequence: Synthetic oligonucleotide
gaaccuggacggaacccag

SEQ ID NO: 496292 - RNA, 19 nt, Artificial Sequence
  Description of Artificial Sequence: Synthetic oligonucleotide
gaaaugcacgccccacaga

SEQ ID NO: 496293 - RNA, 19 nt, Artificial Sequence
  Description of Artificial Sequence: Synthetic oligonucleotide
gugcgcauauuauaggccu

SEQ ID NO: 496294 - RNA, 19 nt, Artificial Sequence
  Description of Artificial Sequence: Synthetic oligonucleotide
cacagcggggucuggauca

SEQ ID NO: 496295 - RNA, 19 nt, Artificial Sequence
  Description of Artificial Sequence: Synthetic oligonucleotide
ucauaccaauagucuucug

SEQ ID NO: 496296 - RNA, 19 nt, Artificial Sequence
  Description of Artificial Sequence: Synthetic oligonucleotide
accccauauauuacaauaa

SEQ ID NO: 496297 - RNA, 19 nt, Artificial Sequence
  Description of Artificial Sequence: Synthetic oligonucleotide
ggagaauagcccgaaggac

SEQ ID NO: 496298 - RNA, 19 nt, Artificial Sequence
  Description of Artificial Sequence: Synthetic oligonucleotide
ggucagguagaucuccuca

SEQ ID NO: 496299 - RNA, 19 nt, Artificial Sequence
  Description of Artificial Sequence: Synthetic oligonucleotide
gaaucuaaccccauauauu

SEQ ID NO: 496300 - RNA, 19 nt, Artificial Sequence
  Description of Artificial Sequence: Synthetic oligonucleotide
guaggacagguguacucca

SEQ ID NO: 496301 - RNA, 19 nt, Artificial Sequence
  Description of Artificial Sequence: Synthetic oligonucleotide
gggcuaucaguagaggugc

SEQ ID NO: 496302 - RNA, 19 nt, Artificial Sequence
  Description of Artificial Sequence: Synthetic oligonucleotide
gacaccucuaacgcugauc

SEQ ID NO: 496303 - RNA, 19 nt, Artificial Sequence
  Description of Artificial Sequence: Synthetic oligonucleotide
cuguccuaguacuggccug

SEQ ID NO: 496304 - RNA, 19 nt, Artificial Sequence
  Description of Artificial Sequence: Synthetic oligonucleotide
cauguggaggugucugcuc

SEQ ID NO: 496305 - RNA, 19 nt, Artificial Sequence
  Description of Artificial Sequence: Synthetic oligonucleotide
cugacucauagggugagga

SEQ ID NO: 496306 - RNA, 19 nt, Artificial Sequence
  Description of Artificial Sequence: Synthetic oligonucleotide
ggcaugaaacaagacccag

SEQ ID NO: 496307 - RNA, 19 nt, Artificial Sequence
  Description of Artificial Sequence: Synthetic oligonucleotide
augucgaggcacaaaccug

SEQ ID NO: 496308 - RNA, 19 nt, Artificial Sequence
  Description of Artificial Sequence: Synthetic oligonucleotide
ggugcgcauauuauaggcc

SEQ ID NO: 496309 - RNA, 19 nt, Artificial Sequence
  Description of Artificial Sequence: Synthetic oligonucleotide
cagguagauaucuucugua

SEQ ID NO: 496310 - RNA, 19 nt, Artificial Sequence
  Description of Artificial Sequence: Synthetic oligonucleotide
cagcuugacccuucaccag

SEQ ID NO: 496311 - RNA, 19 nt, Artificial Sequence
  Description of Artificial Sequence: Synthetic oligonucleotide
ccuuacuggaaaguccucc

SEQ ID NO: 496312 - RNA, 19 nt, Artificial Sequence
  Description of Artificial Sequence: Synthetic oligonucleotide
cugaaaugcacgccccaca

SEQ ID NO: 496313 - RNA, 19 nt, Artificial Sequence
  Description of Artificial Sequence: Synthetic oligonucleotide
aucggcuuugacaccuauc

SEQ ID NO: 496314 - RNA, 19 nt, Artificial Sequence
  Description of Artificial Sequence: Synthetic oligonucleotide
gauaaggaaccuggacgga

SEQ ID NO: 496315 - RNA, 19 nt, Artificial Sequence
  Description of Artificial Sequence: Synthetic oligonucleotide
gacggaacccaggaacuuc

SEQ ID NO: 496316 - RNA, 19 nt, Artificial Sequence
  Description of Artificial Sequence: Synthetic oligonucleotide
guagucuccgaagcauggc

SEQ ID NO: 496317 - RNA, 19 nt, Artificial Sequence
  Description of Artificial Sequence: Synthetic oligonucleotide
auagcccgaaggacucagc

SEQ ID NO: 496318 - RNA, 19 nt, Artificial Sequence
  Description of Artificial Sequence: Synthetic oligonucleotide
cagcgcugcggcgacaagg

SEQ ID NO: 496319 - RNA, 19 nt, Artificial Sequence
  Description of Artificial Sequence: Synthetic oligonucleotide
caucaucggcuuugacacc

SEQ ID NO: 496320 - RNA, 19 nt, Artificial Sequence
  Description of Artificial Sequence: Synthetic oligonucleotide
caguagaggugccucgguc

SEQ ID NO: 496321 - RNA, 19 nt, Artificial Sequence
  Description of Artificial Sequence: Synthetic oligonucleotide
uauagcccgaugggucugc

SEQ ID NO: 496322 - RNA, 19 nt, Artificial Sequence
  Description of Artificial Sequence: Synthetic oligonucleotide
gaguacacagcggggucug

SEQ ID NO: 496323 - RNA, 19 nt, Artificial Sequence
  Description of Artificial Sequence: Synthetic oligonucleotide
cugcaguuguggaguacac

SEQ ID NO: 496324 - RNA, 19 nt, Artificial Sequence
  Description of Artificial Sequence: Synthetic oligonucleotide
gacguucaggaacuucuua

SEQ ID NO: 496325 - RNA, 19 nt, Artificial Sequence
  Description of Artificial Sequence: Synthetic oligonucleotide
ggggaugacaguacuaguc

SEQ ID NO: 496326 - RNA, 19 nt, Artificial Sequence
  Description of Artificial Sequence: Synthetic oligonucleotide
gugcuuggugaugaaacca

SEQ ID NO: 496327 - RNA, 19 nt, Artificial Sequence
  Description of Artificial Sequence: Synthetic oligonucleotide
uccuuacuggaaaguccuc

SEQ ID NO: 496328 - RNA, 19 nt, Artificial Sequence
  Description of Artificial Sequence: Synthetic oligonucleotide
agcggggucuggaucagag

SEQ ID NO: 496329 - RNA, 19 nt, Artificial Sequence
  Description of Artificial Sequence: Synthetic oligonucleotide
guugccagcuguccuagua

SEQ ID NO: 496330 - RNA, 19 nt, Artificial Sequence
  Description of Artificial Sequence: Synthetic oligonucleotide
ccuagcgcacacaagccug

SEQ ID NO: 496331 - RNA, 19 nt, Artificial Sequence
  Description of Artificial Sequence: Synthetic oligonucleotide
guaguucaucacucaggca

SEQ ID NO: 496332 - RNA, 19 nt, Artificial Sequence
  Description of Artificial Sequence: Synthetic oligonucleotide
gagguuagagcugcccaga

SEQ ID NO: 496333 - RNA, 19 nt, Artificial Sequence
  Description of Artificial Sequence: Synthetic oligonucleotide
ggcucagcucgcuucuggg

SEQ ID NO: 496334 - RNA, 19 nt, Artificial Sequence
  Description of Artificial Sequence: Synthetic oligonucleotide
cuugaccgagucguaggac

SEQ ID NO: 496335 - RNA, 19 nt, Artificial Sequence
  Description of Artificial Sequence: Synthetic oligonucleotide
cucuaacgcugaucucaag

SEQ ID NO: 496336 - RNA, 19 nt, Artificial Sequence
  Description of Artificial Sequence: Synthetic oligonucleotide
ccgcacaucugccugguag

SEQ ID NO: 496337 - RNA, 19 nt, Artificial Sequence
  Description of Artificial Sequence: Synthetic oligonucleotide
auauagcccgaugggucug

SEQ ID NO: 496338 - RNA, 19 nt, Artificial Sequence
  Description of Artificial Sequence: Synthetic oligonucleotide
ccagcuguccuaguacugg

SEQ ID NO: 496339 - RNA, 19 nt, Artificial Sequence
  Description of Artificial Sequence: Synthetic oligonucleotide
cagugccucuguuccuagg

SEQ ID NO: 496340 - RNA, 19 nt, Artificial Sequence
  Description of Artificial Sequence: Synthetic oligonucleotide
gggaacccuuuguagucag

SEQ ID NO: 496341 - RNA, 19 nt, Artificial Sequence
  Description of Artificial Sequence: Synthetic oligonucleotide
gguggcaaucuuuugcaua

SEQ ID NO: 496342 - RNA, 19 nt, Artificial Sequence
  Description of Artificial Sequence: Synthetic oligonucleotide
guacuagucgaagcccuca

SEQ ID NO: 496343 - RNA, 19 nt, Artificial Sequence
  Description of Artificial Sequence: Synthetic oligonucleotide
cggugcgcauauuauaggc

SEQ ID NO: 496344 - RNA, 19 nt, Artificial Sequence
  Description of Artificial Sequence: Synthetic oligonucleotide
gcuaacugacauccggcuc

SEQ ID NO: 496345 - RNA, 19 nt, Artificial Sequence
  Description of Artificial Sequence: Synthetic oligonucleotide
uuguagucagaggccugac

SEQ ID NO: 496346 - RNA, 19 nt, Artificial Sequence
  Description of Artificial Sequence: Synthetic oligonucleotide
ucggucucgaugggaggug

SEQ ID NO: 496347 - RNA, 19 nt, Artificial Sequence
  Description of Artificial Sequence: Synthetic oligonucleotide
uaguaggauucggucucga

SEQ ID NO: 496348 - RNA, 19 nt, Artificial Sequence
  Description of Artificial Sequence: Synthetic oligonucleotide
ucuccgaagcauggccgca

SEQ ID NO: 496349 - RNA, 19 nt, Artificial Sequence
  Description of Artificial Sequence: Synthetic oligonucleotide
cuucuguaggacaggugua

SEQ ID NO: 496350 - RNA, 19 nt, Artificial Sequence
  Description of Artificial Sequence: Synthetic oligonucleotide
caguacuagucgaagcccu

SEQ ID NO: 496351 - RNA, 19 nt, Artificial Sequence
  Description of Artificial Sequence: Synthetic oligonucleotide
ccuaucuugacaccucuaa

SEQ ID NO: 496352 - RNA, 19 nt, Artificial Sequence
  Description of Artificial Sequence: Synthetic oligonucleotide
gagggauguggccgcccug

SEQ ID NO: 496353 - RNA, 19 nt, Artificial Sequence
  Description of Artificial Sequence: Synthetic oligonucleotide
gcgacaagggcuaucagua

SEQ ID NO: 496354 - RNA, 19 nt, Artificial Sequence
  Description of Artificial Sequence: Synthetic oligonucleotide
cuccgaagcauggccgcag

SEQ ID NO: 496355 - RNA, 19 nt, Artificial Sequence
  Description of Artificial Sequence: Synthetic oligonucleotide
cacugcuacuccagguaga

SEQ ID NO: 496356 - RNA, 19 nt, Artificial Sequence
  Description of Artificial Sequence: Synthetic oligonucleotide
ggcgacaagggcuaucagu

SEQ ID NO: 496357 - RNA, 19 nt, Artificial Sequence
  Description of Artificial Sequence: Synthetic oligonucleotide
cucgcuucuggggaugaca

SEQ ID NO: 496358 - RNA, 19 nt, Artificial Sequence
  Description of Artificial Sequence: Synthetic oligonucleotide
auagcggcacagaggacau

SEQ ID NO: 496359 - RNA, 19 nt, Artificial Sequence
  Description of Artificial Sequence: Synthetic oligonucleotide
ccuugugauaaggaaccug

SEQ ID NO: 496360 - RNA, 19 nt, Artificial Sequence
  Description of Artificial Sequence: Synthetic oligonucleotide
ugacaccucuaacgcugau

SEQ ID NO: 496361 - RNA, 19 nt, Artificial Sequence
  Description of Artificial Sequence: Synthetic oligonucleotide
uuuccccgcaaggcagggc

SEQ ID NO: 496362 - RNA, 19 nt, Artificial Sequence
  Description of Artificial Sequence: Synthetic oligonucleotide
ccggugcgcauauuauagg

SEQ ID NO: 496363 - RNA, 19 nt, Artificial Sequence
  Description of Artificial Sequence: Synthetic oligonucleotide
ggacagagcgcuggugucc

SEQ ID NO: 496364 - RNA, 19 nt, Artificial Sequence
  Description of Artificial Sequence: Synthetic oligonucleotide
gaauagcccgaaggacuca

SEQ ID NO: 496365 - RNA, 19 nt, Artificial Sequence
  Description of Artificial Sequence: Synthetic oligonucleotide
gagcggccacucaugaaga

SEQ ID NO: 496366 - RNA, 19 nt, Artificial Sequence
  Description of Artificial Sequence: Synthetic oligonucleotide
ucaucggcuuugacaccua

SEQ ID NO: 496367 - RNA, 19 nt, Artificial Sequence
  Description of Artificial Sequence: Synthetic oligonucleotide
gaugcccguggaggcggcg

SEQ ID NO: 496368 - RNA, 19 nt, Artificial Sequence
  Description of Artificial Sequence: Synthetic oligonucleotide
cugacauccggcucucagu

SEQ ID NO: 496369 - RNA, 19 nt, Artificial Sequence
  Description of Artificial Sequence: Synthetic oligonucleotide
guccuaguacuggccuggg

SEQ ID NO: 496370 - RNA, 19 nt, Artificial Sequence
  Description of Artificial Sequence: Synthetic oligonucleotide
gagagcggccacucaugaa

SEQ ID NO: 496371 - RNA, 19 nt, Artificial Sequence
  Description of Artificial Sequence: Synthetic oligonucleotide
gcuggaggguggguuaaag

SEQ ID NO: 496372 - RNA, 19 nt, Artificial Sequence
  Description of Artificial Sequence: Synthetic oligonucleotide
guacacagcggggucugga

SEQ ID NO: 496373 - RNA, 19 nt, Artificial Sequence
  Description of Artificial Sequence: Synthetic oligonucleotide
ccaccaacguguacuugac

SEQ ID NO: 496374 - RNA, 19 nt, Artificial Sequence
  Description of Artificial Sequence: Synthetic oligonucleotide
cuccggugcgcauauuaua

SEQ ID NO: 496375 - RNA, 19 nt, Artificial Sequence
  Description of Artificial Sequence: Synthetic oligonucleotide
ccuuccuagcgcacacaag

SEQ ID NO: 496376 - RNA, 19 nt, Artificial Sequence
  Description of Artificial Sequence: Synthetic oligonucleotide
uccccgcaaggcagggcgu

SEQ ID NO: 496377 - RNA, 19 nt, Artificial Sequence
  Description of Artificial Sequence: Synthetic oligonucleotide
ggagaggaucauccacuuc

SEQ ID NO: 496378 - RNA, 19 nt, Artificial Sequence
  Description of Artificial Sequence: Synthetic oligonucleotide
caccucuaacgcugaucuc

SEQ ID NO: 496379 - RNA, 19 nt, Artificial Sequence
  Description of Artificial Sequence: Synthetic oligonucleotide
ugaagacguucaggaacuu

SEQ ID NO: 496380 - RNA, 19 nt, Artificial Sequence
  Description of Artificial Sequence: Synthetic oligonucleotide
aggagcgagagcggccacu

SEQ ID NO: 496381 - RNA, 19 nt, Artificial Sequence
  Description of Artificial Sequence: Synthetic oligonucleotide
agccuguacuguccuccau

SEQ ID NO: 496382 - RNA, 19 nt, Artificial Sequence
  Description of Artificial Sequence: Synthetic oligonucleotide
gcuguccuaguacuggccu

SEQ ID NO: 496383 - RNA, 19 nt, Artificial Sequence
  Description of Artificial Sequence: Synthetic oligonucleotide
agacguucaggaacuucuu

SEQ ID NO: 496384 - RNA, 19 nt, Artificial Sequence
  Description of Artificial Sequence: Synthetic oligonucleotide
ggcaaaccgguggucagca

SEQ ID NO: 496385 - RNA, 19 nt, Artificial Sequence
  Description of Artificial Sequence: Synthetic oligonucleotide
agcagcgcugcggcgacaa

SEQ ID NO: 496386 - RNA, 19 nt, Artificial Sequence
  Description of Artificial Sequence: Synthetic oligonucleotide
aggugacaagacagugaca

SEQ ID NO: 496387 - RNA, 19 nt, Artificial Sequence
  Description of Artificial Sequence: Synthetic oligonucleotide
gccugguaguaggauucgg

SEQ ID NO: 496388 - RNA, 19 nt, Artificial Sequence
  Description of Artificial Sequence: Synthetic oligonucleotide
guccgagcucagugaugcc

SEQ ID NO: 496389 - RNA, 19 nt, Artificial Sequence
  Description of Artificial Sequence: Synthetic oligonucleotide
gcgcauauuauaggccuca

SEQ ID NO: 496390 - RNA, 19 nt, Artificial Sequence
  Description of Artificial Sequence: Synthetic oligonucleotide
gugcaccgugagccggcgg

SEQ ID NO: 496391 - RNA, 19 nt, Artificial Sequence
  Description of Artificial Sequence: Synthetic oligonucleotide
caccuaucuugacaccucu

SEQ ID NO: 496392 - RNA, 19 nt, Artificial Sequence
  Description of Artificial Sequence: Synthetic oligonucleotide
ggcuacauuuauuucccuu

SEQ ID NO: 496393 - RNA, 19 nt, Artificial Sequence
  Description of Artificial Sequence: Synthetic oligonucleotide
guggguuaaagugcaccgu

SEQ ID NO: 496394 - RNA, 19 nt, Artificial Sequence
  Description of Artificial Sequence: Synthetic oligonucleotide
ggcuccggugcgcauauua

SEQ ID NO: 496395 - RNA, 19 nt, Artificial Sequence
  Description of Artificial Sequence: Synthetic oligonucleotide
auguggccgcccugcaguu

SEQ ID NO: 496396 - RNA, 19 nt, Artificial Sequence
  Description of Artificial Sequence: Synthetic oligonucleotide
cagggcgugcuguagcccu

SEQ ID NO: 496397 - RNA, 19 nt, Artificial Sequence
  Description of Artificial Sequence: Synthetic oligonucleotide
gucguaggacagagcgcug

SEQ ID NO: 496398 - RNA, 19 nt, Artificial Sequence
  Description of Artificial Sequence: Synthetic oligonucleotide
cgacaagggcuaucaguag

SEQ ID NO: 496399 - RNA, 19 nt, Artificial Sequence
  Description of Artificial Sequence: Synthetic oligonucleotide
gcaaaccgguggucagcag

SEQ ID NO: 496400 - RNA, 19 nt, Artificial Sequence
  Description of Artificial Sequence: Synthetic oligonucleotide
agcucgcuucuggggauga

SEQ ID NO: 496401 - RNA, 19 nt, Artificial Sequence
  Description of Artificial Sequence: Synthetic oligonucleotide
ugcggcgacaagggcuauc

SEQ ID NO: 496402 - RNA, 19 nt, Artificial Sequence
  Description of Artificial Sequence: Synthetic oligonucleotide
gcggcgacaagggcuauca

SEQ ID NO: 496403 - RNA, 19 nt, Artificial Sequence
  Description of Artificial Sequence: Synthetic oligonucleotide
cccgaaacaacagcccuca

SEQ ID NO: 496404 - RNA, 19 nt, Artificial Sequence
  Description of Artificial Sequence: Synthetic oligonucleotide
ggcuaucaguagaggugcc

SEQ ID NO: 496405 - RNA, 19 nt, Artificial Sequence
  Description of Artificial Sequence: Synthetic oligonucleotide
accuaucuugacaccucua

SEQ ID NO: 496406 - RNA, 19 nt, Artificial Sequence
  Description of Artificial Sequence: Synthetic oligonucleotide
ccugguaguaggauucggu

SEQ ID NO: 496407 - RNA, 19 nt, Artificial Sequence
  Description of Artificial Sequence: Synthetic oligonucleotide
cagaggccccacagauguc

SEQ ID NO: 496408 - RNA, 19 nt, Artificial Sequence
  Description of Artificial Sequence: Synthetic oligonucleotide
uggccgcccugcaguugug

SEQ ID NO: 496409 - RNA, 19 nt, Artificial Sequence
  Description of Artificial Sequence: Synthetic oligonucleotide
ggggaacccuuuguaguca

SEQ ID NO: 496410 - RNA, 19 nt, Artificial Sequence
  Description of Artificial Sequence: Synthetic oligonucleotide
ccgagucguaggacagagc

SEQ ID NO: 496411 - RNA, 19 nt, Artificial Sequence
  Description of Artificial Sequence: Synthetic oligonucleotide
gcgagagcggccacucaug

SEQ ID NO: 496412 - RNA, 19 nt, Artificial Sequence
  Description of Artificial Sequence: Synthetic oligonucleotide
ccgaagcauggccgcaggc

SEQ ID NO: 496413 - RNA, 19 nt, Artificial Sequence
  Description of Artificial Sequence: Synthetic oligonucleotide
gcuugacccuucaccaguc

SEQ ID NO: 496414 - RNA, 19 nt, Artificial Sequence
  Description of Artificial Sequence: Synthetic oligonucleotide
ccucuaacgcugaucucaa

SEQ ID NO: 496415 - RNA, 19 nt, Artificial Sequence
  Description of Artificial Sequence: Synthetic oligonucleotide
caccgugagccggcgggug

SEQ ID NO: 496416 - RNA, 19 nt, Artificial Sequence
  Description of Artificial Sequence: Synthetic oligonucleotide
ggaguacacagcggggucu

SEQ ID NO: 496417 - RNA, 19 nt, Artificial Sequence
  Description of Artificial Sequence: Synthetic oligonucleotide
gguugaccacuuggaggug

SEQ ID NO: 496418 - RNA, 19 nt, Artificial Sequence
  Description of Artificial Sequence: Synthetic oligonucleotide
cgaaacaacagcccucacu

SEQ ID NO: 496419 - RNA, 19 nt, Artificial Sequence
  Description of Artificial Sequence: Synthetic oligonucleotide
gcacgccccacagacucug

SEQ ID NO: 496420 - RNA, 19 nt, Artificial Sequence
  Description of Artificial Sequence: Synthetic oligonucleotide
gggacggugggcacuucca

SEQ ID NO: 496421 - RNA, 19 nt, Artificial Sequence
  Description of Artificial Sequence: Synthetic oligonucleotide
cccgggccgacccacggug

SEQ ID NO: 496422 - RNA, 19 nt, Artificial Sequence
  Description of Artificial Sequence: Synthetic oligonucleotide
gcuaucaguagaggugccu

SEQ ID NO: 496423 - RNA, 19 nt, Artificial Sequence
  Description of Artificial Sequence: Synthetic oligonucleotide
cuccuuccuagcgcacaca

SEQ ID NO: 496424 - RNA, 19 nt, Artificial Sequence
  Description of Artificial Sequence: Synthetic oligonucleotide
uagcggcacagaggacauc

SEQ ID NO: 496425 - RNA, 19 nt, Artificial Sequence
  Description of Artificial Sequence: Synthetic oligonucleotide
ccgacccacggugcagugg

SEQ ID NO: 496426 - RNA, 19 nt, Artificial Sequence
  Description of Artificial Sequence: Synthetic oligonucleotide
aggggacggugggcacuuc

SEQ ID NO: 496427 - RNA, 19 nt, Artificial Sequence
  Description of Artificial Sequence: Synthetic oligonucleotide
caucggcuuugacaccuau

SEQ ID NO: 496428 - RNA, 19 nt, Artificial Sequence
  Description of Artificial Sequence: Synthetic oligonucleotide
gccgacccacggugcagug

SEQ ID NO: 496429 - RNA, 19 nt, Artificial Sequence
  Description of Artificial Sequence: Synthetic oligonucleotide
cgagagcggccacucauga

SEQ ID NO: 496430 - RNA, 19 nt, Artificial Sequence
  Description of Artificial Sequence: Synthetic oligonucleotide
cccgaggcuuccccgccac

SEQ ID NO: 496431 - RNA, 19 nt, Artificial Sequence
  Description of Artificial Sequence: Synthetic oligonucleotide
ccgggccgacccacggugc

SEQ ID NO: 496432 - RNA, 19 nt, Artificial Sequence
  Description of Artificial Sequence: Synthetic oligonucleotide
gcagcgcugcggcgacaag

SEQ ID NO: 496433 - RNA, 19 nt, Artificial Sequence
  Description of Artificial Sequence: Synthetic oligonucleotide
gcgcugcggcgacaagggc

SEQ ID NO: 496434 - RNA, 19 nt, Artificial Sequence
  Description of Artificial Sequence: Synthetic oligonucleotide
cgcuuucgucacuguaguc

SEQ ID NO: 496435 - RNA, 19 nt, Artificial Sequence
  Description of Artificial Sequence: Synthetic oligonucleotide
ccacuuggaggugccaucu

SEQ ID NO: 496436 - RNA, 19 nt, Artificial Sequence
  Description of Artificial Sequence: Synthetic oligonucleotide
gcuccggugcgcauauuau

SEQ ID NO: 496437 - RNA, 19 nt, Artificial Sequence
  Description of Artificial Sequence: Synthetic oligonucleotide
ccuguccguugccagcugu

SEQ ID NO: 496438 - RNA, 19 nt, Artificial Sequence
  Description of Artificial Sequence: Synthetic oligonucleotide
cagcggggucuggaucaga

SEQ ID NO: 496439 - RNA, 19 nt, Artificial Sequence
  Description of Artificial Sequence: Synthetic oligonucleotide
cggcgacaagggcuaucag

SEQ ID NO: 496440 - RNA, 19 nt, Artificial Sequence
  Description of Artificial Sequence: Synthetic oligonucleotide
ggccgacccacggugcagu

SEQ ID NO: 496441 - RNA, 19 nt, Artificial Sequence
  Description of Artificial Sequence: Synthetic oligonucleotide
ccacggugcaguggcaggu

SEQ ID NO: 496442 - RNA, 19 nt, Artificial Sequence
  Description of Artificial Sequence: Synthetic oligonucleotide
gcccgaugggucugcucau

SEQ ID NO: 496443 - RNA, 19 nt, Artificial Sequence
  Description of Artificial Sequence: Synthetic oligonucleotide
cccuugugauaaggaaccu

SEQ ID NO: 496444 - RNA, 19 nt, Artificial Sequence
  Description of Artificial Sequence: Synthetic oligonucleotide
gugccacauccuguccguu

SEQ ID NO: 496445 - RNA, 19 nt, Artificial Sequence
  Description of Artificial Sequence: Synthetic oligonucleotide
gcaccgugagccggcgggu

SEQ ID NO: 496446 - RNA, 19 nt, Artificial Sequence
  Description of Artificial Sequence: Synthetic oligonucleotide
cgggccgacccacggugca

SEQ ID NO: 496447 - RNA, 19 nt, Artificial Sequence
  Description of Artificial Sequence: Synthetic oligonucleotide
cgcauauuauaggccucau

SEQ ID NO: 496448 - RNA, 19 nt, Artificial Sequence
  Description of Artificial Sequence: Synthetic oligonucleotide
cggcuuugacaccuaucuu

SEQ ID NO: 496449 - RNA, 19 nt, Artificial Sequence
  Description of Artificial Sequence: Synthetic oligonucleotide
ccgugagccggcggguggu

SEQ ID NO: 496450 - RNA, 19 nt, Artificial Sequence
  Description of Artificial Sequence: Synthetic oligonucleotide
cugcggcgacaagggcuau

SEQ ID NO: 496451 - RNA, 19 nt, Artificial Sequence
  Description of Artificial Sequence: Synthetic oligonucleotide
cgggcuccggugcgcauau

SEQ ID NO: 496452 - RNA, 19 nt, Artificial Sequence
  Description of Artificial Sequence: Synthetic oligonucleotide
ccccgggccgacccacggu

SEQ ID NO: 496453 - RNA, 19 nt, Artificial Sequence
  Description of Artificial Sequence: Synthetic oligonucleotide
cggcgggugguggcaaucu

SEQ ID NO: 496454 - RNA, 19 nt, Artificial Sequence
  Description of Artificial Sequence: Synthetic oligonucleotide
gggcuccggugcgcauauu

SEQ ID NO: 496455 - RNA, 19 nt, Artificial Sequence
  Description of Artificial Sequence: Synthetic oligonucleotide
aaaugaaagugguagaaac

SEQ ID NO: 496456 - RNA, 19 nt, Artificial Sequence
  Description of Artificial Sequence: Synthetic oligonucleotide
aaucucaucggcuuuaucg

SEQ ID NO: 496457 - RNA, 19 nt, Artificial Sequence
  Description of Artificial Sequence: Synthetic oligonucleotide
aagaaaauuaauaucuugc

SEQ ID NO: 496458 - RNA, 19 nt, Artificial Sequence
  Description of Artificial Sequence: Synthetic oligonucleotide
aaaccuauggcccuuuucc

SEQ ID NO: 496459 - RNA, 19 nt, Artificial Sequence
  Description of Artificial Sequence: Synthetic oligonucleotide
ucaacuaccagucacauac

SEQ ID NO: 496460 - RNA, 19 nt, Artificial Sequence
  Description of Artificial Sequence: Synthetic oligonucleotide
uauauauuugguucgauug

SEQ ID NO: 496461 - RNA, 19 nt, Artificial Sequence
  Description of Artificial Sequence: Synthetic oligonucleotide
aaugauuucgugcugccuc

SEQ ID NO: 496462 - RNA, 19 nt, Artificial Sequence
  Description of Artificial Sequence: Synthetic oligonucleotide
aguacaaucaacuaccagu

SEQ ID NO: 496463 - RNA, 19 nt, Artificial Sequence
  Description of Artificial Sequence: Synthetic oligonucleotide
aaaucgaucccgcucauag

SEQ ID NO: 496464 - RNA, 19 nt, Artificial Sequence
  Description of Artificial Sequence: Synthetic oligonucleotide
aaagcgaaccaccuuagag

SEQ ID NO: 496465 - RNA, 19 nt, Artificial Sequence
  Description of Artificial Sequence: Synthetic oligonucleotide
aagcgaaccaccuuagagg

SEQ ID NO: 496466 - RNA, 19 nt, Artificial Sequence
  Description of Artificial Sequence: Synthetic oligonucleotide
uauuugguucgauugaggg

SEQ ID NO: 496467 - RNA, 19 nt, Artificial Sequence
  Description of Artificial Sequence: Synthetic oligonucleotide
ucugucaggaacauaaucu

SEQ ID NO: 496468 - RNA, 19 nt, Artificial Sequence
  Description of Artificial Sequence: Synthetic oligonucleotide
uuuaaucccaguacaauca

SEQ ID NO: 496469 - RNA, 19 nt, Artificial Sequence
  Description of Artificial Sequence: Synthetic oligonucleotide
aagucucauauauauuugg

SEQ ID NO: 496470 - RNA, 19 nt, Artificial Sequence
  Description of Artificial Sequence: Synthetic oligonucleotide
aagaacacgaucucggucu

SEQ ID NO: 496471 - RNA, 19 nt, Artificial Sequence
  Description of Artificial Sequence: Synthetic oligonucleotide
acaaucaacuaccagucac

SEQ ID NO: 496472 - RNA, 19 nt, Artificial Sequence
  Description of Artificial Sequence: Synthetic oligonucleotide
cagccuaugaaucucaucg

SEQ ID NO: 496473 - RNA, 19 nt, Artificial Sequence
  Description of Artificial Sequence: Synthetic oligonucleotide
aaauguucuguuggaaucc

SEQ ID NO: 496474 - RNA, 19 nt, Artificial Sequence
  Description of Artificial Sequence: Synthetic oligonucleotide
aaaaugucuaacucuguca

SEQ ID NO: 496475 - RNA, 19 nt, Artificial Sequence
  Description of Artificial Sequence: Synthetic oligonucleotide
aggauggccuaucaaaucc

SEQ ID NO: 496476 - RNA, 19 nt, Artificial Sequence
  Description of Artificial Sequence: Synthetic oligonucleotide
uuaucgugaaaguuuauug

SEQ ID NO: 496477 - RNA, 19 nt, Artificial Sequence
  Description of Artificial Sequence: Synthetic oligonucleotide
ucucauauauauuugguuc

SEQ ID NO: 496478 - RNA, 19 nt, Artificial Sequence
  Description of Artificial Sequence: Synthetic oligonucleotide
ucuugucucgauaugacug

SEQ ID NO: 496479 - RNA, 19 nt, Artificial Sequence
  Description of Artificial Sequence: Synthetic oligonucleotide
cuaaauuugcaucggaccc

SEQ ID NO: 496480 - RNA, 19 nt, Artificial Sequence
  Description of Artificial Sequence: Synthetic oligonucleotide
cauucuguagucuugaguc

SEQ ID NO: 496481 - RNA, 19 nt, Artificial Sequence
  Description of Artificial Sequence: Synthetic oligonucleotide
agggucuuacaacugaccc

SEQ ID NO: 496482 - RNA, 19 nt, Artificial Sequence
  Description of Artificial Sequence: Synthetic oligonucleotide
uuuaagcuuucuuccaugg

SEQ ID NO: 496483 - RNA, 19 nt, Artificial Sequence
  Description of Artificial Sequence: Synthetic oligonucleotide
cucauauauauuugguucg

SEQ ID NO: 496484 - RNA, 19 nt, Artificial Sequence
  Description of Artificial Sequence: Synthetic oligonucleotide
auaucauccacguucuuag

SEQ ID NO: 496485 - RNA, 19 nt, Artificial Sequence
  Description of Artificial Sequence: Synthetic oligonucleotide
cuagacuuaaaacucuggg

SEQ ID NO: 496486 - RNA, 19 nt, Artificial Sequence
  Description of Artificial Sequence: Synthetic oligonucleotide
accauuaccccuccaaggc

SEQ ID NO: 496487 - RNA, 19 nt, Artificial Sequence
  Description of Artificial Sequence: Synthetic oligonucleotide
aaccauuaccccuccaagg

SEQ ID NO: 496488 - RNA, 19 nt, Artificial Sequence
  Description of Artificial Sequence: Synthetic oligonucleotide
auuugguucgauugagggc

SEQ ID NO: 496489 - RNA, 19 nt, Artificial Sequence
  Description of Artificial Sequence: Synthetic oligonucleotide
uaacgcuccauucaaaacu

SEQ ID NO: 496490 - RNA, 19 nt, Artificial Sequence
  Description of Artificial Sequence: Synthetic oligonucleotide
uacagcaagauucuaaaau

SEQ ID NO: 496491 - RNA, 19 nt, Artificial Sequence
  Description of Artificial Sequence: Synthetic oligonucleotide
caucuuguagcaaggaacg

SEQ ID NO: 496492 - RNA, 19 nt, Artificial Sequence
  Description of Artificial Sequence: Synthetic oligonucleotide
uugaacguuuugaacaugc

SEQ ID NO: 496493 - RNA, 19 nt, Artificial Sequence
  Description of Artificial Sequence: Synthetic oligonucleotide
uuugguucgauugagggcu

SEQ ID NO: 496494 - RNA, 19 nt, Artificial Sequence
  Description of Artificial Sequence: Synthetic oligonucleotide
aauaacgcuccauucaaaa

SEQ ID NO: 496495 - RNA, 19 nt, Artificial Sequence
  Description of Artificial Sequence: Synthetic oligonucleotide
ugaaagggaaaacccauca

SEQ ID NO: 496496 - RNA, 19 nt, Artificial Sequence
  Description of Artificial Sequence: Synthetic oligonucleotide
aagcacgaguuucauaguc

SEQ ID NO: 496497 - RNA, 19 nt, Artificial Sequence
  Description of Artificial Sequence: Synthetic oligonucleotide
ucauugauagcauccagga

SEQ ID NO: 496498 - RNA, 19 nt, Artificial Sequence
  Description of Artificial Sequence: Synthetic oligonucleotide
acaagaacgcuuccaacac

SEQ ID NO: 496499 - RNA, 19 nt, Artificial Sequence
  Description of Artificial Sequence: Synthetic oligonucleotide
aaaaccuauggcccuuuuc

SEQ ID NO: 496500 - RNA, 19 nt, Artificial Sequence
  Description of Artificial Sequence: Synthetic oligonucleotide
cuuagaggaauaacgcucc

SEQ ID NO: 496501 - RNA, 19 nt, Artificial Sequence
  Description of Artificial Sequence: Synthetic oligonucleotide
ucaaaagcgaaccaccuua

SEQ ID NO: 496502 - RNA, 19 nt, Artificial Sequence
  Description of Artificial Sequence: Synthetic oligonucleotide
cauggaugggccuucauag

SEQ ID NO: 496503 - RNA, 19 nt, Artificial Sequence
  Description of Artificial Sequence: Synthetic oligonucleotide
cucccaaucagucuguccg

SEQ ID NO: 496504 - RNA, 19 nt, Artificial Sequence
  Description of Artificial Sequence: Synthetic oligonucleotide
ugaugauagucugugacag

SEQ ID NO: 496505 - RNA, 19 nt, Artificial Sequence
  Description of Artificial Sequence: Synthetic oligonucleotide
uacaccucaaaacccuugg

SEQ ID NO: 496506 - RNA, 19 nt, Artificial Sequence
  Description of Artificial Sequence: Synthetic oligonucleotide
ucaaccucaaaagcgaacc

SEQ ID NO: 496507 - RNA, 19 nt, Artificial Sequence
  Description of Artificial Sequence: Synthetic oligonucleotide
uaagucucauauauauuug

SEQ ID NO: 496508 - RNA, 19 nt, Artificial Sequence
  Description of Artificial Sequence: Synthetic oligonucleotide
uuuugcugcacuccaaaac

SEQ ID NO: 496509 - RNA, 19 nt, Artificial Sequence
  Description of Artificial Sequence: Synthetic oligonucleotide
uaagcuuucuuccauggau

SEQ ID NO: 496510 - RNA, 19 nt, Artificial Sequence
  Description of Artificial Sequence: Synthetic oligonucleotide
aaggaacggaugucuagac

SEQ ID NO: 496511 - RNA, 19 nt, Artificial Sequence
  Description of Artificial Sequence: Synthetic oligonucleotide
ugugacaguguacagugga

SEQ ID NO: 496512 - RNA, 19 nt, Artificial Sequence
  Description of Artificial Sequence: Synthetic oligonucleotide
uaucgugaaaguuuauugu

SEQ ID NO: 496513 - RNA, 19 nt, Artificial Sequence
  Description of Artificial Sequence: Synthetic oligonucleotide
aacuaccagucacauacag

SEQ ID NO: 496514 - RNA, 19 nt, Artificial Sequence
  Description of Artificial Sequence: Synthetic oligonucleotide
auaacgcuccauucaaaac

SEQ ID NO: 496515 - RNA, 19 nt, Artificial Sequence
  Description of Artificial Sequence: Synthetic oligonucleotide
uuuucggaauguaacccag

SEQ ID NO: 496516 - RNA, 19 nt, Artificial Sequence
  Description of Artificial Sequence: Synthetic oligonucleotide
auagucaagaacacgaucu

SEQ ID NO: 496517 - RNA, 19 nt, Artificial Sequence
  Description of Artificial Sequence: Synthetic oligonucleotide
ugaaacguggaaacacaag

SEQ ID NO: 496518 - RNA, 19 nt, Artificial Sequence
  Description of Artificial Sequence: Synthetic oligonucleotide
cucauagucaagaacacga

SEQ ID NO: 496519 - RNA, 19 nt, Artificial Sequence
  Description of Artificial Sequence: Synthetic oligonucleotide
ucuaggucugcccaucuca

SEQ ID NO: 496520 - RNA, 19 nt, Artificial Sequence
  Description of Artificial Sequence: Synthetic oligonucleotide
aauuaauaucuugcuuggg

SEQ ID NO: 496521 - RNA, 19 nt, Artificial Sequence
  Description of Artificial Sequence: Synthetic oligonucleotide
ucauuaugacaacaauucu

SEQ ID NO: 496522 - RNA, 19 nt, Artificial Sequence
  Description of Artificial Sequence: Synthetic oligonucleotide
auauauuugguucgauuga

SEQ ID NO: 496523 - RNA, 19 nt, Artificial Sequence
  Description of Artificial Sequence: Synthetic oligonucleotide
ucuagacgcaucaugugac

SEQ ID NO: 496524 - RNA, 19 nt, Artificial Sequence
  Description of Artificial Sequence: Synthetic oligonucleotide
acgaguuucauagucauca

SEQ ID NO: 496525 - RNA, 19 nt, Artificial Sequence
  Description of Artificial Sequence: Synthetic oligonucleotide
uugcuuuucggaauguaac

SEQ ID NO: 496526 - RNA, 19 nt, Artificial Sequence
  Description of Artificial Sequence: Synthetic oligonucleotide
ugucaucucgagaucugcg

SEQ ID NO: 496527 - RNA, 19 nt, Artificial Sequence
  Description of Artificial Sequence: Synthetic oligonucleotide
uuucccgccauguaucucc

SEQ ID NO: 496528 - RNA, 19 nt, Artificial Sequence
  Description of Artificial Sequence: Synthetic oligonucleotide
auggauauuucucuugcca

SEQ ID NO: 496529 - RNA, 19 nt, Artificial Sequence
  Description of Artificial Sequence: Synthetic oligonucleotide
ugcuuuucggaauguaacc

SEQ ID NO: 496530 - RNA, 19 nt, Artificial Sequence
  Description of Artificial Sequence: Synthetic oligonucleotide
ugucuauccacaucagaug

SEQ ID NO: 496531 - RNA, 19 nt, Artificial Sequence
  Description of Artificial Sequence: Synthetic oligonucleotide
uuagugccaguccucaagc

SEQ ID NO: 496532 - RNA, 19 nt, Artificial Sequence
  Description of Artificial Sequence: Synthetic oligonucleotide
uagucuugagucuuggggu

SEQ ID NO: 496533 - RNA, 19 nt, Artificial Sequence
  Description of Artificial Sequence: Synthetic oligonucleotide
ggaacggaugucuagacgc

SEQ ID NO: 496534 - RNA, 19 nt, Artificial Sequence
  Description of Artificial Sequence: Synthetic oligonucleotide
auacucucgaauccuuaac

SEQ ID NO: 496535 - RNA, 19 nt, Artificial Sequence
  Description of Artificial Sequence: Synthetic oligonucleotide
aauguaacccaguucgcuu

SEQ ID NO: 496536 - RNA, 19 nt, Artificial Sequence
  Description of Artificial Sequence: Synthetic oligonucleotide
uggucaaccucaaaagcga

SEQ ID NO: 496537 - RNA, 19 nt, Artificial Sequence
  Description of Artificial Sequence: Synthetic oligonucleotide
caccuuagaggaauaacgc

SEQ ID NO: 496538 - RNA, 19 nt, Artificial Sequence
  Description of Artificial Sequence: Synthetic oligonucleotide
cauucugcuggcaaucgcc

SEQ ID NO: 496539 - RNA, 19 nt, Artificial Sequence
  Description of Artificial Sequence: Synthetic oligonucleotide
uuuugaacguuuugaacau

SEQ ID NO: 496540 - RNA, 19 nt, Artificial Sequence
  Description of Artificial Sequence: Synthetic oligonucleotide
gaggauggcauauguuccg

SEQ ID NO: 496541 - RNA, 19 nt, Artificial Sequence
  Description of Artificial Sequence: Synthetic oligonucleotide
ggaaugucuauccacauca

SEQ ID NO: 496542 - RNA, 19 nt, Artificial Sequence
  Description of Artificial Sequence: Synthetic oligonucleotide
gaaccauuaccccuccaag

SEQ ID NO: 496543 - RNA, 19 nt, Artificial Sequence
  Description of Artificial Sequence: Synthetic oligonucleotide
ucuaacucugucauugaua

SEQ ID NO: 496544 - RNA, 19 nt, Artificial Sequence
  Description of Artificial Sequence: Synthetic oligonucleotide
uuaagcuaacccucccucc

SEQ ID NO: 496545 - RNA, 19 nt, Artificial Sequence
  Description of Artificial Sequence: Synthetic oligonucleotide
ggucguaucagacuuccgg

SEQ ID NO: 496546 - RNA, 19 nt, Artificial Sequence
  Description of Artificial Sequence: Synthetic oligonucleotide
uuucuugucucgauaugac

SEQ ID NO: 496547 - RNA, 19 nt, Artificial Sequence
  Description of Artificial Sequence: Synthetic oligonucleotide
ucagauggguaccaucugu

SEQ ID NO: 496548 - RNA, 19 nt, Artificial Sequence
  Description of Artificial Sequence: Synthetic oligonucleotide
cacaagucugguuaucggc

SEQ ID NO: 496549 - RNA, 19 nt, Artificial Sequence
  Description of Artificial Sequence: Synthetic oligonucleotide
ugucaaaucgaucccgcuc

SEQ ID NO: 496550 - RNA, 19 nt, Artificial Sequence
  Description of Artificial Sequence: Synthetic oligonucleotide
gauggguaccaucugucug

SEQ ID NO: 496551 - RNA, 19 nt, Artificial Sequence
  Description of Artificial Sequence: Synthetic oligonucleotide
gauaugacugauuccuguc

SEQ ID NO: 496552 - RNA, 19 nt, Artificial Sequence
  Description of Artificial Sequence: Synthetic oligonucleotide
uccguuuagugccaguccu

SEQ ID NO: 496553 - RNA, 19 nt, Artificial Sequence
  Description of Artificial Sequence: Synthetic oligonucleotide
aacccaguucgcuuuccuc

SEQ ID NO: 496554 - RNA, 19 nt, Artificial Sequence
  Description of Artificial Sequence: Synthetic oligonucleotide
uucugucaggaacauaauc

SEQ ID NO: 496555 - RNA, 19 nt, Artificial Sequence
  Description of Artificial Sequence: Synthetic oligonucleotide
agguaauccuccauucugc

SEQ ID NO: 496556 - RNA, 19 nt, Artificial Sequence
  Description of Artificial Sequence: Synthetic oligonucleotide
aauaucuugcuuggguaca

SEQ ID NO: 496557 - RNA, 19 nt, Artificial Sequence
  Description of Artificial Sequence: Synthetic oligonucleotide
agcgaaccaccuuagagga

SEQ ID NO: 496558 - RNA, 19 nt, Artificial Sequence
  Description of Artificial Sequence: Synthetic oligonucleotide
ccaccuuagaggaauaacg

SEQ ID NO: 496559 - RNA, 19 nt, Artificial Sequence
  Description of Artificial Sequence: Synthetic oligonucleotide
ugguuaucggcacucauuu

SEQ ID NO: 496560 - RNA, 19 nt, Artificial Sequence
  Description of Artificial Sequence: Synthetic oligonucleotide
auaugacugauuccuguca

SEQ ID NO: 496561 - RNA, 19 nt, Artificial Sequence
  Description of Artificial Sequence: Synthetic oligonucleotide
ucucuacuucuucaauugc

SEQ ID NO: 496562 - RNA, 19 nt, Artificial Sequence
  Description of Artificial Sequence: Synthetic oligonucleotide
uggauggucggccaucugu

SEQ ID NO: 496563 - RNA, 19 nt, Artificial Sequence
  Description of Artificial Sequence: Synthetic oligonucleotide
auggucggccaucuguggc

SEQ ID NO: 496564 - RNA, 19 nt, Artificial Sequence
  Description of Artificial Sequence: Synthetic oligonucleotide
gagggcguggucuauagga

SEQ ID NO: 496565 - RNA, 19 nt, Artificial Sequence
  Description of Artificial Sequence: Synthetic oligonucleotide
uugaaacguggaaacacaa

SEQ ID NO: 496566 - RNA, 19 nt, Artificial Sequence
  Description of Artificial Sequence: Synthetic oligonucleotide
uaugacugauuccugucau

SEQ ID NO: 496567 - RNA, 19 nt, Artificial Sequence
  Description of Artificial Sequence: Synthetic oligonucleotide
uuaagcuuucuuccaugga

SEQ ID NO: 496568 - RNA, 19 nt, Artificial Sequence
  Description of Artificial Sequence: Synthetic oligonucleotide
cugacaaccguucucuuuc

SEQ ID NO: 496569 - RNA, 19 nt, Artificial Sequence
  Description of Artificial Sequence: Synthetic oligonucleotide
cagugaugaaauaaucauc

SEQ ID NO: 496570 - RNA, 19 nt, Artificial Sequence
  Description of Artificial Sequence: Synthetic oligonucleotide
uuuaucgugaaaguuuauu

SEQ ID NO: 496571 - RNA, 19 nt, Artificial Sequence
  Description of Artificial Sequence: Synthetic oligonucleotide
uaaaacucugggugcaggu

SEQ ID NO: 496572 - RNA, 19 nt, Artificial Sequence
  Description of Artificial Sequence: Synthetic oligonucleotide
cuagcuuugccucagaagu

SEQ ID NO: 496573 - RNA, 19 nt, Artificial Sequence
  Description of Artificial Sequence: Synthetic oligonucleotide
aggaacggaugucuagacg

SEQ ID NO: 496574 - RNA, 19 nt, Artificial Sequence
  Description of Artificial Sequence: Synthetic oligonucleotide
gucacguuuccguuuagug

SEQ ID NO: 496575 - RNA, 19 nt, Artificial Sequence
  Description of Artificial Sequence: Synthetic oligonucleotide
uaaucucucuuuucccgcc

SEQ ID NO: 496576 - RNA, 19 nt, Artificial Sequence
  Description of Artificial Sequence: Synthetic oligonucleotide
auuucucuugccacaaguc

SEQ ID NO: 496577 - RNA, 19 nt, Artificial Sequence
  Description of Artificial Sequence: Synthetic oligonucleotide
aucgugaaaguuuauuguu

SEQ ID NO: 496578 - RNA, 19 nt, Artificial Sequence
  Description of Artificial Sequence: Synthetic oligonucleotide
accuuagaggaauaacgcu

SEQ ID NO: 496579 - RNA, 19 nt, Artificial Sequence
  Description of Artificial Sequence: Synthetic oligonucleotide
agccuaugaaucucaucgg

SEQ ID NO: 496580 - RNA, 19 nt, Artificial Sequence
  Description of Artificial Sequence: Synthetic oligonucleotide
gacgcaucaugugacgagg

SEQ ID NO: 496581 - RNA, 19 nt, Artificial Sequence
  Description of Artificial Sequence: Synthetic oligonucleotide
cuaagucucauauauauuu

SEQ ID NO: 496582 - RNA, 19 nt, Artificial Sequence
  Description of Artificial Sequence: Synthetic oligonucleotide
aauaaucaucuagacuuaa

SEQ ID NO: 496583 - RNA, 19 nt, Artificial Sequence
  Description of Artificial Sequence: Synthetic oligonucleotide
aaaagcgaaccaccuuaga

SEQ ID NO: 496584 - RNA, 19 nt, Artificial Sequence
  Description of Artificial Sequence: Synthetic oligonucleotide
ucauaggguggucguauca

SEQ ID NO: 496585 - RNA, 19 nt, Artificial Sequence
  Description of Artificial Sequence: Synthetic oligonucleotide
aaauuugcaucggacccca

SEQ ID NO: 496586 - RNA, 19 nt, Artificial Sequence
  Description of Artificial Sequence: Synthetic oligonucleotide
uuugcaacaugugucuuuc

SEQ ID NO: 496587 - RNA, 19 nt, Artificial Sequence
  Description of Artificial Sequence: Synthetic oligonucleotide
guuaagcuaacccucccuc

SEQ ID NO: 496588 - RNA, 19 nt, Artificial Sequence
  Description of Artificial Sequence: Synthetic oligonucleotide
aaccuauggcccuuuuccu

SEQ ID NO: 496589 - RNA, 19 nt, Artificial Sequence
  Description of Artificial Sequence: Synthetic oligonucleotide
ccaucuguggcucagcucc

SEQ ID NO: 496590 - RNA, 19 nt, Artificial Sequence
  Description of Artificial Sequence: Synthetic oligonucleotide
gguaccaucugucugacaa

SEQ ID NO: 496591 - RNA, 19 nt, Artificial Sequence
  Description of Artificial Sequence: Synthetic oligonucleotide
cagguaauccuccauucug

SEQ ID NO: 496592 - RNA, 19 nt, Artificial Sequence
  Description of Artificial Sequence: Synthetic oligonucleotide
aguccucucauuaugacaa

SEQ ID NO: 496593 - RNA, 19 nt, Artificial Sequence
  Description of Artificial Sequence: Synthetic oligonucleotide
cauagucaagaacacgauc

SEQ ID NO: 496594 - RNA, 19 nt, Artificial Sequence
  Description of Artificial Sequence: Synthetic oligonucleotide
guacaaucaacuaccaguc

SEQ ID NO: 496595 - RNA, 19 nt, Artificial Sequence
  Description of Artificial Sequence: Synthetic oligonucleotide
cuagacgcaucaugugacg

SEQ ID NO: 496596 - RNA, 19 nt, Artificial Sequence
  Description of Artificial Sequence: Synthetic oligonucleotide
aguuaagcuaacccucccu

SEQ ID NO: 496597 - RNA, 19 nt, Artificial Sequence
  Description of Artificial Sequence: Synthetic oligonucleotide
ucaagaacacgaucucggu

SEQ ID NO: 496598 - RNA, 19 nt, Artificial Sequence
  Description of Artificial Sequence: Synthetic oligonucleotide
ucugacugagaaccauuac

SEQ ID NO: 496599 - RNA, 19 nt, Artificial Sequence
  Description of Artificial Sequence: Synthetic oligonucleotide
ucucgauaugacugauucc

SEQ ID NO: 496600 - RNA, 19 nt, Artificial Sequence
  Description of Artificial Sequence: Synthetic oligonucleotide
ucaauugcagcaucuugua

SEQ ID NO: 496601 - RNA, 19 nt, Artificial Sequence
  Description of Artificial Sequence: Synthetic oligonucleotide
caaaagcgaaccaccuuag

SEQ ID NO: 496602 - RNA, 19 nt, Artificial Sequence
  Description of Artificial Sequence: Synthetic oligonucleotide
caaccguucucuuucccag

SEQ ID NO: 496603 - RNA, 19 nt, Artificial Sequence
  Description of Artificial Sequence: Synthetic oligonucleotide
accaccuuagaggaauaac

SEQ ID NO: 496604 - RNA, 19 nt, Artificial Sequence
  Description of Artificial Sequence: Synthetic oligonucleotide
uucccaaugaucagccauc

SEQ ID NO: 496605 - RNA, 19 nt, Artificial Sequence
  Description of Artificial Sequence: Synthetic oligonucleotide
ugucuagacgcaucaugug

SEQ ID NO: 496606 - RNA, 19 nt, Artificial Sequence
  Description of Artificial Sequence: Synthetic oligonucleotide
uacaaucaacuaccaguca

SEQ ID NO: 496607 - RNA, 19 nt, Artificial Sequence
  Description of Artificial Sequence: Synthetic oligonucleotide
augucuauccacaucagau

SEQ ID NO: 496608 - RNA, 19 nt, Artificial Sequence
  Description of Artificial Sequence: Synthetic oligonucleotide
gaugcauucuguagucuug

SEQ ID NO: 496609 - RNA, 19 nt, Artificial Sequence
  Description of Artificial Sequence: Synthetic oligonucleotide
ucugcguucucugucaaau

SEQ ID NO: 496610 - RNA, 19 nt, Artificial Sequence
  Description of Artificial Sequence: Synthetic oligonucleotide
uacaacugacccugguggc

SEQ ID NO: 496611 - RNA, 19 nt, Artificial Sequence
  Description of Artificial Sequence: Synthetic oligonucleotide
agugccaguccucaagcca

SEQ ID NO: 496612 - RNA, 19 nt, Artificial Sequence
  Description of Artificial Sequence: Synthetic oligonucleotide
cuuagacucaggcuucuuc

SEQ ID NO: 496613 - RNA, 19 nt, Artificial Sequence
  Description of Artificial Sequence: Synthetic oligonucleotide
gauggucggccaucugugg

SEQ ID NO: 496614 - RNA, 19 nt, Artificial Sequence
  Description of Artificial Sequence: Synthetic oligonucleotide
cuacggauccccaccagac

SEQ ID NO: 496615 - RNA, 19 nt, Artificial Sequence
  Description of Artificial Sequence: Synthetic oligonucleotide
auauuugguucgauugagg

SEQ ID NO: 496616 - RNA, 19 nt, Artificial Sequence
  Description of Artificial Sequence: Synthetic oligonucleotide
ugaugcauucuguagucuu

SEQ ID NO: 496617 - RNA, 19 nt, Artificial Sequence
  Description of Artificial Sequence: Synthetic oligonucleotide
ucucaacccguggagcugg

SEQ ID NO: 496618 - RNA, 19 nt, Artificial Sequence
  Description of Artificial Sequence: Synthetic oligonucleotide
caacccguggagcuggagg

SEQ ID NO: 496619 - RNA, 19 nt, Artificial Sequence
  Description of Artificial Sequence: Synthetic oligonucleotide
uuaugacaacaauucuuuc

SEQ ID NO: 496620 - RNA, 19 nt, Artificial Sequence
  Description of Artificial Sequence: Synthetic oligonucleotide
auugaaacguggaaacaca

SEQ ID NO: 496621 - RNA, 19 nt, Artificial Sequence
  Description of Artificial Sequence: Synthetic oligonucleotide
uguacagccuaugaaucuc

SEQ ID NO: 496622 - RNA, 19 nt, Artificial Sequence
  Description of Artificial Sequence: Synthetic oligonucleotide
ucggcuuuaucgugaaagu

SEQ ID NO: 496623 - RNA, 19 nt, Artificial Sequence
  Description of Artificial Sequence: Synthetic oligonucleotide
aggaauggucuuucuuguc

SEQ ID NO: 496624 - RNA, 19 nt, Artificial Sequence
  Description of Artificial Sequence: Synthetic oligonucleotide
gucuagacgcaucauguga

SEQ ID NO: 496625 - RNA, 19 nt, Artificial Sequence
  Description of Artificial Sequence: Synthetic oligonucleotide
ucauaggauggccuaucaa

SEQ ID NO: 496626 - RNA, 19 nt, Artificial Sequence
  Description of Artificial Sequence: Synthetic oligonucleotide
aaaugauuucgugcugccu

SEQ ID NO: 496627 - RNA, 19 nt, Artificial Sequence
  Description of Artificial Sequence: Synthetic oligonucleotide
ggucuuacaacugacccug

SEQ ID NO: 496628 - RNA, 19 nt, Artificial Sequence
  Description of Artificial Sequence: Synthetic oligonucleotide
ccuuagaggaauaacgcuc

SEQ ID NO: 496629 - RNA, 19 nt, Artificial Sequence
  Description of Artificial Sequence: Synthetic oligonucleotide
caaucaacuaccagucaca

SEQ ID NO: 496630 - RNA, 19 nt, Artificial Sequence
  Description of Artificial Sequence: Synthetic oligonucleotide
uuagaggaauaacgcucca

SEQ ID NO: 496631 - RNA, 19 nt, Artificial Sequence
  Description of Artificial Sequence: Synthetic oligonucleotide
acuuaaaacucugggugca

SEQ ID NO: 496632 - RNA, 19 nt, Artificial Sequence
  Description of Artificial Sequence: Synthetic oligonucleotide
caaucagucuguccgacca

SEQ ID NO: 496633 - RNA, 19 nt, Artificial Sequence
  Description of Artificial Sequence: Synthetic oligonucleotide
gggcauucgauccucuggg

SEQ ID NO: 496634 - RNA, 19 nt, Artificial Sequence
  Description of Artificial Sequence: Synthetic oligonucleotide
acguucuuagacucaggcu

SEQ ID NO: 496635 - RNA, 19 nt, Artificial Sequence
  Description of Artificial Sequence: Synthetic oligonucleotide
agagggucuuacaacugac

SEQ ID NO: 496636 - RNA, 19 nt, Artificial Sequence
  Description of Artificial Sequence: Synthetic oligonucleotide
uuucggaauguaacccagu

SEQ ID NO: 496637 - RNA, 19 nt, Artificial Sequence
  Description of Artificial Sequence: Synthetic oligonucleotide
augauuucgugcugccucu

SEQ ID NO: 496638 - RNA, 19 nt, Artificial Sequence
  Description of Artificial Sequence: Synthetic oligonucleotide
cauaggguggucguaucag

SEQ ID NO: 496639 - RNA, 19 nt, Artificial Sequence
  Description of Artificial Sequence: Synthetic oligonucleotide
uggcauauguuccgccaug

SEQ ID NO: 496640 - RNA, 19 nt, Artificial Sequence
  Description of Artificial Sequence: Synthetic oligonucleotide
ggucuauaggauccugggg

SEQ ID NO: 496641 - RNA, 19 nt, Artificial Sequence
  Description of Artificial Sequence: Synthetic oligonucleotide
auauuucucuugccacaag

SEQ ID NO: 496642 - RNA, 19 nt, Artificial Sequence
  Description of Artificial Sequence: Synthetic oligonucleotide
agucugguuaucggcacuc

SEQ ID NO: 496643 - RNA, 19 nt, Artificial Sequence
  Description of Artificial Sequence: Synthetic oligonucleotide
caagaacacgaucucgguc

SEQ ID NO: 496644 - RNA, 19 nt, Artificial Sequence
  Description of Artificial Sequence: Synthetic oligonucleotide
gauauuucucuugccacaa

SEQ ID NO: 496645 - RNA, 19 nt, Artificial Sequence
  Description of Artificial Sequence: Synthetic oligonucleotide
gauuccugucaucucgaga

SEQ ID NO: 496646 - RNA, 19 nt, Artificial Sequence
  Description of Artificial Sequence: Synthetic oligonucleotide
ugugaggauggcauauguu

SEQ ID NO: 496647 - RNA, 19 nt, Artificial Sequence
  Description of Artificial Sequence: Synthetic oligonucleotide
acaagucugguuaucggca

SEQ ID NO: 496648 - RNA, 19 nt, Artificial Sequence
  Description of Artificial Sequence: Synthetic oligonucleotide
ucguaucagacuuccgguc

SEQ ID NO: 496649 - RNA, 19 nt, Artificial Sequence
  Description of Artificial Sequence: Synthetic oligonucleotide
ucaucucgagaucugcguu

SEQ ID NO: 496650 - RNA, 19 nt, Artificial Sequence
  Description of Artificial Sequence: Synthetic oligonucleotide
cuugucucgauaugacuga

SEQ ID NO: 496651 - RNA, 19 nt, Artificial Sequence
  Description of Artificial Sequence: Synthetic oligonucleotide
acuuccggucauaggaugg

SEQ ID NO: 496652 - RNA, 19 nt, Artificial Sequence
  Description of Artificial Sequence: Synthetic oligonucleotide
uccggucauaggauggccu

SEQ ID NO: 496653 - RNA, 19 nt, Artificial Sequence
  Description of Artificial Sequence: Synthetic oligonucleotide
uauggcccuuuuccuaucu

SEQ ID NO: 496654 - RNA, 19 nt, Artificial Sequence
  Description of Artificial Sequence: Synthetic oligonucleotide
caguacaaucaacuaccag

SEQ ID NO: 496655 - RNA, 19 nt, Artificial Sequence
  Description of Artificial Sequence: Synthetic oligonucleotide
uccucucauuaugacaaca

SEQ ID NO: 496656 - RNA, 19 nt, Artificial Sequence
  Description of Artificial Sequence: Synthetic oligonucleotide
auaggguggucguaucaga

SEQ ID NO: 496657 - RNA, 19 nt, Artificial Sequence
  Description of Artificial Sequence: Synthetic oligonucleotide
cucgauaugacugauuccu

SEQ ID NO: 496658 - RNA, 19 nt, Artificial Sequence
  Description of Artificial Sequence: Synthetic oligonucleotide
ucaugugacgaggugcagu

SEQ ID NO: 496659 - RNA, 19 nt, Artificial Sequence
  Description of Artificial Sequence: Synthetic oligonucleotide
caagucugguuaucggcac

SEQ ID NO: 496660 - RNA, 19 nt, Artificial Sequence
  Description of Artificial Sequence: Synthetic oligonucleotide
aucagauggguaccaucug

SEQ ID NO: 496661 - RNA, 19 nt, Artificial Sequence
  Description of Artificial Sequence: Synthetic oligonucleotide
uuacccauaggagggcgug

SEQ ID NO: 496662 - RNA, 19 nt, Artificial Sequence
  Description of Artificial Sequence: Synthetic oligonucleotide
cagauggguaccaucuguc

SEQ ID NO: 496663 - RNA, 19 nt, Artificial Sequence
  Description of Artificial Sequence: Synthetic oligonucleotide
auaggauggccuaucaaau

SEQ ID NO: 496664 - RNA, 19 nt, Artificial Sequence
  Description of Artificial Sequence: Synthetic oligonucleotide
uugcuuggguacagcaaga

SEQ ID NO: 496665 - RNA, 19 nt, Artificial Sequence
  Description of Artificial Sequence: Synthetic oligonucleotide
caucucgagaucugcguuc

SEQ ID NO: 496666 - RNA, 19 nt, Artificial Sequence
  Description of Artificial Sequence: Synthetic oligonucleotide
ugacaaccguucucuuucc

SEQ ID NO: 496667 - RNA, 19 nt, Artificial Sequence
  Description of Artificial Sequence: Synthetic oligonucleotide
ggggcauucgauccucugg

SEQ ID NO: 496668 - RNA, 19 nt, Artificial Sequence
  Description of Artificial Sequence: Synthetic oligonucleotide
gagggucuuacaacugacc

SEQ ID NO: 496669 - RNA, 19 nt, Artificial Sequence
  Description of Artificial Sequence: Synthetic oligonucleotide
aacgcuccauucaaaacua

SEQ ID NO: 496670 - RNA, 19 nt, Artificial Sequence
  Description of Artificial Sequence: Synthetic oligonucleotide
gacaaccguucucuuuccc

SEQ ID NO: 496671 - RNA, 19 nt, Artificial Sequence
  Description of Artificial Sequence: Synthetic oligonucleotide
ucagaauaucauccacguu

SEQ ID NO: 496672 - RNA, 19 nt, Artificial Sequence
  Description of Artificial Sequence: Synthetic oligonucleotide
aggagggcguggucuauag

SEQ ID NO: 496673 - RNA, 19 nt, Artificial Sequence
  Description of Artificial Sequence: Synthetic oligonucleotide
acgaggugcaguuucccaa

SEQ ID NO: 496674 - RNA, 19 nt, Artificial Sequence
  Description of Artificial Sequence: Synthetic oligonucleotide
ggaauaacgcuccauucaa

SEQ ID NO: 496675 - RNA, 19 nt, Artificial Sequence
  Description of Artificial Sequence: Synthetic oligonucleotide
uggucguaucagacuuccg

SEQ ID NO: 496676 - RNA, 19 nt, Artificial Sequence
  Description of Artificial Sequence: Synthetic oligonucleotide
gcuuuucggaauguaaccc

SEQ ID NO: 496677 - RNA, 19 nt, Artificial Sequence
  Description of Artificial Sequence: Synthetic oligonucleotide
uagacgcaucaugugacga

SEQ ID NO: 496678 - RNA, 19 nt, Artificial Sequence
  Description of Artificial Sequence: Synthetic oligonucleotide
augaggaauggucuuucuu

SEQ ID NO: 496679 - RNA, 19 nt, Artificial Sequence
  Description of Artificial Sequence: Synthetic oligonucleotide
uacggauccccaccagacu

SEQ ID NO: 496680 - RNA, 19 nt, Artificial Sequence
  Description of Artificial Sequence: Synthetic oligonucleotide
aaucgccucccagucacgu

SEQ ID NO: 496681 - RNA, 19 nt, Artificial Sequence
  Description of Artificial Sequence: Synthetic oligonucleotide
agaacacgaucucggucug

SEQ ID NO: 496682 - RNA, 19 nt, Artificial Sequence
  Description of Artificial Sequence: Synthetic oligonucleotide
uggcaaucgccucccaguc

SEQ ID NO: 496683 - RNA, 19 nt, Artificial Sequence
  Description of Artificial Sequence: Synthetic oligonucleotide
aggguggucguaucagacu

SEQ ID NO: 496684 - RNA, 19 nt, Artificial Sequence
  Description of Artificial Sequence: Synthetic oligonucleotide
ugaccacuuucaucuguga

SEQ ID NO: 496685 - RNA, 19 nt, Artificial Sequence
  Description of Artificial Sequence: Synthetic oligonucleotide
guggucguaucagacuucc

SEQ ID NO: 496686 - RNA, 19 nt, Artificial Sequence
  Description of Artificial Sequence: Synthetic oligonucleotide
acggauccccaccagacuu

SEQ ID NO: 496687 - RNA, 19 nt, Artificial Sequence
  Description of Artificial Sequence: Synthetic oligonucleotide
cugugacaguguacagugg

SEQ ID NO: 496688 - RNA, 19 nt, Artificial Sequence
  Description of Artificial Sequence: Synthetic oligonucleotide
aauacaccucaaaacccuu

SEQ ID NO: 496689 - RNA, 19 nt, Artificial Sequence
  Description of Artificial Sequence: Synthetic oligonucleotide
gcggauauaucccaggucu

SEQ ID NO: 496690 - RNA, 19 nt, Artificial Sequence
  Description of Artificial Sequence: Synthetic oligonucleotide
uggauacucucgaauccuu

SEQ ID NO: 496691 - RNA, 19 nt, Artificial Sequence
  Description of Artificial Sequence: Synthetic oligonucleotide
auggcauauguuccgccau

SEQ ID NO: 496692 - RNA, 19 nt, Artificial Sequence
  Description of Artificial Sequence: Synthetic oligonucleotide
ccgcucauagucaagaaca

SEQ ID NO: 496693 - RNA, 19 nt, Artificial Sequence
  Description of Artificial Sequence: Synthetic oligonucleotide
aggugcaguuucccaauga

SEQ ID NO: 496694 - RNA, 19 nt, Artificial Sequence
  Description of Artificial Sequence: Synthetic oligonucleotide
gacgaggugcaguuuccca

SEQ ID NO: 496695 - RNA, 19 nt, Artificial Sequence
  Description of Artificial Sequence: Synthetic oligonucleotide
agcacgaguuucauaguca

SEQ ID NO: 496696 - RNA, 19 nt, Artificial Sequence
  Description of Artificial Sequence: Synthetic oligonucleotide
ucgccucccagucacguuu

SEQ ID NO: 496697 - RNA, 19 nt, Artificial Sequence
  Description of Artificial Sequence: Synthetic oligonucleotide
acuccaaaacuggucaaaa

SEQ ID NO: 496698 - RNA, 19 nt, Artificial Sequence
  Description of Artificial Sequence: Synthetic oligonucleotide
uccuacggauccccaccag

SEQ ID NO: 496699 - RNA, 19 nt, Artificial Sequence
  Description of Artificial Sequence: Synthetic oligonucleotide
uauccacaucagaugggua

SEQ ID NO: 496700 - RNA, 19 nt, Artificial Sequence
  Description of Artificial Sequence: Synthetic oligonucleotide
gauggccuaucaaauccuc

SEQ ID NO: 496701 - RNA, 19 nt, Artificial Sequence
  Description of Artificial Sequence: Synthetic oligonucleotide
caguccucucauuaugaca

SEQ ID NO: 496702 - RNA, 19 nt, Artificial Sequence
  Description of Artificial Sequence: Synthetic oligonucleotide
gcaaucgccucccagucac

SEQ ID NO: 496703 - RNA, 19 nt, Artificial Sequence
  Description of Artificial Sequence: Synthetic oligonucleotide
ugggccuucauaggguggu

SEQ ID NO: 496704 - RNA, 19 nt, Artificial Sequence
  Description of Artificial Sequence: Synthetic oligonucleotide
guacgucuccuccaucuca

SEQ ID NO: 496705 - RNA, 19 nt, Artificial Sequence
  Description of Artificial Sequence: Synthetic oligonucleotide
ugcaucggaccccaucauu

SEQ ID NO: 496706 - RNA, 19 nt, Artificial Sequence
  Description of Artificial Sequence: Synthetic oligonucleotide
uucucaacccguggagcug

SEQ ID NO: 496707 - RNA, 19 nt, Artificial Sequence
  Description of Artificial Sequence: Synthetic oligonucleotide
cacgaucucggucugugga

SEQ ID NO: 496708 - RNA, 19 nt, Artificial Sequence
  Description of Artificial Sequence: Synthetic oligonucleotide
gucuguccgaccacaaaac

SEQ ID NO: 496709 - RNA, 19 nt, Artificial Sequence
  Description of Artificial Sequence: Synthetic oligonucleotide
uagaggaauaacgcuccau

SEQ ID NO: 496710 - RNA, 19 nt, Artificial Sequence
  Description of Artificial Sequence: Synthetic oligonucleotide
ugacgaggugcaguuuccc

SEQ ID NO: 496711 - RNA, 19 nt, Artificial Sequence
  Description of Artificial Sequence: Synthetic oligonucleotide
accuauggcccuuuuccua

SEQ ID NO: 496712 - RNA, 19 nt, Artificial Sequence
  Description of Artificial Sequence: Synthetic oligonucleotide
ggcguggucuauaggaucc

SEQ ID NO: 496713 - RNA, 19 nt, Artificial Sequence
  Description of Artificial Sequence: Synthetic oligonucleotide
gaucucggucuguggagca

SEQ ID NO: 496714 - RNA, 19 nt, Artificial Sequence
  Description of Artificial Sequence: Synthetic oligonucleotide
ggaauggucuuucuugucu

SEQ ID NO: 496715 - RNA, 19 nt, Artificial Sequence
  Description of Artificial Sequence: Synthetic oligonucleotide
ucucggucuguggagcaga

SEQ ID NO: 496716 - RNA, 19 nt, Artificial Sequence
  Description of Artificial Sequence: Synthetic oligonucleotide
gucguaucagacuuccggu

SEQ ID NO: 496717 - RNA, 19 nt, Artificial Sequence
  Description of Artificial Sequence: Synthetic oligonucleotide
ccaucauuucagaggaaug

SEQ ID NO: 496718 - RNA, 19 nt, Artificial Sequence
  Description of Artificial Sequence: Synthetic oligonucleotide
ggucagagucuaaauuugc

SEQ ID NO: 496719 - RNA, 19 nt, Artificial Sequence
  Description of Artificial Sequence: Synthetic oligonucleotide
uucgauccucuggguaagg

SEQ ID NO: 496720 - RNA, 19 nt, Artificial Sequence
  Description of Artificial Sequence: Synthetic oligonucleotide
acuaagucucauauauauu

SEQ ID NO: 496721 - RNA, 19 nt, Artificial Sequence
  Description of Artificial Sequence: Synthetic oligonucleotide
aucucgagaucugcguucu

SEQ ID NO: 496722 - RNA, 19 nt, Artificial Sequence
  Description of Artificial Sequence: Synthetic oligonucleotide
agcuaacccucccucccca

SEQ ID NO: 496723 - RNA, 19 nt, Artificial Sequence
  Description of Artificial Sequence: Synthetic oligonucleotide
gaacggaugucuagacgca

SEQ ID NO: 496724 - RNA, 19 nt, Artificial Sequence
  Description of Artificial Sequence: Synthetic oligonucleotide
agucccauucugucaggaa

SEQ ID NO: 496725 - RNA, 19 nt, Artificial Sequence
  Description of Artificial Sequence: Synthetic oligonucleotide
gaauaacgcuccauucaaa

SEQ ID NO: 496726 - RNA, 19 nt, Artificial Sequence
  Description of Artificial Sequence: Synthetic oligonucleotide
gaugauagucugugacagu

SEQ ID NO: 496727 - RNA, 19 nt, Artificial Sequence
  Description of Artificial Sequence: Synthetic oligonucleotide
caagaacgcuuccaacaca

SEQ ID NO: 496728 - RNA, 19 nt, Artificial Sequence
  Description of Artificial Sequence: Synthetic oligonucleotide
agucacguuuccguuuagu

SEQ ID NO: 496729 - RNA, 19 nt, Artificial Sequence
  Description of Artificial Sequence: Synthetic oligonucleotide
auauuccaucaccuucuuu

SEQ ID NO: 496730 - RNA, 19 nt, Artificial Sequence
  Description of Artificial Sequence: Synthetic oligonucleotide
gucaucucgagaucugcgu

SEQ ID NO: 496731 - RNA, 19 nt, Artificial Sequence
  Description of Artificial Sequence: Synthetic oligonucleotide
ucgauccucuggguaaggu

SEQ ID NO: 496732 - RNA, 19 nt, Artificial Sequence
  Description of Artificial Sequence: Synthetic oligonucleotide
ggggcggauauaucccagg

SEQ ID NO: 496733 - RNA, 19 nt, Artificial Sequence
  Description of Artificial Sequence: Synthetic oligonucleotide
cuguccgaccacaaaaccu

SEQ ID NO: 496734 - RNA, 19 nt, Artificial Sequence
  Description of Artificial Sequence: Synthetic oligonucleotide
uugccacaagucugguuau

SEQ ID NO: 496735 - RNA, 19 nt, Artificial Sequence
  Description of Artificial Sequence: Synthetic oligonucleotide
ugcuuggguacagcaagau

SEQ ID NO: 496736 - RNA, 19 nt, Artificial Sequence
  Description of Artificial Sequence: Synthetic oligonucleotide
agccaggugaccacuuuca

SEQ ID NO: 496737 - RNA, 19 nt, Artificial Sequence
  Description of Artificial Sequence: Synthetic oligonucleotide
cuucucaacccguggagcu

SEQ ID NO: 496738 - RNA, 19 nt, Artificial Sequence
  Description of Artificial Sequence: Synthetic oligonucleotide
caaccucaaaagcgaacca

SEQ ID NO: 496739 - RNA, 19 nt, Artificial Sequence
  Description of Artificial Sequence: Synthetic oligonucleotide
ugauuucgugcugccucug

SEQ ID NO: 496740 - RNA, 19 nt, Artificial Sequence
  Description of Artificial Sequence: Synthetic oligonucleotide
ggaaugaugugaggauggc

SEQ ID NO: 496741 - RNA, 19 nt, Artificial Sequence
  Description of Artificial Sequence: Synthetic oligonucleotide
caaucgccucccagucacg

SEQ ID NO: 496742 - RNA, 19 nt, Artificial Sequence
  Description of Artificial Sequence: Synthetic oligonucleotide
cugcguucucugucaaauc

SEQ ID NO: 496743 - RNA, 19 nt, Artificial Sequence
  Description of Artificial Sequence: Synthetic oligonucleotide
ggauggucggccaucugug

SEQ ID NO: 496744 - RNA, 19 nt, Artificial Sequence
  Description of Artificial Sequence: Synthetic oligonucleotide
caauuccugugcagcuuuc

SEQ ID NO: 496745 - RNA, 19 nt, Artificial Sequence
  Description of Artificial Sequence: Synthetic oligonucleotide
guacagccuaugaaucuca

SEQ ID NO: 496746 - RNA, 19 nt, Artificial Sequence
  Description of Artificial Sequence: Synthetic oligonucleotide
ggaauguaacccaguucgc

SEQ ID NO: 496747 - RNA, 19 nt, Artificial Sequence
  Description of Artificial Sequence: Synthetic oligonucleotide
ccauuaccccuccaaggcc

SEQ ID NO: 496748 - RNA, 19 nt, Artificial Sequence
  Description of Artificial Sequence: Synthetic oligonucleotide
gcuuacccauaggagggcg

SEQ ID NO: 496749 - RNA, 19 nt, Artificial Sequence
  Description of Artificial Sequence: Synthetic oligonucleotide
guaacccaguucgcuuucc

SEQ ID NO: 496750 - RNA, 19 nt, Artificial Sequence
  Description of Artificial Sequence: Synthetic oligonucleotide
cuggcaaucgccucccagu

SEQ ID NO: 496751 - RNA, 19 nt, Artificial Sequence
  Description of Artificial Sequence: Synthetic oligonucleotide
gcuuuaucgugaaaguuua

SEQ ID NO: 496752 - RNA, 19 nt, Artificial Sequence
  Description of Artificial Sequence: Synthetic oligonucleotide
ucaacccguggagcuggag

SEQ ID NO: 496753 - RNA, 19 nt, Artificial Sequence
  Description of Artificial Sequence: Synthetic oligonucleotide
gaucugcguucucugucaa

SEQ ID NO: 496754 - RNA, 19 nt, Artificial Sequence
  Description of Artificial Sequence: Synthetic oligonucleotide
uuuucccgccauguaucuc

SEQ ID NO: 496755 - RNA, 19 nt, Artificial Sequence
  Description of Artificial Sequence: Synthetic oligonucleotide
cauaggagggcguggucua

SEQ ID NO: 496756 - RNA, 19 nt, Artificial Sequence
  Description of Artificial Sequence: Synthetic oligonucleotide
gcuggugcgguacgucucc

SEQ ID NO: 496757 - RNA, 19 nt, Artificial Sequence
  Description of Artificial Sequence: Synthetic oligonucleotide
ggcggauauaucccagguc

SEQ ID NO: 496758 - RNA, 19 nt, Artificial Sequence
  Description of Artificial Sequence: Synthetic oligonucleotide
caugugacgaggugcaguu

SEQ ID NO: 496759 - RNA, 19 nt, Artificial Sequence
  Description of Artificial Sequence: Synthetic oligonucleotide
caacuaccagucacauaca

SEQ ID NO: 496760 - RNA, 19 nt, Artificial Sequence
  Description of Artificial Sequence: Synthetic oligonucleotide
ucggaagcacgaguuucau

SEQ ID NO: 496761 - RNA, 19 nt, Artificial Sequence
  Description of Artificial Sequence: Synthetic oligonucleotide
ggagggcguggucuauagg

SEQ ID NO: 496762 - RNA, 19 nt, Artificial Sequence
  Description of Artificial Sequence: Synthetic oligonucleotide
guuuagugccaguccucaa

SEQ ID NO: 496763 - RNA, 19 nt, Artificial Sequence
  Description of Artificial Sequence: Synthetic oligonucleotide
cccgcucauagucaagaac

SEQ ID NO: 496764 - RNA, 19 nt, Artificial Sequence
  Description of Artificial Sequence: Synthetic oligonucleotide
uaucagacuuccggucaua

SEQ ID NO: 496765 - RNA, 19 nt, Artificial Sequence
  Description of Artificial Sequence: Synthetic oligonucleotide
cagaaguguccaucuccca

SEQ ID NO: 496766 - RNA, 19 nt, Artificial Sequence
  Description of Artificial Sequence: Synthetic oligonucleotide
ccucucauuaugacaacaa

SEQ ID NO: 496767 - RNA, 19 nt, Artificial Sequence
  Description of Artificial Sequence: Synthetic oligonucleotide
gguuaucggcacucauuuc

SEQ ID NO: 496768 - RNA, 19 nt, Artificial Sequence
  Description of Artificial Sequence: Synthetic oligonucleotide
ccauucugcuggcaaucgc

SEQ ID NO: 496769 - RNA, 19 nt, Artificial Sequence
  Description of Artificial Sequence: Synthetic oligonucleotide
gccauguaucuccucuuuc

SEQ ID NO: 496770 - RNA, 19 nt, Artificial Sequence
  Description of Artificial Sequence: Synthetic oligonucleotide
gcauucuguagucuugagu

SEQ ID NO: 496771 - RNA, 19 nt, Artificial Sequence
  Description of Artificial Sequence: Synthetic oligonucleotide
ggcuuuaucgugaaaguuu

SEQ ID NO: 496772 - RNA, 19 nt, Artificial Sequence
  Description of Artificial Sequence: Synthetic oligonucleotide
uugguucgauugagggcuu

SEQ ID NO: 496773 - RNA, 19 nt, Artificial Sequence
  Description of Artificial Sequence: Synthetic oligonucleotide
ucucgagaucugcguucuc

SEQ ID NO: 496774 - RNA, 19 nt, Artificial Sequence
  Description of Artificial Sequence: Synthetic oligonucleotide
cugguuaucggcacucauu

SEQ ID NO: 496775 - RNA, 19 nt, Artificial Sequence
  Description of Artificial Sequence: Synthetic oligonucleotide
ugccacaagucugguuauc

SEQ ID NO: 496776 - RNA, 19 nt, Artificial Sequence
  Description of Artificial Sequence: Synthetic oligonucleotide
uguggagcagagggucuua

SEQ ID NO: 496777 - RNA, 19 nt, Artificial Sequence
  Description of Artificial Sequence: Synthetic oligonucleotide
guaucagacuuccggucau

SEQ ID NO: 496778 - RNA, 19 nt, Artificial Sequence
  Description of Artificial Sequence: Synthetic oligonucleotide
cuggauacucucgaauccu

SEQ ID NO: 496779 - RNA, 19 nt, Artificial Sequence
  Description of Artificial Sequence: Synthetic oligonucleotide
cuccaaaacuggucaaaau

SEQ ID NO: 496780 - RNA, 19 nt, Artificial Sequence
  Description of Artificial Sequence: Synthetic oligonucleotide
agcaaggaacggaugucua

SEQ ID NO: 496781 - RNA, 19 nt, Artificial Sequence
  Description of Artificial Sequence: Synthetic oligonucleotide
gcucggaagcacgaguuuc

SEQ ID NO: 496782 - RNA, 19 nt, Artificial Sequence
  Description of Artificial Sequence: Synthetic oligonucleotide
aggccuuggucagagucua

SEQ ID NO: 496783 - RNA, 19 nt, Artificial Sequence
  Description of Artificial Sequence: Synthetic oligonucleotide
acgcaucaugugacgaggu

SEQ ID NO: 496784 - RNA, 19 nt, Artificial Sequence
  Description of Artificial Sequence: Synthetic oligonucleotide
cuuacccauaggagggcgu

SEQ ID NO: 496785 - RNA, 19 nt, Artificial Sequence
  Description of Artificial Sequence: Synthetic oligonucleotide
cuaacccucccuccccaaa

SEQ ID NO: 496786 - RNA, 19 nt, Artificial Sequence
  Description of Artificial Sequence: Synthetic oligonucleotide
cguaucagacuuccgguca

SEQ ID NO: 496787 - RNA, 19 nt, Artificial Sequence
  Description of Artificial Sequence: Synthetic oligonucleotide
ccaguacaaucaacuacca

SEQ ID NO: 496788 - RNA, 19 nt, Artificial Sequence
  Description of Artificial Sequence: Synthetic oligonucleotide
uaggagggcguggucuaua

SEQ ID NO: 496789 - RNA, 19 nt, Artificial Sequence
  Description of Artificial Sequence: Synthetic oligonucleotide
guggauggucggccaucug

SEQ ID NO: 496790 - RNA, 19 nt, Artificial Sequence
  Description of Artificial Sequence: Synthetic oligonucleotide
ggggauacuggguaacuuu

SEQ ID NO: 496791 - RNA, 19 nt, Artificial Sequence
  Description of Artificial Sequence: Synthetic oligonucleotide
ggguggucguaucagacuu

SEQ ID NO: 496792 - RNA, 19 nt, Artificial Sequence
  Description of Artificial Sequence: Synthetic oligonucleotide
guuuccguuuagugccagu

SEQ ID NO: 496793 - RNA, 19 nt, Artificial Sequence
  Description of Artificial Sequence: Synthetic oligonucleotide
gcacgaguuucauagucau

SEQ ID NO: 496794 - RNA, 19 nt, Artificial Sequence
  Description of Artificial Sequence: Synthetic oligonucleotide
aauuugcaucggaccccau

SEQ ID NO: 496795 - RNA, 19 nt, Artificial Sequence
  Description of Artificial Sequence: Synthetic oligonucleotide
auaggagggcguggucuau

SEQ ID NO: 496796 - RNA, 19 nt, Artificial Sequence
  Description of Artificial Sequence: Synthetic oligonucleotide
ggcaaucgccucccaguca

SEQ ID NO: 496797 - RNA, 19 nt, Artificial Sequence
  Description of Artificial Sequence: Synthetic oligonucleotide
acguuuccguuuagugcca

SEQ ID NO: 496798 - RNA, 19 nt, Artificial Sequence
  Description of Artificial Sequence: Synthetic oligonucleotide
ccguuuagugccaguccuc

SEQ ID NO: 496799 - RNA, 19 nt, Artificial Sequence
  Description of Artificial Sequence: Synthetic oligonucleotide
ccuacggauccccaccaga

SEQ ID NO: 496800 - RNA, 19 nt, Artificial Sequence
  Description of Artificial Sequence: Synthetic oligonucleotide
ccagucccauucugucagg

SEQ ID NO: 496801 - RNA, 19 nt, Artificial Sequence
  Description of Artificial Sequence: Synthetic oligonucleotide
gggcggauauaucccaggu

SEQ ID NO: 496802 - RNA, 19 nt, Artificial Sequence
  Description of Artificial Sequence: Synthetic oligonucleotide
ggauggccuaucaaauccu

SEQ ID NO: 496803 - RNA, 19 nt, Artificial Sequence
  Description of Artificial Sequence: Synthetic oligonucleotide
cauauuccaucaccuucuu

SEQ ID NO: 496804 - RNA, 19 nt, Artificial Sequence
  Description of Artificial Sequence: Synthetic oligonucleotide
augugacgaggugcaguuu

SEQ ID NO: 496805 - RNA, 19 nt, Artificial Sequence
  Description of Artificial Sequence: Synthetic oligonucleotide
cguuuagugccaguccuca

SEQ ID NO: 496806 - RNA, 19 nt, Artificial Sequence
  Description of Artificial Sequence: Synthetic oligonucleotide
ccaguucgcuuuccucuuc

SEQ ID NO: 496807 - RNA, 19 nt, Artificial Sequence
  Description of Artificial Sequence: Synthetic oligonucleotide
cucaacccguggagcugga

SEQ ID NO: 496808 - RNA, 19 nt, Artificial Sequence
  Description of Artificial Sequence: Synthetic oligonucleotide
caucggcuuuaucgugaaa

SEQ ID NO: 496809 - RNA, 19 nt, Artificial Sequence
  Description of Artificial Sequence: Synthetic oligonucleotide
gguggauggucggccaucu

SEQ ID NO: 496810 - RNA, 19 nt, Artificial Sequence
  Description of Artificial Sequence: Synthetic oligonucleotide
cccgccauguaucuccucu

SEQ ID NO: 496811 - RNA, 19 nt, Artificial Sequence
  Description of Artificial Sequence: Synthetic oligonucleotide
ccuaucaaauccuccucuu

SEQ ID NO: 496812 - RNA, 19 nt, Artificial Sequence
  Description of Artificial Sequence: Synthetic oligonucleotide
ccggucauaggauggccua

SEQ ID NO: 496813 - RNA, 19 nt, Artificial Sequence
  Description of Artificial Sequence: Synthetic oligonucleotide
gugguggauggucggccau

SEQ ID NO: 496814 - RNA, 19 nt, Artificial Sequence
  Description of Artificial Sequence: Synthetic oligonucleotide
gauccccaccagacuucaa

SEQ ID NO: 496815 - RNA, 19 nt, Artificial Sequence
  Description of Artificial Sequence: Synthetic oligonucleotide
cguggucuauaggauccug

SEQ ID NO: 496816 - RNA, 19 nt, Artificial Sequence
  Description of Artificial Sequence: Synthetic oligonucleotide
caaaaccuauggcccuuuu

SEQ ID NO: 496817 - RNA, 19 nt, Artificial Sequence
  Description of Artificial Sequence: Synthetic oligonucleotide
cgaucccgcucauagucaa

SEQ ID NO: 496818 - RNA, 19 nt, Artificial Sequence
  Description of Artificial Sequence: Synthetic oligonucleotide
cguuuccguuuagugccag

SEQ ID NO: 496819 - RNA, 19 nt, Artificial Sequence
  Description of Artificial Sequence: Synthetic oligonucleotide
gcgguacgucuccuccauc

SEQ ID NO: 496820 - RNA, 19 nt, Artificial Sequence
  Description of Artificial Sequence: Synthetic oligonucleotide
ccucugacugagaaccauu

SEQ ID NO: 496821 - RNA, 19 nt, Artificial Sequence
  Description of Artificial Sequence: Synthetic oligonucleotide
ggcucggaagcacgaguuu

SEQ ID NO: 496822 - RNA, 19 nt, Artificial Sequence
  Description of Artificial Sequence: Synthetic oligonucleotide
gguucgauugagggcuuuu

SEQ ID NO: 496823 - RNA, 19 nt, Artificial Sequence
  Description of Artificial Sequence: Synthetic oligonucleotide
ccgggcucggaagcacgag

SEQ ID NO: 496824 - RNA, 19 nt, Artificial Sequence
  Description of Artificial Sequence: Synthetic oligonucleotide
cccgggcucggaagcacga

SEQ ID NO: 496825 - RNA, 19 nt, Artificial Sequence
  Description of Artificial Sequence: Synthetic oligonucleotide
gcgaaccaccuuagaggaa

SEQ ID NO: 496826 - RNA, 19 nt, Artificial Sequence
  Description of Artificial Sequence: Synthetic oligonucleotide
cgaggugcaguuucccaau

SEQ ID NO: 496827 - RNA, 19 nt, Artificial Sequence
  Description of Artificial Sequence: Synthetic oligonucleotide
cuggugcgguacgucuccu

SEQ ID NO: 496828 - RNA, 19 nt, Artificial Sequence
  Description of Artificial Sequence: Synthetic oligonucleotide
gcguggucuauaggauccu

SEQ ID NO: 496829 - RNA, 19 nt, Artificial Sequence
  Description of Artificial Sequence: Synthetic oligonucleotide
cccauucugucaggaacau

SEQ ID NO: 496830 - RNA, 19 nt, Artificial Sequence
  Description of Artificial Sequence: Synthetic oligonucleotide
cgggcucggaagcacgagu

SEQ ID NO: 496831 - RNA, 19 nt, Artificial Sequence
  Description of Artificial Sequence: Synthetic oligonucleotide
ccgccauguaucuccucuu

SEQ ID NO: 496832 - RNA, 19 nt, Artificial Sequence
  Description of Artificial Sequence: Synthetic oligonucleotide
cgccauguaucuccucuuu

SEQ ID NO: 496833 - RNA, 19 nt, Artificial Sequence
  Description of Artificial Sequence: Synthetic oligonucleotide
uauaauguaacaaaguugg

SEQ ID NO: 496834 - RNA, 19 nt, Artificial Sequence
  Description of Artificial Sequence: Synthetic oligonucleotide
uggauaauuaaccagagca

SEQ ID NO: 496835 - RNA, 19 nt, Artificial Sequence
  Description of Artificial Sequence: Synthetic oligonucleotide
aacaacaauguacuguugc

SEQ ID NO: 496836 - RNA, 19 nt, Artificial Sequence
  Description of Artificial Sequence: Synthetic oligonucleotide
aacuaauuuagcuucuuac

SEQ ID NO: 496837 - RNA, 19 nt, Artificial Sequence
  Description of Artificial Sequence: Synthetic oligonucleotide
uuauacagcgacaacaagg

SEQ ID NO: 496838 - RNA, 19 nt, Artificial Sequence
  Description of Artificial Sequence: Synthetic oligonucleotide
aauauagugaaguagcaga

SEQ ID NO: 496839 - RNA, 19 nt, Artificial Sequence
  Description of Artificial Sequence: Synthetic oligonucleotide
cuaauaucagcuuuggagg

SEQ ID NO: 496840 - RNA, 19 nt, Artificial Sequence
  Description of Artificial Sequence: Synthetic oligonucleotide
auauauguuacacaccuuc

SEQ ID NO: 496841 - RNA, 19 nt, Artificial Sequence
  Description of Artificial Sequence: Synthetic oligonucleotide
ugaauuauuaaaauagauc

SEQ ID NO: 496842 - RNA, 19 nt, Artificial Sequence
  Description of Artificial Sequence: Synthetic oligonucleotide
aauuuagcuucuuacgauc

SEQ ID NO: 496843 - RNA, 19 nt, Artificial Sequence
  Description of Artificial Sequence: Synthetic oligonucleotide
auauauauguuacacaccu

SEQ ID NO: 496844 - RNA, 19 nt, Artificial Sequence
  Description of Artificial Sequence: Synthetic oligonucleotide
aauagagccaaacuaauuu

SEQ ID NO: 496845 - RNA, 19 nt, Artificial Sequence
  Description of Artificial Sequence: Synthetic oligonucleotide
aaauaguccaaauaccggu

SEQ ID NO: 496846 - RNA, 19 nt, Artificial Sequence
  Description of Artificial Sequence: Synthetic oligonucleotide
uugagggaaacuuugaagc

SEQ ID NO: 496847 - RNA, 19 nt, Artificial Sequence
  Description of Artificial Sequence: Synthetic oligonucleotide
uaauguuugacucagccaa

SEQ ID NO: 496848 - RNA, 19 nt, Artificial Sequence
  Description of Artificial Sequence: Synthetic oligonucleotide
uguaauguuugacucagcc

SEQ ID NO: 496849 - RNA, 19 nt, Artificial Sequence
  Description of Artificial Sequence: Synthetic oligonucleotide
uuugacucagccaauaacu

SEQ ID NO: 496850 - RNA, 19 nt, Artificial Sequence
  Description of Artificial Sequence: Synthetic oligonucleotide
cuuacgaucaauaaaguca

SEQ ID NO: 496851 - RNA, 19 nt, Artificial Sequence
  Description of Artificial Sequence: Synthetic oligonucleotide
acugacacaauuaauauag

SEQ ID NO: 496852 - RNA, 19 nt, Artificial Sequence
  Description of Artificial Sequence: Synthetic oligonucleotide
aagugcaacaacaauguac

SEQ ID NO: 496853 - RNA, 19 nt, Artificial Sequence
  Description of Artificial Sequence: Synthetic oligonucleotide
aauuuucucacacgaaaug

SEQ ID NO: 496854 - RNA, 19 nt, Artificial Sequence
  Description of Artificial Sequence: Synthetic oligonucleotide
aagagauuggucugguaac

SEQ ID NO: 496855 - RNA, 19 nt, Artificial Sequence
  Description of Artificial Sequence: Synthetic oligonucleotide
aaauuauugcgauaccugu

SEQ ID NO: 496856 - RNA, 19 nt, Artificial Sequence
  Description of Artificial Sequence: Synthetic oligonucleotide
cauagcucaauagagaagg

SEQ ID NO: 496857 - RNA, 19 nt, Artificial Sequence
  Description of Artificial Sequence: Synthetic oligonucleotide
aaauaaaugguugauguaa

SEQ ID NO: 496858 - RNA, 19 nt, Artificial Sequence
  Description of Artificial Sequence: Synthetic oligonucleotide
agagagaugcuucuuuccc

SEQ ID NO: 496859 - RNA, 19 nt, Artificial Sequence
  Description of Artificial Sequence: Synthetic oligonucleotide
uguagaauccuccacugca

SEQ ID NO: 496860 - RNA, 19 nt, Artificial Sequence
  Description of Artificial Sequence: Synthetic oligonucleotide
aguaagauugccucaucac

SEQ ID NO: 496861 - RNA, 19 nt, Artificial Sequence
  Description of Artificial Sequence: Synthetic oligonucleotide
uacguagucaaucaacuga

SEQ ID NO: 496862 - RNA, 19 nt, Artificial Sequence
  Description of Artificial Sequence: Synthetic oligonucleotide
aauauccguguguuuauag

SEQ ID NO: 496863 - RNA, 19 nt, Artificial Sequence
  Description of Artificial Sequence: Synthetic oligonucleotide
aacuuauacagcgacaaca

SEQ ID NO: 496864 - RNA, 19 nt, Artificial Sequence
  Description of Artificial Sequence: Synthetic oligonucleotide
uguguuuauagcauuccca

SEQ ID NO: 496865 - RNA, 19 nt, Artificial Sequence
  Description of Artificial Sequence: Synthetic oligonucleotide
auauccguguguuuauagc

SEQ ID NO: 496866 - RNA, 19 nt, Artificial Sequence
  Description of Artificial Sequence: Synthetic oligonucleotide
auauuggaagaucauaacu

SEQ ID NO: 496867 - RNA, 19 nt, Artificial Sequence
  Description of Artificial Sequence: Synthetic oligonucleotide
auagcauucccaaacuugc

SEQ ID NO: 496868 - RNA, 19 nt, Artificial Sequence
  Description of Artificial Sequence: Synthetic oligonucleotide
ugacacaauuaauauagug

SEQ ID NO: 496869 - RNA, 19 nt, Artificial Sequence
  Description of Artificial Sequence: Synthetic oligonucleotide
ccuaauaucagcuuuggag

SEQ ID NO: 496870 - RNA, 19 nt, Artificial Sequence
  Description of Artificial Sequence: Synthetic oligonucleotide
aagcguauugcaaucacgg

SEQ ID NO: 496871 - RNA, 19 nt, Artificial Sequence
  Description of Artificial Sequence: Synthetic oligonucleotide
uuacgaucaauaaagucaa

SEQ ID NO: 496872 - RNA, 19 nt, Artificial Sequence
  Description of Artificial Sequence: Synthetic oligonucleotide
uguuagcagaauuuagugc

SEQ ID NO: 496873 - RNA, 19 nt, Artificial Sequence
  Description of Artificial Sequence: Synthetic oligonucleotide
auuuucucacacgaaaugg

SEQ ID NO: 496874 - RNA, 19 nt, Artificial Sequence
  Description of Artificial Sequence: Synthetic oligonucleotide
auaacugagugagaacucc

SEQ ID NO: 496875 - RNA, 19 nt, Artificial Sequence
  Description of Artificial Sequence: Synthetic oligonucleotide
aguaccuuggauaauuaac

SEQ ID NO: 496876 - RNA, 19 nt, Artificial Sequence
  Description of Artificial Sequence: Synthetic oligonucleotide
aaguaguucugucagacuu

SEQ ID NO: 496877 - RNA, 19 nt, Artificial Sequence
  Description of Artificial Sequence: Synthetic oligonucleotide
ucagauaugagaguuucug

SEQ ID NO: 496878 - RNA, 19 nt, Artificial Sequence
  Description of Artificial Sequence: Synthetic oligonucleotide
gaagcuaaugaauggaauc

SEQ ID NO: 496879 - RNA, 19 nt, Artificial Sequence
  Description of Artificial Sequence: Synthetic oligonucleotide
caagauuuggggaucaaug

SEQ ID NO: 496880 - RNA, 19 nt, Artificial Sequence
  Description of Artificial Sequence: Synthetic oligonucleotide
uagagccaaacuaauuuag

SEQ ID NO: 496881 - RNA, 19 nt, Artificial Sequence
  Description of Artificial Sequence: Synthetic oligonucleotide
uuaaccacagaaucuucag

SEQ ID NO: 496882 - RNA, 19 nt, Artificial Sequence
  Description of Artificial Sequence: Synthetic oligonucleotide
guagucaaucaacugaacc

SEQ ID NO: 496883 - RNA, 19 nt, Artificial Sequence
  Description of Artificial Sequence: Synthetic oligonucleotide
aaccccucuuguaagaagc

SEQ ID NO: 496884 - RNA, 19 nt, Artificial Sequence
  Description of Artificial Sequence: Synthetic oligonucleotide
auugcaaccaaccaacgau

SEQ ID NO: 496885 - RNA, 19 nt, Artificial Sequence
  Description of Artificial Sequence: Synthetic oligonucleotide
agauaugagaguuucugga

SEQ ID NO: 496886 - RNA, 19 nt, Artificial Sequence
  Description of Artificial Sequence: Synthetic oligonucleotide
uccuuacaggcaaagauac

SEQ ID NO: 496887 - RNA, 19 nt, Artificial Sequence
  Description of Artificial Sequence: Synthetic oligonucleotide
aguaaaaccccucuuguaa

SEQ ID NO: 496888 - RNA, 19 nt, Artificial Sequence
  Description of Artificial Sequence: Synthetic oligonucleotide
ugaccgacaagaaaagcca

SEQ ID NO: 496889 - RNA, 19 nt, Artificial Sequence
  Description of Artificial Sequence: Synthetic oligonucleotide
uggacauccauaagcaaug

SEQ ID NO: 496890 - RNA, 19 nt, Artificial Sequence
  Description of Artificial Sequence: Synthetic oligonucleotide
auguuagcagaauuuagug

SEQ ID NO: 496891 - RNA, 19 nt, Artificial Sequence
  Description of Artificial Sequence: Synthetic oligonucleotide
ucaaauuauugcgauaccu

SEQ ID NO: 496892 - RNA, 19 nt, Artificial Sequence
  Description of Artificial Sequence: Synthetic oligonucleotide
uaauauagugaaguagcag

SEQ ID NO: 496893 - RNA, 19 nt, Artificial Sequence
  Description of Artificial Sequence: Synthetic oligonucleotide
guugagggaaacuuugaag

SEQ ID NO: 496894 - RNA, 19 nt, Artificial Sequence
  Description of Artificial Sequence: Synthetic oligonucleotide
uaaagaagagaggugcuag

SEQ ID NO: 496895 - RNA, 19 nt, Artificial Sequence
  Description of Artificial Sequence: Synthetic oligonucleotide
uucccauuuuaccugaaga

SEQ ID NO: 496896 - RNA, 19 nt, Artificial Sequence
  Description of Artificial Sequence: Synthetic oligonucleotide
auaccauauacauucuucu

SEQ ID NO: 496897 - RNA, 19 nt, Artificial Sequence
  Description of Artificial Sequence: Synthetic oligonucleotide
uuuucucacacgaaauggu

SEQ ID NO: 496898 - RNA, 19 nt, Artificial Sequence
  Description of Artificial Sequence: Synthetic oligonucleotide
auaagcaaugaaccauaac

SEQ ID NO: 496899 - RNA, 19 nt, Artificial Sequence
  Description of Artificial Sequence: Synthetic oligonucleotide
cuuggaguugccaucacug

SEQ ID NO: 496900 - RNA, 19 nt, Artificial Sequence
  Description of Artificial Sequence: Synthetic oligonucleotide
gaggcaggcucuuauacag

SEQ ID NO: 496901 - RNA, 19 nt, Artificial Sequence
  Description of Artificial Sequence: Synthetic oligonucleotide
guuacacaccuucucauag

SEQ ID NO: 496902 - RNA, 19 nt, Artificial Sequence
  Description of Artificial Sequence: Synthetic oligonucleotide
ucuuuauucagugaggcuu

SEQ ID NO: 496903 - RNA, 19 nt, Artificial Sequence
  Description of Artificial Sequence: Synthetic oligonucleotide
ucugcaaaaguugagggaa

SEQ ID NO: 496904 - RNA, 19 nt, Artificial Sequence
  Description of Artificial Sequence: Synthetic oligonucleotide
uauauguuacacaccuucu

SEQ ID NO: 496905 - RNA, 19 nt, Artificial Sequence
  Description of Artificial Sequence: Synthetic oligonucleotide
ucucacacgaaaugguuug

SEQ ID NO: 496906 - RNA, 19 nt, Artificial Sequence
  Description of Artificial Sequence: Synthetic oligonucleotide
ugcauagcucaauagagaa

SEQ ID NO: 496907 - RNA, 19 nt, Artificial Sequence
  Description of Artificial Sequence: Synthetic oligonucleotide
uucuuguaauguuugacuc

SEQ ID NO: 496908 - RNA, 19 nt, Artificial Sequence
  Description of Artificial Sequence: Synthetic oligonucleotide
aaaaguaccuuggauaauu

SEQ ID NO: 496909 - RNA, 19 nt, Artificial Sequence
  Description of Artificial Sequence: Synthetic oligonucleotide
ugcaaucacggacagccag

SEQ ID NO: 496910 - RNA, 19 nt, Artificial Sequence
  Description of Artificial Sequence: Synthetic oligonucleotide
agaacacuacacuugaaau

SEQ ID NO: 496911 - RNA, 19 nt, Artificial Sequence
  Description of Artificial Sequence: Synthetic oligonucleotide
agugcaacaacaauguacu

SEQ ID NO: 496912 - RNA, 19 nt, Artificial Sequence
  Description of Artificial Sequence: Synthetic oligonucleotide
uuucaggcccugaaaaccc

SEQ ID NO: 496913 - RNA, 19 nt, Artificial Sequence
  Description of Artificial Sequence: Synthetic oligonucleotide
ugguugauguaaagaagag

SEQ ID NO: 496914 - RNA, 19 nt, Artificial Sequence
  Description of Artificial Sequence: Synthetic oligonucleotide
ucuuacgaucaauaaaguc

SEQ ID NO: 496915 - RNA, 19 nt, Artificial Sequence
  Description of Artificial Sequence: Synthetic oligonucleotide
ugcuauucgcagaucaucu

SEQ ID NO: 496916 - RNA, 19 nt, Artificial Sequence
  Description of Artificial Sequence: Synthetic oligonucleotide
ugcacgugaucauccaugg

SEQ ID NO: 496917 - RNA, 19 nt, Artificial Sequence
  Description of Artificial Sequence: Synthetic oligonucleotide
guuagcagaauuuagugcu

SEQ ID NO: 496918 - RNA, 19 nt, Artificial Sequence
  Description of Artificial Sequence: Synthetic oligonucleotide
cuaauuuagcuucuuacga

SEQ ID NO: 496919 - RNA, 19 nt, Artificial Sequence
  Description of Artificial Sequence: Synthetic oligonucleotide
aagccaauagagccaaacu

SEQ ID NO: 496920 - RNA, 19 nt, Artificial Sequence
  Description of Artificial Sequence: Synthetic oligonucleotide
cuuguaauguuugacucag

SEQ ID NO: 496921 - RNA, 19 nt, Artificial Sequence
  Description of Artificial Sequence: Synthetic oligonucleotide
ugcauucuauguuagcaga

SEQ ID NO: 496922 - RNA, 19 nt, Artificial Sequence
  Description of Artificial Sequence: Synthetic oligonucleotide
gcugguauaacugagugag

SEQ ID NO: 496923 - RNA, 19 nt, Artificial Sequence
  Description of Artificial Sequence: Synthetic oligonucleotide
uuagagagcggccuuuacu

SEQ ID NO: 496924 - RNA, 19 nt, Artificial Sequence
  Description of Artificial Sequence: Synthetic oligonucleotide
uucuauguuagcagaauuu

SEQ ID NO: 496925 - RNA, 19 nt, Artificial Sequence
  Description of Artificial Sequence: Synthetic oligonucleotide
uaauuuagcuucuuacgau

SEQ ID NO: 496926 - RNA, 19 nt, Artificial Sequence
  Description of Artificial Sequence: Synthetic oligonucleotide
gguguggacauccauaagc

SEQ ID NO: 496927 - RNA, 19 nt, Artificial Sequence
  Description of Artificial Sequence: Synthetic oligonucleotide
uggggaucaauguauacuc

SEQ ID NO: 496928 - RNA, 19 nt, Artificial Sequence
  Description of Artificial Sequence: Synthetic oligonucleotide
ugaaguaguucugucagac

SEQ ID NO: 496929 - RNA, 19 nt, Artificial Sequence
  Description of Artificial Sequence: Synthetic oligonucleotide
acacgaaaugguuugacau

SEQ ID NO: 496930 - RNA, 19 nt, Artificial Sequence
  Description of Artificial Sequence: Synthetic oligonucleotide
caauauuggaagaucauaa

SEQ ID NO: 496931 - RNA, 19 nt, Artificial Sequence
  Description of Artificial Sequence: Synthetic oligonucleotide
ugcauucccauuuuaccug

SEQ ID NO: 496932 - RNA, 19 nt, Artificial Sequence
  Description of Artificial Sequence: Synthetic oligonucleotide
uucaccucagagaagcuaa

SEQ ID NO: 496933 - RNA, 19 nt, Artificial Sequence
  Description of Artificial Sequence: Synthetic oligonucleotide
uucugaaguaguucuguca

SEQ ID NO: 496934 - RNA, 19 nt, Artificial Sequence
  Description of Artificial Sequence: Synthetic oligonucleotide
uugcaguaggaaauaacac

SEQ ID NO: 496935 - RNA, 19 nt, Artificial Sequence
  Description of Artificial Sequence: Synthetic oligonucleotide
guaaaaccccucuuguaag

SEQ ID NO: 496936 - RNA, 19 nt, Artificial Sequence
  Description of Artificial Sequence: Synthetic oligonucleotide
uacagcgacaacaaggcuu

SEQ ID NO: 496937 - RNA, 19 nt, Artificial Sequence
  Description of Artificial Sequence: Synthetic oligonucleotide
aggaugguggacuaaauuu

SEQ ID NO: 496938 - RNA, 19 nt, Artificial Sequence
  Description of Artificial Sequence: Synthetic oligonucleotide
aaaguuucaggcccugaaa

SEQ ID NO: 496939 - RNA, 19 nt, Artificial Sequence
  Description of Artificial Sequence: Synthetic oligonucleotide
uuuagucaguaaauauaac

SEQ ID NO: 496940 - RNA, 19 nt, Artificial Sequence
  Description of Artificial Sequence: Synthetic oligonucleotide
uuggauaauuaaccagagc

SEQ ID NO: 496941 - RNA, 19 nt, Artificial Sequence
  Description of Artificial Sequence: Synthetic oligonucleotide
uaauguaacaaaguugguu

SEQ ID NO: 496942 - RNA, 19 nt, Artificial Sequence
  Description of Artificial Sequence: Synthetic oligonucleotide
ucuaucggaagugauauuu

SEQ ID NO: 496943 - RNA, 19 nt, Artificial Sequence
  Description of Artificial Sequence: Synthetic oligonucleotide
aaaccccucuuguaagaag

SEQ ID NO: 496944 - RNA, 19 nt, Artificial Sequence
  Description of Artificial Sequence: Synthetic oligonucleotide
auguguagaauccuccacu

SEQ ID NO: 496945 - RNA, 19 nt, Artificial Sequence
  Description of Artificial Sequence: Synthetic oligonucleotide
agagccaaacuaauuuagc

SEQ ID NO: 496946 - RNA, 19 nt, Artificial Sequence
  Description of Artificial Sequence: Synthetic oligonucleotide
uugcacgugaucauccaug

SEQ ID NO: 496947 - RNA, 19 nt, Artificial Sequence
  Description of Artificial Sequence: Synthetic oligonucleotide
uaaauuuaagcuguuucua

SEQ ID NO: 496948 - RNA, 19 nt, Artificial Sequence
  Description of Artificial Sequence: Synthetic oligonucleotide
gaaaugguuugacauuuuc

SEQ ID NO: 496949 - RNA, 19 nt, Artificial Sequence
  Description of Artificial Sequence: Synthetic oligonucleotide
uauugcgauaccuguauau

SEQ ID NO: 496950 - RNA, 19 nt, Artificial Sequence
  Description of Artificial Sequence: Synthetic oligonucleotide
acuguccuuucuucggggc

SEQ ID NO: 496951 - RNA, 19 nt, Artificial Sequence
  Description of Artificial Sequence: Synthetic oligonucleotide
accagagcaacuugccaac

SEQ ID NO: 496952 - RNA, 19 nt, Artificial Sequence
  Description of Artificial Sequence: Synthetic oligonucleotide
gauaccuguauauaaugua

SEQ ID NO: 496953 - RNA, 19 nt, Artificial Sequence
  Description of Artificial Sequence: Synthetic oligonucleotide
uauaacugagugagaacuc

SEQ ID NO: 496954 - RNA, 19 nt, Artificial Sequence
  Description of Artificial Sequence: Synthetic oligonucleotide
caagcguauugcaaucacg

SEQ ID NO: 496955 - RNA, 19 nt, Artificial Sequence
  Description of Artificial Sequence: Synthetic oligonucleotide
aaacuaauuuagcuucuua

SEQ ID NO: 496956 - RNA, 19 nt, Artificial Sequence
  Description of Artificial Sequence: Synthetic oligonucleotide
gugaccgacaagaaaagcc

SEQ ID NO: 496957 - RNA, 19 nt, Artificial Sequence
  Description of Artificial Sequence: Synthetic oligonucleotide
ucuauguuagcagaauuua

SEQ ID NO: 496958 - RNA, 19 nt, Artificial Sequence
  Description of Artificial Sequence: Synthetic oligonucleotide
aaauaccgguuccauuucu

SEQ ID NO: 496959 - RNA, 19 nt, Artificial Sequence
  Description of Artificial Sequence: Synthetic oligonucleotide
ugcuucguaguugggagcg

SEQ ID NO: 496960 - RNA, 19 nt, Artificial Sequence
  Description of Artificial Sequence: Synthetic oligonucleotide
agaacuuauacagcgacaa

SEQ ID NO: 496961 - RNA, 19 nt, Artificial Sequence
  Description of Artificial Sequence: Synthetic oligonucleotide
aacaccaauauuggaagau

SEQ ID NO: 496962 - RNA, 19 nt, Artificial Sequence
  Description of Artificial Sequence: Synthetic oligonucleotide
ucccauuuuaccugaagau

SEQ ID NO: 496963 - RNA, 19 nt, Artificial Sequence
  Description of Artificial Sequence: Synthetic oligonucleotide
uggucugguaacuaucacu

SEQ ID NO: 496964 - RNA, 19 nt, Artificial Sequence
  Description of Artificial Sequence: Synthetic oligonucleotide
uaguccaaauaccgguucc

SEQ ID NO: 496965 - RNA, 19 nt, Artificial Sequence
  Description of Artificial Sequence: Synthetic oligonucleotide
augguugauguaaagaaga

SEQ ID NO: 496966 - RNA, 19 nt, Artificial Sequence
  Description of Artificial Sequence: Synthetic oligonucleotide
auaccgguuccauuucuuc

SEQ ID NO: 496967 - RNA, 19 nt, Artificial Sequence
  Description of Artificial Sequence: Synthetic oligonucleotide
gaauccaggucaaaagcug

SEQ ID NO: 496968 - RNA, 19 nt, Artificial Sequence
  Description of Artificial Sequence: Synthetic oligonucleotide
aaggaugguggacuaaauu

SEQ ID NO: 496969 - RNA, 19 nt, Artificial Sequence
  Description of Artificial Sequence: Synthetic oligonucleotide
uaaaaccccucuuguaaga

SEQ ID NO: 496970 - RNA, 19 nt, Artificial Sequence
  Description of Artificial Sequence: Synthetic oligonucleotide
ugacucagccaauaacuga

SEQ ID NO: 496971 - RNA, 19 nt, Artificial Sequence
  Description of Artificial Sequence: Synthetic oligonucleotide
uccauaagcaaugaaccau

SEQ ID NO: 496972 - RNA, 19 nt, Artificial Sequence
  Description of Artificial Sequence: Synthetic oligonucleotide
ggaagugauauuucacucc

SEQ ID NO: 496973 - RNA, 19 nt, Artificial Sequence
  Description of Artificial Sequence: Synthetic oligonucleotide
ugcgauaccuguauauaau

SEQ ID NO: 496974 - RNA, 19 nt, Artificial Sequence
  Description of Artificial Sequence: Synthetic oligonucleotide
aaugcuucacaggaguaaa

SEQ ID NO: 496975 - RNA, 19 nt, Artificial Sequence
  Description of Artificial Sequence: Synthetic oligonucleotide
ugagaaaaucagagagaug

SEQ ID NO: 496976 - RNA, 19 nt, Artificial Sequence
  Description of Artificial Sequence: Synthetic oligonucleotide
aaacccucugaaaauaaau

SEQ ID NO: 496977 - RNA, 19 nt, Artificial Sequence
  Description of Artificial Sequence: Synthetic oligonucleotide
uggaccuaauaucagcuuu

SEQ ID NO: 496978 - RNA, 19 nt, Artificial Sequence
  Description of Artificial Sequence: Synthetic oligonucleotide
aaguaccuuggauaauuaa

SEQ ID NO: 496979 - RNA, 19 nt, Artificial Sequence
  Description of Artificial Sequence: Synthetic oligonucleotide
uaacugagugagaacucca

SEQ ID NO: 496980 - RNA, 19 nt, Artificial Sequence
  Description of Artificial Sequence: Synthetic oligonucleotide
auagagccaaacuaauuua

SEQ ID NO: 496981 - RNA, 19 nt, Artificial Sequence
  Description of Artificial Sequence: Synthetic oligonucleotide
gcucaauagagaaggaugg

SEQ ID NO: 496982 - RNA, 19 nt, Artificial Sequence
  Description of Artificial Sequence: Synthetic oligonucleotide
ugagccucaguaagauugc

SEQ ID NO: 496983 - RNA, 19 nt, Artificial Sequence
  Description of Artificial Sequence: Synthetic oligonucleotide
auccauaagcaaugaacca

SEQ ID NO: 496984 - RNA, 19 nt, Artificial Sequence
  Description of Artificial Sequence: Synthetic oligonucleotide
guucaagauacuggcaucc

SEQ ID NO: 496985 - RNA, 19 nt, Artificial Sequence
  Description of Artificial Sequence: Synthetic oligonucleotide
auaauuaaccagagcaacu

SEQ ID NO: 496986 - RNA, 19 nt, Artificial Sequence
  Description of Artificial Sequence: Synthetic oligonucleotide
uugcgauaccuguauauaa

SEQ ID NO: 496987 - RNA, 19 nt, Artificial Sequence
  Description of Artificial Sequence: Synthetic oligonucleotide
aggacaccgccuuaaccac

SEQ ID NO: 496988 - RNA, 19 nt, Artificial Sequence
  Description of Artificial Sequence: Synthetic oligonucleotide
ugagaaauucugcuucgua

SEQ ID NO: 496989 - RNA, 19 nt, Artificial Sequence
  Description of Artificial Sequence: Synthetic oligonucleotide
uaccgguuccauuucuucc

SEQ ID NO: 496990 - RNA, 19 nt, Artificial Sequence
  Description of Artificial Sequence: Synthetic oligonucleotide
uuauacaggaaugcuucac

SEQ ID NO: 496991 - RNA, 19 nt, Artificial Sequence
  Description of Artificial Sequence: Synthetic oligonucleotide
uuucucacacgaaaugguu

SEQ ID NO: 496992 - RNA, 19 nt, Artificial Sequence
  Description of Artificial Sequence: Synthetic oligonucleotide
acaccaauauuggaagauc

SEQ ID NO: 496993 - RNA, 19 nt, Artificial Sequence
  Description of Artificial Sequence: Synthetic oligonucleotide
uugcucuccaagcguauug

SEQ ID NO: 496994 - RNA, 19 nt, Artificial Sequence
  Description of Artificial Sequence: Synthetic oligonucleotide
gagcaacuugccaacacag

SEQ ID NO: 496995 - RNA, 19 nt, Artificial Sequence
  Description of Artificial Sequence: Synthetic oligonucleotide
cugagugccacauuuaaua

SEQ ID NO: 496996 - RNA, 19 nt, Artificial Sequence
  Description of Artificial Sequence: Synthetic oligonucleotide
uauagugaaguagcagaga

SEQ ID NO: 496997 - RNA, 19 nt, Artificial Sequence
  Description of Artificial Sequence: Synthetic oligonucleotide
guaauguuugacucagcca

SEQ ID NO: 496998 - RNA, 19 nt, Artificial Sequence
  Description of Artificial Sequence: Synthetic oligonucleotide
gccaaacuaauuuagcuuc

SEQ ID NO: 496999 - RNA, 19 nt, Artificial Sequence
  Description of Artificial Sequence: Synthetic oligonucleotide
guaacaaaguugguucaag

SEQ ID NO: 497000 - RNA, 19 nt, Artificial Sequence
  Description of Artificial Sequence: Synthetic oligonucleotide
uaucacugccuugagaaau

SEQ ID NO: 497001 - RNA, 19 nt, Artificial Sequence
  Description of Artificial Sequence: Synthetic oligonucleotide
cugccuugagaaauucugc

SEQ ID NO: 497002 - RNA, 19 nt, Artificial Sequence
  Description of Artificial Sequence: Synthetic oligonucleotide
uguuugacucagccaauaa

SEQ ID NO: 497003 - RNA, 19 nt, Artificial Sequence
  Description of Artificial Sequence: Synthetic oligonucleotide
auucuauguuagcagaauu

SEQ ID NO: 497004 - RNA, 19 nt, Artificial Sequence
  Description of Artificial Sequence: Synthetic oligonucleotide
agcgucuaguauuccuugg

SEQ ID NO: 497005 - RNA, 19 nt, Artificial Sequence
  Description of Artificial Sequence: Synthetic oligonucleotide
caggacaccgccuuaacca

SEQ ID NO: 497006 - RNA, 19 nt, Artificial Sequence
  Description of Artificial Sequence: Synthetic oligonucleotide
gagggaaacuuugaagcug

SEQ ID NO: 497007 - RNA, 19 nt, Artificial Sequence
  Description of Artificial Sequence: Synthetic oligonucleotide
agauugccucaucacugac

SEQ ID NO: 497008 - RNA, 19 nt, Artificial Sequence
  Description of Artificial Sequence: Synthetic oligonucleotide
ugaaaguauucuacugcua

SEQ ID NO: 497009 - RNA, 19 nt, Artificial Sequence
  Description of Artificial Sequence: Synthetic oligonucleotide
caggcuaagagauuggucu

SEQ ID NO: 497010 - RNA, 19 nt, Artificial Sequence
  Description of Artificial Sequence: Synthetic oligonucleotide
cauguguagaauccuccac

SEQ ID NO: 497011 - RNA, 19 nt, Artificial Sequence
  Description of Artificial Sequence: Synthetic oligonucleotide
uagaauccuccacugcacu

SEQ ID NO: 497012 - RNA, 19 nt, Artificial Sequence
  Description of Artificial Sequence: Synthetic oligonucleotide
uucucacacgaaaugguuu

SEQ ID NO: 497013 - RNA, 19 nt, Artificial Sequence
  Description of Artificial Sequence: Synthetic oligonucleotide
ggucugguaacuaucacug

SEQ ID NO: 497014 - RNA, 19 nt, Artificial Sequence
  Description of Artificial Sequence: Synthetic oligonucleotide
ucaauauccguguguuuau

SEQ ID NO: 497015 - RNA, 19 nt, Artificial Sequence
  Description of Artificial Sequence: Synthetic oligonucleotide
ugcaaccaaccaacgauaa

SEQ ID NO: 497016 - RNA, 19 nt, Artificial Sequence
  Description of Artificial Sequence: Synthetic oligonucleotide
uucagauaugagaguuucu

SEQ ID NO: 497017 - RNA, 19 nt, Artificial Sequence
  Description of Artificial Sequence: Synthetic oligonucleotide
aucacggacagccagccua

SEQ ID NO: 497018 - RNA, 19 nt, Artificial Sequence
  Description of Artificial Sequence: Synthetic oligonucleotide
uuccaggcuaagagauugg

SEQ ID NO: 497019 - RNA, 19 nt, Artificial Sequence
  Description of Artificial Sequence: Synthetic oligonucleotide
gaauuuagugcugguauaa

SEQ ID NO: 497020 - RNA, 19 nt, Artificial Sequence
  Description of Artificial Sequence: Synthetic oligonucleotide
auccacccaaaguugucuc

SEQ ID NO: 497021 - RNA, 19 nt, Artificial Sequence
  Description of Artificial Sequence: Synthetic oligonucleotide
aauuauugcgauaccugua

SEQ ID NO: 497022 - RNA, 19 nt, Artificial Sequence
  Description of Artificial Sequence: Synthetic oligonucleotide
cuacguagucaaucaacug

SEQ ID NO: 497023 - RNA, 19 nt, Artificial Sequence
  Description of Artificial Sequence: Synthetic oligonucleotide
uugcaaccaaccaacgaua

SEQ ID NO: 497024 - RNA, 19 nt, Artificial Sequence
  Description of Artificial Sequence: Synthetic oligonucleotide
gagccaaacuaauuuagcu

SEQ ID NO: 497025 - RNA, 19 nt, Artificial Sequence
  Description of Artificial Sequence: Synthetic oligonucleotide
auaccuguauauaauguaa

SEQ ID NO: 497026 - RNA, 19 nt, Artificial Sequence
  Description of Artificial Sequence: Synthetic oligonucleotide
cacgugaucauccauggaa

SEQ ID NO: 497027 - RNA, 19 nt, Artificial Sequence
  Description of Artificial Sequence: Synthetic oligonucleotide
gaauagagcucacgucuac

SEQ ID NO: 497028 - RNA, 19 nt, Artificial Sequence
  Description of Artificial Sequence: Synthetic oligonucleotide
caccaauauuggaagauca

SEQ ID NO: 497029 - RNA, 19 nt, Artificial Sequence
  Description of Artificial Sequence: Synthetic oligonucleotide
uagcauucccaaacuugcc

SEQ ID NO: 497030 - RNA, 19 nt, Artificial Sequence
  Description of Artificial Sequence: Synthetic oligonucleotide
aacccucugaaaauaaaua

SEQ ID NO: 497031 - RNA, 19 nt, Artificial Sequence
  Description of Artificial Sequence: Synthetic oligonucleotide
accauaacugucaaauagu

SEQ ID NO: 497032 - RNA, 19 nt, Artificial Sequence
  Description of Artificial Sequence: Synthetic oligonucleotide
uuuagagagcggccuuuac

SEQ ID NO: 497033 - RNA, 19 nt, Artificial Sequence
  Description of Artificial Sequence: Synthetic oligonucleotide
gcugcauucccauuuuacc

SEQ ID NO: 497034 - RNA, 19 nt, Artificial Sequence
  Description of Artificial Sequence: Synthetic oligonucleotide
ugagaucaucugagaaggc

SEQ ID NO: 497035 - RNA, 19 nt, Artificial Sequence
  Description of Artificial Sequence: Synthetic oligonucleotide
guaagauugccucaucacu

SEQ ID NO: 497036 - RNA, 19 nt, Artificial Sequence
  Description of Artificial Sequence: Synthetic oligonucleotide
ugagaacuccauuuucuuu

SEQ ID NO: 497037 - RNA, 19 nt, Artificial Sequence
  Description of Artificial Sequence: Synthetic oligonucleotide
guauugcaaucacggacag

SEQ ID NO: 497038 - RNA, 19 nt, Artificial Sequence
  Description of Artificial Sequence: Synthetic oligonucleotide
aaagugcaacaacaaugua

SEQ ID NO: 497039 - RNA, 19 nt, Artificial Sequence
  Description of Artificial Sequence: Synthetic oligonucleotide
gaacuuauacagcgacaac

SEQ ID NO: 497040 - RNA, 19 nt, Artificial Sequence
  Description of Artificial Sequence: Synthetic oligonucleotide
uauauauguuacacaccuu

SEQ ID NO: 497041 - RNA, 19 nt, Artificial Sequence
  Description of Artificial Sequence: Synthetic oligonucleotide
uugggagcgucuaguauuc

SEQ ID NO: 497042 - RNA, 19 nt, Artificial Sequence
  Description of Artificial Sequence: Synthetic oligonucleotide
gagcgucuaguauuccuug

SEQ ID NO: 497043 - RNA, 19 nt, Artificial Sequence
  Description of Artificial Sequence: Synthetic oligonucleotide
ugcaaaaguugagggaaac

SEQ ID NO: 497044 - RNA, 19 nt, Artificial Sequence
  Description of Artificial Sequence: Synthetic oligonucleotide
gugaucauccauggaaagc

SEQ ID NO: 497045 - RNA, 19 nt, Artificial Sequence
  Description of Artificial Sequence: Synthetic oligonucleotide
uccuuuuagucaguaaaua

SEQ ID NO: 497046 - RNA, 19 nt, Artificial Sequence
  Description of Artificial Sequence: Synthetic oligonucleotide
cagacuuuguagaacacua

SEQ ID NO: 497047 - RNA, 19 nt, Artificial Sequence
  Description of Artificial Sequence: Synthetic oligonucleotide
aaaacccucugaaaauaaa

SEQ ID NO: 497048 - RNA, 19 nt, Artificial Sequence
  Description of Artificial Sequence: Synthetic oligonucleotide
ccugggaccucucugaaag

SEQ ID NO: 497049 - RNA, 19 nt, Artificial Sequence
  Description of Artificial Sequence: Synthetic oligonucleotide
ggaagauugcaguaggaaa

SEQ ID NO: 497050 - RNA, 19 nt, Artificial Sequence
  Description of Artificial Sequence: Synthetic oligonucleotide
gcguauugcaaucacggac

SEQ ID NO: 497051 - RNA, 19 nt, Artificial Sequence
  Description of Artificial Sequence: Synthetic oligonucleotide
aaaaccccucuuguaagaa

SEQ ID NO: 497052 - RNA, 19 nt, Artificial Sequence
  Description of Artificial Sequence: Synthetic oligonucleotide
agcaaugaauguucugcaa

SEQ ID NO: 497053 - RNA, 19 nt, Artificial Sequence
  Description of Artificial Sequence: Synthetic oligonucleotide
gcaauuuucucacacgaaa

SEQ ID NO: 497054 - RNA, 19 nt, Artificial Sequence
  Description of Artificial Sequence: Synthetic oligonucleotide
uuugaguugccugguucug

SEQ ID NO: 497055 - RNA, 19 nt, Artificial Sequence
  Description of Artificial Sequence: Synthetic oligonucleotide
uuauucagugaggcuuucc

SEQ ID NO: 497056 - RNA, 19 nt, Artificial Sequence
  Description of Artificial Sequence: Synthetic oligonucleotide
uuguaauguuugacucagc

SEQ ID NO: 497057 - RNA, 19 nt, Artificial Sequence
  Description of Artificial Sequence: Synthetic oligonucleotide
ccuuggauaauuaaccaga

SEQ ID NO: 497058 - RNA, 19 nt, Artificial Sequence
  Description of Artificial Sequence: Synthetic oligonucleotide
gacaccgccuuaaccacag

SEQ ID NO: 497059 - RNA, 19 nt, Artificial Sequence
  Description of Artificial Sequence: Synthetic oligonucleotide
uucguaguugggagcgucu

SEQ ID NO: 497060 - RNA, 19 nt, Artificial Sequence
  Description of Artificial Sequence: Synthetic oligonucleotide
acgaaaugguuugacauuu

SEQ ID NO: 497061 - RNA, 19 nt, Artificial Sequence
  Description of Artificial Sequence: Synthetic oligonucleotide
ugcucuccaagcguauugc

SEQ ID NO: 497062 - RNA, 19 nt, Artificial Sequence
  Description of Artificial Sequence: Synthetic oligonucleotide
agagauuggucugguaacu

SEQ ID NO: 497063 - RNA, 19 nt, Artificial Sequence
  Description of Artificial Sequence: Synthetic oligonucleotide
gaugcuucuuuccccugca

SEQ ID NO: 497064 - RNA, 19 nt, Artificial Sequence
  Description of Artificial Sequence: Synthetic oligonucleotide
uccccugcauucuauguua

SEQ ID NO: 497065 - RNA, 19 nt, Artificial Sequence
  Description of Artificial Sequence: Synthetic oligonucleotide
aaguugagggaaacuuuga

SEQ ID NO: 497066 - RNA, 19 nt, Artificial Sequence
  Description of Artificial Sequence: Synthetic oligonucleotide
gaguccauggauccaccca

SEQ ID NO: 497067 - RNA, 19 nt, Artificial Sequence
  Description of Artificial Sequence: Synthetic oligonucleotide
caggaaugcuucacaggag

SEQ ID NO: 497068 - RNA, 19 nt, Artificial Sequence
  Description of Artificial Sequence: Synthetic oligonucleotide
agcuguucuaucggaagug

SEQ ID NO: 497069 - RNA, 19 nt, Artificial Sequence
  Description of Artificial Sequence: Synthetic oligonucleotide
agaaggaugguggacuaaa

SEQ ID NO: 497070 - RNA, 19 nt, Artificial Sequence
  Description of Artificial Sequence: Synthetic oligonucleotide
cuuggaccuaauaucagcu

SEQ ID NO: 497071 - RNA, 19 nt, Artificial Sequence
  Description of Artificial Sequence: Synthetic oligonucleotide
agcguauugcaaucacgga

SEQ ID NO: 497072 - RNA, 19 nt, Artificial Sequence
  Description of Artificial Sequence: Synthetic oligonucleotide
caguaagauugccucauca

SEQ ID NO: 497073 - RNA, 19 nt, Artificial Sequence
  Description of Artificial Sequence: Synthetic oligonucleotide
ucaguaagauugccucauc

SEQ ID NO: 497074 - RNA, 19 nt, Artificial Sequence
  Description of Artificial Sequence: Synthetic oligonucleotide
ucacggacagccagccuac

SEQ ID NO: 497075 - RNA, 19 nt, Artificial Sequence
  Description of Artificial Sequence: Synthetic oligonucleotide
accgacaagaaaagccauc

SEQ ID NO: 497076 - RNA, 19 nt, Artificial Sequence
  Description of Artificial Sequence: Synthetic oligonucleotide
guguagaauccuccacugc

SEQ ID NO: 497077 - RNA, 19 nt, Artificial Sequence
  Description of Artificial Sequence: Synthetic oligonucleotide
uccaagcguauugcaauca

SEQ ID NO: 497078 - RNA, 19 nt, Artificial Sequence
  Description of Artificial Sequence: Synthetic oligonucleotide
gcgauaccuguauauaaug

SEQ ID NO: 497079 - RNA, 19 nt, Artificial Sequence
  Description of Artificial Sequence: Synthetic oligonucleotide
ugguaacuaucacugccuu

SEQ ID NO: 497080 - RNA, 19 nt, Artificial Sequence
  Description of Artificial Sequence: Synthetic oligonucleotide
auugcgauaccuguauaua

SEQ ID NO: 497081 - RNA, 19 nt, Artificial Sequence
  Description of Artificial Sequence: Synthetic oligonucleotide
guagaauccuccacugcac

SEQ ID NO: 497082 - RNA, 19 nt, Artificial Sequence
  Description of Artificial Sequence: Synthetic oligonucleotide
caaauaccgguuccauuuc

SEQ ID NO: 497083 - RNA, 19 nt, Artificial Sequence
  Description of Artificial Sequence: Synthetic oligonucleotide
cauugcaaccaaccaacga

SEQ ID NO: 497084 - RNA, 19 nt, Artificial Sequence
  Description of Artificial Sequence: Synthetic oligonucleotide
uugagaaauucugcuucgu

SEQ ID NO: 497085 - RNA, 19 nt, Artificial Sequence
  Description of Artificial Sequence: Synthetic oligonucleotide
ggcucuuauacaggaaugc

SEQ ID NO: 497086 - RNA, 19 nt, Artificial Sequence
  Description of Artificial Sequence: Synthetic oligonucleotide
aauguuugacucagccaau

SEQ ID NO: 497087 - RNA, 19 nt, Artificial Sequence
  Description of Artificial Sequence: Synthetic oligonucleotide
aaaguaccuuggauaauua

SEQ ID NO: 497088 - RNA, 19 nt, Artificial Sequence
  Description of Artificial Sequence: Synthetic oligonucleotide
aaucacggacagccagccu

SEQ ID NO: 497089 - RNA, 19 nt, Artificial Sequence
  Description of Artificial Sequence: Synthetic oligonucleotide
ggacagccagccuacguag

SEQ ID NO: 497090 - RNA, 19 nt, Artificial Sequence
  Description of Artificial Sequence: Synthetic oligonucleotide
caacaacaauguacuguug

SEQ ID NO: 497091 - RNA, 19 nt, Artificial Sequence
  Description of Artificial Sequence: Synthetic oligonucleotide
acgucuacuguccuuucuu

SEQ ID NO: 497092 - RNA, 19 nt, Artificial Sequence
  Description of Artificial Sequence: Synthetic oligonucleotide
agaggugcuagaugaucaa

SEQ ID NO: 497093 - RNA, 19 nt, Artificial Sequence
  Description of Artificial Sequence: Synthetic oligonucleotide
aagugauauuucacuccug

SEQ ID NO: 497094 - RNA, 19 nt, Artificial Sequence
  Description of Artificial Sequence: Synthetic oligonucleotide
aauaccgguuccauuucuu

SEQ ID NO: 497095 - RNA, 19 nt, Artificial Sequence
  Description of Artificial Sequence: Synthetic oligonucleotide
agcugucaaauuauugcga

SEQ ID NO: 497096 - RNA, 19 nt, Artificial Sequence
  Description of Artificial Sequence: Synthetic oligonucleotide
uuggaccuaauaucagcuu

SEQ ID NO: 497097 - RNA, 19 nt, Artificial Sequence
  Description of Artificial Sequence: Synthetic oligonucleotide
gacauccauaagcaaugaa

SEQ ID NO: 497098 - RNA, 19 nt, Artificial Sequence
  Description of Artificial Sequence: Synthetic oligonucleotide
uauugcaaucacggacagc

SEQ ID NO: 497099 - RNA, 19 nt, Artificial Sequence
  Description of Artificial Sequence: Synthetic oligonucleotide
gguaacuaucacugccuug

SEQ ID NO: 497100 - RNA, 19 nt, Artificial Sequence
  Description of Artificial Sequence: Synthetic oligonucleotide
cuccaagcguauugcaauc

SEQ ID NO: 497101 - RNA, 19 nt, Artificial Sequence
  Description of Artificial Sequence: Synthetic oligonucleotide
uccguguguuuauagcauu

SEQ ID NO: 497102 - RNA, 19 nt, Artificial Sequence
  Description of Artificial Sequence: Synthetic oligonucleotide
guucuaucggaagugauau

SEQ ID NO: 497103 - RNA, 19 nt, Artificial Sequence
  Description of Artificial Sequence: Synthetic oligonucleotide
cugcuucguaguugggagc

SEQ ID NO: 497104 - RNA, 19 nt, Artificial Sequence
  Description of Artificial Sequence: Synthetic oligonucleotide
ggcaaacauagggacacag

SEQ ID NO: 497105 - RNA, 19 nt, Artificial Sequence
  Description of Artificial Sequence: Synthetic oligonucleotide
cugcauucccauuuuaccu

SEQ ID NO: 497106 - RNA, 19 nt, Artificial Sequence
  Description of Artificial Sequence: Synthetic oligonucleotide
agaucauaacuuauauaua

SEQ ID NO: 497107 - RNA, 19 nt, Artificial Sequence
  Description of Artificial Sequence: Synthetic oligonucleotide
cauaagcaaugaaccauaa

SEQ ID NO: 497108 - RNA, 19 nt, Artificial Sequence
  Description of Artificial Sequence: Synthetic oligonucleotide
ugucaccgguugcacguga

SEQ ID NO: 497109 - RNA, 19 nt, Artificial Sequence
  Description of Artificial Sequence: Synthetic oligonucleotide
gucuaguauuccuuggagu

SEQ ID NO: 497110 - RNA, 19 nt, Artificial Sequence
  Description of Artificial Sequence: Synthetic oligonucleotide
aggaaguuuguaaauucuu

SEQ ID NO: 497111 - RNA, 19 nt, Artificial Sequence
  Description of Artificial Sequence: Synthetic oligonucleotide
ggauaauuaaccagagcaa

SEQ ID NO: 497112 - RNA, 19 nt, Artificial Sequence
  Description of Artificial Sequence: Synthetic oligonucleotide
cuuugaguugccugguucu

SEQ ID NO: 497113 - RNA, 19 nt, Artificial Sequence
  Description of Artificial Sequence: Synthetic oligonucleotide
ggaccuaauaucagcuuug

SEQ ID NO: 497114 - RNA, 19 nt, Artificial Sequence
  Description of Artificial Sequence: Synthetic oligonucleotide
caauuuucucacacgaaau

SEQ ID NO: 497115 - RNA, 19 nt, Artificial Sequence
  Description of Artificial Sequence: Synthetic oligonucleotide
gcugucuuuuaagacacac

SEQ ID NO: 497116 - RNA, 19 nt, Artificial Sequence
  Description of Artificial Sequence: Synthetic oligonucleotide
uaguugggagcgucuagua

SEQ ID NO: 497117 - RNA, 19 nt, Artificial Sequence
  Description of Artificial Sequence: Synthetic oligonucleotide
cagccuacguagucaauca

SEQ ID NO: 497118 - RNA, 19 nt, Artificial Sequence
  Description of Artificial Sequence: Synthetic oligonucleotide
cacugacacaauuaauaua

SEQ ID NO: 497119 - RNA, 19 nt, Artificial Sequence
  Description of Artificial Sequence: Synthetic oligonucleotide
gaaaaguuucaggcccuga

SEQ ID NO: 497120 - RNA, 19 nt, Artificial Sequence
  Description of Artificial Sequence: Synthetic oligonucleotide
gaaggcagcucuaagcaau

SEQ ID NO: 497121 - RNA, 19 nt, Artificial Sequence
  Description of Artificial Sequence: Synthetic oligonucleotide
uuuauucagugaggcuuuc

SEQ ID NO: 497122 - RNA, 19 nt, Artificial Sequence
  Description of Artificial Sequence: Synthetic oligonucleotide
cguauugcaaucacggaca

SEQ ID NO: 497123 - RNA, 19 nt, Artificial Sequence
  Description of Artificial Sequence: Synthetic oligonucleotide
cacccaaaguugucuccag

SEQ ID NO: 497124 - RNA, 19 nt, Artificial Sequence
  Description of Artificial Sequence: Synthetic oligonucleotide
gccaauagagccaaacuaa

SEQ ID NO: 497125 - RNA, 19 nt, Artificial Sequence
  Description of Artificial Sequence: Synthetic oligonucleotide
ucaccgguugcacgugauc

SEQ ID NO: 497126 - RNA, 19 nt, Artificial Sequence
  Description of Artificial Sequence: Synthetic oligonucleotide
ccaauucugaaguaguucu

SEQ ID NO: 497127 - RNA, 19 nt, Artificial Sequence
  Description of Artificial Sequence: Synthetic oligonucleotide
agauugcaguaggaaauaa

SEQ ID NO: 497128 - RNA, 19 nt, Artificial Sequence
  Description of Artificial Sequence: Synthetic oligonucleotide
cuucggggcuuuccuguag

SEQ ID NO: 497129 - RNA, 19 nt, Artificial Sequence
  Description of Artificial Sequence: Synthetic oligonucleotide
cucuuauacaggaaugcuu

SEQ ID NO: 497130 - RNA, 19 nt, Artificial Sequence
  Description of Artificial Sequence: Synthetic oligonucleotide
gagccucaguaagauugcc

SEQ ID NO: 497131 - RNA, 19 nt, Artificial Sequence
  Description of Artificial Sequence: Synthetic oligonucleotide
acggacagccagccuacgu

SEQ ID NO: 497132 - RNA, 19 nt, Artificial Sequence
  Description of Artificial Sequence: Synthetic oligonucleotide
cuucguaguugggagcguc

SEQ ID NO: 497133 - RNA, 19 nt, Artificial Sequence
  Description of Artificial Sequence: Synthetic oligonucleotide
ccgccuuaaccacagaauc

SEQ ID NO: 497134 - RNA, 19 nt, Artificial Sequence
  Description of Artificial Sequence: Synthetic oligonucleotide
cccauuuuaccugaagauc

SEQ ID NO: 497135 - RNA, 19 nt, Artificial Sequence
  Description of Artificial Sequence: Synthetic oligonucleotide
accgccuuaaccacagaau

SEQ ID NO: 497136 - RNA, 19 nt, Artificial Sequence
  Description of Artificial Sequence: Synthetic oligonucleotide
uucuaucggaagugauauu

SEQ ID NO: 497137 - RNA, 19 nt, Artificial Sequence
  Description of Artificial Sequence: Synthetic oligonucleotide
caccgguugcacgugauca

SEQ ID NO: 497138 - RNA, 19 nt, Artificial Sequence
  Description of Artificial Sequence: Synthetic oligonucleotide
gacaauguccaggaaguuu

SEQ ID NO: 497139 - RNA, 19 nt, Artificial Sequence
  Description of Artificial Sequence: Synthetic oligonucleotide
accgguugcacgugaucau

SEQ ID NO: 497140 - RNA, 19 nt, Artificial Sequence
  Description of Artificial Sequence: Synthetic oligonucleotide
ucgauuguuucuggagcua

SEQ ID NO: 497141 - RNA, 19 nt, Artificial Sequence
  Description of Artificial Sequence: Synthetic oligonucleotide
gccaauucugaaguaguuc

SEQ ID NO: 497142 - RNA, 19 nt, Artificial Sequence
  Description of Artificial Sequence: Synthetic oligonucleotide
cuaucacugccuugagaaa

SEQ ID NO: 497143 - RNA, 19 nt, Artificial Sequence
  Description of Artificial Sequence: Synthetic oligonucleotide
gccuacguagucaaucaac

SEQ ID NO: 497144 - RNA, 19 nt, Artificial Sequence
  Description of Artificial Sequence: Synthetic oligonucleotide
ucacgucuacuguccuuuc

SEQ ID NO: 497145 - RNA, 19 nt, Artificial Sequence
  Description of Artificial Sequence: Synthetic oligonucleotide
ucguaguugggagcgucua

SEQ ID NO: 497146 - RNA, 19 nt, Artificial Sequence
  Description of Artificial Sequence: Synthetic oligonucleotide
cuuuuaccuuccaggcuaa

SEQ ID NO: 497147 - RNA, 19 nt, Artificial Sequence
  Description of Artificial Sequence: Synthetic oligonucleotide
gcaaucacggacagccagc

SEQ ID NO: 497148 - RNA, 19 nt, Artificial Sequence
  Description of Artificial Sequence: Synthetic oligonucleotide
cggaagugauauuucacuc

SEQ ID NO: 497149 - RNA, 19 nt, Artificial Sequence
  Description of Artificial Sequence: Synthetic oligonucleotide
ccaggacaccgccuuaacc

SEQ ID NO: 497150 - RNA, 19 nt, Artificial Sequence
  Description of Artificial Sequence: Synthetic oligonucleotide
ggggaucaauguauacucc

SEQ ID NO: 497151 - RNA, 19 nt, Artificial Sequence
  Description of Artificial Sequence: Synthetic oligonucleotide
ggcugcauucccauuuuac

SEQ ID NO: 497152 - RNA, 19 nt, Artificial Sequence
  Description of Artificial Sequence: Synthetic oligonucleotide
ccaagcguauugcaaucac

SEQ ID NO: 497153 - RNA, 19 nt, Artificial Sequence
  Description of Artificial Sequence: Synthetic oligonucleotide
guauuccuuggaguugcca

SEQ ID NO: 497154 - RNA, 19 nt, Artificial Sequence
  Description of Artificial Sequence: Synthetic oligonucleotide
gagauuggucugguaacua

SEQ ID NO: 497155 - RNA, 19 nt, Artificial Sequence
  Description of Artificial Sequence: Synthetic oligonucleotide
ccaaauaccgguuccauuu

SEQ ID NO: 497156 - RNA, 19 nt, Artificial Sequence
  Description of Artificial Sequence: Synthetic oligonucleotide
cauccaggcucaggagugc

SEQ ID NO: 497157 - RNA, 19 nt, Artificial Sequence
  Description of Artificial Sequence: Synthetic oligonucleotide
ccgaauagagcucacgucu

SEQ ID NO: 497158 - RNA, 19 nt, Artificial Sequence
  Description of Artificial Sequence: Synthetic oligonucleotide
cugguauaacugagugaga

SEQ ID NO: 497159 - RNA, 19 nt, Artificial Sequence
  Description of Artificial Sequence: Synthetic oligonucleotide
uugucaccgguugcacgug

SEQ ID NO: 497160 - RNA, 19 nt, Artificial Sequence
  Description of Artificial Sequence: Synthetic oligonucleotide
ccuacguagucaaucaacu

SEQ ID NO: 497161 - RNA, 19 nt, Artificial Sequence
  Description of Artificial Sequence: Synthetic oligonucleotide
gcugucaaauuauugcgau

SEQ ID NO: 497162 - RNA, 19 nt, Artificial Sequence
  Description of Artificial Sequence: Synthetic oligonucleotide
caauagagccaaacuaauu

SEQ ID NO: 497163 - RNA, 19 nt, Artificial Sequence
  Description of Artificial Sequence: Synthetic oligonucleotide
ccaggcuaagagauugguc

SEQ ID NO: 497164 - RNA, 19 nt, Artificial Sequence
  Description of Artificial Sequence: Synthetic oligonucleotide
ggcagcucuaagcaaugaa

SEQ ID NO: 497165 - RNA, 19 nt, Artificial Sequence
  Description of Artificial Sequence: Synthetic oligonucleotide
cccgaauagagcucacguc

SEQ ID NO: 497166 - RNA, 19 nt, Artificial Sequence
  Description of Artificial Sequence: Synthetic oligonucleotide
gaacugugaccgacaagaa

SEQ ID NO: 497167 - RNA, 19 nt, Artificial Sequence
  Description of Artificial Sequence: Synthetic oligonucleotide
aagccaucccagagaggca

SEQ ID NO: 497168 - RNA, 19 nt, Artificial Sequence
  Description of Artificial Sequence: Synthetic oligonucleotide
gcgucuaguauuccuugga

SEQ ID NO: 497169 - RNA, 19 nt, Artificial Sequence
  Description of Artificial Sequence: Synthetic oligonucleotide
gguugcacgugaucaucca

SEQ ID NO: 497170 - RNA, 19 nt, Artificial Sequence
  Description of Artificial Sequence: Synthetic oligonucleotide
agccaauucugaaguaguu

SEQ ID NO: 497171 - RNA, 19 nt, Artificial Sequence
  Description of Artificial Sequence: Synthetic oligonucleotide
ccagccuacguagucaauc

SEQ ID NO: 497172 - RNA, 19 nt, Artificial Sequence
  Description of Artificial Sequence: Synthetic oligonucleotide
cuaagagauuggucuggua

SEQ ID NO: 497173 - RNA, 19 nt, Artificial Sequence
  Description of Artificial Sequence: Synthetic oligonucleotide
cacgaaaugguuugacauu

SEQ ID NO: 497174 - RNA, 19 nt, Artificial Sequence
  Description of Artificial Sequence: Synthetic oligonucleotide
agagcggccuuuacuugga

SEQ ID NO: 497175 - RNA, 19 nt, Artificial Sequence
  Description of Artificial Sequence: Synthetic oligonucleotide
ugggagcgucuaguauucc

SEQ ID NO: 497176 - RNA, 19 nt, Artificial Sequence
  Description of Artificial Sequence: Synthetic oligonucleotide
cauucuauguuagcagaau

SEQ ID NO: 497177 - RNA, 19 nt, Artificial Sequence
  Description of Artificial Sequence: Synthetic oligonucleotide
gaauggaauccaggucaaa

SEQ ID NO: 497178 - RNA, 19 nt, Artificial Sequence
  Description of Artificial Sequence: Synthetic oligonucleotide
ccaauauuggaagaucaua

SEQ ID NO: 497179 - RNA, 19 nt, Artificial Sequence
  Description of Artificial Sequence: Synthetic oligonucleotide
gagaaggaugguggacuaa

SEQ ID NO: 497180 - RNA, 19 nt, Artificial Sequence
  Description of Artificial Sequence: Synthetic oligonucleotide
cucacacgaaaugguuuga

SEQ ID NO: 497181 - RNA, 19 nt, Artificial Sequence
  Description of Artificial Sequence: Synthetic oligonucleotide
gagcggccuuuacuuggac

SEQ ID NO: 497182 - RNA, 19 nt, Artificial Sequence
  Description of Artificial Sequence: Synthetic oligonucleotide
gcauucuauguuagcagaa

SEQ ID NO: 497183 - RNA, 19 nt, Artificial Sequence
  Description of Artificial Sequence: Synthetic oligonucleotide
cugagacugaacucugauu

SEQ ID NO: 497184 - RNA, 19 nt, Artificial Sequence
  Description of Artificial Sequence: Synthetic oligonucleotide
gcagcucuaagcaaugaau

SEQ ID NO: 497185 - RNA, 19 nt, Artificial Sequence
  Description of Artificial Sequence: Synthetic oligonucleotide
cuguucuaucggaagugau

SEQ ID NO: 497186 - RNA, 19 nt, Artificial Sequence
  Description of Artificial Sequence: Synthetic oligonucleotide
cgucuacuguccuuucuuc

SEQ ID NO: 497187 - RNA, 19 nt, Artificial Sequence
  Description of Artificial Sequence: Synthetic oligonucleotide
cacggacagccagccuacg

SEQ ID NO: 497188 - RNA, 19 nt, Artificial Sequence
  Description of Artificial Sequence: Synthetic oligonucleotide
cucacgucuacuguccuuu

SEQ ID NO: 497189 - RNA, 19 nt, Artificial Sequence
  Description of Artificial Sequence: Synthetic oligonucleotide
cuguccuuucuucggggcu

SEQ ID NO: 497190 - RNA, 19 nt, Artificial Sequence
  Description of Artificial Sequence: Synthetic oligonucleotide
gcucuaagcaaugaauguu

SEQ ID NO: 497191 - RNA, 19 nt, Artificial Sequence
  Description of Artificial Sequence: Synthetic oligonucleotide
ccaauagagccaaacuaau

SEQ ID NO: 497192 - RNA, 19 nt, Artificial Sequence
  Description of Artificial Sequence: Synthetic oligonucleotide
ggaaugcuucacaggagua

SEQ ID NO: 497193 - RNA, 19 nt, Artificial Sequence
  Description of Artificial Sequence: Synthetic oligonucleotide
caaacuaauuuagcuucuu

SEQ ID NO: 497194 - RNA, 19 nt, Artificial Sequence
  Description of Artificial Sequence: Synthetic oligonucleotide
cacgucuacuguccuuucu

SEQ ID NO: 497195 - RNA, 19 nt, Artificial Sequence
  Description of Artificial Sequence: Synthetic oligonucleotide
cgauaccuguauauaaugu

SEQ ID NO: 497196 - RNA, 19 nt, Artificial Sequence
  Description of Artificial Sequence: Synthetic oligonucleotide
guccaaauaccgguuccau

SEQ ID NO: 497197 - RNA, 19 nt, Artificial Sequence
  Description of Artificial Sequence: Synthetic oligonucleotide
cagcgacaacaaggcuugg

SEQ ID NO: 497198 - RNA, 19 nt, Artificial Sequence
  Description of Artificial Sequence: Synthetic oligonucleotide
ccuuuacuuggaccuaaua

SEQ ID NO: 497199 - RNA, 19 nt, Artificial Sequence
  Description of Artificial Sequence: Synthetic oligonucleotide
ccccgaauagagcucacgu

SEQ ID NO: 497200 - RNA, 19 nt, Artificial Sequence
  Description of Artificial Sequence: Synthetic oligonucleotide
ggacaccgccuuaaccaca

SEQ ID NO: 497201 - RNA, 19 nt, Artificial Sequence
  Description of Artificial Sequence: Synthetic oligonucleotide
gugccacauuuaauaaaau

SEQ ID NO: 497202 - RNA, 19 nt, Artificial Sequence
  Description of Artificial Sequence: Synthetic oligonucleotide
cgaauagagcucacgucua

SEQ ID NO: 497203 - RNA, 19 nt, Artificial Sequence
  Description of Artificial Sequence: Synthetic oligonucleotide
guugcucuccaagcguauu

SEQ ID NO: 497204 - RNA, 19 nt, Artificial Sequence
  Description of Artificial Sequence: Synthetic oligonucleotide
gggaccucucugaaaguau

SEQ ID NO: 497205 - RNA, 19 nt, Artificial Sequence
  Description of Artificial Sequence: Synthetic oligonucleotide
cgauuguuucuggagcuaa

SEQ ID NO: 497206 - RNA, 19 nt, Artificial Sequence
  Description of Artificial Sequence: Synthetic oligonucleotide
gucaccgguugcacgugau

SEQ ID NO: 497207 - RNA, 19 nt, Artificial Sequence
  Description of Artificial Sequence: Synthetic oligonucleotide
gcucacgucuacuguccuu

SEQ ID NO: 497208 - RNA, 19 nt, Artificial Sequence
  Description of Artificial Sequence: Synthetic oligonucleotide
gcuucguaguugggagcgu

SEQ ID NO: 497209 - RNA, 19 nt, Artificial Sequence
  Description of Artificial Sequence: Synthetic oligonucleotide
gccuuuacuuggaccuaau

SEQ ID NO: 497210 - RNA, 19 nt, Artificial Sequence
  Description of Artificial Sequence: Synthetic oligonucleotide
ucuaaaucagguuuggccg

SEQ ID NO: 497211 - RNA, 19 nt, Artificial Sequence
  Description of Artificial Sequence: Synthetic oligonucleotide
aacaucggaguucugaggg

SEQ ID NO: 497212 - RNA, 19 nt, Artificial Sequence
  Description of Artificial Sequence: Synthetic oligonucleotide
gacuuaauaaauuguggcg

SEQ ID NO: 497213 - RNA, 19 nt, Artificial Sequence
  Description of Artificial Sequence: Synthetic oligonucleotide
aaugcaaaacacuucugag

SEQ ID NO: 497214 - RNA, 19 nt, Artificial Sequence
  Description of Artificial Sequence: Synthetic oligonucleotide
aaugccugggcauaaagug

SEQ ID NO: 497215 - RNA, 19 nt, Artificial Sequence
  Description of Artificial Sequence: Synthetic oligonucleotide
aguuuaagaacuuuaucag

SEQ ID NO: 497216 - RNA, 19 nt, Artificial Sequence
  Description of Artificial Sequence: Synthetic oligonucleotide
uguugcugcaugcacaugg

SEQ ID NO: 497217 - RNA, 19 nt, Artificial Sequence
  Description of Artificial Sequence: Synthetic oligonucleotide
aaugucggugguuuuaauc

SEQ ID NO: 497218 - RNA, 19 nt, Artificial Sequence
  Description of Artificial Sequence: Synthetic oligonucleotide
uaauaaauuguggcgaugg

SEQ ID NO: 497219 - RNA, 19 nt, Artificial Sequence
  Description of Artificial Sequence: Synthetic oligonucleotide
gguuuuauaaugucggugg

SEQ ID NO: 497220 - RNA, 19 nt, Artificial Sequence
  Description of Artificial Sequence: Synthetic oligonucleotide
aaacuaauagccucgguau

SEQ ID NO: 497221 - RNA, 19 nt, Artificial Sequence
  Description of Artificial Sequence: Synthetic oligonucleotide
ucuaaagagagcuuucaca

SEQ ID NO: 497222 - RNA, 19 nt, Artificial Sequence
  Description of Artificial Sequence: Synthetic oligonucleotide
aagacuuaauaaauugugg

SEQ ID NO: 497223 - RNA, 19 nt, Artificial Sequence
  Description of Artificial Sequence: Synthetic oligonucleotide
agacuucucuccuuuaagc

SEQ ID NO: 497224 - RNA, 19 nt, Artificial Sequence
  Description of Artificial Sequence: Synthetic oligonucleotide
agccuucuaauauacacac

SEQ ID NO: 497225 - RNA, 19 nt, Artificial Sequence
  Description of Artificial Sequence: Synthetic oligonucleotide
aauacuaaguuccaccauu

SEQ ID NO: 497226 - RNA, 19 nt, Artificial Sequence
  Description of Artificial Sequence: Synthetic oligonucleotide
uaaccuaauacacgcauca

SEQ ID NO: 497227 - RNA, 19 nt, Artificial Sequence
  Description of Artificial Sequence: Synthetic oligonucleotide
auccguauuucuuugcuac

SEQ ID NO: 497228 - RNA, 19 nt, Artificial Sequence
  Description of Artificial Sequence: Synthetic oligonucleotide
uuagaggcggccaugacga

SEQ ID NO: 497229 - RNA, 19 nt, Artificial Sequence
  Description of Artificial Sequence: Synthetic oligonucleotide
ccaauaagcagguagaagg

SEQ ID NO: 497230 - RNA, 19 nt, Artificial Sequence
  Description of Artificial Sequence: Synthetic oligonucleotide
cauuucaucagcuuuacca

SEQ ID NO: 497231 - RNA, 19 nt, Artificial Sequence
  Description of Artificial Sequence: Synthetic oligonucleotide
uuuaauagguuuuaagcuu

SEQ ID NO: 497232 - RNA, 19 nt, Artificial Sequence
  Description of Artificial Sequence: Synthetic oligonucleotide
uuugcauggccaauuacug

SEQ ID NO: 497233 - RNA, 19 nt, Artificial Sequence
  Description of Artificial Sequence: Synthetic oligonucleotide
uaaauuguggcgauggcau

SEQ ID NO: 497234 - RNA, 19 nt, Artificial Sequence
  Description of Artificial Sequence: Synthetic oligonucleotide
uucucaguaggacacaaac

SEQ ID NO: 497235 - RNA, 19 nt, Artificial Sequence
  Description of Artificial Sequence: Synthetic oligonucleotide
uaaacaucggaguucugag

SEQ ID NO: 497236 - RNA, 19 nt, Artificial Sequence
  Description of Artificial Sequence: Synthetic oligonucleotide
aaacugaugaccuuaucua

SEQ ID NO: 497237 - RNA, 19 nt, Artificial Sequence
  Description of Artificial Sequence: Synthetic oligonucleotide
uuugcacgucuaaagagag

SEQ ID NO: 497238 - RNA, 19 nt, Artificial Sequence
  Description of Artificial Sequence: Synthetic oligonucleotide
aacuagauccagcagaauu

SEQ ID NO: 497239 - RNA, 19 nt, Artificial Sequence
  Description of Artificial Sequence: Synthetic oligonucleotide
uuguugaucuguuaaugcc

SEQ ID NO: 497240 - RNA, 19 nt, Artificial Sequence
  Description of Artificial Sequence: Synthetic oligonucleotide
cuuaucuaaaucagguuug

SEQ ID NO: 497241 - RNA, 19 nt, Artificial Sequence
  Description of Artificial Sequence: Synthetic oligonucleotide
uccgugaaagaacugaagu

SEQ ID NO: 497242 - RNA, 19 nt, Artificial Sequence
  Description of Artificial Sequence: Synthetic oligonucleotide
aaacaucggaguucugagg

SEQ ID NO: 497243 - RNA, 19 nt, Artificial Sequence
  Description of Artificial Sequence: Synthetic oligonucleotide
agguuuuaagcuuuuguug

SEQ ID NO: 497244 - RNA, 19 nt, Artificial Sequence
  Description of Artificial Sequence: Synthetic oligonucleotide
ugggucuuaaccuaauaca

SEQ ID NO: 497245 - RNA, 19 nt, Artificial Sequence
  Description of Artificial Sequence: Synthetic oligonucleotide
aauacacgcaucaaagucu

SEQ ID NO: 497246 - RNA, 19 nt, Artificial Sequence
  Description of Artificial Sequence: Synthetic oligonucleotide
ugaccuuaucuaaaucagg

SEQ ID NO: 497247 - RNA, 19 nt, Artificial Sequence
  Description of Artificial Sequence: Synthetic oligonucleotide
auaaguuguagcauuaucu

SEQ ID NO: 497248 - RNA, 19 nt, Artificial Sequence
  Description of Artificial Sequence: Synthetic oligonucleotide
uuaagcuuuuguugcacag

SEQ ID NO: 497249 - RNA, 19 nt, Artificial Sequence
  Description of Artificial Sequence: Synthetic oligonucleotide
gguuuuaagcuuuuguugc

SEQ ID NO: 497250 - RNA, 19 nt, Artificial Sequence
  Description of Artificial Sequence: Synthetic oligonucleotide
caacaccuaaacaugaaac

SEQ ID NO: 497251 - RNA, 19 nt, Artificial Sequence
  Description of Artificial Sequence: Synthetic oligonucleotide
uuugcuacuucugucuggg

SEQ ID NO: 497252 - RNA, 19 nt, Artificial Sequence
  Description of Artificial Sequence: Synthetic oligonucleotide
uaucauccgugaaagaacu

SEQ ID NO: 497253 - RNA, 19 nt, Artificial Sequence
  Description of Artificial Sequence: Synthetic oligonucleotide
uugggucuuaaccuaauac

SEQ ID NO: 497254 - RNA, 19 nt, Artificial Sequence
  Description of Artificial Sequence: Synthetic oligonucleotide
ugaaguugaaguaaaccuu

SEQ ID NO: 497255 - RNA, 19 nt, Artificial Sequence
  Description of Artificial Sequence: Synthetic oligonucleotide
acuuaauaaauuguggcga

SEQ ID NO: 497256 - RNA, 19 nt, Artificial Sequence
  Description of Artificial Sequence: Synthetic oligonucleotide
accuuuauccaaaucuugc

SEQ ID NO: 497257 - RNA, 19 nt, Artificial Sequence
  Description of Artificial Sequence: Synthetic oligonucleotide
uuuaugaacauaaguugua

SEQ ID NO: 497258 - RNA, 19 nt, Artificial Sequence
  Description of Artificial Sequence: Synthetic oligonucleotide
gaaaugauaucauccguga

SEQ ID NO: 497259 - RNA, 19 nt, Artificial Sequence
  Description of Artificial Sequence: Synthetic oligonucleotide
augauaucauccgugaaag

SEQ ID NO: 497260 - RNA, 19 nt, Artificial Sequence
  Description of Artificial Sequence: Synthetic oligonucleotide
uccagaucaauacauuuau

SEQ ID NO: 497261 - RNA, 19 nt, Artificial Sequence
  Description of Artificial Sequence: Synthetic oligonucleotide
cuuagaggcggccaugacg

SEQ ID NO: 497262 - RNA, 19 nt, Artificial Sequence
  Description of Artificial Sequence: Synthetic oligonucleotide
guuguugaucuguuaaugc

SEQ ID NO: 497263 - RNA, 19 nt, Artificial Sequence
  Description of Artificial Sequence: Synthetic oligonucleotide
ucaauaguucccaugguuu

SEQ ID NO: 497264 - RNA, 19 nt, Artificial Sequence
  Description of Artificial Sequence: Synthetic oligonucleotide
uuaauagguuuuaagcuuu

SEQ ID NO: 497265 - RNA, 19 nt, Artificial Sequence
  Description of Artificial Sequence: Synthetic oligonucleotide
uaugccuggcgauacaaug

SEQ ID NO: 497266 - RNA, 19 nt, Artificial Sequence
  Description of Artificial Sequence: Synthetic oligonucleotide
caucgcaaagugaauacag

SEQ ID NO: 497267 - RNA, 19 nt, Artificial Sequence
  Description of Artificial Sequence: Synthetic oligonucleotide
uuaucuaaaucagguuugg

SEQ ID NO: 497268 - RNA, 19 nt, Artificial Sequence
  Description of Artificial Sequence: Synthetic oligonucleotide
auaucauccgugaaagaac

SEQ ID NO: 497269 - RNA, 19 nt, Artificial Sequence
  Description of Artificial Sequence: Synthetic oligonucleotide
gauaucauccgugaaagaa

SEQ ID NO: 497270 - RNA, 19 nt, Artificial Sequence
  Description of Artificial Sequence: Synthetic oligonucleotide
acacgcaucaaagucugcc

SEQ ID NO: 497271 - RNA, 19 nt, Artificial Sequence
  Description of Artificial Sequence: Synthetic oligonucleotide
uuaugaucuugucauaguu

SEQ ID NO: 497272 - RNA, 19 nt, Artificial Sequence
  Description of Artificial Sequence: Synthetic oligonucleotide
agaucaauacauuuaucau

SEQ ID NO: 497273 - RNA, 19 nt, Artificial Sequence
  Description of Artificial Sequence: Synthetic oligonucleotide
ugcuacuucugucugggca

SEQ ID NO: 497274 - RNA, 19 nt, Artificial Sequence
  Description of Artificial Sequence: Synthetic oligonucleotide
agcauugaauagcuuguuc

SEQ ID NO: 497275 - RNA, 19 nt, Artificial Sequence
  Description of Artificial Sequence: Synthetic oligonucleotide
aaauuguggcgauggcauc

SEQ ID NO: 497276 - RNA, 19 nt, Artificial Sequence
  Description of Artificial Sequence: Synthetic oligonucleotide
aauauuuguugccuuuauu

SEQ ID NO: 497277 - RNA, 19 nt, Artificial Sequence
  Description of Artificial Sequence: Synthetic oligonucleotide
uucccgagaaguuuaagaa

SEQ ID NO: 497278 - RNA, 19 nt, Artificial Sequence
  Description of Artificial Sequence: Synthetic oligonucleotide
aacugaugaccuuaucuaa

SEQ ID NO: 497279 - RNA, 19 nt, Artificial Sequence
  Description of Artificial Sequence: Synthetic oligonucleotide
ucgguauagcauugaauag

SEQ ID NO: 497280 - RNA, 19 nt, Artificial Sequence
  Description of Artificial Sequence: Synthetic oligonucleotide
guggugauaaacaucggag

SEQ ID NO: 497281 - RNA, 19 nt, Artificial Sequence
  Description of Artificial Sequence: Synthetic oligonucleotide
uguacaauccugugccacc

SEQ ID NO: 497282 - RNA, 19 nt, Artificial Sequence
  Description of Artificial Sequence: Synthetic oligonucleotide
auaaacaucggaguucuga

SEQ ID NO: 497283 - RNA, 19 nt, Artificial Sequence
  Description of Artificial Sequence: Synthetic oligonucleotide
auugguugagaaaugauau

SEQ ID NO: 497284 - RNA, 19 nt, Artificial Sequence
  Description of Artificial Sequence: Synthetic oligonucleotide
caugaaacagauguaauga

SEQ ID NO: 497285 - RNA, 19 nt, Artificial Sequence
  Description of Artificial Sequence: Synthetic oligonucleotide
acuaauagccucgguauag

SEQ ID NO: 497286 - RNA, 19 nt, Artificial Sequence
  Description of Artificial Sequence: Synthetic oligonucleotide
cucgguauagcauugaaua

SEQ ID NO: 497287 - RNA, 19 nt, Artificial Sequence
  Description of Artificial Sequence: Synthetic oligonucleotide
ucggagcuucacauuagcg

SEQ ID NO: 497288 - RNA, 19 nt, Artificial Sequence
  Description of Artificial Sequence: Synthetic oligonucleotide
ugucggugguuuuaauccg

SEQ ID NO: 497289 - RNA, 19 nt, Artificial Sequence
  Description of Artificial Sequence: Synthetic oligonucleotide
uggcaucagagguucacgg

SEQ ID NO: 497290 - RNA, 19 nt, Artificial Sequence
  Description of Artificial Sequence: Synthetic oligonucleotide
uggugauaaacaucggagu

SEQ ID NO: 497291 - RNA, 19 nt, Artificial Sequence
  Description of Artificial Sequence: Synthetic oligonucleotide
uaaugccugggcauaaagu

SEQ ID NO: 497292 - RNA, 19 nt, Artificial Sequence
  Description of Artificial Sequence: Synthetic oligonucleotide
cuuuaugacuucuucaaaa

SEQ ID NO: 497293 - RNA, 19 nt, Artificial Sequence
  Description of Artificial Sequence: Synthetic oligonucleotide
ucauccgugaaagaacuga

SEQ ID NO: 497294 - RNA, 19 nt, Artificial Sequence
  Description of Artificial Sequence: Synthetic oligonucleotide
ugguuuuauaaugucggug

SEQ ID NO: 497295 - RNA, 19 nt, Artificial Sequence
  Description of Artificial Sequence: Synthetic oligonucleotide
uuaaccuaauacacgcauc

SEQ ID NO: 497296 - RNA, 19 nt, Artificial Sequence
  Description of Artificial Sequence: Synthetic oligonucleotide
uggaagccuucuaauauac

SEQ ID NO: 497297 - RNA, 19 nt, Artificial Sequence
  Description of Artificial Sequence: Synthetic oligonucleotide
uccuuuaagcauugguuga

SEQ ID NO: 497298 - RNA, 19 nt, Artificial Sequence
  Description of Artificial Sequence: Synthetic oligonucleotide
auaaauuguggcgauggca

SEQ ID NO: 497299 - RNA, 19 nt, Artificial Sequence
  Description of Artificial Sequence: Synthetic oligonucleotide
aaaugauaucauccgugaa

SEQ ID NO: 497300 - RNA, 19 nt, Artificial Sequence
  Description of Artificial Sequence: Synthetic oligonucleotide
uccucgguggugauaaaca

SEQ ID NO: 497301 - RNA, 19 nt, Artificial Sequence
  Description of Artificial Sequence: Synthetic oligonucleotide
agaacuuuaucagcuaaca

SEQ ID NO: 497302 - RNA, 19 nt, Artificial Sequence
  Description of Artificial Sequence: Synthetic oligonucleotide
aguuguagcauuaucuggu

SEQ ID NO: 497303 - RNA, 19 nt, Artificial Sequence
  Description of Artificial Sequence: Synthetic oligonucleotide
ucgcaaagugaauacagau

SEQ ID NO: 497304 - RNA, 19 nt, Artificial Sequence
  Description of Artificial Sequence: Synthetic oligonucleotide
ucuuaaccuaauacacgca

SEQ ID NO: 497305 - RNA, 19 nt, Artificial Sequence
  Description of Artificial Sequence: Synthetic oligonucleotide
ugcuguguaugccuggcga

SEQ ID NO: 497306 - RNA, 19 nt, Artificial Sequence
  Description of Artificial Sequence: Synthetic oligonucleotide
ggcgauacaaugcaaaaca

SEQ ID NO: 497307 - RNA, 19 nt, Artificial Sequence
  Description of Artificial Sequence: Synthetic oligonucleotide
aauagguuuuaagcuuuug

SEQ ID NO: 497308 - RNA, 19 nt, Artificial Sequence
  Description of Artificial Sequence: Synthetic oligonucleotide
augaccuuaucuaaaucag

SEQ ID NO: 497309 - RNA, 19 nt, Artificial Sequence
  Description of Artificial Sequence: Synthetic oligonucleotide
caguaguaaggcuucugcc

SEQ ID NO: 497310 - RNA, 19 nt, Artificial Sequence
  Description of Artificial Sequence: Synthetic oligonucleotide
ugagcuccaaaccuuuauc

SEQ ID NO: 497311 - RNA, 19 nt, Artificial Sequence
  Description of Artificial Sequence: Synthetic oligonucleotide
uuaauaaauuguggcgaug

SEQ ID NO: 497312 - RNA, 19 nt, Artificial Sequence
  Description of Artificial Sequence: Synthetic oligonucleotide
ucuaaagcuucuccuuccu

SEQ ID NO: 497313 - RNA, 19 nt, Artificial Sequence
  Description of Artificial Sequence: Synthetic oligonucleotide
auacaaugcaaaacacuuc

SEQ ID NO: 497314 - RNA, 19 nt, Artificial Sequence
  Description of Artificial Sequence: Synthetic oligonucleotide
auacuaaguuccaccauuc

SEQ ID NO: 497315 - RNA, 19 nt, Artificial Sequence
  Description of Artificial Sequence: Synthetic oligonucleotide
uuauuugcauggccaauua

SEQ ID NO: 497316 - RNA, 19 nt, Artificial Sequence
  Description of Artificial Sequence: Synthetic oligonucleotide
auagcauugaauagcuugu

SEQ ID NO: 497317 - RNA, 19 nt, Artificial Sequence
  Description of Artificial Sequence: Synthetic oligonucleotide
uaauagccucgguauagca

SEQ ID NO: 497318 - RNA, 19 nt, Artificial Sequence
  Description of Artificial Sequence: Synthetic oligonucleotide
caaacuaauagccucggua

SEQ ID NO: 497319 - RNA, 19 nt, Artificial Sequence
  Description of Artificial Sequence: Synthetic oligonucleotide
ucccgagaaguuuaagaac

SEQ ID NO: 497320 - RNA, 19 nt, Artificial Sequence
  Description of Artificial Sequence: Synthetic oligonucleotide
augccuggcgauacaaugc

SEQ ID NO: 497321 - RNA, 19 nt, Artificial Sequence
  Description of Artificial Sequence: Synthetic oligonucleotide
gcauugaauagcuuguuca

SEQ ID NO: 497322 - RNA, 19 nt, Artificial Sequence
  Description of Artificial Sequence: Synthetic oligonucleotide
uugguuuuauaaugucggu

SEQ ID NO: 497323 - RNA, 19 nt, Artificial Sequence
  Description of Artificial Sequence: Synthetic oligonucleotide
cauaggcugcuguugcugc

SEQ ID NO: 497324 - RNA, 19 nt, Artificial Sequence
  Description of Artificial Sequence: Synthetic oligonucleotide
uugaaauauuuguugccuu

SEQ ID NO: 497325 - RNA, 19 nt, Artificial Sequence
  Description of Artificial Sequence: Synthetic oligonucleotide
cauugguugagaaaugaua

SEQ ID NO: 497326 - RNA, 19 nt, Artificial Sequence
  Description of Artificial Sequence: Synthetic oligonucleotide
aacuaauagccucgguaua

SEQ ID NO: 497327 - RNA, 19 nt, Artificial Sequence
  Description of Artificial Sequence: Synthetic oligonucleotide
augccugggcauaaagugc

SEQ ID NO: 497328 - RNA, 19 nt, Artificial Sequence
  Description of Artificial Sequence: Synthetic oligonucleotide
ugcucggagcuucacauua

SEQ ID NO: 497329 - RNA, 19 nt, Artificial Sequence
  Description of Artificial Sequence: Synthetic oligonucleotide
gagggcauuugcucggagc

SEQ ID NO: 497330 - RNA, 19 nt, Artificial Sequence
  Description of Artificial Sequence: Synthetic oligonucleotide
agccacgugccaucgcgcc

SEQ ID NO: 497331 - RNA, 19 nt, Artificial Sequence
  Description of Artificial Sequence: Synthetic oligonucleotide
aggguucaguugaagaggg

SEQ ID NO: 497332 - RNA, 19 nt, Artificial Sequence
  Description of Artificial Sequence: Synthetic oligonucleotide
uuuguacaauccugugcca

SEQ ID NO: 497333 - RNA, 19 nt, Artificial Sequence
  Description of Artificial Sequence: Synthetic oligonucleotide
agguucacgguucuuguau

SEQ ID NO: 497334 - RNA, 19 nt, Artificial Sequence
  Description of Artificial Sequence: Synthetic oligonucleotide
ggucuuaaccuaauacacg

SEQ ID NO: 497335 - RNA, 19 nt, Artificial Sequence
  Description of Artificial Sequence: Synthetic oligonucleotide
aauagccucgguauagcau

SEQ ID NO: 497336 - RNA, 19 nt, Artificial Sequence
  Description of Artificial Sequence: Synthetic oligonucleotide
acgacuguccgccgccgcc

SEQ ID NO: 497337 - RNA, 19 nt, Artificial Sequence
  Description of Artificial Sequence: Synthetic oligonucleotide
agagguucacgguucuugu

SEQ ID NO: 497338 - RNA, 19 nt, Artificial Sequence
  Description of Artificial Sequence: Synthetic oligonucleotide
accuuucauagcugccugg

SEQ ID NO: 497339 - RNA, 19 nt, Artificial Sequence
  Description of Artificial Sequence: Synthetic oligonucleotide
caccuaaacaugaaacaga

SEQ ID NO: 497340 - RNA, 19 nt, Artificial Sequence
  Description of Artificial Sequence: Synthetic oligonucleotide
uuguagcauuaucugguuc

SEQ ID NO: 497341 - RNA, 19 nt, Artificial Sequence
  Description of Artificial Sequence: Synthetic oligonucleotide
gucuaaagagagcuuucac

SEQ ID NO: 497342 - RNA, 19 nt, Artificial Sequence
  Description of Artificial Sequence: Synthetic oligonucleotide
cuaauagccucgguauagc

SEQ ID NO: 497343 - RNA, 19 nt, Artificial Sequence
  Description of Artificial Sequence: Synthetic oligonucleotide
uguguaugccuggcgauac

SEQ ID NO: 497344 - RNA, 19 nt, Artificial Sequence
  Description of Artificial Sequence: Synthetic oligonucleotide
acuagauccagcagaauuu

SEQ ID NO: 497345 - RNA, 19 nt, Artificial Sequence
  Description of Artificial Sequence: Synthetic oligonucleotide
ugauaucauccgugaaaga

SEQ ID NO: 497346 - RNA, 19 nt, Artificial Sequence
  Description of Artificial Sequence: Synthetic oligonucleotide
gaccuuaucuaaaucaggu

SEQ ID NO: 497347 - RNA, 19 nt, Artificial Sequence
  Description of Artificial Sequence: Synthetic oligonucleotide
caucacaaagggaauacua

SEQ ID NO: 497348 - RNA, 19 nt, Artificial Sequence
  Description of Artificial Sequence: Synthetic oligonucleotide
uugcauggccaauuacugu

SEQ ID NO: 497349 - RNA, 19 nt, Artificial Sequence
  Description of Artificial Sequence: Synthetic oligonucleotide
gugauaaacaucggaguuc

SEQ ID NO: 497350 - RNA, 19 nt, Artificial Sequence
  Description of Artificial Sequence: Synthetic oligonucleotide
uccucucugcacuucaaua

SEQ ID NO: 497351 - RNA, 19 nt, Artificial Sequence
  Description of Artificial Sequence: Synthetic oligonucleotide
caucagagguucacgguuc

SEQ ID NO: 497352 - RNA, 19 nt, Artificial Sequence
  Description of Artificial Sequence: Synthetic oligonucleotide
auacacgcaucaaagucug

SEQ ID NO: 497353 - RNA, 19 nt, Artificial Sequence
  Description of Artificial Sequence: Synthetic oligonucleotide
ucucugcacuucaauaguu

SEQ ID NO: 497354 - RNA, 19 nt, Artificial Sequence
  Description of Artificial Sequence: Synthetic oligonucleotide
cuaaaucagguuuggccga

SEQ ID NO: 497355 - RNA, 19 nt, Artificial Sequence
  Description of Artificial Sequence: Synthetic oligonucleotide
cucgcaguaguaaggcuuc

SEQ ID NO: 497356 - RNA, 19 nt, Artificial Sequence
  Description of Artificial Sequence: Synthetic oligonucleotide
ugguuuuaauccguauuuc

SEQ ID NO: 497357 - RNA, 19 nt, Artificial Sequence
  Description of Artificial Sequence: Synthetic oligonucleotide
guucaacagccuuuguaca

SEQ ID NO: 497358 - RNA, 19 nt, Artificial Sequence
  Description of Artificial Sequence: Synthetic oligonucleotide
gauuaaguucaacagccuu

SEQ ID NO: 497359 - RNA, 19 nt, Artificial Sequence
  Description of Artificial Sequence: Synthetic oligonucleotide
uguaugccuggcgauacaa

SEQ ID NO: 497360 - RNA, 19 nt, Artificial Sequence
  Description of Artificial Sequence: Synthetic oligonucleotide
gguggugauaaacaucgga

SEQ ID NO: 497361 - RNA, 19 nt, Artificial Sequence
  Description of Artificial Sequence: Synthetic oligonucleotide
gggucuuaaccuaauacac

SEQ ID NO: 497362 - RNA, 19 nt, Artificial Sequence
  Description of Artificial Sequence: Synthetic oligonucleotide
cucgguggugauaaacauc

SEQ ID NO: 497363 - RNA, 19 nt, Artificial Sequence
  Description of Artificial Sequence: Synthetic oligonucleotide
cucggagcuucacauuagc

SEQ ID NO: 497364 - RNA, 19 nt, Artificial Sequence
  Description of Artificial Sequence: Synthetic oligonucleotide
uuccguucgcuguugcgcu

SEQ ID NO: 497365 - RNA, 19 nt, Artificial Sequence
  Description of Artificial Sequence: Synthetic oligonucleotide
acaaacuaauagccucggu

SEQ ID NO: 497366 - RNA, 19 nt, Artificial Sequence
  Description of Artificial Sequence: Synthetic oligonucleotide
ucacauuagcguccuucaa

SEQ ID NO: 497367 - RNA, 19 nt, Artificial Sequence
  Description of Artificial Sequence: Synthetic oligonucleotide
cagagguucacgguucuug

SEQ ID NO: 497368 - RNA, 19 nt, Artificial Sequence
  Description of Artificial Sequence: Synthetic oligonucleotide
ucaacagccuuuguacaau

SEQ ID NO: 497369 - RNA, 19 nt, Artificial Sequence
  Description of Artificial Sequence: Synthetic oligonucleotide
gguggcucgcaguaguaag

SEQ ID NO: 497370 - RNA, 19 nt, Artificial Sequence
  Description of Artificial Sequence: Synthetic oligonucleotide
cugcuugggcucuauccag

SEQ ID NO: 497371 - RNA, 19 nt, Artificial Sequence
  Description of Artificial Sequence: Synthetic oligonucleotide
ccagggagucaccagaacc

SEQ ID NO: 497372 - RNA, 19 nt, Artificial Sequence
  Description of Artificial Sequence: Synthetic oligonucleotide
guggcucgcaguaguaagg

SEQ ID NO: 497373 - RNA, 19 nt, Artificial Sequence
  Description of Artificial Sequence: Synthetic oligonucleotide
ugccaucgcgccagggucc

SEQ ID NO: 497374 - RNA, 19 nt, Artificial Sequence
  Description of Artificial Sequence: Synthetic oligonucleotide
uggcucgcaguaguaaggc

SEQ ID NO: 497375 - RNA, 19 nt, Artificial Sequence
  Description of Artificial Sequence: Synthetic oligonucleotide
auugaauagcuuguucaua

SEQ ID NO: 497376 - RNA, 19 nt, Artificial Sequence
  Description of Artificial Sequence: Synthetic oligonucleotide
agaacugggcgcagccgcc

SEQ ID NO: 497377 - RNA, 19 nt, Artificial Sequence
  Description of Artificial Sequence: Synthetic oligonucleotide
cccacaacaccuaaacaug

SEQ ID NO: 497378 - RNA, 19 nt, Artificial Sequence
  Description of Artificial Sequence: Synthetic oligonucleotide
uggccgaauuggcacugcc

SEQ ID NO: 497379 - RNA, 19 nt, Artificial Sequence
  Description of Artificial Sequence: Synthetic oligonucleotide
gugguuuuaauccguauuu

SEQ ID NO: 497380 - RNA, 19 nt, Artificial Sequence
  Description of Artificial Sequence: Synthetic oligonucleotide
cuaauacacgcaucaaagu

SEQ ID NO: 497381 - RNA, 19 nt, Artificial Sequence
  Description of Artificial Sequence: Synthetic oligonucleotide
acgucuaaagagagcuuuc

SEQ ID NO: 497382 - RNA, 19 nt, Artificial Sequence
  Description of Artificial Sequence: Synthetic oligonucleotide
cuuaauaaauuguggcgau

SEQ ID NO: 497383 - RNA, 19 nt, Artificial Sequence
  Description of Artificial Sequence: Synthetic oligonucleotide
ggcaucuauuuccuuugag

SEQ ID NO: 497384 - RNA, 19 nt, Artificial Sequence
  Description of Artificial Sequence: Synthetic oligonucleotide
aucgcaaagugaauacaga

SEQ ID NO: 497385 - RNA, 19 nt, Artificial Sequence
  Description of Artificial Sequence: Synthetic oligonucleotide
ugggcuuagaggcggccau

SEQ ID NO: 497386 - RNA, 19 nt, Artificial Sequence
  Description of Artificial Sequence: Synthetic oligonucleotide
aaccuaauacacgcaucaa

SEQ ID NO: 497387 - RNA, 19 nt, Artificial Sequence
  Description of Artificial Sequence: Synthetic oligonucleotide
cacgcaucaaagucugcca

SEQ ID NO: 497388 - RNA, 19 nt, Artificial Sequence
  Description of Artificial Sequence: Synthetic oligonucleotide
aucggaguucugagggucg

SEQ ID NO: 497389 - RNA, 19 nt, Artificial Sequence
  Description of Artificial Sequence: Synthetic oligonucleotide
gaaccgucgggguggccgc

SEQ ID NO: 497390 - RNA, 19 nt, Artificial Sequence
  Description of Artificial Sequence: Synthetic oligonucleotide
cauccgugaaagaacugaa

SEQ ID NO: 497391 - RNA, 19 nt, Artificial Sequence
  Description of Artificial Sequence: Synthetic oligonucleotide
guuuuauaaugucgguggu

SEQ ID NO: 497392 - RNA, 19 nt, Artificial Sequence
  Description of Artificial Sequence: Synthetic oligonucleotide
uacacgcaucaaagucugc

SEQ ID NO: 497393 - RNA, 19 nt, Artificial Sequence
  Description of Artificial Sequence: Synthetic oligonucleotide
ucggugguuuuaauccgua

SEQ ID NO: 497394 - RNA, 19 nt, Artificial Sequence
  Description of Artificial Sequence: Synthetic oligonucleotide
guaguaaggcuucugccau

SEQ ID NO: 497395 - RNA, 19 nt, Artificial Sequence
  Description of Artificial Sequence: Synthetic oligonucleotide
cuggcgauacaaugcaaaa

SEQ ID NO: 497396 - RNA, 19 nt, Artificial Sequence
  Description of Artificial Sequence: Synthetic oligonucleotide
gaacugggcgcagccgccg

SEQ ID NO: 497397 - RNA, 19 nt, Artificial Sequence
  Description of Artificial Sequence: Synthetic oligonucleotide
auaguucccaugguuucau

SEQ ID NO: 497398 - RNA, 19 nt, Artificial Sequence
  Description of Artificial Sequence: Synthetic oligonucleotide
uaaugucggugguuuuaau

SEQ ID NO: 497399 - RNA, 19 nt, Artificial Sequence
  Description of Artificial Sequence: Synthetic oligonucleotide
cuuuaagcauugguugaga

SEQ ID NO: 497400 - RNA, 19 nt, Artificial Sequence
  Description of Artificial Sequence: Synthetic oligonucleotide
cgguauagcauugaauagc

SEQ ID NO: 497401 - RNA, 19 nt, Artificial Sequence
  Description of Artificial Sequence: Synthetic oligonucleotide
cuuucccgagaaguuuaag

SEQ ID NO: 497402 - RNA, 19 nt, Artificial Sequence
  Description of Artificial Sequence: Synthetic oligonucleotide
gugccaucgcgccaggguc

SEQ ID NO: 497403 - RNA, 19 nt, Artificial Sequence
  Description of Artificial Sequence: Synthetic oligonucleotide
ggugauaaacaucggaguu

SEQ ID NO: 497404 - RNA, 19 nt, Artificial Sequence
  Description of Artificial Sequence: Synthetic oligonucleotide
gagcuugugccagagcaaa

SEQ ID NO: 497405 - RNA, 19 nt, Artificial Sequence
  Description of Artificial Sequence: Synthetic oligonucleotide
gcuccaaaccuuuauccaa

SEQ ID NO: 497406 - RNA, 19 nt, Artificial Sequence
  Description of Artificial Sequence: Synthetic oligonucleotide
agcuugugccagagcaaac

SEQ ID NO: 497407 - RNA, 19 nt, Artificial Sequence
  Description of Artificial Sequence: Synthetic oligonucleotide
ugacgacuguccgccgccg

SEQ ID NO: 497408 - RNA, 19 nt, Artificial Sequence
  Description of Artificial Sequence: Synthetic oligonucleotide
ccuuuaagcauugguugag

SEQ ID NO: 497409 - RNA, 19 nt, Artificial Sequence
  Description of Artificial Sequence: Synthetic oligonucleotide
ugggcucuauccagagaau

SEQ ID NO: 497410 - RNA, 19 nt, Artificial Sequence
  Description of Artificial Sequence: Synthetic oligonucleotide
aucgcgccaggguccccgc

SEQ ID NO: 497411 - RNA, 19 nt, Artificial Sequence
  Description of Artificial Sequence: Synthetic oligonucleotide
caucgcgccaggguccccg

SEQ ID NO: 497412 - RNA, 19 nt, Artificial Sequence
  Description of Artificial Sequence: Synthetic oligonucleotide
gcuaacagcaugcucugcu

SEQ ID NO: 497413 - RNA, 19 nt, Artificial Sequence
  Description of Artificial Sequence: Synthetic oligonucleotide
uagcauugaauagcuuguu

SEQ ID NO: 497414 - RNA, 19 nt, Artificial Sequence
  Description of Artificial Sequence: Synthetic oligonucleotide
gccgaauuggcacugccaa

SEQ ID NO: 497415 - RNA, 19 nt, Artificial Sequence
  Description of Artificial Sequence: Synthetic oligonucleotide
aggguccccgcgcccgagc

SEQ ID NO: 497416 - RNA, 19 nt, Artificial Sequence
  Description of Artificial Sequence: Synthetic oligonucleotide
augcacauggugccucuuu

SEQ ID NO: 497417 - RNA, 19 nt, Artificial Sequence
  Description of Artificial Sequence: Synthetic oligonucleotide
gacgacuguccgccgccgc

SEQ ID NO: 497418 - RNA, 19 nt, Artificial Sequence
  Description of Artificial Sequence: Synthetic oligonucleotide
guccucgguggugauaaac

SEQ ID NO: 497419 - RNA, 19 nt, Artificial Sequence
  Description of Artificial Sequence: Synthetic oligonucleotide
gccuuuguacaauccugug

SEQ ID NO: 497420 - RNA, 19 nt, Artificial Sequence
  Description of Artificial Sequence: Synthetic oligonucleotide
ggcucuauccagagaauuc

SEQ ID NO: 497421 - RNA, 19 nt, Artificial Sequence
  Description of Artificial Sequence: Synthetic oligonucleotide
caucgccgccuccaugggc

SEQ ID NO: 497422 - RNA, 19 nt, Artificial Sequence
  Description of Artificial Sequence: Synthetic oligonucleotide
gcgauacaaugcaaaacac

SEQ ID NO: 497423 - RNA, 19 nt, Artificial Sequence
  Description of Artificial Sequence: Synthetic oligonucleotide
gcauaaagugcauagccuu

SEQ ID NO: 497424 - RNA, 19 nt, Artificial Sequence
  Description of Artificial Sequence: Synthetic oligonucleotide
aucagacuucucuccuuua

SEQ ID NO: 497425 - RNA, 19 nt, Artificial Sequence
  Description of Artificial Sequence: Synthetic oligonucleotide
ccuuaucuaaaucagguuu

SEQ ID NO: 497426 - RNA, 19 nt, Artificial Sequence
  Description of Artificial Sequence: Synthetic oligonucleotide
guagaagguggcucgcagu

SEQ ID NO: 497427 - RNA, 19 nt, Artificial Sequence
  Description of Artificial Sequence: Synthetic oligonucleotide
gucuuccguucgcuguugc

SEQ ID NO: 497428 - RNA, 19 nt, Artificial Sequence
  Description of Artificial Sequence: Synthetic oligonucleotide
cgugaaagaacugaaguaa

SEQ ID NO: 497429 - RNA, 19 nt, Artificial Sequence
  Description of Artificial Sequence: Synthetic oligonucleotide
augggcuuagaggcggcca

SEQ ID NO: 497430 - RNA, 19 nt, Artificial Sequence
  Description of Artificial Sequence: Synthetic oligonucleotide
gcggccaugacgacugucc

SEQ ID NO: 497431 - RNA, 19 nt, Artificial Sequence
  Description of Artificial Sequence: Synthetic oligonucleotide
aucauccgugaaagaacug

SEQ ID NO: 497432 - RNA, 19 nt, Artificial Sequence
  Description of Artificial Sequence: Synthetic oligonucleotide
cuccggggucuuccguucg

SEQ ID NO: 497433 - RNA, 19 nt, Artificial Sequence
  Description of Artificial Sequence: Synthetic oligonucleotide
ccacaacaccuaaacauga

SEQ ID NO: 497434 - RNA, 19 nt, Artificial Sequence
  Description of Artificial Sequence: Synthetic oligonucleotide
caccgcccacuccauuucc

SEQ ID NO: 497435 - RNA, 19 nt, Artificial Sequence
  Description of Artificial Sequence: Synthetic oligonucleotide
cuugggucuuaaccuaaua

SEQ ID NO: 497436 - RNA, 19 nt, Artificial Sequence
  Description of Artificial Sequence: Synthetic oligonucleotide
ggccaugacgacuguccgc

SEQ ID NO: 497437 - RNA, 19 nt, Artificial Sequence
  Description of Artificial Sequence: Synthetic oligonucleotide
gguugauagcuuuguugaa

SEQ ID NO: 497438 - RNA, 19 nt, Artificial Sequence
  Description of Artificial Sequence: Synthetic oligonucleotide
cuguuguugaucuguuaau

SEQ ID NO: 497439 - RNA, 19 nt, Artificial Sequence
  Description of Artificial Sequence: Synthetic oligonucleotide
ccaaaccuuuauccaaauc

SEQ ID NO: 497440 - RNA, 19 nt, Artificial Sequence
  Description of Artificial Sequence: Synthetic oligonucleotide
agcuuuuguugcacaggga

SEQ ID NO: 497441 - RNA, 19 nt, Artificial Sequence
  Description of Artificial Sequence: Synthetic oligonucleotide
gccagcgucggggagggag

SEQ ID NO: 497442 - RNA, 19 nt, Artificial Sequence
  Description of Artificial Sequence: Synthetic oligonucleotide
uaguucccaugguuucaua

SEQ ID NO: 497443 - RNA, 19 nt, Artificial Sequence
  Description of Artificial Sequence: Synthetic oligonucleotide
ccuggcgauacaaugcaaa

SEQ ID NO: 497444 - RNA, 19 nt, Artificial Sequence
  Description of Artificial Sequence: Synthetic oligonucleotide
ccgugaaagaacugaagua

SEQ ID NO: 497445 - RNA, 19 nt, Artificial Sequence
  Description of Artificial Sequence: Synthetic oligonucleotide
gcauuaucugguuccagau

SEQ ID NO: 497446 - RNA, 19 nt, Artificial Sequence
  Description of Artificial Sequence: Synthetic oligonucleotide
ugcuuccacugaaguugaa

SEQ ID NO: 497447 - RNA, 19 nt, Artificial Sequence
  Description of Artificial Sequence: Synthetic oligonucleotide
acuugggucuuaaccuaau

SEQ ID NO: 497448 - RNA, 19 nt, Artificial Sequence
  Description of Artificial Sequence: Synthetic oligonucleotide
cucaugggcuuuugcacgu

SEQ ID NO: 497449 - RNA, 19 nt, Artificial Sequence
  Description of Artificial Sequence: Synthetic oligonucleotide
guguaugccuggcgauaca

SEQ ID NO: 497450 - RNA, 19 nt, Artificial Sequence
  Description of Artificial Sequence: Synthetic oligonucleotide
agguggcucgcaguaguaa

SEQ ID NO: 497451 - RNA, 19 nt, Artificial Sequence
  Description of Artificial Sequence: Synthetic oligonucleotide
cauuuccgacuuggccagg

SEQ ID NO: 497452 - RNA, 19 nt, Artificial Sequence
  Description of Artificial Sequence: Synthetic oligonucleotide
cacgucuaaagagagcuuu

SEQ ID NO: 497453 - RNA, 19 nt, Artificial Sequence
  Description of Artificial Sequence: Synthetic oligonucleotide
gcaucgcaaagugaauaca

SEQ ID NO: 497454 - RNA, 19 nt, Artificial Sequence
  Description of Artificial Sequence: Synthetic oligonucleotide
ggguucaguugaagagggg

SEQ ID NO: 497455 - RNA, 19 nt, Artificial Sequence
  Description of Artificial Sequence: Synthetic oligonucleotide
cauauacuguuuagcuuuu

SEQ ID NO: 497456 - RNA, 19 nt, Artificial Sequence
  Description of Artificial Sequence: Synthetic oligonucleotide
caacaggggcgccccgaug

SEQ ID NO: 497457 - RNA, 19 nt, Artificial Sequence
  Description of Artificial Sequence: Synthetic oligonucleotide
gucgccccggccucccgcc

SEQ ID NO: 497458 - RNA, 19 nt, Artificial Sequence
  Description of Artificial Sequence: Synthetic oligonucleotide
gcucauuuuggaagccuuc

SEQ ID NO: 497459 - RNA, 19 nt, Artificial Sequence
  Description of Artificial Sequence: Synthetic oligonucleotide
cccaugguuucauaugcaa

SEQ ID NO: 497460 - RNA, 19 nt, Artificial Sequence
  Description of Artificial Sequence: Synthetic oligonucleotide
cuugugccagagcaaacuu

SEQ ID NO: 497461 - RNA, 19 nt, Artificial Sequence
  Description of Artificial Sequence: Synthetic oligonucleotide
gcugcaagacugcaaacuu

SEQ ID NO: 497462 - RNA, 19 nt, Artificial Sequence
  Description of Artificial Sequence: Synthetic oligonucleotide
caucagacuucucuccuuu

SEQ ID NO: 497463 - RNA, 19 nt, Artificial Sequence
  Description of Artificial Sequence: Synthetic oligonucleotide
cuagauccagcagaauuuu

SEQ ID NO: 497464 - RNA, 19 nt, Artificial Sequence
  Description of Artificial Sequence: Synthetic oligonucleotide
ggcaugggcagcaucgcaa

SEQ ID NO: 497465 - RNA, 19 nt, Artificial Sequence
  Description of Artificial Sequence: Synthetic oligonucleotide
gucgccgcgccacggucac

SEQ ID NO: 497466 - RNA, 19 nt, Artificial Sequence
  Description of Artificial Sequence: Synthetic oligonucleotide
ggccaauuacuguuuguau

SEQ ID NO: 497467 - RNA, 19 nt, Artificial Sequence
  Description of Artificial Sequence: Synthetic oligonucleotide
cuggcgucgccccggccuc

SEQ ID NO: 497468 - RNA, 19 nt, Artificial Sequence
  Description of Artificial Sequence: Synthetic oligonucleotide
ggcaucagagguucacggu

SEQ ID NO: 497469 - RNA, 19 nt, Artificial Sequence
  Description of Artificial Sequence: Synthetic oligonucleotide
ccgccuucggcuccacagg

SEQ ID NO: 497470 - RNA, 19 nt, Artificial Sequence
  Description of Artificial Sequence: Synthetic oligonucleotide
uccguucgcuguugcgcuu

SEQ ID NO: 497471 - RNA, 19 nt, Artificial Sequence
  Description of Artificial Sequence: Synthetic oligonucleotide
ggucaccgggccagcgucg

SEQ ID NO: 497472 - RNA, 19 nt, Artificial Sequence
  Description of Artificial Sequence: Synthetic oligonucleotide
acgugccaucgcgccaggg

SEQ ID NO: 497473 - RNA, 19 nt, Artificial Sequence
  Description of Artificial Sequence: Synthetic oligonucleotide
gcuuagaggcggccaugac

SEQ ID NO: 497474 - RNA, 19 nt, Artificial Sequence
  Description of Artificial Sequence: Synthetic oligonucleotide
gucggugguuuuaauccgu

SEQ ID NO: 497475 - RNA, 19 nt, Artificial Sequence
  Description of Artificial Sequence: Synthetic oligonucleotide
ccgcccacuccauuuccag

SEQ ID NO: 497476 - RNA, 19 nt, Artificial Sequence
  Description of Artificial Sequence: Synthetic oligonucleotide
ggauuaaguucaacagccu

SEQ ID NO: 497477 - RNA, 19 nt, Artificial Sequence
  Description of Artificial Sequence: Synthetic oligonucleotide
ugcuuuccccuugguuuua

SEQ ID NO: 497478 - RNA, 19 nt, Artificial Sequence
  Description of Artificial Sequence: Synthetic oligonucleotide
accauucaacacaguucau

SEQ ID NO: 497479 - RNA, 19 nt, Artificial Sequence
  Description of Artificial Sequence: Synthetic oligonucleotide
ggggucuuccguucgcugu

SEQ ID NO: 497480 - RNA, 19 nt, Artificial Sequence
  Description of Artificial Sequence: Synthetic oligonucleotide
ggccgaauuggcacugcca

SEQ ID NO: 497481 - RNA, 19 nt, Artificial Sequence
  Description of Artificial Sequence: Synthetic oligonucleotide
gccucgguauagcauugaa

SEQ ID NO: 497482 - RNA, 19 nt, Artificial Sequence
  Description of Artificial Sequence: Synthetic oligonucleotide
ggucuuccguucgcuguug

SEQ ID NO: 497483 - RNA, 19 nt, Artificial Sequence
  Description of Artificial Sequence: Synthetic oligonucleotide
aaccgucgggguggccgcu

SEQ ID NO: 497484 - RNA, 19 nt, Artificial Sequence
  Description of Artificial Sequence: Synthetic oligonucleotide
cugcucauuuuggaagccu

SEQ ID NO: 497485 - RNA, 19 nt, Artificial Sequence
  Description of Artificial Sequence: Synthetic oligonucleotide
gguucacgguucuuguauu

SEQ ID NO: 497486 - RNA, 19 nt, Artificial Sequence
  Description of Artificial Sequence: Synthetic oligonucleotide
cgucuaaagagagcuuuca

SEQ ID NO: 497487 - RNA, 19 nt, Artificial Sequence
  Description of Artificial Sequence: Synthetic oligonucleotide
gcucgcaguaguaaggcuu

SEQ ID NO: 497488 - RNA, 19 nt, Artificial Sequence
  Description of Artificial Sequence: Synthetic oligonucleotide
cagcacaccuuggaaauuu

SEQ ID NO: 497489 - RNA, 19 nt, Artificial Sequence
  Description of Artificial Sequence: Synthetic oligonucleotide
agccgccgccgccgccgcc

SEQ ID NO: 497490 - RNA, 19 nt, Artificial Sequence
  Description of Artificial Sequence: Synthetic oligonucleotide
ggcgccccgauggccagag

SEQ ID NO: 497491 - RNA, 19 nt, Artificial Sequence
  Description of Artificial Sequence: Synthetic oligonucleotide
guaugccuggcgauacaau

SEQ ID NO: 497492 - RNA, 19 nt, Artificial Sequence
  Description of Artificial Sequence: Synthetic oligonucleotide
ccuccggggucuuccguuc

SEQ ID NO: 497493 - RNA, 19 nt, Artificial Sequence
  Description of Artificial Sequence: Synthetic oligonucleotide
guauagcauugaauagcuu

SEQ ID NO: 497494 - RNA, 19 nt, Artificial Sequence
  Description of Artificial Sequence: Synthetic oligonucleotide
ccucgguauagcauugaau

SEQ ID NO: 497495 - RNA, 19 nt, Artificial Sequence
  Description of Artificial Sequence: Synthetic oligonucleotide
gccacgugccaucgcgcca

SEQ ID NO: 497496 - RNA, 19 nt, Artificial Sequence
  Description of Artificial Sequence: Synthetic oligonucleotide
gccaucgcgccaggguccc

SEQ ID NO: 497497 - RNA, 19 nt, Artificial Sequence
  Description of Artificial Sequence: Synthetic oligonucleotide
cgccgcgccacggucaccg

SEQ ID NO: 497498 - RNA, 19 nt, Artificial Sequence
  Description of Artificial Sequence: Synthetic oligonucleotide
ggcucgcaguaguaaggcu

SEQ ID NO: 497499 - RNA, 19 nt, Artificial Sequence
  Description of Artificial Sequence: Synthetic oligonucleotide
ccucgguggugauaaacau

SEQ ID NO: 497500 - RNA, 19 nt, Artificial Sequence
  Description of Artificial Sequence: Synthetic oligonucleotide
cgacuguccgccgccgccg

SEQ ID NO: 497501 - RNA, 19 nt, Artificial Sequence
  Description of Artificial Sequence: Synthetic oligonucleotide
gggcucuauccagagaauu

SEQ ID NO: 497502 - RNA, 19 nt, Artificial Sequence
  Description of Artificial Sequence: Synthetic oligonucleotide
cggggucuuccguucgcug

SEQ ID NO: 497503 - RNA, 19 nt, Artificial Sequence
  Description of Artificial Sequence: Synthetic oligonucleotide
cagccgccgccgccgccgc

SEQ ID NO: 497504 - RNA, 19 nt, Artificial Sequence
  Description of Artificial Sequence: Synthetic oligonucleotide
ccguucgcuguugcgcuuc

SEQ ID NO: 497505 - RNA, 19 nt, Artificial Sequence
  Description of Artificial Sequence: Synthetic oligonucleotide
caacuagauccagcagaau

SEQ ID NO: 497506 - RNA, 19 nt, Artificial Sequence
  Description of Artificial Sequence: Synthetic oligonucleotide
ucgccgcgccacggucacc

SEQ ID NO: 497507 - RNA, 19 nt, Artificial Sequence
  Description of Artificial Sequence: Synthetic oligonucleotide
ccgagaaguuuaagaacuu

SEQ ID NO: 497508 - RNA, 19 nt, Artificial Sequence
  Description of Artificial Sequence: Synthetic oligonucleotide
ccgucgccgcgccacgguc

SEQ ID NO: 497509 - RNA, 19 nt, Artificial Sequence
  Description of Artificial Sequence: Synthetic oligonucleotide
cgugccaucgcgccagggu

SEQ ID NO: 497510 - RNA, 19 nt, Artificial Sequence
  Description of Artificial Sequence: Synthetic oligonucleotide
cgucgccccggccucccgc

SEQ ID NO: 497511 - RNA, 19 nt, Artificial Sequence
  Description of Artificial Sequence: Synthetic oligonucleotide
ccgaauuggcacugccaau

SEQ ID NO: 497512 - RNA, 19 nt, Artificial Sequence
  Description of Artificial Sequence: Synthetic oligonucleotide
cgagaaguuuaagaacuuu

SEQ ID NO: 497513 - RNA, 19 nt, Artificial Sequence
  Description of Artificial Sequence: Synthetic oligonucleotide
cgucgggguggccgcugcc

SEQ ID NO: 497514 - RNA, 19 nt, Artificial Sequence
  Description of Artificial Sequence: Synthetic oligonucleotide
gccgccgccgccgccgcca

SEQ ID NO: 497515 - RNA, 19 nt, Artificial Sequence
  Description of Artificial Sequence: Synthetic oligonucleotide
ccacggucaccgggccagc

SEQ ID NO: 497516 - RNA, 19 nt, Artificial Sequence
  Description of Artificial Sequence: Synthetic oligonucleotide
gcacgucuaaagagagcuu

SEQ ID NO: 497517 - RNA, 19 nt, Artificial Sequence
  Description of Artificial Sequence: Synthetic oligonucleotide
cggcgccuccgccuucggc

SEQ ID NO: 497518 - RNA, 19 nt, Artificial Sequence
  Description of Artificial Sequence: Synthetic oligonucleotide
cguucgcuguugcgcuuca

SEQ ID NO: 497519 - RNA, 19 nt, Artificial Sequence
  Description of Artificial Sequence: Synthetic oligonucleotide
ccggcgccuccgccuucgg

SEQ ID NO: 497520 - RNA, 19 nt, Artificial Sequence
  Description of Artificial Sequence: Synthetic oligonucleotide
cggugguuuuaauccguau

SEQ ID NO: 497521 - RNA, 19 nt, Artificial Sequence
  Description of Artificial Sequence: Synthetic oligonucleotide
gcgccccgauggccagagc

SEQ ID NO: 497522 - RNA, 19 nt, Artificial Sequence
  Description of Artificial Sequence: Synthetic oligonucleotide
ccaucgcgccagggucccc

SEQ ID NO: 497523 - RNA, 19 nt, Artificial Sequence
  Description of Artificial Sequence: Synthetic oligonucleotide
ccggggucuuccguucgcu

SEQ ID NO: 497524 - RNA, 19 nt, Artificial Sequence
  Description of Artificial Sequence: Synthetic oligonucleotide
gggcgccccgauggccaga

SEQ ID NO: 497525 - RNA, 19 nt, Artificial Sequence
  Description of Artificial Sequence: Synthetic oligonucleotide
ccgacuuggccagguugau

SEQ ID NO: 497526 - RNA, 19 nt, Artificial Sequence
  Description of Artificial Sequence: Synthetic oligonucleotide
ccgccgccgccgccgccau

SEQ ID NO: 497527 - RNA, 19 nt, Artificial Sequence
  Description of Artificial Sequence: Synthetic oligonucleotide
auuaaccucacuuuuauac

SEQ ID NO: 497528 - RNA, 19 nt, Artificial Sequence
  Description of Artificial Sequence: Synthetic oligonucleotide
aauaacacauuucaguugu

SEQ ID NO: 497529 - RNA, 19 nt, Artificial Sequence
  Description of Artificial Sequence: Synthetic oligonucleotide
uguuguauacaacagaugu

SEQ ID NO: 497530 - RNA, 19 nt, Artificial Sequence
  Description of Artificial Sequence: Synthetic oligonucleotide
aauuccgguugucugaucc

SEQ ID NO: 497531 - RNA, 19 nt, Artificial Sequence
  Description of Artificial Sequence: Synthetic oligonucleotide
aauuuucgccacuuuaagc

SEQ ID NO: 497532 - RNA, 19 nt, Artificial Sequence
  Description of Artificial Sequence: Synthetic oligonucleotide
aaacacgucaucaagcugc

SEQ ID NO: 497533 - RNA, 19 nt, Artificial Sequence
  Description of Artificial Sequence: Synthetic oligonucleotide
uuacauucauacuagagca

SEQ ID NO: 497534 - RNA, 19 nt, Artificial Sequence
  Description of Artificial Sequence: Synthetic oligonucleotide
ucauucagcucuaauaucc

SEQ ID NO: 497535 - RNA, 19 nt, Artificial Sequence
  Description of Artificial Sequence: Synthetic oligonucleotide
aauuauugcgcccacuuca

SEQ ID NO: 497536 - RNA, 19 nt, Artificial Sequence
  Description of Artificial Sequence: Synthetic oligonucleotide
uacauuauggcacagcccu

SEQ ID NO: 497537 - RNA, 19 nt, Artificial Sequence
  Description of Artificial Sequence: Synthetic oligonucleotide
uuguccuagaaucucaucc

SEQ ID NO: 497538 - RNA, 19 nt, Artificial Sequence
  Description of Artificial Sequence: Synthetic oligonucleotide
aaugaagcuagcuuuggcu

SEQ ID NO: 497539 - RNA, 19 nt, Artificial Sequence
  Description of Artificial Sequence: Synthetic oligonucleotide
ugaaacaucggcuccagcc

SEQ ID NO: 497540 - RNA, 19 nt, Artificial Sequence
  Description of Artificial Sequence: Synthetic oligonucleotide
aggacuuucagacugacca

SEQ ID NO: 497541 - RNA, 19 nt, Artificial Sequence
  Description of Artificial Sequence: Synthetic oligonucleotide
auuuucgccacuuuaagca

SEQ ID NO: 497542 - RNA, 19 nt, Artificial Sequence
  Description of Artificial Sequence: Synthetic oligonucleotide
ugcaguaacccuacaaagg

SEQ ID NO: 497543 - RNA, 19 nt, Artificial Sequence
  Description of Artificial Sequence: Synthetic oligonucleotide
uguaacuaaccacacacac

SEQ ID NO: 497544 - RNA, 19 nt, Artificial Sequence
  Description of Artificial Sequence: Synthetic oligonucleotide
aauugcacaaaccguagga

SEQ ID NO: 497545 - RNA, 19 nt, Artificial Sequence
  Description of Artificial Sequence: Synthetic oligonucleotide
uuuauacaguuacauaugu

SEQ ID NO: 497546 - RNA, 19 nt, Artificial Sequence
  Description of Artificial Sequence: Synthetic oligonucleotide
uugaugacuagcaaucuca

SEQ ID NO: 497547 - RNA, 19 nt, Artificial Sequence
  Description of Artificial Sequence: Synthetic oligonucleotide
ucaaguaagaacacagggu

SEQ ID NO: 497548 - RNA, 19 nt, Artificial Sequence
  Description of Artificial Sequence: Synthetic oligonucleotide
auuuuagggagccagaaaa

SEQ ID NO: 497549 - RNA, 19 nt, Artificial Sequence
  Description of Artificial Sequence: Synthetic oligonucleotide
acauauguacuaaaaggcc

SEQ ID NO: 497550 - RNA, 19 nt, Artificial Sequence
  Description of Artificial Sequence: Synthetic oligonucleotide
aaauugcacaaaccguagg

SEQ ID NO: 497551 - RNA, 19 nt, Artificial Sequence
  Description of Artificial Sequence: Synthetic oligonucleotide
aaauaauuauugcgcccac

SEQ ID NO: 497552 - RNA, 19 nt, Artificial Sequence
  Description of Artificial Sequence: Synthetic oligonucleotide
cacuacauuauugaaaacc

SEQ ID NO: 497553 - RNA, 19 nt, Artificial Sequence
  Description of Artificial Sequence: Synthetic oligonucleotide
auuuuauggcaugugacac

SEQ ID NO: 497554 - RNA, 19 nt, Artificial Sequence
  Description of Artificial Sequence: Synthetic oligonucleotide
uaauuuucgccacuuuaag

SEQ ID NO: 497555 - RNA, 19 nt, Artificial Sequence
  Description of Artificial Sequence: Synthetic oligonucleotide
cacucgaaugcauagacag

SEQ ID NO: 497556 - RNA, 19 nt, Artificial Sequence
  Description of Artificial Sequence: Synthetic oligonucleotide
aacagauguguaacuaacc

SEQ ID NO: 497557 - RNA, 19 nt, Artificial Sequence
  Description of Artificial Sequence: Synthetic oligonucleotide
gaaugcauagacaguaagg

SEQ ID NO: 497558 - RNA, 19 nt, Artificial Sequence
  Description of Artificial Sequence: Synthetic oligonucleotide
aacccuacaaaggcuauac

SEQ ID NO: 497559 - RNA, 19 nt, Artificial Sequence
  Description of Artificial Sequence: Synthetic oligonucleotide
cuaaugcucauuuaaaaga

SEQ ID NO: 497560 - RNA, 19 nt, Artificial Sequence
  Description of Artificial Sequence: Synthetic oligonucleotide
aaaaugggcuucuaaguaa

SEQ ID NO: 497561 - RNA, 19 nt, Artificial Sequence
  Description of Artificial Sequence: Synthetic oligonucleotide
uucgcucuuacucucacca

SEQ ID NO: 497562 - RNA, 19 nt, Artificial Sequence
  Description of Artificial Sequence: Synthetic oligonucleotide
aacuucgcaguuucugaac

SEQ ID NO: 497563 - RNA, 19 nt, Artificial Sequence
  Description of Artificial Sequence: Synthetic oligonucleotide
guugacuugcugaagaucc

SEQ ID NO: 497564 - RNA, 19 nt, Artificial Sequence
  Description of Artificial Sequence: Synthetic oligonucleotide
auagacaguaaggaugcgc

SEQ ID NO: 497565 - RNA, 19 nt, Artificial Sequence
  Description of Artificial Sequence: Synthetic oligonucleotide
acaaccugaaaacaccuug

SEQ ID NO: 497566 - RNA, 19 nt, Artificial Sequence
  Description of Artificial Sequence: Synthetic oligonucleotide
gacacuaucgucccaggcc

SEQ ID NO: 497567 - RNA, 19 nt, Artificial Sequence
  Description of Artificial Sequence: Synthetic oligonucleotide
acagauguguaacuaacca

SEQ ID NO: 497568 - RNA, 19 nt, Artificial Sequence
  Description of Artificial Sequence: Synthetic oligonucleotide
ugcacaaaccguaggaaca

SEQ ID NO: 497569 - RNA, 19 nt, Artificial Sequence
  Description of Artificial Sequence: Synthetic oligonucleotide
ucgaaacacgucaucaagc

SEQ ID NO: 497570 - RNA, 19 nt, Artificial Sequence
  Description of Artificial Sequence: Synthetic oligonucleotide
cauugacucgaagagaacg

SEQ ID NO: 497571 - RNA, 19 nt, Artificial Sequence
  Description of Artificial Sequence: Synthetic oligonucleotide
uacaucgacgucauaguug

SEQ ID NO: 497572 - RNA, 19 nt, Artificial Sequence
  Description of Artificial Sequence: Synthetic oligonucleotide
ugugauucacuccaggaua

SEQ ID NO: 497573 - RNA, 19 nt, Artificial Sequence
  Description of Artificial Sequence: Synthetic oligonucleotide
uaugugugggcucaauaca

SEQ ID NO: 497574 - RNA, 19 nt, Artificial Sequence
  Description of Artificial Sequence: Synthetic oligonucleotide
uucacgcugaauccaacag

SEQ ID NO: 497575 - RNA, 19 nt, Artificial Sequence
  Description of Artificial Sequence: Synthetic oligonucleotide
cagauugcacaauacuugg

SEQ ID NO: 497576 - RNA, 19 nt, Artificial Sequence
  Description of Artificial Sequence: Synthetic oligonucleotide
uuuauacuggucccucucc

SEQ ID NO: 497577 - RNA, 19 nt, Artificial Sequence
  Description of Artificial Sequence: Synthetic oligonucleotide
acauuauugaaaaccuuac

SEQ ID NO: 497578 - RNA, 19 nt, Artificial Sequence
  Description of Artificial Sequence: Synthetic oligonucleotide
acaguaaggaugcgcuugc

SEQ ID NO: 497579 - RNA, 19 nt, Artificial Sequence
  Description of Artificial Sequence: Synthetic oligonucleotide
acugagaaugaacauguga

SEQ ID NO: 497580 - RNA, 19 nt, Artificial Sequence
  Description of Artificial Sequence: Synthetic oligonucleotide
guaagcagaccucaucagg

SEQ ID NO: 497581 - RNA, 19 nt, Artificial Sequence
  Description of Artificial Sequence: Synthetic oligonucleotide
aaaccguaggaacaaccug

SEQ ID NO: 497582 - RNA, 19 nt, Artificial Sequence
  Description of Artificial Sequence: Synthetic oligonucleotide
auaugcacugaauuuucag

SEQ ID NO: 497583 - RNA, 19 nt, Artificial Sequence
  Description of Artificial Sequence: Synthetic oligonucleotide
ugaccauuaacacuuucaa

SEQ ID NO: 497584 - RNA, 19 nt, Artificial Sequence
  Description of Artificial Sequence: Synthetic oligonucleotide
uucaguuguggaaaauaug

SEQ ID NO: 497585 - RNA, 19 nt, Artificial Sequence
  Description of Artificial Sequence: Synthetic oligonucleotide
caaagcauauuuuauggca

SEQ ID NO: 497586 - RNA, 19 nt, Artificial Sequence
  Description of Artificial Sequence: Synthetic oligonucleotide
aaaauugcacaaaccguag

SEQ ID NO: 497587 - RNA, 19 nt, Artificial Sequence
  Description of Artificial Sequence: Synthetic oligonucleotide
gucacuacauuauugaaaa

SEQ ID NO: 497588 - RNA, 19 nt, Artificial Sequence
  Description of Artificial Sequence: Synthetic oligonucleotide
uuaacugcugcugaucuca

SEQ ID NO: 497589 - RNA, 19 nt, Artificial Sequence
  Description of Artificial Sequence: Synthetic oligonucleotide
acaucgacgucauaguuga

SEQ ID NO: 497590 - RNA, 19 nt, Artificial Sequence
  Description of Artificial Sequence: Synthetic oligonucleotide
uauugcgcccacuucacgc

SEQ ID NO: 497591 - RNA, 19 nt, Artificial Sequence
  Description of Artificial Sequence: Synthetic oligonucleotide
uuacauuauggcacagccc

SEQ ID NO: 497592 - RNA, 19 nt, Artificial Sequence
  Description of Artificial Sequence: Synthetic oligonucleotide
cauacuagagcagaagaug

SEQ ID NO: 497593 - RNA, 19 nt, Artificial Sequence
  Description of Artificial Sequence: Synthetic oligonucleotide
ucauacuagagcagaagau

SEQ ID NO: 497594 - RNA, 19 nt, Artificial Sequence
  Description of Artificial Sequence: Synthetic oligonucleotide
cacuacaucgacgucauag

SEQ ID NO: 497595 - RNA, 19 nt, Artificial Sequence
  Description of Artificial Sequence: Synthetic oligonucleotide
agcucuaauauccucugcu

SEQ ID NO: 497596 - RNA, 19 nt, Artificial Sequence
  Description of Artificial Sequence: Synthetic oligonucleotide
gacacucgaaugcauagac

SEQ ID NO: 497597 - RNA, 19 nt, Artificial Sequence
  Description of Artificial Sequence: Synthetic oligonucleotide
acaaaccguaggaacaacc

SEQ ID NO: 497598 - RNA, 19 nt, Artificial Sequence
  Description of Artificial Sequence: Synthetic oligonucleotide
uguccuagaaucucaucca

SEQ ID NO: 497599 - RNA, 19 nt, Artificial Sequence
  Description of Artificial Sequence: Synthetic oligonucleotide
ugaauaugcacugaauuuu

SEQ ID NO: 497600 - RNA, 19 nt, Artificial Sequence
  Description of Artificial Sequence: Synthetic oligonucleotide
aagugggauguaccaaauc

SEQ ID NO: 497601 - RNA, 19 nt, Artificial Sequence
  Description of Artificial Sequence: Synthetic oligonucleotide
ugugacacuaucgucccag

SEQ ID NO: 497602 - RNA, 19 nt, Artificial Sequence
  Description of Artificial Sequence: Synthetic oligonucleotide
gaacccaugucugaucagg

SEQ ID NO: 497603 - RNA, 19 nt, Artificial Sequence
  Description of Artificial Sequence: Synthetic oligonucleotide
aguuguggaaaauaugauu

SEQ ID NO: 497604 - RNA, 19 nt, Artificial Sequence
  Description of Artificial Sequence: Synthetic oligonucleotide
uuuuauacuggucccucuc

SEQ ID NO: 497605 - RNA, 19 nt, Artificial Sequence
  Description of Artificial Sequence: Synthetic oligonucleotide
ccuacaaaggcuauacagg

SEQ ID NO: 497606 - RNA, 19 nt, Artificial Sequence
  Description of Artificial Sequence: Synthetic oligonucleotide
cuauacaggaaauuucaca

SEQ ID NO: 497607 - RNA, 19 nt, Artificial Sequence
  Description of Artificial Sequence: Synthetic oligonucleotide
uauggcaugugacacuauc

SEQ ID NO: 497608 - RNA, 19 nt, Artificial Sequence
  Description of Artificial Sequence: Synthetic oligonucleotide
uggacacucgaaugcauag

SEQ ID NO: 497609 - RNA, 19 nt, Artificial Sequence
  Description of Artificial Sequence: Synthetic oligonucleotide
caccacuuguccuagaauc

SEQ ID NO: 497610 - RNA, 19 nt, Artificial Sequence
  Description of Artificial Sequence: Synthetic oligonucleotide
ucacgcugaauccaacagc

SEQ ID NO: 497611 - RNA, 19 nt, Artificial Sequence
  Description of Artificial Sequence: Synthetic oligonucleotide
ugacucgaagagaacgaag

SEQ ID NO: 497612 - RNA, 19 nt, Artificial Sequence
  Description of Artificial Sequence: Synthetic oligonucleotide
cugcaguaacccuacaaag

SEQ ID NO: 497613 - RNA, 19 nt, Artificial Sequence
  Description of Artificial Sequence: Synthetic oligonucleotide
agcaacaauaaaacuuugg

SEQ ID NO: 497614 - RNA, 19 nt, Artificial Sequence
  Description of Artificial Sequence: Synthetic oligonucleotide
ucuuguaaucaucucucuc

SEQ ID NO: 497615 - RNA, 19 nt, Artificial Sequence
  Description of Artificial Sequence: Synthetic oligonucleotide
caagcaucacacugaaccc

SEQ ID NO: 497616 - RNA, 19 nt, Artificial Sequence
  Description of Artificial Sequence: Synthetic oligonucleotide
ugcacaauacuugggacca

SEQ ID NO: 497617 - RNA, 19 nt, Artificial Sequence
  Description of Artificial Sequence: Synthetic oligonucleotide
uugugauucacuccaggau

SEQ ID NO: 497618 - RNA, 19 nt, Artificial Sequence
  Description of Artificial Sequence: Synthetic oligonucleotide
aaccugaaaacaccuuggu

SEQ ID NO: 497619 - RNA, 19 nt, Artificial Sequence
  Description of Artificial Sequence: Synthetic oligonucleotide
cacgaaauugacagcuucc

SEQ ID NO: 497620 - RNA, 19 nt, Artificial Sequence
  Description of Artificial Sequence: Synthetic oligonucleotide
gucgaaacacgucaucaag

SEQ ID NO: 497621 - RNA, 19 nt, Artificial Sequence
  Description of Artificial Sequence: Synthetic oligonucleotide
aaccguaggaacaaccuga

SEQ ID NO: 497622 - RNA, 19 nt, Artificial Sequence
  Description of Artificial Sequence: Synthetic oligonucleotide
agggucacuacauuauuga

SEQ ID NO: 497623 - RNA, 19 nt, Artificial Sequence
  Description of Artificial Sequence: Synthetic oligonucleotide
uuucgccacuuuaagcaag

SEQ ID NO: 497624 - RNA, 19 nt, Artificial Sequence
  Description of Artificial Sequence: Synthetic oligonucleotide
augcacugaauuuucagaa

SEQ ID NO: 497625 - RNA, 19 nt, Artificial Sequence
  Description of Artificial Sequence: Synthetic oligonucleotide
acuacaucgacgucauagu

SEQ ID NO: 497626 - RNA, 19 nt, Artificial Sequence
  Description of Artificial Sequence: Synthetic oligonucleotide
caugugacacuaucguccc

SEQ ID NO: 497627 - RNA, 19 nt, Artificial Sequence
  Description of Artificial Sequence: Synthetic oligonucleotide
aggucaggcacaaucauag

SEQ ID NO: 497628 - RNA, 19 nt, Artificial Sequence
  Description of Artificial Sequence: Synthetic oligonucleotide
ccugaaaacaccuugguga

SEQ ID NO: 497629 - RNA, 19 nt, Artificial Sequence
  Description of Artificial Sequence: Synthetic oligonucleotide
cagauguguaacuaaccac

SEQ ID NO: 497630 - RNA, 19 nt, Artificial Sequence
  Description of Artificial Sequence: Synthetic oligonucleotide
aucugguaauuuucgccac

SEQ ID NO: 497631 - RNA, 19 nt, Artificial Sequence
  Description of Artificial Sequence: Synthetic oligonucleotide
ccuacauugacucgaagag

SEQ ID NO: 497632 - RNA, 19 nt, Artificial Sequence
  Description of Artificial Sequence: Synthetic oligonucleotide
aucauagcaagcagcugcc

SEQ ID NO: 497633 - RNA, 19 nt, Artificial Sequence
  Description of Artificial Sequence: Synthetic oligonucleotide
gcaguaacccuacaaaggc

SEQ ID NO: 497634 - RNA, 19 nt, Artificial Sequence
  Description of Artificial Sequence: Synthetic oligonucleotide
aauaauuauugcgcccacu

SEQ ID NO: 497635 - RNA, 19 nt, Artificial Sequence
  Description of Artificial Sequence: Synthetic oligonucleotide
uugaucuauuccaucuggu

SEQ ID NO: 497636 - RNA, 19 nt, Artificial Sequence
  Description of Artificial Sequence: Synthetic oligonucleotide
ucucaguucccguaccuga

SEQ ID NO: 497637 - RNA, 19 nt, Artificial Sequence
  Description of Artificial Sequence: Synthetic oligonucleotide
auuucucuauuuccaauaa

SEQ ID NO: 497638 - RNA, 19 nt, Artificial Sequence
  Description of Artificial Sequence: Synthetic oligonucleotide
uuauugcgcccacuucacg

SEQ ID NO: 497639 - RNA, 19 nt, Artificial Sequence
  Description of Artificial Sequence: Synthetic oligonucleotide
agcagaccucaucaggagg

SEQ ID NO: 497640 - RNA, 19 nt, Artificial Sequence
  Description of Artificial Sequence: Synthetic oligonucleotide
uaauuauugcgcccacuuc

SEQ ID NO: 497641 - RNA, 19 nt, Artificial Sequence
  Description of Artificial Sequence: Synthetic oligonucleotide
caaauaauuauugcgccca

SEQ ID NO: 497642 - RNA, 19 nt, Artificial Sequence
  Description of Artificial Sequence: Synthetic oligonucleotide
acaacagauguguaacuaa

SEQ ID NO: 497643 - RNA, 19 nt, Artificial Sequence
  Description of Artificial Sequence: Synthetic oligonucleotide
cuuguaaucaucucucucu

SEQ ID NO: 497644 - RNA, 19 nt, Artificial Sequence
  Description of Artificial Sequence: Synthetic oligonucleotide
uagcaacauauccauuuac

SEQ ID NO: 497645 - RNA, 19 nt, Artificial Sequence
  Description of Artificial Sequence: Synthetic oligonucleotide
gguuauuguagcaauacca

SEQ ID NO: 497646 - RNA, 19 nt, Artificial Sequence
  Description of Artificial Sequence: Synthetic oligonucleotide
uuuauggcaugugacacua

SEQ ID NO: 497647 - RNA, 19 nt, Artificial Sequence
  Description of Artificial Sequence: Synthetic oligonucleotide
ugaucuauuccaucuggua

SEQ ID NO: 497648 - RNA, 19 nt, Artificial Sequence
  Description of Artificial Sequence: Synthetic oligonucleotide
uguaaucaucucucucuug

SEQ ID NO: 497649 - RNA, 19 nt, Artificial Sequence
  Description of Artificial Sequence: Synthetic oligonucleotide
uguuugugauucacuccag

SEQ ID NO: 497650 - RNA, 19 nt, Artificial Sequence
  Description of Artificial Sequence: Synthetic oligonucleotide
acuucgcaguuucugaacu

SEQ ID NO: 497651 - RNA, 19 nt, Artificial Sequence
  Description of Artificial Sequence: Synthetic oligonucleotide
ucuacccucaguuccccug

SEQ ID NO: 497652 - RNA, 19 nt, Artificial Sequence
  Description of Artificial Sequence: Synthetic oligonucleotide
uugcgugacugacagcagc

SEQ ID NO: 497653 - RNA, 19 nt, Artificial Sequence
  Description of Artificial Sequence: Synthetic oligonucleotide
auuauugcgcccacuucac

SEQ ID NO: 497654 - RNA, 19 nt, Artificial Sequence
  Description of Artificial Sequence: Synthetic oligonucleotide
uuauuguagcaauaccauu

SEQ ID NO: 497655 - RNA, 19 nt, Artificial Sequence
  Description of Artificial Sequence: Synthetic oligonucleotide
gguuauuucacaggugucc

SEQ ID NO: 497656 - RNA, 19 nt, Artificial Sequence
  Description of Artificial Sequence: Synthetic oligonucleotide
uuacacucagccgacgcug

SEQ ID NO: 497657 - RNA, 19 nt, Artificial Sequence
  Description of Artificial Sequence: Synthetic oligonucleotide
guuguauacaacagaugug

SEQ ID NO: 497658 - RNA, 19 nt, Artificial Sequence
  Description of Artificial Sequence: Synthetic oligonucleotide
ugugggcucaauacaaaua

SEQ ID NO: 497659 - RNA, 19 nt, Artificial Sequence
  Description of Artificial Sequence: Synthetic oligonucleotide
auacuagagcagaagaugu

SEQ ID NO: 497660 - RNA, 19 nt, Artificial Sequence
  Description of Artificial Sequence: Synthetic oligonucleotide
ugaggcuuuccccauccac

SEQ ID NO: 497661 - RNA, 19 nt, Artificial Sequence
  Description of Artificial Sequence: Synthetic oligonucleotide
aguugacuugcugaagauc

SEQ ID NO: 497662 - RNA, 19 nt, Artificial Sequence
  Description of Artificial Sequence: Synthetic oligonucleotide
aauuaaccucacuuuuaua

SEQ ID NO: 497663 - RNA, 19 nt, Artificial Sequence
  Description of Artificial Sequence: Synthetic oligonucleotide
uucuucacgcacuugucau

SEQ ID NO: 497664 - RNA, 19 nt, Artificial Sequence
  Description of Artificial Sequence: Synthetic oligonucleotide
gaauaugcacugaauuuuc

SEQ ID NO: 497665 - RNA, 19 nt, Artificial Sequence
  Description of Artificial Sequence: Synthetic oligonucleotide
cugaccauuaacacuuuca

SEQ ID NO: 497666 - RNA, 19 nt, Artificial Sequence
  Description of Artificial Sequence: Synthetic oligonucleotide
uuucguaagugggauguac

SEQ ID NO: 497667 - RNA, 19 nt, Artificial Sequence
  Description of Artificial Sequence: Synthetic oligonucleotide
ugacacuaucgucccaggc

SEQ ID NO: 497668 - RNA, 19 nt, Artificial Sequence
  Description of Artificial Sequence: Synthetic oligonucleotide
uccuagaaucucauccacu

SEQ ID NO: 497669 - RNA, 19 nt, Artificial Sequence
  Description of Artificial Sequence: Synthetic oligonucleotide
ucugguaauuuucgccacu

SEQ ID NO: 497670 - RNA, 19 nt, Artificial Sequence
  Description of Artificial Sequence: Synthetic oligonucleotide
aaugggcuucuaaguaaac

SEQ ID NO: 497671 - RNA, 19 nt, Artificial Sequence
  Description of Artificial Sequence: Synthetic oligonucleotide
agcagaagaugugcggcgc

SEQ ID NO: 497672 - RNA, 19 nt, Artificial Sequence
  Description of Artificial Sequence: Synthetic oligonucleotide
uaccugacggcgauccgag

SEQ ID NO: 497673 - RNA, 19 nt, Artificial Sequence
  Description of Artificial Sequence: Synthetic oligonucleotide
guaagugggauguaccaaa

SEQ ID NO: 497674 - RNA, 19 nt, Artificial Sequence
  Description of Artificial Sequence: Synthetic oligonucleotide
gauguguaacuaaccacac

SEQ ID NO: 497675 - RNA, 19 nt, Artificial Sequence
  Description of Artificial Sequence: Synthetic oligonucleotide
ugcgugacugacagcagcu

SEQ ID NO: 497676 - RNA, 19 nt, Artificial Sequence
  Description of Artificial Sequence: Synthetic oligonucleotide
gcaugugacacuaucgucc

SEQ ID NO: 497677 - RNA, 19 nt, Artificial Sequence
  Description of Artificial Sequence: Synthetic oligonucleotide
uguccagcugucgaaacac

SEQ ID NO: 497678 - RNA, 19 nt, Artificial Sequence
  Description of Artificial Sequence: Synthetic oligonucleotide
aaauuccgguugucugauc

SEQ ID NO: 497679 - RNA, 19 nt, Artificial Sequence
  Description of Artificial Sequence: Synthetic oligonucleotide
uuuucgccacuuuaagcaa

SEQ ID NO: 497680 - RNA, 19 nt, Artificial Sequence
  Description of Artificial Sequence: Synthetic oligonucleotide
uauacuggucccucuccac

SEQ ID NO: 497681 - RNA, 19 nt, Artificial Sequence
  Description of Artificial Sequence: Synthetic oligonucleotide
uacaacagauguguaacua

SEQ ID NO: 497682 - RNA, 19 nt, Artificial Sequence
  Description of Artificial Sequence: Synthetic oligonucleotide
agauucaauguuguauaca

SEQ ID NO: 497683 - RNA, 19 nt, Artificial Sequence
  Description of Artificial Sequence: Synthetic oligonucleotide
accuuacuaaugcucauuu

SEQ ID NO: 497684 - RNA, 19 nt, Artificial Sequence
  Description of Artificial Sequence: Synthetic oligonucleotide
aucgacgucauaguugacu

SEQ ID NO: 497685 - RNA, 19 nt, Artificial Sequence
  Description of Artificial Sequence: Synthetic oligonucleotide
ucucucucuugcgugacug

SEQ ID NO: 497686 - RNA, 19 nt, Artificial Sequence
  Description of Artificial Sequence: Synthetic oligonucleotide
uucgcaguuucugaacugu

SEQ ID NO: 497687 - RNA, 19 nt, Artificial Sequence
  Description of Artificial Sequence: Synthetic oligonucleotide
auugacucgaagagaacga

SEQ ID NO: 497688 - RNA, 19 nt, Artificial Sequence
  Description of Artificial Sequence: Synthetic oligonucleotide
agaaccuauguggucagga

SEQ ID NO: 497689 - RNA, 19 nt, Artificial Sequence
  Description of Artificial Sequence: Synthetic oligonucleotide
ucgaaugcauagacaguaa

SEQ ID NO: 497690 - RNA, 19 nt, Artificial Sequence
  Description of Artificial Sequence: Synthetic oligonucleotide
ugugugggcucaauacaaa

SEQ ID NO: 497691 - RNA, 19 nt, Artificial Sequence
  Description of Artificial Sequence: Synthetic oligonucleotide
agcauauuuuauggcaugu

SEQ ID NO: 497692 - RNA, 19 nt, Artificial Sequence
  Description of Artificial Sequence: Synthetic oligonucleotide
ucgguguacacaugacacu

SEQ ID NO: 497693 - RNA, 19 nt, Artificial Sequence
  Description of Artificial Sequence: Synthetic oligonucleotide
agauugcacaauacuuggg

SEQ ID NO: 497694 - RNA, 19 nt, Artificial Sequence
  Description of Artificial Sequence: Synthetic oligonucleotide
agagcuaugcagagacagg

SEQ ID NO: 497695 - RNA, 19 nt, Artificial Sequence
  Description of Artificial Sequence: Synthetic oligonucleotide
guaacuaaccacacacaca

SEQ ID NO: 497696 - RNA, 19 nt, Artificial Sequence
  Description of Artificial Sequence: Synthetic oligonucleotide
auugcgcccacuucacgcu

SEQ ID NO: 497697 - RNA, 19 nt, Artificial Sequence
  Description of Artificial Sequence: Synthetic oligonucleotide
gaacuucgcaguuucugaa

SEQ ID NO: 497698 - RNA, 19 nt, Artificial Sequence
  Description of Artificial Sequence: Synthetic oligonucleotide
cauaguugacuugcugaag

SEQ ID NO: 497699 - RNA, 19 nt, Artificial Sequence
  Description of Artificial Sequence: Synthetic oligonucleotide
ugcaucugcgagagacugc

SEQ ID NO: 497700 - RNA, 19 nt, Artificial Sequence
  Description of Artificial Sequence: Synthetic oligonucleotide
aguaacccuacaaaggcua

SEQ ID NO: 497701 - RNA, 19 nt, Artificial Sequence
  Description of Artificial Sequence: Synthetic oligonucleotide
augggcuucuaaguaaaca

SEQ ID NO: 497702 - RNA, 19 nt, Artificial Sequence
  Description of Artificial Sequence: Synthetic oligonucleotide
agggacaaauuccgguugu

SEQ ID NO: 497703 - RNA, 19 nt, Artificial Sequence
  Description of Artificial Sequence: Synthetic oligonucleotide
gcaucugcgagagacugcg

SEQ ID NO: 497704 - RNA, 19 nt, Artificial Sequence
  Description of Artificial Sequence: Synthetic oligonucleotide
auugcacaaaccguaggaa

SEQ ID NO: 497705 - RNA, 19 nt, Artificial Sequence
  Description of Artificial Sequence: Synthetic oligonucleotide
aguaaggaugcgcuugcuu

SEQ ID NO: 497706 - RNA, 19 nt, Artificial Sequence
  Description of Artificial Sequence: Synthetic oligonucleotide
ugcucagcucacacugacc

SEQ ID NO: 497707 - RNA, 19 nt, Artificial Sequence
  Description of Artificial Sequence: Synthetic oligonucleotide
cucucuccuaugagcagag

SEQ ID NO: 497708 - RNA, 19 nt, Artificial Sequence
  Description of Artificial Sequence: Synthetic oligonucleotide
uaguugacuugcugaagau

SEQ ID NO: 497709 - RNA, 19 nt, Artificial Sequence
  Description of Artificial Sequence: Synthetic oligonucleotide
ggguuauuguagcaauacc

SEQ ID NO: 497710 - RNA, 19 nt, Artificial Sequence
  Description of Artificial Sequence: Synthetic oligonucleotide
aucgucccaggccuguuug

SEQ ID NO: 497711 - RNA, 19 nt, Artificial Sequence
  Description of Artificial Sequence: Synthetic oligonucleotide
cauccacgaaauugacagc

SEQ ID NO: 497712 - RNA, 19 nt, Artificial Sequence
  Description of Artificial Sequence: Synthetic oligonucleotide
cuuaacugcugcugaucuc

SEQ ID NO: 497713 - RNA, 19 nt, Artificial Sequence
  Description of Artificial Sequence: Synthetic oligonucleotide
ccuaugagcagagcuaugc

SEQ ID NO: 497714 - RNA, 19 nt, Artificial Sequence
  Description of Artificial Sequence: Synthetic oligonucleotide
cuucgcaguuucugaacug

SEQ ID NO: 497715 - RNA, 19 nt, Artificial Sequence
  Description of Artificial Sequence: Synthetic oligonucleotide
ucucucuugcgugacugac

SEQ ID NO: 497716 - RNA, 19 nt, Artificial Sequence
  Description of Artificial Sequence: Synthetic oligonucleotide
cuucacgcacuugucauuc

SEQ ID NO: 497717 - RNA, 19 nt, Artificial Sequence
  Description of Artificial Sequence: Synthetic oligonucleotide
uucucaguucccguaccug

SEQ ID NO: 497718 - RNA, 19 nt, Artificial Sequence
  Description of Artificial Sequence: Synthetic oligonucleotide
gcucuaauauccucugcug

SEQ ID NO: 497719 - RNA, 19 nt, Artificial Sequence
  Description of Artificial Sequence: Synthetic oligonucleotide
gugggcucaauacaaauau

SEQ ID NO: 497720 - RNA, 19 nt, Artificial Sequence
  Description of Artificial Sequence: Synthetic oligonucleotide
acugaccugcaguaacccu

SEQ ID NO: 497721 - RNA, 19 nt, Artificial Sequence
  Description of Artificial Sequence: Synthetic oligonucleotide
guccuagaaucucauccac

SEQ ID NO: 497722 - RNA, 19 nt, Artificial Sequence
  Description of Artificial Sequence: Synthetic oligonucleotide
cuucuucacgcacuuguca

SEQ ID NO: 497723 - RNA, 19 nt, Artificial Sequence
  Description of Artificial Sequence: Synthetic oligonucleotide
agaaucucauccacuacau

SEQ ID NO: 497724 - RNA, 19 nt, Artificial Sequence
  Description of Artificial Sequence: Synthetic oligonucleotide
guuauuguagcaauaccau

SEQ ID NO: 497725 - RNA, 19 nt, Artificial Sequence
  Description of Artificial Sequence: Synthetic oligonucleotide
cucgaaugcauagacagua

SEQ ID NO: 497726 - RNA, 19 nt, Artificial Sequence
  Description of Artificial Sequence: Synthetic oligonucleotide
agccauucagcugcucgac

SEQ ID NO: 497727 - RNA, 19 nt, Artificial Sequence
  Description of Artificial Sequence: Synthetic oligonucleotide
aggugaaaugaagcuagcu

SEQ ID NO: 497728 - RNA, 19 nt, Artificial Sequence
  Description of Artificial Sequence: Synthetic oligonucleotide
cacagguuauuucacaggu

SEQ ID NO: 497729 - RNA, 19 nt, Artificial Sequence
  Description of Artificial Sequence: Synthetic oligonucleotide
uacacucagccgacgcugu

SEQ ID NO: 497730 - RNA, 19 nt, Artificial Sequence
  Description of Artificial Sequence: Synthetic oligonucleotide
ggaacuucgcaguuucuga

SEQ ID NO: 497731 - RNA, 19 nt, Artificial Sequence
  Description of Artificial Sequence: Synthetic oligonucleotide
gugacacuaucgucccagg

SEQ ID NO: 497732 - RNA, 19 nt, Artificial Sequence
  Description of Artificial Sequence: Synthetic oligonucleotide
cuucacgcugaauccaaca

SEQ ID NO: 497733 - RNA, 19 nt, Artificial Sequence
  Description of Artificial Sequence: Synthetic oligonucleotide
acauugacucgaagagaac

SEQ ID NO: 497734 - RNA, 19 nt, Artificial Sequence
  Description of Artificial Sequence: Synthetic oligonucleotide
uccuaugagcagagcuaug

SEQ ID NO: 497735 - RNA, 19 nt, Artificial Sequence
  Description of Artificial Sequence: Synthetic oligonucleotide
cagcugucgaaacacguca

SEQ ID NO: 497736 - RNA, 19 nt, Artificial Sequence
  Description of Artificial Sequence: Synthetic oligonucleotide
agccgacgcugugaaagcc

SEQ ID NO: 497737 - RNA, 19 nt, Artificial Sequence
  Description of Artificial Sequence: Synthetic oligonucleotide
uccccuguaagcagaccuc

SEQ ID NO: 497738 - RNA, 19 nt, Artificial Sequence
  Description of Artificial Sequence: Synthetic oligonucleotide
cauuauugaaaaccuuacu

SEQ ID NO: 497739 - RNA, 19 nt, Artificial Sequence
  Description of Artificial Sequence: Synthetic oligonucleotide
ugcucgguguacacaugac

SEQ ID NO: 497740 - RNA, 19 nt, Artificial Sequence
  Description of Artificial Sequence: Synthetic oligonucleotide
gcacaaucauagcaagcag

SEQ ID NO: 497741 - RNA, 19 nt, Artificial Sequence
  Description of Artificial Sequence: Synthetic oligonucleotide
caaaccguaggaacaaccu

SEQ ID NO: 497742 - RNA, 19 nt, Artificial Sequence
  Description of Artificial Sequence: Synthetic oligonucleotide
cugucgaaacacgucauca

SEQ ID NO: 497743 - RNA, 19 nt, Artificial Sequence
  Description of Artificial Sequence: Synthetic oligonucleotide
cauucauacuagagcagaa

SEQ ID NO: 497744 - RNA, 19 nt, Artificial Sequence
  Description of Artificial Sequence: Synthetic oligonucleotide
ccugacggcgauccgaggg

SEQ ID NO: 497745 - RNA, 19 nt, Artificial Sequence
  Description of Artificial Sequence: Synthetic oligonucleotide
cuaugagcagagcuaugca

SEQ ID NO: 497746 - RNA, 19 nt, Artificial Sequence
  Description of Artificial Sequence: Synthetic oligonucleotide
ugcggcgcugucugcaucu

SEQ ID NO: 497747 - RNA, 19 nt, Artificial Sequence
  Description of Artificial Sequence: Synthetic oligonucleotide
guaagacuuuuaucugcuc

SEQ ID NO: 497748 - RNA, 19 nt, Artificial Sequence
  Description of Artificial Sequence: Synthetic oligonucleotide
agucugccgcccguuacac

SEQ ID NO: 497749 - RNA, 19 nt, Artificial Sequence
  Description of Artificial Sequence: Synthetic oligonucleotide
uccgguugucugauccugu

SEQ ID NO: 497750 - RNA, 19 nt, Artificial Sequence
  Description of Artificial Sequence: Synthetic oligonucleotide
caucaggagggucacuaca

SEQ ID NO: 497751 - RNA, 19 nt, Artificial Sequence
  Description of Artificial Sequence: Synthetic oligonucleotide
ucuucacgcacuugucauu

SEQ ID NO: 497752 - RNA, 19 nt, Artificial Sequence
  Description of Artificial Sequence: Synthetic oligonucleotide
cuaaaaggccaucuccucu

SEQ ID NO: 497753 - RNA, 19 nt, Artificial Sequence
  Description of Artificial Sequence: Synthetic oligonucleotide
ccaugucugaucagggcgc

SEQ ID NO: 497754 - RNA, 19 nt, Artificial Sequence
  Description of Artificial Sequence: Synthetic oligonucleotide
uccacgaaauugacagcuu

SEQ ID NO: 497755 - RNA, 19 nt, Artificial Sequence
  Description of Artificial Sequence: Synthetic oligonucleotide
cuacauugacucgaagaga

SEQ ID NO: 497756 - RNA, 19 nt, Artificial Sequence
  Description of Artificial Sequence: Synthetic oligonucleotide
gcuagcuuuggcuuuccuc

SEQ ID NO: 497757 - RNA, 19 nt, Artificial Sequence
  Description of Artificial Sequence: Synthetic oligonucleotide
uucacgcacuugucauuca

SEQ ID NO: 497758 - RNA, 19 nt, Artificial Sequence
  Description of Artificial Sequence: Synthetic oligonucleotide
uucccguaccugacggcga

SEQ ID NO: 497759 - RNA, 19 nt, Artificial Sequence
  Description of Artificial Sequence: Synthetic oligonucleotide
acgaagcuugaggcuuucc

SEQ ID NO: 497760 - RNA, 19 nt, Artificial Sequence
  Description of Artificial Sequence: Synthetic oligonucleotide
cagcucuaauauccucugc

SEQ ID NO: 497761 - RNA, 19 nt, Artificial Sequence
  Description of Artificial Sequence: Synthetic oligonucleotide
acucagccgacgcugugaa

SEQ ID NO: 497762 - RNA, 19 nt, Artificial Sequence
  Description of Artificial Sequence: Synthetic oligonucleotide
cauagacaguaaggaugcg

SEQ ID NO: 497763 - RNA, 19 nt, Artificial Sequence
  Description of Artificial Sequence: Synthetic oligonucleotide
cacugagaaugaacaugug

SEQ ID NO: 497764 - RNA, 19 nt, Artificial Sequence
  Description of Artificial Sequence: Synthetic oligonucleotide
gcugcacucagucuuuaca

SEQ ID NO: 497765 - RNA, 19 nt, Artificial Sequence
  Description of Artificial Sequence: Synthetic oligonucleotide
gcccguuacacucagccga

SEQ ID NO: 497766 - RNA, 19 nt, Artificial Sequence
  Description of Artificial Sequence: Synthetic oligonucleotide
uugaggcuuuccccaucca

SEQ ID NO: 497767 - RNA, 19 nt, Artificial Sequence
  Description of Artificial Sequence: Synthetic oligonucleotide
aggagggucacuacauuau

SEQ ID NO: 497768 - RNA, 19 nt, Artificial Sequence
  Description of Artificial Sequence: Synthetic oligonucleotide
acauuauggcacagcccuc

SEQ ID NO: 497769 - RNA, 19 nt, Artificial Sequence
  Description of Artificial Sequence: Synthetic oligonucleotide
ugcccuacauugacucgaa

SEQ ID NO: 497770 - RNA, 19 nt, Artificial Sequence
  Description of Artificial Sequence: Synthetic oligonucleotide
agaagaugugcggcgcugu

SEQ ID NO: 497771 - RNA, 19 nt, Artificial Sequence
  Description of Artificial Sequence: Synthetic oligonucleotide
uugcgcccacuucacgcug

SEQ ID NO: 497772 - RNA, 19 nt, Artificial Sequence
  Description of Artificial Sequence: Synthetic oligonucleotide
guguaacuaaccacacaca

SEQ ID NO: 497773 - RNA, 19 nt, Artificial Sequence
  Description of Artificial Sequence: Synthetic oligonucleotide
cagccgacgcugugaaagc

SEQ ID NO: 497774 - RNA, 19 nt, Artificial Sequence
  Description of Artificial Sequence: Synthetic oligonucleotide
ucgcucuuacucucaccac

SEQ ID NO: 497775 - RNA, 19 nt, Artificial Sequence
  Description of Artificial Sequence: Synthetic oligonucleotide
gcucacuucucaguucccg

SEQ ID NO: 497776 - RNA, 19 nt, Artificial Sequence
  Description of Artificial Sequence: Synthetic oligonucleotide
agggcgcuucuguaugucu

SEQ ID NO: 497777 - RNA, 19 nt, Artificial Sequence
  Description of Artificial Sequence: Synthetic oligonucleotide
ccugcgucuuaacugcugc

SEQ ID NO: 497778 - RNA, 19 nt, Artificial Sequence
  Description of Artificial Sequence: Synthetic oligonucleotide
uaucgucccaggccuguuu

SEQ ID NO: 497779 - RNA, 19 nt, Artificial Sequence
  Description of Artificial Sequence: Synthetic oligonucleotide
cugcucgguguacacauga

SEQ ID NO: 497780 - RNA, 19 nt, Artificial Sequence
  Description of Artificial Sequence: Synthetic oligonucleotide
ugcgcccacuucacgcuga

SEQ ID NO: 497781 - RNA, 19 nt, Artificial Sequence
  Description of Artificial Sequence: Synthetic oligonucleotide
guuacacucagccgacgcu

SEQ ID NO: 497782 - RNA, 19 nt, Artificial Sequence
  Description of Artificial Sequence: Synthetic oligonucleotide
ccgcccguuacacucagcc

SEQ ID NO: 497783 - RNA, 19 nt, Artificial Sequence
  Description of Artificial Sequence: Synthetic oligonucleotide
ggccaucuccucuuuucag

SEQ ID NO: 497784 - RNA, 19 nt, Artificial Sequence
  Description of Artificial Sequence: Synthetic oligonucleotide
acucgaaugcauagacagu

SEQ ID NO: 497785 - RNA, 19 nt, Artificial Sequence
  Description of Artificial Sequence: Synthetic oligonucleotide
acacucgaaugcauagaca

SEQ ID NO: 497786 - RNA, 19 nt, Artificial Sequence
  Description of Artificial Sequence: Synthetic oligonucleotide
guaccugacggcgauccga

SEQ ID NO: 497787 - RNA, 19 nt, Artificial Sequence
  Description of Artificial Sequence: Synthetic oligonucleotide
acuaucgucccaggccugu

SEQ ID NO: 497788 - RNA, 19 nt, Artificial Sequence
  Description of Artificial Sequence: Synthetic oligonucleotide
uaacccuacaaaggcuaua

SEQ ID NO: 497789 - RNA, 19 nt, Artificial Sequence
  Description of Artificial Sequence: Synthetic oligonucleotide
cagaagaugugcggcgcug

SEQ ID NO: 497790 - RNA, 19 nt, Artificial Sequence
  Description of Artificial Sequence: Synthetic oligonucleotide
ugccgcccguuacacucag

SEQ ID NO: 497791 - RNA, 19 nt, Artificial Sequence
  Description of Artificial Sequence: Synthetic oligonucleotide
cuauguggucaggacuuuc

SEQ ID NO: 497792 - RNA, 19 nt, Artificial Sequence
  Description of Artificial Sequence: Synthetic oligonucleotide
cugcgugcucagcucacac

SEQ ID NO: 497793 - RNA, 19 nt, Artificial Sequence
  Description of Artificial Sequence: Synthetic oligonucleotide
ucccguaccugacggcgau

SEQ ID NO: 497794 - RNA, 19 nt, Artificial Sequence
  Description of Artificial Sequence: Synthetic oligonucleotide
auacuugggaccagucaaa

SEQ ID NO: 497795 - RNA, 19 nt, Artificial Sequence
  Description of Artificial Sequence: Synthetic oligonucleotide
uuuucguaagugggaugua

SEQ ID NO: 497796 - RNA, 19 nt, Artificial Sequence
  Description of Artificial Sequence: Synthetic oligonucleotide
ccacgaaauugacagcuuc

SEQ ID NO: 497797 - RNA, 19 nt, Artificial Sequence
  Description of Artificial Sequence: Synthetic oligonucleotide
cccgcuaccacacgccugc

SEQ ID NO: 497798 - RNA, 19 nt, Artificial Sequence
  Description of Artificial Sequence: Synthetic oligonucleotide
cgcucuuacucucaccacc

SEQ ID NO: 497799 - RNA, 19 nt, Artificial Sequence
  Description of Artificial Sequence: Synthetic oligonucleotide
ggauguaccaaauccucau

SEQ ID NO: 497800 - RNA, 19 nt, Artificial Sequence
  Description of Artificial Sequence: Synthetic oligonucleotide
cauucagcucuaauauccu

SEQ ID NO: 497801 - RNA, 19 nt, Artificial Sequence
  Description of Artificial Sequence: Synthetic oligonucleotide
cgauccgagggacaaauuc

SEQ ID NO: 497802 - RNA, 19 nt, Artificial Sequence
  Description of Artificial Sequence: Synthetic oligonucleotide
cuggacacucgaaugcaua

SEQ ID NO: 497803 - RNA, 19 nt, Artificial Sequence
  Description of Artificial Sequence: Synthetic oligonucleotide
ccuguaagcagaccucauc

SEQ ID NO: 497804 - RNA, 19 nt, Artificial Sequence
  Description of Artificial Sequence: Synthetic oligonucleotide
cacuucacgcugaauccaa

SEQ ID NO: 497805 - RNA, 19 nt, Artificial Sequence
  Description of Artificial Sequence: Synthetic oligonucleotide
cugcccuacauugacucga

SEQ ID NO: 497806 - RNA, 19 nt, Artificial Sequence
  Description of Artificial Sequence: Synthetic oligonucleotide
cacaaaccguaggaacaac

SEQ ID NO: 497807 - RNA, 19 nt, Artificial Sequence
  Description of Artificial Sequence: Synthetic oligonucleotide
aaggaugcgcuugcuucuu

SEQ ID NO: 497808 - RNA, 19 nt, Artificial Sequence
  Description of Artificial Sequence: Synthetic oligonucleotide
cugacggcgauccgaggga

SEQ ID NO: 497809 - RNA, 19 nt, Artificial Sequence
  Description of Artificial Sequence: Synthetic oligonucleotide
ugcgagagacugcgugcuc

SEQ ID NO: 497810 - RNA, 19 nt, Artificial Sequence
  Description of Artificial Sequence: Synthetic oligonucleotide
ggucaggcacaaucauagc

SEQ ID NO: 497811 - RNA, 19 nt, Artificial Sequence
  Description of Artificial Sequence: Synthetic oligonucleotide
gccagucacagguuauuuc

SEQ ID NO: 497812 - RNA, 19 nt, Artificial Sequence
  Description of Artificial Sequence: Synthetic oligonucleotide
aacuaaccacacacacaaa

SEQ ID NO: 497813 - RNA, 19 nt, Artificial Sequence
  Description of Artificial Sequence: Synthetic oligonucleotide
gaacugugggucaggguua

SEQ ID NO: 497814 - RNA, 19 nt, Artificial Sequence
  Description of Artificial Sequence: Synthetic oligonucleotide
cuacauuauugaaaaccuu

SEQ ID NO: 497815 - RNA, 19 nt, Artificial Sequence
  Description of Artificial Sequence: Synthetic oligonucleotide
ugugcggcgcugucugcau

SEQ ID NO: 497816 - RNA, 19 nt, Artificial Sequence
  Description of Artificial Sequence: Synthetic oligonucleotide
ugacggcgauccgagggac

SEQ ID NO: 497817 - RNA, 19 nt, Artificial Sequence
  Description of Artificial Sequence: Synthetic oligonucleotide
cguuacacucagccgacgc

SEQ ID NO: 497818 - RNA, 19 nt, Artificial Sequence
  Description of Artificial Sequence: Synthetic oligonucleotide
augugacacuaucguccca

SEQ ID NO: 497819 - RNA, 19 nt, Artificial Sequence
  Description of Artificial Sequence: Synthetic oligonucleotide
ccgacgcugugaaagcccc

SEQ ID NO: 497820 - RNA, 19 nt, Artificial Sequence
  Description of Artificial Sequence: Synthetic oligonucleotide
gcgucuuaacugcugcuga

SEQ ID NO: 497821 - RNA, 19 nt, Artificial Sequence
  Description of Artificial Sequence: Synthetic oligonucleotide
cacuaucgucccaggccug

SEQ ID NO: 497822 - RNA, 19 nt, Artificial Sequence
  Description of Artificial Sequence: Synthetic oligonucleotide
gggauguaccaaauccuca

SEQ ID NO: 497823 - RNA, 19 nt, Artificial Sequence
  Description of Artificial Sequence: Synthetic oligonucleotide
gcugucgaaacacgucauc

SEQ ID NO: 497824 - RNA, 19 nt, Artificial Sequence
  Description of Artificial Sequence: Synthetic oligonucleotide
accguaggaacaaccugaa

SEQ ID NO: 497825 - RNA, 19 nt, Artificial Sequence
  Description of Artificial Sequence: Synthetic oligonucleotide
cugaucagggcgcuucugu

SEQ ID NO: 497826 - RNA, 19 nt, Artificial Sequence
  Description of Artificial Sequence: Synthetic oligonucleotide
gugugggcucaauacaaau

SEQ ID NO: 497827 - RNA, 19 nt, Artificial Sequence
  Description of Artificial Sequence: Synthetic oligonucleotide
cucacuucucaguucccgu

SEQ ID NO: 497828 - RNA, 19 nt, Artificial Sequence
  Description of Artificial Sequence: Synthetic oligonucleotide
ggcgcuucuguaugucuuc

SEQ ID NO: 497829 - RNA, 19 nt, Artificial Sequence
  Description of Artificial Sequence: Synthetic oligonucleotide
gccauucagcugcucgacc

SEQ ID NO: 497830 - RNA, 19 nt, Artificial Sequence
  Description of Artificial Sequence: Synthetic oligonucleotide
acccucaguuccccuguaa

SEQ ID NO: 497831 - RNA, 19 nt, Artificial Sequence
  Description of Artificial Sequence: Synthetic oligonucleotide
cuuuccccauccacgaaau

SEQ ID NO: 497832 - RNA, 19 nt, Artificial Sequence
  Description of Artificial Sequence: Synthetic oligonucleotide
cucucucuugcgugacuga

SEQ ID NO: 497833 - RNA, 19 nt, Artificial Sequence
  Description of Artificial Sequence: Synthetic oligonucleotide
cacacgccugcgucuuaac

SEQ ID NO: 497834 - RNA, 19 nt, Artificial Sequence
  Description of Artificial Sequence: Synthetic oligonucleotide
ccguaccugacggcgaucc

SEQ ID NO: 497835 - RNA, 19 nt, Artificial Sequence
  Description of Artificial Sequence: Synthetic oligonucleotide
acgucauaguugacuugcu

SEQ ID NO: 497836 - RNA, 19 nt, Artificial Sequence
  Description of Artificial Sequence: Synthetic oligonucleotide
cuucucaguucccguaccu

SEQ ID NO: 497837 - RNA, 19 nt, Artificial Sequence
  Description of Artificial Sequence: Synthetic oligonucleotide
caucgacgucauaguugac

SEQ ID NO: 497838 - RNA, 19 nt, Artificial Sequence
  Description of Artificial Sequence: Synthetic oligonucleotide
cuacaucgacgucauaguu

SEQ ID NO: 497839 - RNA, 19 nt, Artificial Sequence
  Description of Artificial Sequence: Synthetic oligonucleotide
ggacacucgaaugcauaga

SEQ ID NO: 497840 - RNA, 19 nt, Artificial Sequence
  Description of Artificial Sequence: Synthetic oligonucleotide
cccguuacacucagccgac

SEQ ID NO: 497841 - RNA, 19 nt, Artificial Sequence
  Description of Artificial Sequence: Synthetic oligonucleotide
ggacaaauuccgguugucu

SEQ ID NO: 497842 - RNA, 19 nt, Artificial Sequence
  Description of Artificial Sequence: Synthetic oligonucleotide
gccgacgcugugaaagccc

SEQ ID NO: 497843 - RNA, 19 nt, Artificial Sequence
  Description of Artificial Sequence: Synthetic oligonucleotide
cuccuaugagcagagcuau

SEQ ID NO: 497844 - RNA, 19 nt, Artificial Sequence
  Description of Artificial Sequence: Synthetic oligonucleotide
caaauuccgguugucugau

SEQ ID NO: 497845 - RNA, 19 nt, Artificial Sequence
  Description of Artificial Sequence: Synthetic oligonucleotide
gcgagagacugcgugcuca

SEQ ID NO: 497846 - RNA, 19 nt, Artificial Sequence
  Description of Artificial Sequence: Synthetic oligonucleotide
cagggcgcuucuguauguc

SEQ ID NO: 497847 - RNA, 19 nt, Artificial Sequence
  Description of Artificial Sequence: Synthetic oligonucleotide
cgagagacugcgugcucag

SEQ ID NO: 497848 - RNA, 19 nt, Artificial Sequence
  Description of Artificial Sequence: Synthetic oligonucleotide
gacggcgauccgagggaca

SEQ ID NO: 497849 - RNA, 19 nt, Artificial Sequence
  Description of Artificial Sequence: Synthetic oligonucleotide
cgcccguuacacucagccg

SEQ ID NO: 497850 - RNA, 19 nt, Artificial Sequence
  Description of Artificial Sequence: Synthetic oligonucleotide
ccuuacuaaugcucauuua

SEQ ID NO: 497851 - RNA, 19 nt, Artificial Sequence
  Description of Artificial Sequence: Synthetic oligonucleotide
cugguaauuuucgccacuu

SEQ ID NO: 497852 - RNA, 19 nt, Artificial Sequence
  Description of Artificial Sequence: Synthetic oligonucleotide
ggacuuucagacugaccau

SEQ ID NO: 497853 - RNA, 19 nt, Artificial Sequence
  Description of Artificial Sequence: Synthetic oligonucleotide
gcacaauacuugggaccag

SEQ ID NO: 497854 - RNA, 19 nt, Artificial Sequence
  Description of Artificial Sequence: Synthetic oligonucleotide
cugcgagagacugcgugcu

SEQ ID NO: 497855 - RNA, 19 nt, Artificial Sequence
  Description of Artificial Sequence: Synthetic oligonucleotide
ggagggucacuacauuauu

SEQ ID NO: 497856 - RNA, 19 nt, Artificial Sequence
  Description of Artificial Sequence: Synthetic oligonucleotide
ccgagggacaaauuccggu

SEQ ID NO: 497857 - RNA, 19 nt, Artificial Sequence
  Description of Artificial Sequence: Synthetic oligonucleotide
caugucugaucagggcgcu

SEQ ID NO: 497858 - RNA, 19 nt, Artificial Sequence
  Description of Artificial Sequence: Synthetic oligonucleotide
cguaccugacggcgauccg

SEQ ID NO: 497859 - RNA, 19 nt, Artificial Sequence
  Description of Artificial Sequence: Synthetic oligonucleotide
gcagaagaugugcggcgcu

SEQ ID NO: 497860 - RNA, 19 nt, Artificial Sequence
  Description of Artificial Sequence: Synthetic oligonucleotide
ggcgauccgagggacaaau

SEQ ID NO: 497861 - RNA, 19 nt, Artificial Sequence
  Description of Artificial Sequence: Synthetic oligonucleotide
ccguuacacucagccgacg

SEQ ID NO: 497862 - RNA, 19 nt, Artificial Sequence
  Description of Artificial Sequence: Synthetic oligonucleotide
cucagccgacgcugugaaa

SEQ ID NO: 497863 - RNA, 19 nt, Artificial Sequence
  Description of Artificial Sequence: Synthetic oligonucleotide
cguaagugggauguaccaa

SEQ ID NO: 497864 - RNA, 19 nt, Artificial Sequence
  Description of Artificial Sequence: Synthetic oligonucleotide
gcgugacugacagcagcuc

SEQ ID NO: 497865 - RNA, 19 nt, Artificial Sequence
  Description of Artificial Sequence: Synthetic oligonucleotide
ccccgcuaccacacgccug

SEQ ID NO: 497866 - RNA, 19 nt, Artificial Sequence
  Description of Artificial Sequence: Synthetic oligonucleotide
cucuacccucaguuccccu

SEQ ID NO: 497867 - RNA, 19 nt, Artificial Sequence
  Description of Artificial Sequence: Synthetic oligonucleotide
gcgcuugcuucuucagucu

SEQ ID NO: 497868 - RNA, 19 nt, Artificial Sequence
  Description of Artificial Sequence: Synthetic oligonucleotide
gucugccgcccguuacacu

SEQ ID NO: 497869 - RNA, 19 nt, Artificial Sequence
  Description of Artificial Sequence: Synthetic oligonucleotide
caucugcgagagacugcgu

SEQ ID NO: 497870 - RNA, 19 nt, Artificial Sequence
  Description of Artificial Sequence: Synthetic oligonucleotide
caguaaggaugcgcuugcu

SEQ ID NO: 497871 - RNA, 19 nt, Artificial Sequence
  Description of Artificial Sequence: Synthetic oligonucleotide
cgagggacaaauuccgguu

SEQ ID NO: 497872 - RNA, 19 nt, Artificial Sequence
  Description of Artificial Sequence: Synthetic oligonucleotide
acugugggucaggguuauu

SEQ ID NO: 497873 - RNA, 19 nt, Artificial Sequence
  Description of Artificial Sequence: Synthetic oligonucleotide
gcucgaccccagccaguca

SEQ ID NO: 497874 - RNA, 19 nt, Artificial Sequence
  Description of Artificial Sequence: Synthetic oligonucleotide
cugcucgaccccagccagu

SEQ ID NO: 497875 - RNA, 19 nt, Artificial Sequence
  Description of Artificial Sequence: Synthetic oligonucleotide
gguugucacuggauauuuu

SEQ ID NO: 497876 - RNA, 19 nt, Artificial Sequence
  Description of Artificial Sequence: Synthetic oligonucleotide
ccguaggaacaaccugaaa

SEQ ID NO: 497877 - RNA, 19 nt, Artificial Sequence
  Description of Artificial Sequence: Synthetic oligonucleotide
cuucagucugccgcccguu

SEQ ID NO: 497878 - RNA, 19 nt, Artificial Sequence
  Description of Artificial Sequence: Synthetic oligonucleotide
gggcgcuucuguaugucuu

SEQ ID NO: 497879 - RNA, 19 nt, Artificial Sequence
  Description of Artificial Sequence: Synthetic oligonucleotide
gcggcgcugucugcaucug

SEQ ID NO: 497880 - RNA, 19 nt, Artificial Sequence
  Description of Artificial Sequence: Synthetic oligonucleotide
ccgcuaccacacgccugcg

SEQ ID NO: 497881 - RNA, 19 nt, Artificial Sequence
  Description of Artificial Sequence: Synthetic oligonucleotide
cuaucgucccaggccuguu

SEQ ID NO: 497882 - RNA, 19 nt, Artificial Sequence
  Description of Artificial Sequence: Synthetic oligonucleotide
gccgcccguuacacucagc

SEQ ID NO: 497883 - RNA, 19 nt, Artificial Sequence
  Description of Artificial Sequence: Synthetic oligonucleotide
cccuguaagcagaccucau

SEQ ID NO: 497884 - RNA, 19 nt, Artificial Sequence
  Description of Artificial Sequence: Synthetic oligonucleotide
cccguaccugacggcgauc

SEQ ID NO: 497885 - RNA, 19 nt, Artificial Sequence
  Description of Artificial Sequence: Synthetic oligonucleotide
gcgauccgagggacaaauu

SEQ ID NO: 497886 - RNA, 19 nt, Artificial Sequence
  Description of Artificial Sequence: Synthetic oligonucleotide
cgcuaccacacgccugcgu

SEQ ID NO: 497887 - RNA, 19 nt, Artificial Sequence
  Description of Artificial Sequence: Synthetic oligonucleotide
cggcgauccgagggacaaa

SEQ ID NO: 497888 - RNA, 19 nt, Artificial Sequence
  Description of Artificial Sequence: Synthetic oligonucleotide
aauuagaugauucugguag

SEQ ID NO: 497889 - RNA, 19 nt, Artificial Sequence
  Description of Artificial Sequence: Synthetic oligonucleotide
aaguaugaacuucagagcc

SEQ ID NO: 497890 - RNA, 19 nt, Artificial Sequence
  Description of Artificial Sequence: Synthetic oligonucleotide
ucuaagauucucaaguucg

SEQ ID NO: 497891 - RNA, 19 nt, Artificial Sequence
  Description of Artificial Sequence: Synthetic oligonucleotide
aaaaguagcugcuaacggg

SEQ ID NO: 497892 - RNA, 19 nt, Artificial Sequence
  Description of Artificial Sequence: Synthetic oligonucleotide
uuugauaaugaacugacac

SEQ ID NO: 497893 - RNA, 19 nt, Artificial Sequence
  Description of Artificial Sequence: Synthetic oligonucleotide
agcgagaccagguagaugc

SEQ ID NO: 497894 - RNA, 19 nt, Artificial Sequence
  Description of Artificial Sequence: Synthetic oligonucleotide
uuuagcacagcaaaaguag

SEQ ID NO: 497895 - RNA, 19 nt, Artificial Sequence
  Description of Artificial Sequence: Synthetic oligonucleotide
auagagacgguucaugacc

SEQ ID NO: 497896 - RNA, 19 nt, Artificial Sequence
  Description of Artificial Sequence: Synthetic oligonucleotide
ucguguuugauaaugaacu

SEQ ID NO: 497897 - RNA, 19 nt, Artificial Sequence
  Description of Artificial Sequence: Synthetic oligonucleotide
aaacuuacuggaaacggcc

SEQ ID NO: 497898 - RNA, 19 nt, Artificial Sequence
  Description of Artificial Sequence: Synthetic oligonucleotide
gauaaagucacucucaucu

SEQ ID NO: 497899 - RNA, 19 nt, Artificial Sequence
  Description of Artificial Sequence: Synthetic oligonucleotide
gcaaguaugaacuucagag

SEQ ID NO: 497900 - RNA, 19 nt, Artificial Sequence
  Description of Artificial Sequence: Synthetic oligonucleotide
aaaaggucguuugaagacc

SEQ ID NO: 497901 - RNA, 19 nt, Artificial Sequence
  Description of Artificial Sequence: Synthetic oligonucleotide
agcauaucgauagagacgg

SEQ ID NO: 497902 - RNA, 19 nt, Artificial Sequence
  Description of Artificial Sequence: Synthetic oligonucleotide
ucaucuuuagcucuaagau

SEQ ID NO: 497903 - RNA, 19 nt, Artificial Sequence
  Description of Artificial Sequence: Synthetic oligonucleotide
auugagaaaguugaacacc

SEQ ID NO: 497904 - RNA, 19 nt, Artificial Sequence
  Description of Artificial Sequence: Synthetic oligonucleotide
acagucuuauguuggaggc

SEQ ID NO: 497905 - RNA, 19 nt, Artificial Sequence
  Description of Artificial Sequence: Synthetic oligonucleotide
uuagcgauaauucugcuuu

SEQ ID NO: 497906 - RNA, 19 nt, Artificial Sequence
  Description of Artificial Sequence: Synthetic oligonucleotide
uucuaugaccacuagaggu

SEQ ID NO: 497907 - RNA, 19 nt, Artificial Sequence
  Description of Artificial Sequence: Synthetic oligonucleotide
aacacuuucagaauuagau

SEQ ID NO: 497908 - RNA, 19 nt, Artificial Sequence
  Description of Artificial Sequence: Synthetic oligonucleotide
uccaaguaaucaucgaagg

SEQ ID NO: 497909 - RNA, 19 nt, Artificial Sequence
  Description of Artificial Sequence: Synthetic oligonucleotide
aaucagagcacaguuagug

SEQ ID NO: 497910 - RNA, 19 nt, Artificial Sequence
  Description of Artificial Sequence: Synthetic oligonucleotide
agcucuaagauucucaagu

SEQ ID NO: 497911 - RNA, 19 nt, Artificial Sequence
  Description of Artificial Sequence: Synthetic oligonucleotide
ucuucccacacaaagaggu

SEQ ID NO: 497912 - RNA, 19 nt, Artificial Sequence
  Description of Artificial Sequence: Synthetic oligonucleotide
ucuaugaccacuagaggug

SEQ ID NO: 497913 - RNA, 19 nt, Artificial Sequence
  Description of Artificial Sequence: Synthetic oligonucleotide
aguuauuuagcacagcaaa

SEQ ID NO: 497914 - RNA, 19 nt, Artificial Sequence
  Description of Artificial Sequence: Synthetic oligonucleotide
aagagauucuacgacuugg

SEQ ID NO: 497915 - RNA, 19 nt, Artificial Sequence
  Description of Artificial Sequence: Synthetic oligonucleotide
gaaguuauuuagcacagca

SEQ ID NO: 497916 - RNA, 19 nt, Artificial Sequence
  Description of Artificial Sequence: Synthetic oligonucleotide
agauauaacacucaucguu

SEQ ID NO: 497917 - RNA, 19 nt, Artificial Sequence
  Description of Artificial Sequence: Synthetic oligonucleotide
gugaaauacuccaagaacc

SEQ ID NO: 497918 - RNA, 19 nt, Artificial Sequence
  Description of Artificial Sequence: Synthetic oligonucleotide
acaauugagaaaguugaac

SEQ ID NO: 497919 - RNA, 19 nt, Artificial Sequence
  Description of Artificial Sequence: Synthetic oligonucleotide
agaagagcgaagcaaaaca

SEQ ID NO: 497920 - RNA, 19 nt, Artificial Sequence
  Description of Artificial Sequence: Synthetic oligonucleotide
uuuagcucuaagauucuca

SEQ ID NO: 497921 - RNA, 19 nt, Artificial Sequence
  Description of Artificial Sequence: Synthetic oligonucleotide
ugauaaugaacugacacuc

SEQ ID NO: 497922 - RNA, 19 nt, Artificial Sequence
  Description of Artificial Sequence: Synthetic oligonucleotide
uugauaaugaacugacacu

SEQ ID NO: 497923 - RNA, 19 nt, Artificial Sequence
  Description of Artificial Sequence: Synthetic oligonucleotide
gaagaagagauucuacgac

SEQ ID NO: 497924 - RNA, 19 nt, Artificial Sequence
  Description of Artificial Sequence: Synthetic oligonucleotide
aaaggucguuugaagaccc

SEQ ID NO: 497925 - RNA, 19 nt, Artificial Sequence
  Description of Artificial Sequence: Synthetic oligonucleotide
uaaacgcaggagaaaaggc

SEQ ID NO: 497926 - RNA, 19 nt, Artificial Sequence
  Description of Artificial Sequence: Synthetic oligonucleotide
acggccagcacacuggggc

SEQ ID NO: 497927 - RNA, 19 nt, Artificial Sequence
  Description of Artificial Sequence: Synthetic oligonucleotide
cauacuuauuuaacagugg

SEQ ID NO: 497928 - RNA, 19 nt, Artificial Sequence
  Description of Artificial Sequence: Synthetic oligonucleotide
aacggguaaacgcaggaga

SEQ ID NO: 497929 - RNA, 19 nt, Artificial Sequence
  Description of Artificial Sequence: Synthetic oligonucleotide
gaugacauacuugucguag

SEQ ID NO: 497930 - RNA, 19 nt, Artificial Sequence
  Description of Artificial Sequence: Synthetic oligonucleotide
uagaucaucaugacguaga

SEQ ID NO: 497931 - RNA, 19 nt, Artificial Sequence
  Description of Artificial Sequence: Synthetic oligonucleotide
augaccucaaucacgaugg

SEQ ID NO: 497932 - RNA, 19 nt, Artificial Sequence
  Description of Artificial Sequence: Synthetic oligonucleotide
uuccucagcagaauuuggg

SEQ ID NO: 497933 - RNA, 19 nt, Artificial Sequence
  Description of Artificial Sequence: Synthetic oligonucleotide
ugccaaacaccaauacugg

SEQ ID NO: 497934 - RNA, 19 nt, Artificial Sequence
  Description of Artificial Sequence: Synthetic oligonucleotide
guaaacgcaggagaaaagg

SEQ ID NO: 497935 - RNA, 19 nt, Artificial Sequence
  Description of Artificial Sequence: Synthetic oligonucleotide
caaguaugaacuucagagc

SEQ ID NO: 497936 - RNA, 19 nt, Artificial Sequence
  Description of Artificial Sequence: Synthetic oligonucleotide
uuccguuggagccaguaag

SEQ ID NO: 497937 - RNA, 19 nt, Artificial Sequence
  Description of Artificial Sequence: Synthetic oligonucleotide
acuuacuggaaacggccgc

SEQ ID NO: 497938 - RNA, 19 nt, Artificial Sequence
  Description of Artificial Sequence: Synthetic oligonucleotide
uucguguuugauaaugaac

SEQ ID NO: 497939 - RNA, 19 nt, Artificial Sequence
  Description of Artificial Sequence: Synthetic oligonucleotide
aaccgaguauaccaggugu

SEQ ID NO: 497940 - RNA, 19 nt, Artificial Sequence
  Description of Artificial Sequence: Synthetic oligonucleotide
caggguugugucaauaucc

SEQ ID NO: 497941 - RNA, 19 nt, Artificial Sequence
  Description of Artificial Sequence: Synthetic oligonucleotide
aguuagugaccacagauau

SEQ ID NO: 497942 - RNA, 19 nt, Artificial Sequence
  Description of Artificial Sequence: Synthetic oligonucleotide
uugacuuccgugaaguuau

SEQ ID NO: 497943 - RNA, 19 nt, Artificial Sequence
  Description of Artificial Sequence: Synthetic oligonucleotide
caaacuuacuggaaacggc

SEQ ID NO: 497944 - RNA, 19 nt, Artificial Sequence
  Description of Artificial Sequence: Synthetic oligonucleotide
aaucaucgaagguucccag

SEQ ID NO: 497945 - RNA, 19 nt, Artificial Sequence
  Description of Artificial Sequence: Synthetic oligonucleotide
uccgugaaguuauuuagca

SEQ ID NO: 497946 - RNA, 19 nt, Artificial Sequence
  Description of Artificial Sequence: Synthetic oligonucleotide
aacgcaggagaaaaggcuc

SEQ ID NO: 497947 - RNA, 19 nt, Artificial Sequence
  Description of Artificial Sequence: Synthetic oligonucleotide
cacucaucguuucaaaagc

SEQ ID NO: 497948 - RNA, 19 nt, Artificial Sequence
  Description of Artificial Sequence: Synthetic oligonucleotide
augagauugaacgaggcga

SEQ ID NO: 497949 - RNA, 19 nt, Artificial Sequence
  Description of Artificial Sequence: Synthetic oligonucleotide
uguggaccagaugagauug

SEQ ID NO: 497950 - RNA, 19 nt, Artificial Sequence
  Description of Artificial Sequence: Synthetic oligonucleotide
ugacacucagccauaguga

SEQ ID NO: 497951 - RNA, 19 nt, Artificial Sequence
  Description of Artificial Sequence: Synthetic oligonucleotide
uccguuggagccaguaagg

SEQ ID NO: 497952 - RNA, 19 nt, Artificial Sequence
  Description of Artificial Sequence: Synthetic oligonucleotide
acgaucaaaaccaagucug

SEQ ID NO: 497953 - RNA, 19 nt, Artificial Sequence
  Description of Artificial Sequence: Synthetic oligonucleotide
cuucuuuagggccucagug

SEQ ID NO: 497954 - RNA, 19 nt, Artificial Sequence
  Description of Artificial Sequence: Synthetic oligonucleotide
gacguagagggagaaauag

SEQ ID NO: 497955 - RNA, 19 nt, Artificial Sequence
  Description of Artificial Sequence: Synthetic oligonucleotide
caagacgucaggaacucag

SEQ ID NO: 497956 - RNA, 19 nt, Artificial Sequence
  Description of Artificial Sequence: Synthetic oligonucleotide
uaucgauagagacgguuca

SEQ ID NO: 497957 - RNA, 19 nt, Artificial Sequence
  Description of Artificial Sequence: Synthetic oligonucleotide
gagcaaaccgaguauacca

SEQ ID NO: 497958 - RNA, 19 nt, Artificial Sequence
  Description of Artificial Sequence: Synthetic oligonucleotide
auuuaacaguggucuaaac

SEQ ID NO: 497959 - RNA, 19 nt, Artificial Sequence
  Description of Artificial Sequence: Synthetic oligonucleotide
aaaguagcugcuaacgggu

SEQ ID NO: 497960 - RNA, 19 nt, Artificial Sequence
  Description of Artificial Sequence: Synthetic oligonucleotide
cagcauaucgauagagacg

SEQ ID NO: 497961 - RNA, 19 nt, Artificial Sequence
  Description of Artificial Sequence: Synthetic oligonucleotide
ucugccccaaguaacaguc

SEQ ID NO: 497962 - RNA, 19 nt, Artificial Sequence
  Description of Artificial Sequence: Synthetic oligonucleotide
uuagcucuaagauucucaa

SEQ ID NO: 497963 - RNA, 19 nt, Artificial Sequence
  Description of Artificial Sequence: Synthetic oligonucleotide
agucuuauguuggaggcuc

SEQ ID NO: 497964 - RNA, 19 nt, Artificial Sequence
  Description of Artificial Sequence: Synthetic oligonucleotide
agagcaaaccgaguauacc

SEQ ID NO: 497965 - RNA, 19 nt, Artificial Sequence
  Description of Artificial Sequence: Synthetic oligonucleotide
aaaccgaguauaccaggug

SEQ ID NO: 497966 - RNA, 19 nt, Artificial Sequence
  Description of Artificial Sequence: Synthetic oligonucleotide
uaguagggcagcccgauga

SEQ ID NO: 497967 - RNA, 19 nt, Artificial Sequence
  Description of Artificial Sequence: Synthetic oligonucleotide
ugggcgaguucuaugacca

SEQ ID NO: 497968 - RNA, 19 nt, Artificial Sequence
  Description of Artificial Sequence: Synthetic oligonucleotide
gacuugguucaguaucugg

SEQ ID NO: 497969 - RNA, 19 nt, Artificial Sequence
  Description of Artificial Sequence: Synthetic oligonucleotide
caagcucuggcgcaaaagc

SEQ ID NO: 497970 - RNA, 19 nt, Artificial Sequence
  Description of Artificial Sequence: Synthetic oligonucleotide
acaggguugugucaauauc

SEQ ID NO: 497971 - RNA, 19 nt, Artificial Sequence
  Description of Artificial Sequence: Synthetic oligonucleotide
auguggaaagcugagccac

SEQ ID NO: 497972 - RNA, 19 nt, Artificial Sequence
  Description of Artificial Sequence: Synthetic oligonucleotide
aauacuuccguuggagcca

SEQ ID NO: 497973 - RNA, 19 nt, Artificial Sequence
  Description of Artificial Sequence: Synthetic oligonucleotide
auaucgauagagacgguuc

SEQ ID NO: 497974 - RNA, 19 nt, Artificial Sequence
  Description of Artificial Sequence: Synthetic oligonucleotide
ucuaaacagcagcugggca

SEQ ID NO: 497975 - RNA, 19 nt, Artificial Sequence
  Description of Artificial Sequence: Synthetic oligonucleotide
uuccgugaaguuauuuagc

SEQ ID NO: 497976 - RNA, 19 nt, Artificial Sequence
  Description of Artificial Sequence: Synthetic oligonucleotide
gcugcuaacggguaaacgc

SEQ ID NO: 497977 - RNA, 19 nt, Artificial Sequence
  Description of Artificial Sequence: Synthetic oligonucleotide
gaaguuguggcgcguuccg

SEQ ID NO: 497978 - RNA, 19 nt, Artificial Sequence
  Description of Artificial Sequence: Synthetic oligonucleotide
ggugaaauacuccaagaac

SEQ ID NO: 497979 - RNA, 19 nt, Artificial Sequence
  Description of Artificial Sequence: Synthetic oligonucleotide
aaacgcaggagaaaaggcu

SEQ ID NO: 497980 - RNA, 19 nt, Artificial Sequence
  Description of Artificial Sequence: Synthetic oligonucleotide
ugggucacgaugccagacg

SEQ ID NO: 497981 - RNA, 19 nt, Artificial Sequence
  Description of Artificial Sequence: Synthetic oligonucleotide
aacuuacuggaaacggccg

SEQ ID NO: 497982 - RNA, 19 nt, Artificial Sequence
  Description of Artificial Sequence: Synthetic oligonucleotide
ucuuugacauccugggcga

SEQ ID NO: 497983 - RNA, 19 nt, Artificial Sequence
  Description of Artificial Sequence: Synthetic oligonucleotide
ugagauugaacgaggcgaa

SEQ ID NO: 497984 - RNA, 19 nt, Artificial Sequence
  Description of Artificial Sequence: Synthetic oligonucleotide
ucguuguuaucauggaaac

SEQ ID NO: 497985 - RNA, 19 nt, Artificial Sequence
  Description of Artificial Sequence: Synthetic oligonucleotide
agagagguuccucccugcc

SEQ ID NO: 497986 - RNA, 19 nt, Artificial Sequence
  Description of Artificial Sequence: Synthetic oligonucleotide
uacaguuuggccuggggau

SEQ ID NO: 497987 - RNA, 19 nt, Artificial Sequence
  Description of Artificial Sequence: Synthetic oligonucleotide
caccaauacuggcugaagg

SEQ ID NO: 497988 - RNA, 19 nt, Artificial Sequence
  Description of Artificial Sequence: Synthetic oligonucleotide
uuagaugauucugguaggc

SEQ ID NO: 497989 - RNA, 19 nt, Artificial Sequence
  Description of Artificial Sequence: Synthetic oligonucleotide
acucaucguuucaaaagcc

SEQ ID NO: 497990 - RNA, 19 nt, Artificial Sequence
  Description of Artificial Sequence: Synthetic oligonucleotide
acugccaaacaccaauacu

SEQ ID NO: 497991 - RNA, 19 nt, Artificial Sequence
  Description of Artificial Sequence: Synthetic oligonucleotide
ucacuuguggugacauucc

SEQ ID NO: 497992 - RNA, 19 nt, Artificial Sequence
  Description of Artificial Sequence: Synthetic oligonucleotide
uaaucaucgaagguuccca

SEQ ID NO: 497993 - RNA, 19 nt, Artificial Sequence
  Description of Artificial Sequence: Synthetic oligonucleotide
gaggugaucaggagugugg

SEQ ID NO: 497994 - RNA, 19 nt, Artificial Sequence
  Description of Artificial Sequence: Synthetic oligonucleotide
uucaagaaauacuuccguu

SEQ ID NO: 497995 - RNA, 19 nt, Artificial Sequence
  Description of Artificial Sequence: Synthetic oligonucleotide
ucuacgacuugguucagua

SEQ ID NO: 497996 - RNA, 19 nt, Artificial Sequence
  Description of Artificial Sequence: Synthetic oligonucleotide
acacgaacggcagcgagac

SEQ ID NO: 497997 - RNA, 19 nt, Artificial Sequence
  Description of Artificial Sequence: Synthetic oligonucleotide
ugcuaacggguaaacgcag

SEQ ID NO: 497998 - RNA, 19 nt, Artificial Sequence
  Description of Artificial Sequence: Synthetic oligonucleotide
cugaguucaggcugguacc

SEQ ID NO: 497999 - RNA, 19 nt, Artificial Sequence
  Description of Artificial Sequence: Synthetic oligonucleotide
aacgaggcgaagaugacau

SEQ ID NO: 498000 - RNA, 19 nt, Artificial Sequence
  Description of Artificial Sequence: Synthetic oligonucleotide
agugucgugcagugggaac

SEQ ID NO: 498001 - RNA, 19 nt, Artificial Sequence
  Description of Artificial Sequence: Synthetic oligonucleotide
gagcgaagcaaaacaauug

SEQ ID NO: 498002 - RNA, 19 nt, Artificial Sequence
  Description of Artificial Sequence: Synthetic oligonucleotide
caucguuucaaaagccaac

SEQ ID NO: 498003 - RNA, 19 nt, Artificial Sequence
  Description of Artificial Sequence: Synthetic oligonucleotide
aggugaucaggaguguggc

SEQ ID NO: 498004 - RNA, 19 nt, Artificial Sequence
  Description of Artificial Sequence: Synthetic oligonucleotide
gauaugccgugguuuauca

SEQ ID NO: 498005 - RNA, 19 nt, Artificial Sequence
  Description of Artificial Sequence: Synthetic oligonucleotide
uuuagcgauaauucugcuu

SEQ ID NO: 498006 - RNA, 19 nt, Artificial Sequence
  Description of Artificial Sequence: Synthetic oligonucleotide
ucguuucaaaagccaacug

SEQ ID NO: 498007 - RNA, 19 nt, Artificial Sequence
  Description of Artificial Sequence: Synthetic oligonucleotide
uuaucagggauggcaaaug

SEQ ID NO: 498008 - RNA, 19 nt, Artificial Sequence
  Description of Artificial Sequence: Synthetic oligonucleotide
uccugggcgaguucuauga

SEQ ID NO: 498009 - RNA, 19 nt, Artificial Sequence
  Description of Artificial Sequence: Synthetic oligonucleotide
accacgaucaaaaccaagu

SEQ ID NO: 498010 - RNA, 19 nt, Artificial Sequence
  Description of Artificial Sequence: Synthetic oligonucleotide
uauccaccuuuaaagccug

SEQ ID NO: 498011 - RNA, 19 nt, Artificial Sequence
  Description of Artificial Sequence: Synthetic oligonucleotide
aggaguguggccaagcucu

SEQ ID NO: 498012 - RNA, 19 nt, Artificial Sequence
  Description of Artificial Sequence: Synthetic oligonucleotide
cucuaagauucucaaguuc

SEQ ID NO: 498013 - RNA, 19 nt, Artificial Sequence
  Description of Artificial Sequence: Synthetic oligonucleotide
uuuaucagggauggcaaau

SEQ ID NO: 498014 - RNA, 19 nt, Artificial Sequence
  Description of Artificial Sequence: Synthetic oligonucleotide
aucguuguuaucauggaaa

SEQ ID NO: 498015 - RNA, 19 nt, Artificial Sequence
  Description of Artificial Sequence: Synthetic oligonucleotide
aguaaccacgaaugcuguc

SEQ ID NO: 498016 - RNA, 19 nt, Artificial Sequence
  Description of Artificial Sequence: Synthetic oligonucleotide
ucgaagguucccagguaag

SEQ ID NO: 498017 - RNA, 19 nt, Artificial Sequence
  Description of Artificial Sequence: Synthetic oligonucleotide
gggauuaaggcaaagguga

SEQ ID NO: 498018 - RNA, 19 nt, Artificial Sequence
  Description of Artificial Sequence: Synthetic oligonucleotide
acuuccgugaaguuauuua

SEQ ID NO: 498019 - RNA, 19 nt, Artificial Sequence
  Description of Artificial Sequence: Synthetic oligonucleotide
gcaaacuuacuggaaacgg

SEQ ID NO: 498020 - RNA, 19 nt, Artificial Sequence
  Description of Artificial Sequence: Synthetic oligonucleotide
acgaacggcagcgagacca

SEQ ID NO: 498021 - RNA, 19 nt, Artificial Sequence
  Description of Artificial Sequence: Synthetic oligonucleotide
ucaucuggauaugccgugg

SEQ ID NO: 498022 - RNA, 19 nt, Artificial Sequence
  Description of Artificial Sequence: Synthetic oligonucleotide
acauagccaaacugcaaga

SEQ ID NO: 498023 - RNA, 19 nt, Artificial Sequence
  Description of Artificial Sequence: Synthetic oligonucleotide
uuccguaggugaaggcccg

SEQ ID NO: 498024 - RNA, 19 nt, Artificial Sequence
  Description of Artificial Sequence: Synthetic oligonucleotide
cacaaugcugggcauguac

SEQ ID NO: 498025 - RNA, 19 nt, Artificial Sequence
  Description of Artificial Sequence: Synthetic oligonucleotide
auucugguaggcagauucc

SEQ ID NO: 498026 - RNA, 19 nt, Artificial Sequence
  Description of Artificial Sequence: Synthetic oligonucleotide
gaccccaugaaacccuggc

SEQ ID NO: 498027 - RNA, 19 nt, Artificial Sequence
  Description of Artificial Sequence: Synthetic oligonucleotide
ugaaguuguggcgcguucc

SEQ ID NO: 498028 - RNA, 19 nt, Artificial Sequence
  Description of Artificial Sequence: Synthetic oligonucleotide
acggcguucacuuguggug

SEQ ID NO: 498029 - RNA, 19 nt, Artificial Sequence
  Description of Artificial Sequence: Synthetic oligonucleotide
uggaaaccuuugaaguugu

SEQ ID NO: 498030 - RNA, 19 nt, Artificial Sequence
  Description of Artificial Sequence: Synthetic oligonucleotide
agguauaaauuuugguuuu

SEQ ID NO: 498031 - RNA, 19 nt, Artificial Sequence
  Description of Artificial Sequence: Synthetic oligonucleotide
agaaccaggcccgcggcgc

SEQ ID NO: 498032 - RNA, 19 nt, Artificial Sequence
  Description of Artificial Sequence: Synthetic oligonucleotide
aucagagcacaguuaguga

SEQ ID NO: 498033 - RNA, 19 nt, Artificial Sequence
  Description of Artificial Sequence: Synthetic oligonucleotide
ucaaucacgauggcauaca

SEQ ID NO: 498034 - RNA, 19 nt, Artificial Sequence
  Description of Artificial Sequence: Synthetic oligonucleotide
uagcucuaagauucucaag

SEQ ID NO: 498035 - RNA, 19 nt, Artificial Sequence
  Description of Artificial Sequence: Synthetic oligonucleotide
uuuuagcgauaauucugcu

SEQ ID NO: 498036 - RNA, 19 nt, Artificial Sequence
  Description of Artificial Sequence: Synthetic oligonucleotide
auuuagcacagcaaaagua

SEQ ID NO: 498037 - RNA, 19 nt, Artificial Sequence
  Description of Artificial Sequence: Synthetic oligonucleotide
guagaugcguaguugucuc

SEQ ID NO: 498038 - RNA, 19 nt, Artificial Sequence
  Description of Artificial Sequence: Synthetic oligonucleotide
ucgauagagacgguucaug

SEQ ID NO: 498039 - RNA, 19 nt, Artificial Sequence
  Description of Artificial Sequence: Synthetic oligonucleotide
aaacaccaauacuggcuga

SEQ ID NO: 498040 - RNA, 19 nt, Artificial Sequence
  Description of Artificial Sequence: Synthetic oligonucleotide
uagugaggaagucaucguu

SEQ ID NO: 498041 - RNA, 19 nt, Artificial Sequence
  Description of Artificial Sequence: Synthetic oligonucleotide
cuuacuggaaacggccgcc

SEQ ID NO: 498042 - RNA, 19 nt, Artificial Sequence
  Description of Artificial Sequence: Synthetic oligonucleotide
cucggcuccucaaacugcc

SEQ ID NO: 498043 - RNA, 19 nt, Artificial Sequence
  Description of Artificial Sequence: Synthetic oligonucleotide
gaaacggccgcccgcgcag

SEQ ID NO: 498044 - RNA, 19 nt, Artificial Sequence
  Description of Artificial Sequence: Synthetic oligonucleotide
uaacggguaaacgcaggag

SEQ ID NO: 498045 - RNA, 19 nt, Artificial Sequence
  Description of Artificial Sequence: Synthetic oligonucleotide
gaugcguaguugucucuug

SEQ ID NO: 498046 - RNA, 19 nt, Artificial Sequence
  Description of Artificial Sequence: Synthetic oligonucleotide
agauugaacgaggcgaaga

SEQ ID NO: 498047 - RNA, 19 nt, Artificial Sequence
  Description of Artificial Sequence: Synthetic oligonucleotide
guagaucaucaugacguag

SEQ ID NO: 498048 - RNA, 19 nt, Artificial Sequence
  Description of Artificial Sequence: Synthetic oligonucleotide
uuuagggccucagugucgu

SEQ ID NO: 498049 - RNA, 19 nt, Artificial Sequence
  Description of Artificial Sequence: Synthetic oligonucleotide
gaagagcgaagcaaaacaa

SEQ ID NO: 498050 - RNA, 19 nt, Artificial Sequence
  Description of Artificial Sequence: Synthetic oligonucleotide
ucuggauaugccgugguuu

SEQ ID NO: 498051 - RNA, 19 nt, Artificial Sequence
  Description of Artificial Sequence: Synthetic oligonucleotide
aguauccaaacuugauaaa

SEQ ID NO: 498052 - RNA, 19 nt, Artificial Sequence
  Description of Artificial Sequence: Synthetic oligonucleotide
uacaggguugugucaauau

SEQ ID NO: 498053 - RNA, 19 nt, Artificial Sequence
  Description of Artificial Sequence: Synthetic oligonucleotide
gauaaugaacugacacuca

SEQ ID NO: 498054 - RNA, 19 nt, Artificial Sequence
  Description of Artificial Sequence: Synthetic oligonucleotide
cucaucguuucaaaagcca

SEQ ID NO: 498055 - RNA, 19 nt, Artificial Sequence
  Description of Artificial Sequence: Synthetic oligonucleotide
auuccaaucagagcacagu

SEQ ID NO: 498056 - RNA, 19 nt, Artificial Sequence
  Description of Artificial Sequence: Synthetic oligonucleotide
guaguugucucuuguagcu

SEQ ID NO: 498057 - RNA, 19 nt, Artificial Sequence
  Description of Artificial Sequence: Synthetic oligonucleotide
gaauuagaugauucuggua

SEQ ID NO: 498058 - RNA, 19 nt, Artificial Sequence
  Description of Artificial Sequence: Synthetic oligonucleotide
ugaguucaggcugguaccc

SEQ ID NO: 498059 - RNA, 19 nt, Artificial Sequence
  Description of Artificial Sequence: Synthetic oligonucleotide
aagagcgaagcaaaacaau

SEQ ID NO: 498060 - RNA, 19 nt, Artificial Sequence
  Description of Artificial Sequence: Synthetic oligonucleotide
aacugacacucagccauag

SEQ ID NO: 498061 - RNA, 19 nt, Artificial Sequence
  Description of Artificial Sequence: Synthetic oligonucleotide
cagagcaaaccgaguauac

SEQ ID NO: 498062 - RNA, 19 nt, Artificial Sequence
  Description of Artificial Sequence: Synthetic oligonucleotide
guaucugggaggugaucag

SEQ ID NO: 498063 - RNA, 19 nt, Artificial Sequence
  Description of Artificial Sequence: Synthetic oligonucleotide
aacaccaauacuggcugaa

SEQ ID NO: 498064 - RNA, 19 nt, Artificial Sequence
  Description of Artificial Sequence: Synthetic oligonucleotide
aguggucuaaacagcagcu

SEQ ID NO: 498065 - RNA, 19 nt, Artificial Sequence
  Description of Artificial Sequence: Synthetic oligonucleotide
ucccacacaaagagguagu

SEQ ID NO: 498066 - RNA, 19 nt, Artificial Sequence
  Description of Artificial Sequence: Synthetic oligonucleotide
cacgaugccagacgugagc

SEQ ID NO: 498067 - RNA, 19 nt, Artificial Sequence
  Description of Artificial Sequence: Synthetic oligonucleotide
aucagugauuucccggggu

SEQ ID NO: 498068 - RNA, 19 nt, Artificial Sequence
  Description of Artificial Sequence: Synthetic oligonucleotide
cacaaguauccaaacuuga

SEQ ID NO: 498069 - RNA, 19 nt, Artificial Sequence
  Description of Artificial Sequence: Synthetic oligonucleotide
ugacagaauugaugcccag

SEQ ID NO: 498070 - RNA, 19 nt, Artificial Sequence
  Description of Artificial Sequence: Synthetic oligonucleotide
gggcugauacuucagagca

SEQ ID NO: 498071 - RNA, 19 nt, Artificial Sequence
  Description of Artificial Sequence: Synthetic oligonucleotide
ugaacgaggcgaagaugac

SEQ ID NO: 498072 - RNA, 19 nt, Artificial Sequence
  Description of Artificial Sequence: Synthetic oligonucleotide
gggcauguacagcaggagg

SEQ ID NO: 498073 - RNA, 19 nt, Artificial Sequence
  Description of Artificial Sequence: Synthetic oligonucleotide
auaugccgugguuuaucag

SEQ ID NO: 498074 - RNA, 19 nt, Artificial Sequence
  Description of Artificial Sequence: Synthetic oligonucleotide
guuguggcgcguuccguag

SEQ ID NO: 498075 - RNA, 19 nt, Artificial Sequence
  Description of Artificial Sequence: Synthetic oligonucleotide
auugaacgaggcgaagaug

SEQ ID NO: 498076 - RNA, 19 nt, Artificial Sequence
  Description of Artificial Sequence: Synthetic oligonucleotide
cugcuaacggguaaacgca

SEQ ID NO: 498077 - RNA, 19 nt, Artificial Sequence
  Description of Artificial Sequence: Synthetic oligonucleotide
cauguacagcaggaggccg

SEQ ID NO: 498078 - RNA, 19 nt, Artificial Sequence
  Description of Artificial Sequence: Synthetic oligonucleotide
agagcgaagcaaaacaauu

SEQ ID NO: 498079 - RNA, 19 nt, Artificial Sequence
  Description of Artificial Sequence: Synthetic oligonucleotide
gcaaaccgaguauaccagg

SEQ ID NO: 498080 - RNA, 19 nt, Artificial Sequence
  Description of Artificial Sequence: Synthetic oligonucleotide
uggggauaaccagggauca

SEQ ID NO: 498081 - RNA, 19 nt, Artificial Sequence
  Description of Artificial Sequence: Synthetic oligonucleotide
ccaaguaacagucuuaugu

SEQ ID NO: 498082 - RNA, 19 nt, Artificial Sequence
  Description of Artificial Sequence: Synthetic oligonucleotide
aaguaaccacgaaugcugu

SEQ ID NO: 498083 - RNA, 19 nt, Artificial Sequence
  Description of Artificial Sequence: Synthetic oligonucleotide
uuugagccauucuuugguu

SEQ ID NO: 498084 - RNA, 19 nt, Artificial Sequence
  Description of Artificial Sequence: Synthetic oligonucleotide
gauugaacgaggcgaagau

SEQ ID NO: 498085 - RNA, 19 nt, Artificial Sequence
  Description of Artificial Sequence: Synthetic oligonucleotide
gcugucuaugggcugauac

SEQ ID NO: 498086 - RNA, 19 nt, Artificial Sequence
  Description of Artificial Sequence: Synthetic oligonucleotide
aguauaccagguguccuca

SEQ ID NO: 498087 - RNA, 19 nt, Artificial Sequence
  Description of Artificial Sequence: Synthetic oligonucleotide
gguucaugaccucaaucac

SEQ ID NO: 498088 - RNA, 19 nt, Artificial Sequence
  Description of Artificial Sequence: Synthetic oligonucleotide
agcaucuggccugaguuca

SEQ ID NO: 498089 - RNA, 19 nt, Artificial Sequence
  Description of Artificial Sequence: Synthetic oligonucleotide
gcguaguugucucuuguag

SEQ ID NO: 498090 - RNA, 19 nt, Artificial Sequence
  Description of Artificial Sequence: Synthetic oligonucleotide
uuguggcgcguuccguagg

SEQ ID NO: 498091 - RNA, 19 nt, Artificial Sequence
  Description of Artificial Sequence: Synthetic oligonucleotide
accgaguauaccagguguc

SEQ ID NO: 498092 - RNA, 19 nt, Artificial Sequence
  Description of Artificial Sequence: Synthetic oligonucleotide
uguggcgcguuccguaggu

SEQ ID NO: 498093 - RNA, 19 nt, Artificial Sequence
  Description of Artificial Sequence: Synthetic oligonucleotide
gcgcaaaagcuucaugucc

SEQ ID NO: 498094 - RNA, 19 nt, Artificial Sequence
  Description of Artificial Sequence: Synthetic oligonucleotide
cucacaaguauccaaacuu

SEQ ID NO: 498095 - RNA, 19 nt, Artificial Sequence
  Description of Artificial Sequence: Synthetic oligonucleotide
aguagcugcuaacggguaa

SEQ ID NO: 498096 - RNA, 19 nt, Artificial Sequence
  Description of Artificial Sequence: Synthetic oligonucleotide
agcugcuaacggguaaacg

SEQ ID NO: 498097 - RNA, 19 nt, Artificial Sequence
  Description of Artificial Sequence: Synthetic oligonucleotide
accacgaaugcugucuaug

SEQ ID NO: 498098 - RNA, 19 nt, Artificial Sequence
  Description of Artificial Sequence: Synthetic oligonucleotide
aguagaucaucaugacgua

SEQ ID NO: 498099 - RNA, 19 nt, Artificial Sequence
  Description of Artificial Sequence: Synthetic oligonucleotide
ggggauuaaggcaaaggug

SEQ ID NO: 498100 - RNA, 19 nt, Artificial Sequence
  Description of Artificial Sequence: Synthetic oligonucleotide
gaggccgguccacacagac

SEQ ID NO: 498101 - RNA, 19 nt, Artificial Sequence
  Description of Artificial Sequence: Synthetic oligonucleotide
guagcuggaguagagaggu

SEQ ID NO: 498102 - RNA, 19 nt, Artificial Sequence
  Description of Artificial Sequence: Synthetic oligonucleotide
acaaguauccaaacuugau

SEQ ID NO: 498103 - RNA, 19 nt, Artificial Sequence
  Description of Artificial Sequence: Synthetic oligonucleotide
agagauucuacgacuuggu

SEQ ID NO: 498104 - RNA, 19 nt, Artificial Sequence
  Description of Artificial Sequence: Synthetic oligonucleotide
ugagugccuccaaggauuc

SEQ ID NO: 498105 - RNA, 19 nt, Artificial Sequence
  Description of Artificial Sequence: Synthetic oligonucleotide
agcgauaauucugcuuuug

SEQ ID NO: 498106 - RNA, 19 nt, Artificial Sequence
  Description of Artificial Sequence: Synthetic oligonucleotide
cuaacggguaaacgcagga

SEQ ID NO: 498107 - RNA, 19 nt, Artificial Sequence
  Description of Artificial Sequence: Synthetic oligonucleotide
cgauaauucugcuuuugag

SEQ ID NO: 498108 - RNA, 19 nt, Artificial Sequence
  Description of Artificial Sequence: Synthetic oligonucleotide
auacacaaugcugggcaug

SEQ ID NO: 498109 - RNA, 19 nt, Artificial Sequence
  Description of Artificial Sequence: Synthetic oligonucleotide
caaucuggccaguuucauc

SEQ ID NO: 498110 - RNA, 19 nt, Artificial Sequence
  Description of Artificial Sequence: Synthetic oligonucleotide
aguucguguuugauaauga

SEQ ID NO: 498111 - RNA, 19 nt, Artificial Sequence
  Description of Artificial Sequence: Synthetic oligonucleotide
uuacuggaaacggccgccc

SEQ ID NO: 498112 - RNA, 19 nt, Artificial Sequence
  Description of Artificial Sequence: Synthetic oligonucleotide
uggcgcguuccguagguga

SEQ ID NO: 498113 - RNA, 19 nt, Artificial Sequence
  Description of Artificial Sequence: Synthetic oligonucleotide
augcguaguugucucuugu

SEQ ID NO: 498114 - RNA, 19 nt, Artificial Sequence
  Description of Artificial Sequence: Synthetic oligonucleotide
ugcugggcauguacagcag

SEQ ID NO: 498115 - RNA, 19 nt, Artificial Sequence
  Description of Artificial Sequence: Synthetic oligonucleotide
agcagcauaucgauagaga

SEQ ID NO: 498116 - RNA, 19 nt, Artificial Sequence
  Description of Artificial Sequence: Synthetic oligonucleotide
uaguugucucuuguagcug

SEQ ID NO: 498117 - RNA, 19 nt, Artificial Sequence
  Description of Artificial Sequence: Synthetic oligonucleotide
agugauuucccgggguaca

SEQ ID NO: 498118 - RNA, 19 nt, Artificial Sequence
  Description of Artificial Sequence: Synthetic oligonucleotide
aggcgaagaugacauacuu

SEQ ID NO: 498119 - RNA, 19 nt, Artificial Sequence
  Description of Artificial Sequence: Synthetic oligonucleotide
gagauugaacgaggcgaag

SEQ ID NO: 498120 - RNA, 19 nt, Artificial Sequence
  Description of Artificial Sequence: Synthetic oligonucleotide
uucccgggguacaguuugg

SEQ ID NO: 498121 - RNA, 19 nt, Artificial Sequence
  Description of Artificial Sequence: Synthetic oligonucleotide
guaugaacuucagagccaa

SEQ ID NO: 498122 - RNA, 19 nt, Artificial Sequence
  Description of Artificial Sequence: Synthetic oligonucleotide
cuuguggugacauuccaau

SEQ ID NO: 498123 - RNA, 19 nt, Artificial Sequence
  Description of Artificial Sequence: Synthetic oligonucleotide
caccacgaucaaaaccaag

SEQ ID NO: 498124 - RNA, 19 nt, Artificial Sequence
  Description of Artificial Sequence: Synthetic oligonucleotide
guaaccacgaaugcugucu

SEQ ID NO: 498125 - RNA, 19 nt, Artificial Sequence
  Description of Artificial Sequence: Synthetic oligonucleotide
gucguuugaagacccugca

SEQ ID NO: 498126 - RNA, 19 nt, Artificial Sequence
  Description of Artificial Sequence: Synthetic oligonucleotide
acgaugccagacgugagca

SEQ ID NO: 498127 - RNA, 19 nt, Artificial Sequence
  Description of Artificial Sequence: Synthetic oligonucleotide
ugcguaguugucucuugua

SEQ ID NO: 498128 - RNA, 19 nt, Artificial Sequence
  Description of Artificial Sequence: Synthetic oligonucleotide
gaggcggguauuccucagc

SEQ ID NO: 498129 - RNA, 19 nt, Artificial Sequence
  Description of Artificial Sequence: Synthetic oligonucleotide
gaacgaggcgaagaugaca

SEQ ID NO: 498130 - RNA, 19 nt, Artificial Sequence
  Description of Artificial Sequence: Synthetic oligonucleotide
aguuguggcgcguuccgua

SEQ ID NO: 498131 - RNA, 19 nt, Artificial Sequence
  Description of Artificial Sequence: Synthetic oligonucleotide
caacacuuucagaauuaga

SEQ ID NO: 498132 - RNA, 19 nt, Artificial Sequence
  Description of Artificial Sequence: Synthetic oligonucleotide
acgacuugguucaguaucu

SEQ ID NO: 498133 - RNA, 19 nt, Artificial Sequence
  Description of Artificial Sequence: Synthetic oligonucleotide
cacgaucaaaaccaagucu

SEQ ID NO: 498134 - RNA, 19 nt, Artificial Sequence
  Description of Artificial Sequence: Synthetic oligonucleotide
gcucagggagcuuucuucc

SEQ ID NO: 498135 - RNA, 19 nt, Artificial Sequence
  Description of Artificial Sequence: Synthetic oligonucleotide
aggguugugucaauaucca

SEQ ID NO: 498136 - RNA, 19 nt, Artificial Sequence
  Description of Artificial Sequence: Synthetic oligonucleotide
agaggcacacgaacggcag

SEQ ID NO: 498137 - RNA, 19 nt, Artificial Sequence
  Description of Artificial Sequence: Synthetic oligonucleotide
gguaaacgcaggagaaaag

SEQ ID NO: 498138 - RNA, 19 nt, Artificial Sequence
  Description of Artificial Sequence: Synthetic oligonucleotide
aaccacgaaugcugucuau

SEQ ID NO: 498139 - RNA, 19 nt, Artificial Sequence
  Description of Artificial Sequence: Synthetic oligonucleotide
cuuuagcucuaagauucuc

SEQ ID NO: 498140 - RNA, 19 nt, Artificial Sequence
  Description of Artificial Sequence: Synthetic oligonucleotide
agacggcguucacuugugg

SEQ ID NO: 498141 - RNA, 19 nt, Artificial Sequence
  Description of Artificial Sequence: Synthetic oligonucleotide
agguagaugcguaguuguc

SEQ ID NO: 498142 - RNA, 19 nt, Artificial Sequence
  Description of Artificial Sequence: Synthetic oligonucleotide
guuugauaaugaacugaca

SEQ ID NO: 498143 - RNA, 19 nt, Artificial Sequence
  Description of Artificial Sequence: Synthetic oligonucleotide
aggucguuugaagacccug

SEQ ID NO: 498144 - RNA, 19 nt, Artificial Sequence
  Description of Artificial Sequence: Synthetic oligonucleotide
acaccaauacuggcugaag

SEQ ID NO: 498145 - RNA, 19 nt, Artificial Sequence
  Description of Artificial Sequence: Synthetic oligonucleotide
aagacggcguucacuugug

SEQ ID NO: 498146 - RNA, 19 nt, Artificial Sequence
  Description of Artificial Sequence: Synthetic oligonucleotide
guuuaucagggauggcaaa

SEQ ID NO: 498147 - RNA, 19 nt, Artificial Sequence
  Description of Artificial Sequence: Synthetic oligonucleotide
ggcaauguagaagagcgaa

SEQ ID NO: 498148 - RNA, 19 nt, Artificial Sequence
  Description of Artificial Sequence: Synthetic oligonucleotide
ucucaaguucguguuugau

SEQ ID NO: 498149 - RNA, 19 nt, Artificial Sequence
  Description of Artificial Sequence: Synthetic oligonucleotide
auacuuccguuggagccag

SEQ ID NO: 498150 - RNA, 19 nt, Artificial Sequence
  Description of Artificial Sequence: Synthetic oligonucleotide
agguaaguucccauuuccu

SEQ ID NO: 498151 - RNA, 19 nt, Artificial Sequence
  Description of Artificial Sequence: Synthetic oligonucleotide
guggucuaaacagcagcug

SEQ ID NO: 498152 - RNA, 19 nt, Artificial Sequence
  Description of Artificial Sequence: Synthetic oligonucleotide
gcgaagcaaaacaauugag

SEQ ID NO: 498153 - RNA, 19 nt, Artificial Sequence
  Description of Artificial Sequence: Synthetic oligonucleotide
guaggucauguuggcacag

SEQ ID NO: 498154 - RNA, 19 nt, Artificial Sequence
  Description of Artificial Sequence: Synthetic oligonucleotide
gccaaacaccaauacuggc

SEQ ID NO: 498155 - RNA, 19 nt, Artificial Sequence
  Description of Artificial Sequence: Synthetic oligonucleotide
gugauuucccgggguacag

SEQ ID NO: 498156 - RNA, 19 nt, Artificial Sequence
  Description of Artificial Sequence: Synthetic oligonucleotide
ggucguuugaagacccugc

SEQ ID NO: 498157 - RNA, 19 nt, Artificial Sequence
  Description of Artificial Sequence: Synthetic oligonucleotide
ggcagauuccaaucuguga

SEQ ID NO: 498158 - RNA, 19 nt, Artificial Sequence
  Description of Artificial Sequence: Synthetic oligonucleotide
uugacauccugggcgaguu

SEQ ID NO: 498159 - RNA, 19 nt, Artificial Sequence
  Description of Artificial Sequence: Synthetic oligonucleotide
uggccucggcuccucaaac

SEQ ID NO: 498160 - RNA, 19 nt, Artificial Sequence
  Description of Artificial Sequence: Synthetic oligonucleotide
ggcgcaaaagcuucauguc

SEQ ID NO: 498161 - RNA, 19 nt, Artificial Sequence
  Description of Artificial Sequence: Synthetic oligonucleotide
cuaagauucucaaguucgu

SEQ ID NO: 498162 - RNA, 19 nt, Artificial Sequence
  Description of Artificial Sequence: Synthetic oligonucleotide
gugauuuucccaagacguc

SEQ ID NO: 498163 - RNA, 19 nt, Artificial Sequence
  Description of Artificial Sequence: Synthetic oligonucleotide
caaaccgaguauaccaggu

SEQ ID NO: 498164 - RNA, 19 nt, Artificial Sequence
  Description of Artificial Sequence: Synthetic oligonucleotide
gcggguauuccucagcaga

SEQ ID NO: 498165 - RNA, 19 nt, Artificial Sequence
  Description of Artificial Sequence: Synthetic oligonucleotide
acguagagggagaaauaga

SEQ ID NO: 498166 - RNA, 19 nt, Artificial Sequence
  Description of Artificial Sequence: Synthetic oligonucleotide
aggcagauuccaaucugug

SEQ ID NO: 498167 - RNA, 19 nt, Artificial Sequence
  Description of Artificial Sequence: Synthetic oligonucleotide
cacacgaacggcagcgaga

SEQ ID NO: 498168 - RNA, 19 nt, Artificial Sequence
  Description of Artificial Sequence: Synthetic oligonucleotide
ugaccacuagaggugugaa

SEQ ID NO: 498169 - RNA, 19 nt, Artificial Sequence
  Description of Artificial Sequence: Synthetic oligonucleotide
aaguuguggcgcguuccgu

SEQ ID NO: 498170 - RNA, 19 nt, Artificial Sequence
  Description of Artificial Sequence: Synthetic oligonucleotide
augccagacgugagcaauc

SEQ ID NO: 498171 - RNA, 19 nt, Artificial Sequence
  Description of Artificial Sequence: Synthetic oligonucleotide
ugucgugcagugggaacac

SEQ ID NO: 498172 - RNA, 19 nt, Artificial Sequence
  Description of Artificial Sequence: Synthetic oligonucleotide
caagcaucuggccugaguu

SEQ ID NO: 498173 - RNA, 19 nt, Artificial Sequence
  Description of Artificial Sequence: Synthetic oligonucleotide
ugauuucccgggguacagu

SEQ ID NO: 498174 - RNA, 19 nt, Artificial Sequence
  Description of Artificial Sequence: Synthetic oligonucleotide
cagguagaugcguaguugu

SEQ ID NO: 498175 - RNA, 19 nt, Artificial Sequence
  Description of Artificial Sequence: Synthetic oligonucleotide
acggguaaacgcaggagaa

SEQ ID NO: 498176 - RNA, 19 nt, Artificial Sequence
  Description of Artificial Sequence: Synthetic oligonucleotide
gauuucccgggguacaguu

SEQ ID NO: 498177 - RNA, 19 nt, Artificial Sequence
  Description of Artificial Sequence: Synthetic oligonucleotide
gcuaacggguaaacgcagg

SEQ ID NO: 498178 - RNA, 19 nt, Artificial Sequence
  Description of Artificial Sequence: Synthetic oligonucleotide
cuggcgcaaaagcuucaug

SEQ ID NO: 498179 - RNA, 19 nt, Artificial Sequence
  Description of Artificial Sequence: Synthetic oligonucleotide
gacggcguucacuuguggu

SEQ ID NO: 498180 - RNA, 19 nt, Artificial Sequence
  Description of Artificial Sequence: Synthetic oligonucleotide
gcgauaauucugcuuuuga

SEQ ID NO: 498181 - RNA, 19 nt, Artificial Sequence
  Description of Artificial Sequence: Synthetic oligonucleotide
ccacgaucaaaaccaaguc

SEQ ID NO: 498182 - RNA, 19 nt, Artificial Sequence
  Description of Artificial Sequence: Synthetic oligonucleotide
gagccgggagaaccaggcc

SEQ ID NO: 498183 - RNA, 19 nt, Artificial Sequence
  Description of Artificial Sequence: Synthetic oligonucleotide
ggguaaacgcaggagaaaa

SEQ ID NO: 498184 - RNA, 19 nt, Artificial Sequence
  Description of Artificial Sequence: Synthetic oligonucleotide
gaacggcagcgagaccagg

SEQ ID NO: 498185 - RNA, 19 nt, Artificial Sequence
  Description of Artificial Sequence: Synthetic oligonucleotide
guagcugcuaacggguaaa

SEQ ID NO: 498186 - RNA, 19 nt, Artificial Sequence
  Description of Artificial Sequence: Synthetic oligonucleotide
gguaggcagauuccaaucu

SEQ ID NO: 498187 - RNA, 19 nt, Artificial Sequence
  Description of Artificial Sequence: Synthetic oligonucleotide
uagcgauaauucugcuuuu

SEQ ID NO: 498188 - RNA, 19 nt, Artificial Sequence
  Description of Artificial Sequence: Synthetic oligonucleotide
aguuuggccuggggauaac

SEQ ID NO: 498189 - RNA, 19 nt, Artificial Sequence
  Description of Artificial Sequence: Synthetic oligonucleotide
gagaccagguagaugcgua

SEQ ID NO: 498190 - RNA, 19 nt, Artificial Sequence
  Description of Artificial Sequence: Synthetic oligonucleotide
ccgugaaguuauuuagcac

SEQ ID NO: 498191 - RNA, 19 nt, Artificial Sequence
  Description of Artificial Sequence: Synthetic oligonucleotide
cugaguugacuuccgugaa

SEQ ID NO: 498192 - RNA, 19 nt, Artificial Sequence
  Description of Artificial Sequence: Synthetic oligonucleotide
cacuuguggugacauucca

SEQ ID NO: 498193 - RNA, 19 nt, Artificial Sequence
  Description of Artificial Sequence: Synthetic oligonucleotide
gucuuauguuggaggcucc

SEQ ID NO: 498194 - RNA, 19 nt, Artificial Sequence
  Description of Artificial Sequence: Synthetic oligonucleotide
gcacacgaacggcagcgag

SEQ ID NO: 498195 - RNA, 19 nt, Artificial Sequence
  Description of Artificial Sequence: Synthetic oligonucleotide
ccgugguuuaucagggaug

SEQ ID NO: 498196 - RNA, 19 nt, Artificial Sequence
  Description of Artificial Sequence: Synthetic oligonucleotide
ucggcuccucaaacugccu

SEQ ID NO: 498197 - RNA, 19 nt, Artificial Sequence
  Description of Artificial Sequence: Synthetic oligonucleotide
cugcaaaaggucguuugaa

SEQ ID NO: 498198 - RNA, 19 nt, Artificial Sequence
  Description of Artificial Sequence: Synthetic oligonucleotide
aaguagcugcuaacgggua

SEQ ID NO: 498199 - RNA, 19 nt, Artificial Sequence
  Description of Artificial Sequence: Synthetic oligonucleotide
acuuccguuggagccagua

SEQ ID NO: 498200 - RNA, 19 nt, Artificial Sequence
  Description of Artificial Sequence: Synthetic oligonucleotide
auacaggguugugucaaua

SEQ ID NO: 498201 - RNA, 19 nt, Artificial Sequence
  Description of Artificial Sequence: Synthetic oligonucleotide
cguuccguaggugaaggcc

SEQ ID NO: 498202 - RNA, 19 nt, Artificial Sequence
  Description of Artificial Sequence: Synthetic oligonucleotide
cagauauaacacucaucgu

SEQ ID NO: 498203 - RNA, 19 nt, Artificial Sequence
  Description of Artificial Sequence: Synthetic oligonucleotide
cuugagugccuccaaggau

SEQ ID NO: 498204 - RNA, 19 nt, Artificial Sequence
  Description of Artificial Sequence: Synthetic oligonucleotide
cuuccguuggagccaguaa

SEQ ID NO: 498205 - RNA, 19 nt, Artificial Sequence
  Description of Artificial Sequence: Synthetic oligonucleotide
ccgaguauaccaggugucc

SEQ ID NO: 498206 - RNA, 19 nt, Artificial Sequence
  Description of Artificial Sequence: Synthetic oligonucleotide
cagacgugagcaaucuccu

SEQ ID NO: 498207 - RNA, 19 nt, Artificial Sequence
  Description of Artificial Sequence: Synthetic oligonucleotide
gguagaugcguaguugucu

SEQ ID NO: 498208 - RNA, 19 nt, Artificial Sequence
  Description of Artificial Sequence: Synthetic oligonucleotide
gccgggagaaccaggcccg

SEQ ID NO: 498209 - RNA, 19 nt, Artificial Sequence
  Description of Artificial Sequence: Synthetic oligonucleotide
gugggaacaccugggucac

SEQ ID NO: 498210 - RNA, 19 nt, Artificial Sequence
  Description of Artificial Sequence: Synthetic oligonucleotide
cugggaggugaucaggagu

SEQ ID NO: 498211 - RNA, 19 nt, Artificial Sequence
  Description of Artificial Sequence: Synthetic oligonucleotide
cuuauguuggaggcuccaa

SEQ ID NO: 498212 - RNA, 19 nt, Artificial Sequence
  Description of Artificial Sequence: Synthetic oligonucleotide
ccagguagaugcguaguug

SEQ ID NO: 498213 - RNA, 19 nt, Artificial Sequence
  Description of Artificial Sequence: Synthetic oligonucleotide
gaggcgaagaugacauacu

SEQ ID NO: 498214 - RNA, 19 nt, Artificial Sequence
  Description of Artificial Sequence: Synthetic oligonucleotide
uggggcucagggagcuuuc

SEQ ID NO: 498215 - RNA, 19 nt, Artificial Sequence
  Description of Artificial Sequence: Synthetic oligonucleotide
cauaucgauagagacgguu

SEQ ID NO: 498216 - RNA, 19 nt, Artificial Sequence
  Description of Artificial Sequence: Synthetic oligonucleotide
agacgguucaugaccucaa

SEQ ID NO: 498217 - RNA, 19 nt, Artificial Sequence
  Description of Artificial Sequence: Synthetic oligonucleotide
ccucggcuccucaaacugc

SEQ ID NO: 498218 - RNA, 19 nt, Artificial Sequence
  Description of Artificial Sequence: Synthetic oligonucleotide
ugacuuccgugaaguuauu

SEQ ID NO: 498219 - RNA, 19 nt, Artificial Sequence
  Description of Artificial Sequence: Synthetic oligonucleotide
uccguaggugaaggcccgc

SEQ ID NO: 498220 - RNA, 19 nt, Artificial Sequence
  Description of Artificial Sequence: Synthetic oligonucleotide
cuaugaccacuagaggugu

SEQ ID NO: 498221 - RNA, 19 nt, Artificial Sequence
  Description of Artificial Sequence: Synthetic oligonucleotide
caaucagagcacaguuagu

SEQ ID NO: 498222 - RNA, 19 nt, Artificial Sequence
  Description of Artificial Sequence: Synthetic oligonucleotide
cauacacaaugcugggcau

SEQ ID NO: 498223 - RNA, 19 nt, Artificial Sequence
  Description of Artificial Sequence: Synthetic oligonucleotide
ccaaggauucgaauuccaa

SEQ ID NO: 498224 - RNA, 19 nt, Artificial Sequence
  Description of Artificial Sequence: Synthetic oligonucleotide
cucuggcgcaaaagcuuca

SEQ ID NO: 498225 - RNA, 19 nt, Artificial Sequence
  Description of Artificial Sequence: Synthetic oligonucleotide
gaacugacacucagccaua

SEQ ID NO: 498226 - RNA, 19 nt, Artificial Sequence
  Description of Artificial Sequence: Synthetic oligonucleotide
ggaaacggccgcccgcgca

SEQ ID NO: 498227 - RNA, 19 nt, Artificial Sequence
  Description of Artificial Sequence: Synthetic oligonucleotide
agguaguagggcagcccga

SEQ ID NO: 498228 - RNA, 19 nt, Artificial Sequence
  Description of Artificial Sequence: Synthetic oligonucleotide
gcucuggcgcaaaagcuuc

SEQ ID NO: 498229 - RNA, 19 nt, Artificial Sequence
  Description of Artificial Sequence: Synthetic oligonucleotide
gacgguucaugaccucaau

SEQ ID NO: 498230 - RNA, 19 nt, Artificial Sequence
  Description of Artificial Sequence: Synthetic oligonucleotide
cacgaacggcagcgagacc

SEQ ID NO: 498231 - RNA, 19 nt, Artificial Sequence
  Description of Artificial Sequence: Synthetic oligonucleotide
ccaaguaaucaucgaaggu

SEQ ID NO: 498232 - RNA, 19 nt, Artificial Sequence
  Description of Artificial Sequence: Synthetic oligonucleotide
ccugcacauuuucaaggca

SEQ ID NO: 498233 - RNA, 19 nt, Artificial Sequence
  Description of Artificial Sequence: Synthetic oligonucleotide
cagcgagaccagguagaug

SEQ ID NO: 498234 - RNA, 19 nt, Artificial Sequence
  Description of Artificial Sequence: Synthetic oligonucleotide
auuucccgggguacaguuu

SEQ ID NO: 498235 - RNA, 19 nt, Artificial Sequence
  Description of Artificial Sequence: Synthetic oligonucleotide
cuggccucggcuccucaaa

SEQ ID NO: 498236 - RNA, 19 nt, Artificial Sequence
  Description of Artificial Sequence: Synthetic oligonucleotide
gcucuaagauucucaaguu

SEQ ID NO: 498237 - RNA, 19 nt, Artificial Sequence
  Description of Artificial Sequence: Synthetic oligonucleotide
ggucacgaugccagacgug

SEQ ID NO: 498238 - RNA, 19 nt, Artificial Sequence
  Description of Artificial Sequence: Synthetic oligonucleotide
ccacuagaggugugaagga

SEQ ID NO: 498239 - RNA, 19 nt, Artificial Sequence
  Description of Artificial Sequence: Synthetic oligonucleotide
ggcguucacuuguggugac

SEQ ID NO: 498240 - RNA, 19 nt, Artificial Sequence
  Description of Artificial Sequence: Synthetic oligonucleotide
gggucacgaugccagacgu

SEQ ID NO: 498241 - RNA, 19 nt, Artificial Sequence
  Description of Artificial Sequence: Synthetic oligonucleotide
cgaguucuaugaccacuag

SEQ ID NO: 498242 - RNA, 19 nt, Artificial Sequence
  Description of Artificial Sequence: Synthetic oligonucleotide
gcgagaccagguagaugcg

SEQ ID NO: 498243 - RNA, 19 nt, Artificial Sequence
  Description of Artificial Sequence: Synthetic oligonucleotide
guggaccagaugagauuga

SEQ ID NO: 498244 - RNA, 19 nt, Artificial Sequence
  Description of Artificial Sequence: Synthetic oligonucleotide
ggaccccaugaaacccugg

SEQ ID NO: 498245 - RNA, 19 nt, Artificial Sequence
  Description of Artificial Sequence: Synthetic oligonucleotide
cuacgacuugguucaguau

SEQ ID NO: 498246 - RNA, 19 nt, Artificial Sequence
  Description of Artificial Sequence: Synthetic oligonucleotide
cgcaaaagcuucauguccu

SEQ ID NO: 498247 - RNA, 19 nt, Artificial Sequence
  Description of Artificial Sequence: Synthetic oligonucleotide
gcguuccguaggugaaggc

SEQ ID NO: 498248 - RNA, 19 nt, Artificial Sequence
  Description of Artificial Sequence: Synthetic oligonucleotide
cccaagacgucaggaacuc

SEQ ID NO: 498249 - RNA, 19 nt, Artificial Sequence
  Description of Artificial Sequence: Synthetic oligonucleotide
gcgaguucuaugaccacua

SEQ ID NO: 498250 - RNA, 19 nt, Artificial Sequence
  Description of Artificial Sequence: Synthetic oligonucleotide
ccgagccgggagaaccagg

SEQ ID NO: 498251 - RNA, 19 nt, Artificial Sequence
  Description of Artificial Sequence: Synthetic oligonucleotide
uacuuccguuggagccagu

SEQ ID NO: 498252 - RNA, 19 nt, Artificial Sequence
  Description of Artificial Sequence: Synthetic oligonucleotide
gacuuccgugaaguuauuu

SEQ ID NO: 498253 - RNA, 19 nt, Artificial Sequence
  Description of Artificial Sequence: Synthetic oligonucleotide
cauacaggguugugucaau

SEQ ID NO: 498254 - RNA, 19 nt, Artificial Sequence
  Description of Artificial Sequence: Synthetic oligonucleotide
cgcguuccguaggugaagg

SEQ ID NO: 498255 - RNA, 19 nt, Artificial Sequence
  Description of Artificial Sequence: Synthetic oligonucleotide
ugcugucuaugggcugaua

SEQ ID NO: 498256 - RNA, 19 nt, Artificial Sequence
  Description of Artificial Sequence: Synthetic oligonucleotide
cagucuuauguuggaggcu

SEQ ID NO: 498257 - RNA, 19 nt, Artificial Sequence
  Description of Artificial Sequence: Synthetic oligonucleotide
cgaacggcagcgagaccag

SEQ ID NO: 498258 - RNA, 19 nt, Artificial Sequence
  Description of Artificial Sequence: Synthetic oligonucleotide
guggcgcguuccguaggug

SEQ ID NO: 498259 - RNA, 19 nt, Artificial Sequence
  Description of Artificial Sequence: Synthetic oligonucleotide
cuuugaaguuguggcgcgu

SEQ ID NO: 498260 - RNA, 19 nt, Artificial Sequence
  Description of Artificial Sequence: Synthetic oligonucleotide
guucacuuguggugacauu

SEQ ID NO: 498261 - RNA, 19 nt, Artificial Sequence
  Description of Artificial Sequence: Synthetic oligonucleotide
gccagacgugagcaaucuc

SEQ ID NO: 498262 - RNA, 19 nt, Artificial Sequence
  Description of Artificial Sequence: Synthetic oligonucleotide
gcgcguuccguaggugaag

SEQ ID NO: 498263 - RNA, 19 nt, Artificial Sequence
  Description of Artificial Sequence: Synthetic oligonucleotide
auggcacggccagcacacu

SEQ ID NO: 498264 - RNA, 19 nt, Artificial Sequence
  Description of Artificial Sequence: Synthetic oligonucleotide
ccgcauggcagcaucugua

SEQ ID NO: 498265 - RNA, 19 nt, Artificial Sequence
  Description of Artificial Sequence: Synthetic oligonucleotide
ccaagagggcaugcuccac

SEQ ID NO: 498266 - RNA, 19 nt, Artificial Sequence
  Description of Artificial Sequence: Synthetic oligonucleotide
ggcgcguuccguaggugaa

SEQ ID NO: 498267 - RNA, 19 nt, Artificial Sequence
  Description of Artificial Sequence: Synthetic oligonucleotide
caccuacugugacugccau

SEQ ID NO: 498268 - RNA, 19 nt, Artificial Sequence
  Description of Artificial Sequence: Synthetic oligonucleotide
ggccucggcuccucaaacu

SEQ ID NO: 498269 - RNA, 19 nt, Artificial Sequence
  Description of Artificial Sequence: Synthetic oligonucleotide
ggcggcccgagccgggaga

SEQ ID NO: 498270 - RNA, 19 nt, Artificial Sequence
  Description of Artificial Sequence: Synthetic oligonucleotide
acggccgcccgcgcagcgu

SEQ ID NO: 498271 - RNA, 19 nt, Artificial Sequence
  Description of Artificial Sequence: Synthetic oligonucleotide
cgacuugguucaguaucug

SEQ ID NO: 498272 - RNA, 19 nt, Artificial Sequence
  Description of Artificial Sequence: Synthetic oligonucleotide
gcguucacuuguggugaca

SEQ ID NO: 498273 - RNA, 19 nt, Artificial Sequence
  Description of Artificial Sequence: Synthetic oligonucleotide
cuggggcucagggagcuuu

SEQ ID NO: 498274 - RNA, 19 nt, Artificial Sequence
  Description of Artificial Sequence: Synthetic oligonucleotide
ccaagacgucaggaacuca

SEQ ID NO: 498275 - RNA, 19 nt, Artificial Sequence
  Description of Artificial Sequence: Synthetic oligonucleotide
ccguaggugaaggcccgca

SEQ ID NO: 498276 - RNA, 19 nt, Artificial Sequence
  Description of Artificial Sequence: Synthetic oligonucleotide
cgaguauaccagguguccu

SEQ ID NO: 498277 - RNA, 19 nt, Artificial Sequence
  Description of Artificial Sequence: Synthetic oligonucleotide
ggaggccgguccacacaga

SEQ ID NO: 498278 - RNA, 19 nt, Artificial Sequence
  Description of Artificial Sequence: Synthetic oligonucleotide
cccgcauggcagcaucugu

SEQ ID NO: 498279 - RNA, 19 nt, Artificial Sequence
  Description of Artificial Sequence: Synthetic oligonucleotide
gccgguccacacagacuca

SEQ ID NO: 498280 - RNA, 19 nt, Artificial Sequence
  Description of Artificial Sequence: Synthetic oligonucleotide
cguucacuuguggugacau

SEQ ID NO: 498281 - RNA, 19 nt, Artificial Sequence
  Description of Artificial Sequence: Synthetic oligonucleotide
gcauaucgauagagacggu

SEQ ID NO: 498282 - RNA, 19 nt, Artificial Sequence
  Description of Artificial Sequence: Synthetic oligonucleotide
ggccgcccgcgcagcgucc

SEQ ID NO: 498283 - RNA, 19 nt, Artificial Sequence
  Description of Artificial Sequence: Synthetic oligonucleotide
gccgcccgcgcagcguccu

SEQ ID NO: 498284 - RNA, 19 nt, Artificial Sequence
  Description of Artificial Sequence: Synthetic oligonucleotide
ccccagcgguaggucaugu

SEQ ID NO: 498285 - RNA, 19 nt, Artificial Sequence
  Description of Artificial Sequence: Synthetic oligonucleotide
cggcccgagccgggagaac

SEQ ID NO: 498286 - RNA, 19 nt, Artificial Sequence
  Description of Artificial Sequence: Synthetic oligonucleotide
aauaguucuauauacauca

SEQ ID NO: 498287 - RNA, 19 nt, Artificial Sequence
  Description of Artificial Sequence: Synthetic oligonucleotide
aagaaugcuggcuuuacuc

SEQ ID NO: 498288 - RNA, 19 nt, Artificial Sequence
  Description of Artificial Sequence: Synthetic oligonucleotide
aauucaggggaauacagga

SEQ ID NO: 498289 - RNA, 19 nt, Artificial Sequence
  Description of Artificial Sequence: Synthetic oligonucleotide
ucauacagccccaauaaag

SEQ ID NO: 498290 - RNA, 19 nt, Artificial Sequence
  Description of Artificial Sequence: Synthetic oligonucleotide
agaaugcuggcuuuacucc

SEQ ID NO: 498291 - RNA, 19 nt, Artificial Sequence
  Description of Artificial Sequence: Synthetic oligonucleotide
cuuacaugaugaaugcucg

SEQ ID NO: 498292 - RNA, 19 nt, Artificial Sequence
  Description of Artificial Sequence: Synthetic oligonucleotide
aacguauucuugcaauguc

SEQ ID NO: 498293 - RNA, 19 nt, Artificial Sequence
  Description of Artificial Sequence: Synthetic oligonucleotide
aauuacaggggcaucggac

SEQ ID NO: 498294 - RNA, 19 nt, Artificial Sequence
  Description of Artificial Sequence: Synthetic oligonucleotide
acagacuggaucaaggggc

SEQ ID NO: 498295 - RNA, 19 nt, Artificial Sequence
  Description of Artificial Sequence: Synthetic oligonucleotide
gaaauugaccuucguaacc

SEQ ID NO: 498296 - RNA, 19 nt, Artificial Sequence
  Description of Artificial Sequence: Synthetic oligonucleotide
cuaaguaagggacugguuc

SEQ ID NO: 498297 - RNA, 19 nt, Artificial Sequence
  Description of Artificial Sequence: Synthetic oligonucleotide
acuuacaugaugaaugcuc

SEQ ID NO: 498298 - RNA, 19 nt, Artificial Sequence
  Description of Artificial Sequence: Synthetic oligonucleotide
uuacaccugggaaauagcc

SEQ ID NO: 498299 - RNA, 19 nt, Artificial Sequence
  Description of Artificial Sequence: Synthetic oligonucleotide
guugaucggagacugacag

SEQ ID NO: 498300 - RNA, 19 nt, Artificial Sequence
  Description of Artificial Sequence: Synthetic oligonucleotide
agcgacccuaccuuaaccc

SEQ ID NO: 498301 - RNA, 19 nt, Artificial Sequence
  Description of Artificial Sequence: Synthetic oligonucleotide
uuaccuacgcuuccaaacc

SEQ ID NO: 498302 - RNA, 19 nt, Artificial Sequence
  Description of Artificial Sequence: Synthetic oligonucleotide
auguuuaccggcuccguac

SEQ ID NO: 498303 - RNA, 19 nt, Artificial Sequence
  Description of Artificial Sequence: Synthetic oligonucleotide
cuuaccuacgcuuccaaac

SEQ ID NO: 498304 - RNA, 19 nt, Artificial Sequence
  Description of Artificial Sequence: Synthetic oligonucleotide
uucguaaccccaaaggaaa

SEQ ID NO: 498305 - RNA, 19 nt, Artificial Sequence
  Description of Artificial Sequence: Synthetic oligonucleotide
cuaagaaugucggauggcg

SEQ ID NO: 498306 - RNA, 19 nt, Artificial Sequence
  Description of Artificial Sequence: Synthetic oligonucleotide
ugugugacagcaagauccg

SEQ ID NO: 498307 - RNA, 19 nt, Artificial Sequence
  Description of Artificial Sequence: Synthetic oligonucleotide
accuucguaaccccaaagg

SEQ ID NO: 498308 - RNA, 19 nt, Artificial Sequence
  Description of Artificial Sequence: Synthetic oligonucleotide
aguaacuuacaccugggaa

SEQ ID NO: 498309 - RNA, 19 nt, Artificial Sequence
  Description of Artificial Sequence: Synthetic oligonucleotide
guugcuaccaggcagccac

SEQ ID NO: 498310 - RNA, 19 nt, Artificial Sequence
  Description of Artificial Sequence: Synthetic oligonucleotide
aggaaugguucucagggag

SEQ ID NO: 498311 - RNA, 19 nt, Artificial Sequence
  Description of Artificial Sequence: Synthetic oligonucleotide
aauuccuaaccucucccga

SEQ ID NO: 498312 - RNA, 19 nt, Artificial Sequence
  Description of Artificial Sequence: Synthetic oligonucleotide
ugccuauguauccuaaaca

SEQ ID NO: 498313 - RNA, 19 nt, Artificial Sequence
  Description of Artificial Sequence: Synthetic oligonucleotide
aacaagaagaaugcuggcu

SEQ ID NO: 498314 - RNA, 19 nt, Artificial Sequence
  Description of Artificial Sequence: Synthetic oligonucleotide
ugaucggagacugacagac

SEQ ID NO: 498315 - RNA, 19 nt, Artificial Sequence
  Description of Artificial Sequence: Synthetic oligonucleotide
ugaaggacuuagcuucccg

SEQ ID NO: 498316 - RNA, 19 nt, Artificial Sequence
  Description of Artificial Sequence: Synthetic oligonucleotide
uguuuaccggcuccguacg

SEQ ID NO: 498317 - RNA, 19 nt, Artificial Sequence
  Description of Artificial Sequence: Synthetic oligonucleotide
cugguaacagccuacguuc

SEQ ID NO: 498318 - RNA, 19 nt, Artificial Sequence
  Description of Artificial Sequence: Synthetic oligonucleotide
gauucuuuugcaguacggc

SEQ ID NO: 498319 - RNA, 19 nt, Artificial Sequence
  Description of Artificial Sequence: Synthetic oligonucleotide
aucggacauacuucuuucc

SEQ ID NO: 498320 - RNA, 19 nt, Artificial Sequence
  Description of Artificial Sequence: Synthetic oligonucleotide
uaagaaugucggauggcgc

SEQ ID NO: 498321 - RNA, 19 nt, Artificial Sequence
  Description of Artificial Sequence: Synthetic oligonucleotide
guaacuuacaccugggaaa

SEQ ID NO: 498322 - RNA, 19 nt, Artificial Sequence
  Description of Artificial Sequence: Synthetic oligonucleotide
gauaucugcgcccaauaga

SEQ ID NO: 498323 - RNA, 19 nt, Artificial Sequence
  Description of Artificial Sequence: Synthetic oligonucleotide
gauuaggggaccauauccc

SEQ ID NO: 498324 - RNA, 19 nt, Artificial Sequence
  Description of Artificial Sequence: Synthetic oligonucleotide
aaacguauucuugcaaugu

SEQ ID NO: 498325 - RNA, 19 nt, Artificial Sequence
  Description of Artificial Sequence: Synthetic oligonucleotide
ucggauggcgccuugauua

SEQ ID NO: 498326 - RNA, 19 nt, Artificial Sequence
  Description of Artificial Sequence: Synthetic oligonucleotide
ggauuaggggaccauaucc

SEQ ID NO: 498327 - RNA, 19 nt, Artificial Sequence
  Description of Artificial Sequence: Synthetic oligonucleotide
aucugcgcccaauagauga

SEQ ID NO: 498328 - RNA, 19 nt, Artificial Sequence
  Description of Artificial Sequence: Synthetic oligonucleotide
cuaaccucucccgagacag

SEQ ID NO: 498329 - RNA, 19 nt, Artificial Sequence
  Description of Artificial Sequence: Synthetic oligonucleotide
ugugaauucuguccacaga

SEQ ID NO: 498330 - RNA, 19 nt, Artificial Sequence
  Description of Artificial Sequence: Synthetic oligonucleotide
uggaguaccgacagcguug

SEQ ID NO: 498331 - RNA, 19 nt, Artificial Sequence
  Description of Artificial Sequence: Synthetic oligonucleotide
ugcugcaacuggaaguaag

SEQ ID NO: 498332 - RNA, 19 nt, Artificial Sequence
  Description of Artificial Sequence: Synthetic oligonucleotide
ggugaagugcaauagcagc

SEQ ID NO: 498333 - RNA, 19 nt, Artificial Sequence
  Description of Artificial Sequence: Synthetic oligonucleotide
gaauguguaagggucagga

SEQ ID NO: 498334 - RNA, 19 nt, Artificial Sequence
  Description of Artificial Sequence: Synthetic oligonucleotide
uccgcuccaaagcucuugg

SEQ ID NO: 498335 - RNA, 19 nt, Artificial Sequence
  Description of Artificial Sequence: Synthetic oligonucleotide
auuccuaaccucucccgag

SEQ ID NO: 498336 - RNA, 19 nt, Artificial Sequence
  Description of Artificial Sequence: Synthetic oligonucleotide
guauccuaaacagcaaccc

SEQ ID NO: 498337 - RNA, 19 nt, Artificial Sequence
  Description of Artificial Sequence: Synthetic oligonucleotide
ugcguagauaccuccauau

SEQ ID NO: 498338 - RNA, 19 nt, Artificial Sequence
  Description of Artificial Sequence: Synthetic oligonucleotide
aaggacuuagcuucccgaa

SEQ ID NO: 498339 - RNA, 19 nt, Artificial Sequence
  Description of Artificial Sequence: Synthetic oligonucleotide
uuucugaaggacuuagcuu

SEQ ID NO: 498340 - RNA, 19 nt, Artificial Sequence
  Description of Artificial Sequence: Synthetic oligonucleotide
aauguguaagggucaggaa

SEQ ID NO: 498341 - RNA, 19 nt, Artificial Sequence
  Description of Artificial Sequence: Synthetic oligonucleotide
acagccuacguucccaaug

SEQ ID NO: 498342 - RNA, 19 nt, Artificial Sequence
  Description of Artificial Sequence: Synthetic oligonucleotide
acagacucgacagguaauc

SEQ ID NO: 498343 - RNA, 19 nt, Artificial Sequence
  Description of Artificial Sequence: Synthetic oligonucleotide
auuaggggaccauauccca

SEQ ID NO: 498344 - RNA, 19 nt, Artificial Sequence
  Description of Artificial Sequence: Synthetic oligonucleotide
uauaccuuuuggacuuaca

SEQ ID NO: 498345 - RNA, 19 nt, Artificial Sequence
  Description of Artificial Sequence: Synthetic oligonucleotide
ggggaauacaggauuaggg

SEQ ID NO: 498346 - RNA, 19 nt, Artificial Sequence
  Description of Artificial Sequence: Synthetic oligonucleotide
acguugaucggagacugac

SEQ ID NO: 498347 - RNA, 19 nt, Artificial Sequence
  Description of Artificial Sequence: Synthetic oligonucleotide
uucguugcagacaccacau

SEQ ID NO: 498348 - RNA, 19 nt, Artificial Sequence
  Description of Artificial Sequence: Synthetic oligonucleotide
aguguuacuguugcuacca

SEQ ID NO: 498349 - RNA, 19 nt, Artificial Sequence
  Description of Artificial Sequence: Synthetic oligonucleotide
cacuauccgggcuagucag

SEQ ID NO: 498350 - RNA, 19 nt, Artificial Sequence
  Description of Artificial Sequence: Synthetic oligonucleotide
guggcuucguugcagacac

SEQ ID NO: 498351 - RNA, 19 nt, Artificial Sequence
  Description of Artificial Sequence: Synthetic oligonucleotide
ccuaauggugcacaugagg

SEQ ID NO: 498352 - RNA, 19 nt, Artificial Sequence
  Description of Artificial Sequence: Synthetic oligonucleotide
uccucucaaguccaguguc

SEQ ID NO: 498353 - RNA, 19 nt, Artificial Sequence
  Description of Artificial Sequence: Synthetic oligonucleotide
uaacuuacaccugggaaau

SEQ ID NO: 498354 - RNA, 19 nt, Artificial Sequence
  Description of Artificial Sequence: Synthetic oligonucleotide
agauaaggagacaauuaca

SEQ ID NO: 498355 - RNA, 19 nt, Artificial Sequence
  Description of Artificial Sequence: Synthetic oligonucleotide
ggacuuacaugaugaaugc

SEQ ID NO: 498356 - RNA, 19 nt, Artificial Sequence
  Description of Artificial Sequence: Synthetic oligonucleotide
uucauacagccccaauaaa

SEQ ID NO: 498357 - RNA, 19 nt, Artificial Sequence
  Description of Artificial Sequence: Synthetic oligonucleotide
cuagcaauggucuuaccua

SEQ ID NO: 498358 - RNA, 19 nt, Artificial Sequence
  Description of Artificial Sequence: Synthetic oligonucleotide
ggacuuagcuucccgaaag

SEQ ID NO: 498359 - RNA, 19 nt, Artificial Sequence
  Description of Artificial Sequence: Synthetic oligonucleotide
gacuuagcuucccgaaagc

SEQ ID NO: 498360 - RNA, 19 nt, Artificial Sequence
  Description of Artificial Sequence: Synthetic oligonucleotide
ugguaacagccuacguucc

SEQ ID NO: 498361 - RNA, 19 nt, Artificial Sequence
  Description of Artificial Sequence: Synthetic oligonucleotide
uaguguuacuguugcuacc

SEQ ID NO: 498362 - RNA, 19 nt, Artificial Sequence
  Description of Artificial Sequence: Synthetic oligonucleotide
ugcuauguggggaucucaa

SEQ ID NO: 498363 - RNA, 19 nt, Artificial Sequence
  Description of Artificial Sequence: Synthetic oligonucleotide
uuccuaaccucucccgaga

SEQ ID NO: 498364 - RNA, 19 nt, Artificial Sequence
  Description of Artificial Sequence: Synthetic oligonucleotide
aguaccgacagcguuggga

SEQ ID NO: 498365 - RNA, 19 nt, Artificial Sequence
  Description of Artificial Sequence: Synthetic oligonucleotide
uagauaccuccauauugcu

SEQ ID NO: 498366 - RNA, 19 nt, Artificial Sequence
  Description of Artificial Sequence: Synthetic oligonucleotide
cuucguaaccccaaaggaa

SEQ ID NO: 498367 - RNA, 19 nt, Artificial Sequence
  Description of Artificial Sequence: Synthetic oligonucleotide
aguacggccgugggcaagc

SEQ ID NO: 498368 - RNA, 19 nt, Artificial Sequence
  Description of Artificial Sequence: Synthetic oligonucleotide
gcaagauccgcuccaaagc

SEQ ID NO: 498369 - RNA, 19 nt, Artificial Sequence
  Description of Artificial Sequence: Synthetic oligonucleotide
aggggaauacaggauuagg

SEQ ID NO: 498370 - RNA, 19 nt, Artificial Sequence
  Description of Artificial Sequence: Synthetic oligonucleotide
cagccuacguucccaaugc

SEQ ID NO: 498371 - RNA, 19 nt, Artificial Sequence
  Description of Artificial Sequence: Synthetic oligonucleotide
uuugccuauguauccuaaa

SEQ ID NO: 498372 - RNA, 19 nt, Artificial Sequence
  Description of Artificial Sequence: Synthetic oligonucleotide
ugcugugcaugcuuccaug

SEQ ID NO: 498373 - RNA, 19 nt, Artificial Sequence
  Description of Artificial Sequence: Synthetic oligonucleotide
uccgaggauaucugcgccc

SEQ ID NO: 498374 - RNA, 19 nt, Artificial Sequence
  Description of Artificial Sequence: Synthetic oligonucleotide
augugggagaaagggacuc

SEQ ID NO: 498375 - RNA, 19 nt, Artificial Sequence
  Description of Artificial Sequence: Synthetic oligonucleotide
uaccuacgcuuccaaaccu

SEQ ID NO: 498376 - RNA, 19 nt, Artificial Sequence
  Description of Artificial Sequence: Synthetic oligonucleotide
uguugucacacucccuuuu

SEQ ID NO: 498377 - RNA, 19 nt, Artificial Sequence
  Description of Artificial Sequence: Synthetic oligonucleotide
cacccuuuaccuagcacug

SEQ ID NO: 498378 - RNA, 19 nt, Artificial Sequence
  Description of Artificial Sequence: Synthetic oligonucleotide
uuaggggaccauaucccau

SEQ ID NO: 498379 - RNA, 19 nt, Artificial Sequence
  Description of Artificial Sequence: Synthetic oligonucleotide
aauccgcugggaagucacc

SEQ ID NO: 498380 - RNA, 19 nt, Artificial Sequence
  Description of Artificial Sequence: Synthetic oligonucleotide
uggggaguugcuacaggcu

SEQ ID NO: 498381 - RNA, 19 nt, Artificial Sequence
  Description of Artificial Sequence: Synthetic oligonucleotide
cuauccgggcuagucaggg

SEQ ID NO: 498382 - RNA, 19 nt, Artificial Sequence
  Description of Artificial Sequence: Synthetic oligonucleotide
cagucagcgaccagcugcc

SEQ ID NO: 498383 - RNA, 19 nt, Artificial Sequence
  Description of Artificial Sequence: Synthetic oligonucleotide
agacucgacagguaaucau

SEQ ID NO: 498384 - RNA, 19 nt, Artificial Sequence
  Description of Artificial Sequence: Synthetic oligonucleotide
guaaggcuggaguaccgac

SEQ ID NO: 498385 - RNA, 19 nt, Artificial Sequence
  Description of Artificial Sequence: Synthetic oligonucleotide
gggaccauaucccauauua

SEQ ID NO: 498386 - RNA, 19 nt, Artificial Sequence
  Description of Artificial Sequence: Synthetic oligonucleotide
ugcgcccaauagaugacac

SEQ ID NO: 498387 - RNA, 19 nt, Artificial Sequence
  Description of Artificial Sequence: Synthetic oligonucleotide
auaucccauauuaaauagu

SEQ ID NO: 498388 - RNA, 19 nt, Artificial Sequence
  Description of Artificial Sequence: Synthetic oligonucleotide
gacaagaaaugugggagaa

SEQ ID NO: 498389 - RNA, 19 nt, Artificial Sequence
  Description of Artificial Sequence: Synthetic oligonucleotide
uuuaccggcuccguacgga

SEQ ID NO: 498390 - RNA, 19 nt, Artificial Sequence
  Description of Artificial Sequence: Synthetic oligonucleotide
ucuuaccuacgcuuccaaa

SEQ ID NO: 498391 - RNA, 19 nt, Artificial Sequence
  Description of Artificial Sequence: Synthetic oligonucleotide
uaucugcgcccaauagaug

SEQ ID NO: 498392 - RNA, 19 nt, Artificial Sequence
  Description of Artificial Sequence: Synthetic oligonucleotide
ucugcgcccaauagaugac

SEQ ID NO: 498393 - RNA, 19 nt, Artificial Sequence
  Description of Artificial Sequence: Synthetic oligonucleotide
cuugugugacagcaagauc

SEQ ID NO: 498394 - RNA, 19 nt, Artificial Sequence
  Description of Artificial Sequence: Synthetic oligonucleotide
uccuaaccucucccgagac

SEQ ID NO: 498395 - RNA, 19 nt, Artificial Sequence
  Description of Artificial Sequence: Synthetic oligonucleotide
aaugucggauggcgccuug

SEQ ID NO: 498396 - RNA, 19 nt, Artificial Sequence
  Description of Artificial Sequence: Synthetic oligonucleotide
uugaucggagacugacaga

SEQ ID NO: 498397 - RNA, 19 nt, Artificial Sequence
  Description of Artificial Sequence: Synthetic oligonucleotide
accgugccaagguucgguc

SEQ ID NO: 498398 - RNA, 19 nt, Artificial Sequence
  Description of Artificial Sequence: Synthetic oligonucleotide
uaccuuaacccaguucagu

SEQ ID NO: 498399 - RNA, 19 nt, Artificial Sequence
  Description of Artificial Sequence: Synthetic oligonucleotide
uugcaguacggccgugggc

SEQ ID NO: 498400 - RNA, 19 nt, Artificial Sequence
  Description of Artificial Sequence: Synthetic oligonucleotide
cuacgcuuccaaaccuaag

SEQ ID NO: 498401 - RNA, 19 nt, Artificial Sequence
  Description of Artificial Sequence: Synthetic oligonucleotide
aagguucggucugugaauu

SEQ ID NO: 498402 - RNA, 19 nt, Artificial Sequence
  Description of Artificial Sequence: Synthetic oligonucleotide
caauaaagggcccggccca

SEQ ID NO: 498403 - RNA, 19 nt, Artificial Sequence
  Description of Artificial Sequence: Synthetic oligonucleotide
guuuaccggcuccguacgg

SEQ ID NO: 498404 - RNA, 19 nt, Artificial Sequence
  Description of Artificial Sequence: Synthetic oligonucleotide
uaggggaccauaucccaua

SEQ ID NO: 498405 - RNA, 19 nt, Artificial Sequence
  Description of Artificial Sequence: Synthetic oligonucleotide
gcucaugaagaaauugacc

SEQ ID NO: 498406 - RNA, 19 nt, Artificial Sequence
  Description of Artificial Sequence: Synthetic oligonucleotide
cuuagcuucccgaaagccu

SEQ ID NO: 498407 - RNA, 19 nt, Artificial Sequence
  Description of Artificial Sequence: Synthetic oligonucleotide
cacuuacugacagcuuccg

SEQ ID NO: 498408 - RNA, 19 nt, Artificial Sequence
  Description of Artificial Sequence: Synthetic oligonucleotide
aggacuuagcuucccgaaa

SEQ ID NO: 498409 - RNA, 19 nt, Artificial Sequence
  Description of Artificial Sequence: Synthetic oligonucleotide
agguucggucugugaauuc

SEQ ID NO: 498410 - RNA, 19 nt, Artificial Sequence
  Description of Artificial Sequence: Synthetic oligonucleotide
accggcuccguacggaggu

SEQ ID NO: 498411 - RNA, 19 nt, Artificial Sequence
  Description of Artificial Sequence: Synthetic oligonucleotide
aaacucggaaggaggaauu

SEQ ID NO: 498412 - RNA, 19 nt, Artificial Sequence
  Description of Artificial Sequence: Synthetic oligonucleotide
cucaggguauugaggccag

SEQ ID NO: 498413 - RNA, 19 nt, Artificial Sequence
  Description of Artificial Sequence: Synthetic oligonucleotide
aguggcuucguugcagaca

SEQ ID NO: 498414 - RNA, 19 nt, Artificial Sequence
  Description of Artificial Sequence: Synthetic oligonucleotide
uguaagggucaggaauggu

SEQ ID NO: 498415 - RNA, 19 nt, Artificial Sequence
  Description of Artificial Sequence: Synthetic oligonucleotide
ugucggauggcgccuugau

SEQ ID NO: 498416 - RNA, 19 nt, Artificial Sequence
  Description of Artificial Sequence: Synthetic oligonucleotide
agcguugggauaaagccuu

SEQ ID NO: 498417 - RNA, 19 nt, Artificial Sequence
  Description of Artificial Sequence: Synthetic oligonucleotide
gccaagaguaaaccaagca

SEQ ID NO: 498418 - RNA, 19 nt, Artificial Sequence
  Description of Artificial Sequence: Synthetic oligonucleotide
uccgggcuagucaggggug

SEQ ID NO: 498419 - RNA, 19 nt, Artificial Sequence
  Description of Artificial Sequence: Synthetic oligonucleotide
aacagccuacguucccaau

SEQ ID NO: 498420 - RNA, 19 nt, Artificial Sequence
  Description of Artificial Sequence: Synthetic oligonucleotide
ggcucaugaagaaauugac

SEQ ID NO: 498421 - RNA, 19 nt, Artificial Sequence
  Description of Artificial Sequence: Synthetic oligonucleotide
gguaacagccuacguuccc

SEQ ID NO: 498422 - RNA, 19 nt, Artificial Sequence
  Description of Artificial Sequence: Synthetic oligonucleotide
acucccacuauccgggcua

SEQ ID NO: 498423 - RNA, 19 nt, Artificial Sequence
  Description of Artificial Sequence: Synthetic oligonucleotide
ucgggcuaagaaugucgga

SEQ ID NO: 498424 - RNA, 19 nt, Artificial Sequence
  Description of Artificial Sequence: Synthetic oligonucleotide
cagcgacccuaccuuaacc

SEQ ID NO: 498425 - RNA, 19 nt, Artificial Sequence
  Description of Artificial Sequence: Synthetic oligonucleotide
ggaguaccgacagcguugg

SEQ ID NO: 498426 - RNA, 19 nt, Artificial Sequence
  Description of Artificial Sequence: Synthetic oligonucleotide
accgacagcguugggauaa

SEQ ID NO: 498427 - RNA, 19 nt, Artificial Sequence
  Description of Artificial Sequence: Synthetic oligonucleotide
gcuagcaauggucuuaccu

SEQ ID NO: 498428 - RNA, 19 nt, Artificial Sequence
  Description of Artificial Sequence: Synthetic oligonucleotide
cccaauagaugacacuuuc

SEQ ID NO: 498429 - RNA, 19 nt, Artificial Sequence
  Description of Artificial Sequence: Synthetic oligonucleotide
ggcauguuuaccggcuccg

SEQ ID NO: 498430 - RNA, 19 nt, Artificial Sequence
  Description of Artificial Sequence: Synthetic oligonucleotide
gagacagcgacccuaccuu

SEQ ID NO: 498431 - RNA, 19 nt, Artificial Sequence
  Description of Artificial Sequence: Synthetic oligonucleotide
uccguacggaggugcggag

SEQ ID NO: 498432 - RNA, 19 nt, Artificial Sequence
  Description of Artificial Sequence: Synthetic oligonucleotide
ccuaggggcaauguuuugc

SEQ ID NO: 498433 - RNA, 19 nt, Artificial Sequence
  Description of Artificial Sequence: Synthetic oligonucleotide
acuauccgggcuagucagg

SEQ ID NO: 498434 - RNA, 19 nt, Artificial Sequence
  Description of Artificial Sequence: Synthetic oligonucleotide
cagaaacguauucuugcaa

SEQ ID NO: 498435 - RNA, 19 nt, Artificial Sequence
  Description of Artificial Sequence: Synthetic oligonucleotide
cccaauaaagggcccggcc

SEQ ID NO: 498436 - RNA, 19 nt, Artificial Sequence
  Description of Artificial Sequence: Synthetic oligonucleotide
guaccgacagcguugggau

SEQ ID NO: 498437 - RNA, 19 nt, Artificial Sequence
  Description of Artificial Sequence: Synthetic oligonucleotide
cccgcuaagccguugccgc

SEQ ID NO: 498438 - RNA, 19 nt, Artificial Sequence
  Description of Artificial Sequence: Synthetic oligonucleotide
gaguggcuucguugcagac

SEQ ID NO: 498439 - RNA, 19 nt, Artificial Sequence
  Description of Artificial Sequence: Synthetic oligonucleotide
acaggauuaggggaccaua

SEQ ID NO: 498440 - RNA, 19 nt, Artificial Sequence
  Description of Artificial Sequence: Synthetic oligonucleotide
agaaagggacucaggguau

SEQ ID NO: 498441 - RNA, 19 nt, Artificial Sequence
  Description of Artificial Sequence: Synthetic oligonucleotide
ccucucaaguccagugucc

SEQ ID NO: 498442 - RNA, 19 nt, Artificial Sequence
  Description of Artificial Sequence: Synthetic oligonucleotide
caacaccgcuggaugcccc

SEQ ID NO: 498443 - RNA, 19 nt, Artificial Sequence
  Description of Artificial Sequence: Synthetic oligonucleotide
acaagaaaugugggagaaa

SEQ ID NO: 498444 - RNA, 19 nt, Artificial Sequence
  Description of Artificial Sequence: Synthetic oligonucleotide
ccggcccaaacauagaaca

SEQ ID NO: 498445 - RNA, 19 nt, Artificial Sequence
  Description of Artificial Sequence: Synthetic oligonucleotide
ggggcacucccacuauccg

SEQ ID NO: 498446 - RNA, 19 nt, Artificial Sequence
  Description of Artificial Sequence: Synthetic oligonucleotide
caucgccgggcucggacag

SEQ ID NO: 498447 - RNA, 19 nt, Artificial Sequence
  Description of Artificial Sequence: Synthetic oligonucleotide
ugaugggaguggcuucguu

SEQ ID NO: 498448 - RNA, 19 nt, Artificial Sequence
  Description of Artificial Sequence: Synthetic oligonucleotide
uguugcuaccaggcagcca

SEQ ID NO: 498449 - RNA, 19 nt, Artificial Sequence
  Description of Artificial Sequence: Synthetic oligonucleotide
aggggaccauaucccauau

SEQ ID NO: 498450 - RNA, 19 nt, Artificial Sequence
  Description of Artificial Sequence: Synthetic oligonucleotide
auacaggauuaggggacca

SEQ ID NO: 498451 - RNA, 19 nt, Artificial Sequence
  Description of Artificial Sequence: Synthetic oligonucleotide
ccgugggcaagcaauccgc

SEQ ID NO: 498452 - RNA, 19 nt, Artificial Sequence
  Description of Artificial Sequence: Synthetic oligonucleotide
uggcgccuugauuacuuuu

SEQ ID NO: 498453 - RNA, 19 nt, Artificial Sequence
  Description of Artificial Sequence: Synthetic oligonucleotide
gggcgucaggccuccaccg

SEQ ID NO: 498454 - RNA, 19 nt, Artificial Sequence
  Description of Artificial Sequence: Synthetic oligonucleotide
gaugccccucagggaacgg

SEQ ID NO: 498455 - RNA, 19 nt, Artificial Sequence
  Description of Artificial Sequence: Synthetic oligonucleotide
cguacggaggugcggaggg

SEQ ID NO: 498456 - RNA, 19 nt, Artificial Sequence
  Description of Artificial Sequence: Synthetic oligonucleotide
cauguuuaccggcuccgua

SEQ ID NO: 498457 - RNA, 19 nt, Artificial Sequence
  Description of Artificial Sequence: Synthetic oligonucleotide
ugcucgggcuaagaauguc

SEQ ID NO: 498458 - RNA, 19 nt, Artificial Sequence
  Description of Artificial Sequence: Synthetic oligonucleotide
gacuuacaugaugaaugcu

SEQ ID NO: 498459 - RNA, 19 nt, Artificial Sequence
  Description of Artificial Sequence: Synthetic oligonucleotide
ccaagguucggucugugaa

SEQ ID NO: 498460 - RNA, 19 nt, Artificial Sequence
  Description of Artificial Sequence: Synthetic oligonucleotide
gaguaccgacagcguuggg

SEQ ID NO: 498461 - RNA, 19 nt, Artificial Sequence
  Description of Artificial Sequence: Synthetic oligonucleotide
cucagucagcgaccagcug

SEQ ID NO: 498462 - RNA, 19 nt, Artificial Sequence
  Description of Artificial Sequence: Synthetic oligonucleotide
acccaguucagugcugcaa

SEQ ID NO: 498463 - RNA, 19 nt, Artificial Sequence
  Description of Artificial Sequence: Synthetic oligonucleotide
gucuuaccuacgcuuccaa

SEQ ID NO: 498464 - RNA, 19 nt, Artificial Sequence
  Description of Artificial Sequence: Synthetic oligonucleotide
gggaguggcuucguugcag

SEQ ID NO: 498465 - RNA, 19 nt, Artificial Sequence
  Description of Artificial Sequence: Synthetic oligonucleotide
ggcgucaggccuccaccgg

SEQ ID NO: 498466 - RNA, 19 nt, Artificial Sequence
  Description of Artificial Sequence: Synthetic oligonucleotide
agagccuuuuguaguguua

SEQ ID NO: 498467 - RNA, 19 nt, Artificial Sequence
  Description of Artificial Sequence: Synthetic oligonucleotide
accccugcugaaguaacuu

SEQ ID NO: 498468 - RNA, 19 nt, Artificial Sequence
  Description of Artificial Sequence: Synthetic oligonucleotide
aggcccuagguugaugauu

SEQ ID NO: 498469 - RNA, 19 nt, Artificial Sequence
  Description of Artificial Sequence: Synthetic oligonucleotide
agggcaccgugccaagguu

SEQ ID NO: 498470 - RNA, 19 nt, Artificial Sequence
  Description of Artificial Sequence: Synthetic oligonucleotide
cagacuggaucaaggggcu

SEQ ID NO: 498471 - RNA, 19 nt, Artificial Sequence
  Description of Artificial Sequence: Synthetic oligonucleotide
uacggccgugggcaagcaa

SEQ ID NO: 498472 - RNA, 19 nt, Artificial Sequence
  Description of Artificial Sequence: Synthetic oligonucleotide
acccuuuaccuagcacugu

SEQ ID NO: 498473 - RNA, 19 nt, Artificial Sequence
  Description of Artificial Sequence: Synthetic oligonucleotide
gcgacccuaccuuaaccca

SEQ ID NO: 498474 - RNA, 19 nt, Artificial Sequence
  Description of Artificial Sequence: Synthetic oligonucleotide
accgccgccgccgccgccg

SEQ ID NO: 498475 - RNA, 19 nt, Artificial Sequence
  Description of Artificial Sequence: Synthetic oligonucleotide
ccaucacccuuuaccuagc

SEQ ID NO: 498476 - RNA, 19 nt, Artificial Sequence
  Description of Artificial Sequence: Synthetic oligonucleotide
uaccgacagcguugggaua

SEQ ID NO: 498477 - RNA, 19 nt, Artificial Sequence
  Description of Artificial Sequence: Synthetic oligonucleotide
ggaccauaucccauauuaa

SEQ ID NO: 498478 - RNA, 19 nt, Artificial Sequence
  Description of Artificial Sequence: Synthetic oligonucleotide
gcccgcuaagccguugccg

SEQ ID NO: 498479 - RNA, 19 nt, Artificial Sequence
  Description of Artificial Sequence: Synthetic oligonucleotide
gguucggucugugaauucu

SEQ ID NO: 498480 - RNA, 19 nt, Artificial Sequence
  Description of Artificial Sequence: Synthetic oligonucleotide
ggucuuaccuacgcuucca

SEQ ID NO: 498481 - RNA, 19 nt, Artificial Sequence
  Description of Artificial Sequence: Synthetic oligonucleotide
agcggggagcgcucuccgu

SEQ ID NO: 498482 - RNA, 19 nt, Artificial Sequence
  Description of Artificial Sequence: Synthetic oligonucleotide
gcuaagccguugccgccag

SEQ ID NO: 498483 - RNA, 19 nt, Artificial Sequence
  Description of Artificial Sequence: Synthetic oligonucleotide
accuacgcuuccaaaccua

SEQ ID NO: 498484 - RNA, 19 nt, Artificial Sequence
  Description of Artificial Sequence: Synthetic oligonucleotide
augcucgggcuaagaaugu

SEQ ID NO: 498485 - RNA, 19 nt, Artificial Sequence
  Description of Artificial Sequence: Synthetic oligonucleotide
augucggauggcgccuuga

SEQ ID NO: 498486 - RNA, 19 nt, Artificial Sequence
  Description of Artificial Sequence: Synthetic oligonucleotide
gcaacaccgcuggaugccc

SEQ ID NO: 498487 - RNA, 19 nt, Artificial Sequence
  Description of Artificial Sequence: Synthetic oligonucleotide
cccgagacagcgacccuac

SEQ ID NO: 498488 - RNA, 19 nt, Artificial Sequence
  Description of Artificial Sequence: Synthetic oligonucleotide
ggggagcgcucuccguccg

SEQ ID NO: 498489 - RNA, 19 nt, Artificial Sequence
  Description of Artificial Sequence: Synthetic oligonucleotide
gcggggcauguuuaccggc

SEQ ID NO: 498490 - RNA, 19 nt, Artificial Sequence
  Description of Artificial Sequence: Synthetic oligonucleotide
cacguugaucggagacuga

SEQ ID NO: 498491 - RNA, 19 nt, Artificial Sequence
  Description of Artificial Sequence: Synthetic oligonucleotide
ccacuauccgggcuaguca

SEQ ID NO: 498492 - RNA, 19 nt, Artificial Sequence
  Description of Artificial Sequence: Synthetic oligonucleotide
caguacggccgugggcaag

SEQ ID NO: 498493 - RNA, 19 nt, Artificial Sequence
  Description of Artificial Sequence: Synthetic oligonucleotide
gcaugcuuccaugugccaa

SEQ ID NO: 498494 - RNA, 19 nt, Artificial Sequence
  Description of Artificial Sequence: Synthetic oligonucleotide
gggcccgcuaagccguugc

SEQ ID NO: 498495 - RNA, 19 nt, Artificial Sequence
  Description of Artificial Sequence: Synthetic oligonucleotide
cugcgcccaauagaugaca

SEQ ID NO: 498496 - RNA, 19 nt, Artificial Sequence
  Description of Artificial Sequence: Synthetic oligonucleotide
ggagcgcucuccguccgcc

SEQ ID NO: 498497 - RNA, 19 nt, Artificial Sequence
  Description of Artificial Sequence: Synthetic oligonucleotide
gcaucggacauacuucuuu

SEQ ID NO: 498498 - RNA, 19 nt, Artificial Sequence
  Description of Artificial Sequence: Synthetic oligonucleotide
ggggcauguuuaccggcuc

SEQ ID NO: 498499 - RNA, 19 nt, Artificial Sequence
  Description of Artificial Sequence: Synthetic oligonucleotide
ccugguaacagccuacguu

SEQ ID NO: 498500 - RNA, 19 nt, Artificial Sequence
  Description of Artificial Sequence: Synthetic oligonucleotide
ggcccgcuaagccguugcc

SEQ ID NO: 498501 - RNA, 19 nt, Artificial Sequence
  Description of Artificial Sequence: Synthetic oligonucleotide
ccgcuaagccguugccgcc

SEQ ID NO: 498502 - RNA, 19 nt, Artificial Sequence
  Description of Artificial Sequence: Synthetic oligonucleotide
ccguacggaggugcggagg

SEQ ID NO: 498503 - RNA, 19 nt, Artificial Sequence
  Description of Artificial Sequence: Synthetic oligonucleotide
gcacucccacuauccgggc

SEQ ID NO: 498504 - RNA, 19 nt, Artificial Sequence
  Description of Artificial Sequence: Synthetic oligonucleotide
ccuaaccucucccgagaca

SEQ ID NO: 498505 - RNA, 19 nt, Artificial Sequence
  Description of Artificial Sequence: Synthetic oligonucleotide
gucggauggcgccuugauu

SEQ ID NO: 498506 - RNA, 19 nt, Artificial Sequence
  Description of Artificial Sequence: Synthetic oligonucleotide
cguugaucggagacugaca

SEQ ID NO: 498507 - RNA, 19 nt, Artificial Sequence
  Description of Artificial Sequence: Synthetic oligonucleotide
gcugcguagauaccuccau

SEQ ID NO: 498508 - RNA, 19 nt, Artificial Sequence
  Description of Artificial Sequence: Synthetic oligonucleotide
cugugacaccccugcugaa

SEQ ID NO: 498509 - RNA, 19 nt, Artificial Sequence
  Description of Artificial Sequence: Synthetic oligonucleotide
ccccaauaaagggcccggc

SEQ ID NO: 498510 - RNA, 19 nt, Artificial Sequence
  Description of Artificial Sequence: Synthetic oligonucleotide
caccccugcugaaguaacu

SEQ ID NO: 498511 - RNA, 19 nt, Artificial Sequence
  Description of Artificial Sequence: Synthetic oligonucleotide
ucccacuauccgggcuagu

SEQ ID NO: 498512 - RNA, 19 nt, Artificial Sequence
  Description of Artificial Sequence: Synthetic oligonucleotide
cggauggcgccuugauuac

SEQ ID NO: 498513 - RNA, 19 nt, Artificial Sequence
  Description of Artificial Sequence: Synthetic oligonucleotide
gcaauccgcugggaaguca

SEQ ID NO: 498514 - RNA, 19 nt, Artificial Sequence
  Description of Artificial Sequence: Synthetic oligonucleotide
gggagcgcucuccguccgc

SEQ ID NO: 498515 - RNA, 19 nt, Artificial Sequence
  Description of Artificial Sequence: Synthetic oligonucleotide
gaaugucggauggcgccuu

SEQ ID NO: 498516 - RNA, 19 nt, Artificial Sequence
  Description of Artificial Sequence: Synthetic oligonucleotide
caccgugccaagguucggu

SEQ ID NO: 498517 - RNA, 19 nt, Artificial Sequence
  Description of Artificial Sequence: Synthetic oligonucleotide
gcaccgugccaagguucgg

SEQ ID NO: 498518 - RNA, 19 nt, Artificial Sequence
  Description of Artificial Sequence: Synthetic oligonucleotide
gccuccaccgggcccgguc

SEQ ID NO: 498519 - RNA, 19 nt, Artificial Sequence
  Description of Artificial Sequence: Synthetic oligonucleotide
cgagacagcgacccuaccu

SEQ ID NO: 498520 - RNA, 19 nt, Artificial Sequence
  Description of Artificial Sequence: Synthetic oligonucleotide
gccgccgccgccgccgccg

SEQ ID NO: 498521 - RNA, 19 nt, Artificial Sequence
  Description of Artificial Sequence: Synthetic oligonucleotide
ccgagacagcgacccuacc

SEQ ID NO: 498522 - RNA, 19 nt, Artificial Sequence
  Description of Artificial Sequence: Synthetic oligonucleotide
ggcaagcaauccgcuggga

SEQ ID NO: 498523 - RNA, 19 nt, Artificial Sequence
  Description of Artificial Sequence: Synthetic oligonucleotide
gcgcccaauagaugacacu

SEQ ID NO: 498524 - RNA, 19 nt, Artificial Sequence
  Description of Artificial Sequence: Synthetic oligonucleotide
ccccuggugaagugcaaua

SEQ ID NO: 498525 - RNA, 19 nt, Artificial Sequence
  Description of Artificial Sequence: Synthetic oligonucleotide
ccuaaguaagggacugguu

SEQ ID NO: 498526 - RNA, 19 nt, Artificial Sequence
  Description of Artificial Sequence: Synthetic oligonucleotide
guacggccgugggcaagca

SEQ ID NO: 498527 - RNA, 19 nt, Artificial Sequence
  Description of Artificial Sequence: Synthetic oligonucleotide
ggccuaggggcaauguuuu

SEQ ID NO: 498528 - RNA, 19 nt, Artificial Sequence
  Description of Artificial Sequence: Synthetic oligonucleotide
gugccaagguucggucugu

SEQ ID NO: 498529 - RNA, 19 nt, Artificial Sequence
  Description of Artificial Sequence: Synthetic oligonucleotide
gcauguuuaccggcuccgu

SEQ ID NO: 498530 - RNA, 19 nt, Artificial Sequence
  Description of Artificial Sequence: Synthetic oligonucleotide
cgacagcguugggauaaag

SEQ ID NO: 498531 - RNA, 19 nt, Artificial Sequence
  Description of Artificial Sequence: Synthetic oligonucleotide
ggauggcgccuugauuacu

SEQ ID NO: 498532 - RNA, 19 nt, Artificial Sequence
  Description of Artificial Sequence: Synthetic oligonucleotide
caccgccgccgccgccgcc

SEQ ID NO: 498533 - RNA, 19 nt, Artificial Sequence
  Description of Artificial Sequence: Synthetic oligonucleotide
ggggaccauaucccauauu

SEQ ID NO: 498534 - RNA, 19 nt, Artificial Sequence
  Description of Artificial Sequence: Synthetic oligonucleotide
ccgugccaagguucggucu

SEQ ID NO: 498535 - RNA, 19 nt, Artificial Sequence
  Description of Artificial Sequence: Synthetic oligonucleotide
cucccgagacagcgacccu

SEQ ID NO: 498536 - RNA, 19 nt, Artificial Sequence
  Description of Artificial Sequence: Synthetic oligonucleotide
cgcuaagccguugccgcca

SEQ ID NO: 498537 - RNA, 19 nt, Artificial Sequence
  Description of Artificial Sequence: Synthetic oligonucleotide
cggggcauguuuaccggcu

SEQ ID NO: 498538 - RNA, 19 nt, Artificial Sequence
  Description of Artificial Sequence: Synthetic oligonucleotide
ccgggcuagucagggguga

SEQ ID NO: 498539 - RNA, 19 nt, Artificial Sequence
  Description of Artificial Sequence: Synthetic oligonucleotide
ccggcaccucuaccccaac

SEQ ID NO: 498540 - RNA, 19 nt, Artificial Sequence
  Description of Artificial Sequence: Synthetic oligonucleotide
gggcccggucgcgcucccg

SEQ ID NO: 498541 - RNA, 19 nt, Artificial Sequence
  Description of Artificial Sequence: Synthetic oligonucleotide
ccuuuaggccccggguuuu

SEQ ID NO: 498542 - RNA, 19 nt, Artificial Sequence
  Description of Artificial Sequence: Synthetic oligonucleotide
ccgacagcguugggauaaa

SEQ ID NO: 498543 - RNA, 19 nt, Artificial Sequence
  Description of Artificial Sequence: Synthetic oligonucleotide
gccgccgccgccgccgcua

SEQ ID NO: 498544 - RNA, 19 nt, Artificial Sequence
  Description of Artificial Sequence: Synthetic oligonucleotide
ccgccgccgccgccgccgc

SEQ ID NO: 498545 - RNA, 19 nt, Artificial Sequence
  Description of Artificial Sequence: Synthetic oligonucleotide
gcguugggauaaagccuuu

SEQ ID NO: 498546 - RNA, 19 nt, Artificial Sequence
  Description of Artificial Sequence: Synthetic oligonucleotide
cgggcccgcuaagccguug

SEQ ID NO: 498547 - RNA, 19 nt, Artificial Sequence
  Description of Artificial Sequence: Synthetic oligonucleotide
cgccgccgccgccgccgcc

SEQ ID NO: 498548 - RNA, 19 nt, Artificial Sequence
  Description of Artificial Sequence: Synthetic oligonucleotide
ccgggcccgcuaagccguu

SEQ ID NO: 498549 - RNA, 19 nt, Artificial Sequence
  Description of Artificial Sequence: Synthetic oligonucleotide
cgccgccgccgccgccgcu

SEQ ID NO: 498550 - RNA, 19 nt, Artificial Sequence
  Description of Artificial Sequence: Synthetic oligonucleotide
aaaaguacaugauagcagg

SEQ ID NO: 498551 - RNA, 19 nt, Artificial Sequence
  Description of Artificial Sequence: Synthetic oligonucleotide
aaauaauucgauuggagag

SEQ ID NO: 498552 - RNA, 19 nt, Artificial Sequence
  Description of Artificial Sequence: Synthetic oligonucleotide
aauccauaaaguuaaaaug

SEQ ID NO: 498553 - RNA, 19 nt, Artificial Sequence
  Description of Artificial Sequence: Synthetic oligonucleotide
aacauaacgaagcagagca

SEQ ID NO: 498554 - RNA, 19 nt, Artificial Sequence
  Description of Artificial Sequence: Synthetic oligonucleotide
acugauauuaggcaagugc

SEQ ID NO: 498555 - RNA, 19 nt, Artificial Sequence
  Description of Artificial Sequence: Synthetic oligonucleotide
aauacucuuuacugcaugc

SEQ ID NO: 498556 - RNA, 19 nt, Artificial Sequence
  Description of Artificial Sequence: Synthetic oligonucleotide
aauuauuggcagcaacugc

SEQ ID NO: 498557 - RNA, 19 nt, Artificial Sequence
  Description of Artificial Sequence: Synthetic oligonucleotide
aacaauaguggcccaauac

SEQ ID NO: 498558 - RNA, 19 nt, Artificial Sequence
  Description of Artificial Sequence: Synthetic oligonucleotide
aauuaauauauauucacua

SEQ ID NO: 498559 - RNA, 19 nt, Artificial Sequence
  Description of Artificial Sequence: Synthetic oligonucleotide
ucucuuaacuccauuauag

SEQ ID NO: 498560 - RNA, 19 nt, Artificial Sequence
  Description of Artificial Sequence: Synthetic oligonucleotide
acaauaguggcccaauacc

SEQ ID NO: 498561 - RNA, 19 nt, Artificial Sequence
  Description of Artificial Sequence: Synthetic oligonucleotide
aguacuggagcacaaagac

SEQ ID NO: 498562 - RNA, 19 nt, Artificial Sequence
  Description of Artificial Sequence: Synthetic oligonucleotide
aaguauaugcuguauaacu

SEQ ID NO: 498563 - RNA, 19 nt, Artificial Sequence
  Description of Artificial Sequence: Synthetic oligonucleotide
ugcacugugaaauuauugg

SEQ ID NO: 498564 - RNA, 19 nt, Artificial Sequence
  Description of Artificial Sequence: Synthetic oligonucleotide
auaaccuggucauucaacc

SEQ ID NO: 498565 - RNA, 19 nt, Artificial Sequence
  Description of Artificial Sequence: Synthetic oligonucleotide
ucugucgucacucacagca

SEQ ID NO: 498566 - RNA, 19 nt, Artificial Sequence
  Description of Artificial Sequence: Synthetic oligonucleotide
uuuaauacucuuuacugca

SEQ ID NO: 498567 - RNA, 19 nt, Artificial Sequence
  Description of Artificial Sequence: Synthetic oligonucleotide
auaacugcugacuaauugg

SEQ ID NO: 498568 - RNA, 19 nt, Artificial Sequence
  Description of Artificial Sequence: Synthetic oligonucleotide
gagaauacagugcaaagcc

SEQ ID NO: 498569 - RNA, 19 nt, Artificial Sequence
  Description of Artificial Sequence: Synthetic oligonucleotide
auaaucaguguauuaacuc

SEQ ID NO: 498570 - RNA, 19 nt, Artificial Sequence
  Description of Artificial Sequence: Synthetic oligonucleotide
auguuauucauauucagug

SEQ ID NO: 498571 - RNA, 19 nt, Artificial Sequence
  Description of Artificial Sequence: Synthetic oligonucleotide
uuuuaauacucuuuacugc

SEQ ID NO: 498572 - RNA, 19 nt, Artificial Sequence
  Description of Artificial Sequence: Synthetic oligonucleotide
ugggguuaaauuuuaaacc

SEQ ID NO: 498573 - RNA, 19 nt, Artificial Sequence
  Description of Artificial Sequence: Synthetic oligonucleotide
ucuuauauucucuacacaa

SEQ ID NO: 498574 - RNA, 19 nt, Artificial Sequence
  Description of Artificial Sequence: Synthetic oligonucleotide
auaaaggucauuuaguuua

SEQ ID NO: 498575 - RNA, 19 nt, Artificial Sequence
  Description of Artificial Sequence: Synthetic oligonucleotide
cucaugauaacuaagaaaa

SEQ ID NO: 498576 - RNA, 19 nt, Artificial Sequence
  Description of Artificial Sequence: Synthetic oligonucleotide
aauucgauuggagaguguc

SEQ ID NO: 498577 - RNA, 19 nt, Artificial Sequence
  Description of Artificial Sequence: Synthetic oligonucleotide
agauaaucaguguauuaac

SEQ ID NO: 498578 - RNA, 19 nt, Artificial Sequence
  Description of Artificial Sequence: Synthetic oligonucleotide
uauauucacuacaagaaau

SEQ ID NO: 498579 - RNA, 19 nt, Artificial Sequence
  Description of Artificial Sequence: Synthetic oligonucleotide
aaauucaguaaguguuugg

SEQ ID NO: 498580 - RNA, 19 nt, Artificial Sequence
  Description of Artificial Sequence: Synthetic oligonucleotide
aaccauaaauucaagauga

SEQ ID NO: 498581 - RNA, 19 nt, Artificial Sequence
  Description of Artificial Sequence: Synthetic oligonucleotide
gaaauaauucgauuggaga

SEQ ID NO: 498582 - RNA, 19 nt, Artificial Sequence
  Description of Artificial Sequence: Synthetic oligonucleotide
gauauuaggcaagugcugg

SEQ ID NO: 498583 - RNA, 19 nt, Artificial Sequence
  Description of Artificial Sequence: Synthetic oligonucleotide
uucucuauugauaaauggu

SEQ ID NO: 498584 - RNA, 19 nt, Artificial Sequence
  Description of Artificial Sequence: Synthetic oligonucleotide
aauaugggagggauuaugg

SEQ ID NO: 498585 - RNA, 19 nt, Artificial Sequence
  Description of Artificial Sequence: Synthetic oligonucleotide
uuuaacaaaagguggugca

SEQ ID NO: 498586 - RNA, 19 nt, Artificial Sequence
  Description of Artificial Sequence: Synthetic oligonucleotide
uccucuuucguacucgagg

SEQ ID NO: 498587 - RNA, 19 nt, Artificial Sequence
  Description of Artificial Sequence: Synthetic oligonucleotide
uuauuguagaagaugcgga

SEQ ID NO: 498588 - RNA, 19 nt, Artificial Sequence
  Description of Artificial Sequence: Synthetic oligonucleotide
uauagauccucuuucguac

SEQ ID NO: 498589 - RNA, 19 nt, Artificial Sequence
  Description of Artificial Sequence: Synthetic oligonucleotide
aaagggacaacugauauua

SEQ ID NO: 498590 - RNA, 19 nt, Artificial Sequence
  Description of Artificial Sequence: Synthetic oligonucleotide
uggauaggaaucaacagaa

SEQ ID NO: 498591 - RNA, 19 nt, Artificial Sequence
  Description of Artificial Sequence: Synthetic oligonucleotide
aauauuuagcuagaagggu

SEQ ID NO: 498592 - RNA, 19 nt, Artificial Sequence
  Description of Artificial Sequence: Synthetic oligonucleotide
uguuuggagauucaaguaa

SEQ ID NO: 498593 - RNA, 19 nt, Artificial Sequence
  Description of Artificial Sequence: Synthetic oligonucleotide
ugacccaaagucauaacug

SEQ ID NO: 498594 - RNA, 19 nt, Artificial Sequence
  Description of Artificial Sequence: Synthetic oligonucleotide
acugcugacuaauuggguc

SEQ ID NO: 498595 - RNA, 19 nt, Artificial Sequence
  Description of Artificial Sequence: Synthetic oligonucleotide
uauuuagcuagaaggguug

SEQ ID NO: 498596 - RNA, 19 nt, Artificial Sequence
  Description of Artificial Sequence: Synthetic oligonucleotide
uuuaguccaucucuuaacu

SEQ ID NO: 498597 - RNA, 19 nt, Artificial Sequence
  Description of Artificial Sequence: Synthetic oligonucleotide
uuaaauaugggagggauua

SEQ ID NO: 498598 - RNA, 19 nt, Artificial Sequence
  Description of Artificial Sequence: Synthetic oligonucleotide
aauaauucgauuggagagu

SEQ ID NO: 498599 - RNA, 19 nt, Artificial Sequence
  Description of Artificial Sequence: Synthetic oligonucleotide
auaguggcccaauaccacc

SEQ ID NO: 498600 - RNA, 19 nt, Artificial Sequence
  Description of Artificial Sequence: Synthetic oligonucleotide
ucuguuguggaauacacuu

SEQ ID NO: 498601 - RNA, 19 nt, Artificial Sequence
  Description of Artificial Sequence: Synthetic oligonucleotide
uguuguauuucaaccauaa

SEQ ID NO: 498602 - RNA, 19 nt, Artificial Sequence
  Description of Artificial Sequence: Synthetic oligonucleotide
aguaacaaaccaucugcuc

SEQ ID NO: 498603 - RNA, 19 nt, Artificial Sequence
  Description of Artificial Sequence: Synthetic oligonucleotide
ugaaauuauuggcagcaac

SEQ ID NO: 498604 - RNA, 19 nt, Artificial Sequence
  Description of Artificial Sequence: Synthetic oligonucleotide
ucucuauugauaaaugguu

SEQ ID NO: 498605 - RNA, 19 nt, Artificial Sequence
  Description of Artificial Sequence: Synthetic oligonucleotide
aauacacuuuguaacagca

SEQ ID NO: 498606 - RNA, 19 nt, Artificial Sequence
  Description of Artificial Sequence: Synthetic oligonucleotide
uaacuauguuucaaaagcu

SEQ ID NO: 498607 - RNA, 19 nt, Artificial Sequence
  Description of Artificial Sequence: Synthetic oligonucleotide
uaugcaugcguuuggauaa

SEQ ID NO: 498608 - RNA, 19 nt, Artificial Sequence
  Description of Artificial Sequence: Synthetic oligonucleotide
uccauuauagccuuugguu

SEQ ID NO: 498609 - RNA, 19 nt, Artificial Sequence
  Description of Artificial Sequence: Synthetic oligonucleotide
uucaaccauaaauucaaga

SEQ ID NO: 498610 - RNA, 19 nt, Artificial Sequence
  Description of Artificial Sequence: Synthetic oligonucleotide
auagggaacgucuauucug

SEQ ID NO: 498611 - RNA, 19 nt, Artificial Sequence
  Description of Artificial Sequence: Synthetic oligonucleotide
agaaguauaugcuguauaa

SEQ ID NO: 498612 - RNA, 19 nt, Artificial Sequence
  Description of Artificial Sequence: Synthetic oligonucleotide
auauuaggcaagugcuggc

SEQ ID NO: 498613 - RNA, 19 nt, Artificial Sequence
  Description of Artificial Sequence: Synthetic oligonucleotide
ugagcuaugcucuaucaaa

SEQ ID NO: 498614 - RNA, 19 nt, Artificial Sequence
  Description of Artificial Sequence: Synthetic oligonucleotide
aauaguggcccaauaccac

SEQ ID NO: 498615 - RNA, 19 nt, Artificial Sequence
  Description of Artificial Sequence: Synthetic oligonucleotide
aucucuuaugaguuugagg

SEQ ID NO: 498616 - RNA, 19 nt, Artificial Sequence
  Description of Artificial Sequence: Synthetic oligonucleotide
aggaaagcaucucaugcuc

SEQ ID NO: 498617 - RNA, 19 nt, Artificial Sequence
  Description of Artificial Sequence: Synthetic oligonucleotide
uuuaaucucccaaggacau

SEQ ID NO: 498618 - RNA, 19 nt, Artificial Sequence
  Description of Artificial Sequence: Synthetic oligonucleotide
uaauacucuuuacugcaug

SEQ ID NO: 498619 - RNA, 19 nt, Artificial Sequence
  Description of Artificial Sequence: Synthetic oligonucleotide
aguaaguguuuggagauuc

SEQ ID NO: 498620 - RNA, 19 nt, Artificial Sequence
  Description of Artificial Sequence: Synthetic oligonucleotide
acugaccuagcauacagca

SEQ ID NO: 498621 - RNA, 19 nt, Artificial Sequence
  Description of Artificial Sequence: Synthetic oligonucleotide
auuugagguaacaauagug

SEQ ID NO: 498622 - RNA, 19 nt, Artificial Sequence
  Description of Artificial Sequence: Synthetic oligonucleotide
ugcguuuggauaauaaaua

SEQ ID NO: 498623 - RNA, 19 nt, Artificial Sequence
  Description of Artificial Sequence: Synthetic oligonucleotide
uacuguuguauuucaacca

SEQ ID NO: 498624 - RNA, 19 nt, Artificial Sequence
  Description of Artificial Sequence: Synthetic oligonucleotide
ugagggacaucagugaaag

SEQ ID NO: 498625 - RNA, 19 nt, Artificial Sequence
  Description of Artificial Sequence: Synthetic oligonucleotide
aaauaugggagggauuaug

SEQ ID NO: 498626 - RNA, 19 nt, Artificial Sequence
  Description of Artificial Sequence: Synthetic oligonucleotide
cuuaacucuucucacauca

SEQ ID NO: 498627 - RNA, 19 nt, Artificial Sequence
  Description of Artificial Sequence: Synthetic oligonucleotide
aauugggucucuuaacaua

SEQ ID NO: 498628 - RNA, 19 nt, Artificial Sequence
  Description of Artificial Sequence: Synthetic oligonucleotide
aacuauguuucaaaagcug

SEQ ID NO: 498629 - RNA, 19 nt, Artificial Sequence
  Description of Artificial Sequence: Synthetic oligonucleotide
ugaguacugaccuagcaua

SEQ ID NO: 498630 - RNA, 19 nt, Artificial Sequence
  Description of Artificial Sequence: Synthetic oligonucleotide
uauuaaauaugggagggau

SEQ ID NO: 498631 - RNA, 19 nt, Artificial Sequence
  Description of Artificial Sequence: Synthetic oligonucleotide
uaugggagggauuauggaa

SEQ ID NO: 498632 - RNA, 19 nt, Artificial Sequence
  Description of Artificial Sequence: Synthetic oligonucleotide
ucugucuauaugcaugcgu

SEQ ID NO: 498633 - RNA, 19 nt, Artificial Sequence
  Description of Artificial Sequence: Synthetic oligonucleotide
ucuagggcgaggcacuugc

SEQ ID NO: 498634 - RNA, 19 nt, Artificial Sequence
  Description of Artificial Sequence: Synthetic oligonucleotide
uccuuauagauccucuuuc

SEQ ID NO: 498635 - RNA, 19 nt, Artificial Sequence
  Description of Artificial Sequence: Synthetic oligonucleotide
aauucugaccauccagggu

SEQ ID NO: 498636 - RNA, 19 nt, Artificial Sequence
  Description of Artificial Sequence: Synthetic oligonucleotide
accacaauugcaaagaaaa

SEQ ID NO: 498637 - RNA, 19 nt, Artificial Sequence
  Description of Artificial Sequence: Synthetic oligonucleotide
uuauagauccucuuucgua

SEQ ID NO: 498638 - RNA, 19 nt, Artificial Sequence
  Description of Artificial Sequence: Synthetic oligonucleotide
ucuuaacauaacgaagcag

SEQ ID NO: 498639 - RNA, 19 nt, Artificial Sequence
  Description of Artificial Sequence: Synthetic oligonucleotide
guaaugagagaccagugga

SEQ ID NO: 498640 - RNA, 19 nt, Artificial Sequence
  Description of Artificial Sequence: Synthetic oligonucleotide
ucaguaaguguuuggagau

SEQ ID NO: 498641 - RNA, 19 nt, Artificial Sequence
  Description of Artificial Sequence: Synthetic oligonucleotide
auaaccucaucuaggaauc

SEQ ID NO: 498642 - RNA, 19 nt, Artificial Sequence
  Description of Artificial Sequence: Synthetic oligonucleotide
agagaggcagguugagagc

SEQ ID NO: 498643 - RNA, 19 nt, Artificial Sequence
  Description of Artificial Sequence: Synthetic oligonucleotide
uagggaacgucuauucuga

SEQ ID NO: 498644 - RNA, 19 nt, Artificial Sequence
  Description of Artificial Sequence: Synthetic oligonucleotide
uccuagcuacccuuuaugc

SEQ ID NO: 498645 - RNA, 19 nt, Artificial Sequence
  Description of Artificial Sequence: Synthetic oligonucleotide
uguauaacugcugacuaau

SEQ ID NO: 498646 - RNA, 19 nt, Artificial Sequence
  Description of Artificial Sequence: Synthetic oligonucleotide
agagcagauaaucagugua

SEQ ID NO: 498647 - RNA, 19 nt, Artificial Sequence
  Description of Artificial Sequence: Synthetic oligonucleotide
caauucugaccauccaggg

SEQ ID NO: 498648 - RNA, 19 nt, Artificial Sequence
  Description of Artificial Sequence: Synthetic oligonucleotide
aaguucucauucugaggag

SEQ ID NO: 498649 - RNA, 19 nt, Artificial Sequence
  Description of Artificial Sequence: Synthetic oligonucleotide
uuaacucuucucacaucag

SEQ ID NO: 498650 - RNA, 19 nt, Artificial Sequence
  Description of Artificial Sequence: Synthetic oligonucleotide
ugucccgcuuuccugaccc

SEQ ID NO: 498651 - RNA, 19 nt, Artificial Sequence
  Description of Artificial Sequence: Synthetic oligonucleotide
guggauaggaaucaacaga

SEQ ID NO: 498652 - RNA, 19 nt, Artificial Sequence
  Description of Artificial Sequence: Synthetic oligonucleotide
cugagugggaccaaacuuc

SEQ ID NO: 498653 - RNA, 19 nt, Artificial Sequence
  Description of Artificial Sequence: Synthetic oligonucleotide
ucguacucgaggcaugucu

SEQ ID NO: 498654 - RNA, 19 nt, Artificial Sequence
  Description of Artificial Sequence: Synthetic oligonucleotide
auaugcaugcguuuggaua

SEQ ID NO: 498655 - RNA, 19 nt, Artificial Sequence
  Description of Artificial Sequence: Synthetic oligonucleotide
aaaagggacaacugauauu

SEQ ID NO: 498656 - RNA, 19 nt, Artificial Sequence
  Description of Artificial Sequence: Synthetic oligonucleotide
ucugggguuaaauuuuaaa

SEQ ID NO: 498657 - RNA, 19 nt, Artificial Sequence
  Description of Artificial Sequence: Synthetic oligonucleotide
uuagcuagaaggguugagu

SEQ ID NO: 498658 - RNA, 19 nt, Artificial Sequence
  Description of Artificial Sequence: Synthetic oligonucleotide
gaaggguugaguacugacc

SEQ ID NO: 498659 - RNA, 19 nt, Artificial Sequence
  Description of Artificial Sequence: Synthetic oligonucleotide
acuguuguauuucaaccau

SEQ ID NO: 498660 - RNA, 19 nt, Artificial Sequence
  Description of Artificial Sequence: Synthetic oligonucleotide
augauagcaggagaaauga

SEQ ID NO: 498661 - RNA, 19 nt, Artificial Sequence
  Description of Artificial Sequence: Synthetic oligonucleotide
uguaguucacucugcuuga

SEQ ID NO: 498662 - RNA, 19 nt, Artificial Sequence
  Description of Artificial Sequence: Synthetic oligonucleotide
ugugucccuaaguaggaac

SEQ ID NO: 498663 - RNA, 19 nt, Artificial Sequence
  Description of Artificial Sequence: Synthetic oligonucleotide
uuauucauauucaguggua

SEQ ID NO: 498664 - RNA, 19 nt, Artificial Sequence
  Description of Artificial Sequence: Synthetic oligonucleotide
cuuaacuccauuauagccu

SEQ ID NO: 498665 - RNA, 19 nt, Artificial Sequence
  Description of Artificial Sequence: Synthetic oligonucleotide
ugcuguauaacugcugacu

SEQ ID NO: 498666 - RNA, 19 nt, Artificial Sequence
  Description of Artificial Sequence: Synthetic oligonucleotide
auaauucgauuggagagug

SEQ ID NO: 498667 - RNA, 19 nt, Artificial Sequence
  Description of Artificial Sequence: Synthetic oligonucleotide
acaacugauauuaggcaag

SEQ ID NO: 498668 - RNA, 19 nt, Artificial Sequence
  Description of Artificial Sequence: Synthetic oligonucleotide
gucucuuaacauaacgaag

SEQ ID NO: 498669 - RNA, 19 nt, Artificial Sequence
  Description of Artificial Sequence: Synthetic oligonucleotide
acaugacuggcuuucacaa

SEQ ID NO: 498670 - RNA, 19 nt, Artificial Sequence
  Description of Artificial Sequence: Synthetic oligonucleotide
uucgauuggagagugucac

SEQ ID NO: 498671 - RNA, 19 nt, Artificial Sequence
  Description of Artificial Sequence: Synthetic oligonucleotide
gaaguauaugcuguauaac

SEQ ID NO: 498672 - RNA, 19 nt, Artificial Sequence
  Description of Artificial Sequence: Synthetic oligonucleotide
uuaauacucuuuacugcau

SEQ ID NO: 498673 - RNA, 19 nt, Artificial Sequence
  Description of Artificial Sequence: Synthetic oligonucleotide
uucuacugcagggaugaag

SEQ ID NO: 498674 - RNA, 19 nt, Artificial Sequence
  Description of Artificial Sequence: Synthetic oligonucleotide
ucucuacacaaaauuuaaa

SEQ ID NO: 498675 - RNA, 19 nt, Artificial Sequence
  Description of Artificial Sequence: Synthetic oligonucleotide
caauaguggcccaauacca

SEQ ID NO: 498676 - RNA, 19 nt, Artificial Sequence
  Description of Artificial Sequence: Synthetic oligonucleotide
ucaugauaacuaagaaaau

SEQ ID NO: 498677 - RNA, 19 nt, Artificial Sequence
  Description of Artificial Sequence: Synthetic oligonucleotide
gguggauaggaaucaacag

SEQ ID NO: 498678 - RNA, 19 nt, Artificial Sequence
  Description of Artificial Sequence: Synthetic oligonucleotide
cucuuaugaguuugaggcc

SEQ ID NO: 498679 - RNA, 19 nt, Artificial Sequence
  Description of Artificial Sequence: Synthetic oligonucleotide
agugggaccaaacuuccau

SEQ ID NO: 498680 - RNA, 19 nt, Artificial Sequence
  Description of Artificial Sequence: Synthetic oligonucleotide
agaagggugaaaauaaauu

SEQ ID NO: 498681 - RNA, 19 nt, Artificial Sequence
  Description of Artificial Sequence: Synthetic oligonucleotide
uaccuuaacucuucucaca

SEQ ID NO: 498682 - RNA, 19 nt, Artificial Sequence
  Description of Artificial Sequence: Synthetic oligonucleotide
agggugaaaauaaauuuga

SEQ ID NO: 498683 - RNA, 19 nt, Artificial Sequence
  Description of Artificial Sequence: Synthetic oligonucleotide
cacacgcccaucuacacuc

SEQ ID NO: 498684 - RNA, 19 nt, Artificial Sequence
  Description of Artificial Sequence: Synthetic oligonucleotide
uucuguuguggaauacacu

SEQ ID NO: 498685 - RNA, 19 nt, Artificial Sequence
  Description of Artificial Sequence: Synthetic oligonucleotide
uuuagcuagaaggguugag

SEQ ID NO: 498686 - RNA, 19 nt, Artificial Sequence
  Description of Artificial Sequence: Synthetic oligonucleotide
aauucaagaugaccauguu

SEQ ID NO: 498687 - RNA, 19 nt, Artificial Sequence
  Description of Artificial Sequence: Synthetic oligonucleotide
agaugaauuaauauauauu

SEQ ID NO: 498688 - RNA, 19 nt, Artificial Sequence
  Description of Artificial Sequence: Synthetic oligonucleotide
auuucucuauugauaaaug

SEQ ID NO: 498689 - RNA, 19 nt, Artificial Sequence
  Description of Artificial Sequence: Synthetic oligonucleotide
gaagaugcggaaguugcac

SEQ ID NO: 498690 - RNA, 19 nt, Artificial Sequence
  Description of Artificial Sequence: Synthetic oligonucleotide
gggacaacugauauuaggc

SEQ ID NO: 498691 - RNA, 19 nt, Artificial Sequence
  Description of Artificial Sequence: Synthetic oligonucleotide
augcuguauaacugcugac

SEQ ID NO: 498692 - RNA, 19 nt, Artificial Sequence
  Description of Artificial Sequence: Synthetic oligonucleotide
aguuaggucuguuacuguu

SEQ ID NO: 498693 - RNA, 19 nt, Artificial Sequence
  Description of Artificial Sequence: Synthetic oligonucleotide
uuaggcaagugcuggcugu

SEQ ID NO: 498694 - RNA, 19 nt, Artificial Sequence
  Description of Artificial Sequence: Synthetic oligonucleotide
uagggcgaggcacuugcag

SEQ ID NO: 498695 - RNA, 19 nt, Artificial Sequence
  Description of Artificial Sequence: Synthetic oligonucleotide
accuguauucaguucacau

SEQ ID NO: 498696 - RNA, 19 nt, Artificial Sequence
  Description of Artificial Sequence: Synthetic oligonucleotide
auaugggagggauuaugga

SEQ ID NO: 498697 - RNA, 19 nt, Artificial Sequence
  Description of Artificial Sequence: Synthetic oligonucleotide
uaaccuggucauucaacca

SEQ ID NO: 498698 - RNA, 19 nt, Artificial Sequence
  Description of Artificial Sequence: Synthetic oligonucleotide
accuuaacucuucucacau

SEQ ID NO: 498699 - RNA, 19 nt, Artificial Sequence
  Description of Artificial Sequence: Synthetic oligonucleotide
gugucccuaaguaggaacg

SEQ ID NO: 498700 - RNA, 19 nt, Artificial Sequence
  Description of Artificial Sequence: Synthetic oligonucleotide
uguuacuguuguauuucaa

SEQ ID NO: 498701 - RNA, 19 nt, Artificial Sequence
  Description of Artificial Sequence: Synthetic oligonucleotide
guuuggagauucaaguaac

SEQ ID NO: 498702 - RNA, 19 nt, Artificial Sequence
  Description of Artificial Sequence: Synthetic oligonucleotide
ucacuacaagaaauuuaac

SEQ ID NO: 498703 - RNA, 19 nt, Artificial Sequence
  Description of Artificial Sequence: Synthetic oligonucleotide
acaaaagguggugcacgcc

SEQ ID NO: 498704 - RNA, 19 nt, Artificial Sequence
  Description of Artificial Sequence: Synthetic oligonucleotide
uagcuagaaggguugagua

SEQ ID NO: 498705 - RNA, 19 nt, Artificial Sequence
  Description of Artificial Sequence: Synthetic oligonucleotide
gggauuauggaauccauaa

SEQ ID NO: 498706 - RNA, 19 nt, Artificial Sequence
  Description of Artificial Sequence: Synthetic oligonucleotide
gauaaucaguguauuaacu

SEQ ID NO: 498707 - RNA, 19 nt, Artificial Sequence
  Description of Artificial Sequence: Synthetic oligonucleotide
gucuauaugcaugcguuug

SEQ ID NO: 498708 - RNA, 19 nt, Artificial Sequence
  Description of Artificial Sequence: Synthetic oligonucleotide
aacgucuauucugagcuau

SEQ ID NO: 498709 - RNA, 19 nt, Artificial Sequence
  Description of Artificial Sequence: Synthetic oligonucleotide
uauuaggcaagugcuggcu

SEQ ID NO: 498710 - RNA, 19 nt, Artificial Sequence
  Description of Artificial Sequence: Synthetic oligonucleotide
augcguuuggauaauaaau

SEQ ID NO: 498711 - RNA, 19 nt, Artificial Sequence
  Description of Artificial Sequence: Synthetic oligonucleotide
aaaguacaugauagcagga

SEQ ID NO: 498712 - RNA, 19 nt, Artificial Sequence
  Description of Artificial Sequence: Synthetic oligonucleotide
caucagugaaaggugcugc

SEQ ID NO: 498713 - RNA, 19 nt, Artificial Sequence
  Description of Artificial Sequence: Synthetic oligonucleotide
ggaacgucuauucugagcu

SEQ ID NO: 498714 - RNA, 19 nt, Artificial Sequence
  Description of Artificial Sequence: Synthetic oligonucleotide
cuuucacaaccacuccuag

SEQ ID NO: 498715 - RNA, 19 nt, Artificial Sequence
  Description of Artificial Sequence: Synthetic oligonucleotide
auauuuagcuagaaggguu

SEQ ID NO: 498716 - RNA, 19 nt, Artificial Sequence
  Description of Artificial Sequence: Synthetic oligonucleotide
uucacucugcuugagcgac

SEQ ID NO: 498717 - RNA, 19 nt, Artificial Sequence
  Description of Artificial Sequence: Synthetic oligonucleotide
agguggauaggaaucaaca

SEQ ID NO: 498718 - RNA, 19 nt, Artificial Sequence
  Description of Artificial Sequence: Synthetic oligonucleotide
uaaguguuuggagauucaa

SEQ ID NO: 498719 - RNA, 19 nt, Artificial Sequence
  Description of Artificial Sequence: Synthetic oligonucleotide
cuacccuuuaugccauagg

SEQ ID NO: 498720 - RNA, 19 nt, Artificial Sequence
  Description of Artificial Sequence: Synthetic oligonucleotide
auauucagugguaaacaga

SEQ ID NO: 498721 - RNA, 19 nt, Artificial Sequence
  Description of Artificial Sequence: Synthetic oligonucleotide
cuagcauacagcagaagua

SEQ ID NO: 498722 - RNA, 19 nt, Artificial Sequence
  Description of Artificial Sequence: Synthetic oligonucleotide
aucucuuaacuccauuaua

SEQ ID NO: 498723 - RNA, 19 nt, Artificial Sequence
  Description of Artificial Sequence: Synthetic oligonucleotide
auauccagcaugugcuuau

SEQ ID NO: 498724 - RNA, 19 nt, Artificial Sequence
  Description of Artificial Sequence: Synthetic oligonucleotide
uuagguucugggguuaaau

SEQ ID NO: 498725 - RNA, 19 nt, Artificial Sequence
  Description of Artificial Sequence: Synthetic oligonucleotide
gguguaaaacaugacuggc

SEQ ID NO: 498726 - RNA, 19 nt, Artificial Sequence
  Description of Artificial Sequence: Synthetic oligonucleotide
cauaacgaagcagagcaga

SEQ ID NO: 498727 - RNA, 19 nt, Artificial Sequence
  Description of Artificial Sequence: Synthetic oligonucleotide
auagauccucuuucguacu

SEQ ID NO: 498728 - RNA, 19 nt, Artificial Sequence
  Description of Artificial Sequence: Synthetic oligonucleotide
acagucucacucugucguc

SEQ ID NO: 498729 - RNA, 19 nt, Artificial Sequence
  Description of Artificial Sequence: Synthetic oligonucleotide
cuugagcgacccauccucc

SEQ ID NO: 498730 - RNA, 19 nt, Artificial Sequence
  Description of Artificial Sequence: Synthetic oligonucleotide
cauguuauucauauucagu

SEQ ID NO: 498731 - RNA, 19 nt, Artificial Sequence
  Description of Artificial Sequence: Synthetic oligonucleotide
ggucucuuaacauaacgaa

SEQ ID NO: 498732 - RNA, 19 nt, Artificial Sequence
  Description of Artificial Sequence: Synthetic oligonucleotide
cugaccuagcauacagcag

SEQ ID NO: 498733 - RNA, 19 nt, Artificial Sequence
  Description of Artificial Sequence: Synthetic oligonucleotide
uaacaauaguggcccaaua

SEQ ID NO: 498734 - RNA, 19 nt, Artificial Sequence
  Description of Artificial Sequence: Synthetic oligonucleotide
caucuaacuauguuucaaa

SEQ ID NO: 498735 - RNA, 19 nt, Artificial Sequence
  Description of Artificial Sequence: Synthetic oligonucleotide
cuagaaggguugaguacug

SEQ ID NO: 498736 - RNA, 19 nt, Artificial Sequence
  Description of Artificial Sequence: Synthetic oligonucleotide
caugcguuuggauaauaaa

SEQ ID NO: 498737 - RNA, 19 nt, Artificial Sequence
  Description of Artificial Sequence: Synthetic oligonucleotide
aaccacuccuagcuacccu

SEQ ID NO: 498738 - RNA, 19 nt, Artificial Sequence
  Description of Artificial Sequence: Synthetic oligonucleotide
ucacugagugggaccaaac

SEQ ID NO: 498739 - RNA, 19 nt, Artificial Sequence
  Description of Artificial Sequence: Synthetic oligonucleotide
auacacuuuguaacagcag

SEQ ID NO: 498740 - RNA, 19 nt, Artificial Sequence
  Description of Artificial Sequence: Synthetic oligonucleotide
ugucccuaaguaggaacgc

SEQ ID NO: 498741 - RNA, 19 nt, Artificial Sequence
  Description of Artificial Sequence: Synthetic oligonucleotide
cucuuaacauaacgaagca

SEQ ID NO: 498742 - RNA, 19 nt, Artificial Sequence
  Description of Artificial Sequence: Synthetic oligonucleotide
ccucuuucguacucgaggc

SEQ ID NO: 498743 - RNA, 19 nt, Artificial Sequence
  Description of Artificial Sequence: Synthetic oligonucleotide
ccauguuauucauauucag

SEQ ID NO: 498744 - RNA, 19 nt, Artificial Sequence
  Description of Artificial Sequence: Synthetic oligonucleotide
ugacuaauugggucucuua

SEQ ID NO: 498745 - RNA, 19 nt, Artificial Sequence
  Description of Artificial Sequence: Synthetic oligonucleotide
ccuagcuacccuuuaugcc

SEQ ID NO: 498746 - RNA, 19 nt, Artificial Sequence
  Description of Artificial Sequence: Synthetic oligonucleotide
gagcgacccauccuccucc

SEQ ID NO: 498747 - RNA, 19 nt, Artificial Sequence
  Description of Artificial Sequence: Synthetic oligonucleotide
cagguggauaggaaucaac

SEQ ID NO: 498748 - RNA, 19 nt, Artificial Sequence
  Description of Artificial Sequence: Synthetic oligonucleotide
ggacaacugauauuaggca

SEQ ID NO: 498749 - RNA, 19 nt, Artificial Sequence
  Description of Artificial Sequence: Synthetic oligonucleotide
cuuucguacucgaggcaug

SEQ ID NO: 498750 - RNA, 19 nt, Artificial Sequence
  Description of Artificial Sequence: Synthetic oligonucleotide
accucaucuaggaauccag

SEQ ID NO: 498751 - RNA, 19 nt, Artificial Sequence
  Description of Artificial Sequence: Synthetic oligonucleotide
auaccaccaaucugaaaua

SEQ ID NO: 498752 - RNA, 19 nt, Artificial Sequence
  Description of Artificial Sequence: Synthetic oligonucleotide
caugacuggcuuucacaac

SEQ ID NO: 498753 - RNA, 19 nt, Artificial Sequence
  Description of Artificial Sequence: Synthetic oligonucleotide
uuucguacucgaggcaugu

SEQ ID NO: 498754 - RNA, 19 nt, Artificial Sequence
  Description of Artificial Sequence: Synthetic oligonucleotide
uucucacaucagcacuaug

SEQ ID NO: 498755 - RNA, 19 nt, Artificial Sequence
  Description of Artificial Sequence: Synthetic oligonucleotide
gaguacugaccuagcauac

SEQ ID NO: 498756 - RNA, 19 nt, Artificial Sequence
  Description of Artificial Sequence: Synthetic oligonucleotide
uaauucgauuggagagugu

SEQ ID NO: 498757 - RNA, 19 nt, Artificial Sequence
  Description of Artificial Sequence: Synthetic oligonucleotide
ucgauuggagagugucaca

SEQ ID NO: 498758 - RNA, 19 nt, Artificial Sequence
  Description of Artificial Sequence: Synthetic oligonucleotide
gcuuauuguagaagaugcg

SEQ ID NO: 498759 - RNA, 19 nt, Artificial Sequence
  Description of Artificial Sequence: Synthetic oligonucleotide
uauucugagcuaugcucua

SEQ ID NO: 498760 - RNA, 19 nt, Artificial Sequence
  Description of Artificial Sequence: Synthetic oligonucleotide
uugcaagcucuuguguccc

SEQ ID NO: 498761 - RNA, 19 nt, Artificial Sequence
  Description of Artificial Sequence: Synthetic oligonucleotide
aacugcugacuaauugggu

SEQ ID NO: 498762 - RNA, 19 nt, Artificial Sequence
  Description of Artificial Sequence: Synthetic oligonucleotide
agaccccaauugcuucuac

SEQ ID NO: 498763 - RNA, 19 nt, Artificial Sequence
  Description of Artificial Sequence: Synthetic oligonucleotide
ucgaggcaugucuucuuga

SEQ ID NO: 498764 - RNA, 19 nt, Artificial Sequence
  Description of Artificial Sequence: Synthetic oligonucleotide
ugagcgacccauccuccuc

SEQ ID NO: 498765 - RNA, 19 nt, Artificial Sequence
  Description of Artificial Sequence: Synthetic oligonucleotide
ugccgagucucaguccagg

SEQ ID NO: 498766 - RNA, 19 nt, Artificial Sequence
  Description of Artificial Sequence: Synthetic oligonucleotide
cagggucgccagaucaucc

SEQ ID NO: 498767 - RNA, 19 nt, Artificial Sequence
  Description of Artificial Sequence: Synthetic oligonucleotide
uucugggguuaaauuuuaa

SEQ ID NO: 498768 - RNA, 19 nt, Artificial Sequence
  Description of Artificial Sequence: Synthetic oligonucleotide
ggguugaguacugaccuag

SEQ ID NO: 498769 - RNA, 19 nt, Artificial Sequence
  Description of Artificial Sequence: Synthetic oligonucleotide
uggcccgguaguuuguuau

SEQ ID NO: 498770 - RNA, 19 nt, Artificial Sequence
  Description of Artificial Sequence: Synthetic oligonucleotide
augaaugccuugggaauca

SEQ ID NO: 498771 - RNA, 19 nt, Artificial Sequence
  Description of Artificial Sequence: Synthetic oligonucleotide
ccacaauugcaaagaaaag

SEQ ID NO: 498772 - RNA, 19 nt, Artificial Sequence
  Description of Artificial Sequence: Synthetic oligonucleotide
accaaaucuacuaggcuuu

SEQ ID NO: 498773 - RNA, 19 nt, Artificial Sequence
  Description of Artificial Sequence: Synthetic oligonucleotide
gagcuaugcucuaucaaaa

SEQ ID NO: 498774 - RNA, 19 nt, Artificial Sequence
  Description of Artificial Sequence: Synthetic oligonucleotide
gggugaaaauaaauuugag

SEQ ID NO: 498775 - RNA, 19 nt, Artificial Sequence
  Description of Artificial Sequence: Synthetic oligonucleotide
ggguuaaauuuuaaaccug

SEQ ID NO: 498776 - RNA, 19 nt, Artificial Sequence
  Description of Artificial Sequence: Synthetic oligonucleotide
auuuagcuagaaggguuga

SEQ ID NO: 498777 - RNA, 19 nt, Artificial Sequence
  Description of Artificial Sequence: Synthetic oligonucleotide
uaaauaugggagggauuau

SEQ ID NO: 498778 - RNA, 19 nt, Artificial Sequence
  Description of Artificial Sequence: Synthetic oligonucleotide
aaccuguauucaguucaca

SEQ ID NO: 498779 - RNA, 19 nt, Artificial Sequence
  Description of Artificial Sequence: Synthetic oligonucleotide
auaacgaagcagagcagau

SEQ ID NO: 498780 - RNA, 19 nt, Artificial Sequence
  Description of Artificial Sequence: Synthetic oligonucleotide
gacuuugucugggacugca

SEQ ID NO: 498781 - RNA, 19 nt, Artificial Sequence
  Description of Artificial Sequence: Synthetic oligonucleotide
agggaacgucuauucugag

SEQ ID NO: 498782 - RNA, 19 nt, Artificial Sequence
  Description of Artificial Sequence: Synthetic oligonucleotide
uugagcgacccauccuccu

SEQ ID NO: 498783 - RNA, 19 nt, Artificial Sequence
  Description of Artificial Sequence: Synthetic oligonucleotide
acauaacgaagcagagcag

SEQ ID NO: 498784 - RNA, 19 nt, Artificial Sequence
  Description of Artificial Sequence: Synthetic oligonucleotide
auucgauuggagaguguca

SEQ ID NO: 498785 - RNA, 19 nt, Artificial Sequence
  Description of Artificial Sequence: Synthetic oligonucleotide
ugguuaccagcugucuaug

SEQ ID NO: 498786 - RNA, 19 nt, Artificial Sequence
  Description of Artificial Sequence: Synthetic oligonucleotide
cuguauaacugcugacuaa

SEQ ID NO: 498787 - RNA, 19 nt, Artificial Sequence
  Description of Artificial Sequence: Synthetic oligonucleotide
cagaaguauaugcuguaua

SEQ ID NO: 498788 - RNA, 19 nt, Artificial Sequence
  Description of Artificial Sequence: Synthetic oligonucleotide
cccuuuaugccauagggaa

SEQ ID NO: 498789 - RNA, 19 nt, Artificial Sequence
  Description of Artificial Sequence: Synthetic oligonucleotide
agcagauaaucaguguauu

SEQ ID NO: 498790 - RNA, 19 nt, Artificial Sequence
  Description of Artificial Sequence: Synthetic oligonucleotide
caccaaaucuacuaggcuu

SEQ ID NO: 498791 - RNA, 19 nt, Artificial Sequence
  Description of Artificial Sequence: Synthetic oligonucleotide
cagccuaccuuaacucuuc

SEQ ID NO: 498792 - RNA, 19 nt, Artificial Sequence
  Description of Artificial Sequence: Synthetic oligonucleotide
ccauagggaacgucuauuc

SEQ ID NO: 498793 - RNA, 19 nt, Artificial Sequence
  Description of Artificial Sequence: Synthetic oligonucleotide
aguucacaucuaacuaugu

SEQ ID NO: 498794 - RNA, 19 nt, Artificial Sequence
  Description of Artificial Sequence: Synthetic oligonucleotide
cugucgucacucacagcac

SEQ ID NO: 498795 - RNA, 19 nt, Artificial Sequence
  Description of Artificial Sequence: Synthetic oligonucleotide
ggauuauggaauccauaaa

SEQ ID NO: 498796 - RNA, 19 nt, Artificial Sequence
  Description of Artificial Sequence: Synthetic oligonucleotide
guaguucacucugcuugag

SEQ ID NO: 498797 - RNA, 19 nt, Artificial Sequence
  Description of Artificial Sequence: Synthetic oligonucleotide
uugucccgcuuuccugacc

SEQ ID NO: 498798 - RNA, 19 nt, Artificial Sequence
  Description of Artificial Sequence: Synthetic oligonucleotide
cugucuauaugcaugcguu

SEQ ID NO: 498799 - RNA, 19 nt, Artificial Sequence
  Description of Artificial Sequence: Synthetic oligonucleotide
gcuguauaacugcugacua

SEQ ID NO: 498800 - RNA, 19 nt, Artificial Sequence
  Description of Artificial Sequence: Synthetic oligonucleotide
cuuuagacacacgcccauc

SEQ ID NO: 498801 - RNA, 19 nt, Artificial Sequence
  Description of Artificial Sequence: Synthetic oligonucleotide
uuuagguucugggguuaaa

SEQ ID NO: 498802 - RNA, 19 nt, Artificial Sequence
  Description of Artificial Sequence: Synthetic oligonucleotide
ccuuuaugccauagggaac

SEQ ID NO: 498803 - RNA, 19 nt, Artificial Sequence
  Description of Artificial Sequence: Synthetic oligonucleotide
guacucgaggcaugucuuc

SEQ ID NO: 498804 - RNA, 19 nt, Artificial Sequence
  Description of Artificial Sequence: Synthetic oligonucleotide
ccauuauagccuuugguua

SEQ ID NO: 498805 - RNA, 19 nt, Artificial Sequence
  Description of Artificial Sequence: Synthetic oligonucleotide
uggagucccugccgagucu

SEQ ID NO: 498806 - RNA, 19 nt, Artificial Sequence
  Description of Artificial Sequence: Synthetic oligonucleotide
ugcugacuaauugggucuc

SEQ ID NO: 498807 - RNA, 19 nt, Artificial Sequence
  Description of Artificial Sequence: Synthetic oligonucleotide
gcagguugagagcugcuca

SEQ ID NO: 498808 - RNA, 19 nt, Artificial Sequence
  Description of Artificial Sequence: Synthetic oligonucleotide
ugaccauguuauucauauu

SEQ ID NO: 498809 - RNA, 19 nt, Artificial Sequence
  Description of Artificial Sequence: Synthetic oligonucleotide
gucuauucugagcuaugcu

SEQ ID NO: 498810 - RNA, 19 nt, Artificial Sequence
  Description of Artificial Sequence: Synthetic oligonucleotide
cugagcuaugcucuaucaa

SEQ ID NO: 498811 - RNA, 19 nt, Artificial Sequence
  Description of Artificial Sequence: Synthetic oligonucleotide
cugcugacuaauugggucu

SEQ ID NO: 498812 - RNA, 19 nt, Artificial Sequence
  Description of Artificial Sequence: Synthetic oligonucleotide
uucaaccaauucugaccau

SEQ ID NO: 498813 - RNA, 19 nt, Artificial Sequence
  Description of Artificial Sequence: Synthetic oligonucleotide
gcucuugugucccuaagua

SEQ ID NO: 498814 - RNA, 19 nt, Artificial Sequence
  Description of Artificial Sequence: Synthetic oligonucleotide
agacacugacagucucacu

SEQ ID NO: 498815 - RNA, 19 nt, Artificial Sequence
  Description of Artificial Sequence: Synthetic oligonucleotide
ccccaauugcuucuacugc

SEQ ID NO: 498816 - RNA, 19 nt, Artificial Sequence
  Description of Artificial Sequence: Synthetic oligonucleotide
guaaguguuuggagauuca

SEQ ID NO: 498817 - RNA, 19 nt, Artificial Sequence
  Description of Artificial Sequence: Synthetic oligonucleotide
gagcagauaaucaguguau

SEQ ID NO: 498818 - RNA, 19 nt, Artificial Sequence
  Description of Artificial Sequence: Synthetic oligonucleotide
ccccaguuaggucuguuac

SEQ ID NO: 498819 - RNA, 19 nt, Artificial Sequence
  Description of Artificial Sequence: Synthetic oligonucleotide
uuccugacccaaagucaua

SEQ ID NO: 498820 - RNA, 19 nt, Artificial Sequence
  Description of Artificial Sequence: Synthetic oligonucleotide
acugcaugcucugucuaua

SEQ ID NO: 498821 - RNA, 19 nt, Artificial Sequence
  Description of Artificial Sequence: Synthetic oligonucleotide
cuguuguauuucaaccaua

SEQ ID NO: 498822 - RNA, 19 nt, Artificial Sequence
  Description of Artificial Sequence: Synthetic oligonucleotide
caucucaugcucagggacu

SEQ ID NO: 498823 - RNA, 19 nt, Artificial Sequence
  Description of Artificial Sequence: Synthetic oligonucleotide
gcuagaaggguugaguacu

SEQ ID NO: 498824 - RNA, 19 nt, Artificial Sequence
  Description of Artificial Sequence: Synthetic oligonucleotide
agggauuauggaauccaua

SEQ ID NO: 498825 - RNA, 19 nt, Artificial Sequence
  Description of Artificial Sequence: Synthetic oligonucleotide
agccuaccuuaacucuucu

SEQ ID NO: 498826 - RNA, 19 nt, Artificial Sequence
  Description of Artificial Sequence: Synthetic oligonucleotide
gaccccaauugcuucuacu

SEQ ID NO: 498827 - RNA, 19 nt, Artificial Sequence
  Description of Artificial Sequence: Synthetic oligonucleotide
gcagccaacugaaaguuaa

SEQ ID NO: 498828 - RNA, 19 nt, Artificial Sequence
  Description of Artificial Sequence: Synthetic oligonucleotide
gugggaccaaacuuccaua

SEQ ID NO: 498829 - RNA, 19 nt, Artificial Sequence
  Description of Artificial Sequence: Synthetic oligonucleotide
ggccagccuaccuuaacuc

SEQ ID NO: 498830 - RNA, 19 nt, Artificial Sequence
  Description of Artificial Sequence: Synthetic oligonucleotide
gaacgucuauucugagcua

SEQ ID NO: 498831 - RNA, 19 nt, Artificial Sequence
  Description of Artificial Sequence: Synthetic oligonucleotide
agucccugccgagucucag

SEQ ID NO: 498832 - RNA, 19 nt, Artificial Sequence
  Description of Artificial Sequence: Synthetic oligonucleotide
cucugucgucacucacagc

SEQ ID NO: 498833 - RNA, 19 nt, Artificial Sequence
  Description of Artificial Sequence: Synthetic oligonucleotide
ggagagugucacaguaaug

SEQ ID NO: 498834 - RNA, 19 nt, Artificial Sequence
  Description of Artificial Sequence: Synthetic oligonucleotide
acgucuauucugagcuaug

SEQ ID NO: 498835 - RNA, 19 nt, Artificial Sequence
  Description of Artificial Sequence: Synthetic oligonucleotide
gugaaauuauuggcagcaa

SEQ ID NO: 498836 - RNA, 19 nt, Artificial Sequence
  Description of Artificial Sequence: Synthetic oligonucleotide
gcguuuggauaauaaauau

SEQ ID NO: 498837 - RNA, 19 nt, Artificial Sequence
  Description of Artificial Sequence: Synthetic oligonucleotide
gguaacaauaguggcccaa

SEQ ID NO: 498838 - RNA, 19 nt, Artificial Sequence
  Description of Artificial Sequence: Synthetic oligonucleotide
gguugaguacugaccuagc

SEQ ID NO: 498839 - RNA, 19 nt, Artificial Sequence
  Description of Artificial Sequence: Synthetic oligonucleotide
ucccgcuuuccugacccaa

SEQ ID NO: 498840 - RNA, 19 nt, Artificial Sequence
  Description of Artificial Sequence: Synthetic oligonucleotide
ugcaugcguuuggauaaua

SEQ ID NO: 498841 - RNA, 19 nt, Artificial Sequence
  Description of Artificial Sequence: Synthetic oligonucleotide
guacuggagcacaaagacu

SEQ ID NO: 498842 - RNA, 19 nt, Artificial Sequence
  Description of Artificial Sequence: Synthetic oligonucleotide
cgucuauucugagcuaugc

SEQ ID NO: 498843 - RNA, 19 nt, Artificial Sequence
  Description of Artificial Sequence: Synthetic oligonucleotide
cagucucacucugucguca

SEQ ID NO: 498844 - RNA, 19 nt, Artificial Sequence
  Description of Artificial Sequence: Synthetic oligonucleotide
uucguacucgaggcauguc

SEQ ID NO: 498845 - RNA, 19 nt, Artificial Sequence
  Description of Artificial Sequence: Synthetic oligonucleotide
gagggauuauggaauccau

SEQ ID NO: 498846 - RNA, 19 nt, Artificial Sequence
  Description of Artificial Sequence: Synthetic oligonucleotide
gccaacccugaagaaauuc

SEQ ID NO: 498847 - RNA, 19 nt, Artificial Sequence
  Description of Artificial Sequence: Synthetic oligonucleotide
augucuggcccgguaguuu

SEQ ID NO: 498848 - RNA, 19 nt, Artificial Sequence
  Description of Artificial Sequence: Synthetic oligonucleotide
ucuggcccgguaguuuguu

SEQ ID NO: 498849 - RNA, 19 nt, Artificial Sequence
  Description of Artificial Sequence: Synthetic oligonucleotide
agcucaccauacauauuua

SEQ ID NO: 498850 - RNA, 19 nt, Artificial Sequence
  Description of Artificial Sequence: Synthetic oligonucleotide
gcaugcguuuggauaauaa

SEQ ID NO: 498851 - RNA, 19 nt, Artificial Sequence
  Description of Artificial Sequence: Synthetic oligonucleotide
cuagggcgaggcacuugca

SEQ ID NO: 498852 - RNA, 19 nt, Artificial Sequence
  Description of Artificial Sequence: Synthetic oligonucleotide
cagguugagagcugcucau

SEQ ID NO: 498853 - RNA, 19 nt, Artificial Sequence
  Description of Artificial Sequence: Synthetic oligonucleotide
agcagccaacugaaaguua

SEQ ID NO: 498854 - RNA, 19 nt, Artificial Sequence
  Description of Artificial Sequence: Synthetic oligonucleotide
augcaugcguuuggauaau

SEQ ID NO: 498855 - RNA, 19 nt, Artificial Sequence
  Description of Artificial Sequence: Synthetic oligonucleotide
gggcgaggcacuugcagua

SEQ ID NO: 498856 - RNA, 19 nt, Artificial Sequence
  Description of Artificial Sequence: Synthetic oligonucleotide
gccagccuaccuuaacucu

SEQ ID NO: 498857 - RNA, 19 nt, Artificial Sequence
  Description of Artificial Sequence: Synthetic oligonucleotide
guauaacugcugacuaauu

SEQ ID NO: 498858 - RNA, 19 nt, Artificial Sequence
  Description of Artificial Sequence: Synthetic oligonucleotide
ccgguaguuuguuauuucu

SEQ ID NO: 498859 - RNA, 19 nt, Artificial Sequence
  Description of Artificial Sequence: Synthetic oligonucleotide
cugcaugcucugucuauau

SEQ ID NO: 498860 - RNA, 19 nt, Artificial Sequence
  Description of Artificial Sequence: Synthetic oligonucleotide
agagaccaguggacuucca

SEQ ID NO: 498861 - RNA, 19 nt, Artificial Sequence
  Description of Artificial Sequence: Synthetic oligonucleotide
gagucccugccgagucuca

SEQ ID NO: 498862 - RNA, 19 nt, Artificial Sequence
  Description of Artificial Sequence: Synthetic oligonucleotide
ccagggucgccagaucauc

SEQ ID NO: 498863 - RNA, 19 nt, Artificial Sequence
  Description of Artificial Sequence: Synthetic oligonucleotide
cgcccaucuacacuccuca

SEQ ID NO: 498864 - RNA, 19 nt, Artificial Sequence
  Description of Artificial Sequence: Synthetic oligonucleotide
cuggcccgguaguuuguua

SEQ ID NO: 498865 - RNA, 19 nt, Artificial Sequence
  Description of Artificial Sequence: Synthetic oligonucleotide
gucccgcuuuccugaccca

SEQ ID NO: 498866 - RNA, 19 nt, Artificial Sequence
  Description of Artificial Sequence: Synthetic oligonucleotide
cagaccccaauugcuucua

SEQ ID NO: 498867 - RNA, 19 nt, Artificial Sequence
  Description of Artificial Sequence: Synthetic oligonucleotide
ccagccuaccuuaacucuu

SEQ ID NO: 498868 - RNA, 19 nt, Artificial Sequence
  Description of Artificial Sequence: Synthetic oligonucleotide
gccauagggaacgucuauu

SEQ ID NO: 498869 - RNA, 19 nt, Artificial Sequence
  Description of Artificial Sequence: Synthetic oligonucleotide
caguaaguguuuggagauu

SEQ ID NO: 498870 - RNA, 19 nt, Artificial Sequence
  Description of Artificial Sequence: Synthetic oligonucleotide
gcgaggcacuugcaguacu

SEQ ID NO: 498871 - RNA, 19 nt, Artificial Sequence
  Description of Artificial Sequence: Synthetic oligonucleotide
cccgcuuuccugacccaaa

SEQ ID NO: 498872 - RNA, 19 nt, Artificial Sequence
  Description of Artificial Sequence: Synthetic oligonucleotide
gcugacuaauugggucucu

SEQ ID NO: 498873 - RNA, 19 nt, Artificial Sequence
  Description of Artificial Sequence: Synthetic oligonucleotide
gucuggcccgguaguuugu

SEQ ID NO: 498874 - RNA, 19 nt, Artificial Sequence
  Description of Artificial Sequence: Synthetic oligonucleotide
cguacucgaggcaugucuu

SEQ ID NO: 498875 - RNA, 19 nt, Artificial Sequence
  Description of Artificial Sequence: Synthetic oligonucleotide
ggcccgguaguuuguuauu

SEQ ID NO: 498876 - RNA, 19 nt, Artificial Sequence
  Description of Artificial Sequence: Synthetic oligonucleotide
gcccgguaguuuguuauuu

SEQ ID NO: 498877 - RNA, 19 nt, Artificial Sequence
  Description of Artificial Sequence: Synthetic oligonucleotide
ccacuccuagcuacccuuu

SEQ ID NO: 498878 - RNA, 19 nt, Artificial Sequence
  Description of Artificial Sequence: Synthetic oligonucleotide
gcgacccauccuccuccau

SEQ ID NO: 498879 - RNA, 19 nt, Artificial Sequence
  Description of Artificial Sequence: Synthetic oligonucleotide
cacuauaagaccuagaacc

SEQ ID NO: 498880 - RNA, 19 nt, Artificial Sequence
  Description of Artificial Sequence: Synthetic oligonucleotide
acauauacuauucucaagg

SEQ ID NO: 498881 - RNA, 19 nt, Artificial Sequence
  Description of Artificial Sequence: Synthetic oligonucleotide
aguuggaccauuuauugcc

SEQ ID NO: 498882 - RNA, 19 nt, Artificial Sequence
  Description of Artificial Sequence: Synthetic oligonucleotide
aaucgaacuucauuaaacg

SEQ ID NO: 498883 - RNA, 19 nt, Artificial Sequence
  Description of Artificial Sequence: Synthetic oligonucleotide
uagcuuaggaauuucaucg

SEQ ID NO: 498884 - RNA, 19 nt, Artificial Sequence
  Description of Artificial Sequence: Synthetic oligonucleotide
acuuaagauauuuacucgc

SEQ ID NO: 498885 - RNA, 19 nt, Artificial Sequence
  Description of Artificial Sequence: Synthetic oligonucleotide
aagaccuagaaccuuguac

SEQ ID NO: 498886 - RNA, 19 nt, Artificial Sequence
  Description of Artificial Sequence: Synthetic oligonucleotide
auuaaacggaaccuggcgc

SEQ ID NO: 498887 - RNA, 19 nt, Artificial Sequence
  Description of Artificial Sequence: Synthetic oligonucleotide
uuuccaacaagauuccugg

SEQ ID NO: 498888 - RNA, 19 nt, Artificial Sequence
  Description of Artificial Sequence: Synthetic oligonucleotide
uuuagugccaacaaacaca

SEQ ID NO: 498889 - RNA, 19 nt, Artificial Sequence
  Description of Artificial Sequence: Synthetic oligonucleotide
gaauuuguaccauaaccgg

SEQ ID NO: 498890 - RNA, 19 nt, Artificial Sequence
  Description of Artificial Sequence: Synthetic oligonucleotide
aacuugaauaaaauccucc

SEQ ID NO: 498891 - RNA, 19 nt, Artificial Sequence
  Description of Artificial Sequence: Synthetic oligonucleotide
aaguauguuuaacauauga

SEQ ID NO: 498892 - RNA, 19 nt, Artificial Sequence
  Description of Artificial Sequence: Synthetic oligonucleotide
ucuaucuuuggcaagcuug

SEQ ID NO: 498893 - RNA, 19 nt, Artificial Sequence
  Description of Artificial Sequence: Synthetic oligonucleotide
aauauaaucugcaacugug

SEQ ID NO: 498894 - RNA, 19 nt, Artificial Sequence
  Description of Artificial Sequence: Synthetic oligonucleotide
acccauaccaaucugucgc

SEQ ID NO: 498895 - RNA, 19 nt, Artificial Sequence
  Description of Artificial Sequence: Synthetic oligonucleotide
aauuccaagaaaccccuag

SEQ ID NO: 498896 - RNA, 19 nt, Artificial Sequence
  Description of Artificial Sequence: Synthetic oligonucleotide
cauucuaaaugcuuagugg

SEQ ID NO: 498897 - RNA, 19 nt, Artificial Sequence
  Description of Artificial Sequence: Synthetic oligonucleotide
auaaaucccuuguagaaag

SEQ ID NO: 498898 - RNA, 19 nt, Artificial Sequence
  Description of Artificial Sequence: Synthetic oligonucleotide
uuaacauaugauuucuuca

SEQ ID NO: 498899 - RNA, 19 nt, Artificial Sequence
  Description of Artificial Sequence: Synthetic oligonucleotide
auaugauuucuucaggauc

SEQ ID NO: 498900 - RNA, 19 nt, Artificial Sequence
  Description of Artificial Sequence: Synthetic oligonucleotide
caucuuuucgcucagauuc

SEQ ID NO: 498901 - RNA, 19 nt, Artificial Sequence
  Description of Artificial Sequence: Synthetic oligonucleotide
gauauuuacucgcuucacg

SEQ ID NO: 498902 - RNA, 19 nt, Artificial Sequence
  Description of Artificial Sequence: Synthetic oligonucleotide
uguaauuagggccccgacg

SEQ ID NO: 498903 - RNA, 19 nt, Artificial Sequence
  Description of Artificial Sequence: Synthetic oligonucleotide
uguaaguggcaucacaagc

SEQ ID NO: 498904 - RNA, 19 nt, Artificial Sequence
  Description of Artificial Sequence: Synthetic oligonucleotide
uccaauacuuucuuuagug

SEQ ID NO: 498905 - RNA, 19 nt, Artificial Sequence
  Description of Artificial Sequence: Synthetic oligonucleotide
uguaauguaaaagaacugu

SEQ ID NO: 498906 - RNA, 19 nt, Artificial Sequence
  Description of Artificial Sequence: Synthetic oligonucleotide
cuaaugaccaaucacucag

SEQ ID NO: 498907 - RNA, 19 nt, Artificial Sequence
  Description of Artificial Sequence: Synthetic oligonucleotide
ucgaacuucauuaaacgga

SEQ ID NO: 498908 - RNA, 19 nt, Artificial Sequence
  Description of Artificial Sequence: Synthetic oligonucleotide
uaaguaagcaaugugauau

SEQ ID NO: 498909 - RNA, 19 nt, Artificial Sequence
  Description of Artificial Sequence: Synthetic oligonucleotide
uuaucaaguaagcuguaug

SEQ ID NO: 498910 - RNA, 19 nt, Artificial Sequence
  Description of Artificial Sequence: Synthetic oligonucleotide
aaugugacuauuucauugu

SEQ ID NO: 498911 - RNA, 19 nt, Artificial Sequence
  Description of Artificial Sequence: Synthetic oligonucleotide
ucagauucuguuucggagg

SEQ ID NO: 498912 - RNA, 19 nt, Artificial Sequence
  Description of Artificial Sequence: Synthetic oligonucleotide
uacgagaccgccuacgacg

SEQ ID NO: 498913 - RNA, 19 nt, Artificial Sequence
  Description of Artificial Sequence: Synthetic oligonucleotide
aucaacuucguccgaauac

SEQ ID NO: 498914 - RNA, 19 nt, Artificial Sequence
  Description of Artificial Sequence: Synthetic oligonucleotide
aaugcauaucacuuaagau

SEQ ID NO: 498915 - RNA, 19 nt, Artificial Sequence
  Description of Artificial Sequence: Synthetic oligonucleotide
ucauuucuggacauaagca

SEQ ID NO: 498916 - RNA, 19 nt, Artificial Sequence
  Description of Artificial Sequence: Synthetic oligonucleotide
aacaaauucuucaugaaaa

SEQ ID NO: 498917 - RNA, 19 nt, Artificial Sequence
  Description of Artificial Sequence: Synthetic oligonucleotide
ucuguauuaucaaguaagc

SEQ ID NO: 498918 - RNA, 19 nt, Artificial Sequence
  Description of Artificial Sequence: Synthetic oligonucleotide
aagauauuuacucgcuuca

SEQ ID NO: 498919 - RNA, 19 nt, Artificial Sequence
  Description of Artificial Sequence: Synthetic oligonucleotide
agacuggcgauccauauuc

SEQ ID NO: 498920 - RNA, 19 nt, Artificial Sequence
  Description of Artificial Sequence: Synthetic oligonucleotide
acuucguccgaauacuucg

SEQ ID NO: 498921 - RNA, 19 nt, Artificial Sequence
  Description of Artificial Sequence: Synthetic oligonucleotide
ugauucuguauuaucaagu

SEQ ID NO: 498922 - RNA, 19 nt, Artificial Sequence
  Description of Artificial Sequence: Synthetic oligonucleotide
aaguaagcuguauggauug

SEQ ID NO: 498923 - RNA, 19 nt, Artificial Sequence
  Description of Artificial Sequence: Synthetic oligonucleotide
agugccaacaaacacaaau

SEQ ID NO: 498924 - RNA, 19 nt, Artificial Sequence
  Description of Artificial Sequence: Synthetic oligonucleotide
ucucaaauccucaggaaca

SEQ ID NO: 498925 - RNA, 19 nt, Artificial Sequence
  Description of Artificial Sequence: Synthetic oligonucleotide
ugcgauguaagacuggcga

SEQ ID NO: 498926 - RNA, 19 nt, Artificial Sequence
  Description of Artificial Sequence: Synthetic oligonucleotide
ucauccgaacuuuagcuag

SEQ ID NO: 498927 - RNA, 19 nt, Artificial Sequence
  Description of Artificial Sequence: Synthetic oligonucleotide
ucgaauauaccucuacuuc

SEQ ID NO: 498928 - RNA, 19 nt, Artificial Sequence
  Description of Artificial Sequence: Synthetic oligonucleotide
agcaaugugauauucuaga

SEQ ID NO: 498929 - RNA, 19 nt, Artificial Sequence
  Description of Artificial Sequence: Synthetic oligonucleotide
uaagauauuuacucgcuuc

SEQ ID NO: 498930 - RNA, 19 nt, Artificial Sequence
  Description of Artificial Sequence: Synthetic oligonucleotide
aauauaccucuacuucauc

SEQ ID NO: 498931 - RNA, 19 nt, Artificial Sequence
  Description of Artificial Sequence: Synthetic oligonucleotide
cacuuaagauauuuacucg

SEQ ID NO: 498932 - RNA, 19 nt, Artificial Sequence
  Description of Artificial Sequence: Synthetic oligonucleotide
uugauugacaggccgaagu

SEQ ID NO: 498933 - RNA, 19 nt, Artificial Sequence
  Description of Artificial Sequence: Synthetic oligonucleotide
uuagugccaacaaacacaa

SEQ ID NO: 498934 - RNA, 19 nt, Artificial Sequence
  Description of Artificial Sequence: Synthetic oligonucleotide
uucuaaaugcuuaguggcc

SEQ ID NO: 498935 - RNA, 19 nt, Artificial Sequence
  Description of Artificial Sequence: Synthetic oligonucleotide
uguuccuauugcuaggccc

SEQ ID NO: 498936 - RNA, 19 nt, Artificial Sequence
  Description of Artificial Sequence: Synthetic oligonucleotide
acacgccucucucaaaucc

SEQ ID NO: 498937 - RNA, 19 nt, Artificial Sequence
  Description of Artificial Sequence: Synthetic oligonucleotide
uguuccacuuccuuuaagu

SEQ ID NO: 498938 - RNA, 19 nt, Artificial Sequence
  Description of Artificial Sequence: Synthetic oligonucleotide
cauuaaacggaaccuggcg

SEQ ID NO: 498939 - RNA, 19 nt, Artificial Sequence
  Description of Artificial Sequence: Synthetic oligonucleotide
uuacauauacuauucucaa

SEQ ID NO: 498940 - RNA, 19 nt, Artificial Sequence
  Description of Artificial Sequence: Synthetic oligonucleotide
auuucaucgccagaagcgc

SEQ ID NO: 498941 - RNA, 19 nt, Artificial Sequence
  Description of Artificial Sequence: Synthetic oligonucleotide
uaaguggcaucacaagcag

SEQ ID NO: 498942 - RNA, 19 nt, Artificial Sequence
  Description of Artificial Sequence: Synthetic oligonucleotide
auauaccucuacuucaucu

SEQ ID NO: 498943 - RNA, 19 nt, Artificial Sequence
  Description of Artificial Sequence: Synthetic oligonucleotide
ucauuaaacggaaccuggc

SEQ ID NO: 498944 - RNA, 19 nt, Artificial Sequence
  Description of Artificial Sequence: Synthetic oligonucleotide
uccacuauuucuugaauaa

SEQ ID NO: 498945 - RNA, 19 nt, Artificial Sequence
  Description of Artificial Sequence: Synthetic oligonucleotide
gauauucuagaagaacuug

SEQ ID NO: 498946 - RNA, 19 nt, Artificial Sequence
  Description of Artificial Sequence: Synthetic oligonucleotide
uuauaucaggugguggugg

SEQ ID NO: 498947 - RNA, 19 nt, Artificial Sequence
  Description of Artificial Sequence: Synthetic oligonucleotide
uuagcuagccaccauccac

SEQ ID NO: 498948 - RNA, 19 nt, Artificial Sequence
  Description of Artificial Sequence: Synthetic oligonucleotide
auggauugcugucuggauc

SEQ ID NO: 498949 - RNA, 19 nt, Artificial Sequence
  Description of Artificial Sequence: Synthetic oligonucleotide
ucguaaaugcauaucacuu

SEQ ID NO: 498950 - RNA, 19 nt, Artificial Sequence
  Description of Artificial Sequence: Synthetic oligonucleotide
aauggaaccauuccaucuu

SEQ ID NO: 498951 - RNA, 19 nt, Artificial Sequence
  Description of Artificial Sequence: Synthetic oligonucleotide
uuaaacggaaccuggcgcu

SEQ ID NO: 498952 - RNA, 19 nt, Artificial Sequence
  Description of Artificial Sequence: Synthetic oligonucleotide
guaauuagggccccgacga

SEQ ID NO: 498953 - RNA, 19 nt, Artificial Sequence
  Description of Artificial Sequence: Synthetic oligonucleotide
aguggcauauccuuucucu

SEQ ID NO: 498954 - RNA, 19 nt, Artificial Sequence
  Description of Artificial Sequence: Synthetic oligonucleotide
uccuccgucuacgagaccg

SEQ ID NO: 498955 - RNA, 19 nt, Artificial Sequence
  Description of Artificial Sequence: Synthetic oligonucleotide
ugcuaggcccauuaaaucu

SEQ ID NO: 498956 - RNA, 19 nt, Artificial Sequence
  Description of Artificial Sequence: Synthetic oligonucleotide
auuagcacacgccucucuc

SEQ ID NO: 498957 - RNA, 19 nt, Artificial Sequence
  Description of Artificial Sequence: Synthetic oligonucleotide
gaucuuugagcacagaacu

SEQ ID NO: 498958 - RNA, 19 nt, Artificial Sequence
  Description of Artificial Sequence: Synthetic oligonucleotide
ucaaguaagcuguauggau

SEQ ID NO: 498959 - RNA, 19 nt, Artificial Sequence
  Description of Artificial Sequence: Synthetic oligonucleotide
ucaaaguauguuuaacaua

SEQ ID NO: 498960 - RNA, 19 nt, Artificial Sequence
  Description of Artificial Sequence: Synthetic oligonucleotide
cuauuucauuguaaguggc

SEQ ID NO: 498961 - RNA, 19 nt, Artificial Sequence
  Description of Artificial Sequence: Synthetic oligonucleotide
uguaccauaaccggaggug

SEQ ID NO: 498962 - RNA, 19 nt, Artificial Sequence
  Description of Artificial Sequence: Synthetic oligonucleotide
auagauucuaaauguucca

SEQ ID NO: 498963 - RNA, 19 nt, Artificial Sequence
  Description of Artificial Sequence: Synthetic oligonucleotide
uauucuagaagaacuugua

SEQ ID NO: 498964 - RNA, 19 nt, Artificial Sequence
  Description of Artificial Sequence: Synthetic oligonucleotide
uuauuuugauugacaggcc

SEQ ID NO: 498965 - RNA, 19 nt, Artificial Sequence
  Description of Artificial Sequence: Synthetic oligonucleotide
auaaucugcaacugugacu

SEQ ID NO: 498966 - RNA, 19 nt, Artificial Sequence
  Description of Artificial Sequence: Synthetic oligonucleotide
acgguuaguacugugauga

SEQ ID NO: 498967 - RNA, 19 nt, Artificial Sequence
  Description of Artificial Sequence: Synthetic oligonucleotide
ucucgaauauaccucuacu

SEQ ID NO: 498968 - RNA, 19 nt, Artificial Sequence
  Description of Artificial Sequence: Synthetic oligonucleotide
uguauguuacuaccaugug

SEQ ID NO: 498969 - RNA, 19 nt, Artificial Sequence
  Description of Artificial Sequence: Synthetic oligonucleotide
uucauggacaucuuugaua

SEQ ID NO: 498970 - RNA, 19 nt, Artificial Sequence
  Description of Artificial Sequence: Synthetic oligonucleotide
uuuuaacacaguagguguc

SEQ ID NO: 498971 - RNA, 19 nt, Artificial Sequence
  Description of Artificial Sequence: Synthetic oligonucleotide
aauacuucguaaaugcaua

SEQ ID NO: 498972 - RNA, 19 nt, Artificial Sequence
  Description of Artificial Sequence: Synthetic oligonucleotide
ucuaaaugcuuaguggccu

SEQ ID NO: 498973 - RNA, 19 nt, Artificial Sequence
  Description of Artificial Sequence: Synthetic oligonucleotide
uacgcgguagcuuaggaau

SEQ ID NO: 498974 - RNA, 19 nt, Artificial Sequence
  Description of Artificial Sequence: Synthetic oligonucleotide
cacuauuguaacuguaaug

SEQ ID NO: 498975 - RNA, 19 nt, Artificial Sequence
  Description of Artificial Sequence: Synthetic oligonucleotide
gaaagugcgauguaagacu

SEQ ID NO: 498976 - RNA, 19 nt, Artificial Sequence
  Description of Artificial Sequence: Synthetic oligonucleotide
ucagaauuuguaccauaac

SEQ ID NO: 498977 - RNA, 19 nt, Artificial Sequence
  Description of Artificial Sequence: Synthetic oligonucleotide
uaaccggagguguaauuag

SEQ ID NO: 498978 - RNA, 19 nt, Artificial Sequence
  Description of Artificial Sequence: Synthetic oligonucleotide
aaagugcgauguaagacug

SEQ ID NO: 498979 - RNA, 19 nt, Artificial Sequence
  Description of Artificial Sequence: Synthetic oligonucleotide
ugcuaaugaccaaucacuc

SEQ ID NO: 498980 - RNA, 19 nt, Artificial Sequence
  Description of Artificial Sequence: Synthetic oligonucleotide
uguauggauugcugucugg

SEQ ID NO: 498981 - RNA, 19 nt, Artificial Sequence
  Description of Artificial Sequence: Synthetic oligonucleotide
acugugcacuuaaagaagg

SEQ ID NO: 498982 - RNA, 19 nt, Artificial Sequence
  Description of Artificial Sequence: Synthetic oligonucleotide
auaccaaucugucgcagcu

SEQ ID NO: 498983 - RNA, 19 nt, Artificial Sequence
  Description of Artificial Sequence: Synthetic oligonucleotide
uuaaguaagcaaugugaua

SEQ ID NO: 498984 - RNA, 19 nt, Artificial Sequence
  Description of Artificial Sequence: Synthetic oligonucleotide
uuaagauauuuacucgcuu

SEQ ID NO: 498985 - RNA, 19 nt, Artificial Sequence
  Description of Artificial Sequence: Synthetic oligonucleotide
uaguuggaccauuuauugc

SEQ ID NO: 498986 - RNA, 19 nt, Artificial Sequence
  Description of Artificial Sequence: Synthetic oligonucleotide
ucaacuucguccgaauacu

SEQ ID NO: 498987 - RNA, 19 nt, Artificial Sequence
  Description of Artificial Sequence: Synthetic oligonucleotide
uuaugggcauuuucauuag

SEQ ID NO: 498988 - RNA, 19 nt, Artificial Sequence
  Description of Artificial Sequence: Synthetic oligonucleotide
uagcuagccaccauccaca

SEQ ID NO: 498989 - RNA, 19 nt, Artificial Sequence
  Description of Artificial Sequence: Synthetic oligonucleotide
guaaaagaacuguaaacua

SEQ ID NO: 498990 - RNA, 19 nt, Artificial Sequence
  Description of Artificial Sequence: Synthetic oligonucleotide
ucgagucucucgaucaucu

SEQ ID NO: 498991 - RNA, 19 nt, Artificial Sequence
  Description of Artificial Sequence: Synthetic oligonucleotide
ccgaauacuucguaaaugc

SEQ ID NO: 498992 - RNA, 19 nt, Artificial Sequence
  Description of Artificial Sequence: Synthetic oligonucleotide
agauauuuacucgcuucac

SEQ ID NO: 498993 - RNA, 19 nt, Artificial Sequence
  Description of Artificial Sequence: Synthetic oligonucleotide
cauuuucauuagcacacgc

SEQ ID NO: 498994 - RNA, 19 nt, Artificial Sequence
  Description of Artificial Sequence: Synthetic oligonucleotide
auauucuagaagaacuugu

SEQ ID NO: 498995 - RNA, 19 nt, Artificial Sequence
  Description of Artificial Sequence: Synthetic oligonucleotide
acuaggaacuuccuucagu

SEQ ID NO: 498996 - RNA, 19 nt, Artificial Sequence
  Description of Artificial Sequence: Synthetic oligonucleotide
aaacggaaccuggcgcucc

SEQ ID NO: 498997 - RNA, 19 nt, Artificial Sequence
  Description of Artificial Sequence: Synthetic oligonucleotide
aagcaaugugauauucuag

SEQ ID NO: 498998 - RNA, 19 nt, Artificial Sequence
  Description of Artificial Sequence: Synthetic oligonucleotide
ucacgguugcuucacuggc

SEQ ID NO: 498999 - RNA, 19 nt, Artificial Sequence
  Description of Artificial Sequence: Synthetic oligonucleotide
aacuucguccgaauacuuc

SEQ ID NO: 499000 - RNA, 19 nt, Artificial Sequence
  Description of Artificial Sequence: Synthetic oligonucleotide
uauuuacucgcuucacggu

SEQ ID NO: 499001 - RNA, 19 nt, Artificial Sequence
  Description of Artificial Sequence: Synthetic oligonucleotide
guauuaucaaguaagcugu

SEQ ID NO: 499002 - RNA, 19 nt, Artificial Sequence
  Description of Artificial Sequence: Synthetic oligonucleotide
ucuacgagaccgccuacga

SEQ ID NO: 499003 - RNA, 19 nt, Artificial Sequence
  Description of Artificial Sequence: Synthetic oligonucleotide
caguaggugucaaaguaug

SEQ ID NO: 499004 - RNA, 19 nt, Artificial Sequence
  Description of Artificial Sequence: Synthetic oligonucleotide
auucuuacucgaaccacac

SEQ ID NO: 499005 - RNA, 19 nt, Artificial Sequence
  Description of Artificial Sequence: Synthetic oligonucleotide
uggucauuugcucucgaau

SEQ ID NO: 499006 - RNA, 19 nt, Artificial Sequence
  Description of Artificial Sequence: Synthetic oligonucleotide
aaucacaucuuuugccauu

SEQ ID NO: 499007 - RNA, 19 nt, Artificial Sequence
  Description of Artificial Sequence: Synthetic oligonucleotide
caccauucaggacugcugc

SEQ ID NO: 499008 - RNA, 19 nt, Artificial Sequence
  Description of Artificial Sequence: Synthetic oligonucleotide
agucguucaaaugugacua

SEQ ID NO: 499009 - RNA, 19 nt, Artificial Sequence
  Description of Artificial Sequence: Synthetic oligonucleotide
uuacucgaaccacaccaga

SEQ ID NO: 499010 - RNA, 19 nt, Artificial Sequence
  Description of Artificial Sequence: Synthetic oligonucleotide
auuaacugaggcaguauca

SEQ ID NO: 499011 - RNA, 19 nt, Artificial Sequence
  Description of Artificial Sequence: Synthetic oligonucleotide
gaaccuggcgcuccgguug

SEQ ID NO: 499012 - RNA, 19 nt, Artificial Sequence
  Description of Artificial Sequence: Synthetic oligonucleotide
guacaagcacuauuguaac

SEQ ID NO: 499013 - RNA, 19 nt, Artificial Sequence
  Description of Artificial Sequence: Synthetic oligonucleotide
augucgagucucucgauca

SEQ ID NO: 499014 - RNA, 19 nt, Artificial Sequence
  Description of Artificial Sequence: Synthetic oligonucleotide
gauaaaucccuuguagaaa

SEQ ID NO: 499015 - RNA, 19 nt, Artificial Sequence
  Description of Artificial Sequence: Synthetic oligonucleotide
ugaugagauucgcuggcgu

SEQ ID NO: 499016 - RNA, 19 nt, Artificial Sequence
  Description of Artificial Sequence: Synthetic oligonucleotide
uccauagauucuaaauguu

SEQ ID NO: 499017 - RNA, 19 nt, Artificial Sequence
  Description of Artificial Sequence: Synthetic oligonucleotide
gaauuccaaauggaggaac

SEQ ID NO: 499018 - RNA, 19 nt, Artificial Sequence
  Description of Artificial Sequence: Synthetic oligonucleotide
aaaucuucucucacaacaa

SEQ ID NO: 499019 - RNA, 19 nt, Artificial Sequence
  Description of Artificial Sequence: Synthetic oligonucleotide
gcuuguacaagcacuauug

SEQ ID NO: 499020 - RNA, 19 nt, Artificial Sequence
  Description of Artificial Sequence: Synthetic oligonucleotide
gaugucgagucucucgauc

SEQ ID NO: 499021 - RNA, 19 nt, Artificial Sequence
  Description of Artificial Sequence: Synthetic oligonucleotide
uuagcacacgccucucuca

SEQ ID NO: 499022 - RNA, 19 nt, Artificial Sequence
  Description of Artificial Sequence: Synthetic oligonucleotide
gugcauucuaaaugcuuag

SEQ ID NO: 499023 - RNA, 19 nt, Artificial Sequence
  Description of Artificial Sequence: Synthetic oligonucleotide
uuuucgcucagauucuguu

SEQ ID NO: 499024 - RNA, 19 nt, Artificial Sequence
  Description of Artificial Sequence: Synthetic oligonucleotide
uucuuacucgaaccacacc

SEQ ID NO: 499025 - RNA, 19 nt, Artificial Sequence
  Description of Artificial Sequence: Synthetic oligonucleotide
aacggaaccuggcgcuccg

SEQ ID NO: 499026 - RNA, 19 nt, Artificial Sequence
  Description of Artificial Sequence: Synthetic oligonucleotide
aaccggagguguaauuagg

SEQ ID NO: 499027 - RNA, 19 nt, Artificial Sequence
  Description of Artificial Sequence: Synthetic oligonucleotide
uggugguaaucgaacuuca

SEQ ID NO: 499028 - RNA, 19 nt, Artificial Sequence
  Description of Artificial Sequence: Synthetic oligonucleotide
uauaucagguggugguggu

SEQ ID NO: 499029 - RNA, 19 nt, Artificial Sequence
  Description of Artificial Sequence: Synthetic oligonucleotide
uccugcuaaugaccaauca

SEQ ID NO: 499030 - RNA, 19 nt, Artificial Sequence
  Description of Artificial Sequence: Synthetic oligonucleotide
uuuugauugacaggccgaa

SEQ ID NO: 499031 - RNA, 19 nt, Artificial Sequence
  Description of Artificial Sequence: Synthetic oligonucleotide
uacucgaaccacaccagau

SEQ ID NO: 499032 - RNA, 19 nt, Artificial Sequence
  Description of Artificial Sequence: Synthetic oligonucleotide
ucucuagguaguuuauuuu

SEQ ID NO: 499033 - RNA, 19 nt, Artificial Sequence
  Description of Artificial Sequence: Synthetic oligonucleotide
uaagacuggcgauccauau

SEQ ID NO: 499034 - RNA, 19 nt, Artificial Sequence
  Description of Artificial Sequence: Synthetic oligonucleotide
auccgaacuuuagcuagcc

SEQ ID NO: 499035 - RNA, 19 nt, Artificial Sequence
  Description of Artificial Sequence: Synthetic oligonucleotide
gugacucuagcccauuuuc

SEQ ID NO: 499036 - RNA, 19 nt, Artificial Sequence
  Description of Artificial Sequence: Synthetic oligonucleotide
aggcguuccauucucaguu

SEQ ID NO: 499037 - RNA, 19 nt, Artificial Sequence
  Description of Artificial Sequence: Synthetic oligonucleotide
uucaguuaugaaacaccau

SEQ ID NO: 499038 - RNA, 19 nt, Artificial Sequence
  Description of Artificial Sequence: Synthetic oligonucleotide
ucaucaguccuccgucuac

SEQ ID NO: 499039 - RNA, 19 nt, Artificial Sequence
  Description of Artificial Sequence: Synthetic oligonucleotide
gacgguuaguacugugaug

SEQ ID NO: 499040 - RNA, 19 nt, Artificial Sequence
  Description of Artificial Sequence: Synthetic oligonucleotide
aaagccccguuggagccac

SEQ ID NO: 499041 - RNA, 19 nt, Artificial Sequence
  Description of Artificial Sequence: Synthetic oligonucleotide
gucaaaguauguuuaacau

SEQ ID NO: 499042 - RNA, 19 nt, Artificial Sequence
  Description of Artificial Sequence: Synthetic oligonucleotide
agccacgaacccuccaccg

SEQ ID NO: 499043 - RNA, 19 nt, Artificial Sequence
  Description of Artificial Sequence: Synthetic oligonucleotide
aggaacugaaagugcgaug

SEQ ID NO: 499044 - RNA, 19 nt, Artificial Sequence
  Description of Artificial Sequence: Synthetic oligonucleotide
caccacgugguccaccacg

SEQ ID NO: 499045 - RNA, 19 nt, Artificial Sequence
  Description of Artificial Sequence: Synthetic oligonucleotide
uuugauugacaggccgaag

SEQ ID NO: 499046 - RNA, 19 nt, Artificial Sequence
  Description of Artificial Sequence: Synthetic oligonucleotide
ccgaacuuuagcuagccac

SEQ ID NO: 499047 - RNA, 19 nt, Artificial Sequence
  Description of Artificial Sequence: Synthetic oligonucleotide
uggcgauccauauucuauc

SEQ ID NO: 499048 - RNA, 19 nt, Artificial Sequence
  Description of Artificial Sequence: Synthetic oligonucleotide
cucucgaauauaccucuac

SEQ ID NO: 499049 - RNA, 19 nt, Artificial Sequence
  Description of Artificial Sequence: Synthetic oligonucleotide
ucuucuccuggaguacgcg

SEQ ID NO: 499050 - RNA, 19 nt, Artificial Sequence
  Description of Artificial Sequence: Synthetic oligonucleotide
uggccgacaguaucauuag

SEQ ID NO: 499051 - RNA, 19 nt, Artificial Sequence
  Description of Artificial Sequence: Synthetic oligonucleotide
cugcuaaugaccaaucacu

SEQ ID NO: 499052 - RNA, 19 nt, Artificial Sequence
  Description of Artificial Sequence: Synthetic oligonucleotide
ucgccagaagcgcuaguug

SEQ ID NO: 499053 - RNA, 19 nt, Artificial Sequence
  Description of Artificial Sequence: Synthetic oligonucleotide
guuaguacugugaugagau

SEQ ID NO: 499054 - RNA, 19 nt, Artificial Sequence
  Description of Artificial Sequence: Synthetic oligonucleotide
ucgcucagauucuguuucg

SEQ ID NO: 499055 - RNA, 19 nt, Artificial Sequence
  Description of Artificial Sequence: Synthetic oligonucleotide
uuacucgcuucacgguugc

SEQ ID NO: 499056 - RNA, 19 nt, Artificial Sequence
  Description of Artificial Sequence: Synthetic oligonucleotide
auacuucguaaaugcauau

SEQ ID NO: 499057 - RNA, 19 nt, Artificial Sequence
  Description of Artificial Sequence: Synthetic oligonucleotide
acuaccauguguuccuauu

SEQ ID NO: 499058 - RNA, 19 nt, Artificial Sequence
  Description of Artificial Sequence: Synthetic oligonucleotide
guaucagauucagucauuc

SEQ ID NO: 499059 - RNA, 19 nt, Artificial Sequence
  Description of Artificial Sequence: Synthetic oligonucleotide
guaauguaaaagaacugua

SEQ ID NO: 499060 - RNA, 19 nt, Artificial Sequence
  Description of Artificial Sequence: Synthetic oligonucleotide
cuuaagauauuuacucgcu

SEQ ID NO: 499061 - RNA, 19 nt, Artificial Sequence
  Description of Artificial Sequence: Synthetic oligonucleotide
cauccgaacuuuagcuagc

SEQ ID NO: 499062 - RNA, 19 nt, Artificial Sequence
  Description of Artificial Sequence: Synthetic oligonucleotide
cuaaaugcuuaguggccuc

SEQ ID NO: 499063 - RNA, 19 nt, Artificial Sequence
  Description of Artificial Sequence: Synthetic oligonucleotide
accggagguguaauuaggg

SEQ ID NO: 499064 - RNA, 19 nt, Artificial Sequence
  Description of Artificial Sequence: Synthetic oligonucleotide
caggaaccuuccuagcuug

SEQ ID NO: 499065 - RNA, 19 nt, Artificial Sequence
  Description of Artificial Sequence: Synthetic oligonucleotide
agacgguacuuucaucagu

SEQ ID NO: 499066 - RNA, 19 nt, Artificial Sequence
  Description of Artificial Sequence: Synthetic oligonucleotide
auaaccggagguguaauua

SEQ ID NO: 499067 - RNA, 19 nt, Artificial Sequence
  Description of Artificial Sequence: Synthetic oligonucleotide
uccccuuucugaauuccaa

SEQ ID NO: 499068 - RNA, 19 nt, Artificial Sequence
  Description of Artificial Sequence: Synthetic oligonucleotide
aacuuuagcuagccaccau

SEQ ID NO: 499069 - RNA, 19 nt, Artificial Sequence
  Description of Artificial Sequence: Synthetic oligonucleotide
uuccacuauaagaccuaga

SEQ ID NO: 499070 - RNA, 19 nt, Artificial Sequence
  Description of Artificial Sequence: Synthetic oligonucleotide
auuaucaaguaagcuguau

SEQ ID NO: 499071 - RNA, 19 nt, Artificial Sequence
  Description of Artificial Sequence: Synthetic oligonucleotide
ucguccgaauacuucguaa

SEQ ID NO: 499072 - RNA, 19 nt, Artificial Sequence
  Description of Artificial Sequence: Synthetic oligonucleotide
cucgcuucacgguugcuuc

SEQ ID NO: 499073 - RNA, 19 nt, Artificial Sequence
  Description of Artificial Sequence: Synthetic oligonucleotide
uguuucggagggguuagac

SEQ ID NO: 499074 - RNA, 19 nt, Artificial Sequence
  Description of Artificial Sequence: Synthetic oligonucleotide
ugagauucgcuggcgucag

SEQ ID NO: 499075 - RNA, 19 nt, Artificial Sequence
  Description of Artificial Sequence: Synthetic oligonucleotide
agauucgcuggcgucagug

SEQ ID NO: 499076 - RNA, 19 nt, Artificial Sequence
  Description of Artificial Sequence: Synthetic oligonucleotide
uuucgcucagauucuguuu

SEQ ID NO: 499077 - RNA, 19 nt, Artificial Sequence
  Description of Artificial Sequence: Synthetic oligonucleotide
agcacuauuguaacuguaa

SEQ ID NO: 499078 - RNA, 19 nt, Artificial Sequence
  Description of Artificial Sequence: Synthetic oligonucleotide
agcuuguacaagcacuauu

SEQ ID NO: 499079 - RNA, 19 nt, Artificial Sequence
  Description of Artificial Sequence: Synthetic oligonucleotide
acucgaaccacaccagauu

SEQ ID NO: 499080 - RNA, 19 nt, Artificial Sequence
  Description of Artificial Sequence: Synthetic oligonucleotide
cugugagggagucuucaug

SEQ ID NO: 499081 - RNA, 19 nt, Artificial Sequence
  Description of Artificial Sequence: Synthetic oligonucleotide
cuggccgacaguaucauua

SEQ ID NO: 499082 - RNA, 19 nt, Artificial Sequence
  Description of Artificial Sequence: Synthetic oligonucleotide
caucaguccuccgucuacg

SEQ ID NO: 499083 - RNA, 19 nt, Artificial Sequence
  Description of Artificial Sequence: Synthetic oligonucleotide
gaaaagcugcugcgaguug

SEQ ID NO: 499084 - RNA, 19 nt, Artificial Sequence
  Description of Artificial Sequence: Synthetic oligonucleotide
uacgacgguuaguacugug

SEQ ID NO: 499085 - RNA, 19 nt, Artificial Sequence
  Description of Artificial Sequence: Synthetic oligonucleotide
ggaucuuugagcacagaac

SEQ ID NO: 499086 - RNA, 19 nt, Artificial Sequence
  Description of Artificial Sequence: Synthetic oligonucleotide
cuagaaccuuguacagaag

SEQ ID NO: 499087 - RNA, 19 nt, Artificial Sequence
  Description of Artificial Sequence: Synthetic oligonucleotide
ccugcuaaugaccaaucac

SEQ ID NO: 499088 - RNA, 19 nt, Artificial Sequence
  Description of Artificial Sequence: Synthetic oligonucleotide
uucaucaguccuccgucua

SEQ ID NO: 499089 - RNA, 19 nt, Artificial Sequence
  Description of Artificial Sequence: Synthetic oligonucleotide
uaauuagggccccgacgac

SEQ ID NO: 499090 - RNA, 19 nt, Artificial Sequence
  Description of Artificial Sequence: Synthetic oligonucleotide
gcuuguuguauguuacuac

SEQ ID NO: 499091 - RNA, 19 nt, Artificial Sequence
  Description of Artificial Sequence: Synthetic oligonucleotide
cugaugucgagucucucga

SEQ ID NO: 499092 - RNA, 19 nt, Artificial Sequence
  Description of Artificial Sequence: Synthetic oligonucleotide
aguacgcgguagcuuagga

SEQ ID NO: 499093 - RNA, 19 nt, Artificial Sequence
  Description of Artificial Sequence: Synthetic oligonucleotide
ccuacgacgguuaguacug

SEQ ID NO: 499094 - RNA, 19 nt, Artificial Sequence
  Description of Artificial Sequence: Synthetic oligonucleotide
uacuucguaaaugcauauc

SEQ ID NO: 499095 - RNA, 19 nt, Artificial Sequence
  Description of Artificial Sequence: Synthetic oligonucleotide
guauggauugcugucugga

SEQ ID NO: 499096 - RNA, 19 nt, Artificial Sequence
  Description of Artificial Sequence: Synthetic oligonucleotide
gucuacgagaccgccuacg

SEQ ID NO: 499097 - RNA, 19 nt, Artificial Sequence
  Description of Artificial Sequence: Synthetic oligonucleotide
gaucccuccccuuucugaa

SEQ ID NO: 499098 - RNA, 19 nt, Artificial Sequence
  Description of Artificial Sequence: Synthetic oligonucleotide
cugcgaguuguuuugugca

SEQ ID NO: 499099 - RNA, 19 nt, Artificial Sequence
  Description of Artificial Sequence: Synthetic oligonucleotide
caagcuuguacaagcacua

SEQ ID NO: 499100 - RNA, 19 nt, Artificial Sequence
  Description of Artificial Sequence: Synthetic oligonucleotide
gcugcgaguuguuuugugc

SEQ ID NO: 499101 - RNA, 19 nt, Artificial Sequence
  Description of Artificial Sequence: Synthetic oligonucleotide
gauucuguuucggaggggu

SEQ ID NO: 499102 - RNA, 19 nt, Artificial Sequence
  Description of Artificial Sequence: Synthetic oligonucleotide
acaguaggugucaaaguau

SEQ ID NO: 499103 - RNA, 19 nt, Artificial Sequence
  Description of Artificial Sequence: Synthetic oligonucleotide
cggagguguaauuagggcc

SEQ ID NO: 499104 - RNA, 19 nt, Artificial Sequence
  Description of Artificial Sequence: Synthetic oligonucleotide
cuaggcccauuaaaucuuc

SEQ ID NO: 499105 - RNA, 19 nt, Artificial Sequence
  Description of Artificial Sequence: Synthetic oligonucleotide
auucaggacugcugcuucu

SEQ ID NO: 499106 - RNA, 19 nt, Artificial Sequence
  Description of Artificial Sequence: Synthetic oligonucleotide
acgugguccaccacgaccu

SEQ ID NO: 499107 - RNA, 19 nt, Artificial Sequence
  Description of Artificial Sequence: Synthetic oligonucleotide
uggaccauuuauugccuuu

SEQ ID NO: 499108 - RNA, 19 nt, Artificial Sequence
  Description of Artificial Sequence: Synthetic oligonucleotide
gcugcugcgaguuguuuug

SEQ ID NO: 499109 - RNA, 19 nt, Artificial Sequence
  Description of Artificial Sequence: Synthetic oligonucleotide
ugcugcgaguuguuuugug

SEQ ID NO: 499110 - RNA, 19 nt, Artificial Sequence
  Description of Artificial Sequence: Synthetic oligonucleotide
ugcgaguuguuuugugcau

SEQ ID NO: 499111 - RNA, 19 nt, Artificial Sequence
  Description of Artificial Sequence: Synthetic oligonucleotide
ucuagcccauuuucauuaa

SEQ ID NO: 499112 - RNA, 19 nt, Artificial Sequence
  Description of Artificial Sequence: Synthetic oligonucleotide
uucguccgaauacuucgua

SEQ ID NO: 499113 - RNA, 19 nt, Artificial Sequence
  Description of Artificial Sequence: Synthetic oligonucleotide
uccgucuacgagaccgccu

SEQ ID NO: 499114 - RNA, 19 nt, Artificial Sequence
  Description of Artificial Sequence: Synthetic oligonucleotide
auuagggccccgacgaccu

SEQ ID NO: 499115 - RNA, 19 nt, Artificial Sequence
  Description of Artificial Sequence: Synthetic oligonucleotide
gaguacgcgguagcuuagg

SEQ ID NO: 499116 - RNA, 19 nt, Artificial Sequence
  Description of Artificial Sequence: Synthetic oligonucleotide
gagggguuagacagcucag

SEQ ID NO: 499117 - RNA, 19 nt, Artificial Sequence
  Description of Artificial Sequence: Synthetic oligonucleotide
gaagaaggucugaaaccca

SEQ ID NO: 499118 - RNA, 19 nt, Artificial Sequence
  Description of Artificial Sequence: Synthetic oligonucleotide
gcuaaugaccaaucacuca

SEQ ID NO: 499119 - RNA, 19 nt, Artificial Sequence
  Description of Artificial Sequence: Synthetic oligonucleotide
cuauuguaacuguaaugua

SEQ ID NO: 499120 - RNA, 19 nt, Artificial Sequence
  Description of Artificial Sequence: Synthetic oligonucleotide
agcuuguuguauguuacua

SEQ ID NO: 499121 - RNA, 19 nt, Artificial Sequence
  Description of Artificial Sequence: Synthetic oligonucleotide
guguaauuagggccccgac

SEQ ID NO: 499122 - RNA, 19 nt, Artificial Sequence
  Description of Artificial Sequence: Synthetic oligonucleotide
cccguuggagccacgaacc

SEQ ID NO: 499123 - RNA, 19 nt, Artificial Sequence
  Description of Artificial Sequence: Synthetic oligonucleotide
gauuccugggaacuugaau

SEQ ID NO: 499124 - RNA, 19 nt, Artificial Sequence
  Description of Artificial Sequence: Synthetic oligonucleotide
ugucgagucucucgaucau

SEQ ID NO: 499125 - RNA, 19 nt, Artificial Sequence
  Description of Artificial Sequence: Synthetic oligonucleotide
acgagaccgccuacgacgg

SEQ ID NO: 499126 - RNA, 19 nt, Artificial Sequence
  Description of Artificial Sequence: Synthetic oligonucleotide
uuaguacugugaugagauu

SEQ ID NO: 499127 - RNA, 19 nt, Artificial Sequence
  Description of Artificial Sequence: Synthetic oligonucleotide
cuacgagaccgccuacgac

SEQ ID NO: 499128 - RNA, 19 nt, Artificial Sequence
  Description of Artificial Sequence: Synthetic oligonucleotide
acgacgguuaguacuguga

SEQ ID NO: 499129 - RNA, 19 nt, Artificial Sequence
  Description of Artificial Sequence: Synthetic oligonucleotide
acuggcgauccauauucua

SEQ ID NO: 499130 - RNA, 19 nt, Artificial Sequence
  Description of Artificial Sequence: Synthetic oligonucleotide
auaagaccuagaaccuugu

SEQ ID NO: 499131 - RNA, 19 nt, Artificial Sequence
  Description of Artificial Sequence: Synthetic oligonucleotide
caaguaagcuguauggauu

SEQ ID NO: 499132 - RNA, 19 nt, Artificial Sequence
  Description of Artificial Sequence: Synthetic oligonucleotide
cuccugcuaaugaccaauc

SEQ ID NO: 499133 - RNA, 19 nt, Artificial Sequence
  Description of Artificial Sequence: Synthetic oligonucleotide
cucgaauauaccucuacuu

SEQ ID NO: 499134 - RNA, 19 nt, Artificial Sequence
  Description of Artificial Sequence: Synthetic oligonucleotide
ucguucaaaugugacuauu

SEQ ID NO: 499135 - RNA, 19 nt, Artificial Sequence
  Description of Artificial Sequence: Synthetic oligonucleotide
cgaauauaccucuacuuca

SEQ ID NO: 499136 - RNA, 19 nt, Artificial Sequence
  Description of Artificial Sequence: Synthetic oligonucleotide
uacuaccauguguuccuau

SEQ ID NO: 499137 - RNA, 19 nt, Artificial Sequence
  Description of Artificial Sequence: Synthetic oligonucleotide
guacugugaugagauucgc

SEQ ID NO: 499138 - RNA, 19 nt, Artificial Sequence
  Description of Artificial Sequence: Synthetic oligonucleotide
ugaugucgagucucucgau

SEQ ID NO: 499139 - RNA, 19 nt, Artificial Sequence
  Description of Artificial Sequence: Synthetic oligonucleotide
gugcgauguaagacuggcg

SEQ ID NO: 499140 - RNA, 19 nt, Artificial Sequence
  Description of Artificial Sequence: Synthetic oligonucleotide
cugaucugauucuguauua

SEQ ID NO: 499141 - RNA, 19 nt, Artificial Sequence
  Description of Artificial Sequence: Synthetic oligonucleotide
ggaacuuccuucaguuaug

SEQ ID NO: 499142 - RNA, 19 nt, Artificial Sequence
  Description of Artificial Sequence: Synthetic oligonucleotide
uaaacggaaccuggcgcuc

SEQ ID NO: 499143 - RNA, 19 nt, Artificial Sequence
  Description of Artificial Sequence: Synthetic oligonucleotide
gguuaguacugugaugaga

SEQ ID NO: 499144 - RNA, 19 nt, Artificial Sequence
  Description of Artificial Sequence: Synthetic oligonucleotide
gugguaaucgaacuucauu

SEQ ID NO: 499145 - RNA, 19 nt, Artificial Sequence
  Description of Artificial Sequence: Synthetic oligonucleotide
guaucauuagcuggguagu

SEQ ID NO: 499146 - RNA, 19 nt, Artificial Sequence
  Description of Artificial Sequence: Synthetic oligonucleotide
uuggaccauuuauugccuu

SEQ ID NO: 499147 - RNA, 19 nt, Artificial Sequence
  Description of Artificial Sequence: Synthetic oligonucleotide
guacgcgguagcuuaggaa

SEQ ID NO: 499148 - RNA, 19 nt, Artificial Sequence
  Description of Artificial Sequence: Synthetic oligonucleotide
aucgccagaagcgcuaguu

SEQ ID NO: 499149 - RNA, 19 nt, Artificial Sequence
  Description of Artificial Sequence: Synthetic oligonucleotide
gcaggcguuccauucucag

SEQ ID NO: 499150 - RNA, 19 nt, Artificial Sequence
  Description of Artificial Sequence: Synthetic oligonucleotide
ccggagguguaauuagggc

SEQ ID NO: 499151 - RNA, 19 nt, Artificial Sequence
  Description of Artificial Sequence: Synthetic oligonucleotide
cuguauuaucaaguaagcu

SEQ ID NO: 499152 - RNA, 19 nt, Artificial Sequence
  Description of Artificial Sequence: Synthetic oligonucleotide
ccaacaagauuccugggaa

SEQ ID NO: 499153 - RNA, 19 nt, Artificial Sequence
  Description of Artificial Sequence: Synthetic oligonucleotide
acgaacccuccaccgucag

SEQ ID NO: 499154 - RNA, 19 nt, Artificial Sequence
  Description of Artificial Sequence: Synthetic oligonucleotide
ucauuagcacacgccucuc

SEQ ID NO: 499155 - RNA, 19 nt, Artificial Sequence
  Description of Artificial Sequence: Synthetic oligonucleotide
agguguaauuagggccccg

SEQ ID NO: 499156 - RNA, 19 nt, Artificial Sequence
  Description of Artificial Sequence: Synthetic oligonucleotide
gauucgcuggcgucagugu

SEQ ID NO: 499157 - RNA, 19 nt, Artificial Sequence
  Description of Artificial Sequence: Synthetic oligonucleotide
acucgcuucacgguugcuu

SEQ ID NO: 499158 - RNA, 19 nt, Artificial Sequence
  Description of Artificial Sequence: Synthetic oligonucleotide
aaauuccaagaaaccccua

SEQ ID NO: 499159 - RNA, 19 nt, Artificial Sequence
  Description of Artificial Sequence: Synthetic oligonucleotide
cugcucugagacucagcuc

SEQ ID NO: 499160 - RNA, 19 nt, Artificial Sequence
  Description of Artificial Sequence: Synthetic oligonucleotide
gaggaacugaaagugcgau

SEQ ID NO: 499161 - RNA, 19 nt, Artificial Sequence
  Description of Artificial Sequence: Synthetic oligonucleotide
guaagcuguauggauugcu

SEQ ID NO: 499162 - RNA, 19 nt, Artificial Sequence
  Description of Artificial Sequence: Synthetic oligonucleotide
cacacgccucucucaaauc

SEQ ID NO: 499163 - RNA, 19 nt, Artificial Sequence
  Description of Artificial Sequence: Synthetic oligonucleotide
cuggcgauccauauucuau

SEQ ID NO: 499164 - RNA, 19 nt, Artificial Sequence
  Description of Artificial Sequence: Synthetic oligonucleotide
aguaucagauucagucauu

SEQ ID NO: 499165 - RNA, 19 nt, Artificial Sequence
  Description of Artificial Sequence: Synthetic oligonucleotide
ggccgaagucguucaaaug

SEQ ID NO: 499166 - RNA, 19 nt, Artificial Sequence
  Description of Artificial Sequence: Synthetic oligonucleotide
ggaucccuccccuuucuga

SEQ ID NO: 499167 - RNA, 19 nt, Artificial Sequence
  Description of Artificial Sequence: Synthetic oligonucleotide
gaccgccuacgacgguuag

SEQ ID NO: 499168 - RNA, 19 nt, Artificial Sequence
  Description of Artificial Sequence: Synthetic oligonucleotide
aggcacaucugaugauaua

SEQ ID NO: 499169 - RNA, 19 nt, Artificial Sequence
  Description of Artificial Sequence: Synthetic oligonucleotide
caucaacuucguccgaaua

SEQ ID NO: 499170 - RNA, 19 nt, Artificial Sequence
  Description of Artificial Sequence: Synthetic oligonucleotide
ggcgucagugucugcaguc

SEQ ID NO: 499171 - RNA, 19 nt, Artificial Sequence
  Description of Artificial Sequence: Synthetic oligonucleotide
cuccgucuacgagaccgcc

SEQ ID NO: 499172 - RNA, 19 nt, Artificial Sequence
  Description of Artificial Sequence: Synthetic oligonucleotide
guaagacuggcgauccaua

SEQ ID NO: 499173 - RNA, 19 nt, Artificial Sequence
  Description of Artificial Sequence: Synthetic oligonucleotide
gguguaauuagggccccga

SEQ ID NO: 499174 - RNA, 19 nt, Artificial Sequence
  Description of Artificial Sequence: Synthetic oligonucleotide
ccaagaaaccccuagcuuu

SEQ ID NO: 499175 - RNA, 19 nt, Artificial Sequence
  Description of Artificial Sequence: Synthetic oligonucleotide
caagaaaccccuagcuuuu

SEQ ID NO: 499176 - RNA, 19 nt, Artificial Sequence
  Description of Artificial Sequence: Synthetic oligonucleotide
gucgagucucucgaucauc

SEQ ID NO: 499177 - RNA, 19 nt, Artificial Sequence
  Description of Artificial Sequence: Synthetic oligonucleotide
gccuacgacgguuaguacu

SEQ ID NO: 499178 - RNA, 19 nt, Artificial Sequence
  Description of Artificial Sequence: Synthetic oligonucleotide
cacgaacccuccaccguca

SEQ ID NO: 499179 - RNA, 19 nt, Artificial Sequence
  Description of Artificial Sequence: Synthetic oligonucleotide
gccgacaguaucauuagcu

SEQ ID NO: 499180 - RNA, 19 nt, Artificial Sequence
  Description of Artificial Sequence: Synthetic oligonucleotide
ugggcgucuccugcugucu

SEQ ID NO: 499181 - RNA, 19 nt, Artificial Sequence
  Description of Artificial Sequence: Synthetic oligonucleotide
cuucaucaguccuccgucu

SEQ ID NO: 499182 - RNA, 19 nt, Artificial Sequence
  Description of Artificial Sequence: Synthetic oligonucleotide
cgaguuguuuugugcauuc

SEQ ID NO: 499183 - RNA, 19 nt, Artificial Sequence
  Description of Artificial Sequence: Synthetic oligonucleotide
cguaaaugcauaucacuua

SEQ ID NO: 499184 - RNA, 19 nt, Artificial Sequence
  Description of Artificial Sequence: Synthetic oligonucleotide
agcacacgccucucucaaa

SEQ ID NO: 499185 - RNA, 19 nt, Artificial Sequence
  Description of Artificial Sequence: Synthetic oligonucleotide
ggcgauccauauucuaucu

SEQ ID NO: 499186 - RNA, 19 nt, Artificial Sequence
  Description of Artificial Sequence: Synthetic oligonucleotide
ggaggauuugccaccacgu

SEQ ID NO: 499187 - RNA, 19 nt, Artificial Sequence
  Description of Artificial Sequence: Synthetic oligonucleotide
ccuauugcuaggcccauua

SEQ ID NO: 499188 - RNA, 19 nt, Artificial Sequence
  Description of Artificial Sequence: Synthetic oligonucleotide
aagcgcuaguuggaccauu

SEQ ID NO: 499189 - RNA, 19 nt, Artificial Sequence
  Description of Artificial Sequence: Synthetic oligonucleotide
cuucguccgaauacuucgu

SEQ ID NO: 499190 - RNA, 19 nt, Artificial Sequence
  Description of Artificial Sequence: Synthetic oligonucleotide
acuggccgacaguaucauu

SEQ ID NO: 499191 - RNA, 19 nt, Artificial Sequence
  Description of Artificial Sequence: Synthetic oligonucleotide
agcgcuaguuggaccauuu

SEQ ID NO: 499192 - RNA, 19 nt, Artificial Sequence
  Description of Artificial Sequence: Synthetic oligonucleotide
gcacuauuguaacuguaau

SEQ ID NO: 499193 - RNA, 19 nt, Artificial Sequence
  Description of Artificial Sequence: Synthetic oligonucleotide
ccacgaacccuccaccguc

SEQ ID NO: 499194 - RNA, 19 nt, Artificial Sequence
  Description of Artificial Sequence: Synthetic oligonucleotide
gcuaguuggaccauuuauu

SEQ ID NO: 499195 - RNA, 19 nt, Artificial Sequence
  Description of Artificial Sequence: Synthetic oligonucleotide
ggaguacgcgguagcuuag

SEQ ID NO: 499196 - RNA, 19 nt, Artificial Sequence
  Description of Artificial Sequence: Synthetic oligonucleotide
cauuagcacacgccucucu

SEQ ID NO: 499197 - RNA, 19 nt, Artificial Sequence
  Description of Artificial Sequence: Synthetic oligonucleotide
caguaucauuagcugggua

SEQ ID NO: 499198 - RNA, 19 nt, Artificial Sequence
  Description of Artificial Sequence: Synthetic oligonucleotide
cacgccucucucaaauccu

SEQ ID NO: 499199 - RNA, 19 nt, Artificial Sequence
  Description of Artificial Sequence: Synthetic oligonucleotide
gcucagaauuuguaccaua

SEQ ID NO: 499200 - RNA, 19 nt, Artificial Sequence
  Description of Artificial Sequence: Synthetic oligonucleotide
uuagggccccgacgaccuc

SEQ ID NO: 499201 - RNA, 19 nt, Artificial Sequence
  Description of Artificial Sequence: Synthetic oligonucleotide
accgccuacgacgguuagu

SEQ ID NO: 499202 - RNA, 19 nt, Artificial Sequence
  Description of Artificial Sequence: Synthetic oligonucleotide
cauaaccggagguguaauu

SEQ ID NO: 499203 - RNA, 19 nt, Artificial Sequence
  Description of Artificial Sequence: Synthetic oligonucleotide
cuauaagaccuagaaccuu

SEQ ID NO: 499204 - RNA, 19 nt, Artificial Sequence
  Description of Artificial Sequence: Synthetic oligonucleotide
acucagcucuagaaauaua

SEQ ID NO: 499205 - RNA, 19 nt, Artificial Sequence
  Description of Artificial Sequence: Synthetic oligonucleotide
cauggacaucuuugauaaa

SEQ ID NO: 499206 - RNA, 19 nt, Artificial Sequence
  Description of Artificial Sequence: Synthetic oligonucleotide
gucguucaaaugugacuau

SEQ ID NO: 499207 - RNA, 19 nt, Artificial Sequence
  Description of Artificial Sequence: Synthetic oligonucleotide
agccccguuggagccacga

SEQ ID NO: 499208 - RNA, 19 nt, Artificial Sequence
  Description of Artificial Sequence: Synthetic oligonucleotide
aggcaguaucagauucagu

SEQ ID NO: 499209 - RNA, 19 nt, Artificial Sequence
  Description of Artificial Sequence: Synthetic oligonucleotide
uucaggcccucugguggaa

SEQ ID NO: 499210 - RNA, 19 nt, Artificial Sequence
  Description of Artificial Sequence: Synthetic oligonucleotide
ccguuggagccacgaaccc

SEQ ID NO: 499211 - RNA, 19 nt, Artificial Sequence
  Description of Artificial Sequence: Synthetic oligonucleotide
gcugucucgcugaugucga

SEQ ID NO: 499212 - RNA, 19 nt, Artificial Sequence
  Description of Artificial Sequence: Synthetic oligonucleotide
cguccgaauacuucguaaa

SEQ ID NO: 499213 - RNA, 19 nt, Artificial Sequence
  Description of Artificial Sequence: Synthetic oligonucleotide
gagaccgccuacgacgguu

SEQ ID NO: 499214 - RNA, 19 nt, Artificial Sequence
  Description of Artificial Sequence: Synthetic oligonucleotide
acgcgguagcuuaggaauu

SEQ ID NO: 499215 - RNA, 19 nt, Artificial Sequence
  Description of Artificial Sequence: Synthetic oligonucleotide
gcacacgccucucucaaau

SEQ ID NO: 499216 - RNA, 19 nt, Artificial Sequence
  Description of Artificial Sequence: Synthetic oligonucleotide
gauugcugucuggaucuuu

SEQ ID NO: 499217 - RNA, 19 nt, Artificial Sequence
  Description of Artificial Sequence: Synthetic oligonucleotide
caacuucguccgaauacuu

SEQ ID NO: 499218 - RNA, 19 nt, Artificial Sequence
  Description of Artificial Sequence: Synthetic oligonucleotide
cgguugccaauuauuuuca

SEQ ID NO: 499219 - RNA, 19 nt, Artificial Sequence
  Description of Artificial Sequence: Synthetic oligonucleotide
agaccgccuacgacgguua

SEQ ID NO: 499220 - RNA, 19 nt, Artificial Sequence
  Description of Artificial Sequence: Synthetic oligonucleotide
gcaguuacuccaggaaccu

SEQ ID NO: 499221 - RNA, 19 nt, Artificial Sequence
  Description of Artificial Sequence: Synthetic oligonucleotide
cgauccauauucuaucuuu

SEQ ID NO: 499222 - RNA, 19 nt, Artificial Sequence
  Description of Artificial Sequence: Synthetic oligonucleotide
gcgauguaagacuggcgau

SEQ ID NO: 499223 - RNA, 19 nt, Artificial Sequence
  Description of Artificial Sequence: Synthetic oligonucleotide
cacagaacugauggaggau

SEQ ID NO: 499224 - RNA, 19 nt, Artificial Sequence
  Description of Artificial Sequence: Synthetic oligonucleotide
ccgucuacgagaccgccua

SEQ ID NO: 499225 - RNA, 19 nt, Artificial Sequence
  Description of Artificial Sequence: Synthetic oligonucleotide
guccuccgucuacgagacc

SEQ ID NO: 499226 - RNA, 19 nt, Artificial Sequence
  Description of Artificial Sequence: Synthetic oligonucleotide
aagccccguuggagccacg

SEQ ID NO: 499227 - RNA, 19 nt, Artificial Sequence
  Description of Artificial Sequence: Synthetic oligonucleotide
ggguaguuucaggaugaua

SEQ ID NO: 499228 - RNA, 19 nt, Artificial Sequence
  Description of Artificial Sequence: Synthetic oligonucleotide
gcguuccauucucaguugu

SEQ ID NO: 499229 - RNA, 19 nt, Artificial Sequence
  Description of Artificial Sequence: Synthetic oligonucleotide
gccccgacgaccucugccu

SEQ ID NO: 499230 - RNA, 19 nt, Artificial Sequence
  Description of Artificial Sequence: Synthetic oligonucleotide
gaagcgcuaguuggaccau

SEQ ID NO: 499231 - RNA, 19 nt, Artificial Sequence
  Description of Artificial Sequence: Synthetic oligonucleotide
gcgguagcuuaggaauuuc

SEQ ID NO: 499232 - RNA, 19 nt, Artificial Sequence
  Description of Artificial Sequence: Synthetic oligonucleotide
gcuaggcccauuaaaucuu

SEQ ID NO: 499233 - RNA, 19 nt, Artificial Sequence
  Description of Artificial Sequence: Synthetic oligonucleotide
ccgccuacgacgguuagua

SEQ ID NO: 499234 - RNA, 19 nt, Artificial Sequence
  Description of Artificial Sequence: Synthetic oligonucleotide
cuguuucggagggguuaga

SEQ ID NO: 499235 - RNA, 19 nt, Artificial Sequence
  Description of Artificial Sequence: Synthetic oligonucleotide
ggugguaaucgaacuucau

SEQ ID NO: 499236 - RNA, 19 nt, Artificial Sequence
  Description of Artificial Sequence: Synthetic oligonucleotide
cgcuaguuggaccauuuau

SEQ ID NO: 499237 - RNA, 19 nt, Artificial Sequence
  Description of Artificial Sequence: Synthetic oligonucleotide
ggaaccuggcgcuccgguu

SEQ ID NO: 499238 - RNA, 19 nt, Artificial Sequence
  Description of Artificial Sequence: Synthetic oligonucleotide
gcgcuaguuggaccauuua

SEQ ID NO: 499239 - RNA, 19 nt, Artificial Sequence
  Description of Artificial Sequence: Synthetic oligonucleotide
cgcuucacgguugcuucac

SEQ ID NO: 499240 - RNA, 19 nt, Artificial Sequence
  Description of Artificial Sequence: Synthetic oligonucleotide
gcuccgguugccaauuauu

SEQ ID NO: 499241 - RNA, 19 nt, Artificial Sequence
  Description of Artificial Sequence: Synthetic oligonucleotide
cuacgacgguuaguacugu

SEQ ID NO: 499242 - RNA, 19 nt, Artificial Sequence
  Description of Artificial Sequence: Synthetic oligonucleotide
gcgucagugucugcagucu

SEQ ID NO: 499243 - RNA, 19 nt, Artificial Sequence
  Description of Artificial Sequence: Synthetic oligonucleotide
caucgccagaagcgcuagu

SEQ ID NO: 499244 - RNA, 19 nt, Artificial Sequence
  Description of Artificial Sequence: Synthetic oligonucleotide
cgucuacgagaccgccuac

SEQ ID NO: 499245 - RNA, 19 nt, Artificial Sequence
  Description of Artificial Sequence: Synthetic oligonucleotide
gcucucgaauauaccucua

SEQ ID NO: 499246 - RNA, 19 nt, Artificial Sequence
  Description of Artificial Sequence: Synthetic oligonucleotide
cacuggccgacaguaucau

SEQ ID NO: 499247 - RNA, 19 nt, Artificial Sequence
  Description of Artificial Sequence: Synthetic oligonucleotide
cgacgguuaguacugugau

SEQ ID NO: 499248 - RNA, 19 nt, Artificial Sequence
  Description of Artificial Sequence: Synthetic oligonucleotide
cugcugcgaguuguuuugu

SEQ ID NO: 499249 - RNA, 19 nt, Artificial Sequence
  Description of Artificial Sequence: Synthetic oligonucleotide
gcgaguuguuuugugcauu

SEQ ID NO: 499250 - RNA, 19 nt, Artificial Sequence
  Description of Artificial Sequence: Synthetic oligonucleotide
cgccuacgacgguuaguac

SEQ ID NO: 499251 - RNA, 19 nt, Artificial Sequence
  Description of Artificial Sequence: Synthetic oligonucleotide
gcauaucacuuaagauauu

SEQ ID NO: 499252 - RNA, 19 nt, Artificial Sequence
  Description of Artificial Sequence: Synthetic oligonucleotide
ccauaaccggagguguaau

SEQ ID NO: 499253 - RNA, 19 nt, Artificial Sequence
  Description of Artificial Sequence: Synthetic oligonucleotide
cguuggagccacgaacccu

SEQ ID NO: 499254 - RNA, 19 nt, Artificial Sequence
  Description of Artificial Sequence: Synthetic oligonucleotide
ccgacgaccucugccucuu

SEQ ID NO: 499255 - RNA, 19 nt, Artificial Sequence
  Description of Artificial Sequence: Synthetic oligonucleotide
aauauaaaguguuacuggg

SEQ ID NO: 499256 - RNA, 19 nt, Artificial Sequence
  Description of Artificial Sequence: Synthetic oligonucleotide
ugguauaguagcaagaacg

SEQ ID NO: 499257 - RNA, 19 nt, Artificial Sequence
  Description of Artificial Sequence: Synthetic oligonucleotide
uaaacaguauuacagcucg

SEQ ID NO: 499258 - RNA, 19 nt, Artificial Sequence
  Description of Artificial Sequence: Synthetic oligonucleotide
uuguuuacaagauauauca

SEQ ID NO: 499259 - RNA, 19 nt, Artificial Sequence
  Description of Artificial Sequence: Synthetic oligonucleotide
aaaauaguauccucacccc

SEQ ID NO: 499260 - RNA, 19 nt, Artificial Sequence
  Description of Artificial Sequence: Synthetic oligonucleotide
uguauaaagguauaguucu

SEQ ID NO: 499261 - RNA, 19 nt, Artificial Sequence
  Description of Artificial Sequence: Synthetic oligonucleotide
uuuaaggaaacuuuucucc

SEQ ID NO: 499262 - RNA, 19 nt, Artificial Sequence
  Description of Artificial Sequence: Synthetic oligonucleotide
auaccaaugguuuaaacag

SEQ ID NO: 499263 - RNA, 19 nt, Artificial Sequence
  Description of Artificial Sequence: Synthetic oligonucleotide
uguaauucaacaugaaagc

SEQ ID NO: 499264 - RNA, 19 nt, Artificial Sequence
  Description of Artificial Sequence: Synthetic oligonucleotide
aauggcauuuacuuacuac

SEQ ID NO: 499265 - RNA, 19 nt, Artificial Sequence
  Description of Artificial Sequence: Synthetic oligonucleotide
aaaaucaaguguaagguuc

SEQ ID NO: 499266 - RNA, 19 nt, Artificial Sequence
  Description of Artificial Sequence: Synthetic oligonucleotide
gauacccauagccagaugg

SEQ ID NO: 499267 - RNA, 19 nt, Artificial Sequence
  Description of Artificial Sequence: Synthetic oligonucleotide
cuagaaagaauuuuaauuc

SEQ ID NO: 499268 - RNA, 19 nt, Artificial Sequence
  Description of Artificial Sequence: Synthetic oligonucleotide
uggacuuuaagaaaaguca

SEQ ID NO: 499269 - RNA, 19 nt, Artificial Sequence
  Description of Artificial Sequence: Synthetic oligonucleotide
uuagauggaauuacaacag

SEQ ID NO: 499270 - RNA, 19 nt, Artificial Sequence
  Description of Artificial Sequence: Synthetic oligonucleotide
ucuugaugaaccaaguacc

SEQ ID NO: 499271 - RNA, 19 nt, Artificial Sequence
  Description of Artificial Sequence: Synthetic oligonucleotide
ucaagugaaguaaugaacu

SEQ ID NO: 499272 - RNA, 19 nt, Artificial Sequence
  Description of Artificial Sequence: Synthetic oligonucleotide
caguauuacagcucgaucg

SEQ ID NO: 499273 - RNA, 19 nt, Artificial Sequence
  Description of Artificial Sequence: Synthetic oligonucleotide
ucacucuuauucuagaaag

SEQ ID NO: 499274 - RNA, 19 nt, Artificial Sequence
  Description of Artificial Sequence: Synthetic oligonucleotide
uucuugaugaaccaaguac

SEQ ID NO: 499275 - RNA, 19 nt, Artificial Sequence
  Description of Artificial Sequence: Synthetic oligonucleotide
cauuuaagaugauuuaagg

SEQ ID NO: 499276 - RNA, 19 nt, Artificial Sequence
  Description of Artificial Sequence: Synthetic oligonucleotide
uuaugguaaagaaauauau

SEQ ID NO: 499277 - RNA, 19 nt, Artificial Sequence
  Description of Artificial Sequence: Synthetic oligonucleotide
uuacuuacuacaaaugcac

SEQ ID NO: 499278 - RNA, 19 nt, Artificial Sequence
  Description of Artificial Sequence: Synthetic oligonucleotide
ucuauucucuacaagucag

SEQ ID NO: 499279 - RNA, 19 nt, Artificial Sequence
  Description of Artificial Sequence: Synthetic oligonucleotide
uauaguagcaagaacgaaa

SEQ ID NO: 499280 - RNA, 19 nt, Artificial Sequence
  Description of Artificial Sequence: Synthetic oligonucleotide
aacaaguccaguucuaagu

SEQ ID NO: 499281 - RNA, 19 nt, Artificial Sequence
  Description of Artificial Sequence: Synthetic oligonucleotide
ucaaguguaagguucauuc

SEQ ID NO: 499282 - RNA, 19 nt, Artificial Sequence
  Description of Artificial Sequence: Synthetic oligonucleotide
auuuaagaugauuuaaggu

SEQ ID NO: 499283 - RNA, 19 nt, Artificial Sequence
  Description of Artificial Sequence: Synthetic oligonucleotide
uuuaagacuaccuucuguc

SEQ ID NO: 499284 - RNA, 19 nt, Artificial Sequence
  Description of Artificial Sequence: Synthetic oligonucleotide
aacauaagcuugaagcuac

SEQ ID NO: 499285 - RNA, 19 nt, Artificial Sequence
  Description of Artificial Sequence: Synthetic oligonucleotide
gaugauuuaaggugagaag

SEQ ID NO: 499286 - RNA, 19 nt, Artificial Sequence
  Description of Artificial Sequence: Synthetic oligonucleotide
ucauuuuagaucugagucc

SEQ ID NO: 499287 - RNA, 19 nt, Artificial Sequence
  Description of Artificial Sequence: Synthetic oligonucleotide
aauuguuuacaagauauau

SEQ ID NO: 499288 - RNA, 19 nt, Artificial Sequence
  Description of Artificial Sequence: Synthetic oligonucleotide
uauucuagaaagaauuuua

SEQ ID NO: 499289 - RNA, 19 nt, Artificial Sequence
  Description of Artificial Sequence: Synthetic oligonucleotide
aagguauaguucucccacc

SEQ ID NO: 499290 - RNA, 19 nt, Artificial Sequence
  Description of Artificial Sequence: Synthetic oligonucleotide
aagauauaucaccaaacaa

SEQ ID NO: 499291 - RNA, 19 nt, Artificial Sequence
  Description of Artificial Sequence: Synthetic oligonucleotide
uuuaaggugagaagucacc

SEQ ID NO: 499292 - RNA, 19 nt, Artificial Sequence
  Description of Artificial Sequence: Synthetic oligonucleotide
uuagucaagguuuucuuac

SEQ ID NO: 499293 - RNA, 19 nt, Artificial Sequence
  Description of Artificial Sequence: Synthetic oligonucleotide
uuuaugguaaagaaauaua

SEQ ID NO: 499294 - RNA, 19 nt, Artificial Sequence
  Description of Artificial Sequence: Synthetic oligonucleotide
gguuuaaacaguauuacag

SEQ ID NO: 499295 - RNA, 19 nt, Artificial Sequence
  Description of Artificial Sequence: Synthetic oligonucleotide
uuugcguagaacuucaguu

SEQ ID NO: 499296 - RNA, 19 nt, Artificial Sequence
  Description of Artificial Sequence: Synthetic oligonucleotide
auggcauuuacuuacuaca

SEQ ID NO: 499297 - RNA, 19 nt, Artificial Sequence
  Description of Artificial Sequence: Synthetic oligonucleotide
ucgacuucaucucuuuuag

SEQ ID NO: 499298 - RNA, 19 nt, Artificial Sequence
  Description of Artificial Sequence: Synthetic oligonucleotide
agcucgaucgacuucaucu

SEQ ID NO: 499299 - RNA, 19 nt, Artificial Sequence
  Description of Artificial Sequence: Synthetic oligonucleotide
caacaugugaucuugccug

SEQ ID NO: 499300 - RNA, 19 nt, Artificial Sequence
  Description of Artificial Sequence: Synthetic oligonucleotide
guaauagucagcaggacgc

SEQ ID NO: 499301 - RNA, 19 nt, Artificial Sequence
  Description of Artificial Sequence: Synthetic oligonucleotide
ucuaaguaugggaacuuug

SEQ ID NO: 499302 - RNA, 19 nt, Artificial Sequence
  Description of Artificial Sequence: Synthetic oligonucleotide
uguuaagcaacaaguccag

SEQ ID NO: 499303 - RNA, 19 nt, Artificial Sequence
  Description of Artificial Sequence: Synthetic oligonucleotide
aacaugaaagcgcuccucu

SEQ ID NO: 499304 - RNA, 19 nt, Artificial Sequence
  Description of Artificial Sequence: Synthetic oligonucleotide
uuaaacaguauuacagcuc

SEQ ID NO: 499305 - RNA, 19 nt, Artificial Sequence
  Description of Artificial Sequence: Synthetic oligonucleotide
acaagauauaucaccaaac

SEQ ID NO: 499306 - RNA, 19 nt, Artificial Sequence
  Description of Artificial Sequence: Synthetic oligonucleotide
cauaugguauaguagcaag

SEQ ID NO: 499307 - RNA, 19 nt, Artificial Sequence
  Description of Artificial Sequence: Synthetic oligonucleotide
guaauucaacaugaaagcg

SEQ ID NO: 499308 - RNA, 19 nt, Artificial Sequence
  Description of Artificial Sequence: Synthetic oligonucleotide
uacaguaggguucuguuuc

SEQ ID NO: 499309 - RNA, 19 nt, Artificial Sequence
  Description of Artificial Sequence: Synthetic oligonucleotide
aaugguuuaaacaguauua

SEQ ID NO: 499310 - RNA, 19 nt, Artificial Sequence
  Description of Artificial Sequence: Synthetic oligonucleotide
acuuacuaacagcagaacu

SEQ ID NO: 499311 - RNA, 19 nt, Artificial Sequence
  Description of Artificial Sequence: Synthetic oligonucleotide
auaaaguguuacuggggac

SEQ ID NO: 499312 - RNA, 19 nt, Artificial Sequence
  Description of Artificial Sequence: Synthetic oligonucleotide
agcaaucuuguggagacgc

SEQ ID NO: 499313 - RNA, 19 nt, Artificial Sequence
  Description of Artificial Sequence: Synthetic oligonucleotide
uuacuuauguuguuacuac

SEQ ID NO: 499314 - RNA, 19 nt, Artificial Sequence
  Description of Artificial Sequence: Synthetic oligonucleotide
gaauguaccaaagauggca

SEQ ID NO: 499315 - RNA, 19 nt, Artificial Sequence
  Description of Artificial Sequence: Synthetic oligonucleotide
aacuaacauacauucaauu

SEQ ID NO: 499316 - RNA, 19 nt, Artificial Sequence
  Description of Artificial Sequence: Synthetic oligonucleotide
uaugggaacuuugauuccg

SEQ ID NO: 499317 - RNA, 19 nt, Artificial Sequence
  Description of Artificial Sequence: Synthetic oligonucleotide
uaagguucauuccacuugu

SEQ ID NO: 499318 - RNA, 19 nt, Artificial Sequence
  Description of Artificial Sequence: Synthetic oligonucleotide
aaggaauguaccaaagaug

SEQ ID NO: 499319 - RNA, 19 nt, Artificial Sequence
  Description of Artificial Sequence: Synthetic oligonucleotide
gguaauagucagcaggacg

SEQ ID NO: 499320 - RNA, 19 nt, Artificial Sequence
  Description of Artificial Sequence: Synthetic oligonucleotide
ugaauuggcucugauacca

SEQ ID NO: 499321 - RNA, 19 nt, Artificial Sequence
  Description of Artificial Sequence: Synthetic oligonucleotide
uuuacuuauguuguuacua

SEQ ID NO: 499322 - RNA, 19 nt, Artificial Sequence
  Description of Artificial Sequence: Synthetic oligonucleotide
auuaauuugcaaauuuaug

SEQ ID NO: 499323 - RNA, 19 nt, Artificial Sequence
  Description of Artificial Sequence: Synthetic oligonucleotide
uuacauucaagucacucuu

SEQ ID NO: 499324 - RNA, 19 nt, Artificial Sequence
  Description of Artificial Sequence: Synthetic oligonucleotide
gaagcuacagcuuacgacu

SEQ ID NO: 499325 - RNA, 19 nt, Artificial Sequence
  Description of Artificial Sequence: Synthetic oligonucleotide
gauggcacuuacuaacagc

SEQ ID NO: 499326 - RNA, 19 nt, Artificial Sequence
  Description of Artificial Sequence: Synthetic oligonucleotide
aguccauagaucucuaaga

SEQ ID NO: 499327 - RNA, 19 nt, Artificial Sequence
  Description of Artificial Sequence: Synthetic oligonucleotide
uagaucugaguccauagau

SEQ ID NO: 499328 - RNA, 19 nt, Artificial Sequence
  Description of Artificial Sequence: Synthetic oligonucleotide
uauguauuuaaggaaacuu

SEQ ID NO: 499329 - RNA, 19 nt, Artificial Sequence
  Description of Artificial Sequence: Synthetic oligonucleotide
ugguaaucaucacagugac

SEQ ID NO: 499330 - RNA, 19 nt, Artificial Sequence
  Description of Artificial Sequence: Synthetic oligonucleotide
cuaauguaaauggucagug

SEQ ID NO: 499331 - RNA, 19 nt, Artificial Sequence
  Description of Artificial Sequence: Synthetic oligonucleotide
auucuaauguaaaugguca

SEQ ID NO: 499332 - RNA, 19 nt, Artificial Sequence
  Description of Artificial Sequence: Synthetic oligonucleotide
acaguauuacagcucgauc

SEQ ID NO: 499333 - RNA, 19 nt, Artificial Sequence
  Description of Artificial Sequence: Synthetic oligonucleotide
ugcguagaacuucaguuga

SEQ ID NO: 499334 - RNA, 19 nt, Artificial Sequence
  Description of Artificial Sequence: Synthetic oligonucleotide
guaagguucauuccacuug

SEQ ID NO: 499335 - RNA, 19 nt, Artificial Sequence
  Description of Artificial Sequence: Synthetic oligonucleotide
uuggugaaaucaacaaaca

SEQ ID NO: 499336 - RNA, 19 nt, Artificial Sequence
  Description of Artificial Sequence: Synthetic oligonucleotide
gaacucucauuuuagaucu

SEQ ID NO: 499337 - RNA, 19 nt, Artificial Sequence
  Description of Artificial Sequence: Synthetic oligonucleotide
uauuacagcucgaucgacu

SEQ ID NO: 499338 - RNA, 19 nt, Artificial Sequence
  Description of Artificial Sequence: Synthetic oligonucleotide
aguauuacagcucgaucga

SEQ ID NO: 499339 - RNA, 19 nt, Artificial Sequence
  Description of Artificial Sequence: Synthetic oligonucleotide
gguguucggagauaguugg

SEQ ID NO: 499340 - RNA, 19 nt, Artificial Sequence
  Description of Artificial Sequence: Synthetic oligonucleotide
ucuugcaaauacagaaaac

SEQ ID NO: 499341 - RNA, 19 nt, Artificial Sequence
  Description of Artificial Sequence: Synthetic oligonucleotide
cuggccgauacccauagcc

SEQ ID NO: 499342 - RNA, 19 nt, Artificial Sequence
  Description of Artificial Sequence: Synthetic oligonucleotide
uuacuaacagcagaacucu

SEQ ID NO: 499343 - RNA, 19 nt, Artificial Sequence
  Description of Artificial Sequence: Synthetic oligonucleotide
uacacaucuuuuguuaagc

SEQ ID NO: 499344 - RNA, 19 nt, Artificial Sequence
  Description of Artificial Sequence: Synthetic oligonucleotide
agugaaguaaugaacuucu

SEQ ID NO: 499345 - RNA, 19 nt, Artificial Sequence
  Description of Artificial Sequence: Synthetic oligonucleotide
gauaguuggcauuuucaga

SEQ ID NO: 499346 - RNA, 19 nt, Artificial Sequence
  Description of Artificial Sequence: Synthetic oligonucleotide
ucuucgaguuuucuuggug

SEQ ID NO: 499347 - RNA, 19 nt, Artificial Sequence
  Description of Artificial Sequence: Synthetic oligonucleotide
uacuuauguuguuacuacc

SEQ ID NO: 499348 - RNA, 19 nt, Artificial Sequence
  Description of Artificial Sequence: Synthetic oligonucleotide
caagauauaucaccaaaca

SEQ ID NO: 499349 - RNA, 19 nt, Artificial Sequence
  Description of Artificial Sequence: Synthetic oligonucleotide
uccgguguauaugaauugg

SEQ ID NO: 499350 - RNA, 19 nt, Artificial Sequence
  Description of Artificial Sequence: Synthetic oligonucleotide
uauaguucucccaccugug

SEQ ID NO: 499351 - RNA, 19 nt, Artificial Sequence
  Description of Artificial Sequence: Synthetic oligonucleotide
ugucaguuacagcucauaa

SEQ ID NO: 499352 - RNA, 19 nt, Artificial Sequence
  Description of Artificial Sequence: Synthetic oligonucleotide
ucagugagaucucuuugga

SEQ ID NO: 499353 - RNA, 19 nt, Artificial Sequence
  Description of Artificial Sequence: Synthetic oligonucleotide
uccgacuugagggaugagg

SEQ ID NO: 499354 - RNA, 19 nt, Artificial Sequence
  Description of Artificial Sequence: Synthetic oligonucleotide
ugacuuccgguguauauga

SEQ ID NO: 499355 - RNA, 19 nt, Artificial Sequence
  Description of Artificial Sequence: Synthetic oligonucleotide
gaacuuugauuccggugcg

SEQ ID NO: 499356 - RNA, 19 nt, Artificial Sequence
  Description of Artificial Sequence: Synthetic oligonucleotide
auggaauuacaacagugau

SEQ ID NO: 499357 - RNA, 19 nt, Artificial Sequence
  Description of Artificial Sequence: Synthetic oligonucleotide
aggggcuuugcguagaacu

SEQ ID NO: 499358 - RNA, 19 nt, Artificial Sequence
  Description of Artificial Sequence: Synthetic oligonucleotide
uuaaggugagaagucaccu

SEQ ID NO: 499359 - RNA, 19 nt, Artificial Sequence
  Description of Artificial Sequence: Synthetic oligonucleotide
caaguguaagguucauucc

SEQ ID NO: 499360 - RNA, 19 nt, Artificial Sequence
  Description of Artificial Sequence: Synthetic oligonucleotide
uuguuuauauuuguaacuu

SEQ ID NO: 499361 - RNA, 19 nt, Artificial Sequence
  Description of Artificial Sequence: Synthetic oligonucleotide
aaaucauuucaaauguuuu

SEQ ID NO: 499362 - RNA, 19 nt, Artificial Sequence
  Description of Artificial Sequence: Synthetic oligonucleotide
agaugauuuaaggugagaa

SEQ ID NO: 499363 - RNA, 19 nt, Artificial Sequence
  Description of Artificial Sequence: Synthetic oligonucleotide
uggugaaaucaacaaacau

SEQ ID NO: 499364 - RNA, 19 nt, Artificial Sequence
  Description of Artificial Sequence: Synthetic oligonucleotide
uuauguuguuacuaccaaa

SEQ ID NO: 499365 - RNA, 19 nt, Artificial Sequence
  Description of Artificial Sequence: Synthetic oligonucleotide
uaaguaugggaacuuugau

SEQ ID NO: 499366 - RNA, 19 nt, Artificial Sequence
  Description of Artificial Sequence: Synthetic oligonucleotide
aaaucaaguguaagguuca

SEQ ID NO: 499367 - RNA, 19 nt, Artificial Sequence
  Description of Artificial Sequence: Synthetic oligonucleotide
ugaucuugccuguccaacc

SEQ ID NO: 499368 - RNA, 19 nt, Artificial Sequence
  Description of Artificial Sequence: Synthetic oligonucleotide
ugguguucggagauaguug

SEQ ID NO: 499369 - RNA, 19 nt, Artificial Sequence
  Description of Artificial Sequence: Synthetic oligonucleotide
cagauggaugguaccaugg

SEQ ID NO: 499370 - RNA, 19 nt, Artificial Sequence
  Description of Artificial Sequence: Synthetic oligonucleotide
cuaaguaugggaacuuuga

SEQ ID NO: 499371 - RNA, 19 nt, Artificial Sequence
  Description of Artificial Sequence: Synthetic oligonucleotide
aaacauaagcuugaagcua

SEQ ID NO: 499372 - RNA, 19 nt, Artificial Sequence
  Description of Artificial Sequence: Synthetic oligonucleotide
aguucuaaguaugggaacu

SEQ ID NO: 499373 - RNA, 19 nt, Artificial Sequence
  Description of Artificial Sequence: Synthetic oligonucleotide
uguauaugaauuggcucug

SEQ ID NO: 499374 - RNA, 19 nt, Artificial Sequence
  Description of Artificial Sequence: Synthetic oligonucleotide
ugaccagccuuagucaagg

SEQ ID NO: 499375 - RNA, 19 nt, Artificial Sequence
  Description of Artificial Sequence: Synthetic oligonucleotide
guguauaugaauuggcucu

SEQ ID NO: 499376 - RNA, 19 nt, Artificial Sequence
  Description of Artificial Sequence: Synthetic oligonucleotide
augaaagcgcuccucugag

SEQ ID NO: 499377 - RNA, 19 nt, Artificial Sequence
  Description of Artificial Sequence: Synthetic oligonucleotide
uccuagaccuuggaagugg

SEQ ID NO: 499378 - RNA, 19 nt, Artificial Sequence
  Description of Artificial Sequence: Synthetic oligonucleotide
uuugauuccggugcgaguu

SEQ ID NO: 499379 - RNA, 19 nt, Artificial Sequence
  Description of Artificial Sequence: Synthetic oligonucleotide
agcaauagcgguugucaug

SEQ ID NO: 499380 - RNA, 19 nt, Artificial Sequence
  Description of Artificial Sequence: Synthetic oligonucleotide
uguucggagauaguuggca

SEQ ID NO: 499381 - RNA, 19 nt, Artificial Sequence
  Description of Artificial Sequence: Synthetic oligonucleotide
augguaaucaucacaguga

SEQ ID NO: 499382 - RNA, 19 nt, Artificial Sequence
  Description of Artificial Sequence: Synthetic oligonucleotide
auacccauagccagauggc

SEQ ID NO: 499383 - RNA, 19 nt, Artificial Sequence
  Description of Artificial Sequence: Synthetic oligonucleotide
uauaugaauuggcucugau

SEQ ID NO: 499384 - RNA, 19 nt, Artificial Sequence
  Description of Artificial Sequence: Synthetic oligonucleotide
ccuuccuagaccuuggaag

SEQ ID NO: 499385 - RNA, 19 nt, Artificial Sequence
  Description of Artificial Sequence: Synthetic oligonucleotide
uacuacaaaugcacauucu

SEQ ID NO: 499386 - RNA, 19 nt, Artificial Sequence
  Description of Artificial Sequence: Synthetic oligonucleotide
ugcgaguucaucuuuucuu

SEQ ID NO: 499387 - RNA, 19 nt, Artificial Sequence
  Description of Artificial Sequence: Synthetic oligonucleotide
uccaguaguuauaaacaua

SEQ ID NO: 499388 - RNA, 19 nt, Artificial Sequence
  Description of Artificial Sequence: Synthetic oligonucleotide
uguuuauauuuguaacuuu

SEQ ID NO: 499389 - RNA, 19 nt, Artificial Sequence
  Description of Artificial Sequence: Synthetic oligonucleotide
uaaggaaacuuuucuccuc

SEQ ID NO: 499390 - RNA, 19 nt, Artificial Sequence
  Description of Artificial Sequence: Synthetic oligonucleotide
aauuggcucugauaccaau

SEQ ID NO: 499391 - RNA, 19 nt, Artificial Sequence
  Description of Artificial Sequence: Synthetic oligonucleotide
uguaagguucauuccacuu

SEQ ID NO: 499392 - RNA, 19 nt, Artificial Sequence
  Description of Artificial Sequence: Synthetic oligonucleotide
uuauacaauaaggguccag

SEQ ID NO: 499393 - RNA, 19 nt, Artificial Sequence
  Description of Artificial Sequence: Synthetic oligonucleotide
uaccaaugguuuaaacagu

SEQ ID NO: 499394 - RNA, 19 nt, Artificial Sequence
  Description of Artificial Sequence: Synthetic oligonucleotide
acuugucaguuacagcuca

SEQ ID NO: 499395 - RNA, 19 nt, Artificial Sequence
  Description of Artificial Sequence: Synthetic oligonucleotide
auaguagcaagaacgaaaa

SEQ ID NO: 499396 - RNA, 19 nt, Artificial Sequence
  Description of Artificial Sequence: Synthetic oligonucleotide
auggcacuuacuaacagca

SEQ ID NO: 499397 - RNA, 19 nt, Artificial Sequence
  Description of Artificial Sequence: Synthetic oligonucleotide
uguggagacgcaagagugu

SEQ ID NO: 499398 - RNA, 19 nt, Artificial Sequence
  Description of Artificial Sequence: Synthetic oligonucleotide
caggacuaaaguguaauuc

SEQ ID NO: 499399 - RNA, 19 nt, Artificial Sequence
  Description of Artificial Sequence: Synthetic oligonucleotide
acucuuauucuagaaagaa

SEQ ID NO: 499400 - RNA, 19 nt, Artificial Sequence
  Description of Artificial Sequence: Synthetic oligonucleotide
ugaaagcgcuccucugagg

SEQ ID NO: 499401 - RNA, 19 nt, Artificial Sequence
  Description of Artificial Sequence: Synthetic oligonucleotide
gagagcacuuugguaauag

SEQ ID NO: 499402 - RNA, 19 nt, Artificial Sequence
  Description of Artificial Sequence: Synthetic oligonucleotide
agauggcacuuacuaacag

SEQ ID NO: 499403 - RNA, 19 nt, Artificial Sequence
  Description of Artificial Sequence: Synthetic oligonucleotide
auaugaauuggcucugaua

SEQ ID NO: 499404 - RNA, 19 nt, Artificial Sequence
  Description of Artificial Sequence: Synthetic oligonucleotide
uggggacuuucuauuuuag

SEQ ID NO: 499405 - RNA, 19 nt, Artificial Sequence
  Description of Artificial Sequence: Synthetic oligonucleotide
auuacagcucgaucgacuu

SEQ ID NO: 499406 - RNA, 19 nt, Artificial Sequence
  Description of Artificial Sequence: Synthetic oligonucleotide
uagguguguauguauuuaa

SEQ ID NO: 499407 - RNA, 19 nt, Artificial Sequence
  Description of Artificial Sequence: Synthetic oligonucleotide
gguguauaugaauuggcuc

SEQ ID NO: 499408 - RNA, 19 nt, Artificial Sequence
  Description of Artificial Sequence: Synthetic oligonucleotide
uuccgguguauaugaauug

SEQ ID NO: 499409 - RNA, 19 nt, Artificial Sequence
  Description of Artificial Sequence: Synthetic oligonucleotide
uggccgauacccauagcca

SEQ ID NO: 499410 - RNA, 19 nt, Artificial Sequence
  Description of Artificial Sequence: Synthetic oligonucleotide
agguuuaagacuaccuucu

SEQ ID NO: 499411 - RNA, 19 nt, Artificial Sequence
  Description of Artificial Sequence: Synthetic oligonucleotide
aucgacuucaucucuuuua

SEQ ID NO: 499412 - RNA, 19 nt, Artificial Sequence
  Description of Artificial Sequence: Synthetic oligonucleotide
ucugaccagccuuagucaa

SEQ ID NO: 499413 - RNA, 19 nt, Artificial Sequence
  Description of Artificial Sequence: Synthetic oligonucleotide
gacuuuaagaaaagucauc

SEQ ID NO: 499414 - RNA, 19 nt, Artificial Sequence
  Description of Artificial Sequence: Synthetic oligonucleotide
gacgcaagaguguguggag

SEQ ID NO: 499415 - RNA, 19 nt, Artificial Sequence
  Description of Artificial Sequence: Synthetic oligonucleotide
cauguucuauauacuccag

SEQ ID NO: 499416 - RNA, 19 nt, Artificial Sequence
  Description of Artificial Sequence: Synthetic oligonucleotide
cuucgaguuuucuugguga

SEQ ID NO: 499417 - RNA, 19 nt, Artificial Sequence
  Description of Artificial Sequence: Synthetic oligonucleotide
ugagaucucuuuggaaaug

SEQ ID NO: 499418 - RNA, 19 nt, Artificial Sequence
  Description of Artificial Sequence: Synthetic oligonucleotide
cacuuugguaauagucagc

SEQ ID NO: 499419 - RNA, 19 nt, Artificial Sequence
  Description of Artificial Sequence: Synthetic oligonucleotide
acuuugauuccggugcgag

SEQ ID NO: 499420 - RNA, 19 nt, Artificial Sequence
  Description of Artificial Sequence: Synthetic oligonucleotide
agcagaacucucauuuuag

SEQ ID NO: 499421 - RNA, 19 nt, Artificial Sequence
  Description of Artificial Sequence: Synthetic oligonucleotide
gacgcuugaguccuuuguc

SEQ ID NO: 499422 - RNA, 19 nt, Artificial Sequence
  Description of Artificial Sequence: Synthetic oligonucleotide
uguuacuggggacuuucua

SEQ ID NO: 499423 - RNA, 19 nt, Artificial Sequence
  Description of Artificial Sequence: Synthetic oligonucleotide
auacaauaaggguccagua

SEQ ID NO: 499424 - RNA, 19 nt, Artificial Sequence
  Description of Artificial Sequence: Synthetic oligonucleotide
ucuuccgacuugagggaug

SEQ ID NO: 499425 - RNA, 19 nt, Artificial Sequence
  Description of Artificial Sequence: Synthetic oligonucleotide
cuuacgacuuuacuuaugu

SEQ ID NO: 499426 - RNA, 19 nt, Artificial Sequence
  Description of Artificial Sequence: Synthetic oligonucleotide
ucaguugauggagaagcaa

SEQ ID NO: 499427 - RNA, 19 nt, Artificial Sequence
  Description of Artificial Sequence: Synthetic oligonucleotide
auaugguauaguagcaaga

SEQ ID NO: 499428 - RNA, 19 nt, Artificial Sequence
  Description of Artificial Sequence: Synthetic oligonucleotide
aaauggucagugagaucuc

SEQ ID NO: 499429 - RNA, 19 nt, Artificial Sequence
  Description of Artificial Sequence: Synthetic oligonucleotide
acuuccgguguauaugaau

SEQ ID NO: 499430 - RNA, 19 nt, Artificial Sequence
  Description of Artificial Sequence: Synthetic oligonucleotide
gucacucuuauucuagaaa

SEQ ID NO: 499431 - RNA, 19 nt, Artificial Sequence
  Description of Artificial Sequence: Synthetic oligonucleotide
aauaaggguccaguaguua

SEQ ID NO: 499432 - RNA, 19 nt, Artificial Sequence
  Description of Artificial Sequence: Synthetic oligonucleotide
caagaguguguggagaguc

SEQ ID NO: 499433 - RNA, 19 nt, Artificial Sequence
  Description of Artificial Sequence: Synthetic oligonucleotide
ggaaauggacuuuaagaaa

SEQ ID NO: 499434 - RNA, 19 nt, Artificial Sequence
  Description of Artificial Sequence: Synthetic oligonucleotide
gcgguugucaugaaacugg

SEQ ID NO: 499435 - RNA, 19 nt, Artificial Sequence
  Description of Artificial Sequence: Synthetic oligonucleotide
uuuauacaauaagggucca

SEQ ID NO: 499436 - RNA, 19 nt, Artificial Sequence
  Description of Artificial Sequence: Synthetic oligonucleotide
caugaaagcgcuccucuga

SEQ ID NO: 499437 - RNA, 19 nt, Artificial Sequence
  Description of Artificial Sequence: Synthetic oligonucleotide
guaugggaacuuugauucc

SEQ ID NO: 499438 - RNA, 19 nt, Artificial Sequence
  Description of Artificial Sequence: Synthetic oligonucleotide
gucaguuacagcucauaaa

SEQ ID NO: 499439 - RNA, 19 nt, Artificial Sequence
  Description of Artificial Sequence: Synthetic oligonucleotide
gcuauagaggacauuucag

SEQ ID NO: 499440 - RNA, 19 nt, Artificial Sequence
  Description of Artificial Sequence: Synthetic oligonucleotide
uccaaccuuacuggcagca

SEQ ID NO: 499441 - RNA, 19 nt, Artificial Sequence
  Description of Artificial Sequence: Synthetic oligonucleotide
gugacuuccgguguauaug

SEQ ID NO: 499442 - RNA, 19 nt, Artificial Sequence
  Description of Artificial Sequence: Synthetic oligonucleotide
cuaaaguguaauucaacau

SEQ ID NO: 499443 - RNA, 19 nt, Artificial Sequence
  Description of Artificial Sequence: Synthetic oligonucleotide
auuaucccuuuuaaaacaa

SEQ ID NO: 499444 - RNA, 19 nt, Artificial Sequence
  Description of Artificial Sequence: Synthetic oligonucleotide
uaaggugagaagucaccuu

SEQ ID NO: 499445 - RNA, 19 nt, Artificial Sequence
  Description of Artificial Sequence: Synthetic oligonucleotide
agguguguauguauuuaag

SEQ ID NO: 499446 - RNA, 19 nt, Artificial Sequence
  Description of Artificial Sequence: Synthetic oligonucleotide
ggcacuuacuaacagcaga

SEQ ID NO: 499447 - RNA, 19 nt, Artificial Sequence
  Description of Artificial Sequence: Synthetic oligonucleotide
caucagguuuaagacuacc

SEQ ID NO: 499448 - RNA, 19 nt, Artificial Sequence
  Description of Artificial Sequence: Synthetic oligonucleotide
cuauauacuccaguuaaua

SEQ ID NO: 499449 - RNA, 19 nt, Artificial Sequence
  Description of Artificial Sequence: Synthetic oligonucleotide
gccuguccaaccuuacugg

SEQ ID NO: 499450 - RNA, 19 nt, Artificial Sequence
  Description of Artificial Sequence: Synthetic oligonucleotide
cuuagucaagguuuucuua

SEQ ID NO: 499451 - RNA, 19 nt, Artificial Sequence
  Description of Artificial Sequence: Synthetic oligonucleotide
uacccauagccagauggca

SEQ ID NO: 499452 - RNA, 19 nt, Artificial Sequence
  Description of Artificial Sequence: Synthetic oligonucleotide
gguauaguagcaagaacga

SEQ ID NO: 499453 - RNA, 19 nt, Artificial Sequence
  Description of Artificial Sequence: Synthetic oligonucleotide
agagcacuuugguaauagu

SEQ ID NO: 499454 - RNA, 19 nt, Artificial Sequence
  Description of Artificial Sequence: Synthetic oligonucleotide
cacucuuauucuagaaaga

SEQ ID NO: 499455 - RNA, 19 nt, Artificial Sequence
  Description of Artificial Sequence: Synthetic oligonucleotide
caucauuuguaaauggcau

SEQ ID NO: 499456 - RNA, 19 nt, Artificial Sequence
  Description of Artificial Sequence: Synthetic oligonucleotide
uaauagucagcaggacgcu

SEQ ID NO: 499457 - RNA, 19 nt, Artificial Sequence
  Description of Artificial Sequence: Synthetic oligonucleotide
acaguaggguucuguuucu

SEQ ID NO: 499458 - RNA, 19 nt, Artificial Sequence
  Description of Artificial Sequence: Synthetic oligonucleotide
ucggagauaguuggcauuu

SEQ ID NO: 499459 - RNA, 19 nt, Artificial Sequence
  Description of Artificial Sequence: Synthetic oligonucleotide
guggagacgcaagagugug

SEQ ID NO: 499460 - RNA, 19 nt, Artificial Sequence
  Description of Artificial Sequence: Synthetic oligonucleotide
uugagggaugaggaguaac

SEQ ID NO: 499461 - RNA, 19 nt, Artificial Sequence
  Description of Artificial Sequence: Synthetic oligonucleotide
uucggagauaguuggcauu

SEQ ID NO: 499462 - RNA, 19 nt, Artificial Sequence
  Description of Artificial Sequence: Synthetic oligonucleotide
augggaacuuugauuccgg

SEQ ID NO: 499463 - RNA, 19 nt, Artificial Sequence
  Description of Artificial Sequence: Synthetic oligonucleotide
ugaguccauagaucucuaa

SEQ ID NO: 499464 - RNA, 19 nt, Artificial Sequence
  Description of Artificial Sequence: Synthetic oligonucleotide
cuacagcuuacgacuuuac

SEQ ID NO: 499465 - RNA, 19 nt, Artificial Sequence
  Description of Artificial Sequence: Synthetic oligonucleotide
cuuccuagaccuuggaagu

SEQ ID NO: 499466 - RNA, 19 nt, Artificial Sequence
  Description of Artificial Sequence: Synthetic oligonucleotide
gccuuucuugcaaauacag

SEQ ID NO: 499467 - RNA, 19 nt, Artificial Sequence
  Description of Artificial Sequence: Synthetic oligonucleotide
ucgaucgacuucaucucuu

SEQ ID NO: 499468 - RNA, 19 nt, Artificial Sequence
  Description of Artificial Sequence: Synthetic oligonucleotide
aagcgcuccucugaggaaa

SEQ ID NO: 499469 - RNA, 19 nt, Artificial Sequence
  Description of Artificial Sequence: Synthetic oligonucleotide
gcaauagcgguugucauga

SEQ ID NO: 499470 - RNA, 19 nt, Artificial Sequence
  Description of Artificial Sequence: Synthetic oligonucleotide
ggccgauacccauagccag

SEQ ID NO: 499471 - RNA, 19 nt, Artificial Sequence
  Description of Artificial Sequence: Synthetic oligonucleotide
accaaugguuuaaacagua

SEQ ID NO: 499472 - RNA, 19 nt, Artificial Sequence
  Description of Artificial Sequence: Synthetic oligonucleotide
ugggaacuuugauuccggu

SEQ ID NO: 499473 - RNA, 19 nt, Artificial Sequence
  Description of Artificial Sequence: Synthetic oligonucleotide
aaucaaguguaagguucau

SEQ ID NO: 499474 - RNA, 19 nt, Artificial Sequence
  Description of Artificial Sequence: Synthetic oligonucleotide
cuugccuguccaaccuuac

SEQ ID NO: 499475 - RNA, 19 nt, Artificial Sequence
  Description of Artificial Sequence: Synthetic oligonucleotide
uuccuagaccuuggaagug

SEQ ID NO: 499476 - RNA, 19 nt, Artificial Sequence
  Description of Artificial Sequence: Synthetic oligonucleotide
ugauuccggugcgaguuca

SEQ ID NO: 499477 - RNA, 19 nt, Artificial Sequence
  Description of Artificial Sequence: Synthetic oligonucleotide
gcacgugaggcuauagagg

SEQ ID NO: 499478 - RNA, 19 nt, Artificial Sequence
  Description of Artificial Sequence: Synthetic oligonucleotide
guauaaagguauaguucuc

SEQ ID NO: 499479 - RNA, 19 nt, Artificial Sequence
  Description of Artificial Sequence: Synthetic oligonucleotide
ggagacgcaagagugugug

SEQ ID NO: 499480 - RNA, 19 nt, Artificial Sequence
  Description of Artificial Sequence: Synthetic oligonucleotide
aacuuugauuccggugcga

SEQ ID NO: 499481 - RNA, 19 nt, Artificial Sequence
  Description of Artificial Sequence: Synthetic oligonucleotide
auuccggugcgaguucauc

SEQ ID NO: 499482 - RNA, 19 nt, Artificial Sequence
  Description of Artificial Sequence: Synthetic oligonucleotide
cuucuuccgacuugaggga

SEQ ID NO: 499483 - RNA, 19 nt, Artificial Sequence
  Description of Artificial Sequence: Synthetic oligonucleotide
uggagacgcaagagugugu

SEQ ID NO: 499484 - RNA, 19 nt, Artificial Sequence
  Description of Artificial Sequence: Synthetic oligonucleotide
cuagaccuuggaaguggug

SEQ ID NO: 499485 - RNA, 19 nt, Artificial Sequence
  Description of Artificial Sequence: Synthetic oligonucleotide
uuacgacuuuacuuauguu

SEQ ID NO: 499486 - RNA, 19 nt, Artificial Sequence
  Description of Artificial Sequence: Synthetic oligonucleotide
uugauuccggugcgaguuc

SEQ ID NO: 499487 - RNA, 19 nt, Artificial Sequence
  Description of Artificial Sequence: Synthetic oligonucleotide
caaugguuuaaacaguauu

SEQ ID NO: 499488 - RNA, 19 nt, Artificial Sequence
  Description of Artificial Sequence: Synthetic oligonucleotide
agaguucuugguguucgga

SEQ ID NO: 499489 - RNA, 19 nt, Artificial Sequence
  Description of Artificial Sequence: Synthetic oligonucleotide
aaacaguauuacagcucga

SEQ ID NO: 499490 - RNA, 19 nt, Artificial Sequence
  Description of Artificial Sequence: Synthetic oligonucleotide
cacuuacuaacagcagaac

SEQ ID NO: 499491 - RNA, 19 nt, Artificial Sequence
  Description of Artificial Sequence: Synthetic oligonucleotide
accuuccuagaccuuggaa

SEQ ID NO: 499492 - RNA, 19 nt, Artificial Sequence
  Description of Artificial Sequence: Synthetic oligonucleotide
ccaaguaccuuuuauggua

SEQ ID NO: 499493 - RNA, 19 nt, Artificial Sequence
  Description of Artificial Sequence: Synthetic oligonucleotide
aguggugacuuccggugua

SEQ ID NO: 499494 - RNA, 19 nt, Artificial Sequence
  Description of Artificial Sequence: Synthetic oligonucleotide
uccggugcgaguucaucuu

SEQ ID NO: 499495 - RNA, 19 nt, Artificial Sequence
  Description of Artificial Sequence: Synthetic oligonucleotide
ccaguucuaaguaugggaa

SEQ ID NO: 499496 - RNA, 19 nt, Artificial Sequence
  Description of Artificial Sequence: Synthetic oligonucleotide
ccgguguauaugaauuggc

SEQ ID NO: 499497 - RNA, 19 nt, Artificial Sequence
  Description of Artificial Sequence: Synthetic oligonucleotide
acgguccgcugauggcugc

SEQ ID NO: 499498 - RNA, 19 nt, Artificial Sequence
  Description of Artificial Sequence: Synthetic oligonucleotide
cuuccgguguauaugaauu

SEQ ID NO: 499499 - RNA, 19 nt, Artificial Sequence
  Description of Artificial Sequence: Synthetic oligonucleotide
guauuacagcucgaucgac

SEQ ID NO: 499500 - RNA, 19 nt, Artificial Sequence
  Description of Artificial Sequence: Synthetic oligonucleotide
auucaacaugaaagcgcuc

SEQ ID NO: 499501 - RNA, 19 nt, Artificial Sequence
  Description of Artificial Sequence: Synthetic oligonucleotide
guauaguagcaagaacgaa

SEQ ID NO: 499502 - RNA, 19 nt, Artificial Sequence
  Description of Artificial Sequence: Synthetic oligonucleotide
gaauuacaacagugaucuc

SEQ ID NO: 499503 - RNA, 19 nt, Artificial Sequence
  Description of Artificial Sequence: Synthetic oligonucleotide
caacaugaaagcgcuccuc

SEQ ID NO: 499504 - RNA, 19 nt, Artificial Sequence
  Description of Artificial Sequence: Synthetic oligonucleotide
guccaguaguuauaaacau

SEQ ID NO: 499505 - RNA, 19 nt, Artificial Sequence
  Description of Artificial Sequence: Synthetic oligonucleotide
ucccaccuguguuuguaau

SEQ ID NO: 499506 - RNA, 19 nt, Artificial Sequence
  Description of Artificial Sequence: Synthetic oligonucleotide
aggacgcuugaguccuuug

SEQ ID NO: 499507 - RNA, 19 nt, Artificial Sequence
  Description of Artificial Sequence: Synthetic oligonucleotide
augcacauucuucgaguuu

SEQ ID NO: 499508 - RNA, 19 nt, Artificial Sequence
  Description of Artificial Sequence: Synthetic oligonucleotide
ccacauauucacauauaga

SEQ ID NO: 499509 - RNA, 19 nt, Artificial Sequence
  Description of Artificial Sequence: Synthetic oligonucleotide
caucacagugacagcaaua

SEQ ID NO: 499510 - RNA, 19 nt, Artificial Sequence
  Description of Artificial Sequence: Synthetic oligonucleotide
ccgacuugagggaugagga

SEQ ID NO: 499511 - RNA, 19 nt, Artificial Sequence
  Description of Artificial Sequence: Synthetic oligonucleotide
aucaaguguaagguucauu

SEQ ID NO: 499512 - RNA, 19 nt, Artificial Sequence
  Description of Artificial Sequence: Synthetic oligonucleotide
cuauucucuacaagucagu

SEQ ID NO: 499513 - RNA, 19 nt, Artificial Sequence
  Description of Artificial Sequence: Synthetic oligonucleotide
ggaauguaccaaagauggc

SEQ ID NO: 499514 - RNA, 19 nt, Artificial Sequence
  Description of Artificial Sequence: Synthetic oligonucleotide
acgcaagaguguguggaga

SEQ ID NO: 499515 - RNA, 19 nt, Artificial Sequence
  Description of Artificial Sequence: Synthetic oligonucleotide
uucuuccgacuugagggau

SEQ ID NO: 499516 - RNA, 19 nt, Artificial Sequence
  Description of Artificial Sequence: Synthetic oligonucleotide
guauaugaauuggcucuga

SEQ ID NO: 499517 - RNA, 19 nt, Artificial Sequence
  Description of Artificial Sequence: Synthetic oligonucleotide
caaucuuguggagacgcaa

SEQ ID NO: 499518 - RNA, 19 nt, Artificial Sequence
  Description of Artificial Sequence: Synthetic oligonucleotide
gacgguccgcugauggcug

SEQ ID NO: 499519 - RNA, 19 nt, Artificial Sequence
  Description of Artificial Sequence: Synthetic oligonucleotide
gcucgaucgacuucaucuc

SEQ ID NO: 499520 - RNA, 19 nt, Artificial Sequence
  Description of Artificial Sequence: Synthetic oligonucleotide
aagcuacagcuuacgacuu

SEQ ID NO: 499521 - RNA, 19 nt, Artificial Sequence
  Description of Artificial Sequence: Synthetic oligonucleotide
agccuuagucaagguuuuc

SEQ ID NO: 499522 - RNA, 19 nt, Artificial Sequence
  Description of Artificial Sequence: Synthetic oligonucleotide
cagugagaucucuuuggaa

SEQ ID NO: 499523 - RNA, 19 nt, Artificial Sequence
  Description of Artificial Sequence: Synthetic oligonucleotide
cuuccgacuugagggauga

SEQ ID NO: 499524 - RNA, 19 nt, Artificial Sequence
  Description of Artificial Sequence: Synthetic oligonucleotide
ggugcgaguucaucuuuuc

SEQ ID NO: 499525 - RNA, 19 nt, Artificial Sequence
  Description of Artificial Sequence: Synthetic oligonucleotide
guaggguucuguuucuguu

SEQ ID NO: 499526 - RNA, 19 nt, Artificial Sequence
  Description of Artificial Sequence: Synthetic oligonucleotide
agcuacagcuuacgacuuu

SEQ ID NO: 499527 - RNA, 19 nt, Artificial Sequence
  Description of Artificial Sequence: Synthetic oligonucleotide
guguucggagauaguuggc

SEQ ID NO: 499528 - RNA, 19 nt, Artificial Sequence
  Description of Artificial Sequence: Synthetic oligonucleotide
gacuaccuucuguccuuca

SEQ ID NO: 499529 - RNA, 19 nt, Artificial Sequence
  Description of Artificial Sequence: Synthetic oligonucleotide
guucggagauaguuggcau

SEQ ID NO: 499530 - RNA, 19 nt, Artificial Sequence
  Description of Artificial Sequence: Synthetic oligonucleotide
ugaggcuauagaggacauu

SEQ ID NO: 499531 - RNA, 19 nt, Artificial Sequence
  Description of Artificial Sequence: Synthetic oligonucleotide
gcuuacgacuuuacuuaug

SEQ ID NO: 499532 - RNA, 19 nt, Artificial Sequence
  Description of Artificial Sequence: Synthetic oligonucleotide
cguagaacuucaguugaug

SEQ ID NO: 499533 - RNA, 19 nt, Artificial Sequence
  Description of Artificial Sequence: Synthetic oligonucleotide
cuuugauuccggugcgagu

SEQ ID NO: 499534 - RNA, 19 nt, Artificial Sequence
  Description of Artificial Sequence: Synthetic oligonucleotide
gacagauggaugguaccau

SEQ ID NO: 499535 - RNA, 19 nt, Artificial Sequence
  Description of Artificial Sequence: Synthetic oligonucleotide
caauaaggguccaguaguu

SEQ ID NO: 499536 - RNA, 19 nt, Artificial Sequence
  Description of Artificial Sequence: Synthetic oligonucleotide
gugcgaguucaucuuuucu

SEQ ID NO: 499537 - RNA, 19 nt, Artificial Sequence
  Description of Artificial Sequence: Synthetic oligonucleotide
caaccuuacuggcagcaau

SEQ ID NO: 499538 - RNA, 19 nt, Artificial Sequence
  Description of Artificial Sequence: Synthetic oligonucleotide
cuggcacgugaggcuauag

SEQ ID NO: 499539 - RNA, 19 nt, Artificial Sequence
  Description of Artificial Sequence: Synthetic oligonucleotide
cucgaucgacuucaucucu

SEQ ID NO: 499540 - RNA, 19 nt, Artificial Sequence
  Description of Artificial Sequence: Synthetic oligonucleotide
cuacaguaggguucuguuu

SEQ ID NO: 499541 - RNA, 19 nt, Artificial Sequence
  Description of Artificial Sequence: Synthetic oligonucleotide
gaucgacuucaucucuuuu

SEQ ID NO: 499542 - RNA, 19 nt, Artificial Sequence
  Description of Artificial Sequence: Synthetic oligonucleotide
ggugacuuccgguguauau

SEQ ID NO: 499543 - RNA, 19 nt, Artificial Sequence
  Description of Artificial Sequence: Synthetic oligonucleotide
agggcauugugaagaguuu

SEQ ID NO: 499544 - RNA, 19 nt, Artificial Sequence
  Description of Artificial Sequence: Synthetic oligonucleotide
uuccgacuugagggaugag

SEQ ID NO: 499545 - RNA, 19 nt, Artificial Sequence
  Description of Artificial Sequence: Synthetic oligonucleotide
guuaagcaacaaguccagu

SEQ ID NO: 499546 - RNA, 19 nt, Artificial Sequence
  Description of Artificial Sequence: Synthetic oligonucleotide
cagcuggucagagagcacu

SEQ ID NO: 499547 - RNA, 19 nt, Artificial Sequence
  Description of Artificial Sequence: Synthetic oligonucleotide
cgacuugagggaugaggag

SEQ ID NO: 499548 - RNA, 19 nt, Artificial Sequence
  Description of Artificial Sequence: Synthetic oligonucleotide
gcuacagcuuacgacuuua

SEQ ID NO: 499549 - RNA, 19 nt, Artificial Sequence
  Description of Artificial Sequence: Synthetic oligonucleotide
cacaagaguucuugguguu

SEQ ID NO: 499550 - RNA, 19 nt, Artificial Sequence
  Description of Artificial Sequence: Synthetic oligonucleotide
cccauagccagauggcaaa

SEQ ID NO: 499551 - RNA, 19 nt, Artificial Sequence
  Description of Artificial Sequence: Synthetic oligonucleotide
gacuuccgguguauaugaa

SEQ ID NO: 499552 - RNA, 19 nt, Artificial Sequence
  Description of Artificial Sequence: Synthetic oligonucleotide
guucuaaguaugggaacuu

SEQ ID NO: 499553 - RNA, 19 nt, Artificial Sequence
  Description of Artificial Sequence: Synthetic oligonucleotide
cagcaauagcgguugucau

SEQ ID NO: 499554 - RNA, 19 nt, Artificial Sequence
  Description of Artificial Sequence: Synthetic oligonucleotide
gccgauacccauagccaga

SEQ ID NO: 499555 - RNA, 19 nt, Artificial Sequence
  Description of Artificial Sequence: Synthetic oligonucleotide
caauagcgguugucaugaa

SEQ ID NO: 499556 - RNA, 19 nt, Artificial Sequence
  Description of Artificial Sequence: Synthetic oligonucleotide
cgguguauaugaauuggcu

SEQ ID NO: 499557 - RNA, 19 nt, Artificial Sequence
  Description of Artificial Sequence: Synthetic oligonucleotide
ccuacaguaggguucuguu

SEQ ID NO: 499558 - RNA, 19 nt, Artificial Sequence
  Description of Artificial Sequence: Synthetic oligonucleotide
cccaccuguguuuguaaua

SEQ ID NO: 499559 - RNA, 19 nt, Artificial Sequence
  Description of Artificial Sequence: Synthetic oligonucleotide
gcuggccgauacccauagc

SEQ ID NO: 499560 - RNA, 19 nt, Artificial Sequence
  Description of Artificial Sequence: Synthetic oligonucleotide
ccaaugguuuaaacaguau

SEQ ID NO: 499561 - RNA, 19 nt, Artificial Sequence
  Description of Artificial Sequence: Synthetic oligonucleotide
ccaccuguguuuguaauau

SEQ ID NO: 499562 - RNA, 19 nt, Artificial Sequence
  Description of Artificial Sequence: Synthetic oligonucleotide
gcuugaguccuuugucauu

SEQ ID NO: 499563 - RNA, 19 nt, Artificial Sequence
  Description of Artificial Sequence: Synthetic oligonucleotide
gcaagaguguguggagagu

SEQ ID NO: 499564 - RNA, 19 nt, Artificial Sequence
  Description of Artificial Sequence: Synthetic oligonucleotide
gccuacaguaggguucugu

SEQ ID NO: 499565 - RNA, 19 nt, Artificial Sequence
  Description of Artificial Sequence: Synthetic oligonucleotide
caccuguguuuguaauauu

SEQ ID NO: 499566 - RNA, 19 nt, Artificial Sequence
  Description of Artificial Sequence: Synthetic oligonucleotide
ggcucugaccagccuuagu

SEQ ID NO: 499567 - RNA, 19 nt, Artificial Sequence
  Description of Artificial Sequence: Synthetic oligonucleotide
cuguuccacaagaguucuu

SEQ ID NO: 499568 - RNA, 19 nt, Artificial Sequence
  Description of Artificial Sequence: Synthetic oligonucleotide
cgauacccauagccagaug

SEQ ID NO: 499569 - RNA, 19 nt, Artificial Sequence
  Description of Artificial Sequence: Synthetic oligonucleotide
ccaaccuuacuggcagcaa

SEQ ID NO: 499570 - RNA, 19 nt, Artificial Sequence
  Description of Artificial Sequence: Synthetic oligonucleotide
cgcuugaguccuuugucau

SEQ ID NO: 499571 - RNA, 19 nt, Artificial Sequence
  Description of Artificial Sequence: Synthetic oligonucleotide
gcguagaacuucaguugau

SEQ ID NO: 499572 - RNA, 19 nt, Artificial Sequence
  Description of Artificial Sequence: Synthetic oligonucleotide
gcuggcacgugaggcuaua

SEQ ID NO: 499573 - RNA, 19 nt, Artificial Sequence
  Description of Artificial Sequence: Synthetic oligonucleotide
gcuggucagagagcacuuu

SEQ ID NO: 499574 - RNA, 19 nt, Artificial Sequence
  Description of Artificial Sequence: Synthetic oligonucleotide
cgaucgacuucaucucuuu

SEQ ID NO: 499575 - RNA, 19 nt, Artificial Sequence
  Description of Artificial Sequence: Synthetic oligonucleotide
gccccucaguuuugcuaau

SEQ ID NO: 499576 - RNA, 19 nt, Artificial Sequence
  Description of Artificial Sequence: Synthetic oligonucleotide
ccggugcgaguucaucuuu

SEQ ID NO: 499577 - RNA, 19 nt, Artificial Sequence
  Description of Artificial Sequence: Synthetic oligonucleotide
cggugcgaguucaucuuuu

SEQ ID NO: 499578 - RNA, 19 nt, Artificial Sequence
  Description of Artificial Sequence: Synthetic oligonucleotide
gcaggacgcuugaguccuu

SEQ ID NO: 499579 - RNA, 19 nt, Artificial Sequence
  Description of Artificial Sequence: Synthetic oligonucleotide
cgguccgcugauggcugcu

SEQ ID NO: 499580 - RNA, 19 nt, Artificial Sequence
  Description of Artificial Sequence: Synthetic oligonucleotide
ugaugugucacuucgaaug

SEQ ID NO: 499581 - RNA, 19 nt, Artificial Sequence
  Description of Artificial Sequence: Synthetic oligonucleotide
auguauauaguaaacacac

SEQ ID NO: 499582 - RNA, 19 nt, Artificial Sequence
  Description of Artificial Sequence: Synthetic oligonucleotide
aaauccuugccauaggcug

SEQ ID NO: 499583 - RNA, 19 nt, Artificial Sequence
  Description of Artificial Sequence: Synthetic oligonucleotide
ucauaguugacucuggcac

SEQ ID NO: 499584 - RNA, 19 nt, Artificial Sequence
  Description of Artificial Sequence: Synthetic oligonucleotide
uccuuuaucucauagacau

SEQ ID NO: 499585 - RNA, 19 nt, Artificial Sequence
  Description of Artificial Sequence: Synthetic oligonucleotide
aagugucuaacguaccacg

SEQ ID NO: 499586 - RNA, 19 nt, Artificial Sequence
  Description of Artificial Sequence: Synthetic oligonucleotide
agcgacuugccguacaucc

SEQ ID NO: 499587 - RNA, 19 nt, Artificial Sequence
  Description of Artificial Sequence: Synthetic oligonucleotide
aaaauugaaggaugcucuc

SEQ ID NO: 499588 - RNA, 19 nt, Artificial Sequence
  Description of Artificial Sequence: Synthetic oligonucleotide
acuacuuagucguugccac

SEQ ID NO: 499589 - RNA, 19 nt, Artificial Sequence
  Description of Artificial Sequence: Synthetic oligonucleotide
gaugucaugguacagcgac

SEQ ID NO: 499590 - RNA, 19 nt, Artificial Sequence
  Description of Artificial Sequence: Synthetic oligonucleotide
aucgcauugaacuuggacu

SEQ ID NO: 499591 - RNA, 19 nt, Artificial Sequence
  Description of Artificial Sequence: Synthetic oligonucleotide
ugagagagagagaugagga

SEQ ID NO: 499592 - RNA, 19 nt, Artificial Sequence
  Description of Artificial Sequence: Synthetic oligonucleotide
cuucgagacaccaugauuc

SEQ ID NO: 499593 - RNA, 19 nt, Artificial Sequence
  Description of Artificial Sequence: Synthetic oligonucleotide
uccgcuuauauuccgcucg

SEQ ID NO: 499594 - RNA, 19 nt, Artificial Sequence
  Description of Artificial Sequence: Synthetic oligonucleotide
aacacacuuauauguaucu

SEQ ID NO: 499595 - RNA, 19 nt, Artificial Sequence
  Description of Artificial Sequence: Synthetic oligonucleotide
aacaucuauucugaacagc

SEQ ID NO: 499596 - RNA, 19 nt, Artificial Sequence
  Description of Artificial Sequence: Synthetic oligonucleotide
ugucuaacguaccacggag

SEQ ID NO: 499597 - RNA, 19 nt, Artificial Sequence
  Description of Artificial Sequence: Synthetic oligonucleotide
uaacguaccacggaggaag

SEQ ID NO: 499598 - RNA, 19 nt, Artificial Sequence
  Description of Artificial Sequence: Synthetic oligonucleotide
gaagcgaggauuucaauca

SEQ ID NO: 499599 - RNA, 19 nt, Artificial Sequence
  Description of Artificial Sequence: Synthetic oligonucleotide
ucgguuuccaaacugggcu

SEQ ID NO: 499600 - RNA, 19 nt, Artificial Sequence
  Description of Artificial Sequence: Synthetic oligonucleotide
uccgauaguccccagaagu

SEQ ID NO: 499601 - RNA, 19 nt, Artificial Sequence
  Description of Artificial Sequence: Synthetic oligonucleotide
uuagucguugccaccacag

SEQ ID NO: 499602 - RNA, 19 nt, Artificial Sequence
  Description of Artificial Sequence: Synthetic oligonucleotide
uacuggauagacuaggaaa

SEQ ID NO: 499603 - RNA, 19 nt, Artificial Sequence
  Description of Artificial Sequence: Synthetic oligonucleotide
ucuaacguaccacggagga

SEQ ID NO: 499604 - RNA, 19 nt, Artificial Sequence
  Description of Artificial Sequence: Synthetic oligonucleotide
uuauccagcccgauugggg

SEQ ID NO: 499605 - RNA, 19 nt, Artificial Sequence
  Description of Artificial Sequence: Synthetic oligonucleotide
ugauuuuaggucuuugauc

SEQ ID NO: 499606 - RNA, 19 nt, Artificial Sequence
  Description of Artificial Sequence: Synthetic oligonucleotide
agcugagagucuuagucac

SEQ ID NO: 499607 - RNA, 19 nt, Artificial Sequence
  Description of Artificial Sequence: Synthetic oligonucleotide
uucaguagaaucuuccgau

SEQ ID NO: 499608 - RNA, 19 nt, Artificial Sequence
  Description of Artificial Sequence: Synthetic oligonucleotide
uccaggauaggucauugga

SEQ ID NO: 499609 - RNA, 19 nt, Artificial Sequence
  Description of Artificial Sequence: Synthetic oligonucleotide
uguuagaacggcucccuag

SEQ ID NO: 499610 - RNA, 19 nt, Artificial Sequence
  Description of Artificial Sequence: Synthetic oligonucleotide
cuggacuagggacauaucc

SEQ ID NO: 499611 - RNA, 19 nt, Artificial Sequence
  Description of Artificial Sequence: Synthetic oligonucleotide
aaugauugcagaggccagg

SEQ ID NO: 499612 - RNA, 19 nt, Artificial Sequence
  Description of Artificial Sequence: Synthetic oligonucleotide
guuagaacggcucccuagg

SEQ ID NO: 499613 - RNA, 19 nt, Artificial Sequence
  Description of Artificial Sequence: Synthetic oligonucleotide
cucgcauggggucaaaucc

SEQ ID NO: 499614 - RNA, 19 nt, Artificial Sequence
  Description of Artificial Sequence: Synthetic oligonucleotide
ucuguuuaguucccggaug

SEQ ID NO: 499615 - RNA, 19 nt, Artificial Sequence
  Description of Artificial Sequence: Synthetic oligonucleotide
cuggcugacuuuaauuugg

SEQ ID NO: 499616 - RNA, 19 nt, Artificial Sequence
  Description of Artificial Sequence: Synthetic oligonucleotide
aguauggggaugaaaagag

SEQ ID NO: 499617 - RNA, 19 nt, Artificial Sequence
  Description of Artificial Sequence: Synthetic oligonucleotide
gucuuagucacaagcaacg

SEQ ID NO: 499618 - RNA, 19 nt, Artificial Sequence
  Description of Artificial Sequence: Synthetic oligonucleotide
agaacggcucccuaggcag

SEQ ID NO: 499619 - RNA, 19 nt, Artificial Sequence
  Description of Artificial Sequence: Synthetic oligonucleotide
agcaacgaggaaugauugc

SEQ ID NO: 499620 - RNA, 19 nt, Artificial Sequence
  Description of Artificial Sequence: Synthetic oligonucleotide
gauguguucguuacuucgg

SEQ ID NO: 499621 - RNA, 19 nt, Artificial Sequence
  Description of Artificial Sequence: Synthetic oligonucleotide
cuuguugagccuuucagca

SEQ ID NO: 499622 - RNA, 19 nt, Artificial Sequence
  Description of Artificial Sequence: Synthetic oligonucleotide
caggcauuucaccacagcc

SEQ ID NO: 499623 - RNA, 19 nt, Artificial Sequence
  Description of Artificial Sequence: Synthetic oligonucleotide
gguaugcuggauaugaggg

SEQ ID NO: 499624 - RNA, 19 nt, Artificial Sequence
  Description of Artificial Sequence: Synthetic oligonucleotide
auaucucggccagucaucc

SEQ ID NO: 499625 - RNA, 19 nt, Artificial Sequence
  Description of Artificial Sequence: Synthetic oligonucleotide
acaguauggggaugaaaag

SEQ ID NO: 499626 - RNA, 19 nt, Artificial Sequence
  Description of Artificial Sequence: Synthetic oligonucleotide
augauucgaaucagggucc

SEQ ID NO: 499627 - RNA, 19 nt, Artificial Sequence
  Description of Artificial Sequence: Synthetic oligonucleotide
agucuuagucacaagcaac

SEQ ID NO: 499628 - RNA, 19 nt, Artificial Sequence
  Description of Artificial Sequence: Synthetic oligonucleotide
guaaucguugaaaacugcc

SEQ ID NO: 499629 - RNA, 19 nt, Artificial Sequence
  Description of Artificial Sequence: Synthetic oligonucleotide
gagagagagagaugaggag

SEQ ID NO: 499630 - RNA, 19 nt, Artificial Sequence
  Description of Artificial Sequence: Synthetic oligonucleotide
ggauguguucguuacuucg

SEQ ID NO: 499631 - RNA, 19 nt, Artificial Sequence
  Description of Artificial Sequence: Synthetic oligonucleotide
uuucggcacaguaugggga

SEQ ID NO: 499632 - RNA, 19 nt, Artificial Sequence
  Description of Artificial Sequence: Synthetic oligonucleotide
uaguuggccacauuaucca

SEQ ID NO: 499633 - RNA, 19 nt, Artificial Sequence
  Description of Artificial Sequence: Synthetic oligonucleotide
ugcuuguuagaacggcucc

SEQ ID NO: 499634 - RNA, 19 nt, Artificial Sequence
  Description of Artificial Sequence: Synthetic oligonucleotide
ugagccuuucagcaaagaa

SEQ ID NO: 499635 - RNA, 19 nt, Artificial Sequence
  Description of Artificial Sequence: Synthetic oligonucleotide
aaauugaaggaugcucucu

SEQ ID NO: 499636 - RNA, 19 nt, Artificial Sequence
  Description of Artificial Sequence: Synthetic oligonucleotide
auguguucguuacuucggg

SEQ ID NO: 499637 - RNA, 19 nt, Artificial Sequence
  Description of Artificial Sequence: Synthetic oligonucleotide
ucgcauugaacuuggacuc

SEQ ID NO: 499638 - RNA, 19 nt, Artificial Sequence
  Description of Artificial Sequence: Synthetic oligonucleotide
acaucuauucugaacagca

SEQ ID NO: 499639 - RNA, 19 nt, Artificial Sequence
  Description of Artificial Sequence: Synthetic oligonucleotide
acgaggaaugauugcagag

SEQ ID NO: 499640 - RNA, 19 nt, Artificial Sequence
  Description of Artificial Sequence: Synthetic oligonucleotide
uccucagaaacauguauau

SEQ ID NO: 499641 - RNA, 19 nt, Artificial Sequence
  Description of Artificial Sequence: Synthetic oligonucleotide
cugagagagagagaugagg

SEQ ID NO: 499642 - RNA, 19 nt, Artificial Sequence
  Description of Artificial Sequence: Synthetic oligonucleotide
auaguugacucuggcaccg

SEQ ID NO: 499643 - RNA, 19 nt, Artificial Sequence
  Description of Artificial Sequence: Synthetic oligonucleotide
caguagaaucuuccgauag

SEQ ID NO: 499644 - RNA, 19 nt, Artificial Sequence
  Description of Artificial Sequence: Synthetic oligonucleotide
ucugcuuguuagaacggcu

SEQ ID NO: 499645 - RNA, 19 nt, Artificial Sequence
  Description of Artificial Sequence: Synthetic oligonucleotide
uuuaguucccggauguguu

SEQ ID NO: 499646 - RNA, 19 nt, Artificial Sequence
  Description of Artificial Sequence: Synthetic oligonucleotide
uagucacaagcaacgagga

SEQ ID NO: 499647 - RNA, 19 nt, Artificial Sequence
  Description of Artificial Sequence: Synthetic oligonucleotide
guaacuuggcacuggcugc

SEQ ID NO: 499648 - RNA, 19 nt, Artificial Sequence
  Description of Artificial Sequence: Synthetic oligonucleotide
uuccgcucggauauccagg

SEQ ID NO: 499649 - RNA, 19 nt, Artificial Sequence
  Description of Artificial Sequence: Synthetic oligonucleotide
aguagaaucuuccgauagu

SEQ ID NO: 499650 - RNA, 19 nt, Artificial Sequence
  Description of Artificial Sequence: Synthetic oligonucleotide
caugguacagcgacuugcc

SEQ ID NO: 499651 - RNA, 19 nt, Artificial Sequence
  Description of Artificial Sequence: Synthetic oligonucleotide
ucguugaaaacugccacca

SEQ ID NO: 499652 - RNA, 19 nt, Artificial Sequence
  Description of Artificial Sequence: Synthetic oligonucleotide
uucccugagagagagagau

SEQ ID NO: 499653 - RNA, 19 nt, Artificial Sequence
  Description of Artificial Sequence: Synthetic oligonucleotide
gucgagcucacuucgagac

SEQ ID NO: 499654 - RNA, 19 nt, Artificial Sequence
  Description of Artificial Sequence: Synthetic oligonucleotide
guuacuucgggaagcgagg

SEQ ID NO: 499655 - RNA, 19 nt, Artificial Sequence
  Description of Artificial Sequence: Synthetic oligonucleotide
ucguugccaccacagaucu

SEQ ID NO: 499656 - RNA, 19 nt, Artificial Sequence
  Description of Artificial Sequence: Synthetic oligonucleotide
cagguuuaaggcacauucc

SEQ ID NO: 499657 - RNA, 19 nt, Artificial Sequence
  Description of Artificial Sequence: Synthetic oligonucleotide
uuuuaggucuuugaucaaa

SEQ ID NO: 499658 - RNA, 19 nt, Artificial Sequence
  Description of Artificial Sequence: Synthetic oligonucleotide
uggcuacagacauucaggu

SEQ ID NO: 499659 - RNA, 19 nt, Artificial Sequence
  Description of Artificial Sequence: Synthetic oligonucleotide
uucguuacuucgggaagcg

SEQ ID NO: 499660 - RNA, 19 nt, Artificial Sequence
  Description of Artificial Sequence: Synthetic oligonucleotide
gaaucuuccgauagucccc

SEQ ID NO: 499661 - RNA, 19 nt, Artificial Sequence
  Description of Artificial Sequence: Synthetic oligonucleotide
agaaucgcauugaacuugg

SEQ ID NO: 499662 - RNA, 19 nt, Artificial Sequence
  Description of Artificial Sequence: Synthetic oligonucleotide
uuagaacggcucccuaggc

SEQ ID NO: 499663 - RNA, 19 nt, Artificial Sequence
  Description of Artificial Sequence: Synthetic oligonucleotide
aagcaacgaggaaugauug

SEQ ID NO: 499664 - RNA, 19 nt, Artificial Sequence
  Description of Artificial Sequence: Synthetic oligonucleotide
ucaucuguuccuaggcggu

SEQ ID NO: 499665 - RNA, 19 nt, Artificial Sequence
  Description of Artificial Sequence: Synthetic oligonucleotide
uagaacggcucccuaggca

SEQ ID NO: 499666 - RNA, 19 nt, Artificial Sequence
  Description of Artificial Sequence: Synthetic oligonucleotide
auuccauaaggagggacag

SEQ ID NO: 499667 - RNA, 19 nt, Artificial Sequence
  Description of Artificial Sequence: Synthetic oligonucleotide
uacuuagucguugccacca

SEQ ID NO: 499668 - RNA, 19 nt, Artificial Sequence
  Description of Artificial Sequence: Synthetic oligonucleotide
uguaggcucuguuuaguuc

SEQ ID NO: 499669 - RNA, 19 nt, Artificial Sequence
  Description of Artificial Sequence: Synthetic oligonucleotide
accacagaucuucaguaga

SEQ ID NO: 499670 - RNA, 19 nt, Artificial Sequence
  Description of Artificial Sequence: Synthetic oligonucleotide
ugacccacccacuuacuac

SEQ ID NO: 499671 - RNA, 19 nt, Artificial Sequence
  Description of Artificial Sequence: Synthetic oligonucleotide
guagauggcugccugagaa

SEQ ID NO: 499672 - RNA, 19 nt, Artificial Sequence
  Description of Artificial Sequence: Synthetic oligonucleotide
cuggguagcucauaguuga

SEQ ID NO: 499673 - RNA, 19 nt, Artificial Sequence
  Description of Artificial Sequence: Synthetic oligonucleotide
agugucuaacguaccacgg

SEQ ID NO: 499674 - RNA, 19 nt, Artificial Sequence
  Description of Artificial Sequence: Synthetic oligonucleotide
ucacuucgagacaccauga

SEQ ID NO: 499675 - RNA, 19 nt, Artificial Sequence
  Description of Artificial Sequence: Synthetic oligonucleotide
uggguaacuuggcacuggc

SEQ ID NO: 499676 - RNA, 19 nt, Artificial Sequence
  Description of Artificial Sequence: Synthetic oligonucleotide
uccuggguaacuuggcacu

SEQ ID NO: 499677 - RNA, 19 nt, Artificial Sequence
  Description of Artificial Sequence: Synthetic oligonucleotide
cauuauccagcccgauugg

SEQ ID NO: 499678 - RNA, 19 nt, Artificial Sequence
  Description of Artificial Sequence: Synthetic oligonucleotide
agagucuuagucacaagca

SEQ ID NO: 499679 - RNA, 19 nt, Artificial Sequence
  Description of Artificial Sequence: Synthetic oligonucleotide
ucgcauggggucaaaucca

SEQ ID NO: 499680 - RNA, 19 nt, Artificial Sequence
  Description of Artificial Sequence: Synthetic oligonucleotide
cucgguuuccaaacugggc

SEQ ID NO: 499681 - RNA, 19 nt, Artificial Sequence
  Description of Artificial Sequence: Synthetic oligonucleotide
gaagugucuaacguaccac

SEQ ID NO: 499682 - RNA, 19 nt, Artificial Sequence
  Description of Artificial Sequence: Synthetic oligonucleotide
aacguaccacggaggaagc

SEQ ID NO: 499683 - RNA, 19 nt, Artificial Sequence
  Description of Artificial Sequence: Synthetic oligonucleotide
gaucucaacccgcgaagug

SEQ ID NO: 499684 - RNA, 19 nt, Artificial Sequence
  Description of Artificial Sequence: Synthetic oligonucleotide
ggaagcgaggauuucaauc

SEQ ID NO: 499685 - RNA, 19 nt, Artificial Sequence
  Description of Artificial Sequence: Synthetic oligonucleotide
ucacuacuuagucguugcc

SEQ ID NO: 499686 - RNA, 19 nt, Artificial Sequence
  Description of Artificial Sequence: Synthetic oligonucleotide
gagucuuagucacaagcaa

SEQ ID NO: 499687 - RNA, 19 nt, Artificial Sequence
  Description of Artificial Sequence: Synthetic oligonucleotide
acugacgcuuucccggauc

SEQ ID NO: 499688 - RNA, 19 nt, Artificial Sequence
  Description of Artificial Sequence: Synthetic oligonucleotide
ugucacuucgaauggccuc

SEQ ID NO: 499689 - RNA, 19 nt, Artificial Sequence
  Description of Artificial Sequence: Synthetic oligonucleotide
gaguauccuggguaacuug

SEQ ID NO: 499690 - RNA, 19 nt, Artificial Sequence
  Description of Artificial Sequence: Synthetic oligonucleotide
cuuauauuccgcucggaua

SEQ ID NO: 499691 - RNA, 19 nt, Artificial Sequence
  Description of Artificial Sequence: Synthetic oligonucleotide
uguguucguuacuucggga

SEQ ID NO: 499692 - RNA, 19 nt, Artificial Sequence
  Description of Artificial Sequence: Synthetic oligonucleotide
cuucaguagaaucuuccga

SEQ ID NO: 499693 - RNA, 19 nt, Artificial Sequence
  Description of Artificial Sequence: Synthetic oligonucleotide
ucucaacccgcgaaguguc

SEQ ID NO: 499694 - RNA, 19 nt, Artificial Sequence
  Description of Artificial Sequence: Synthetic oligonucleotide
ugauucgaaucaggguccg

SEQ ID NO: 499695 - RNA, 19 nt, Artificial Sequence
  Description of Artificial Sequence: Synthetic oligonucleotide
uuuguaggcucuguuuagu

SEQ ID NO: 499696 - RNA, 19 nt, Artificial Sequence
  Description of Artificial Sequence: Synthetic oligonucleotide
auaugagggcaucccaggu

SEQ ID NO: 499697 - RNA, 19 nt, Artificial Sequence
  Description of Artificial Sequence: Synthetic oligonucleotide
ucucgcauggggucaaauc

SEQ ID NO: 499698 - RNA, 19 nt, Artificial Sequence
  Description of Artificial Sequence: Synthetic oligonucleotide
acuuagucguugccaccac

SEQ ID NO: 499699 - RNA, 19 nt, Artificial Sequence
  Description of Artificial Sequence: Synthetic oligonucleotide
cauggggucaaauccagaa

SEQ ID NO: 499700 - RNA, 19 nt, Artificial Sequence
  Description of Artificial Sequence: Synthetic oligonucleotide
aagugucucccgugauguc

SEQ ID NO: 499701 - RNA, 19 nt, Artificial Sequence
  Description of Artificial Sequence: Synthetic oligonucleotide
auccgcuuauauuccgcuc

SEQ ID NO: 499702 - RNA, 19 nt, Artificial Sequence
  Description of Artificial Sequence: Synthetic oligonucleotide
ggaggucgagcucacuucg

SEQ ID NO: 499703 - RNA, 19 nt, Artificial Sequence
  Description of Artificial Sequence: Synthetic oligonucleotide
ucccacugacgcuuucccg

SEQ ID NO: 499704 - RNA, 19 nt, Artificial Sequence
  Description of Artificial Sequence: Synthetic oligonucleotide
uccgcucggauauccagga

SEQ ID NO: 499705 - RNA, 19 nt, Artificial Sequence
  Description of Artificial Sequence: Synthetic oligonucleotide
ugccucgguuuccaaacug

SEQ ID NO: 499706 - RNA, 19 nt, Artificial Sequence
  Description of Artificial Sequence: Synthetic oligonucleotide
uccaaaugucccagacaug

SEQ ID NO: 499707 - RNA, 19 nt, Artificial Sequence
  Description of Artificial Sequence: Synthetic oligonucleotide
ucuguuccuaggcgguucu

SEQ ID NO: 499708 - RNA, 19 nt, Artificial Sequence
  Description of Artificial Sequence: Synthetic oligonucleotide
cuuucccuggccaaugcca

SEQ ID NO: 499709 - RNA, 19 nt, Artificial Sequence
  Description of Artificial Sequence: Synthetic oligonucleotide
gacaucucucuggacuagg

SEQ ID NO: 499710 - RNA, 19 nt, Artificial Sequence
  Description of Artificial Sequence: Synthetic oligonucleotide
uauuccgcucggauaucca

SEQ ID NO: 499711 - RNA, 19 nt, Artificial Sequence
  Description of Artificial Sequence: Synthetic oligonucleotide
uguccaggauaggucauug

SEQ ID NO: 499712 - RNA, 19 nt, Artificial Sequence
  Description of Artificial Sequence: Synthetic oligonucleotide
uuaguucccggauguguuc

SEQ ID NO: 499713 - RNA, 19 nt, Artificial Sequence
  Description of Artificial Sequence: Synthetic oligonucleotide
aucucaacccgcgaagugu

SEQ ID NO: 499714 - RNA, 19 nt, Artificial Sequence
  Description of Artificial Sequence: Synthetic oligonucleotide
uucggcacaguauggggau

SEQ ID NO: 499715 - RNA, 19 nt, Artificial Sequence
  Description of Artificial Sequence: Synthetic oligonucleotide
auggccuguucaucaguuc

SEQ ID NO: 499716 - RNA, 19 nt, Artificial Sequence
  Description of Artificial Sequence: Synthetic oligonucleotide
uccaggauacagguuuggc

SEQ ID NO: 499717 - RNA, 19 nt, Artificial Sequence
  Description of Artificial Sequence: Synthetic oligonucleotide
cuucucgauaucucggcca

SEQ ID NO: 499718 - RNA, 19 nt, Artificial Sequence
  Description of Artificial Sequence: Synthetic oligonucleotide
cacccacuuacuacucucc

SEQ ID NO: 499719 - RNA, 19 nt, Artificial Sequence
  Description of Artificial Sequence: Synthetic oligonucleotide
guguucguuacuucgggaa

SEQ ID NO: 499720 - RNA, 19 nt, Artificial Sequence
  Description of Artificial Sequence: Synthetic oligonucleotide
ggagcacagaaucgcauug

SEQ ID NO: 499721 - RNA, 19 nt, Artificial Sequence
  Description of Artificial Sequence: Synthetic oligonucleotide
acccgcgaagugucuaacg

SEQ ID NO: 499722 - RNA, 19 nt, Artificial Sequence
  Description of Artificial Sequence: Synthetic oligonucleotide
gccauaggcugucuuaaag

SEQ ID NO: 499723 - RNA, 19 nt, Artificial Sequence
  Description of Artificial Sequence: Synthetic oligonucleotide
ucccggauguguucguuac

SEQ ID NO: 499724 - RNA, 19 nt, Artificial Sequence
  Description of Artificial Sequence: Synthetic oligonucleotide
aggguccggucuuuuguuc

SEQ ID NO: 499725 - RNA, 19 nt, Artificial Sequence
  Description of Artificial Sequence: Synthetic oligonucleotide
aacggcucccuaggcaguc

SEQ ID NO: 499726 - RNA, 19 nt, Artificial Sequence
  Description of Artificial Sequence: Synthetic oligonucleotide
ccaggauaggucauuggag

SEQ ID NO: 499727 - RNA, 19 nt, Artificial Sequence
  Description of Artificial Sequence: Synthetic oligonucleotide
uucgaaucaggguccgguc

SEQ ID NO: 499728 - RNA, 19 nt, Artificial Sequence
  Description of Artificial Sequence: Synthetic oligonucleotide
aacccgcgaagugucuaac

SEQ ID NO: 499729 - RNA, 19 nt, Artificial Sequence
  Description of Artificial Sequence: Synthetic oligonucleotide
cuccaaaugucccagacau

SEQ ID NO: 499730 - RNA, 19 nt, Artificial Sequence
  Description of Artificial Sequence: Synthetic oligonucleotide
gauaucucggccagucauc

SEQ ID NO: 499731 - RNA, 19 nt, Artificial Sequence
  Description of Artificial Sequence: Synthetic oligonucleotide
ugucuacaacaaagcugag

SEQ ID NO: 499732 - RNA, 19 nt, Artificial Sequence
  Description of Artificial Sequence: Synthetic oligonucleotide
uuucccugagagagagaga

SEQ ID NO: 499733 - RNA, 19 nt, Artificial Sequence
  Description of Artificial Sequence: Synthetic oligonucleotide
caucuguaauggugccucg

SEQ ID NO: 499734 - RNA, 19 nt, Artificial Sequence
  Description of Artificial Sequence: Synthetic oligonucleotide
uuacuucgggaagcgagga

SEQ ID NO: 499735 - RNA, 19 nt, Artificial Sequence
  Description of Artificial Sequence: Synthetic oligonucleotide
ucgggaagcgaggauuuca

SEQ ID NO: 499736 - RNA, 19 nt, Artificial Sequence
  Description of Artificial Sequence: Synthetic oligonucleotide
cccacugacgcuuucccgg

SEQ ID NO: 499737 - RNA, 19 nt, Artificial Sequence
  Description of Artificial Sequence: Synthetic oligonucleotide
guaaacacacuuauaugua

SEQ ID NO: 499738 - RNA, 19 nt, Artificial Sequence
  Description of Artificial Sequence: Synthetic oligonucleotide
uucccggaucucaacccgc

SEQ ID NO: 499739 - RNA, 19 nt, Artificial Sequence
  Description of Artificial Sequence: Synthetic oligonucleotide
agcgaggauuucaaucagg

SEQ ID NO: 499740 - RNA, 19 nt, Artificial Sequence
  Description of Artificial Sequence: Synthetic oligonucleotide
ggauaugagggcaucccag

SEQ ID NO: 499741 - RNA, 19 nt, Artificial Sequence
  Description of Artificial Sequence: Synthetic oligonucleotide
ggugccucgguuuccaaac

SEQ ID NO: 499742 - RNA, 19 nt, Artificial Sequence
  Description of Artificial Sequence: Synthetic oligonucleotide
gcggaaaacucuccaggcg

SEQ ID NO: 499743 - RNA, 19 nt, Artificial Sequence
  Description of Artificial Sequence: Synthetic oligonucleotide
uacagcgacuugccguaca

SEQ ID NO: 499744 - RNA, 19 nt, Artificial Sequence
  Description of Artificial Sequence: Synthetic oligonucleotide
cuuccgauaguccccagaa

SEQ ID NO: 499745 - RNA, 19 nt, Artificial Sequence
  Description of Artificial Sequence: Synthetic oligonucleotide
aucuguuccuaggcgguuc

SEQ ID NO: 499746 - RNA, 19 nt, Artificial Sequence
  Description of Artificial Sequence: Synthetic oligonucleotide
gacgcuuucccggaucuca

SEQ ID NO: 499747 - RNA, 19 nt, Artificial Sequence
  Description of Artificial Sequence: Synthetic oligonucleotide
acaagcaacgaggaaugau

SEQ ID NO: 499748 - RNA, 19 nt, Artificial Sequence
  Description of Artificial Sequence: Synthetic oligonucleotide
gucacaagcaacgaggaau

SEQ ID NO: 499749 - RNA, 19 nt, Artificial Sequence
  Description of Artificial Sequence: Synthetic oligonucleotide
ucgagcucacuucgagaca

SEQ ID NO: 499750 - RNA, 19 nt, Artificial Sequence
  Description of Artificial Sequence: Synthetic oligonucleotide
uguuuaguucccggaugug

SEQ ID NO: 499751 - RNA, 19 nt, Artificial Sequence
  Description of Artificial Sequence: Synthetic oligonucleotide
uuguaggcucuguuuaguu

SEQ ID NO: 499752 - RNA, 19 nt, Artificial Sequence
  Description of Artificial Sequence: Synthetic oligonucleotide
uccugaugugucacuucga

SEQ ID NO: 499753 - RNA, 19 nt, Artificial Sequence
  Description of Artificial Sequence: Synthetic oligonucleotide
uccggucuuuuguuccugc

SEQ ID NO: 499754 - RNA, 19 nt, Artificial Sequence
  Description of Artificial Sequence: Synthetic oligonucleotide
aaacugccaccaggugggc

SEQ ID NO: 499755 - RNA, 19 nt, Artificial Sequence
  Description of Artificial Sequence: Synthetic oligonucleotide
cguuacuucgggaagcgag

SEQ ID NO: 499756 - RNA, 19 nt, Artificial Sequence
  Description of Artificial Sequence: Synthetic oligonucleotide
gugucuaacguaccacgga

SEQ ID NO: 499757 - RNA, 19 nt, Artificial Sequence
  Description of Artificial Sequence: Synthetic oligonucleotide
gcuuucccggaucucaacc

SEQ ID NO: 499758 - RNA, 19 nt, Artificial Sequence
  Description of Artificial Sequence: Synthetic oligonucleotide
gaccggggucuucaucagg

SEQ ID NO: 499759 - RNA, 19 nt, Artificial Sequence
  Description of Artificial Sequence: Synthetic oligonucleotide
uccaaacuagaaggauccc

SEQ ID NO: 499760 - RNA, 19 nt, Artificial Sequence
  Description of Artificial Sequence: Synthetic oligonucleotide
gauucgaaucaggguccgg

SEQ ID NO: 499761 - RNA, 19 nt, Artificial Sequence
  Description of Artificial Sequence: Synthetic oligonucleotide
acccacuuacuacucuccu

SEQ ID NO: 499762 - RNA, 19 nt, Artificial Sequence
  Description of Artificial Sequence: Synthetic oligonucleotide
gcgaggauuucaaucaggc

SEQ ID NO: 499763 - RNA, 19 nt, Artificial Sequence
  Description of Artificial Sequence: Synthetic oligonucleotide
acuucgggaagcgaggauu

SEQ ID NO: 499764 - RNA, 19 nt, Artificial Sequence
  Description of Artificial Sequence: Synthetic oligonucleotide
uugccguacauccgcuuau

SEQ ID NO: 499765 - RNA, 19 nt, Artificial Sequence
  Description of Artificial Sequence: Synthetic oligonucleotide
ggcgguucucuccagcugc

SEQ ID NO: 499766 - RNA, 19 nt, Artificial Sequence
  Description of Artificial Sequence: Synthetic oligonucleotide
gucucccgugaugucaugg

SEQ ID NO: 499767 - RNA, 19 nt, Artificial Sequence
  Description of Artificial Sequence: Synthetic oligonucleotide
uuugugcucucgucacggu

SEQ ID NO: 499768 - RNA, 19 nt, Artificial Sequence
  Description of Artificial Sequence: Synthetic oligonucleotide
cuugccauaggcugucuua

SEQ ID NO: 499769 - RNA, 19 nt, Artificial Sequence
  Description of Artificial Sequence: Synthetic oligonucleotide
caagcaacgaggaaugauu

SEQ ID NO: 499770 - RNA, 19 nt, Artificial Sequence
  Description of Artificial Sequence: Synthetic oligonucleotide
cucccuaggcagucgauga

SEQ ID NO: 499771 - RNA, 19 nt, Artificial Sequence
  Description of Artificial Sequence: Synthetic oligonucleotide
gguaaucguugaaaacugc

SEQ ID NO: 499772 - RNA, 19 nt, Artificial Sequence
  Description of Artificial Sequence: Synthetic oligonucleotide
cauugaacuuggacucauc

SEQ ID NO: 499773 - RNA, 19 nt, Artificial Sequence
  Description of Artificial Sequence: Synthetic oligonucleotide
uugugcucucgucacgguu

SEQ ID NO: 499774 - RNA, 19 nt, Artificial Sequence
  Description of Artificial Sequence: Synthetic oligonucleotide
ugacucuggcaccggggac

SEQ ID NO: 499775 - RNA, 19 nt, Artificial Sequence
  Description of Artificial Sequence: Synthetic oligonucleotide
acguaccacggaggaagcc

SEQ ID NO: 499776 - RNA, 19 nt, Artificial Sequence
  Description of Artificial Sequence: Synthetic oligonucleotide
agcucauaguugacucugg

SEQ ID NO: 499777 - RNA, 19 nt, Artificial Sequence
  Description of Artificial Sequence: Synthetic oligonucleotide
ucccugagagagagagaug

SEQ ID NO: 499778 - RNA, 19 nt, Artificial Sequence
  Description of Artificial Sequence: Synthetic oligonucleotide
guauccuggguaacuuggc

SEQ ID NO: 499779 - RNA, 19 nt, Artificial Sequence
  Description of Artificial Sequence: Synthetic oligonucleotide
acagcgacuugccguacau

SEQ ID NO: 499780 - RNA, 19 nt, Artificial Sequence
  Description of Artificial Sequence: Synthetic oligonucleotide
ucuggacuagggacauauc

SEQ ID NO: 499781 - RNA, 19 nt, Artificial Sequence
  Description of Artificial Sequence: Synthetic oligonucleotide
gucguugccaccacagauc

SEQ ID NO: 499782 - RNA, 19 nt, Artificial Sequence
  Description of Artificial Sequence: Synthetic oligonucleotide
cacuacuuagucguugcca

SEQ ID NO: 499783 - RNA, 19 nt, Artificial Sequence
  Description of Artificial Sequence: Synthetic oligonucleotide
ucgagacaccaugauucga

SEQ ID NO: 499784 - RNA, 19 nt, Artificial Sequence
  Description of Artificial Sequence: Synthetic oligonucleotide
ccacuuacuacucuccuca

SEQ ID NO: 499785 - RNA, 19 nt, Artificial Sequence
  Description of Artificial Sequence: Synthetic oligonucleotide
gaggaagcccgcggggcgg

SEQ ID NO: 499786 - RNA, 19 nt, Artificial Sequence
  Description of Artificial Sequence: Synthetic oligonucleotide
guugagccuuucagcaaag

SEQ ID NO: 499787 - RNA, 19 nt, Artificial Sequence
  Description of Artificial Sequence: Synthetic oligonucleotide
uggugccucgguuuccaaa

SEQ ID NO: 499788 - RNA, 19 nt, Artificial Sequence
  Description of Artificial Sequence: Synthetic oligonucleotide
cuccaggauacagguuugg

SEQ ID NO: 499789 - RNA, 19 nt, Artificial Sequence
  Description of Artificial Sequence: Synthetic oligonucleotide
gucaugguacagcgacuug

SEQ ID NO: 499790 - RNA, 19 nt, Artificial Sequence
  Description of Artificial Sequence: Synthetic oligonucleotide
uacuucgggaagcgaggau

SEQ ID NO: 499791 - RNA, 19 nt, Artificial Sequence
  Description of Artificial Sequence: Synthetic oligonucleotide
ggcgcugagguugacuugc

SEQ ID NO: 499792 - RNA, 19 nt, Artificial Sequence
  Description of Artificial Sequence: Synthetic oligonucleotide
gagcacagaaucgcauuga

SEQ ID NO: 499793 - RNA, 19 nt, Artificial Sequence
  Description of Artificial Sequence: Synthetic oligonucleotide
caggccucaucaguaccgg

SEQ ID NO: 499794 - RNA, 19 nt, Artificial Sequence
  Description of Artificial Sequence: Synthetic oligonucleotide
aacaaagcugagagucuua

SEQ ID NO: 499795 - RNA, 19 nt, Artificial Sequence
  Description of Artificial Sequence: Synthetic oligonucleotide
uaguugacucuggcaccgg

SEQ ID NO: 499796 - RNA, 19 nt, Artificial Sequence
  Description of Artificial Sequence: Synthetic oligonucleotide
agcaucucgcaugggguca

SEQ ID NO: 499797 - RNA, 19 nt, Artificial Sequence
  Description of Artificial Sequence: Synthetic oligonucleotide
cuguuuaguucccggaugu

SEQ ID NO: 499798 - RNA, 19 nt, Artificial Sequence
  Description of Artificial Sequence: Synthetic oligonucleotide
cuuagucguugccaccaca

SEQ ID NO: 499799 - RNA, 19 nt, Artificial Sequence
  Description of Artificial Sequence: Synthetic oligonucleotide
ucgucacgguuucccugag

SEQ ID NO: 499800 - RNA, 19 nt, Artificial Sequence
  Description of Artificial Sequence: Synthetic oligonucleotide
gccucaucaguaccggccc

SEQ ID NO: 499801 - RNA, 19 nt, Artificial Sequence
  Description of Artificial Sequence: Synthetic oligonucleotide
ggggcggaaaacucuccag

SEQ ID NO: 499802 - RNA, 19 nt, Artificial Sequence
  Description of Artificial Sequence: Synthetic oligonucleotide
gggugacccacccacuuac

SEQ ID NO: 499803 - RNA, 19 nt, Artificial Sequence
  Description of Artificial Sequence: Synthetic oligonucleotide
ccuuucggcacaguauggg

SEQ ID NO: 499804 - RNA, 19 nt, Artificial Sequence
  Description of Artificial Sequence: Synthetic oligonucleotide
aggcgguucucuccagcug

SEQ ID NO: 499805 - RNA, 19 nt, Artificial Sequence
  Description of Artificial Sequence: Synthetic oligonucleotide
gccucgguuuccaaacugg

SEQ ID NO: 499806 - RNA, 19 nt, Artificial Sequence
  Description of Artificial Sequence: Synthetic oligonucleotide
uaccacggaggaagcccgc

SEQ ID NO: 499807 - RNA, 19 nt, Artificial Sequence
  Description of Artificial Sequence: Synthetic oligonucleotide
uauauuccgcucggauauc

SEQ ID NO: 499808 - RNA, 19 nt, Artificial Sequence
  Description of Artificial Sequence: Synthetic oligonucleotide
caucagggccaggauaguc

SEQ ID NO: 499809 - RNA, 19 nt, Artificial Sequence
  Description of Artificial Sequence: Synthetic oligonucleotide
gugacgguacuggauccug

SEQ ID NO: 499810 - RNA, 19 nt, Artificial Sequence
  Description of Artificial Sequence: Synthetic oligonucleotide
aggcgagccacugucacua

SEQ ID NO: 499811 - RNA, 19 nt, Artificial Sequence
  Description of Artificial Sequence: Synthetic oligonucleotide
uaucucggccagucauccu

SEQ ID NO: 499812 - RNA, 19 nt, Artificial Sequence
  Description of Artificial Sequence: Synthetic oligonucleotide
ucaacccgcgaagugucua

SEQ ID NO: 499813 - RNA, 19 nt, Artificial Sequence
  Description of Artificial Sequence: Synthetic oligonucleotide
ggauagucuucucaaaguu

SEQ ID NO: 499814 - RNA, 19 nt, Artificial Sequence
  Description of Artificial Sequence: Synthetic oligonucleotide
cccugagagagagagauga

SEQ ID NO: 499815 - RNA, 19 nt, Artificial Sequence
  Description of Artificial Sequence: Synthetic oligonucleotide
cuggaguguucuucaggca

SEQ ID NO: 499816 - RNA, 19 nt, Artificial Sequence
  Description of Artificial Sequence: Synthetic oligonucleotide
ggauuucaaucaggcaggc

SEQ ID NO: 499817 - RNA, 19 nt, Artificial Sequence
  Description of Artificial Sequence: Synthetic oligonucleotide
ggcaggccucaucaguacc

SEQ ID NO: 499818 - RNA, 19 nt, Artificial Sequence
  Description of Artificial Sequence: Synthetic oligonucleotide
ucguuacuucgggaagcga

SEQ ID NO: 499819 - RNA, 19 nt, Artificial Sequence
  Description of Artificial Sequence: Synthetic oligonucleotide
ccugagagagagagaugag

SEQ ID NO: 499820 - RNA, 19 nt, Artificial Sequence
  Description of Artificial Sequence: Synthetic oligonucleotide
ugcuccccgcauagccuug

SEQ ID NO: 499821 - RNA, 19 nt, Artificial Sequence
  Description of Artificial Sequence: Synthetic oligonucleotide
ugucucccgugaugucaug

SEQ ID NO: 499822 - RNA, 19 nt, Artificial Sequence
  Description of Artificial Sequence: Synthetic oligonucleotide
cguaccacggaggaagccc

SEQ ID NO: 499823 - RNA, 19 nt, Artificial Sequence
  Description of Artificial Sequence: Synthetic oligonucleotide
ucggcacaguauggggaug

SEQ ID NO: 499824 - RNA, 19 nt, Artificial Sequence
  Description of Artificial Sequence: Synthetic oligonucleotide
gcuuauauuccgcucggau

SEQ ID NO: 499825 - RNA, 19 nt, Artificial Sequence
  Description of Artificial Sequence: Synthetic oligonucleotide
ggucgagcucacuucgaga

SEQ ID NO: 499826 - RNA, 19 nt, Artificial Sequence
  Description of Artificial Sequence: Synthetic oligonucleotide
cccuuucggcacaguaugg

SEQ ID NO: 499827 - RNA, 19 nt, Artificial Sequence
  Description of Artificial Sequence: Synthetic oligonucleotide
ccgcuuauauuccgcucgg

SEQ ID NO: 499828 - RNA, 19 nt, Artificial Sequence
  Description of Artificial Sequence: Synthetic oligonucleotide
cucuguuuaguucccggau

SEQ ID NO: 499829 - RNA, 19 nt, Artificial Sequence
  Description of Artificial Sequence: Synthetic oligonucleotide
gcgacuugccguacauccg

SEQ ID NO: 499830 - RNA, 19 nt, Artificial Sequence
  Description of Artificial Sequence: Synthetic oligonucleotide
ccacccacuuacuacucuc

SEQ ID NO: 499831 - RNA, 19 nt, Artificial Sequence
  Description of Artificial Sequence: Synthetic oligonucleotide
agagguaguccugguugaa

SEQ ID NO: 499832 - RNA, 19 nt, Artificial Sequence
  Description of Artificial Sequence: Synthetic oligonucleotide
gagcucacuucgagacacc

SEQ ID NO: 499833 - RNA, 19 nt, Artificial Sequence
  Description of Artificial Sequence: Synthetic oligonucleotide
cccacuuacuacucuccuc

SEQ ID NO: 499834 - RNA, 19 nt, Artificial Sequence
  Description of Artificial Sequence: Synthetic oligonucleotide
cucuggacuagggacauau

SEQ ID NO: 499835 - RNA, 19 nt, Artificial Sequence
  Description of Artificial Sequence: Synthetic oligonucleotide
gugcucucgucacgguuuc

SEQ ID NO: 499836 - RNA, 19 nt, Artificial Sequence
  Description of Artificial Sequence: Synthetic oligonucleotide
ccugggguacuggauagac

SEQ ID NO: 499837 - RNA, 19 nt, Artificial Sequence
  Description of Artificial Sequence: Synthetic oligonucleotide
gguagauggcugccugaga

SEQ ID NO: 499838 - RNA, 19 nt, Artificial Sequence
  Description of Artificial Sequence: Synthetic oligonucleotide
cgagcucacuucgagacac

SEQ ID NO: 499839 - RNA, 19 nt, Artificial Sequence
  Description of Artificial Sequence: Synthetic oligonucleotide
cuacucuccucagaaacau

SEQ ID NO: 499840 - RNA, 19 nt, Artificial Sequence
  Description of Artificial Sequence: Synthetic oligonucleotide
gcucccuaggcagucgaug

SEQ ID NO: 499841 - RNA, 19 nt, Artificial Sequence
  Description of Artificial Sequence: Synthetic oligonucleotide
ugccguacauccgcuuaua

SEQ ID NO: 499842 - RNA, 19 nt, Artificial Sequence
  Description of Artificial Sequence: Synthetic oligonucleotide
acggcucccuaggcagucg

SEQ ID NO: 499843 - RNA, 19 nt, Artificial Sequence
  Description of Artificial Sequence: Synthetic oligonucleotide
caacccgcgaagugucuaa

SEQ ID NO: 499844 - RNA, 19 nt, Artificial Sequence
  Description of Artificial Sequence: Synthetic oligonucleotide
cuaacguaccacggaggaa

SEQ ID NO: 499845 - RNA, 19 nt, Artificial Sequence
  Description of Artificial Sequence: Synthetic oligonucleotide
gaggucgagcucacuucga

SEQ ID NO: 499846 - RNA, 19 nt, Artificial Sequence
  Description of Artificial Sequence: Synthetic oligonucleotide
cgaagugucuaacguacca

SEQ ID NO: 499847 - RNA, 19 nt, Artificial Sequence
  Description of Artificial Sequence: Synthetic oligonucleotide
cugguugaacugcccugca

SEQ ID NO: 499848 - RNA, 19 nt, Artificial Sequence
  Description of Artificial Sequence: Synthetic oligonucleotide
ccgcauagccuuguugagc

SEQ ID NO: 499849 - RNA, 19 nt, Artificial Sequence
  Description of Artificial Sequence: Synthetic oligonucleotide
ggguagccuggguagcuca

SEQ ID NO: 499850 - RNA, 19 nt, Artificial Sequence
  Description of Artificial Sequence: Synthetic oligonucleotide
cgcauggggucaaauccag

SEQ ID NO: 499851 - RNA, 19 nt, Artificial Sequence
  Description of Artificial Sequence: Synthetic oligonucleotide
ugcucucgucacgguuucc

SEQ ID NO: 499852 - RNA, 19 nt, Artificial Sequence
  Description of Artificial Sequence: Synthetic oligonucleotide
acgguuucccugagagaga

SEQ ID NO: 499853 - RNA, 19 nt, Artificial Sequence
  Description of Artificial Sequence: Synthetic oligonucleotide
aucucgcauggggucaaau

SEQ ID NO: 499854 - RNA, 19 nt, Artificial Sequence
  Description of Artificial Sequence: Synthetic oligonucleotide
gcaccggggacccgggcgc

SEQ ID NO: 499855 - RNA, 19 nt, Artificial Sequence
  Description of Artificial Sequence: Synthetic oligonucleotide
gcgaagugucuaacguacc

SEQ ID NO: 499856 - RNA, 19 nt, Artificial Sequence
  Description of Artificial Sequence: Synthetic oligonucleotide
gggccggguagauggcugc

SEQ ID NO: 499857 - RNA, 19 nt, Artificial Sequence
  Description of Artificial Sequence: Synthetic oligonucleotide
caggaggucgagcucacuu

SEQ ID NO: 499858 - RNA, 19 nt, Artificial Sequence
  Description of Artificial Sequence: Synthetic oligonucleotide
cacaagcaacgaggaauga

SEQ ID NO: 499859 - RNA, 19 nt, Artificial Sequence
  Description of Artificial Sequence: Synthetic oligonucleotide
ccggguagauggcugccug

SEQ ID NO: 499860 - RNA, 19 nt, Artificial Sequence
  Description of Artificial Sequence: Synthetic oligonucleotide
cagcgacuugccguacauc

SEQ ID NO: 499861 - RNA, 19 nt, Artificial Sequence
  Description of Artificial Sequence: Synthetic oligonucleotide
guacagcgacuugccguac

SEQ ID NO: 499862 - RNA, 19 nt, Artificial Sequence
  Description of Artificial Sequence: Synthetic oligonucleotide
gacuccgggagcacagaau

SEQ ID NO: 499863 - RNA, 19 nt, Artificial Sequence
  Description of Artificial Sequence: Synthetic oligonucleotide
acgcuuucccggaucucaa

SEQ ID NO: 499864 - RNA, 19 nt, Artificial Sequence
  Description of Artificial Sequence: Synthetic oligonucleotide
gccaugguucugggguggg

SEQ ID NO: 499865 - RNA, 19 nt, Artificial Sequence
  Description of Artificial Sequence: Synthetic oligonucleotide
ggugggcccgacuccggga

SEQ ID NO: 499866 - RNA, 19 nt, Artificial Sequence
  Description of Artificial Sequence: Synthetic oligonucleotide
ggguagcucauaguugacu

SEQ ID NO: 499867 - RNA, 19 nt, Artificial Sequence
  Description of Artificial Sequence: Synthetic oligonucleotide
ggaucucaacccgcgaagu

SEQ ID NO: 499868 - RNA, 19 nt, Artificial Sequence
  Description of Artificial Sequence: Synthetic oligonucleotide
gcauaguuggccacauuau

SEQ ID NO: 499869 - RNA, 19 nt, Artificial Sequence
  Description of Artificial Sequence: Synthetic oligonucleotide
guagccuggguagcucaua

SEQ ID NO: 499870 - RNA, 19 nt, Artificial Sequence
  Description of Artificial Sequence: Synthetic oligonucleotide
ggauggggugacccaccca

SEQ ID NO: 499871 - RNA, 19 nt, Artificial Sequence
  Description of Artificial Sequence: Synthetic oligonucleotide
gugccucgguuuccaaacu

SEQ ID NO: 499872 - RNA, 19 nt, Artificial Sequence
  Description of Artificial Sequence: Synthetic oligonucleotide
ccaugguucuggggugggg

SEQ ID NO: 499873 - RNA, 19 nt, Artificial Sequence
  Description of Artificial Sequence: Synthetic oligonucleotide
cucaacccgcgaagugucu

SEQ ID NO: 499874 - RNA, 19 nt, Artificial Sequence
  Description of Artificial Sequence: Synthetic oligonucleotide
ccggaucucaacccgcgaa

SEQ ID NO: 499875 - RNA, 19 nt, Artificial Sequence
  Description of Artificial Sequence: Synthetic oligonucleotide
gaacggcucccuaggcagu

SEQ ID NO: 499876 - RNA, 19 nt, Artificial Sequence
  Description of Artificial Sequence: Synthetic oligonucleotide
gaggagccgcuggaagugu

SEQ ID NO: 499877 - RNA, 19 nt, Artificial Sequence
  Description of Artificial Sequence: Synthetic oligonucleotide
ccacugacgcuuucccgga

SEQ ID NO: 499878 - RNA, 19 nt, Artificial Sequence
  Description of Artificial Sequence: Synthetic oligonucleotide
gaagcccgcggggcggaaa

SEQ ID NO: 499879 - RNA, 19 nt, Artificial Sequence
  Description of Artificial Sequence: Synthetic oligonucleotide
cccgcgaagugucuaacgu

SEQ ID NO: 499880 - RNA, 19 nt, Artificial Sequence
  Description of Artificial Sequence: Synthetic oligonucleotide
ggggugacccacccacuua

SEQ ID NO: 499881 - RNA, 19 nt, Artificial Sequence
  Description of Artificial Sequence: Synthetic oligonucleotide
cucucuggacuagggacau

SEQ ID NO: 499882 - RNA, 19 nt, Artificial Sequence
  Description of Artificial Sequence: Synthetic oligonucleotide
caggguccggucuuuuguu

SEQ ID NO: 499883 - RNA, 19 nt, Artificial Sequence
  Description of Artificial Sequence: Synthetic oligonucleotide
ccgggagcacagaaucgca

SEQ ID NO: 499884 - RNA, 19 nt, Artificial Sequence
  Description of Artificial Sequence: Synthetic oligonucleotide
ggcgagccacugucacuac

SEQ ID NO: 499885 - RNA, 19 nt, Artificial Sequence
  Description of Artificial Sequence: Synthetic oligonucleotide
cgcggggcggaaaacucuc

SEQ ID NO: 499886 - RNA, 19 nt, Artificial Sequence
  Description of Artificial Sequence: Synthetic oligonucleotide
ggccggguagauggcugcc

SEQ ID NO: 499887 - RNA, 19 nt, Artificial Sequence
  Description of Artificial Sequence: Synthetic oligonucleotide
ccgaaggaccucagcaucu

SEQ ID NO: 499888 - RNA, 19 nt, Artificial Sequence
  Description of Artificial Sequence: Synthetic oligonucleotide
ccgcgaagugucuaacgua

SEQ ID NO: 499889 - RNA, 19 nt, Artificial Sequence
  Description of Artificial Sequence: Synthetic oligonucleotide
cgauaucucggccagucau

SEQ ID NO: 499890 - RNA, 19 nt, Artificial Sequence
  Description of Artificial Sequence: Synthetic oligonucleotide
gcauggggucaaauccaga

SEQ ID NO: 499891 - RNA, 19 nt, Artificial Sequence
  Description of Artificial Sequence: Synthetic oligonucleotide
gcauugaacuuggacucau

SEQ ID NO: 499892 - RNA, 19 nt, Artificial Sequence
  Description of Artificial Sequence: Synthetic oligonucleotide
cgcuuucccggaucucaac

SEQ ID NO: 499893 - RNA, 19 nt, Artificial Sequence
  Description of Artificial Sequence: Synthetic oligonucleotide
cgggaagcgaggauuucaa

SEQ ID NO: 499894 - RNA, 19 nt, Artificial Sequence
  Description of Artificial Sequence: Synthetic oligonucleotide
ccgcucggauauccaggag

SEQ ID NO: 499895 - RNA, 19 nt, Artificial Sequence
  Description of Artificial Sequence: Synthetic oligonucleotide
ccguacauccgcuuauauu

SEQ ID NO: 499896 - RNA, 19 nt, Artificial Sequence
  Description of Artificial Sequence: Synthetic oligonucleotide
cugucacuacuuagucguu

SEQ ID NO: 499897 - RNA, 19 nt, Artificial Sequence
  Description of Artificial Sequence: Synthetic oligonucleotide
gccguacauccgcuuauau

SEQ ID NO: 499898 - RNA, 19 nt, Artificial Sequence
  Description of Artificial Sequence: Synthetic oligonucleotide
accggggacccgggcgcug

SEQ ID NO: 499899 - RNA, 19 nt, Artificial Sequence
  Description of Artificial Sequence: Synthetic oligonucleotide
gcgagccacugucacuacu

SEQ ID NO: 499900 - RNA, 19 nt, Artificial Sequence
  Description of Artificial Sequence: Synthetic oligonucleotide
ggcacaguauggggaugaa

SEQ ID NO: 499901 - RNA, 19 nt, Artificial Sequence
  Description of Artificial Sequence: Synthetic oligonucleotide
ggguaacuuggcacuggcu

SEQ ID NO: 499902 - RNA, 19 nt, Artificial Sequence
  Description of Artificial Sequence: Synthetic oligonucleotide
gcaucucgcauggggucaa

SEQ ID NO: 499903 - RNA, 19 nt, Artificial Sequence
  Description of Artificial Sequence: Synthetic oligonucleotide
cggggcggaaaacucucca

SEQ ID NO: 499904 - RNA, 19 nt, Artificial Sequence
  Description of Artificial Sequence: Synthetic oligonucleotide
gcauagccuuguugagccu

SEQ ID NO: 499905 - RNA, 19 nt, Artificial Sequence
  Description of Artificial Sequence: Synthetic oligonucleotide
cgcauugaacuuggacuca

SEQ ID NO: 499906 - RNA, 19 nt, Artificial Sequence
  Description of Artificial Sequence: Synthetic oligonucleotide
caucucgcauggggucaaa

SEQ ID NO: 499907 - RNA, 19 nt, Artificial Sequence
  Description of Artificial Sequence: Synthetic oligonucleotide
cagcaggggugacgguacu

SEQ ID NO: 499908 - RNA, 19 nt, Artificial Sequence
  Description of Artificial Sequence: Synthetic oligonucleotide
ccggucuuuuguuccugcu

SEQ ID NO: 499909 - RNA, 19 nt, Artificial Sequence
  Description of Artificial Sequence: Synthetic oligonucleotide
gcagucgaugauggccugu

SEQ ID NO: 499910 - RNA, 19 nt, Artificial Sequence
  Description of Artificial Sequence: Synthetic oligonucleotide
gguagccuggguagcucau

SEQ ID NO: 499911 - RNA, 19 nt, Artificial Sequence
  Description of Artificial Sequence: Synthetic oligonucleotide
cacugacgcuuucccggau

SEQ ID NO: 499912 - RNA, 19 nt, Artificial Sequence
  Description of Artificial Sequence: Synthetic oligonucleotide
cccacccacuuacuacucu

SEQ ID NO: 499913 - RNA, 19 nt, Artificial Sequence
  Description of Artificial Sequence: Synthetic oligonucleotide
gccggguagauggcugccu

SEQ ID NO: 499914 - RNA, 19 nt, Artificial Sequence
  Description of Artificial Sequence: Synthetic oligonucleotide
cgcuuauauuccgcucgga

SEQ ID NO: 499915 - RNA, 19 nt, Artificial Sequence
  Description of Artificial Sequence: Synthetic oligonucleotide
ccgcggggcggaaaacucu

SEQ ID NO: 499916 - RNA, 19 nt, Artificial Sequence
  Description of Artificial Sequence: Synthetic oligonucleotide
gccaugccugagagguagu

SEQ ID NO: 499917 - RNA, 19 nt, Artificial Sequence
  Description of Artificial Sequence: Synthetic oligonucleotide
ggcucccuaggcagucgau

SEQ ID NO: 499918 - RNA, 19 nt, Artificial Sequence
  Description of Artificial Sequence: Synthetic oligonucleotide
ggaagcccgcggggcggaa

SEQ ID NO: 499919 - RNA, 19 nt, Artificial Sequence
  Description of Artificial Sequence: Synthetic oligonucleotide
ccggggacccgggcgcuga

SEQ ID NO: 499920 - RNA, 19 nt, Artificial Sequence
  Description of Artificial Sequence: Synthetic oligonucleotide
ccgggcgcugagguugacu

SEQ ID NO: 499921 - RNA, 19 nt, Artificial Sequence
  Description of Artificial Sequence: Synthetic oligonucleotide
cguugccaccacagaucuu

SEQ ID NO: 499922 - RNA, 19 nt, Artificial Sequence
  Description of Artificial Sequence: Synthetic oligonucleotide
aaguuuaccacauuacuuc

SEQ ID NO: 499923 - RNA, 19 nt, Artificial Sequence
  Description of Artificial Sequence: Synthetic oligonucleotide
ucuguuauaagacaugcug

SEQ ID NO: 499924 - RNA, 19 nt, Artificial Sequence
  Description of Artificial Sequence: Synthetic oligonucleotide
gacgaaguagucuucaagg

SEQ ID NO: 499925 - RNA, 19 nt, Artificial Sequence
  Description of Artificial Sequence: Synthetic oligonucleotide
agcaccuuacuucacagcc

SEQ ID NO: 499926 - RNA, 19 nt, Artificial Sequence
  Description of Artificial Sequence: Synthetic oligonucleotide
gaggauauuaaacuguuug

SEQ ID NO: 499927 - RNA, 19 nt, Artificial Sequence
  Description of Artificial Sequence: Synthetic oligonucleotide
acaagguugagcuuguccg

SEQ ID NO: 499928 - RNA, 19 nt, Artificial Sequence
  Description of Artificial Sequence: Synthetic oligonucleotide
aagucagucacuucccugg

SEQ ID NO: 499929 - RNA, 19 nt, Artificial Sequence
  Description of Artificial Sequence: Synthetic oligonucleotide
uuuucacuaagacaagacc

SEQ ID NO: 499930 - RNA, 19 nt, Artificial Sequence
  Description of Artificial Sequence: Synthetic oligonucleotide
ucuagagucaaggagaaug

SEQ ID NO: 499931 - RNA, 19 nt, Artificial Sequence
  Description of Artificial Sequence: Synthetic oligonucleotide
aaucacagaaguaggauuc

SEQ ID NO: 499932 - RNA, 19 nt, Artificial Sequence
  Description of Artificial Sequence: Synthetic oligonucleotide
accacauuacuucagggcg

SEQ ID NO: 499933 - RNA, 19 nt, Artificial Sequence
  Description of Artificial Sequence: Synthetic oligonucleotide
agucuaaggcuucugagac

SEQ ID NO: 499934 - RNA, 19 nt, Artificial Sequence
  Description of Artificial Sequence: Synthetic oligonucleotide
uaagacaagacccugcuuc

SEQ ID NO: 499935 - RNA, 19 nt, Artificial Sequence
  Description of Artificial Sequence: Synthetic oligonucleotide
aauugauggcacucuugcc

SEQ ID NO: 499936 - RNA, 19 nt, Artificial Sequence
  Description of Artificial Sequence: Synthetic oligonucleotide
aauaguauccauucccuaa

SEQ ID NO: 499937 - RNA, 19 nt, Artificial Sequence
  Description of Artificial Sequence: Synthetic oligonucleotide
ucgaaaagcgugucgaagg

SEQ ID NO: 499938 - RNA, 19 nt, Artificial Sequence
  Description of Artificial Sequence: Synthetic oligonucleotide
aacagaguguaaaggaccc

SEQ ID NO: 499939 - RNA, 19 nt, Artificial Sequence
  Description of Artificial Sequence: Synthetic oligonucleotide
caagcaucagcucaaaggc

SEQ ID NO: 499940 - RNA, 19 nt, Artificial Sequence
  Description of Artificial Sequence: Synthetic oligonucleotide
uguuauaagacaugcugca

SEQ ID NO: 499941 - RNA, 19 nt, Artificial Sequence
  Description of Artificial Sequence: Synthetic oligonucleotide
uugcaagucagucacuucc

SEQ ID NO: 499942 - RNA, 19 nt, Artificial Sequence
  Description of Artificial Sequence: Synthetic oligonucleotide
uuauguaaaaggucaguca

SEQ ID NO: 499943 - RNA, 19 nt, Artificial Sequence
  Description of Artificial Sequence: Synthetic oligonucleotide
aauggcuugugugaacggc

SEQ ID NO: 499944 - RNA, 19 nt, Artificial Sequence
  Description of Artificial Sequence: Synthetic oligonucleotide
agaccaguaaaccacaaga

SEQ ID NO: 499945 - RNA, 19 nt, Artificial Sequence
  Description of Artificial Sequence: Synthetic oligonucleotide
agcaaacuauuccaagccc

SEQ ID NO: 499946 - RNA, 19 nt, Artificial Sequence
  Description of Artificial Sequence: Synthetic oligonucleotide
cugagauauggcuagagug

SEQ ID NO: 499947 - RNA, 19 nt, Artificial Sequence
  Description of Artificial Sequence: Synthetic oligonucleotide
aaagacucguccuucuuca

SEQ ID NO: 499948 - RNA, 19 nt, Artificial Sequence
  Description of Artificial Sequence: Synthetic oligonucleotide
aaaucggcccaucaucauc

SEQ ID NO: 499949 - RNA, 19 nt, Artificial Sequence
  Description of Artificial Sequence: Synthetic oligonucleotide
ucuaaggcuucugagacag

SEQ ID NO: 499950 - RNA, 19 nt, Artificial Sequence
  Description of Artificial Sequence: Synthetic oligonucleotide
auugauggcacucuugccu

SEQ ID NO: 499951 - RNA, 19 nt, Artificial Sequence
  Description of Artificial Sequence: Synthetic oligonucleotide
aagggugugggcauguagc

SEQ ID NO: 499952 - RNA, 19 nt, Artificial Sequence
  Description of Artificial Sequence: Synthetic oligonucleotide
cuguuauaagacaugcugc

SEQ ID NO: 499953 - RNA, 19 nt, Artificial Sequence
  Description of Artificial Sequence: Synthetic oligonucleotide
uaguaauggauacccaccc

SEQ ID NO: 499954 - RNA, 19 nt, Artificial Sequence
  Description of Artificial Sequence: Synthetic oligonucleotide
uuucuguuauaagacaugc

SEQ ID NO: 499955 - RNA, 19 nt, Artificial Sequence
  Description of Artificial Sequence: Synthetic oligonucleotide
aagucuaaggcuucugaga

SEQ ID NO: 499956 - RNA, 19 nt, Artificial Sequence
  Description of Artificial Sequence: Synthetic oligonucleotide
cuaguaauggauacccacc

SEQ ID NO: 499957 - RNA, 19 nt, Artificial Sequence
  Description of Artificial Sequence: Synthetic oligonucleotide
uggacagauacacugauuu

SEQ ID NO: 499958 - RNA, 19 nt, Artificial Sequence
  Description of Artificial Sequence: Synthetic oligonucleotide
uguaaaaggucagucaaga

SEQ ID NO: 499959 - RNA, 19 nt, Artificial Sequence
  Description of Artificial Sequence: Synthetic oligonucleotide
cuugccuagauacuguccc

SEQ ID NO: 499960 - RNA, 19 nt, Artificial Sequence
  Description of Artificial Sequence: Synthetic oligonucleotide
uauagaaggcuggagguag

SEQ ID NO: 499961 - RNA, 19 nt, Artificial Sequence
  Description of Artificial Sequence: Synthetic oligonucleotide
aguaauggauacccacccc

SEQ ID NO: 499962 - RNA, 19 nt, Artificial Sequence
  Description of Artificial Sequence: Synthetic oligonucleotide
ugguuauuuuguuagugug

SEQ ID NO: 499963 - RNA, 19 nt, Artificial Sequence
  Description of Artificial Sequence: Synthetic oligonucleotide
ugcauagccagagagacga

SEQ ID NO: 499964 - RNA, 19 nt, Artificial Sequence
  Description of Artificial Sequence: Synthetic oligonucleotide
aaaauaguauccauucccu

SEQ ID NO: 499965 - RNA, 19 nt, Artificial Sequence
  Description of Artificial Sequence: Synthetic oligonucleotide
ugugguugugugcauguag

SEQ ID NO: 499966 - RNA, 19 nt, Artificial Sequence
  Description of Artificial Sequence: Synthetic oligonucleotide
ugaacuuuggguccucucu

SEQ ID NO: 499967 - RNA, 19 nt, Artificial Sequence
  Description of Artificial Sequence: Synthetic oligonucleotide
gagaaugaguggugaaugg

SEQ ID NO: 499968 - RNA, 19 nt, Artificial Sequence
  Description of Artificial Sequence: Synthetic oligonucleotide
agaaugaguggugaauggc

SEQ ID NO: 499969 - RNA, 19 nt, Artificial Sequence
  Description of Artificial Sequence: Synthetic oligonucleotide
aaacgccacauugugcacc

SEQ ID NO: 499970 - RNA, 19 nt, Artificial Sequence
  Description of Artificial Sequence: Synthetic oligonucleotide
uuugcccgaucucagacug

SEQ ID NO: 499971 - RNA, 19 nt, Artificial Sequence
  Description of Artificial Sequence: Synthetic oligonucleotide
aggcaucccgcucaaaucg

SEQ ID NO: 499972 - RNA, 19 nt, Artificial Sequence
  Description of Artificial Sequence: Synthetic oligonucleotide
agaguuuauguaaaagguc

SEQ ID NO: 499973 - RNA, 19 nt, Artificial Sequence
  Description of Artificial Sequence: Synthetic oligonucleotide
uaccacauuacuucagggc

SEQ ID NO: 499974 - RNA, 19 nt, Artificial Sequence
  Description of Artificial Sequence: Synthetic oligonucleotide
uuccgaacaaccaccaccu

SEQ ID NO: 499975 - RNA, 19 nt, Artificial Sequence
  Description of Artificial Sequence: Synthetic oligonucleotide
agaaguaggauucccgaga

SEQ ID NO: 499976 - RNA, 19 nt, Artificial Sequence
  Description of Artificial Sequence: Synthetic oligonucleotide
uccucugagauauggcuag

SEQ ID NO: 499977 - RNA, 19 nt, Artificial Sequence
  Description of Artificial Sequence: Synthetic oligonucleotide
agcuuagcaacaguggaac

SEQ ID NO: 499978 - RNA, 19 nt, Artificial Sequence
  Description of Artificial Sequence: Synthetic oligonucleotide
uucuauuugguaucagcac

SEQ ID NO: 499979 - RNA, 19 nt, Artificial Sequence
  Description of Artificial Sequence: Synthetic oligonucleotide
acacaucacaagucuaagg

SEQ ID NO: 499980 - RNA, 19 nt, Artificial Sequence
  Description of Artificial Sequence: Synthetic oligonucleotide
uccauucccuaacagggcc

SEQ ID NO: 499981 - RNA, 19 nt, Artificial Sequence
  Description of Artificial Sequence: Synthetic oligonucleotide
cugguggacagauacacug

SEQ ID NO: 499982 - RNA, 19 nt, Artificial Sequence
  Description of Artificial Sequence: Synthetic oligonucleotide
ucugagauauggcuagagu

SEQ ID NO: 499983 - RNA, 19 nt, Artificial Sequence
  Description of Artificial Sequence: Synthetic oligonucleotide
acuaagacaagacccugcu

SEQ ID NO: 499984 - RNA, 19 nt, Artificial Sequence
  Description of Artificial Sequence: Synthetic oligonucleotide
agucaagaccaguaaacca

SEQ ID NO: 499985 - RNA, 19 nt, Artificial Sequence
  Description of Artificial Sequence: Synthetic oligonucleotide
gauauggcuagagugcagc

SEQ ID NO: 499986 - RNA, 19 nt, Artificial Sequence
  Description of Artificial Sequence: Synthetic oligonucleotide
agaguccacauuccagcgc

SEQ ID NO: 499987 - RNA, 19 nt, Artificial Sequence
  Description of Artificial Sequence: Synthetic oligonucleotide
ucccgagacaagaagccag

SEQ ID NO: 499988 - RNA, 19 nt, Artificial Sequence
  Description of Artificial Sequence: Synthetic oligonucleotide
caagucuaaggcuucugag

SEQ ID NO: 499989 - RNA, 19 nt, Artificial Sequence
  Description of Artificial Sequence: Synthetic oligonucleotide
acaaguggggcggaguccc

SEQ ID NO: 499990 - RNA, 19 nt, Artificial Sequence
  Description of Artificial Sequence: Synthetic oligonucleotide
gaaguaggauucccgagac

SEQ ID NO: 499991 - RNA, 19 nt, Artificial Sequence
  Description of Artificial Sequence: Synthetic oligonucleotide
ugagagacuucuucacaag

SEQ ID NO: 499992 - RNA, 19 nt, Artificial Sequence
  Description of Artificial Sequence: Synthetic oligonucleotide
aaauaguauccauucccua

SEQ ID NO: 499993 - RNA, 19 nt, Artificial Sequence
  Description of Artificial Sequence: Synthetic oligonucleotide
gacgaggaggugaagaaug

SEQ ID NO: 499994 - RNA, 19 nt, Artificial Sequence
  Description of Artificial Sequence: Synthetic oligonucleotide
aguuuaccacauuacuuca

SEQ ID NO: 499995 - RNA, 19 nt, Artificial Sequence
  Description of Artificial Sequence: Synthetic oligonucleotide
ugccguuuuaauuaucuuu

SEQ ID NO: 499996 - RNA, 19 nt, Artificial Sequence
  Description of Artificial Sequence: Synthetic oligonucleotide
uggauagaguccacauucc

SEQ ID NO: 499997 - RNA, 19 nt, Artificial Sequence
  Description of Artificial Sequence: Synthetic oligonucleotide
aguucuaggaagggugugg

SEQ ID NO: 499998 - RNA, 19 nt, Artificial Sequence
  Description of Artificial Sequence: Synthetic oligonucleotide
cucaaaucggcccaucauc

SEQ ID NO: 499999 - RNA, 19 nt, Artificial Sequence
  Description of Artificial Sequence: Synthetic oligonucleotide
acaagucuaaggcuucuga

SEQ ID NO: 500000 - RNA, 19 nt, Artificial Sequence
  Description of Artificial Sequence: Synthetic oligonucleotide
gaugagagacuucuucaca

SEQ ID NO: 500001 - RNA, 19 nt, Artificial Sequence
  Description of Artificial Sequence: Synthetic oligonucleotide
gaguguaaaggacccgcag

SEQ ID NO: 500002 - RNA, 19 nt, Artificial Sequence
  Description of Artificial Sequence: Synthetic oligonucleotide
aaucggcccaucaucaucu

SEQ ID NO: 500003 - RNA, 19 nt, Artificial Sequence
  Description of Artificial Sequence: Synthetic oligonucleotide
guugugugcauguagggaa

SEQ ID NO: 500004 - RNA, 19 nt, Artificial Sequence
  Description of Artificial Sequence: Synthetic oligonucleotide
aaaagcgugucgaaggcau

SEQ ID NO: 500005 - RNA, 19 nt, Artificial Sequence
  Description of Artificial Sequence: Synthetic oligonucleotide
aacguuccaguccugguua

SEQ ID NO: 500006 - RNA, 19 nt, Artificial Sequence
  Description of Artificial Sequence: Synthetic oligonucleotide
aucagcucaaaggcaaacg

SEQ ID NO: 500007 - RNA, 19 nt, Artificial Sequence
  Description of Artificial Sequence: Synthetic oligonucleotide
gaagaggguggccguauag

SEQ ID NO: 500008 - RNA, 19 nt, Artificial Sequence
  Description of Artificial Sequence: Synthetic oligonucleotide
cacaagguugagcuugucc

SEQ ID NO: 500009 - RNA, 19 nt, Artificial Sequence
  Description of Artificial Sequence: Synthetic oligonucleotide
gaagggugugggcauguag

SEQ ID NO: 500010 - RNA, 19 nt, Artificial Sequence
  Description of Artificial Sequence: Synthetic oligonucleotide
ugaaucacagaaguaggau

SEQ ID NO: 500011 - RNA, 19 nt, Artificial Sequence
  Description of Artificial Sequence: Synthetic oligonucleotide
auggucgaaaagcgugucg

SEQ ID NO: 500012 - RNA, 19 nt, Artificial Sequence
  Description of Artificial Sequence: Synthetic oligonucleotide
aacgccacauugugcaccu

SEQ ID NO: 500013 - RNA, 19 nt, Artificial Sequence
  Description of Artificial Sequence: Synthetic oligonucleotide
guagauuugagguccaagu

SEQ ID NO: 500014 - RNA, 19 nt, Artificial Sequence
  Description of Artificial Sequence: Synthetic oligonucleotide
aguagauuugagguccaag

SEQ ID NO: 500015 - RNA, 19 nt, Artificial Sequence
  Description of Artificial Sequence: Synthetic oligonucleotide
aguuccucugagauauggc

SEQ ID NO: 500016 - RNA, 19 nt, Artificial Sequence
  Description of Artificial Sequence: Synthetic oligonucleotide
ugcuuuugcccgaucucag

SEQ ID NO: 500017 - RNA, 19 nt, Artificial Sequence
  Description of Artificial Sequence: Synthetic oligonucleotide
agagagaaguagcugccgu

SEQ ID NO: 500018 - RNA, 19 nt, Artificial Sequence
  Description of Artificial Sequence: Synthetic oligonucleotide
aguuuauguaaaaggucag

SEQ ID NO: 500019 - RNA, 19 nt, Artificial Sequence
  Description of Artificial Sequence: Synthetic oligonucleotide
gaguccuccaucaagcauc

SEQ ID NO: 500020 - RNA, 19 nt, Artificial Sequence
  Description of Artificial Sequence: Synthetic oligonucleotide
ggugaaucacagaaguagg

SEQ ID NO: 500021 - RNA, 19 nt, Artificial Sequence
  Description of Artificial Sequence: Synthetic oligonucleotide
uggucgaaaagcgugucga

SEQ ID NO: 500022 - RNA, 19 nt, Artificial Sequence
  Description of Artificial Sequence: Synthetic oligonucleotide
cauuacuucagggcgugcc

SEQ ID NO: 500023 - RNA, 19 nt, Artificial Sequence
  Description of Artificial Sequence: Synthetic oligonucleotide
ggugcauggucgaaaagcg

SEQ ID NO: 500024 - RNA, 19 nt, Artificial Sequence
  Description of Artificial Sequence: Synthetic oligonucleotide
cagucaagaccaguaaacc

SEQ ID NO: 500025 - RNA, 19 nt, Artificial Sequence
  Description of Artificial Sequence: Synthetic oligonucleotide
aaacaggcccuguguagcu

SEQ ID NO: 500026 - RNA, 19 nt, Artificial Sequence
  Description of Artificial Sequence: Synthetic oligonucleotide
cagaguguaaaggacccgc

SEQ ID NO: 500027 - RNA, 19 nt, Artificial Sequence
  Description of Artificial Sequence: Synthetic oligonucleotide
cagaaguaggauucccgag

SEQ ID NO: 500028 - RNA, 19 nt, Artificial Sequence
  Description of Artificial Sequence: Synthetic oligonucleotide
aggcaaacgccacauugug

SEQ ID NO: 500029 - RNA, 19 nt, Artificial Sequence
  Description of Artificial Sequence: Synthetic oligonucleotide
gcaaacgccacauugugca

SEQ ID NO: 500030 - RNA, 19 nt, Artificial Sequence
  Description of Artificial Sequence: Synthetic oligonucleotide
cugaagugcauagccagag

SEQ ID NO: 500031 - RNA, 19 nt, Artificial Sequence
  Description of Artificial Sequence: Synthetic oligonucleotide
uuuugcccgaucucagacu

SEQ ID NO: 500032 - RNA, 19 nt, Artificial Sequence
  Description of Artificial Sequence: Synthetic oligonucleotide
cuuagcaacaguggaacca

SEQ ID NO: 500033 - RNA, 19 nt, Artificial Sequence
  Description of Artificial Sequence: Synthetic oligonucleotide
ccuaguaauggauacccac

SEQ ID NO: 500034 - RNA, 19 nt, Artificial Sequence
  Description of Artificial Sequence: Synthetic oligonucleotide
cauucagcuugcagugucc

SEQ ID NO: 500035 - RNA, 19 nt, Artificial Sequence
  Description of Artificial Sequence: Synthetic oligonucleotide
uaaugucacugcuucccac

SEQ ID NO: 500036 - RNA, 19 nt, Artificial Sequence
  Description of Artificial Sequence: Synthetic oligonucleotide
uugauccaguccagaagca

SEQ ID NO: 500037 - RNA, 19 nt, Artificial Sequence
  Description of Artificial Sequence: Synthetic oligonucleotide
ugugugaacggcagcguuu

SEQ ID NO: 500038 - RNA, 19 nt, Artificial Sequence
  Description of Artificial Sequence: Synthetic oligonucleotide
uuacuucacagcccugguc

SEQ ID NO: 500039 - RNA, 19 nt, Artificial Sequence
  Description of Artificial Sequence: Synthetic oligonucleotide
agcccuaguaauggauacc

SEQ ID NO: 500040 - RNA, 19 nt, Artificial Sequence
  Description of Artificial Sequence: Synthetic oligonucleotide
ugaguccuccaucaagcau

SEQ ID NO: 500041 - RNA, 19 nt, Artificial Sequence
  Description of Artificial Sequence: Synthetic oligonucleotide
ccguauagaaggcuggagg

SEQ ID NO: 500042 - RNA, 19 nt, Artificial Sequence
  Description of Artificial Sequence: Synthetic oligonucleotide
ggagguaggaggaacauga

SEQ ID NO: 500043 - RNA, 19 nt, Artificial Sequence
  Description of Artificial Sequence: Synthetic oligonucleotide
aaugaguggugaauggcuu

SEQ ID NO: 500044 - RNA, 19 nt, Artificial Sequence
  Description of Artificial Sequence: Synthetic oligonucleotide
gucgaaaagcgugucgaag

SEQ ID NO: 500045 - RNA, 19 nt, Artificial Sequence
  Description of Artificial Sequence: Synthetic oligonucleotide
caagucagucacuucccug

SEQ ID NO: 500046 - RNA, 19 nt, Artificial Sequence
  Description of Artificial Sequence: Synthetic oligonucleotide
ucguugauccaguccagaa

SEQ ID NO: 500047 - RNA, 19 nt, Artificial Sequence
  Description of Artificial Sequence: Synthetic oligonucleotide
agaggguggccguauagaa

SEQ ID NO: 500048 - RNA, 19 nt, Artificial Sequence
  Description of Artificial Sequence: Synthetic oligonucleotide
uucccgcuuccgaacaacc

SEQ ID NO: 500049 - RNA, 19 nt, Artificial Sequence
  Description of Artificial Sequence: Synthetic oligonucleotide
cagcgugccacccaacuug

SEQ ID NO: 500050 - RNA, 19 nt, Artificial Sequence
  Description of Artificial Sequence: Synthetic oligonucleotide
ggacgaaguagucuucaag

SEQ ID NO: 500051 - RNA, 19 nt, Artificial Sequence
  Description of Artificial Sequence: Synthetic oligonucleotide
aacaccucucuagagucaa

SEQ ID NO: 500052 - RNA, 19 nt, Artificial Sequence
  Description of Artificial Sequence: Synthetic oligonucleotide
ugggcgaucgcgguggcgc

SEQ ID NO: 500053 - RNA, 19 nt, Artificial Sequence
  Description of Artificial Sequence: Synthetic oligonucleotide
uguccaccgaagccggggc

SEQ ID NO: 500054 - RNA, 19 nt, Artificial Sequence
  Description of Artificial Sequence: Synthetic oligonucleotide
acgguaaugccguuuuaau

SEQ ID NO: 500055 - RNA, 19 nt, Artificial Sequence
  Description of Artificial Sequence: Synthetic oligonucleotide
agaacguuccaguccuggu

SEQ ID NO: 500056 - RNA, 19 nt, Artificial Sequence
  Description of Artificial Sequence: Synthetic oligonucleotide
auauggcuagagugcagca

SEQ ID NO: 500057 - RNA, 19 nt, Artificial Sequence
  Description of Artificial Sequence: Synthetic oligonucleotide
agggaggauauuaaacugu

SEQ ID NO: 500058 - RNA, 19 nt, Artificial Sequence
  Description of Artificial Sequence: Synthetic oligonucleotide
ggauucccgagacaagaag

SEQ ID NO: 500059 - RNA, 19 nt, Artificial Sequence
  Description of Artificial Sequence: Synthetic oligonucleotide
cuuagaccaccugugagca

SEQ ID NO: 500060 - RNA, 19 nt, Artificial Sequence
  Description of Artificial Sequence: Synthetic oligonucleotide
cagaacguuccaguccugg

SEQ ID NO: 500061 - RNA, 19 nt, Artificial Sequence
  Description of Artificial Sequence: Synthetic oligonucleotide
uucccacggggagacacgg

SEQ ID NO: 500062 - RNA, 19 nt, Artificial Sequence
  Description of Artificial Sequence: Synthetic oligonucleotide
gaaugaguggugaauggcu

SEQ ID NO: 500063 - RNA, 19 nt, Artificial Sequence
  Description of Artificial Sequence: Synthetic oligonucleotide
uucccuaacagggccucag

SEQ ID NO: 500064 - RNA, 19 nt, Artificial Sequence
  Description of Artificial Sequence: Synthetic oligonucleotide
gucgaaggcaucccgcuca

SEQ ID NO: 500065 - RNA, 19 nt, Artificial Sequence
  Description of Artificial Sequence: Synthetic oligonucleotide
cacacaucacaagucuaag

SEQ ID NO: 500066 - RNA, 19 nt, Artificial Sequence
  Description of Artificial Sequence: Synthetic oligonucleotide
acagaguguaaaggacccg

SEQ ID NO: 500067 - RNA, 19 nt, Artificial Sequence
  Description of Artificial Sequence: Synthetic oligonucleotide
uaaugccguuuuaauuauc

SEQ ID NO: 500068 - RNA, 19 nt, Artificial Sequence
  Description of Artificial Sequence: Synthetic oligonucleotide
uugccuagauacuguccca

SEQ ID NO: 500069 - RNA, 19 nt, Artificial Sequence
  Description of Artificial Sequence: Synthetic oligonucleotide
ugcccgaucucagacugug

SEQ ID NO: 500070 - RNA, 19 nt, Artificial Sequence
  Description of Artificial Sequence: Synthetic oligonucleotide
cuucccacggggagacacg

SEQ ID NO: 500071 - RNA, 19 nt, Artificial Sequence
  Description of Artificial Sequence: Synthetic oligonucleotide
cagcguuuucuguuauaag

SEQ ID NO: 500072 - RNA, 19 nt, Artificial Sequence
  Description of Artificial Sequence: Synthetic oligonucleotide
ucccgcuuccgaacaacca

SEQ ID NO: 500073 - RNA, 19 nt, Artificial Sequence
  Description of Artificial Sequence: Synthetic oligonucleotide
ggcucaaggaagagggugg

SEQ ID NO: 500074 - RNA, 19 nt, Artificial Sequence
  Description of Artificial Sequence: Synthetic oligonucleotide
uccugguuauuuuguuagu

SEQ ID NO: 500075 - RNA, 19 nt, Artificial Sequence
  Description of Artificial Sequence: Synthetic oligonucleotide
cuugcaagucagucacuuc

SEQ ID NO: 500076 - RNA, 19 nt, Artificial Sequence
  Description of Artificial Sequence: Synthetic oligonucleotide
uaacagggccucagagaug

SEQ ID NO: 500077 - RNA, 19 nt, Artificial Sequence
  Description of Artificial Sequence: Synthetic oligonucleotide
agcgugucgaaggcauccc

SEQ ID NO: 500078 - RNA, 19 nt, Artificial Sequence
  Description of Artificial Sequence: Synthetic oligonucleotide
auguccaccgaagccgggg

SEQ ID NO: 500079 - RNA, 19 nt, Artificial Sequence
  Description of Artificial Sequence: Synthetic oligonucleotide
aucgcgguggcgcggagga

SEQ ID NO: 500080 - RNA, 19 nt, Artificial Sequence
  Description of Artificial Sequence: Synthetic oligonucleotide
gguggauguccaccgaagc

SEQ ID NO: 500081 - RNA, 19 nt, Artificial Sequence
  Description of Artificial Sequence: Synthetic oligonucleotide
uugugcaccuucuggucaa

SEQ ID NO: 500082 - RNA, 19 nt, Artificial Sequence
  Description of Artificial Sequence: Synthetic oligonucleotide
uggggaauugauggcacuc

SEQ ID NO: 500083 - RNA, 19 nt, Artificial Sequence
  Description of Artificial Sequence: Synthetic oligonucleotide
gaaaagcgugucgaaggca

SEQ ID NO: 500084 - RNA, 19 nt, Artificial Sequence
  Description of Artificial Sequence: Synthetic oligonucleotide
gucaaggagaaugaguggu

SEQ ID NO: 500085 - RNA, 19 nt, Artificial Sequence
  Description of Artificial Sequence: Synthetic oligonucleotide
agcgugccacccaacuugc

SEQ ID NO: 500086 - RNA, 19 nt, Artificial Sequence
  Description of Artificial Sequence: Synthetic oligonucleotide
ccaacaccucucuagaguc

SEQ ID NO: 500087 - RNA, 19 nt, Artificial Sequence
  Description of Artificial Sequence: Synthetic oligonucleotide
cugguuauuuuguuagugu

SEQ ID NO: 500088 - RNA, 19 nt, Artificial Sequence
  Description of Artificial Sequence: Synthetic oligonucleotide
cuguuugcuggaacuucac

SEQ ID NO: 500089 - RNA, 19 nt, Artificial Sequence
  Description of Artificial Sequence: Synthetic oligonucleotide
ccgaacaaccaccaccugc

SEQ ID NO: 500090 - RNA, 19 nt, Artificial Sequence
  Description of Artificial Sequence: Synthetic oligonucleotide
aagacucguccuucuucau

SEQ ID NO: 500091 - RNA, 19 nt, Artificial Sequence
  Description of Artificial Sequence: Synthetic oligonucleotide
gcccuaguaauggauaccc

SEQ ID NO: 500092 - RNA, 19 nt, Artificial Sequence
  Description of Artificial Sequence: Synthetic oligonucleotide
gagguaggaggaacaugag

SEQ ID NO: 500093 - RNA, 19 nt, Artificial Sequence
  Description of Artificial Sequence: Synthetic oligonucleotide
cacauuacuucagggcgug

SEQ ID NO: 500094 - RNA, 19 nt, Artificial Sequence
  Description of Artificial Sequence: Synthetic oligonucleotide
acccuuagaccaccuguga

SEQ ID NO: 500095 - RNA, 19 nt, Artificial Sequence
  Description of Artificial Sequence: Synthetic oligonucleotide
gaguucuaggaagggugug

SEQ ID NO: 500096 - RNA, 19 nt, Artificial Sequence
  Description of Artificial Sequence: Synthetic oligonucleotide
ucccuaacagggccucaga

SEQ ID NO: 500097 - RNA, 19 nt, Artificial Sequence
  Description of Artificial Sequence: Synthetic oligonucleotide
ggucaaagcugucaggugu

SEQ ID NO: 500098 - RNA, 19 nt, Artificial Sequence
  Description of Artificial Sequence: Synthetic oligonucleotide
acauuacuucagggcgugc

SEQ ID NO: 500099 - RNA, 19 nt, Artificial Sequence
  Description of Artificial Sequence: Synthetic oligonucleotide
uuguccggugcauggucga

SEQ ID NO: 500100 - RNA, 19 nt, Artificial Sequence
  Description of Artificial Sequence: Synthetic oligonucleotide
auggcuugugugaacggca

SEQ ID NO: 500101 - RNA, 19 nt, Artificial Sequence
  Description of Artificial Sequence: Synthetic oligonucleotide
gcaaacuauuccaagccca

SEQ ID NO: 500102 - RNA, 19 nt, Artificial Sequence
  Description of Artificial Sequence: Synthetic oligonucleotide
ugucaggugucagguagaa

SEQ ID NO: 500103 - RNA, 19 nt, Artificial Sequence
  Description of Artificial Sequence: Synthetic oligonucleotide
caaacgccacauugugcac

SEQ ID NO: 500104 - RNA, 19 nt, Artificial Sequence
  Description of Artificial Sequence: Synthetic oligonucleotide
aguggaaccaagggaggau

SEQ ID NO: 500105 - RNA, 19 nt, Artificial Sequence
  Description of Artificial Sequence: Synthetic oligonucleotide
uccgaacaaccaccaccug

SEQ ID NO: 500106 - RNA, 19 nt, Artificial Sequence
  Description of Artificial Sequence: Synthetic oligonucleotide
agaguguaaaggacccgca

SEQ ID NO: 500107 - RNA, 19 nt, Artificial Sequence
  Description of Artificial Sequence: Synthetic oligonucleotide
gggaauaagaagagagaga

SEQ ID NO: 500108 - RNA, 19 nt, Artificial Sequence
  Description of Artificial Sequence: Synthetic oligonucleotide
caggggauuccugaggaca

SEQ ID NO: 500109 - RNA, 19 nt, Artificial Sequence
  Description of Artificial Sequence: Synthetic oligonucleotide
cagcuuagcaacaguggaa

SEQ ID NO: 500110 - RNA, 19 nt, Artificial Sequence
  Description of Artificial Sequence: Synthetic oligonucleotide
guaaugccguuuuaauuau

SEQ ID NO: 500111 - RNA, 19 nt, Artificial Sequence
  Description of Artificial Sequence: Synthetic oligonucleotide
ugccugacccuuagaccac

SEQ ID NO: 500112 - RNA, 19 nt, Artificial Sequence
  Description of Artificial Sequence: Synthetic oligonucleotide
gucuaaggcuucugagaca

SEQ ID NO: 500113 - RNA, 19 nt, Artificial Sequence
  Description of Artificial Sequence: Synthetic oligonucleotide
aggucagucaagaccagua

SEQ ID NO: 500114 - RNA, 19 nt, Artificial Sequence
  Description of Artificial Sequence: Synthetic oligonucleotide
augccguuuuaauuaucuu

SEQ ID NO: 500115 - RNA, 19 nt, Artificial Sequence
  Description of Artificial Sequence: Synthetic oligonucleotide
gaucgcgguggcgcggagg

SEQ ID NO: 500116 - RNA, 19 nt, Artificial Sequence
  Description of Artificial Sequence: Synthetic oligonucleotide
gcuuagcaacaguggaacc

SEQ ID NO: 500117 - RNA, 19 nt, Artificial Sequence
  Description of Artificial Sequence: Synthetic oligonucleotide
ccauuggggaauugauggc

SEQ ID NO: 500118 - RNA, 19 nt, Artificial Sequence
  Description of Artificial Sequence: Synthetic oligonucleotide
gacacgguaaugccguuuu

SEQ ID NO: 500119 - RNA, 19 nt, Artificial Sequence
  Description of Artificial Sequence: Synthetic oligonucleotide
gaacguuccaguccugguu

SEQ ID NO: 500120 - RNA, 19 nt, Artificial Sequence
  Description of Artificial Sequence: Synthetic oligonucleotide
ucgccagcgugccacccaa

SEQ ID NO: 500121 - RNA, 19 nt, Artificial Sequence
  Description of Artificial Sequence: Synthetic oligonucleotide
cgaaaagcgugucgaaggc

SEQ ID NO: 500122 - RNA, 19 nt, Artificial Sequence
  Description of Artificial Sequence: Synthetic oligonucleotide
ugcagaccugccugacccu

SEQ ID NO: 500123 - RNA, 19 nt, Artificial Sequence
  Description of Artificial Sequence: Synthetic oligonucleotide
ccagcuuagcaacagugga

SEQ ID NO: 500124 - RNA, 19 nt, Artificial Sequence
  Description of Artificial Sequence: Synthetic oligonucleotide
cacgguaaugccguuuuaa

SEQ ID NO: 500125 - RNA, 19 nt, Artificial Sequence
  Description of Artificial Sequence: Synthetic oligonucleotide
guauagaaggcuggaggua

SEQ ID NO: 500126 - RNA, 19 nt, Artificial Sequence
  Description of Artificial Sequence: Synthetic oligonucleotide
acccgcagaguagauuuga

SEQ ID NO: 500127 - RNA, 19 nt, Artificial Sequence
  Description of Artificial Sequence: Synthetic oligonucleotide
acggcagcguuuucuguua

SEQ ID NO: 500128 - RNA, 19 nt, Artificial Sequence
  Description of Artificial Sequence: Synthetic oligonucleotide
cuucccgcuuccgaacaac

SEQ ID NO: 500129 - RNA, 19 nt, Artificial Sequence
  Description of Artificial Sequence: Synthetic oligonucleotide
cccuaacagggccucagag

SEQ ID NO: 500130 - RNA, 19 nt, Artificial Sequence
  Description of Artificial Sequence: Synthetic oligonucleotide
cggugcauggucgaaaagc

SEQ ID NO: 500131 - RNA, 19 nt, Artificial Sequence
  Description of Artificial Sequence: Synthetic oligonucleotide
ggggcggagucccuggagc

SEQ ID NO: 500132 - RNA, 19 nt, Artificial Sequence
  Description of Artificial Sequence: Synthetic oligonucleotide
cccgaucucagacuguguc

SEQ ID NO: 500133 - RNA, 19 nt, Artificial Sequence
  Description of Artificial Sequence: Synthetic oligonucleotide
ccuaacagggccucagaga

SEQ ID NO: 500134 - RNA, 19 nt, Artificial Sequence
  Description of Artificial Sequence: Synthetic oligonucleotide
caccuuacuucacagcccu

SEQ ID NO: 500135 - RNA, 19 nt, Artificial Sequence
  Description of Artificial Sequence: Synthetic oligonucleotide
cccgagacaagaagccagc

SEQ ID NO: 500136 - RNA, 19 nt, Artificial Sequence
  Description of Artificial Sequence: Synthetic oligonucleotide
ggcaaacgccacauugugc

SEQ ID NO: 500137 - RNA, 19 nt, Artificial Sequence
  Description of Artificial Sequence: Synthetic oligonucleotide
ugugaacggcagcguuuuc

SEQ ID NO: 500138 - RNA, 19 nt, Artificial Sequence
  Description of Artificial Sequence: Synthetic oligonucleotide
ggucaggcagcccuaguaa

SEQ ID NO: 500139 - RNA, 19 nt, Artificial Sequence
  Description of Artificial Sequence: Synthetic oligonucleotide
cacggcuucgaggacuguc

SEQ ID NO: 500140 - RNA, 19 nt, Artificial Sequence
  Description of Artificial Sequence: Synthetic oligonucleotide
gcgugucgaaggcaucccg

SEQ ID NO: 500141 - RNA, 19 nt, Artificial Sequence
  Description of Artificial Sequence: Synthetic oligonucleotide
uugcccgaucucagacugu

SEQ ID NO: 500142 - RNA, 19 nt, Artificial Sequence
  Description of Artificial Sequence: Synthetic oligonucleotide
aggucuugcacggcuucga

SEQ ID NO: 500143 - RNA, 19 nt, Artificial Sequence
  Description of Artificial Sequence: Synthetic oligonucleotide
guccaccgaagccggggcc

SEQ ID NO: 500144 - RNA, 19 nt, Artificial Sequence
  Description of Artificial Sequence: Synthetic oligonucleotide
agcgcaguggccagccgug

SEQ ID NO: 500145 - RNA, 19 nt, Artificial Sequence
  Description of Artificial Sequence: Synthetic oligonucleotide
gacccgcagaguagauuug

SEQ ID NO: 500146 - RNA, 19 nt, Artificial Sequence
  Description of Artificial Sequence: Synthetic oligonucleotide
ccguggaugcugaaggcuc

SEQ ID NO: 500147 - RNA, 19 nt, Artificial Sequence
  Description of Artificial Sequence: Synthetic oligonucleotide
ccaaguuuaccacauuacu

SEQ ID NO: 500148 - RNA, 19 nt, Artificial Sequence
  Description of Artificial Sequence: Synthetic oligonucleotide
ggguggauguccaccgaag

SEQ ID NO: 500149 - RNA, 19 nt, Artificial Sequence
  Description of Artificial Sequence: Synthetic oligonucleotide
cgugucgaaggcaucccgc

SEQ ID NO: 500150 - RNA, 19 nt, Artificial Sequence
  Description of Artificial Sequence: Synthetic oligonucleotide
cucuuuaaugucacugcuu

SEQ ID NO: 500151 - RNA, 19 nt, Artificial Sequence
  Description of Artificial Sequence: Synthetic oligonucleotide
agggcgugccuugggcuuc

SEQ ID NO: 500152 - RNA, 19 nt, Artificial Sequence
  Description of Artificial Sequence: Synthetic oligonucleotide
gcaccuuacuucacagccc

SEQ ID NO: 500153 - RNA, 19 nt, Artificial Sequence
  Description of Artificial Sequence: Synthetic oligonucleotide
acggggagacacgguaaug

SEQ ID NO: 500154 - RNA, 19 nt, Artificial Sequence
  Description of Artificial Sequence: Synthetic oligonucleotide
ccuucguaaaguacucuaa

SEQ ID NO: 500155 - RNA, 19 nt, Artificial Sequence
  Description of Artificial Sequence: Synthetic oligonucleotide
gccguauagaaggcuggag

SEQ ID NO: 500156 - RNA, 19 nt, Artificial Sequence
  Description of Artificial Sequence: Synthetic oligonucleotide
ggacccgcagaguagauuu

SEQ ID NO: 500157 - RNA, 19 nt, Artificial Sequence
  Description of Artificial Sequence: Synthetic oligonucleotide
uccucgccagcgugccacc

SEQ ID NO: 500158 - RNA, 19 nt, Artificial Sequence
  Description of Artificial Sequence: Synthetic oligonucleotide
cauucuggguccugagagu

SEQ ID NO: 500159 - RNA, 19 nt, Artificial Sequence
  Description of Artificial Sequence: Synthetic oligonucleotide
ggcuugugugaacggcagc

SEQ ID NO: 500160 - RNA, 19 nt, Artificial Sequence
  Description of Artificial Sequence: Synthetic oligonucleotide
guggggccgaagcaggucu

SEQ ID NO: 500161 - RNA, 19 nt, Artificial Sequence
  Description of Artificial Sequence: Synthetic oligonucleotide
ggugucagguagaaguugu

SEQ ID NO: 500162 - RNA, 19 nt, Artificial Sequence
  Description of Artificial Sequence: Synthetic oligonucleotide
agacacgguaaugccguuu

SEQ ID NO: 500163 - RNA, 19 nt, Artificial Sequence
  Description of Artificial Sequence: Synthetic oligonucleotide
cggggagacacgguaaugc

SEQ ID NO: 500164 - RNA, 19 nt, Artificial Sequence
  Description of Artificial Sequence: Synthetic oligonucleotide
gcucaaggaagaggguggc

SEQ ID NO: 500165 - RNA, 19 nt, Artificial Sequence
  Description of Artificial Sequence: Synthetic oligonucleotide
cccgcagaguagauuugag

SEQ ID NO: 500166 - RNA, 19 nt, Artificial Sequence
  Description of Artificial Sequence: Synthetic oligonucleotide
gccguuuuaauuaucuuuu

SEQ ID NO: 500167 - RNA, 19 nt, Artificial Sequence
  Description of Artificial Sequence: Synthetic oligonucleotide
acacgguaaugccguuuua

SEQ ID NO: 500168 - RNA, 19 nt, Artificial Sequence
  Description of Artificial Sequence: Synthetic oligonucleotide
gaguagauuugagguccaa

SEQ ID NO: 500169 - RNA, 19 nt, Artificial Sequence
  Description of Artificial Sequence: Synthetic oligonucleotide
ggucgaaaagcgugucgaa

SEQ ID NO: 500170 - RNA, 19 nt, Artificial Sequence
  Description of Artificial Sequence: Synthetic oligonucleotide
agacccaaacaggcccugu

SEQ ID NO: 500171 - RNA, 19 nt, Artificial Sequence
  Description of Artificial Sequence: Synthetic oligonucleotide
auucccuaacagggccuca

SEQ ID NO: 500172 - RNA, 19 nt, Artificial Sequence
  Description of Artificial Sequence: Synthetic oligonucleotide
uguccggugcauggucgaa

SEQ ID NO: 500173 - RNA, 19 nt, Artificial Sequence
  Description of Artificial Sequence: Synthetic oligonucleotide
gggucaaucaugguccgcu

SEQ ID NO: 500174 - RNA, 19 nt, Artificial Sequence
  Description of Artificial Sequence: Synthetic oligonucleotide
aaggacccgcagaguagau

SEQ ID NO: 500175 - RNA, 19 nt, Artificial Sequence
  Description of Artificial Sequence: Synthetic oligonucleotide
ggccgaagcaggucuugca

SEQ ID NO: 500176 - RNA, 19 nt, Artificial Sequence
  Description of Artificial Sequence: Synthetic oligonucleotide
gccuagauacugucccaga

SEQ ID NO: 500177 - RNA, 19 nt, Artificial Sequence
  Description of Artificial Sequence: Synthetic oligonucleotide
aggacccgcagaguagauu

SEQ ID NO: 500178 - RNA, 19 nt, Artificial Sequence
  Description of Artificial Sequence: Synthetic oligonucleotide
acagaacguuccaguccug

SEQ ID NO: 500179 - RNA, 19 nt, Artificial Sequence
  Description of Artificial Sequence: Synthetic oligonucleotide
cccuucguaaaguacucua

SEQ ID NO: 500180 - RNA, 19 nt, Artificial Sequence
  Description of Artificial Sequence: Synthetic oligonucleotide
ggggauuccugaggacaag

SEQ ID NO: 500181 - RNA, 19 nt, Artificial Sequence
  Description of Artificial Sequence: Synthetic oligonucleotide
gggcgaucgcgguggcgcg

SEQ ID NO: 500182 - RNA, 19 nt, Artificial Sequence
  Description of Artificial Sequence: Synthetic oligonucleotide
gggacgaaguagucuucaa

SEQ ID NO: 500183 - RNA, 19 nt, Artificial Sequence
  Description of Artificial Sequence: Synthetic oligonucleotide
cucgccagcgugccaccca

SEQ ID NO: 500184 - RNA, 19 nt, Artificial Sequence
  Description of Artificial Sequence: Synthetic oligonucleotide
caaaucggcccaucaucau

SEQ ID NO: 500185 - RNA, 19 nt, Artificial Sequence
  Description of Artificial Sequence: Synthetic oligonucleotide
accuuacuucacagcccug

SEQ ID NO: 500186 - RNA, 19 nt, Artificial Sequence
  Description of Artificial Sequence: Synthetic oligonucleotide
cagccagcuauggcaucac

SEQ ID NO: 500187 - RNA, 19 nt, Artificial Sequence
  Description of Artificial Sequence: Synthetic oligonucleotide
gcucaaaucggcccaucau

SEQ ID NO: 500188 - RNA, 19 nt, Artificial Sequence
  Description of Artificial Sequence: Synthetic oligonucleotide
caucaccaacaccucucua

SEQ ID NO: 500189 - RNA, 19 nt, Artificial Sequence
  Description of Artificial Sequence: Synthetic oligonucleotide
ggggugggcgaucgcggug

SEQ ID NO: 500190 - RNA, 19 nt, Artificial Sequence
  Description of Artificial Sequence: Synthetic oligonucleotide
gggaggauauuaaacuguu

SEQ ID NO: 500191 - RNA, 19 nt, Artificial Sequence
  Description of Artificial Sequence: Synthetic oligonucleotide
gugugaacggcagcguuuu

SEQ ID NO: 500192 - RNA, 19 nt, Artificial Sequence
  Description of Artificial Sequence: Synthetic oligonucleotide
ggggaauugauggcacucu

SEQ ID NO: 500193 - RNA, 19 nt, Artificial Sequence
  Description of Artificial Sequence: Synthetic oligonucleotide
ggccguauagaaggcugga

SEQ ID NO: 500194 - RNA, 19 nt, Artificial Sequence
  Description of Artificial Sequence: Synthetic oligonucleotide
cccuaguaauggauaccca

SEQ ID NO: 500195 - RNA, 19 nt, Artificial Sequence
  Description of Artificial Sequence: Synthetic oligonucleotide
gggccgaagcaggucuugc

SEQ ID NO: 500196 - RNA, 19 nt, Artificial Sequence
  Description of Artificial Sequence: Synthetic oligonucleotide
guggaugcugaaggcucaa

SEQ ID NO: 500197 - RNA, 19 nt, Artificial Sequence
  Description of Artificial Sequence: Synthetic oligonucleotide
gggaauugauggcacucuu

SEQ ID NO: 500198 - RNA, 19 nt, Artificial Sequence
  Description of Artificial Sequence: Synthetic oligonucleotide
cagcgcaguggccagccgu

SEQ ID NO: 500199 - RNA, 19 nt, Artificial Sequence
  Description of Artificial Sequence: Synthetic oligonucleotide
ggguggccguauagaaggc

SEQ ID NO: 500200 - RNA, 19 nt, Artificial Sequence
  Description of Artificial Sequence: Synthetic oligonucleotide
ggaagaggguggccguaua

SEQ ID NO: 500201 - RNA, 19 nt, Artificial Sequence
  Description of Artificial Sequence: Synthetic oligonucleotide
ggcgaucgcgguggcgcgg

SEQ ID NO: 500202 - RNA, 19 nt, Artificial Sequence
  Description of Artificial Sequence: Synthetic oligonucleotide
cacggggagacacgguaau

SEQ ID NO: 500203 - RNA, 19 nt, Artificial Sequence
  Description of Artificial Sequence: Synthetic oligonucleotide
cccacggggagacacggua

SEQ ID NO: 500204 - RNA, 19 nt, Artificial Sequence
  Description of Artificial Sequence: Synthetic oligonucleotide
gagacacgguaaugccguu

SEQ ID NO: 500205 - RNA, 19 nt, Artificial Sequence
  Description of Artificial Sequence: Synthetic oligonucleotide
gcaggccuucccgcuuccg

SEQ ID NO: 500206 - RNA, 19 nt, Artificial Sequence
  Description of Artificial Sequence: Synthetic oligonucleotide
gcgcaguggccagccgugg

SEQ ID NO: 500207 - RNA, 19 nt, Artificial Sequence
  Description of Artificial Sequence: Synthetic oligonucleotide
ggaggauauuaaacuguuu

SEQ ID NO: 500208 - RNA, 19 nt, Artificial Sequence
  Description of Artificial Sequence: Synthetic oligonucleotide
gccguggaugcugaaggcu

SEQ ID NO: 500209 - RNA, 19 nt, Artificial Sequence
  Description of Artificial Sequence: Synthetic oligonucleotide
ccacggggagacacgguaa

SEQ ID NO: 500210 - RNA, 19 nt, Artificial Sequence
  Description of Artificial Sequence: Synthetic oligonucleotide
ccagcgcaguggccagccg

SEQ ID NO: 500211 - RNA, 19 nt, Artificial Sequence
  Description of Artificial Sequence: Synthetic oligonucleotide
ucgcgguggcgcggaggac

SEQ ID NO: 500212 - RNA, 19 nt, Artificial Sequence
  Description of Artificial Sequence: Synthetic oligonucleotide
cgguaaugccguuuuaauu

SEQ ID NO: 500213 - RNA, 19 nt, Artificial Sequence
  Description of Artificial Sequence: Synthetic oligonucleotide
cucuagagucaaggagaau

SEQ ID NO: 500214 - RNA, 19 nt, Artificial Sequence
  Description of Artificial Sequence: Synthetic oligonucleotide
ccucgccagcgugccaccc

SEQ ID NO: 500215 - RNA, 19 nt, Artificial Sequence
  Description of Artificial Sequence: Synthetic oligonucleotide
gcgaucgcgguggcgcgga

SEQ ID NO: 500216 - RNA, 19 nt, Artificial Sequence
  Description of Artificial Sequence: Synthetic oligonucleotide
cguggggccgaagcagguc

SEQ ID NO: 500217 - RNA, 19 nt, Artificial Sequence
  Description of Artificial Sequence: Synthetic oligonucleotide
ccacggcaaagugggaaua

SEQ ID NO: 500218 - RNA, 19 nt, Artificial Sequence
  Description of Artificial Sequence: Synthetic oligonucleotide
acgccacauugugcaccuu

SEQ ID NO: 500219 - RNA, 19 nt, Artificial Sequence
  Description of Artificial Sequence: Synthetic oligonucleotide
cccugguccacggcaaagu

SEQ ID NO: 500220 - RNA, 19 nt, Artificial Sequence
  Description of Artificial Sequence: Synthetic oligonucleotide
ccgcucaaaucggcccauc

SEQ ID NO: 500221 - RNA, 19 nt, Artificial Sequence
  Description of Artificial Sequence: Synthetic oligonucleotide
ccagcgugccacccaacuu

SEQ ID NO: 500222 - RNA, 19 nt, Artificial Sequence
  Description of Artificial Sequence: Synthetic oligonucleotide
gccagccguggggccgaag

SEQ ID NO: 500223 - RNA, 19 nt, Artificial Sequence
  Description of Artificial Sequence: Synthetic oligonucleotide
ccccuucguaaaguacucu

SEQ ID NO: 500224 - RNA, 19 nt, Artificial Sequence
  Description of Artificial Sequence: Synthetic oligonucleotide
cgccagcgugccacccaac

SEQ ID NO: 500225 - RNA, 19 nt, Artificial Sequence
  Description of Artificial Sequence: Synthetic oligonucleotide
gcccgaucucagacugugu

SEQ ID NO: 500226 - RNA, 19 nt, Artificial Sequence
  Description of Artificial Sequence: Synthetic oligonucleotide
gggcgugccuugggcuucu

SEQ ID NO: 500227 - RNA, 19 nt, Artificial Sequence
  Description of Artificial Sequence: Synthetic oligonucleotide
gggugccaacagaguucua

SEQ ID NO: 500228 - RNA, 19 nt, Artificial Sequence
  Description of Artificial Sequence: Synthetic oligonucleotide
cggcagcguuuucuguuau

SEQ ID NO: 500229 - RNA, 19 nt, Artificial Sequence
  Description of Artificial Sequence: Synthetic oligonucleotide
uuuugaauugucuacaucc

SEQ ID NO: 500230 - RNA, 19 nt, Artificial Sequence
  Description of Artificial Sequence: Synthetic oligonucleotide
uuuuaaucgagcaucaccc

SEQ ID NO: 500231 - RNA, 19 nt, Artificial Sequence
  Description of Artificial Sequence: Synthetic oligonucleotide
ugaaauaaaccacaucgcg

SEQ ID NO: 500232 - RNA, 19 nt, Artificial Sequence
  Description of Artificial Sequence: Synthetic oligonucleotide
aagaguggcaaucggaccc

SEQ ID NO: 500233 - RNA, 19 nt, Artificial Sequence
  Description of Artificial Sequence: Synthetic oligonucleotide
uuagagagugacaagaacc

SEQ ID NO: 500234 - RNA, 19 nt, Artificial Sequence
  Description of Artificial Sequence: Synthetic oligonucleotide
uaauaagacacucauugug

SEQ ID NO: 500235 - RNA, 19 nt, Artificial Sequence
  Description of Artificial Sequence: Synthetic oligonucleotide
aacaggacgucucugagag

SEQ ID NO: 500236 - RNA, 19 nt, Artificial Sequence
  Description of Artificial Sequence: Synthetic oligonucleotide
aagugaagugcaucgauag

SEQ ID NO: 500237 - RNA, 19 nt, Artificial Sequence
  Description of Artificial Sequence: Synthetic oligonucleotide
auagcgacgaucuccgugc

SEQ ID NO: 500238 - RNA, 19 nt, Artificial Sequence
  Description of Artificial Sequence: Synthetic oligonucleotide
aaauaaaccacaucgcguu

SEQ ID NO: 500239 - RNA, 19 nt, Artificial Sequence
  Description of Artificial Sequence: Synthetic oligonucleotide
cuuuauggguguaagaaac

SEQ ID NO: 500240 - RNA, 19 nt, Artificial Sequence
  Description of Artificial Sequence: Synthetic oligonucleotide
uguauauucacuguacugu

SEQ ID NO: 500241 - RNA, 19 nt, Artificial Sequence
  Description of Artificial Sequence: Synthetic oligonucleotide
cuuuuaaucgagcaucacc

SEQ ID NO: 500242 - RNA, 19 nt, Artificial Sequence
  Description of Artificial Sequence: Synthetic oligonucleotide
caguucauacauuacaccc

SEQ ID NO: 500243 - RNA, 19 nt, Artificial Sequence
  Description of Artificial Sequence: Synthetic oligonucleotide
uuagcagacggucuuaaga

SEQ ID NO: 500244 - RNA, 19 nt, Artificial Sequence
  Description of Artificial Sequence: Synthetic oligonucleotide
uggcuuggcauuuaaauca

SEQ ID NO: 500245 - RNA, 19 nt, Artificial Sequence
  Description of Artificial Sequence: Synthetic oligonucleotide
ugugauaauaagacacuca

SEQ ID NO: 500246 - RNA, 19 nt, Artificial Sequence
  Description of Artificial Sequence: Synthetic oligonucleotide
aaaaucggauuucuucuug

SEQ ID NO: 500247 - RNA, 19 nt, Artificial Sequence
  Description of Artificial Sequence: Synthetic oligonucleotide
cuucauuguaguaucguag

SEQ ID NO: 500248 - RNA, 19 nt, Artificial Sequence
  Description of Artificial Sequence: Synthetic oligonucleotide
aauaagacacucauuguga

SEQ ID NO: 500249 - RNA, 19 nt, Artificial Sequence
  Description of Artificial Sequence: Synthetic oligonucleotide
gauuugggaauucucauga

SEQ ID NO: 500250 - RNA, 19 nt, Artificial Sequence
  Description of Artificial Sequence: Synthetic oligonucleotide
uggcauuuaaaucacuggu

SEQ ID NO: 500251 - RNA, 19 nt, Artificial Sequence
  Description of Artificial Sequence: Synthetic oligonucleotide
aauaaaccacaucgcguuc

SEQ ID NO: 500252 - RNA, 19 nt, Artificial Sequence
  Description of Artificial Sequence: Synthetic oligonucleotide
ucgauagcgacgaucuccg

SEQ ID NO: 500253 - RNA, 19 nt, Artificial Sequence
  Description of Artificial Sequence: Synthetic oligonucleotide
auguggauuauauacacau

SEQ ID NO: 500254 - RNA, 19 nt, Artificial Sequence
  Description of Artificial Sequence: Synthetic oligonucleotide
uaucguaguaacaacuuau

SEQ ID NO: 500255 - RNA, 19 nt, Artificial Sequence
  Description of Artificial Sequence: Synthetic oligonucleotide
uaugguacccucguaagug

SEQ ID NO: 500256 - RNA, 19 nt, Artificial Sequence
  Description of Artificial Sequence: Synthetic oligonucleotide
  modified_base (4)..(4): a, c, u, g, unknown or other
agcnguucugcaugcuucc

SEQ ID NO: 500257 - RNA, 19 nt, Artificial Sequence
  Description of Artificial Sequence: Synthetic oligonucleotide
aaucggaccccacaccgag

SEQ ID NO: 500258 - RNA, 19 nt, Artificial Sequence
  Description of Artificial Sequence: Synthetic oligonucleotide
aggcucacuugccaaaagc

SEQ ID NO: 500259 - RNA, 19 nt, Artificial Sequence
  Description of Artificial Sequence: Synthetic oligonucleotide
augguauauaaauggauaa

SEQ ID NO: 500260 - RNA, 19 nt, Artificial Sequence
  Description of Artificial Sequence: Synthetic oligonucleotide
uguacuguucaguaccugu

SEQ ID NO: 500261 - RNA, 19 nt, Artificial Sequence
  Description of Artificial Sequence: Synthetic oligonucleotide
uuguuggaggcucacuugc

SEQ ID NO: 500262 - RNA, 19 nt, Artificial Sequence
  Description of Artificial Sequence: Synthetic oligonucleotide
ucguaguaacaacuuauac

SEQ ID NO: 500263 - RNA, 19 nt, Artificial Sequence
  Description of Artificial Sequence: Synthetic oligonucleotide
auaauaagacacucauugu

SEQ ID NO: 500264 - RNA, 19 nt, Artificial Sequence
  Description of Artificial Sequence: Synthetic oligonucleotide
ugcacuuacaguagcuucu

SEQ ID NO: 500265 - RNA, 19 nt, Artificial Sequence
  Description of Artificial Sequence: Synthetic oligonucleotide
guaccugugauaauaagac

SEQ ID NO: 500266 - RNA, 19 nt, Artificial Sequence
  Description of Artificial Sequence: Synthetic oligonucleotide
agcgucugaagugaagugc

SEQ ID NO: 500267 - RNA, 19 nt, Artificial Sequence
  Description of Artificial Sequence: Synthetic oligonucleotide
cuuguacuaguccugcacc

SEQ ID NO: 500268 - RNA, 19 nt, Artificial Sequence
  Description of Artificial Sequence: Synthetic oligonucleotide
uuaagcucacgucucauuu

SEQ ID NO: 500269 - RNA, 19 nt, Artificial Sequence
  Description of Artificial Sequence: Synthetic oligonucleotide
uacgggagcguccuugggg

SEQ ID NO: 500270 - RNA, 19 nt, Artificial Sequence
  Description of Artificial Sequence: Synthetic oligonucleotide
uuauggguguaagaaacug

SEQ ID NO: 500271 - RNA, 19 nt, Artificial Sequence
  Description of Artificial Sequence: Synthetic oligonucleotide
uauuuagggaucuuccuuu

SEQ ID NO: 500272 - RNA, 19 nt, Artificial Sequence
  Description of Artificial Sequence: Synthetic oligonucleotide
uuuauggguguaagaaacu

SEQ ID NO: 500273 - RNA, 19 nt, Artificial Sequence
  Description of Artificial Sequence: Synthetic oligonucleotide
aagaucgcuuguuggcuuc

SEQ ID NO: 500274 - RNA, 19 nt, Artificial Sequence
  Description of Artificial Sequence: Synthetic oligonucleotide
gauagcgacgaucuccgug

SEQ ID NO: 500275 - RNA, 19 nt, Artificial Sequence
  Description of Artificial Sequence: Synthetic oligonucleotide
uuuaaucgagcaucacccc

SEQ ID NO: 500276 - RNA, 19 nt, Artificial Sequence
  Description of Artificial Sequence: Synthetic oligonucleotide
  modified_base (5)..(5): a, c, u, g, unknown or other
aagcnguucugcaugcuuc

SEQ ID NO: 500277 - RNA, 19 nt, Artificial Sequence
  Description of Artificial Sequence: Synthetic oligonucleotide
ugaagugcaucgauagcga

SEQ ID NO: 500278 - RNA, 19 nt, Artificial Sequence
  Description of Artificial Sequence: Synthetic oligonucleotide
aagugcaucgauagcgacg

SEQ ID NO: 500279 - RNA, 19 nt, Artificial Sequence
  Description of Artificial Sequence: Synthetic oligonucleotide
auuuagggaucuuccuuuc

SEQ ID NO: 500280 - RNA, 19 nt, Artificial Sequence
  Description of Artificial Sequence: Synthetic oligonucleotide
cauugcuaagcuguugugg

SEQ ID NO: 500281 - RNA, 19 nt, Artificial Sequence
  Description of Artificial Sequence: Synthetic oligonucleotide
cuuuuagagagugacaaga

SEQ ID NO: 500282 - RNA, 19 nt, Artificial Sequence
  Description of Artificial Sequence: Synthetic oligonucleotide
uaagaguggcaaucggacc

SEQ ID NO: 500283 - RNA, 19 nt, Artificial Sequence
  Description of Artificial Sequence: Synthetic oligonucleotide
aguaccugugauaauaaga

SEQ ID NO: 500284 - RNA, 19 nt, Artificial Sequence
  Description of Artificial Sequence: Synthetic oligonucleotide
ucaaauggaggugaaucac

SEQ ID NO: 500285 - RNA, 19 nt, Artificial Sequence
  Description of Artificial Sequence: Synthetic oligonucleotide
agagccucauucacuaacc

SEQ ID NO: 500286 - RNA, 19 nt, Artificial Sequence
  Description of Artificial Sequence: Synthetic oligonucleotide
agcccguacauucuuuuag

SEQ ID NO: 500287 - RNA, 19 nt, Artificial Sequence
  Description of Artificial Sequence: Synthetic oligonucleotide
cuuggggucgagaacgcgc

SEQ ID NO: 500288 - RNA, 19 nt, Artificial Sequence
  Description of Artificial Sequence: Synthetic oligonucleotide
uaaaccacaucgcguucag

SEQ ID NO: 500289 - RNA, 19 nt, Artificial Sequence
  Description of Artificial Sequence: Synthetic oligonucleotide
  modified_base (8)..(8): a, c, u, g, unknown or other
caaaagcnguucugcaugc

SEQ ID NO: 500290 - RNA, 19 nt, Artificial Sequence
  Description of Artificial Sequence: Synthetic oligonucleotide
ucggccauugccuucuaug

SEQ ID NO: 500291 - RNA, 19 nt, Artificial Sequence
  Description of Artificial Sequence: Synthetic oligonucleotide
caugguauauaaauggaua

SEQ ID NO: 500292 - RNA, 19 nt, Artificial Sequence
  Description of Artificial Sequence: Synthetic oligonucleotide
uguacgggagcguccuugg

SEQ ID NO: 500293 - RNA, 19 nt, Artificial Sequence
  Description of Artificial Sequence: Synthetic oligonucleotide
auuguuggaggcucacuug

SEQ ID NO: 500294 - RNA, 19 nt, Artificial Sequence
  Description of Artificial Sequence: Synthetic oligonucleotide
ugugguuagcagacggucu

SEQ ID NO: 500295 - RNA, 19 nt, Artificial Sequence
  Description of Artificial Sequence: Synthetic oligonucleotide
ugcuaagcuguuguggugc

SEQ ID NO: 500296 - RNA, 19 nt, Artificial Sequence
  Description of Artificial Sequence: Synthetic oligonucleotide
ugagcggaaguccuaucca

SEQ ID NO: 500297 - RNA, 19 nt, Artificial Sequence
  Description of Artificial Sequence: Synthetic oligonucleotide
agcuuuauggguguaagaa

SEQ ID NO: 500298 - RNA, 19 nt, Artificial Sequence
  Description of Artificial Sequence: Synthetic oligonucleotide
agugcaucgauagcgacga

SEQ ID NO: 500299 - RNA, 19 nt, Artificial Sequence
  Description of Artificial Sequence: Synthetic oligonucleotide
ucgagaacgcgccucugcc

SEQ ID NO: 500300 - RNA, 19 nt, Artificial Sequence
  Description of Artificial Sequence: Synthetic oligonucleotide
uugaauugucuacauccau

SEQ ID NO: 500301 - RNA, 19 nt, Artificial Sequence
  Description of Artificial Sequence: Synthetic oligonucleotide
uuguacuaguccugcacca

SEQ ID NO: 500302 - RNA, 19 nt, Artificial Sequence
  Description of Artificial Sequence: Synthetic oligonucleotide
uguagcauaccucggccau

SEQ ID NO: 500303 - RNA, 19 nt, Artificial Sequence
  Description of Artificial Sequence: Synthetic oligonucleotide
guaguaucguaguaacaac

SEQ ID NO: 500304 - RNA, 19 nt, Artificial Sequence
  Description of Artificial Sequence: Synthetic oligonucleotide
gacaaucaacucaggauug

SEQ ID NO: 500305 - RNA, 19 nt, Artificial Sequence
  Description of Artificial Sequence: Synthetic oligonucleotide
ugauaauaagacacucauu

SEQ ID NO: 500306 - RNA, 19 nt, Artificial Sequence
  Description of Artificial Sequence: Synthetic oligonucleotide
ccaguaucuguauuaaggc

SEQ ID NO: 500307 - RNA, 19 nt, Artificial Sequence
  Description of Artificial Sequence: Synthetic oligonucleotide
auguuagcauugcuaagcu

SEQ ID NO: 500308 - RNA, 19 nt, Artificial Sequence
  Description of Artificial Sequence: Synthetic oligonucleotide
uuggggucgagaacgcgcc

SEQ ID NO: 500309 - RNA, 19 nt, Artificial Sequence
  Description of Artificial Sequence: Synthetic oligonucleotide
guuagcauugcuaagcugu

SEQ ID NO: 500310 - RNA, 19 nt, Artificial Sequence
  Description of Artificial Sequence: Synthetic oligonucleotide
gugagcggaaguccuaucc

SEQ ID NO: 500311 - RNA, 19 nt, Artificial Sequence
  Description of Artificial Sequence: Synthetic oligonucleotide
agagccgugagacaaucaa

SEQ ID NO: 500312 - RNA, 19 nt, Artificial Sequence
  Description of Artificial Sequence: Synthetic oligonucleotide
aauguggauuauauacaca

SEQ ID NO: 500313 - RNA, 19 nt, Artificial Sequence
  Description of Artificial Sequence: Synthetic oligonucleotide
ucggaccccacaccgaggc

SEQ ID NO: 500314 - RNA, 19 nt, Artificial Sequence
  Description of Artificial Sequence: Synthetic oligonucleotide
acaaacgagguggcgcugc

SEQ ID NO: 500315 - RNA, 19 nt, Artificial Sequence
  Description of Artificial Sequence: Synthetic oligonucleotide
aaccgauuugcaaaaucca

SEQ ID NO: 500316 - RNA, 19 nt, Artificial Sequence
  Description of Artificial Sequence: Synthetic oligonucleotide
uuguuaagcucacgucuca

SEQ ID NO: 500317 - RNA, 19 nt, Artificial Sequence
  Description of Artificial Sequence: Synthetic oligonucleotide
uaccugugauaauaagaca

SEQ ID NO: 500318 - RNA, 19 nt, Artificial Sequence
  Description of Artificial Sequence: Synthetic oligonucleotide
aaucggauuucuucuugua

SEQ ID NO: 500319 - RNA, 19 nt, Artificial Sequence
  Description of Artificial Sequence: Synthetic oligonucleotide
acauuaaggcuagaagugu

SEQ ID NO: 500320 - RNA, 19 nt, Artificial Sequence
  Description of Artificial Sequence: Synthetic oligonucleotide
aggaaaguaugcaugcugu

SEQ ID NO: 500321 - RNA, 19 nt, Artificial Sequence
  Description of Artificial Sequence: Synthetic oligonucleotide
uguggauuauauacacauu

SEQ ID NO: 500322 - RNA, 19 nt, Artificial Sequence
  Description of Artificial Sequence: Synthetic oligonucleotide
aaaccacaucgcguucagc

SEQ ID NO: 500323 - RNA, 19 nt, Artificial Sequence
  Description of Artificial Sequence: Synthetic oligonucleotide
acccucguaagugacaugu

SEQ ID NO: 500324 - RNA, 19 nt, Artificial Sequence
  Description of Artificial Sequence: Synthetic oligonucleotide
  modified_base (7)..(7): a, c, u, g, unknown or other
aaaagcnguucugcaugcu

SEQ ID NO: 500325 - RNA, 19 nt, Artificial Sequence
  Description of Artificial Sequence: Synthetic oligonucleotide
agaguggcaaucggacccc

SEQ ID NO: 500326 - RNA, 19 nt, Artificial Sequence
  Description of Artificial Sequence: Synthetic oligonucleotide
gaagugcaucgauagcgac

SEQ ID NO: 500327 - RNA, 19 nt, Artificial Sequence
  Description of Artificial Sequence: Synthetic oligonucleotide
cauacauuacaccccacaa

SEQ ID NO: 500328 - RNA, 19 nt, Artificial Sequence
  Description of Artificial Sequence: Synthetic oligonucleotide
auaaaccacaucgcguuca

SEQ ID NO: 500329 - RNA, 19 nt, Artificial Sequence
  Description of Artificial Sequence: Synthetic oligonucleotide
acaccccacaauucaaaca

SEQ ID NO: 500330 - RNA, 19 nt, Artificial Sequence
  Description of Artificial Sequence: Synthetic oligonucleotide
agccgugagacaaucaacu

SEQ ID NO: 500331 - RNA, 19 nt, Artificial Sequence
  Description of Artificial Sequence: Synthetic oligonucleotide
uuagcauugcuaagcuguu

SEQ ID NO: 500332 - RNA, 19 nt, Artificial Sequence
  Description of Artificial Sequence: Synthetic oligonucleotide
uuucucaaauggaggugaa

SEQ ID NO: 500333 - RNA, 19 nt, Artificial Sequence
  Description of Artificial Sequence: Synthetic oligonucleotide
uaccguuuccuaagaucgc

SEQ ID NO: 500334 - RNA, 19 nt, Artificial Sequence
  Description of Artificial Sequence: Synthetic oligonucleotide
aaguaccguuuccuaagau

SEQ ID NO: 500335 - RNA, 19 nt, Artificial Sequence
  Description of Artificial Sequence: Synthetic oligonucleotide
auggcuccgggcccaacgg

SEQ ID NO: 500336 - RNA, 19 nt, Artificial Sequence
  Description of Artificial Sequence: Synthetic oligonucleotide
uagcauaccucggccauug

SEQ ID NO: 500337 - RNA, 19 nt, Artificial Sequence
  Description of Artificial Sequence: Synthetic oligonucleotide
agaacgcgccucugccugc

SEQ ID NO: 500338 - RNA, 19 nt, Artificial Sequence
  Description of Artificial Sequence: Synthetic oligonucleotide
uguaaucgugucagggguu

SEQ ID NO: 500339 - RNA, 19 nt, Artificial Sequence
  Description of Artificial Sequence: Synthetic oligonucleotide
aguaucguaguaacaacuu

SEQ ID NO: 500340 - RNA, 19 nt, Artificial Sequence
  Description of Artificial Sequence: Synthetic oligonucleotide
uaagaucgcuuguuggcuu

SEQ ID NO: 500341 - RNA, 19 nt, Artificial Sequence
  Description of Artificial Sequence: Synthetic oligonucleotide
agcaccagcaucugacaaa

SEQ ID NO: 500342 - RNA, 19 nt, Artificial Sequence
  Description of Artificial Sequence: Synthetic oligonucleotide
auaaauggauaaagcuuga

SEQ ID NO: 500343 - RNA, 19 nt, Artificial Sequence
  Description of Artificial Sequence: Synthetic oligonucleotide
ugugcggucccgccgcccc

SEQ ID NO: 500344 - RNA, 19 nt, Artificial Sequence
  Description of Artificial Sequence: Synthetic oligonucleotide
ucacccgaauaguuacugu

SEQ ID NO: 500345 - RNA, 19 nt, Artificial Sequence
  Description of Artificial Sequence: Synthetic oligonucleotide
uuccagcggcacuccagcg

SEQ ID NO: 500346 - RNA, 19 nt, Artificial Sequence
  Description of Artificial Sequence: Synthetic oligonucleotide
cacaacaaacgagguggcg

SEQ ID NO: 500347 - RNA, 19 nt, Artificial Sequence
  Description of Artificial Sequence: Synthetic oligonucleotide
caacagguuggggugacug

SEQ ID NO: 500348 - RNA, 19 nt, Artificial Sequence
  Description of Artificial Sequence: Synthetic oligonucleotide
gucgagaacgcgccucugc

SEQ ID NO: 500349 - RNA, 19 nt, Artificial Sequence
  Description of Artificial Sequence: Synthetic oligonucleotide
aaggugagguggaauguau

SEQ ID NO: 500350 - RNA, 19 nt, Artificial Sequence
  Description of Artificial Sequence: Synthetic oligonucleotide
gagagugacaagaaccacu

SEQ ID NO: 500351 - RNA, 19 nt, Artificial Sequence
  Description of Artificial Sequence: Synthetic oligonucleotide
cacuuacaguagcuucugg

SEQ ID NO: 500352 - RNA, 19 nt, Artificial Sequence
  Description of Artificial Sequence: Synthetic oligonucleotide
gaagugaagugcaucgaua

SEQ ID NO: 500353 - RNA, 19 nt, Artificial Sequence
  Description of Artificial Sequence: Synthetic oligonucleotide
gaagcuccgggaguccgag

SEQ ID NO: 500354 - RNA, 19 nt, Artificial Sequence
  Description of Artificial Sequence: Synthetic oligonucleotide
ccgaauaguuacugugugg

SEQ ID NO: 500355 - RNA, 19 nt, Artificial Sequence
  Description of Artificial Sequence: Synthetic oligonucleotide
agcauaccucggccauugc

SEQ ID NO: 500356 - RNA, 19 nt, Artificial Sequence
  Description of Artificial Sequence: Synthetic oligonucleotide
aucgcuuguuggcuucucu

SEQ ID NO: 500357 - RNA, 19 nt, Artificial Sequence
  Description of Artificial Sequence: Synthetic oligonucleotide
gggaguccgaggcagccgg

SEQ ID NO: 500358 - RNA, 19 nt, Artificial Sequence
  Description of Artificial Sequence: Synthetic oligonucleotide
cucugugcggucccgccgc

SEQ ID NO: 500359 - RNA, 19 nt, Artificial Sequence
  Description of Artificial Sequence: Synthetic oligonucleotide
accguuuccuaagaucgcu

SEQ ID NO: 500360 - RNA, 19 nt, Artificial Sequence
  Description of Artificial Sequence: Synthetic oligonucleotide
uguuaagcucacgucucau

SEQ ID NO: 500361 - RNA, 19 nt, Artificial Sequence
  Description of Artificial Sequence: Synthetic oligonucleotide
aacaaacgagguggcgcug

SEQ ID NO: 500362 - RNA, 19 nt, Artificial Sequence
  Description of Artificial Sequence: Synthetic oligonucleotide
acccgaauaguuacugugu

SEQ ID NO: 500363 - RNA, 19 nt, Artificial Sequence
  Description of Artificial Sequence: Synthetic oligonucleotide
auagaguucccagccacuu

SEQ ID NO: 500364 - RNA, 19 nt, Artificial Sequence
  Description of Artificial Sequence: Synthetic oligonucleotide
ccuucccuuagucaaguac

SEQ ID NO: 500365 - RNA, 19 nt, Artificial Sequence
  Description of Artificial Sequence: Synthetic oligonucleotide
gagccgugagacaaucaac

SEQ ID NO: 500366 - RNA, 19 nt, Artificial Sequence
  Description of Artificial Sequence: Synthetic oligonucleotide
ucgcuuguuggcuucucuu

SEQ ID NO: 500367 - RNA, 19 nt, Artificial Sequence
  Description of Artificial Sequence: Synthetic oligonucleotide
gugugguuagcagacgguc

SEQ ID NO: 500368 - RNA, 19 nt, Artificial Sequence
  Description of Artificial Sequence: Synthetic oligonucleotide
aucguaguaacaacuuaua

SEQ ID NO: 500369 - RNA, 19 nt, Artificial Sequence
  Description of Artificial Sequence: Synthetic oligonucleotide
ggugccggaguuauuguug

SEQ ID NO: 500370 - RNA, 19 nt, Artificial Sequence
  Description of Artificial Sequence: Synthetic oligonucleotide
acaggacgucucugagagg

SEQ ID NO: 500371 - RNA, 19 nt, Artificial Sequence
  Description of Artificial Sequence: Synthetic oligonucleotide
cuaagcuguuguggugccg

SEQ ID NO: 500372 - RNA, 19 nt, Artificial Sequence
  Description of Artificial Sequence: Synthetic oligonucleotide
guagcgucugaagugaagu

SEQ ID NO: 500373 - RNA, 19 nt, Artificial Sequence
  Description of Artificial Sequence: Synthetic oligonucleotide
gcuuuauggguguaagaaa

SEQ ID NO: 500374 - RNA, 19 nt, Artificial Sequence
  Description of Artificial Sequence: Synthetic oligonucleotide
uuggugaaucagguucacu

SEQ ID NO: 500375 - RNA, 19 nt, Artificial Sequence
  Description of Artificial Sequence: Synthetic oligonucleotide
agggacggacugcgccucc

SEQ ID NO: 500376 - RNA, 19 nt, Artificial Sequence
  Description of Artificial Sequence: Synthetic oligonucleotide
gccggaguuauuguuggag

SEQ ID NO: 500377 - RNA, 19 nt, Artificial Sequence
  Description of Artificial Sequence: Synthetic oligonucleotide
cccguacauucuuuuagag

SEQ ID NO: 500378 - RNA, 19 nt, Artificial Sequence
  Description of Artificial Sequence: Synthetic oligonucleotide
guacgggagcguccuuggg

SEQ ID NO: 500379 - RNA, 19 nt, Artificial Sequence
  Description of Artificial Sequence: Synthetic oligonucleotide
caacaaacgagguggcgcu

SEQ ID NO: 500380 - RNA, 19 nt, Artificial Sequence
  Description of Artificial Sequence: Synthetic oligonucleotide
uggugccggaguuauuguu

SEQ ID NO: 500381 - RNA, 19 nt, Artificial Sequence
  Description of Artificial Sequence: Synthetic oligonucleotide
aagagccgugagacaauca

SEQ ID NO: 500382 - RNA, 19 nt, Artificial Sequence
  Description of Artificial Sequence: Synthetic oligonucleotide
agcgacgaucuccgugcag

SEQ ID NO: 500383 - RNA, 19 nt, Artificial Sequence
  Description of Artificial Sequence: Synthetic oligonucleotide
ggcaaucggaccccacacc

SEQ ID NO: 500384 - RNA, 19 nt, Artificial Sequence
  Description of Artificial Sequence: Synthetic oligonucleotide
auaccucggccauugccuu

SEQ ID NO: 500385 - RNA, 19 nt, Artificial Sequence
  Description of Artificial Sequence: Synthetic oligonucleotide
cccaacgguaaguuucagc

SEQ ID NO: 500386 - RNA, 19 nt, Artificial Sequence
  Description of Artificial Sequence: Synthetic oligonucleotide
ucgcugccaaucauccuuu

SEQ ID NO: 500387 - RNA, 19 nt, Artificial Sequence
  Description of Artificial Sequence: Synthetic oligonucleotide
gcgacgaucuccgugcagc

SEQ ID NO: 500388 - RNA, 19 nt, Artificial Sequence
  Description of Artificial Sequence: Synthetic oligonucleotide
cccgaauaguuacugugug

SEQ ID NO: 500389 - RNA, 19 nt, Artificial Sequence
  Description of Artificial Sequence: Synthetic oligonucleotide
cugaucgagguagcgucug

SEQ ID NO: 500390 - RNA, 19 nt, Artificial Sequence
  Description of Artificial Sequence: Synthetic oligonucleotide
caggacgucucugagaggu

SEQ ID NO: 500391 - RNA, 19 nt, Artificial Sequence
  Description of Artificial Sequence: Synthetic oligonucleotide
uagcgacgaucuccgugca

SEQ ID NO: 500392 - RNA, 19 nt, Artificial Sequence
  Description of Artificial Sequence: Synthetic oligonucleotide
cuaagaucgcuuguuggcu

SEQ ID NO: 500393 - RNA, 19 nt, Artificial Sequence
  Description of Artificial Sequence: Synthetic oligonucleotide
ccuuguuaagcucacgucu

SEQ ID NO: 500394 - RNA, 19 nt, Artificial Sequence
  Description of Artificial Sequence: Synthetic oligonucleotide
uguuguggugccggaguua

SEQ ID NO: 500395 - RNA, 19 nt, Artificial Sequence
  Description of Artificial Sequence: Synthetic oligonucleotide
cugcuuggaacuucuacau

SEQ ID NO: 500396 - RNA, 19 nt, Artificial Sequence
  Description of Artificial Sequence: Synthetic oligonucleotide
ugccggaguuauuguugga

SEQ ID NO: 500397 - RNA, 19 nt, Artificial Sequence
  Description of Artificial Sequence: Synthetic oligonucleotide
ccgugagacaaucaacuca

SEQ ID NO: 500398 - RNA, 19 nt, Artificial Sequence
  Description of Artificial Sequence: Synthetic oligonucleotide
gggagcguccuuggggucg

SEQ ID NO: 500399 - RNA, 19 nt, Artificial Sequence
  Description of Artificial Sequence: Synthetic oligonucleotide
cuaugguacccucguaagu

SEQ ID NO: 500400 - RNA, 19 nt, Artificial Sequence
  Description of Artificial Sequence: Synthetic oligonucleotide
uggcuccgggcccaacggu

SEQ ID NO: 500401 - RNA, 19 nt, Artificial Sequence
  Description of Artificial Sequence: Synthetic oligonucleotide
cggcgcagaaguuccagcg

SEQ ID NO: 500402 - RNA, 19 nt, Artificial Sequence
  Description of Artificial Sequence: Synthetic oligonucleotide
gaacgcgccucugccugcc

SEQ ID NO: 500403 - RNA, 19 nt, Artificial Sequence
  Description of Artificial Sequence: Synthetic oligonucleotide
caucgauagcgacgaucuc

SEQ ID NO: 500404 - RNA, 19 nt, Artificial Sequence
  Description of Artificial Sequence: Synthetic oligonucleotide
ucaacagguuggggugacu

SEQ ID NO: 500405 - RNA, 19 nt, Artificial Sequence
  Description of Artificial Sequence: Synthetic oligonucleotide
uggcgaggacggugggacc

SEQ ID NO: 500406 - RNA, 19 nt, Artificial Sequence
  Description of Artificial Sequence: Synthetic oligonucleotide
aucggaccccacaccgagg

SEQ ID NO: 500407 - RNA, 19 nt, Artificial Sequence
  Description of Artificial Sequence: Synthetic oligonucleotide
ggcgaggacggugggaccc

SEQ ID NO: 500408 - RNA, 19 nt, Artificial Sequence
  Description of Artificial Sequence: Synthetic oligonucleotide
cccggcaccauucccacuc

SEQ ID NO: 500409 - RNA, 19 nt, Artificial Sequence
  Description of Artificial Sequence: Synthetic oligonucleotide
agaucgcuuguuggcuucu

SEQ ID NO: 500410 - RNA, 19 nt, Artificial Sequence
  Description of Artificial Sequence: Synthetic oligonucleotide
gccgugagacaaucaacuc

SEQ ID NO: 500411 - RNA, 19 nt, Artificial Sequence
  Description of Artificial Sequence: Synthetic oligonucleotide
cacaucgcguucagcugca

SEQ ID NO: 500412 - RNA, 19 nt, Artificial Sequence
  Description of Artificial Sequence: Synthetic oligonucleotide
gaucuccgugcagcgucgc

SEQ ID NO: 500413 - RNA, 19 nt, Artificial Sequence
  Description of Artificial Sequence: Synthetic oligonucleotide
ggacgucucugagagguga

SEQ ID NO: 500414 - RNA, 19 nt, Artificial Sequence
  Description of Artificial Sequence: Synthetic oligonucleotide
gaucgcuuguuggcuucuc

SEQ ID NO: 500415 - RNA, 19 nt, Artificial Sequence
  Description of Artificial Sequence: Synthetic oligonucleotide
uaaucgugucagggguuuu

SEQ ID NO: 500416 - RNA, 19 nt, Artificial Sequence
  Description of Artificial Sequence: Synthetic oligonucleotide
gcaugguauauaaauggau

SEQ ID NO: 500417 - RNA, 19 nt, Artificial Sequence
  Description of Artificial Sequence: Synthetic oligonucleotide
gcagcgucgcugccaauca

SEQ ID NO: 500418 - RNA, 19 nt, Artificial Sequence
  Description of Artificial Sequence: Synthetic oligonucleotide
gguacccucguaagugaca

SEQ ID NO: 500419 - RNA, 19 nt, Artificial Sequence
  Description of Artificial Sequence: Synthetic oligonucleotide
cuucuaugguacccucgua

SEQ ID NO: 500420 - RNA, 19 nt, Artificial Sequence
  Description of Artificial Sequence: Synthetic oligonucleotide
guaaucgugucagggguuu

SEQ ID NO: 500421 - RNA, 19 nt, Artificial Sequence
  Description of Artificial Sequence: Synthetic oligonucleotide
caacgguaaguuucagcau

SEQ ID NO: 500422 - RNA, 19 nt, Artificial Sequence
  Description of Artificial Sequence: Synthetic oligonucleotide
cagcggcacuccagcgggg

SEQ ID NO: 500423 - RNA, 19 nt, Artificial Sequence
  Description of Artificial Sequence: Synthetic oligonucleotide
ggugagcggaaguccuauc

SEQ ID NO: 500424 - RNA, 19 nt, Artificial Sequence
  Description of Artificial Sequence: Synthetic oligonucleotide
cgaauaguuacuguguggu

SEQ ID NO: 500425 - RNA, 19 nt, Artificial Sequence
  Description of Artificial Sequence: Synthetic oligonucleotide
aggacgucucugagaggug

SEQ ID NO: 500426 - RNA, 19 nt, Artificial Sequence
  Description of Artificial Sequence: Synthetic oligonucleotide
cgacgaucuccgugcagcg

SEQ ID NO: 500427 - RNA, 19 nt, Artificial Sequence
  Description of Artificial Sequence: Synthetic oligonucleotide
acaucgcguucagcugcag

SEQ ID NO: 500428 - RNA, 19 nt, Artificial Sequence
  Description of Artificial Sequence: Synthetic oligonucleotide
ccggcgcagaaguuccagc

SEQ ID NO: 500429 - RNA, 19 nt, Artificial Sequence
  Description of Artificial Sequence: Synthetic oligonucleotide
cgaucuccgugcagcgucg

SEQ ID NO: 500430 - RNA, 19 nt, Artificial Sequence
  Description of Artificial Sequence: Synthetic oligonucleotide
ggacgcagaaauccacagu

SEQ ID NO: 500431 - RNA, 19 nt, Artificial Sequence
  Description of Artificial Sequence: Synthetic oligonucleotide
ccugcaguucacccgaaua

SEQ ID NO: 500432 - RNA, 19 nt, Artificial Sequence
  Description of Artificial Sequence: Synthetic oligonucleotide
cagggacggacugcgccuc

SEQ ID NO: 500433 - RNA, 19 nt, Artificial Sequence
  Description of Artificial Sequence: Synthetic oligonucleotide
guggugccggaguuauugu

SEQ ID NO: 500434 - RNA, 19 nt, Artificial Sequence
  Description of Artificial Sequence: Synthetic oligonucleotide
ccgaggcauuuccucauuc

SEQ ID NO: 500435 - RNA, 19 nt, Artificial Sequence
  Description of Artificial Sequence: Synthetic oligonucleotide
guucacccgaauaguuacu

SEQ ID NO: 500436 - RNA, 19 nt, Artificial Sequence
  Description of Artificial Sequence: Synthetic oligonucleotide
gaggacggugggacccuga

SEQ ID NO: 500437 - RNA, 19 nt, Artificial Sequence
  Description of Artificial Sequence: Synthetic oligonucleotide
ggugggacccugaacugua

SEQ ID NO: 500438 - RNA, 19 nt, Artificial Sequence
  Description of Artificial Sequence: Synthetic oligonucleotide
gacgaucuccgugcagcgu

SEQ ID NO: 500439 - RNA, 19 nt, Artificial Sequence
  Description of Artificial Sequence: Synthetic oligonucleotide
  modified_base (2)..(2): a, c, u, g, unknown or other
cnguucugcaugcuuccuu

SEQ ID NO: 500440 - RNA, 19 nt, Artificial Sequence
  Description of Artificial Sequence: Synthetic oligonucleotide
gccggcgcagaaguuccag

SEQ ID NO: 500441 - RNA, 19 nt, Artificial Sequence
  Description of Artificial Sequence: Synthetic oligonucleotide
agguagcgucugaagugaa

SEQ ID NO: 500442 - RNA, 19 nt, Artificial Sequence
  Description of Artificial Sequence: Synthetic oligonucleotide
ggggucgagaacgcgccuc

SEQ ID NO: 500443 - RNA, 19 nt, Artificial Sequence
  Description of Artificial Sequence: Synthetic oligonucleotide
cugugcggucccgccgccc

SEQ ID NO: 500444 - RNA, 19 nt, Artificial Sequence
  Description of Artificial Sequence: Synthetic oligonucleotide
cccuuagucaaguaccguu

SEQ ID NO: 500445 - RNA, 19 nt, Artificial Sequence
  Description of Artificial Sequence: Synthetic oligonucleotide
gacagcccguacauucuuu

SEQ ID NO: 500446 - RNA, 19 nt, Artificial Sequence
  Description of Artificial Sequence: Synthetic oligonucleotide
ggaagcuccgggaguccga

SEQ ID NO: 500447 - RNA, 19 nt, Artificial Sequence
  Description of Artificial Sequence: Synthetic oligonucleotide
gcggaaguccuauccacuu

SEQ ID NO: 500448 - RNA, 19 nt, Artificial Sequence
  Description of Artificial Sequence: Synthetic oligonucleotide
ggucgagaacgcgccucug

SEQ ID NO: 500449 - RNA, 19 nt, Artificial Sequence
  Description of Artificial Sequence: Synthetic oligonucleotide
gggucgagaacgcgccucu

SEQ ID NO: 500450 - RNA, 19 nt, Artificial Sequence
  Description of Artificial Sequence: Synthetic oligonucleotide
gggacgcgggcuggcgagg

SEQ ID NO: 500451 - RNA, 19 nt, Artificial Sequence
  Description of Artificial Sequence: Synthetic oligonucleotide
cgguaaguuucagcauagc

SEQ ID NO: 500452 - RNA, 19 nt, Artificial Sequence
  Description of Artificial Sequence: Synthetic oligonucleotide
ggaguccgaggcagccggc

SEQ ID NO: 500453 - RNA, 19 nt, Artificial Sequence
  Description of Artificial Sequence: Synthetic oligonucleotide
gcccaacgguaaguuucag

SEQ ID NO: 500454 - RNA, 19 nt, Artificial Sequence
  Description of Artificial Sequence: Synthetic oligonucleotide
guagcauaccucggccauu

SEQ ID NO: 500455 - RNA, 19 nt, Artificial Sequence
  Description of Artificial Sequence: Synthetic oligonucleotide
gcuggcgaggacgguggga

SEQ ID NO: 500456 - RNA, 19 nt, Artificial Sequence
  Description of Artificial Sequence: Synthetic oligonucleotide
gggccgcuuggugcagggc

SEQ ID NO: 500457 - RNA, 19 nt, Artificial Sequence
  Description of Artificial Sequence: Synthetic oligonucleotide
cagcgucgcugccaaucau

SEQ ID NO: 500458 - RNA, 19 nt, Artificial Sequence
  Description of Artificial Sequence: Synthetic oligonucleotide
ccgugcagcgucgcugcca

SEQ ID NO: 500459 - RNA, 19 nt, Artificial Sequence
  Description of Artificial Sequence: Synthetic oligonucleotide
gugcaucgauagcgacgau

SEQ ID NO: 500460 - RNA, 19 nt, Artificial Sequence
  Description of Artificial Sequence: Synthetic oligonucleotide
cgggagcguccuugggguc

SEQ ID NO: 500461 - RNA, 19 nt, Artificial Sequence
  Description of Artificial Sequence: Synthetic oligonucleotide
cgaggacggugggacccug

SEQ ID NO: 500462 - RNA, 19 nt, Artificial Sequence
  Description of Artificial Sequence: Synthetic oligonucleotide
gcgaggacggugggacccu

SEQ ID NO: 500463 - RNA, 19 nt, Artificial Sequence
  Description of Artificial Sequence: Synthetic oligonucleotide
cgauagcgacgaucuccgu

SEQ ID NO: 500464 - RNA, 19 nt, Artificial Sequence
  Description of Artificial Sequence: Synthetic oligonucleotide
ccgggcccaacgguaaguu

SEQ ID NO: 500465 - RNA, 19 nt, Artificial Sequence
  Description of Artificial Sequence: Synthetic oligonucleotide
uuaacuaucauccuggucc

SEQ ID NO: 500466 - RNA, 19 nt, Artificial Sequence
  Description of Artificial Sequence: Synthetic oligonucleotide
aaauaguacauguagcagc

SEQ ID NO: 500467 - RNA, 19 nt, Artificial Sequence
  Description of Artificial Sequence: Synthetic oligonucleotide
aagaacuuaacuaucaucc

SEQ ID NO: 500468 - RNA, 19 nt, Artificial Sequence
  Description of Artificial Sequence: Synthetic oligonucleotide
aaacguucaacuuguaugc

SEQ ID NO: 500469 - RNA, 19 nt, Artificial Sequence
  Description of Artificial Sequence: Synthetic oligonucleotide
uuagcuaagaguaagugug

SEQ ID NO: 500470 - RNA, 19 nt, Artificial Sequence
  Description of Artificial Sequence: Synthetic oligonucleotide
aacauuugaaguaauuagc

SEQ ID NO: 500471 - RNA, 19 nt, Artificial Sequence
  Description of Artificial Sequence: Synthetic oligonucleotide
aauaguacauguagcagcc

SEQ ID NO: 500472 - RNA, 19 nt, Artificial Sequence
  Description of Artificial Sequence: Synthetic oligonucleotide
uuaucucacaguuacaccc

SEQ ID NO: 500473 - RNA, 19 nt, Artificial Sequence
  Description of Artificial Sequence: Synthetic oligonucleotide
acaaagcuaagccacaaac

SEQ ID NO: 500474 - RNA, 19 nt, Artificial Sequence
  Description of Artificial Sequence: Synthetic oligonucleotide
uauucguaggaucacauga

SEQ ID NO: 500475 - RNA, 19 nt, Artificial Sequence
  Description of Artificial Sequence: Synthetic oligonucleotide
agauauugaaaauaguaca

SEQ ID NO: 500476 - RNA, 19 nt, Artificial Sequence
  Description of Artificial Sequence: Synthetic oligonucleotide
cuuuggagaaagcagaggg

SEQ ID NO: 500477 - RNA, 19 nt, Artificial Sequence
  Description of Artificial Sequence: Synthetic oligonucleotide
auacauauaaguuguuuuc

SEQ ID NO: 500478 - RNA, 19 nt, Artificial Sequence
  Description of Artificial Sequence: Synthetic oligonucleotide
ugaaguaauuagcuaagag

SEQ ID NO: 500479 - RNA, 19 nt, Artificial Sequence
  Description of Artificial Sequence: Synthetic oligonucleotide
aauggcgagaacuaguccu

SEQ ID NO: 500480 - RNA, 19 nt, Artificial Sequence
  Description of Artificial Sequence: Synthetic oligonucleotide
aacuuaacuaucauccugg

SEQ ID NO: 500481 - RNA, 19 nt, Artificial Sequence
  Description of Artificial Sequence: Synthetic oligonucleotide
uguaugccuaucaagacga

SEQ ID NO: 500482 - RNA, 19 nt, Artificial Sequence
  Description of Artificial Sequence: Synthetic oligonucleotide
caaacguucaacuuguaug

SEQ ID NO: 500483 - RNA, 19 nt, Artificial Sequence
  Description of Artificial Sequence: Synthetic oligonucleotide
aacagguacaaccaagaca

SEQ ID NO: 500484 - RNA, 19 nt, Artificial Sequence
  Description of Artificial Sequence: Synthetic oligonucleotide
cagauauugaaaauaguac

SEQ ID NO: 500485 - RNA, 19 nt, Artificial Sequence
  Description of Artificial Sequence: Synthetic oligonucleotide
gacuccauucucuaaaacc

SEQ ID NO: 500486 - RNA, 19 nt, Artificial Sequence
  Description of Artificial Sequence: Synthetic oligonucleotide
gaugaggugaggcacgccg

SEQ ID NO: 500487 - RNA, 19 nt, Artificial Sequence
  Description of Artificial Sequence: Synthetic oligonucleotide
uuggcaaccacuguauucg

SEQ ID NO: 500488 - RNA, 19 nt, Artificial Sequence
  Description of Artificial Sequence: Synthetic oligonucleotide
caugguuaaugcuucagcc

SEQ ID NO: 500489 - RNA, 19 nt, Artificial Sequence
  Description of Artificial Sequence: Synthetic oligonucleotide
uuuuaucucacaguuacac

SEQ ID NO: 500490 - RNA, 19 nt, Artificial Sequence
  Description of Artificial Sequence: Synthetic oligonucleotide
aaggguagguucucauacc

SEQ ID NO: 500491 - RNA, 19 nt, Artificial Sequence
  Description of Artificial Sequence: Synthetic oligonucleotide
gagaacagugcuuuucccg

SEQ ID NO: 500492 - RNA, 19 nt, Artificial Sequence
  Description of Artificial Sequence: Synthetic oligonucleotide
uuugagggcacuuuguccu

SEQ ID NO: 500493 - RNA, 19 nt, Artificial Sequence
  Description of Artificial Sequence: Synthetic oligonucleotide
gaucacaugacuggggugg

SEQ ID NO: 500494 - RNA, 19 nt, Artificial Sequence
  Description of Artificial Sequence: Synthetic oligonucleotide
uucucuaaaaccaccugug

SEQ ID NO: 500495 - RNA, 19 nt, Artificial Sequence
  Description of Artificial Sequence: Synthetic oligonucleotide
agcacaaacguucaacuug

SEQ ID NO: 500496 - RNA, 19 nt, Artificial Sequence
  Description of Artificial Sequence: Synthetic oligonucleotide
ucuuccuagagcuccuucg

SEQ ID NO: 500497 - RNA, 19 nt, Artificial Sequence
  Description of Artificial Sequence: Synthetic oligonucleotide
uuuuaugaugacaaauaau

SEQ ID NO: 500498 - RNA, 19 nt, Artificial Sequence
  Description of Artificial Sequence: Synthetic oligonucleotide
gaacuuaacuaucauccug

SEQ ID NO: 500499 - RNA, 19 nt, Artificial Sequence
  Description of Artificial Sequence: Synthetic oligonucleotide
auuagcuaagaguaagugu

SEQ ID NO: 500500 - RNA, 19 nt, Artificial Sequence
  Description of Artificial Sequence: Synthetic oligonucleotide
aguuucucgaguggcaucc

SEQ ID NO: 500501 - RNA, 19 nt, Artificial Sequence
  Description of Artificial Sequence: Synthetic oligonucleotide
guaauuagcuaagaguaag

SEQ ID NO: 500502 - RNA, 19 nt, Artificial Sequence
  Description of Artificial Sequence: Synthetic oligonucleotide
uaggcauagaucuuugacu

SEQ ID NO: 500503 - RNA, 19 nt, Artificial Sequence
  Description of Artificial Sequence: Synthetic oligonucleotide
aagacuagcuuacugugaa

SEQ ID NO: 500504 - RNA, 19 nt, Artificial Sequence
  Description of Artificial Sequence: Synthetic oligonucleotide
acccuauauacauauaagu

SEQ ID NO: 500505 - RNA, 19 nt, Artificial Sequence
  Description of Artificial Sequence: Synthetic oligonucleotide
aguuacacccuccuuucgg

SEQ ID NO: 500506 - RNA, 19 nt, Artificial Sequence
  Description of Artificial Sequence: Synthetic oligonucleotide
uacacgucaauguguaugc

SEQ ID NO: 500507 - RNA, 19 nt, Artificial Sequence
  Description of Artificial Sequence: Synthetic oligonucleotide
gaacuaguccuucccaggg

SEQ ID NO: 500508 - RNA, 19 nt, Artificial Sequence
  Description of Artificial Sequence: Synthetic oligonucleotide
aaggugaauggcgagaacu

SEQ ID NO: 500509 - RNA, 19 nt, Artificial Sequence
  Description of Artificial Sequence: Synthetic oligonucleotide
agagcuucggaucguacuc

SEQ ID NO: 500510 - RNA, 19 nt, Artificial Sequence
  Description of Artificial Sequence: Synthetic oligonucleotide
ugccuuuuccaucaaugag

SEQ ID NO: 500511 - RNA, 19 nt, Artificial Sequence
  Description of Artificial Sequence: Synthetic oligonucleotide
guguaugccuaucaagacg

SEQ ID NO: 500512 - RNA, 19 nt, Artificial Sequence
  Description of Artificial Sequence: Synthetic oligonucleotide
acacccuccuuucggaucc

SEQ ID NO: 500513 - RNA, 19 nt, Artificial Sequence
  Description of Artificial Sequence: Synthetic oligonucleotide
agaauuaaugcaguuucag

SEQ ID NO: 500514 - RNA, 19 nt, Artificial Sequence
  Description of Artificial Sequence: Synthetic oligonucleotide
ucgauggaggcuuugcugc

SEQ ID NO: 500515 - RNA, 19 nt, Artificial Sequence
  Description of Artificial Sequence: Synthetic oligonucleotide
agaacuaguccuucccagg

SEQ ID NO: 500516 - RNA, 19 nt, Artificial Sequence
  Description of Artificial Sequence: Synthetic oligonucleotide
accuguaacagauauuuaa

SEQ ID NO: 500517 - RNA, 19 nt, Artificial Sequence
  Description of Artificial Sequence: Synthetic oligonucleotide
uucuuagguagcaccauca

SEQ ID NO: 500518 - RNA, 19 nt, Artificial Sequence
  Description of Artificial Sequence: Synthetic oligonucleotide
uaucaagacgaugaggaga

SEQ ID NO: 500519 - RNA, 19 nt, Artificial Sequence
  Description of Artificial Sequence: Synthetic oligonucleotide
aacccuauauacauauaag

SEQ ID NO: 500520 - RNA, 19 nt, Artificial Sequence
  Description of Artificial Sequence: Synthetic oligonucleotide
ugguugaucagccucccca

SEQ ID NO: 500521 - RNA, 19 nt, Artificial Sequence
  Description of Artificial Sequence: Synthetic oligonucleotide
ugcucgggaagcacaaacg

SEQ ID NO: 500522 - RNA, 19 nt, Artificial Sequence
  Description of Artificial Sequence: Synthetic oligonucleotide
ugaauggcgagaacuaguc

SEQ ID NO: 500523 - RNA, 19 nt, Artificial Sequence
  Description of Artificial Sequence: Synthetic oligonucleotide
uuucggauccuccuccaag

SEQ ID NO: 500524 - RNA, 19 nt, Artificial Sequence
  Description of Artificial Sequence: Synthetic oligonucleotide
cacaaagucuccccgagag

SEQ ID NO: 500525 - RNA, 19 nt, Artificial Sequence
  Description of Artificial Sequence: Synthetic oligonucleotide
auauugaaaauaguacaug

SEQ ID NO: 500526 - RNA, 19 nt, Artificial Sequence
  Description of Artificial Sequence: Synthetic oligonucleotide
ucucuaaaaccaccugugc

SEQ ID NO: 500527 - RNA, 19 nt, Artificial Sequence
  Description of Artificial Sequence: Synthetic oligonucleotide
uuaagaacuuaacuaucau

SEQ ID NO: 500528 - RNA, 19 nt, Artificial Sequence
  Description of Artificial Sequence: Synthetic oligonucleotide
uagcuaagaguaagugugg

SEQ ID NO: 500529 - RNA, 19 nt, Artificial Sequence
  Description of Artificial Sequence: Synthetic oligonucleotide
uuaaugcuucagccaaggg

SEQ ID NO: 500530 - RNA, 19 nt, Artificial Sequence
  Description of Artificial Sequence: Synthetic oligonucleotide
ucguaggaucacaugacug

SEQ ID NO: 500531 - RNA, 19 nt, Artificial Sequence
  Description of Artificial Sequence: Synthetic oligonucleotide
uacauauaaguuguuuucu

SEQ ID NO: 500532 - RNA, 19 nt, Artificial Sequence
  Description of Artificial Sequence: Synthetic oligonucleotide
auauaaaaguuuugguaau

SEQ ID NO: 500533 - RNA, 19 nt, Artificial Sequence
  Description of Artificial Sequence: Synthetic oligonucleotide
cuuugagggcacuuugucc

SEQ ID NO: 500534 - RNA, 19 nt, Artificial Sequence
  Description of Artificial Sequence: Synthetic oligonucleotide
aaaccccgggcucaguaag

SEQ ID NO: 500535 - RNA, 19 nt, Artificial Sequence
  Description of Artificial Sequence: Synthetic oligonucleotide
acuaaaggugaauggcgag

SEQ ID NO: 500536 - RNA, 19 nt, Artificial Sequence
  Description of Artificial Sequence: Synthetic oligonucleotide
guaggcauagaucuuugac

SEQ ID NO: 500537 - RNA, 19 nt, Artificial Sequence
  Description of Artificial Sequence: Synthetic oligonucleotide
uucgauggaggcuuugcug

SEQ ID NO: 500538 - RNA, 19 nt, Artificial Sequence
  Description of Artificial Sequence: Synthetic oligonucleotide
aacaagagcuuggagacau

SEQ ID NO: 500539 - RNA, 19 nt, Artificial Sequence
  Description of Artificial Sequence: Synthetic oligonucleotide
uguauucguaggaucacau

SEQ ID NO: 500540 - RNA, 19 nt, Artificial Sequence
  Description of Artificial Sequence: Synthetic oligonucleotide
uguguaugccuaucaagac

SEQ ID NO: 500541 - RNA, 19 nt, Artificial Sequence
  Description of Artificial Sequence: Synthetic oligonucleotide
aagcuaagccacaaacagg

SEQ ID NO: 500542 - RNA, 19 nt, Artificial Sequence
  Description of Artificial Sequence: Synthetic oligonucleotide
gguaauauaaggccaucug

SEQ ID NO: 500543 - RNA, 19 nt, Artificial Sequence
  Description of Artificial Sequence: Synthetic oligonucleotide
guuaaugcuucagccaagg

SEQ ID NO: 500544 - RNA, 19 nt, Artificial Sequence
  Description of Artificial Sequence: Synthetic oligonucleotide
guuaagaacuuaacuauca

SEQ ID NO: 500545 - RNA, 19 nt, Artificial Sequence
  Description of Artificial Sequence: Synthetic oligonucleotide
cucgugaugugcaacugag

SEQ ID NO: 500546 - RNA, 19 nt, Artificial Sequence
  Description of Artificial Sequence: Synthetic oligonucleotide
uaagaguaaguguggugug

SEQ ID NO: 500547 - RNA, 19 nt, Artificial Sequence
  Description of Artificial Sequence: Synthetic oligonucleotide
guagauuccagcuaauggu

SEQ ID NO: 500548 - RNA, 19 nt, Artificial Sequence
  Description of Artificial Sequence: Synthetic oligonucleotide
agaacuuaacuaucauccu

SEQ ID NO: 500549 - RNA, 19 nt, Artificial Sequence
  Description of Artificial Sequence: Synthetic oligonucleotide
ucucgggaggcgaugagga

SEQ ID NO: 500550 - RNA, 19 nt, Artificial Sequence
  Description of Artificial Sequence: Synthetic oligonucleotide
ucggacuucacagagcuuc

SEQ ID NO: 500551 - RNA, 19 nt, Artificial Sequence
  Description of Artificial Sequence: Synthetic oligonucleotide
ugaccaggcuagcaagggg

SEQ ID NO: 500552 - RNA, 19 nt, Artificial Sequence
  Description of Artificial Sequence: Synthetic oligonucleotide
uuagcaucggugaucucaa

SEQ ID NO: 500553 - RNA, 19 nt, Artificial Sequence
  Description of Artificial Sequence: Synthetic oligonucleotide
uguugggacucauguaggc

SEQ ID NO: 500554 - RNA, 19 nt, Artificial Sequence
  Description of Artificial Sequence: Synthetic oligonucleotide
uuucuuagguagcaccauc

SEQ ID NO: 500555 - RNA, 19 nt, Artificial Sequence
  Description of Artificial Sequence: Synthetic oligonucleotide
aagucugaccacugaccag

SEQ ID NO: 500556 - RNA, 19 nt, Artificial Sequence
  Description of Artificial Sequence: Synthetic oligonucleotide
agcaucggugaucucaaug

SEQ ID NO: 500557 - RNA, 19 nt, Artificial Sequence
  Description of Artificial Sequence: Synthetic oligonucleotide
cuuagguagcaccaucaug

SEQ ID NO: 500558 - RNA, 19 nt, Artificial Sequence
  Description of Artificial Sequence: Synthetic oligonucleotide
agcuucggaucguacuccc

SEQ ID NO: 500559 - RNA, 19 nt, Artificial Sequence
  Description of Artificial Sequence: Synthetic oligonucleotide
cuuggcaaccacuguauuc

SEQ ID NO: 500560 - RNA, 19 nt, Artificial Sequence
  Description of Artificial Sequence: Synthetic oligonucleotide
ucucauaccuggcuccaga

SEQ ID NO: 500561 - RNA, 19 nt, Artificial Sequence
  Description of Artificial Sequence: Synthetic oligonucleotide
gcaaccacuguauucguag

SEQ ID NO: 500562 - RNA, 19 nt, Artificial Sequence
  Description of Artificial Sequence: Synthetic oligonucleotide
gauauugaaaauaguacau

SEQ ID NO: 500563 - RNA, 19 nt, Artificial Sequence
  Description of Artificial Sequence: Synthetic oligonucleotide
auacagagccucccgcuuc

SEQ ID NO: 500564 - RNA, 19 nt, Artificial Sequence
  Description of Artificial Sequence: Synthetic oligonucleotide
ucguacucccaccauuucu

SEQ ID NO: 500565 - RNA, 19 nt, Artificial Sequence
  Description of Artificial Sequence: Synthetic oligonucleotide
ucuucucgcuucuuguaga

SEQ ID NO: 500566 - RNA, 19 nt, Artificial Sequence
  Description of Artificial Sequence: Synthetic oligonucleotide
ugaggcacgccgucgaugu

SEQ ID NO: 500567 - RNA, 19 nt, Artificial Sequence
  Description of Artificial Sequence: Synthetic oligonucleotide
aagaauuaaugcaguuuca

SEQ ID NO: 500568 - RNA, 19 nt, Artificial Sequence
  Description of Artificial Sequence: Synthetic oligonucleotide
uuccccuggcauuugaccu

SEQ ID NO: 500569 - RNA, 19 nt, Artificial Sequence
  Description of Artificial Sequence: Synthetic oligonucleotide
gguauucuaccacaaaguc

SEQ ID NO: 500570 - RNA, 19 nt, Artificial Sequence
  Description of Artificial Sequence: Synthetic oligonucleotide
gacgaugaggagaacaaga

SEQ ID NO: 500571 - RNA, 19 nt, Artificial Sequence
  Description of Artificial Sequence: Synthetic oligonucleotide
gaagcacaaacguucaacu

SEQ ID NO: 500572 - RNA, 19 nt, Artificial Sequence
  Description of Artificial Sequence: Synthetic oligonucleotide
uggggaagacuuucuuagg

SEQ ID NO: 500573 - RNA, 19 nt, Artificial Sequence
  Description of Artificial Sequence: Synthetic oligonucleotide
acaaacguucaacuuguau

SEQ ID NO: 500574 - RNA, 19 nt, Artificial Sequence
  Description of Artificial Sequence: Synthetic oligonucleotide
cuuagcaucggugaucuca

SEQ ID NO: 500575 - RNA, 19 nt, Artificial Sequence
  Description of Artificial Sequence: Synthetic oligonucleotide
cuaucaagacgaugaggag

SEQ ID NO: 500576 - RNA, 19 nt, Artificial Sequence
  Description of Artificial Sequence: Synthetic oligonucleotide
ggaagacuagcuuacugug

SEQ ID NO: 500577 - RNA, 19 nt, Artificial Sequence
  Description of Artificial Sequence: Synthetic oligonucleotide
ucgccguagucauacagga

SEQ ID NO: 500578 - RNA, 19 nt, Artificial Sequence
  Description of Artificial Sequence: Synthetic oligonucleotide
uaacuaucauccugguccu

SEQ ID NO: 500579 - RNA, 19 nt, Artificial Sequence
  Description of Artificial Sequence: Synthetic oligonucleotide
uucucgaguggcauccaca

SEQ ID NO: 500580 - RNA, 19 nt, Artificial Sequence
  Description of Artificial Sequence: Synthetic oligonucleotide
gaauggcgagaacuagucc

SEQ ID NO: 500581 - RNA, 19 nt, Artificial Sequence
  Description of Artificial Sequence: Synthetic oligonucleotide
aggguagguucucauaccu

SEQ ID NO: 500582 - RNA, 19 nt, Artificial Sequence
  Description of Artificial Sequence: Synthetic oligonucleotide
agcuuggagacaucccguc

SEQ ID NO: 500583 - RNA, 19 nt, Artificial Sequence
  Description of Artificial Sequence: Synthetic oligonucleotide
acgaugaggagaacaagag

SEQ ID NO: 500584 - RNA, 19 nt, Artificial Sequence
  Description of Artificial Sequence: Synthetic oligonucleotide
aagcacaaacguucaacuu

SEQ ID NO: 500585 - RNA, 19 nt, Artificial Sequence
  Description of Artificial Sequence: Synthetic oligonucleotide
ugguaauauaaggccaucu

SEQ ID NO: 500586 - RNA, 19 nt, Artificial Sequence
  Description of Artificial Sequence: Synthetic oligonucleotide
uggcaaucacaccucugcc

SEQ ID NO: 500587 - RNA, 19 nt, Artificial Sequence
  Description of Artificial Sequence: Synthetic oligonucleotide
cucuucucgcuucuuguag

SEQ ID NO: 500588 - RNA, 19 nt, Artificial Sequence
  Description of Artificial Sequence: Synthetic oligonucleotide
cuucggaucguacucccac

SEQ ID NO: 500589 - RNA, 19 nt, Artificial Sequence
  Description of Artificial Sequence: Synthetic oligonucleotide
cacgccgucgaugucaugc

SEQ ID NO: 500590 - RNA, 19 nt, Artificial Sequence
  Description of Artificial Sequence: Synthetic oligonucleotide
ucccuuugagggcacuuug

SEQ ID NO: 500591 - RNA, 19 nt, Artificial Sequence
  Description of Artificial Sequence: Synthetic oligonucleotide
ucggaucguacucccacca

SEQ ID NO: 500592 - RNA, 19 nt, Artificial Sequence
  Description of Artificial Sequence: Synthetic oligonucleotide
cauucucuaaaaccaccug

SEQ ID NO: 500593 - RNA, 19 nt, Artificial Sequence
  Description of Artificial Sequence: Synthetic oligonucleotide
guauucguaggaucacaug

SEQ ID NO: 500594 - RNA, 19 nt, Artificial Sequence
  Description of Artificial Sequence: Synthetic oligonucleotide
ucuuagguagcaccaucau

SEQ ID NO: 500595 - RNA, 19 nt, Artificial Sequence
  Description of Artificial Sequence: Synthetic oligonucleotide
uguaggcauagaucuuuga

SEQ ID NO: 500596 - RNA, 19 nt, Artificial Sequence
  Description of Artificial Sequence: Synthetic oligonucleotide
gacuaaaggugaauggcga

SEQ ID NO: 500597 - RNA, 19 nt, Artificial Sequence
  Description of Artificial Sequence: Synthetic oligonucleotide
ugaugcuucgaggugccug

SEQ ID NO: 500598 - RNA, 19 nt, Artificial Sequence
  Description of Artificial Sequence: Synthetic oligonucleotide
ugaagaggggagcgcauuc

SEQ ID NO: 500599 - RNA, 19 nt, Artificial Sequence
  Description of Artificial Sequence: Synthetic oligonucleotide
ugugcaacugaguucucuu

SEQ ID NO: 500600 - RNA, 19 nt, Artificial Sequence
  Description of Artificial Sequence: Synthetic oligonucleotide
aucaagacgaugaggagaa

SEQ ID NO: 500601 - RNA, 19 nt, Artificial Sequence
  Description of Artificial Sequence: Synthetic oligonucleotide
cuaagaguaaguguggugu

SEQ ID NO: 500602 - RNA, 19 nt, Artificial Sequence
  Description of Artificial Sequence: Synthetic oligonucleotide
acacuuacugugguugauc

SEQ ID NO: 500603 - RNA, 19 nt, Artificial Sequence
  Description of Artificial Sequence: Synthetic oligonucleotide
uccagcuaaugguuucccc

SEQ ID NO: 500604 - RNA, 19 nt, Artificial Sequence
  Description of Artificial Sequence: Synthetic oligonucleotide
ugcuuggcaaccacuguau

SEQ ID NO: 500605 - RNA, 19 nt, Artificial Sequence
  Description of Artificial Sequence: Synthetic oligonucleotide
accggguagaaaucuguca

SEQ ID NO: 500606 - RNA, 19 nt, Artificial Sequence
  Description of Artificial Sequence: Synthetic oligonucleotide
cuauucugcuguguuuucc

SEQ ID NO: 500607 - RNA, 19 nt, Artificial Sequence
  Description of Artificial Sequence: Synthetic oligonucleotide
aguaagcuuuggagaaagc

SEQ ID NO: 500608 - RNA, 19 nt, Artificial Sequence
  Description of Artificial Sequence: Synthetic oligonucleotide
cacugaccaggcuagcaag

SEQ ID NO: 500609 - RNA, 19 nt, Artificial Sequence
  Description of Artificial Sequence: Synthetic oligonucleotide
acuuucuuagguagcacca

SEQ ID NO: 500610 - RNA, 19 nt, Artificial Sequence
  Description of Artificial Sequence: Synthetic oligonucleotide
cguaggaucacaugacugg

SEQ ID NO: 500611 - RNA, 19 nt, Artificial Sequence
  Description of Artificial Sequence: Synthetic oligonucleotide
gcuuccuaguucauguucg

SEQ ID NO: 500612 - RNA, 19 nt, Artificial Sequence
  Description of Artificial Sequence: Synthetic oligonucleotide
uucggaucguacucccacc

SEQ ID NO: 500613 - RNA, 19 nt, Artificial Sequence
  Description of Artificial Sequence: Synthetic oligonucleotide
uucgaggugccuggaaaag

SEQ ID NO: 500614 - RNA, 19 nt, Artificial Sequence
  Description of Artificial Sequence: Synthetic oligonucleotide
gucgccguagucauacagg

SEQ ID NO: 500615 - RNA, 19 nt, Artificial Sequence
  Description of Artificial Sequence: Synthetic oligonucleotide
uccccaggcgguuaguuuc

SEQ ID NO: 500616 - RNA, 19 nt, Artificial Sequence
  Description of Artificial Sequence: Synthetic oligonucleotide
acuuaacuaucauccuggu

SEQ ID NO: 500617 - RNA, 19 nt, Artificial Sequence
  Description of Artificial Sequence: Synthetic oligonucleotide
aggggagcgcauuccagag

SEQ ID NO: 500618 - RNA, 19 nt, Artificial Sequence
  Description of Artificial Sequence: Synthetic oligonucleotide
caucggugaucucaaugag

SEQ ID NO: 500619 - RNA, 19 nt, Artificial Sequence
  Description of Artificial Sequence: Synthetic oligonucleotide
gguucucauaccuggcucc

SEQ ID NO: 500620 - RNA, 19 nt, Artificial Sequence
  Description of Artificial Sequence: Synthetic oligonucleotide
agacuuucuuagguagcac

SEQ ID NO: 500621 - RNA, 19 nt, Artificial Sequence
  Description of Artificial Sequence: Synthetic oligonucleotide
agccccuagacuaaaggug

SEQ ID NO: 500622 - RNA, 19 nt, Artificial Sequence
  Description of Artificial Sequence: Synthetic oligonucleotide
cuuggagacaucccgucca

SEQ ID NO: 500623 - RNA, 19 nt, Artificial Sequence
  Description of Artificial Sequence: Synthetic oligonucleotide
uuucucgaguggcauccac

SEQ ID NO: 500624 - RNA, 19 nt, Artificial Sequence
  Description of Artificial Sequence: Synthetic oligonucleotide
caaguccuagacugcucgg

SEQ ID NO: 500625 - RNA, 19 nt, Artificial Sequence
  Description of Artificial Sequence: Synthetic oligonucleotide
aguccuagacugcucggga

SEQ ID NO: 500626 - RNA, 19 nt, Artificial Sequence
  Description of Artificial Sequence: Synthetic oligonucleotide
gaucuuugacugcccagca

SEQ ID NO: 500627 - RNA, 19 nt, Artificial Sequence
  Description of Artificial Sequence: Synthetic oligonucleotide
cuuggaugugggguguggg

SEQ ID NO: 500628 - RNA, 19 nt, Artificial Sequence
  Description of Artificial Sequence: Synthetic oligonucleotide
gaagaggggagcgcauucc

SEQ ID NO: 500629 - RNA, 19 nt, Artificial Sequence
  Description of Artificial Sequence: Synthetic oligonucleotide
guuacacccuccuuucgga

SEQ ID NO: 500630 - RNA, 19 nt, Artificial Sequence
  Description of Artificial Sequence: Synthetic oligonucleotide
uagcuuacugugaaaccuu

SEQ ID NO: 500631 - RNA, 19 nt, Artificial Sequence
  Description of Artificial Sequence: Synthetic oligonucleotide
gcauagaucuuugacugcc

SEQ ID NO: 500632 - RNA, 19 nt, Artificial Sequence
  Description of Artificial Sequence: Synthetic oligonucleotide
ucgacuccauucucuaaaa

SEQ ID NO: 500633 - RNA, 19 nt, Artificial Sequence
  Description of Artificial Sequence: Synthetic oligonucleotide
uucaugccuucuuccuucc

SEQ ID NO: 500634 - RNA, 19 nt, Artificial Sequence
  Description of Artificial Sequence: Synthetic oligonucleotide
aguaagugugguguguaaa

SEQ ID NO: 500635 - RNA, 19 nt, Artificial Sequence
  Description of Artificial Sequence: Synthetic oligonucleotide
cuaccucugcuaucacagg

SEQ ID NO: 500636 - RNA, 19 nt, Artificial Sequence
  Description of Artificial Sequence: Synthetic oligonucleotide
aacguucaacuuguaugca

SEQ ID NO: 500637 - RNA, 19 nt, Artificial Sequence
  Description of Artificial Sequence: Synthetic oligonucleotide
ugcuuuucccgaccugccu

SEQ ID NO: 500638 - RNA, 19 nt, Artificial Sequence
  Description of Artificial Sequence: Synthetic oligonucleotide
caagacgaugaggagaaca

SEQ ID NO: 500639 - RNA, 19 nt, Artificial Sequence
  Description of Artificial Sequence: Synthetic oligonucleotide
caaagucuccccgagagaa

SEQ ID NO: 500640 - RNA, 19 nt, Artificial Sequence
  Description of Artificial Sequence: Synthetic oligonucleotide
aagucaccuaccucugcua

SEQ ID NO: 500641 - RNA, 19 nt, Artificial Sequence
  Description of Artificial Sequence: Synthetic oligonucleotide
gaggcuuugcugcggucgc

SEQ ID NO: 500642 - RNA, 19 nt, Artificial Sequence
  Description of Artificial Sequence: Synthetic oligonucleotide
acacgucaauguguaugcc

SEQ ID NO: 500643 - RNA, 19 nt, Artificial Sequence
  Description of Artificial Sequence: Synthetic oligonucleotide
ucgaggugccuggaaaagc

SEQ ID NO: 500644 - RNA, 19 nt, Artificial Sequence
  Description of Artificial Sequence: Synthetic oligonucleotide
uuucccgaccugccucuag

SEQ ID NO: 500645 - RNA, 19 nt, Artificial Sequence
  Description of Artificial Sequence: Synthetic oligonucleotide
aguacauguagcagccugu

SEQ ID NO: 500646 - RNA, 19 nt, Artificial Sequence
  Description of Artificial Sequence: Synthetic oligonucleotide
gcuaagaguaaguguggug

SEQ ID NO: 500647 - RNA, 19 nt, Artificial Sequence
  Description of Artificial Sequence: Synthetic oligonucleotide
uucccacacuuacuguggu

SEQ ID NO: 500648 - RNA, 19 nt, Artificial Sequence
  Description of Artificial Sequence: Synthetic oligonucleotide
aguagguuuugcucagaua

SEQ ID NO: 500649 - RNA, 19 nt, Artificial Sequence
  Description of Artificial Sequence: Synthetic oligonucleotide
uucccgaccugccucuagu

SEQ ID NO: 500650 - RNA, 19 nt, Artificial Sequence
  Description of Artificial Sequence: Synthetic oligonucleotide
ucgugaugugcaacugagu

SEQ ID NO: 500651 - RNA, 19 nt, Artificial Sequence
  Description of Artificial Sequence: Synthetic oligonucleotide
ggaggcuuugcugcggucg

SEQ ID NO: 500652 - RNA, 19 nt, Artificial Sequence
  Description of Artificial Sequence: Synthetic oligonucleotide
caacugaguucucuuccug

SEQ ID NO: 500653 - RNA, 19 nt, Artificial Sequence
  Description of Artificial Sequence: Synthetic oligonucleotide
uucgcaccggguagaaauc

SEQ ID NO: 500654 - RNA, 19 nt, Artificial Sequence
  Description of Artificial Sequence: Synthetic oligonucleotide
gcgguuaguuucucgagug

SEQ ID NO: 500655 - RNA, 19 nt, Artificial Sequence
  Description of Artificial Sequence: Synthetic oligonucleotide
gcuagcaaggggugugggg

SEQ ID NO: 500656 - RNA, 19 nt, Artificial Sequence
  Description of Artificial Sequence: Synthetic oligonucleotide
uccuucccgcucucaauca

SEQ ID NO: 500657 - RNA, 19 nt, Artificial Sequence
  Description of Artificial Sequence: Synthetic oligonucleotide
caguuacacccuccuuucg

SEQ ID NO: 500658 - RNA, 19 nt, Artificial Sequence
  Description of Artificial Sequence: Synthetic oligonucleotide
cauguucgacuccauucuc

SEQ ID NO: 500659 - RNA, 19 nt, Artificial Sequence
  Description of Artificial Sequence: Synthetic oligonucleotide
cuaaugguuuccccuggca

SEQ ID NO: 500660 - RNA, 19 nt, Artificial Sequence
  Description of Artificial Sequence: Synthetic oligonucleotide
cuguaacagauauuuaaau

SEQ ID NO: 500661 - RNA, 19 nt, Artificial Sequence
  Description of Artificial Sequence: Synthetic oligonucleotide
gggagcgcauuccagagca

SEQ ID NO: 500662 - RNA, 19 nt, Artificial Sequence
  Description of Artificial Sequence: Synthetic oligonucleotide
ggugaauggcgagaacuag

SEQ ID NO: 500663 - RNA, 19 nt, Artificial Sequence
  Description of Artificial Sequence: Synthetic oligonucleotide
ggucuggcaauucccacac

SEQ ID NO: 500664 - RNA, 19 nt, Artificial Sequence
  Description of Artificial Sequence: Synthetic oligonucleotide
caucggacuucacagagcu

SEQ ID NO: 500665 - RNA, 19 nt, Artificial Sequence
  Description of Artificial Sequence: Synthetic oligonucleotide
ggucgccguagucauacag

SEQ ID NO: 500666 - RNA, 19 nt, Artificial Sequence
  Description of Artificial Sequence: Synthetic oligonucleotide
cuucgcaccggguagaaau

SEQ ID NO: 500667 - RNA, 19 nt, Artificial Sequence
  Description of Artificial Sequence: Synthetic oligonucleotide
uugaccucgugaugugcaa

SEQ ID NO: 500668 - RNA, 19 nt, Artificial Sequence
  Description of Artificial Sequence: Synthetic oligonucleotide
caauguguaugccuaucaa

SEQ ID NO: 500669 - RNA, 19 nt, Artificial Sequence
  Description of Artificial Sequence: Synthetic oligonucleotide
auuuuaucucacaguuaca

SEQ ID NO: 500670 - RNA, 19 nt, Artificial Sequence
  Description of Artificial Sequence: Synthetic oligonucleotide
ugccaggggaccucuccug

SEQ ID NO: 500671 - RNA, 19 nt, Artificial Sequence
  Description of Artificial Sequence: Synthetic oligonucleotide
ucggauccuccuccaaguc

SEQ ID NO: 500672 - RNA, 19 nt, Artificial Sequence
  Description of Artificial Sequence: Synthetic oligonucleotide
gcgagaacuaguccuuccc

SEQ ID NO: 500673 - RNA, 19 nt, Artificial Sequence
  Description of Artificial Sequence: Synthetic oligonucleotide
auguucgacuccauucucu

SEQ ID NO: 500674 - RNA, 19 nt, Artificial Sequence
  Description of Artificial Sequence: Synthetic oligonucleotide
gaguaagugugguguguaa

SEQ ID NO: 500675 - RNA, 19 nt, Artificial Sequence
  Description of Artificial Sequence: Synthetic oligonucleotide
uggagacaucccguccagg

SEQ ID NO: 500676 - RNA, 19 nt, Artificial Sequence
  Description of Artificial Sequence: Synthetic oligonucleotide
uagacugcucgggaagcac

SEQ ID NO: 500677 - RNA, 19 nt, Artificial Sequence
  Description of Artificial Sequence: Synthetic oligonucleotide
ucacaguuacacccuccuu

SEQ ID NO: 500678 - RNA, 19 nt, Artificial Sequence
  Description of Artificial Sequence: Synthetic oligonucleotide
caccggguagaaaucuguc

SEQ ID NO: 500679 - RNA, 19 nt, Artificial Sequence
  Description of Artificial Sequence: Synthetic oligonucleotide
gggaagacuagcuuacugu

SEQ ID NO: 500680 - RNA, 19 nt, Artificial Sequence
  Description of Artificial Sequence: Synthetic oligonucleotide
gccuaucaagacgaugagg

SEQ ID NO: 500681 - RNA, 19 nt, Artificial Sequence
  Description of Artificial Sequence: Synthetic oligonucleotide
gccguagucauacaggagu

SEQ ID NO: 500682 - RNA, 19 nt, Artificial Sequence
  Description of Artificial Sequence: Synthetic oligonucleotide
ccuagagcuccuucgcacc

SEQ ID NO: 500683 - RNA, 19 nt, Artificial Sequence
  Description of Artificial Sequence: Synthetic oligonucleotide
cuucgaggugccuggaaaa

SEQ ID NO: 500684 - RNA, 19 nt, Artificial Sequence
  Description of Artificial Sequence: Synthetic oligonucleotide
gaccucgugaugugcaacu

SEQ ID NO: 500685 - RNA, 19 nt, Artificial Sequence
  Description of Artificial Sequence: Synthetic oligonucleotide
ugaccucgugaugugcaac

SEQ ID NO: 500686 - RNA, 19 nt, Artificial Sequence
  Description of Artificial Sequence: Synthetic oligonucleotide
ggcauuugaccucgugaug

SEQ ID NO: 500687 - RNA, 19 nt, Artificial Sequence
  Description of Artificial Sequence: Synthetic oligonucleotide
ucgcaccggguagaaaucu

SEQ ID NO: 500688 - RNA, 19 nt, Artificial Sequence
  Description of Artificial Sequence: Synthetic oligonucleotide
cacaguuacacccuccuuu

SEQ ID NO: 500689 - RNA, 19 nt, Artificial Sequence
  Description of Artificial Sequence: Synthetic oligonucleotide
ggcgagaacuaguccuucc

SEQ ID NO: 500690 - RNA, 19 nt, Artificial Sequence
  Description of Artificial Sequence: Synthetic oligonucleotide
cuccuuucggauccuccuc

SEQ ID NO: 500691 - RNA, 19 nt, Artificial Sequence
  Description of Artificial Sequence: Synthetic oligonucleotide
augagguccccaugguauu

SEQ ID NO: 500692 - RNA, 19 nt, Artificial Sequence
  Description of Artificial Sequence: Synthetic oligonucleotide
gcuccuucgcaccggguag

SEQ ID NO: 500693 - RNA, 19 nt, Artificial Sequence
  Description of Artificial Sequence: Synthetic oligonucleotide
uggcaaccacuguauucgu

SEQ ID NO: 500694 - RNA, 19 nt, Artificial Sequence
  Description of Artificial Sequence: Synthetic oligonucleotide
cacgucaauguguaugccu

SEQ ID NO: 500695 - RNA, 19 nt, Artificial Sequence
  Description of Artificial Sequence: Synthetic oligonucleotide
aggcacgccgucgauguca

SEQ ID NO: 500696 - RNA, 19 nt, Artificial Sequence
  Description of Artificial Sequence: Synthetic oligonucleotide
gaacaagagcuuggagaca

SEQ ID NO: 500697 - RNA, 19 nt, Artificial Sequence
  Description of Artificial Sequence: Synthetic oligonucleotide
cuguauucguaggaucaca

SEQ ID NO: 500698 - RNA, 19 nt, Artificial Sequence
  Description of Artificial Sequence: Synthetic oligonucleotide
auaguacauguagcagccu

SEQ ID NO: 500699 - RNA, 19 nt, Artificial Sequence
  Description of Artificial Sequence: Synthetic oligonucleotide
gagcccggcuuccuaguuc

SEQ ID NO: 500700 - RNA, 19 nt, Artificial Sequence
  Description of Artificial Sequence: Synthetic oligonucleotide
acgccgucgaugucaugca

SEQ ID NO: 500701 - RNA, 19 nt, Artificial Sequence
  Description of Artificial Sequence: Synthetic oligonucleotide
uucccuuugagggcacuuu

SEQ ID NO: 500702 - RNA, 19 nt, Artificial Sequence
  Description of Artificial Sequence: Synthetic oligonucleotide
cauuucccuuugagggcac

SEQ ID NO: 500703 - RNA, 19 nt, Artificial Sequence
  Description of Artificial Sequence: Synthetic oligonucleotide
ggaggccacaugguuaaug

SEQ ID NO: 500704 - RNA, 19 nt, Artificial Sequence
  Description of Artificial Sequence: Synthetic oligonucleotide
gugcuuuucccgaccugcc

SEQ ID NO: 500705 - RNA, 19 nt, Artificial Sequence
  Description of Artificial Sequence: Synthetic oligonucleotide
ccgaccugccucuagucug

SEQ ID NO: 500706 - RNA, 19 nt, Artificial Sequence
  Description of Artificial Sequence: Synthetic oligonucleotide
ccugaugcuucgaggugcc

SEQ ID NO: 500707 - RNA, 19 nt, Artificial Sequence
  Description of Artificial Sequence: Synthetic oligonucleotide
ucccgaccugccucuaguc

SEQ ID NO: 500708 - RNA, 19 nt, Artificial Sequence
  Description of Artificial Sequence: Synthetic oligonucleotide
accucgugaugugcaacug

SEQ ID NO: 500709 - RNA, 19 nt, Artificial Sequence
  Description of Artificial Sequence: Synthetic oligonucleotide
gaucguacucccaccauuu

SEQ ID NO: 500710 - RNA, 19 nt, Artificial Sequence
  Description of Artificial Sequence: Synthetic oligonucleotide
gugaauggcgagaacuagu

SEQ ID NO: 500711 - RNA, 19 nt, Artificial Sequence
  Description of Artificial Sequence: Synthetic oligonucleotide
guccuagacugcucgggaa

SEQ ID NO: 500712 - RNA, 19 nt, Artificial Sequence
  Description of Artificial Sequence: Synthetic oligonucleotide
ucccacacuuacugugguu

SEQ ID NO: 500713 - RNA, 19 nt, Artificial Sequence
  Description of Artificial Sequence: Synthetic oligonucleotide
augaggugaggcacgccgu

SEQ ID NO: 500714 - RNA, 19 nt, Artificial Sequence
  Description of Artificial Sequence: Synthetic oligonucleotide
cccuauauacauauaaguu

SEQ ID NO: 500715 - RNA, 19 nt, Artificial Sequence
  Description of Artificial Sequence: Synthetic oligonucleotide
ggacuucacagagcuucgg

SEQ ID NO: 500716 - RNA, 19 nt, Artificial Sequence
  Description of Artificial Sequence: Synthetic oligonucleotide
cagccccuagacuaaaggu

SEQ ID NO: 500717 - RNA, 19 nt, Artificial Sequence
  Description of Artificial Sequence: Synthetic oligonucleotide
caaaccccgggcucaguaa

SEQ ID NO: 500718 - RNA, 19 nt, Artificial Sequence
  Description of Artificial Sequence: Synthetic oligonucleotide
gccccuagacuaaagguga

SEQ ID NO: 500719 - RNA, 19 nt, Artificial Sequence
  Description of Artificial Sequence: Synthetic oligonucleotide
caucccguccaggcugugc

SEQ ID NO: 500720 - RNA, 19 nt, Artificial Sequence
  Description of Artificial Sequence: Synthetic oligonucleotide
cagugcuuuucccgaccug

SEQ ID NO: 500721 - RNA, 19 nt, Artificial Sequence
  Description of Artificial Sequence: Synthetic oligonucleotide
ucaagacgaugaggagaac

SEQ ID NO: 500722 - RNA, 19 nt, Artificial Sequence
  Description of Artificial Sequence: Synthetic oligonucleotide
ccggguagaaaucugucaa

SEQ ID NO: 500723 - RNA, 19 nt, Artificial Sequence
  Description of Artificial Sequence: Synthetic oligonucleotide
agcgcauuccagagcauuu

SEQ ID NO: 500724 - RNA, 19 nt, Artificial Sequence
  Description of Artificial Sequence: Synthetic oligonucleotide
gugccaaguccuagacugc

SEQ ID NO: 500725 - RNA, 19 nt, Artificial Sequence
  Description of Artificial Sequence: Synthetic oligonucleotide
gcuuacugugaaaccuuug

SEQ ID NO: 500726 - RNA, 19 nt, Artificial Sequence
  Description of Artificial Sequence: Synthetic oligonucleotide
agcuuacugugaaaccuuu

SEQ ID NO: 500727 - RNA, 19 nt, Artificial Sequence
  Description of Artificial Sequence: Synthetic oligonucleotide
ccuagacugcucgggaagc

SEQ ID NO: 500728 - RNA, 19 nt, Artificial Sequence
  Description of Artificial Sequence: Synthetic oligonucleotide
auggcgagaacuaguccuu

SEQ ID NO: 500729 - RNA, 19 nt, Artificial Sequence
  Description of Artificial Sequence: Synthetic oligonucleotide
cucugcuaucacagguuaa

SEQ ID NO: 500730 - RNA, 19 nt, Artificial Sequence
  Description of Artificial Sequence: Synthetic oligonucleotide
uggcgagaacuaguccuuc

SEQ ID NO: 500731 - RNA, 19 nt, Artificial Sequence
  Description of Artificial Sequence: Synthetic oligonucleotide
ucuuagcaucggugaucuc

SEQ ID NO: 500732 - RNA, 19 nt, Artificial Sequence
  Description of Artificial Sequence: Synthetic oligonucleotide
gcucgggaagcacaaacgu

SEQ ID NO: 500733 - RNA, 19 nt, Artificial Sequence
  Description of Artificial Sequence: Synthetic oligonucleotide
uggaggcuuugcugcgguc

SEQ ID NO: 500734 - RNA, 19 nt, Artificial Sequence
  Description of Artificial Sequence: Synthetic oligonucleotide
ugagggcacuuuguccuuu

SEQ ID NO: 500735 - RNA, 19 nt, Artificial Sequence
  Description of Artificial Sequence: Synthetic oligonucleotide
gcacaaacguucaacuugu

SEQ ID NO: 500736 - RNA, 19 nt, Artificial Sequence
  Description of Artificial Sequence: Synthetic oligonucleotide
ggggagcgcauuccagagc

SEQ ID NO: 500737 - RNA, 19 nt, Artificial Sequence
  Description of Artificial Sequence: Synthetic oligonucleotide
ccagcuaaugguuuccccu

SEQ ID NO: 500738 - RNA, 19 nt, Artificial Sequence
  Description of Artificial Sequence: Synthetic oligonucleotide
ucccgcucucaaucagcuc

SEQ ID NO: 500739 - RNA, 19 nt, Artificial Sequence
  Description of Artificial Sequence: Synthetic oligonucleotide
cucgaguggcauccacaca

SEQ ID NO: 500740 - RNA, 19 nt, Artificial Sequence
  Description of Artificial Sequence: Synthetic oligonucleotide
uccuucgcaccggguagaa

SEQ ID NO: 500741 - RNA, 19 nt, Artificial Sequence
  Description of Artificial Sequence: Synthetic oligonucleotide
ccucuagucugacugccca

SEQ ID NO: 500742 - RNA, 19 nt, Artificial Sequence
  Description of Artificial Sequence: Synthetic oligonucleotide
ugguuuccccuggcauuug

SEQ ID NO: 500743 - RNA, 19 nt, Artificial Sequence
  Description of Artificial Sequence: Synthetic oligonucleotide
cuccaaaccccgggcucag

SEQ ID NO: 500744 - RNA, 19 nt, Artificial Sequence
  Description of Artificial Sequence: Synthetic oligonucleotide
ccuuuuccaucaaugagau

SEQ ID NO: 500745 - RNA, 19 nt, Artificial Sequence
  Description of Artificial Sequence: Synthetic oligonucleotide
uagcaucggugaucucaau

SEQ ID NO: 500746 - RNA, 19 nt, Artificial Sequence
  Description of Artificial Sequence: Synthetic oligonucleotide
gcgcauuccagagcauuug

SEQ ID NO: 500747 - RNA, 19 nt, Artificial Sequence
  Description of Artificial Sequence: Synthetic oligonucleotide
cgcuucuuagcaucgguga

SEQ ID NO: 500748 - RNA, 19 nt, Artificial Sequence
  Description of Artificial Sequence: Synthetic oligonucleotide
cucgggaagcacaaacguu

SEQ ID NO: 500749 - RNA, 19 nt, Artificial Sequence
  Description of Artificial Sequence: Synthetic oligonucleotide
ccgagagaacugcuuggug

SEQ ID NO: 500750 - RNA, 19 nt, Artificial Sequence
  Description of Artificial Sequence: Synthetic oligonucleotide
caguagguuuugcucagau

SEQ ID NO: 500751 - RNA, 19 nt, Artificial Sequence
  Description of Artificial Sequence: Synthetic oligonucleotide
agcagucauuucacucccu

SEQ ID NO: 500752 - RNA, 19 nt, Artificial Sequence
  Description of Artificial Sequence: Synthetic oligonucleotide
cacaugacugggguggagu

SEQ ID NO: 500753 - RNA, 19 nt, Artificial Sequence
  Description of Artificial Sequence: Synthetic oligonucleotide
cuuucuuagguagcaccau

SEQ ID NO: 500754 - RNA, 19 nt, Artificial Sequence
  Description of Artificial Sequence: Synthetic oligonucleotide
uuuucccgaccugccucua

SEQ ID NO: 500755 - RNA, 19 nt, Artificial Sequence
  Description of Artificial Sequence: Synthetic oligonucleotide
gaggggucuugugcauaca

SEQ ID NO: 500756 - RNA, 19 nt, Artificial Sequence
  Description of Artificial Sequence: Synthetic oligonucleotide
gagcgcauuccagagcauu

SEQ ID NO: 500757 - RNA, 19 nt, Artificial Sequence
  Description of Artificial Sequence: Synthetic oligonucleotide
ccucgugaugugcaacuga

SEQ ID NO: 500758 - RNA, 19 nt, Artificial Sequence
  Description of Artificial Sequence: Synthetic oligonucleotide
gcuucuuagcaucggugau

SEQ ID NO: 500759 - RNA, 19 nt, Artificial Sequence
  Description of Artificial Sequence: Synthetic oligonucleotide
gaggcacgccgucgauguc

SEQ ID NO: 500760 - RNA, 19 nt, Artificial Sequence
  Description of Artificial Sequence: Synthetic oligonucleotide
ccacacuuacugugguuga

SEQ ID NO: 500761 - RNA, 19 nt, Artificial Sequence
  Description of Artificial Sequence: Synthetic oligonucleotide
gugccaggggaccucuccu

SEQ ID NO: 500762 - RNA, 19 nt, Artificial Sequence
  Description of Artificial Sequence: Synthetic oligonucleotide
cacaaacguucaacuugua

SEQ ID NO: 500763 - RNA, 19 nt, Artificial Sequence
  Description of Artificial Sequence: Synthetic oligonucleotide
cgagaacuaguccuuccca

SEQ ID NO: 500764 - RNA, 19 nt, Artificial Sequence
  Description of Artificial Sequence: Synthetic oligonucleotide
gggaagcacaaacguucaa

SEQ ID NO: 500765 - RNA, 19 nt, Artificial Sequence
  Description of Artificial Sequence: Synthetic oligonucleotide
gccucuagucugacugccc

SEQ ID NO: 500766 - RNA, 19 nt, Artificial Sequence
  Description of Artificial Sequence: Synthetic oligonucleotide
ggaugaggugaggcacgcc

SEQ ID NO: 500767 - RNA, 19 nt, Artificial Sequence
  Description of Artificial Sequence: Synthetic oligonucleotide
ccgggcucaguaagcuuug

SEQ ID NO: 500768 - RNA, 19 nt, Artificial Sequence
  Description of Artificial Sequence: Synthetic oligonucleotide
gaccugccucuagucugac

SEQ ID NO: 500769 - RNA, 19 nt, Artificial Sequence
  Description of Artificial Sequence: Synthetic oligonucleotide
ggggaccucuccuggcguc

SEQ ID NO: 500770 - RNA, 19 nt, Artificial Sequence
  Description of Artificial Sequence: Synthetic oligonucleotide
ggccuugccuggcaauaaa

SEQ ID NO: 500771 - RNA, 19 nt, Artificial Sequence
  Description of Artificial Sequence: Synthetic oligonucleotide
ccucugcuaucacagguua

SEQ ID NO: 500772 - RNA, 19 nt, Artificial Sequence
  Description of Artificial Sequence: Synthetic oligonucleotide
cgccguagucauacaggag

SEQ ID NO: 500773 - RNA, 19 nt, Artificial Sequence
  Description of Artificial Sequence: Synthetic oligonucleotide
cgcaccggguagaaaucug

SEQ ID NO: 500774 - RNA, 19 nt, Artificial Sequence
  Description of Artificial Sequence: Synthetic oligonucleotide
ccuccuuucggauccuccu

SEQ ID NO: 500775 - RNA, 19 nt, Artificial Sequence
  Description of Artificial Sequence: Synthetic oligonucleotide
cccggcuuccuaguucaug

SEQ ID NO: 500776 - RNA, 19 nt, Artificial Sequence
  Description of Artificial Sequence: Synthetic oligonucleotide
ccacaaagucuccccgaga

SEQ ID NO: 500777 - RNA, 19 nt, Artificial Sequence
  Description of Artificial Sequence: Synthetic oligonucleotide
ccaaaccccgggcucagua

SEQ ID NO: 500778 - RNA, 19 nt, Artificial Sequence
  Description of Artificial Sequence: Synthetic oligonucleotide
gccgggccuccaaaccccg

SEQ ID NO: 500779 - RNA, 19 nt, Artificial Sequence
  Description of Artificial Sequence: Synthetic oligonucleotide
gcaccggguagaaaucugu

SEQ ID NO: 500780 - RNA, 19 nt, Artificial Sequence
  Description of Artificial Sequence: Synthetic oligonucleotide
ggcaaccacuguauucgua

SEQ ID NO: 500781 - RNA, 19 nt, Artificial Sequence
  Description of Artificial Sequence: Synthetic oligonucleotide
cguacucccaccauuucuu

SEQ ID NO: 500782 - RNA, 19 nt, Artificial Sequence
  Description of Artificial Sequence: Synthetic oligonucleotide
gcuucggaucguacuccca

SEQ ID NO: 500783 - RNA, 19 nt, Artificial Sequence
  Description of Artificial Sequence: Synthetic oligonucleotide
cuccccaggcgguuaguuu

SEQ ID NO: 500784 - RNA, 19 nt, Artificial Sequence
  Description of Artificial Sequence: Synthetic oligonucleotide
gccgucgaugucaugcagu

SEQ ID NO: 500785 - RNA, 19 nt, Artificial Sequence
  Description of Artificial Sequence: Synthetic oligonucleotide
cucgggaggcgaugaggau

SEQ ID NO: 500786 - RNA, 19 nt, Artificial Sequence
  Description of Artificial Sequence: Synthetic oligonucleotide
gccaaggguaggcuucgau

SEQ ID NO: 500787 - RNA, 19 nt, Artificial Sequence
  Description of Artificial Sequence: Synthetic oligonucleotide
gcuaagccacaaacaggua

SEQ ID NO: 500788 - RNA, 19 nt, Artificial Sequence
  Description of Artificial Sequence: Synthetic oligonucleotide
cgccgucgaugucaugcag

SEQ ID NO: 500789 - RNA, 19 nt, Artificial Sequence
  Description of Artificial Sequence: Synthetic oligonucleotide
ccccuagacuaaaggugaa

SEQ ID NO: 500790 - RNA, 19 nt, Artificial Sequence
  Description of Artificial Sequence: Synthetic oligonucleotide
ccgucgaugucaugcaguu

SEQ ID NO: 500791 - RNA, 19 nt, Artificial Sequence
  Description of Artificial Sequence: Synthetic oligonucleotide
cagguacaaccaagacauu

SEQ ID NO: 500792 - RNA, 19 nt, Artificial Sequence
  Description of Artificial Sequence: Synthetic oligonucleotide
aggcuucgauggaggcuuu

SEQ ID NO: 500793 - RNA, 19 nt, Artificial Sequence
  Description of Artificial Sequence: Synthetic oligonucleotide
cccgagagaacugcuuggu

SEQ ID NO: 500794 - RNA, 19 nt, Artificial Sequence
  Description of Artificial Sequence: Synthetic oligonucleotide
gggaccucuccuggcgucu

SEQ ID NO: 500795 - RNA, 19 nt, Artificial Sequence
  Description of Artificial Sequence: Synthetic oligonucleotide
cacccgccuguccuuggau

SEQ ID NO: 500796 - RNA, 19 nt, Artificial Sequence
  Description of Artificial Sequence: Synthetic oligonucleotide
cugaugcuucgaggugccu

SEQ ID NO: 500797 - RNA, 19 nt, Artificial Sequence
  Description of Artificial Sequence: Synthetic oligonucleotide
gcacgccgucgaugucaug

SEQ ID NO: 500798 - RNA, 19 nt, Artificial Sequence
  Description of Artificial Sequence: Synthetic oligonucleotide
ggcacgccgucgaugucau

SEQ ID NO: 500799 - RNA, 19 nt, Artificial Sequence
  Description of Artificial Sequence: Synthetic oligonucleotide
ccuucgcaccggguagaaa

SEQ ID NO: 500800 - RNA, 19 nt, Artificial Sequence
  Description of Artificial Sequence: Synthetic oligonucleotide
ggagcgcauuccagagcau

SEQ ID NO: 500801 - RNA, 19 nt, Artificial Sequence
  Description of Artificial Sequence: Synthetic oligonucleotide
gggguguggggaagacuuu

SEQ ID NO: 500802 - RNA, 19 nt, Artificial Sequence
  Description of Artificial Sequence: Synthetic oligonucleotide
cggaucguacucccaccau

SEQ ID NO: 500803 - RNA, 19 nt, Artificial Sequence
  Description of Artificial Sequence: Synthetic oligonucleotide
ccuccccaggcgguuaguu

SEQ ID NO: 500804 - RNA, 19 nt, Artificial Sequence
  Description of Artificial Sequence: Synthetic oligonucleotide
ccccgggcucaguaagcuu

SEQ ID NO: 500805 - RNA, 19 nt, Artificial Sequence
  Description of Artificial Sequence: Synthetic oligonucleotide
gcccggcuuccuaguucau

SEQ ID NO: 500806 - RNA, 19 nt, Artificial Sequence
  Description of Artificial Sequence: Synthetic oligonucleotide
aauacugacaccuauaggu

SEQ ID NO: 500807 - RNA, 19 nt, Artificial Sequence
  Description of Artificial Sequence: Synthetic oligonucleotide
uguaccaggacauucacgg

SEQ ID NO: 500808 - RNA, 19 nt, Artificial Sequence
  Description of Artificial Sequence: Synthetic oligonucleotide
uuuuaauugauguagcucu

SEQ ID NO: 500809 - RNA, 19 nt, Artificial Sequence
  Description of Artificial Sequence: Synthetic oligonucleotide
uggcauuaggaccaaaucg

SEQ ID NO: 500810 - RNA, 19 nt, Artificial Sequence
  Description of Artificial Sequence: Synthetic oligonucleotide
uaugaugagugacaaacag

SEQ ID NO: 500811 - RNA, 19 nt, Artificial Sequence
  Description of Artificial Sequence: Synthetic oligonucleotide
cucuagaagauuuagaguc

SEQ ID NO: 500812 - RNA, 19 nt, Artificial Sequence
  Description of Artificial Sequence: Synthetic oligonucleotide
uguucugggcuucagaucc

SEQ ID NO: 500813 - RNA, 19 nt, Artificial Sequence
  Description of Artificial Sequence: Synthetic oligonucleotide
ucuaugaugagugacaaac

SEQ ID NO: 500814 - RNA, 19 nt, Artificial Sequence
  Description of Artificial Sequence: Synthetic oligonucleotide
auuagcaguagacuauccc

SEQ ID NO: 500815 - RNA, 19 nt, Artificial Sequence
  Description of Artificial Sequence: Synthetic oligonucleotide
aacuuagugaagucccacc

SEQ ID NO: 500816 - RNA, 19 nt, Artificial Sequence
  Description of Artificial Sequence: Synthetic oligonucleotide
aucauuuuaauugauguag

SEQ ID NO: 500817 - RNA, 19 nt, Artificial Sequence
  Description of Artificial Sequence: Synthetic oligonucleotide
aaucgcuugguguagagca

SEQ ID NO: 500818 - RNA, 19 nt, Artificial Sequence
  Description of Artificial Sequence: Synthetic oligonucleotide
uauaggugcugcauggagg

SEQ ID NO: 500819 - RNA, 19 nt, Artificial Sequence
  Description of Artificial Sequence: Synthetic oligonucleotide
ugugaguauaggaaguccc

SEQ ID NO: 500820 - RNA, 19 nt, Artificial Sequence
  Description of Artificial Sequence: Synthetic oligonucleotide
agaagauuuagagucagag

SEQ ID NO: 500821 - RNA, 19 nt, Artificial Sequence
  Description of Artificial Sequence: Synthetic oligonucleotide
uguggucuagaucuggaag

SEQ ID NO: 500822 - RNA, 19 nt, Artificial Sequence
  Description of Artificial Sequence: Synthetic oligonucleotide
uugaaaacuacuccucaug

SEQ ID NO: 500823 - RNA, 19 nt, Artificial Sequence
  Description of Artificial Sequence: Synthetic oligonucleotide
auugauguagcucuuuggu

SEQ ID NO: 500824 - RNA, 19 nt, Artificial Sequence
  Description of Artificial Sequence: Synthetic oligonucleotide
uguuauuggucacauugca

SEQ ID NO: 500825 - RNA, 19 nt, Artificial Sequence
  Description of Artificial Sequence: Synthetic oligonucleotide
gauuguggcagagauaccc

SEQ ID NO: 500826 - RNA, 19 nt, Artificial Sequence
  Description of Artificial Sequence: Synthetic oligonucleotide
uuuggugucucccucauua

SEQ ID NO: 500827 - RNA, 19 nt, Artificial Sequence
  Description of Artificial Sequence: Synthetic oligonucleotide
gacucuaccgguuccgugg

SEQ ID NO: 500828 - RNA, 19 nt, Artificial Sequence
  Description of Artificial Sequence: Synthetic oligonucleotide
uacauaucggcccauugga

SEQ ID NO: 500829 - RNA, 19 nt, Artificial Sequence
  Description of Artificial Sequence: Synthetic oligonucleotide
uaauugauguagcucuuug

SEQ ID NO: 500830 - RNA, 19 nt, Artificial Sequence
  Description of Artificial Sequence: Synthetic oligonucleotide
agacuauccccucuccucc

SEQ ID NO: 500831 - RNA, 19 nt, Artificial Sequence
  Description of Artificial Sequence: Synthetic oligonucleotide
gaauacacugccaggaugc

SEQ ID NO: 500832 - RNA, 19 nt, Artificial Sequence
  Description of Artificial Sequence: Synthetic oligonucleotide
augaucagagccuugauuu

SEQ ID NO: 500833 - RNA, 19 nt, Artificial Sequence
  Description of Artificial Sequence: Synthetic oligonucleotide
auaucggcccauuggagac

SEQ ID NO: 500834 - RNA, 19 nt, Artificial Sequence
  Description of Artificial Sequence: Synthetic oligonucleotide
aaacuuagugaagucccac

SEQ ID NO: 500835 - RNA, 19 nt, Artificial Sequence
  Description of Artificial Sequence: Synthetic oligonucleotide
uuagugaagucccaccacu

SEQ ID NO: 500836 - RNA, 19 nt, Artificial Sequence
  Description of Artificial Sequence: Synthetic oligonucleotide
agacuguccaucuccaauc

SEQ ID NO: 500837 - RNA, 19 nt, Artificial Sequence
  Description of Artificial Sequence: Synthetic oligonucleotide
aacuacuccucauggaggu

SEQ ID NO: 500838 - RNA, 19 nt, Artificial Sequence
  Description of Artificial Sequence: Synthetic oligonucleotide
caugguucggcccucauug

SEQ ID NO: 500839 - RNA, 19 nt, Artificial Sequence
  Description of Artificial Sequence: Synthetic oligonucleotide
ugacccuaggagaaagggg

SEQ ID NO: 500840 - RNA, 19 nt, Artificial Sequence
  Description of Artificial Sequence: Synthetic oligonucleotide
auggcauuaggaccaaauc

SEQ ID NO: 500841 - RNA, 19 nt, Artificial Sequence
  Description of Artificial Sequence: Synthetic oligonucleotide
aaaucgcuugguguagagc

SEQ ID NO: 500842 - RNA, 19 nt, Artificial Sequence
  Description of Artificial Sequence: Synthetic oligonucleotide
aguagacuauccccucucc

SEQ ID NO: 500843 - RNA, 19 nt, Artificial Sequence
  Description of Artificial Sequence: Synthetic oligonucleotide
uuggccuaggcuuagguaa

SEQ ID NO: 500844 - RNA, 19 nt, Artificial Sequence
  Description of Artificial Sequence: Synthetic oligonucleotide
gacccuauuaacagaagag

SEQ ID NO: 500845 - RNA, 19 nt, Artificial Sequence
  Description of Artificial Sequence: Synthetic oligonucleotide
uuaggaccaaaucgcuugg

SEQ ID NO: 500846 - RNA, 19 nt, Artificial Sequence
  Description of Artificial Sequence: Synthetic oligonucleotide
uaggcuuagguaauacuga

SEQ ID NO: 500847 - RNA, 19 nt, Artificial Sequence
  Description of Artificial Sequence: Synthetic oligonucleotide
auuucuggaaggucaaacu

SEQ ID NO: 500848 - RNA, 19 nt, Artificial Sequence
  Description of Artificial Sequence: Synthetic oligonucleotide
caccauuacauaucggccc

SEQ ID NO: 500849 - RNA, 19 nt, Artificial Sequence
  Description of Artificial Sequence: Synthetic oligonucleotide
uacaguucaggauuccaca

SEQ ID NO: 500850 - RNA, 19 nt, Artificial Sequence
  Description of Artificial Sequence: Synthetic oligonucleotide
uguuacuggccacagcaga

SEQ ID NO: 500851 - RNA, 19 nt, Artificial Sequence
  Description of Artificial Sequence: Synthetic oligonucleotide
aggcuuagguaauacugac

SEQ ID NO: 500852 - RNA, 19 nt, Artificial Sequence
  Description of Artificial Sequence: Synthetic oligonucleotide
gcuuagguaauacugacac

SEQ ID NO: 500853 - RNA, 19 nt, Artificial Sequence
  Description of Artificial Sequence: Synthetic oligonucleotide
gauagggguaggcugcucc

SEQ ID NO: 500854 - RNA, 19 nt, Artificial Sequence
  Description of Artificial Sequence: Synthetic oligonucleotide
acuuagugaagucccacca

SEQ ID NO: 500855 - RNA, 19 nt, Artificial Sequence
  Description of Artificial Sequence: Synthetic oligonucleotide
ucugugugcccugagaugu

SEQ ID NO: 500856 - RNA, 19 nt, Artificial Sequence
  Description of Artificial Sequence: Synthetic oligonucleotide
auuacauaucggcccauug

SEQ ID NO: 500857 - RNA, 19 nt, Artificial Sequence
  Description of Artificial Sequence: Synthetic oligonucleotide
uucaggauuccacaugcaa

SEQ ID NO: 500858 - RNA, 19 nt, Artificial Sequence
  Description of Artificial Sequence: Synthetic oligonucleotide
cauugcagugcaugguucg

SEQ ID NO: 500859 - RNA, 19 nt, Artificial Sequence
  Description of Artificial Sequence: Synthetic oligonucleotide
cuguuauuggucacauugc

SEQ ID NO: 500860 - RNA, 19 nt, Artificial Sequence
  Description of Artificial Sequence: Synthetic oligonucleotide
aggucucaccaccaugggc

SEQ ID NO: 500861 - RNA, 19 nt, Artificial Sequence
  Description of Artificial Sequence: Synthetic oligonucleotide
ucggccauuagccucugga

SEQ ID NO: 500862 - RNA, 19 nt, Artificial Sequence
  Description of Artificial Sequence: Synthetic oligonucleotide
agcaagaccccacauucug

SEQ ID NO: 500863 - RNA, 19 nt, Artificial Sequence
  Description of Artificial Sequence: Synthetic oligonucleotide
acacguacaguucaggauu

SEQ ID NO: 500864 - RNA, 19 nt, Artificial Sequence
  Description of Artificial Sequence: Synthetic oligonucleotide
agagcaguccccgagaggu

SEQ ID NO: 500865 - RNA, 19 nt, Artificial Sequence
  Description of Artificial Sequence: Synthetic oligonucleotide
ugggcuucagauccuggag

SEQ ID NO: 500866 - RNA, 19 nt, Artificial Sequence
  Description of Artificial Sequence: Synthetic oligonucleotide
agucuugccccuuggacug

SEQ ID NO: 500867 - RNA, 19 nt, Artificial Sequence
  Description of Artificial Sequence: Synthetic oligonucleotide
ugggcugagaggauagaca

SEQ ID NO: 500868 - RNA, 19 nt, Artificial Sequence
  Description of Artificial Sequence: Synthetic oligonucleotide
uguacaguucccagccagc

SEQ ID NO: 500869 - RNA, 19 nt, Artificial Sequence
  Description of Artificial Sequence: Synthetic oligonucleotide
gacguugaaaacuacuccu

SEQ ID NO: 500870 - RNA, 19 nt, Artificial Sequence
  Description of Artificial Sequence: Synthetic oligonucleotide
uucucgcuguaccacagcu

SEQ ID NO: 500871 - RNA, 19 nt, Artificial Sequence
  Description of Artificial Sequence: Synthetic oligonucleotide
cuauaggugcugcauggag

SEQ ID NO: 500872 - RNA, 19 nt, Artificial Sequence
  Description of Artificial Sequence: Synthetic oligonucleotide
uuagagucagaggcaauug

SEQ ID NO: 500873 - RNA, 19 nt, Artificial Sequence
  Description of Artificial Sequence: Synthetic oligonucleotide
uguaacuggaggccagagu

SEQ ID NO: 500874 - RNA, 19 nt, Artificial Sequence
  Description of Artificial Sequence: Synthetic oligonucleotide
gggauuguggcagagauac

SEQ ID NO: 500875 - RNA, 19 nt, Artificial Sequence
  Description of Artificial Sequence: Synthetic oligonucleotide
agcauauucugagcccucc

SEQ ID NO: 500876 - RNA, 19 nt, Artificial Sequence
  Description of Artificial Sequence: Synthetic oligonucleotide
accaugggccuguugcagc

SEQ ID NO: 500877 - RNA, 19 nt, Artificial Sequence
  Description of Artificial Sequence: Synthetic oligonucleotide
accgugcauugacucaucc

SEQ ID NO: 500878 - RNA, 19 nt, Artificial Sequence
  Description of Artificial Sequence: Synthetic oligonucleotide
uacacguacaguucaggau

SEQ ID NO: 500879 - RNA, 19 nt, Artificial Sequence
  Description of Artificial Sequence: Synthetic oligonucleotide
ggcauuaggaccaaaucgc

SEQ ID NO: 500880 - RNA, 19 nt, Artificial Sequence
  Description of Artificial Sequence: Synthetic oligonucleotide
ugaguagccaagccaggcu

SEQ ID NO: 500881 - RNA, 19 nt, Artificial Sequence
  Description of Artificial Sequence: Synthetic oligonucleotide
cccaccauuacauaucggc

SEQ ID NO: 500882 - RNA, 19 nt, Artificial Sequence
  Description of Artificial Sequence: Synthetic oligonucleotide
uugugggcugagaggauag

SEQ ID NO: 500883 - RNA, 19 nt, Artificial Sequence
  Description of Artificial Sequence: Synthetic oligonucleotide
gcuaccaugugcucugugg

SEQ ID NO: 500884 - RNA, 19 nt, Artificial Sequence
  Description of Artificial Sequence: Synthetic oligonucleotide
uuuaauugauguagcucuu

SEQ ID NO: 500885 - RNA, 19 nt, Artificial Sequence
  Description of Artificial Sequence: Synthetic oligonucleotide
aaaugaucagagccuugau

SEQ ID NO: 500886 - RNA, 19 nt, Artificial Sequence
  Description of Artificial Sequence: Synthetic oligonucleotide
acucuaccgguuccguggc

SEQ ID NO: 500887 - RNA, 19 nt, Artificial Sequence
  Description of Artificial Sequence: Synthetic oligonucleotide
accauuacauaucggccca

SEQ ID NO: 500888 - RNA, 19 nt, Artificial Sequence
  Description of Artificial Sequence: Synthetic oligonucleotide
aggacauucacggaggcau

SEQ ID NO: 500889 - RNA, 19 nt, Artificial Sequence
  Description of Artificial Sequence: Synthetic oligonucleotide
uguagaucuugcaguucug

SEQ ID NO: 500890 - RNA, 19 nt, Artificial Sequence
  Description of Artificial Sequence: Synthetic oligonucleotide
guuucuaugaugagugaca

SEQ ID NO: 500891 - RNA, 19 nt, Artificial Sequence
  Description of Artificial Sequence: Synthetic oligonucleotide
ugcaacaccucagaucaca

SEQ ID NO: 500892 - RNA, 19 nt, Artificial Sequence
  Description of Artificial Sequence: Synthetic oligonucleotide
agcaguagacuauccccuc

SEQ ID NO: 500893 - RNA, 19 nt, Artificial Sequence
  Description of Artificial Sequence: Synthetic oligonucleotide
acuguucuguccaggacgg

SEQ ID NO: 500894 - RNA, 19 nt, Artificial Sequence
  Description of Artificial Sequence: Synthetic oligonucleotide
cuuagugaagucccaccac

SEQ ID NO: 500895 - RNA, 19 nt, Artificial Sequence
  Description of Artificial Sequence: Synthetic oligonucleotide
aggaccaaaucgcuuggug

SEQ ID NO: 500896 - RNA, 19 nt, Artificial Sequence
  Description of Artificial Sequence: Synthetic oligonucleotide
ggucucaccaccaugggcc

SEQ ID NO: 500897 - RNA, 19 nt, Artificial Sequence
  Description of Artificial Sequence: Synthetic oligonucleotide
cauuagcaguagacuaucc

SEQ ID NO: 500898 - RNA, 19 nt, Artificial Sequence
  Description of Artificial Sequence: Synthetic oligonucleotide
cacagaugugguagguucc

SEQ ID NO: 500899 - RNA, 19 nt, Artificial Sequence
  Description of Artificial Sequence: Synthetic oligonucleotide
ggcagagauacccacuugc

SEQ ID NO: 500900 - RNA, 19 nt, Artificial Sequence
  Description of Artificial Sequence: Synthetic oligonucleotide
acuacacguacaguucagg

SEQ ID NO: 500901 - RNA, 19 nt, Artificial Sequence
  Description of Artificial Sequence: Synthetic oligonucleotide
ugaaugcgguggcugacga

SEQ ID NO: 500902 - RNA, 19 nt, Artificial Sequence
  Description of Artificial Sequence: Synthetic oligonucleotide
ggaggucucaccaccaugg

SEQ ID NO: 500903 - RNA, 19 nt, Artificial Sequence
  Description of Artificial Sequence: Synthetic oligonucleotide
agguuccgagagcaguccc

SEQ ID NO: 500904 - RNA, 19 nt, Artificial Sequence
  Description of Artificial Sequence: Synthetic oligonucleotide
ggacguugaaaacuacucc

SEQ ID NO: 500905 - RNA, 19 nt, Artificial Sequence
  Description of Artificial Sequence: Synthetic oligonucleotide
acauucacggaggcauugc

SEQ ID NO: 500906 - RNA, 19 nt, Artificial Sequence
  Description of Artificial Sequence: Synthetic oligonucleotide
uccguggcuccccacuagg

SEQ ID NO: 500907 - RNA, 19 nt, Artificial Sequence
  Description of Artificial Sequence: Synthetic oligonucleotide
ugggcuaccaugugcucug

SEQ ID NO: 500908 - RNA, 19 nt, Artificial Sequence
  Description of Artificial Sequence: Synthetic oligonucleotide
gaaaucacauuuucauacu

SEQ ID NO: 500909 - RNA, 19 nt, Artificial Sequence
  Description of Artificial Sequence: Synthetic oligonucleotide
gagugacaaacagaaagga

SEQ ID NO: 500910 - RNA, 19 nt, Artificial Sequence
  Description of Artificial Sequence: Synthetic oligonucleotide
acagaugugguagguuccg

SEQ ID NO: 500911 - RNA, 19 nt, Artificial Sequence
  Description of Artificial Sequence: Synthetic oligonucleotide
cagggaauacacugccagg

SEQ ID NO: 500912 - RNA, 19 nt, Artificial Sequence
  Description of Artificial Sequence: Synthetic oligonucleotide
ucauuagcaguagacuauc

SEQ ID NO: 500913 - RNA, 19 nt, Artificial Sequence
  Description of Artificial Sequence: Synthetic oligonucleotide
cccuauuaacagaagagug

SEQ ID NO: 500914 - RNA, 19 nt, Artificial Sequence
  Description of Artificial Sequence: Synthetic oligonucleotide
ugaccuggaaucucucccu

SEQ ID NO: 500915 - RNA, 19 nt, Artificial Sequence
  Description of Artificial Sequence: Synthetic oligonucleotide
cuguccuacuguucugucc

SEQ ID NO: 500916 - RNA, 19 nt, Artificial Sequence
  Description of Artificial Sequence: Synthetic oligonucleotide
cauaucggcccauuggaga

SEQ ID NO: 500917 - RNA, 19 nt, Artificial Sequence
  Description of Artificial Sequence: Synthetic oligonucleotide
uagguuccgagguugcagu

SEQ ID NO: 500918 - RNA, 19 nt, Artificial Sequence
  Description of Artificial Sequence: Synthetic oligonucleotide
uucccucucagucuguguu

SEQ ID NO: 500919 - RNA, 19 nt, Artificial Sequence
  Description of Artificial Sequence: Synthetic oligonucleotide
agucccaccacuggagccg

SEQ ID NO: 500920 - RNA, 19 nt, Artificial Sequence
  Description of Artificial Sequence: Synthetic oligonucleotide
auacugacaccuauaggug

SEQ ID NO: 500921 - RNA, 19 nt, Artificial Sequence
  Description of Artificial Sequence: Synthetic oligonucleotide
aacuacacguacaguucag

SEQ ID NO: 500922 - RNA, 19 nt, Artificial Sequence
  Description of Artificial Sequence: Synthetic oligonucleotide
acaguucaggauuccacau

SEQ ID NO: 500923 - RNA, 19 nt, Artificial Sequence
  Description of Artificial Sequence: Synthetic oligonucleotide
aagccccuuuggcugcucg

SEQ ID NO: 500924 - RNA, 19 nt, Artificial Sequence
  Description of Artificial Sequence: Synthetic oligonucleotide
ggaauacacugccaggaug

SEQ ID NO: 500925 - RNA, 19 nt, Artificial Sequence
  Description of Artificial Sequence: Synthetic oligonucleotide
uuggacucuaccgguuccg

SEQ ID NO: 500926 - RNA, 19 nt, Artificial Sequence
  Description of Artificial Sequence: Synthetic oligonucleotide
uaaggacguugaaaacuac

SEQ ID NO: 500927 - RNA, 19 nt, Artificial Sequence
  Description of Artificial Sequence: Synthetic oligonucleotide
uggcgaaggggacuggagu

SEQ ID NO: 500928 - RNA, 19 nt, Artificial Sequence
  Description of Artificial Sequence: Synthetic oligonucleotide
uacgagcagccccugacuc

SEQ ID NO: 500929 - RNA, 19 nt, Artificial Sequence
  Description of Artificial Sequence: Synthetic oligonucleotide
guucggcccucauugcugg

SEQ ID NO: 500930 - RNA, 19 nt, Artificial Sequence
  Description of Artificial Sequence: Synthetic oligonucleotide
guacguaguauuggcaaug

SEQ ID NO: 500931 - RNA, 19 nt, Artificial Sequence
  Description of Artificial Sequence: Synthetic oligonucleotide
guggcuccccacuagggcc

SEQ ID NO: 500932 - RNA, 19 nt, Artificial Sequence
  Description of Artificial Sequence: Synthetic oligonucleotide
uuuugaggggcauggucau

SEQ ID NO: 500933 - RNA, 19 nt, Artificial Sequence
  Description of Artificial Sequence: Synthetic oligonucleotide
uccucauggaggucucacc

SEQ ID NO: 500934 - RNA, 19 nt, Artificial Sequence
  Description of Artificial Sequence: Synthetic oligonucleotide
uuuggccuaggcuuaggua

SEQ ID NO: 500935 - RNA, 19 nt, Artificial Sequence
  Description of Artificial Sequence: Synthetic oligonucleotide
cuaugaugagugacaaaca

SEQ ID NO: 500936 - RNA, 19 nt, Artificial Sequence
  Description of Artificial Sequence: Synthetic oligonucleotide
gaacucuagaagauuuaga

SEQ ID NO: 500937 - RNA, 19 nt, Artificial Sequence
  Description of Artificial Sequence: Synthetic oligonucleotide
cuugugaguauaggaaguc

SEQ ID NO: 500938 - RNA, 19 nt, Artificial Sequence
  Description of Artificial Sequence: Synthetic oligonucleotide
cuacacguacaguucagga

SEQ ID NO: 500939 - RNA, 19 nt, Artificial Sequence
  Description of Artificial Sequence: Synthetic oligonucleotide
auugcagugcaugguucgg

SEQ ID NO: 500940 - RNA, 19 nt, Artificial Sequence
  Description of Artificial Sequence: Synthetic oligonucleotide
guagguuccgagguugcag

SEQ ID NO: 500941 - RNA, 19 nt, Artificial Sequence
  Description of Artificial Sequence: Synthetic oligonucleotide
acaaaaugaucagagccuu

SEQ ID NO: 500942 - RNA, 19 nt, Artificial Sequence
  Description of Artificial Sequence: Synthetic oligonucleotide
uggaacucuagaagauuua

SEQ ID NO: 500943 - RNA, 19 nt, Artificial Sequence
  Description of Artificial Sequence: Synthetic oligonucleotide
caccucagaucacagagca

SEQ ID NO: 500944 - RNA, 19 nt, Artificial Sequence
  Description of Artificial Sequence: Synthetic oligonucleotide
aggcaauuggggauagggg

SEQ ID NO: 500945 - RNA, 19 nt, Artificial Sequence
  Description of Artificial Sequence: Synthetic oligonucleotide
uguguacaguucccagcca

SEQ ID NO: 500946 - RNA, 19 nt, Artificial Sequence
  Description of Artificial Sequence: Synthetic oligonucleotide
guacaguucaggauuccac

SEQ ID NO: 500947 - RNA, 19 nt, Artificial Sequence
  Description of Artificial Sequence: Synthetic oligonucleotide
uccuacuguucuguccagg

SEQ ID NO: 500948 - RNA, 19 nt, Artificial Sequence
  Description of Artificial Sequence: Synthetic oligonucleotide
guuccgagagcaguccccg

SEQ ID NO: 500949 - RNA, 19 nt, Artificial Sequence
  Description of Artificial Sequence: Synthetic oligonucleotide
ugguucggcccucauugcu

SEQ ID NO: 500950 - RNA, 19 nt, Artificial Sequence
  Description of Artificial Sequence: Synthetic oligonucleotide
agugacaaacagaaaggaa

SEQ ID NO: 500951 - RNA, 19 nt, Artificial Sequence
  Description of Artificial Sequence: Synthetic oligonucleotide
uacguaguauuggcaaugu

SEQ ID NO: 500952 - RNA, 19 nt, Artificial Sequence
  Description of Artificial Sequence: Synthetic oligonucleotide
ccaccauuacauaucggcc

SEQ ID NO: 500953 - RNA, 19 nt, Artificial Sequence
  Description of Artificial Sequence: Synthetic oligonucleotide
ucacauugcagugcauggu

SEQ ID NO: 500954 - RNA, 19 nt, Artificial Sequence
  Description of Artificial Sequence: Synthetic oligonucleotide
gggaagaacuguccuacug

SEQ ID NO: 500955 - RNA, 19 nt, Artificial Sequence
  Description of Artificial Sequence: Synthetic oligonucleotide
gacuguccaucuccaauca

SEQ ID NO: 500956 - RNA, 19 nt, Artificial Sequence
  Description of Artificial Sequence: Synthetic oligonucleotide
ccaucugcagaaaugucac

SEQ ID NO: 500957 - RNA, 19 nt, Artificial Sequence
  Description of Artificial Sequence: Synthetic oligonucleotide
ggcccaccauuacauaucg

SEQ ID NO: 500958 - RNA, 19 nt, Artificial Sequence
  Description of Artificial Sequence: Synthetic oligonucleotide
ccagggaauacacugccag

SEQ ID NO: 500959 - RNA, 19 nt, Artificial Sequence
  Description of Artificial Sequence: Synthetic oligonucleotide
auagggguaggcugcuccu

SEQ ID NO: 500960 - RNA, 19 nt, Artificial Sequence
  Description of Artificial Sequence: Synthetic oligonucleotide
ugugcccaacuuuuauguc

SEQ ID NO: 500961 - RNA, 19 nt, Artificial Sequence
  Description of Artificial Sequence: Synthetic oligonucleotide
guaaggacguugaaaacua

SEQ ID NO: 500962 - RNA, 19 nt, Artificial Sequence
  Description of Artificial Sequence: Synthetic oligonucleotide
caucuccaaucacugcccc

SEQ ID NO: 500963 - RNA, 19 nt, Artificial Sequence
  Description of Artificial Sequence: Synthetic oligonucleotide
ggacccuauuaacagaaga

SEQ ID NO: 500964 - RNA, 19 nt, Artificial Sequence
  Description of Artificial Sequence: Synthetic oligonucleotide
cuaccaugugcucugugga

SEQ ID NO: 500965 - RNA, 19 nt, Artificial Sequence
  Description of Artificial Sequence: Synthetic oligonucleotide
auggguaaggacguugaaa

SEQ ID NO: 500966 - RNA, 19 nt, Artificial Sequence
  Description of Artificial Sequence: Synthetic oligonucleotide
caccuauaggugcugcaug

SEQ ID NO: 500967 - RNA, 19 nt, Artificial Sequence
  Description of Artificial Sequence: Synthetic oligonucleotide
ccuggagggcucuaguucc

SEQ ID NO: 500968 - RNA, 19 nt, Artificial Sequence
  Description of Artificial Sequence: Synthetic oligonucleotide
uuccuucacuccacaggug

SEQ ID NO: 500969 - RNA, 19 nt, Artificial Sequence
  Description of Artificial Sequence: Synthetic oligonucleotide
gacuauccccucuccuccc

SEQ ID NO: 500970 - RNA, 19 nt, Artificial Sequence
  Description of Artificial Sequence: Synthetic oligonucleotide
ugugguagguuccgagguu

SEQ ID NO: 500971 - RNA, 19 nt, Artificial Sequence
  Description of Artificial Sequence: Synthetic oligonucleotide
gacaccuauaggugcugca

SEQ ID NO: 500972 - RNA, 19 nt, Artificial Sequence
  Description of Artificial Sequence: Synthetic oligonucleotide
acugacaccuauaggugcu

SEQ ID NO: 500973 - RNA, 19 nt, Artificial Sequence
  Description of Artificial Sequence: Synthetic oligonucleotide
ugacuguuauuggucacau

SEQ ID NO: 500974 - RNA, 19 nt, Artificial Sequence
  Description of Artificial Sequence: Synthetic oligonucleotide
aggggcauggucaucauuu

SEQ ID NO: 500975 - RNA, 19 nt, Artificial Sequence
  Description of Artificial Sequence: Synthetic oligonucleotide
uucacuccacagguguccc

SEQ ID NO: 500976 - RNA, 19 nt, Artificial Sequence
  Description of Artificial Sequence: Synthetic oligonucleotide
ccacccucggccauuagcc

SEQ ID NO: 500977 - RNA, 19 nt, Artificial Sequence
  Description of Artificial Sequence: Synthetic oligonucleotide
cuuccuucacuccacaggu

SEQ ID NO: 500978 - RNA, 19 nt, Artificial Sequence
  Description of Artificial Sequence: Synthetic oligonucleotide
cugcucgggaugaaagcug

SEQ ID NO: 500979 - RNA, 19 nt, Artificial Sequence
  Description of Artificial Sequence: Synthetic oligonucleotide
agugacccuaggagaaagg

SEQ ID NO: 500980 - RNA, 19 nt, Artificial Sequence
  Description of Artificial Sequence: Synthetic oligonucleotide
agccugaagaccugggcua

SEQ ID NO: 500981 - RNA, 19 nt, Artificial Sequence
  Description of Artificial Sequence: Synthetic oligonucleotide
cugccaggacccuauuaac

SEQ ID NO: 500982 - RNA, 19 nt, Artificial Sequence
  Description of Artificial Sequence: Synthetic oligonucleotide
acguacaguucaggauucc

SEQ ID NO: 500983 - RNA, 19 nt, Artificial Sequence
  Description of Artificial Sequence: Synthetic oligonucleotide
accaccgugcauugacuca

SEQ ID NO: 500984 - RNA, 19 nt, Artificial Sequence
  Description of Artificial Sequence: Synthetic oligonucleotide
agccgguacguaguauugg

SEQ ID NO: 500985 - RNA, 19 nt, Artificial Sequence
  Description of Artificial Sequence: Synthetic oligonucleotide
ggcgaaggggacuggagug

SEQ ID NO: 500986 - RNA, 19 nt, Artificial Sequence
  Description of Artificial Sequence: Synthetic oligonucleotide
gauccuucgugaggccagg

SEQ ID NO: 500987 - RNA, 19 nt, Artificial Sequence
  Description of Artificial Sequence: Synthetic oligonucleotide
ccuucgugaggccaggccc

SEQ ID NO: 500988 - RNA, 19 nt, Artificial Sequence
  Description of Artificial Sequence: Synthetic oligonucleotide
ucuaccgguuccguggcuc

SEQ ID NO: 500989 - RNA, 19 nt, Artificial Sequence
  Description of Artificial Sequence: Synthetic oligonucleotide
ugacaccuauaggugcugc

SEQ ID NO: 500990 - RNA, 19 nt, Artificial Sequence
  Description of Artificial Sequence: Synthetic oligonucleotide
cuguucugggcuucagauc

SEQ ID NO: 500991 - RNA, 19 nt, Artificial Sequence
  Description of Artificial Sequence: Synthetic oligonucleotide
aggcccaccauuacauauc

SEQ ID NO: 500992 - RNA, 19 nt, Artificial Sequence
  Description of Artificial Sequence: Synthetic oligonucleotide
gagucugugugcccugaga

SEQ ID NO: 500993 - RNA, 19 nt, Artificial Sequence
  Description of Artificial Sequence: Synthetic oligonucleotide
ccugagaugucacagaugu

SEQ ID NO: 500994 - RNA, 19 nt, Artificial Sequence
  Description of Artificial Sequence: Synthetic oligonucleotide
cuaccgguuccguggcucc

SEQ ID NO: 500995 - RNA, 19 nt, Artificial Sequence
  Description of Artificial Sequence: Synthetic oligonucleotide
gguaaggacguugaaaacu

SEQ ID NO: 500996 - RNA, 19 nt, Artificial Sequence
  Description of Artificial Sequence: Synthetic oligonucleotide
ccaggaguuggccaucugc

SEQ ID NO: 500997 - RNA, 19 nt, Artificial Sequence
  Description of Artificial Sequence: Synthetic oligonucleotide
ucuaguuccccaggccagu

SEQ ID NO: 500998 - RNA, 19 nt, Artificial Sequence
  Description of Artificial Sequence: Synthetic oligonucleotide
cagugacccuaggagaaag

SEQ ID NO: 500999 - RNA, 19 nt, Artificial Sequence
  Description of Artificial Sequence: Synthetic oligonucleotide
cugugcccaacuuuuaugu

SEQ ID NO: 501000 - RNA, 19 nt, Artificial Sequence
  Description of Artificial Sequence: Synthetic oligonucleotide
acaccuauaggugcugcau

SEQ ID NO: 501001 - RNA, 19 nt, Artificial Sequence
  Description of Artificial Sequence: Synthetic oligonucleotide
aggacgguguggucuagau

SEQ ID NO: 501002 - RNA, 19 nt, Artificial Sequence
  Description of Artificial Sequence: Synthetic oligonucleotide
aggacaagcuggggcgggc

SEQ ID NO: 501003 - RNA, 19 nt, Artificial Sequence
  Description of Artificial Sequence: Synthetic oligonucleotide
guacuaggcuggucccagg

SEQ ID NO: 501004 - RNA, 19 nt, Artificial Sequence
  Description of Artificial Sequence: Synthetic oligonucleotide
gagccgguacguaguauug

SEQ ID NO: 501005 - RNA, 19 nt, Artificial Sequence
  Description of Artificial Sequence: Synthetic oligonucleotide
gccgguacguaguauuggc

SEQ ID NO: 501006 - RNA, 19 nt, Artificial Sequence
  Description of Artificial Sequence: Synthetic oligonucleotide
guagcucuuuggugucucc

SEQ ID NO: 501007 - RNA, 19 nt, Artificial Sequence
  Description of Artificial Sequence: Synthetic oligonucleotide
caccaccgugcauugacuc

SEQ ID NO: 501008 - RNA, 19 nt, Artificial Sequence
  Description of Artificial Sequence: Synthetic oligonucleotide
uggccuaggcuuagguaau

SEQ ID NO: 501009 - RNA, 19 nt, Artificial Sequence
  Description of Artificial Sequence: Synthetic oligonucleotide
cucgcuguaccacagcugu

SEQ ID NO: 501010 - RNA, 19 nt, Artificial Sequence
  Description of Artificial Sequence: Synthetic oligonucleotide
aucggcccauuggagacag

SEQ ID NO: 501011 - RNA, 19 nt, Artificial Sequence
  Description of Artificial Sequence: Synthetic oligonucleotide
ucuggggcaccugcccagg

SEQ ID NO: 501012 - RNA, 19 nt, Artificial Sequence
  Description of Artificial Sequence: Synthetic oligonucleotide
gguuccgagguugcagugg

SEQ ID NO: 501013 - RNA, 19 nt, Artificial Sequence
  Description of Artificial Sequence: Synthetic oligonucleotide
gccagcauauucugagccc

SEQ ID NO: 501014 - RNA, 19 nt, Artificial Sequence
  Description of Artificial Sequence: Synthetic oligonucleotide
cuucgugaggccaggccca

SEQ ID NO: 501015 - RNA, 19 nt, Artificial Sequence
  Description of Artificial Sequence: Synthetic oligonucleotide
agguuccgagguugcagug

SEQ ID NO: 501016 - RNA, 19 nt, Artificial Sequence
  Description of Artificial Sequence: Synthetic oligonucleotide
cagcaggauccuucgugag

SEQ ID NO: 501017 - RNA, 19 nt, Artificial Sequence
  Description of Artificial Sequence: Synthetic oligonucleotide
uuguugccgaagccaccca

SEQ ID NO: 501018 - RNA, 19 nt, Artificial Sequence
  Description of Artificial Sequence: Synthetic oligonucleotide
gguacuaggcuggucccag

SEQ ID NO: 501019 - RNA, 19 nt, Artificial Sequence
  Description of Artificial Sequence: Synthetic oligonucleotide
accgguuccguggcucccc

SEQ ID NO: 501020 - RNA, 19 nt, Artificial Sequence
  Description of Artificial Sequence: Synthetic oligonucleotide
gagaggauagacagaggcu

SEQ ID NO: 501021 - RNA, 19 nt, Artificial Sequence
  Description of Artificial Sequence: Synthetic oligonucleotide
gggagcugcggugaaugcg

SEQ ID NO: 501022 - RNA, 19 nt, Artificial Sequence
  Description of Artificial Sequence: Synthetic oligonucleotide
auacacugccaggaugccu

SEQ ID NO: 501023 - RNA, 19 nt, Artificial Sequence
  Description of Artificial Sequence: Synthetic oligonucleotide
cauuguagaucuugcaguu

SEQ ID NO: 501024 - RNA, 19 nt, Artificial Sequence
  Description of Artificial Sequence: Synthetic oligonucleotide
gcugacgaugauguuguug

SEQ ID NO: 501025 - RNA, 19 nt, Artificial Sequence
  Description of Artificial Sequence: Synthetic oligonucleotide
cagucuugccccuuggacu

SEQ ID NO: 501026 - RNA, 19 nt, Artificial Sequence
  Description of Artificial Sequence: Synthetic oligonucleotide
aggauccuucgugaggcca

SEQ ID NO: 501027 - RNA, 19 nt, Artificial Sequence
  Description of Artificial Sequence: Synthetic oligonucleotide
cuggaacucuagaagauuu

SEQ ID NO: 501028 - RNA, 19 nt, Artificial Sequence
  Description of Artificial Sequence: Synthetic oligonucleotide
gcauauucugagcccuccc

SEQ ID NO: 501029 - RNA, 19 nt, Artificial Sequence
  Description of Artificial Sequence: Synthetic oligonucleotide
ggaccaaaucgcuuggugu

SEQ ID NO: 501030 - RNA, 19 nt, Artificial Sequence
  Description of Artificial Sequence: Synthetic oligonucleotide
ugccuguuuuggacucuac

SEQ ID NO: 501031 - RNA, 19 nt, Artificial Sequence
  Description of Artificial Sequence: Synthetic oligonucleotide
guagacuauccccucuccu

SEQ ID NO: 501032 - RNA, 19 nt, Artificial Sequence
  Description of Artificial Sequence: Synthetic oligonucleotide
caacaccucagaucacaga

SEQ ID NO: 501033 - RNA, 19 nt, Artificial Sequence
  Description of Artificial Sequence: Synthetic oligonucleotide
aguccccgagagguggagg

SEQ ID NO: 501034 - RNA, 19 nt, Artificial Sequence
  Description of Artificial Sequence: Synthetic oligonucleotide
ccucauuagcaguagacua

SEQ ID NO: 501035 - RNA, 19 nt, Artificial Sequence
  Description of Artificial Sequence: Synthetic oligonucleotide
cauuagccucuggauccgg

SEQ ID NO: 501036 - RNA, 19 nt, Artificial Sequence
  Description of Artificial Sequence: Synthetic oligonucleotide
ggauccuucgugaggccag

SEQ ID NO: 501037 - RNA, 19 nt, Artificial Sequence
  Description of Artificial Sequence: Synthetic oligonucleotide
uaggaccaaaucgcuuggu

SEQ ID NO: 501038 - RNA, 19 nt, Artificial Sequence
  Description of Artificial Sequence: Synthetic oligonucleotide
agaggcaauuggggauagg

SEQ ID NO: 501039 - RNA, 19 nt, Artificial Sequence
  Description of Artificial Sequence: Synthetic oligonucleotide
guaccaggacauucacgga

SEQ ID NO: 501040 - RNA, 19 nt, Artificial Sequence
  Description of Artificial Sequence: Synthetic oligonucleotide
cugcggugaaugcgguggc

SEQ ID NO: 501041 - RNA, 19 nt, Artificial Sequence
  Description of Artificial Sequence: Synthetic oligonucleotide
acguaguauuggcaauguu

SEQ ID NO: 501042 - RNA, 19 nt, Artificial Sequence
  Description of Artificial Sequence: Synthetic oligonucleotide
uggacucuaccgguuccgu

SEQ ID NO: 501043 - RNA, 19 nt, Artificial Sequence
  Description of Artificial Sequence: Synthetic oligonucleotide
gacgguggggcuggcugag

SEQ ID NO: 501044 - RNA, 19 nt, Artificial Sequence
  Description of Artificial Sequence: Synthetic oligonucleotide
aggacccuauuaacagaag

SEQ ID NO: 501045 - RNA, 19 nt, Artificial Sequence
  Description of Artificial Sequence: Synthetic oligonucleotide
ggccagugacccuaggaga

SEQ ID NO: 501046 - RNA, 19 nt, Artificial Sequence
  Description of Artificial Sequence: Synthetic oligonucleotide
guuccgagguugcaguggu

SEQ ID NO: 501047 - RNA, 19 nt, Artificial Sequence
  Description of Artificial Sequence: Synthetic oligonucleotide
gguucggcccucauugcug

SEQ ID NO: 501048 - RNA, 19 nt, Artificial Sequence
  Description of Artificial Sequence: Synthetic oligonucleotide
gguuccgagagcagucccc

SEQ ID NO: 501049 - RNA, 19 nt, Artificial Sequence
  Description of Artificial Sequence: Synthetic oligonucleotide
gcgaaggggacuggagugg

SEQ ID NO: 501050 - RNA, 19 nt, Artificial Sequence
  Description of Artificial Sequence: Synthetic oligonucleotide
aguagugggcagggaagaa

SEQ ID NO: 501051 - RNA, 19 nt, Artificial Sequence
  Description of Artificial Sequence: Synthetic oligonucleotide
ugugucaggcaagcagguu

SEQ ID NO: 501052 - RNA, 19 nt, Artificial Sequence
  Description of Artificial Sequence: Synthetic oligonucleotide
ggacucuaccgguuccgug

SEQ ID NO: 501053 - RNA, 19 nt, Artificial Sequence
  Description of Artificial Sequence: Synthetic oligonucleotide
caguucuguaccaggacau

SEQ ID NO: 501054 - RNA, 19 nt, Artificial Sequence
  Description of Artificial Sequence: Synthetic oligonucleotide
gccucgcucugccaguugc

SEQ ID NO: 501055 - RNA, 19 nt, Artificial Sequence
  Description of Artificial Sequence: Synthetic oligonucleotide
ggguaggcugcuccuuugc

SEQ ID NO: 501056 - RNA, 19 nt, Artificial Sequence
  Description of Artificial Sequence: Synthetic oligonucleotide
cuugaggggaggcaccagu

SEQ ID NO: 501057 - RNA, 19 nt, Artificial Sequence
  Description of Artificial Sequence: Synthetic oligonucleotide
gaggcugugcccaacuuuu

SEQ ID NO: 501058 - RNA, 19 nt, Artificial Sequence
  Description of Artificial Sequence: Synthetic oligonucleotide
cugacaccuauaggugcug

SEQ ID NO: 501059 - RNA, 19 nt, Artificial Sequence
  Description of Artificial Sequence: Synthetic oligonucleotide
ucgcuguaccacagcuguc

SEQ ID NO: 501060 - RNA, 19 nt, Artificial Sequence
  Description of Artificial Sequence: Synthetic oligonucleotide
gaaauggcauuaggaccaa

SEQ ID NO: 501061 - RNA, 19 nt, Artificial Sequence
  Description of Artificial Sequence: Synthetic oligonucleotide
gggcucuaguuccccaggc

SEQ ID NO: 501062 - RNA, 19 nt, Artificial Sequence
  Description of Artificial Sequence: Synthetic oligonucleotide
cccaacuuuuaugucuuug

SEQ ID NO: 501063 - RNA, 19 nt, Artificial Sequence
  Description of Artificial Sequence: Synthetic oligonucleotide
aggaccuguccaccaccgu

SEQ ID NO: 501064 - RNA, 19 nt, Artificial Sequence
  Description of Artificial Sequence: Synthetic oligonucleotide
cacuccacaggugucccca

SEQ ID NO: 501065 - RNA, 19 nt, Artificial Sequence
  Description of Artificial Sequence: Synthetic oligonucleotide
cuuuggccuaggcuuaggu

SEQ ID NO: 501066 - RNA, 19 nt, Artificial Sequence
  Description of Artificial Sequence: Synthetic oligonucleotide
cauucacggaggcauugcu

SEQ ID NO: 501067 - RNA, 19 nt, Artificial Sequence
  Description of Artificial Sequence: Synthetic oligonucleotide
cuaguuccccaggccaguc

SEQ ID NO: 501068 - RNA, 19 nt, Artificial Sequence
  Description of Artificial Sequence: Synthetic oligonucleotide
uuccgagguugcagugguc

SEQ ID NO: 501069 - RNA, 19 nt, Artificial Sequence
  Description of Artificial Sequence: Synthetic oligonucleotide
ucucaccaccaugggccug

SEQ ID NO: 501070 - RNA, 19 nt, Artificial Sequence
  Description of Artificial Sequence: Synthetic oligonucleotide
ggcuuagguaauacugaca

SEQ ID NO: 501071 - RNA, 19 nt, Artificial Sequence
  Description of Artificial Sequence: Synthetic oligonucleotide
guucaggauuccacaugca

SEQ ID NO: 501072 - RNA, 19 nt, Artificial Sequence
  Description of Artificial Sequence: Synthetic oligonucleotide
ugcgguggcugacgaugau

SEQ ID NO: 501073 - RNA, 19 nt, Artificial Sequence
  Description of Artificial Sequence: Synthetic oligonucleotide
cugugugcccugagauguc

SEQ ID NO: 501074 - RNA, 19 nt, Artificial Sequence
  Description of Artificial Sequence: Synthetic oligonucleotide
cauggguaaggacguugaa

SEQ ID NO: 501075 - RNA, 19 nt, Artificial Sequence
  Description of Artificial Sequence: Synthetic oligonucleotide
agccccugacucugugccu

SEQ ID NO: 501076 - RNA, 19 nt, Artificial Sequence
  Description of Artificial Sequence: Synthetic oligonucleotide
ggggcuuaggccucgcucu

SEQ ID NO: 501077 - RNA, 19 nt, Artificial Sequence
  Description of Artificial Sequence: Synthetic oligonucleotide
ccccacuagggccugcagc

SEQ ID NO: 501078 - RNA, 19 nt, Artificial Sequence
  Description of Artificial Sequence: Synthetic oligonucleotide
uggucacauugcagugcau

SEQ ID NO: 501079 - RNA, 19 nt, Artificial Sequence
  Description of Artificial Sequence: Synthetic oligonucleotide
guacgagcagccccugacu

SEQ ID NO: 501080 - RNA, 19 nt, Artificial Sequence
  Description of Artificial Sequence: Synthetic oligonucleotide
uaccgguuccguggcuccc

SEQ ID NO: 501081 - RNA, 19 nt, Artificial Sequence
  Description of Artificial Sequence: Synthetic oligonucleotide
guagccaagccaggcuguc

SEQ ID NO: 501082 - RNA, 19 nt, Artificial Sequence
  Description of Artificial Sequence: Synthetic oligonucleotide
gcauggguaaggacguuga

SEQ ID NO: 501083 - RNA, 19 nt, Artificial Sequence
  Description of Artificial Sequence: Synthetic oligonucleotide
gguacguaguauuggcaau

SEQ ID NO: 501084 - RNA, 19 nt, Artificial Sequence
  Description of Artificial Sequence: Synthetic oligonucleotide
uguccccacuugugaguau

SEQ ID NO: 501085 - RNA, 19 nt, Artificial Sequence
  Description of Artificial Sequence: Synthetic oligonucleotide
ucacugccccugccaggac

SEQ ID NO: 501086 - RNA, 19 nt, Artificial Sequence
  Description of Artificial Sequence: Synthetic oligonucleotide
cccuuggacugccucuuag

SEQ ID NO: 501087 - RNA, 19 nt, Artificial Sequence
  Description of Artificial Sequence: Synthetic oligonucleotide
aucgcuugguguagagcau

SEQ ID NO: 501088 - RNA, 19 nt, Artificial Sequence
  Description of Artificial Sequence: Synthetic oligonucleotide
ccauuagccucuggauccg

SEQ ID NO: 501089 - RNA, 19 nt, Artificial Sequence
  Description of Artificial Sequence: Synthetic oligonucleotide
cagugcaugguucggcccu

SEQ ID NO: 501090 - RNA, 19 nt, Artificial Sequence
  Description of Artificial Sequence: Synthetic oligonucleotide
gcggugaaugcgguggcug

SEQ ID NO: 501091 - RNA, 19 nt, Artificial Sequence
  Description of Artificial Sequence: Synthetic oligonucleotide
caccgugcauugacucauc

SEQ ID NO: 501092 - RNA, 19 nt, Artificial Sequence
  Description of Artificial Sequence: Synthetic oligonucleotide
uggagccgguacguaguau

SEQ ID NO: 501093 - RNA, 19 nt, Artificial Sequence
  Description of Artificial Sequence: Synthetic oligonucleotide
gcaauuggggauaggggua

SEQ ID NO: 501094 - RNA, 19 nt, Artificial Sequence
  Description of Artificial Sequence: Synthetic oligonucleotide
ccguggcuccccacuaggg

SEQ ID NO: 501095 - RNA, 19 nt, Artificial Sequence
  Description of Artificial Sequence: Synthetic oligonucleotide
uagggguaggcugcuccuu

SEQ ID NO: 501096 - RNA, 19 nt, Artificial Sequence
  Description of Artificial Sequence: Synthetic oligonucleotide
cagagauacccacuugcuu

SEQ ID NO: 501097 - RNA, 19 nt, Artificial Sequence
  Description of Artificial Sequence: Synthetic oligonucleotide
uggauccggcugagggcau

SEQ ID NO: 501098 - RNA, 19 nt, Artificial Sequence
  Description of Artificial Sequence: Synthetic oligonucleotide
gugggcagggaagaacugu

SEQ ID NO: 501099 - RNA, 19 nt, Artificial Sequence
  Description of Artificial Sequence: Synthetic oligonucleotide
ccgagguugcaguggucag

SEQ ID NO: 501100 - RNA, 19 nt, Artificial Sequence
  Description of Artificial Sequence: Synthetic oligonucleotide
ggagccgguacguaguauu

SEQ ID NO: 501101 - RNA, 19 nt, Artificial Sequence
  Description of Artificial Sequence: Synthetic oligonucleotide
cagagguacuaggcugguc

SEQ ID NO: 501102 - RNA, 19 nt, Artificial Sequence
  Description of Artificial Sequence: Synthetic oligonucleotide
guccccacuugugaguaua

SEQ ID NO: 501103 - RNA, 19 nt, Artificial Sequence
  Description of Artificial Sequence: Synthetic oligonucleotide
guguccccacuugugagua

SEQ ID NO: 501104 - RNA, 19 nt, Artificial Sequence
  Description of Artificial Sequence: Synthetic oligonucleotide
gggcuuaggccucgcucug

SEQ ID NO: 501105 - RNA, 19 nt, Artificial Sequence
  Description of Artificial Sequence: Synthetic oligonucleotide
gcaagaccccacauucuga

SEQ ID NO: 501106 - RNA, 19 nt, Artificial Sequence
  Description of Artificial Sequence: Synthetic oligonucleotide
gugugcccugagaugucac

SEQ ID NO: 501107 - RNA, 19 nt, Artificial Sequence
  Description of Artificial Sequence: Synthetic oligonucleotide
gguguccccacuugugagu

SEQ ID NO: 501108 - RNA, 19 nt, Artificial Sequence
  Description of Artificial Sequence: Synthetic oligonucleotide
cgguacguaguauuggcaa

SEQ ID NO: 501109 - RNA, 19 nt, Artificial Sequence
  Description of Artificial Sequence: Synthetic oligonucleotide
caguccccgagagguggag

SEQ ID NO: 501110 - RNA, 19 nt, Artificial Sequence
  Description of Artificial Sequence: Synthetic oligonucleotide
ggacaagcuggggcgggcc

SEQ ID NO: 501111 - RNA, 19 nt, Artificial Sequence
  Description of Artificial Sequence: Synthetic oligonucleotide
ggauuguggcagagauacc

SEQ ID NO: 501112 - RNA, 19 nt, Artificial Sequence
  Description of Artificial Sequence: Synthetic oligonucleotide
gguuccguggcuccccacu

SEQ ID NO: 501113 - RNA, 19 nt, Artificial Sequence
  Description of Artificial Sequence: Synthetic oligonucleotide
gcugcucgggaugaaagcu

SEQ ID NO: 501114 - RNA, 19 nt, Artificial Sequence
  Description of Artificial Sequence: Synthetic oligonucleotide
gcgguggcugacgaugaug

SEQ ID NO: 501115 - RNA, 19 nt, Artificial Sequence
  Description of Artificial Sequence: Synthetic oligonucleotide
gaaugcgguggcugacgau

SEQ ID NO: 501116 - RNA, 19 nt, Artificial Sequence
  Description of Artificial Sequence: Synthetic oligonucleotide
cugggcuaccaugugcucu

SEQ ID NO: 501117 - RNA, 19 nt, Artificial Sequence
  Description of Artificial Sequence: Synthetic oligonucleotide
gucucaccaccaugggccu

SEQ ID NO: 501118 - RNA, 19 nt, Artificial Sequence
  Description of Artificial Sequence: Synthetic oligonucleotide
cagaugugguagguuccga

SEQ ID NO: 501119 - RNA, 19 nt, Artificial Sequence
  Description of Artificial Sequence: Synthetic oligonucleotide
gcauuaggaccaaaucgcu

SEQ ID NO: 501120 - RNA, 19 nt, Artificial Sequence
  Description of Artificial Sequence: Synthetic oligonucleotide
gcaguagacuauccccucu

SEQ ID NO: 501121 - RNA, 19 nt, Artificial Sequence
  Description of Artificial Sequence: Synthetic oligonucleotide
cuggggcgggccagccuac

SEQ ID NO: 501122 - RNA, 19 nt, Artificial Sequence
  Description of Artificial Sequence: Synthetic oligonucleotide
gcagagauacccacuugcu

SEQ ID NO: 501123 - RNA, 19 nt, Artificial Sequence
  Description of Artificial Sequence: Synthetic oligonucleotide
ccgguacguaguauuggca

SEQ ID NO: 501124 - RNA, 19 nt, Artificial Sequence
  Description of Artificial Sequence: Synthetic oligonucleotide
ccuaggcuuagguaauacu

SEQ ID NO: 501125 - RNA, 19 nt, Artificial Sequence
  Description of Artificial Sequence: Synthetic oligonucleotide
gcuggggcgggccagccua

SEQ ID NO: 501126 - RNA, 19 nt, Artificial Sequence
  Description of Artificial Sequence: Synthetic oligonucleotide
ggcuuaggccucgcucugc

SEQ ID NO: 501127 - RNA, 19 nt, Artificial Sequence
  Description of Artificial Sequence: Synthetic oligonucleotide
ggcugagaggauagacaga

SEQ ID NO: 501128 - RNA, 19 nt, Artificial Sequence
  Description of Artificial Sequence: Synthetic oligonucleotide
cccauuggagacaggcuua

SEQ ID NO: 501129 - RNA, 19 nt, Artificial Sequence
  Description of Artificial Sequence: Synthetic oligonucleotide
ggcugugcccaacuuuuau

SEQ ID NO: 501130 - RNA, 19 nt, Artificial Sequence
  Description of Artificial Sequence: Synthetic oligonucleotide
uggggcgggccagccuaca

SEQ ID NO: 501131 - RNA, 19 nt, Artificial Sequence
  Description of Artificial Sequence: Synthetic oligonucleotide
gugccuguuuuggacucua

SEQ ID NO: 501132 - RNA, 19 nt, Artificial Sequence
  Description of Artificial Sequence: Synthetic oligonucleotide
cgcuguaccacagcuguca

SEQ ID NO: 501133 - RNA, 19 nt, Artificial Sequence
  Description of Artificial Sequence: Synthetic oligonucleotide
cauuacauaucggcccauu

SEQ ID NO: 501134 - RNA, 19 nt, Artificial Sequence
  Description of Artificial Sequence: Synthetic oligonucleotide
cgguguggucuagaucugg

SEQ ID NO: 501135 - RNA, 19 nt, Artificial Sequence
  Description of Artificial Sequence: Synthetic oligonucleotide
ccuauaggugcugcaugga

SEQ ID NO: 501136 - RNA, 19 nt, Artificial Sequence
  Description of Artificial Sequence: Synthetic oligonucleotide
caggacgguguggucuaga

SEQ ID NO: 501137 - RNA, 19 nt, Artificial Sequence
  Description of Artificial Sequence: Synthetic oligonucleotide
cacccucggccauuagccu

SEQ ID NO: 501138 - RNA, 19 nt, Artificial Sequence
  Description of Artificial Sequence: Synthetic oligonucleotide
ggggcgggccagccuacac

SEQ ID NO: 501139 - RNA, 19 nt, Artificial Sequence
  Description of Artificial Sequence: Synthetic oligonucleotide
augccacccucggccauua

SEQ ID NO: 501140 - RNA, 19 nt, Artificial Sequence
  Description of Artificial Sequence: Synthetic oligonucleotide
ggccucgcucugccaguug

SEQ ID NO: 501141 - RNA, 19 nt, Artificial Sequence
  Description of Artificial Sequence: Synthetic oligonucleotide
ggauagggguaggcugcuc

SEQ ID NO: 501142 - RNA, 19 nt, Artificial Sequence
  Description of Artificial Sequence: Synthetic oligonucleotide
aggcauggguaaggacguu

SEQ ID NO: 501143 - RNA, 19 nt, Artificial Sequence
  Description of Artificial Sequence: Synthetic oligonucleotide
gcuguaccacagcugucau

SEQ ID NO: 501144 - RNA, 19 nt, Artificial Sequence
  Description of Artificial Sequence: Synthetic oligonucleotide
gcaagcagguugcuuccuu

SEQ ID NO: 501145 - RNA, 19 nt, Artificial Sequence
  Description of Artificial Sequence: Synthetic oligonucleotide
ccgugcauugacucauccu

SEQ ID NO: 501146 - RNA, 19 nt, Artificial Sequence
  Description of Artificial Sequence: Synthetic oligonucleotide
gcaugguucggcccucauu

SEQ ID NO: 501147 - RNA, 19 nt, Artificial Sequence
  Description of Artificial Sequence: Synthetic oligonucleotide
gucaggcaagcagguugcu

SEQ ID NO: 501148 - RNA, 19 nt, Artificial Sequence
  Description of Artificial Sequence: Synthetic oligonucleotide
ccccuuuggcugcucggga

SEQ ID NO: 501149 - RNA, 19 nt, Artificial Sequence
  Description of Artificial Sequence: Synthetic oligonucleotide
auccggcugagggcaucuu

SEQ ID NO: 501150 - RNA, 19 nt, Artificial Sequence
  Description of Artificial Sequence: Synthetic oligonucleotide
cucuaccgguuccguggcu

SEQ ID NO: 501151 - RNA, 19 nt, Artificial Sequence
  Description of Artificial Sequence: Synthetic oligonucleotide
ggcccucauugcuggcgaa

SEQ ID NO: 501152 - RNA, 19 nt, Artificial Sequence
  Description of Artificial Sequence: Synthetic oligonucleotide
ggccuaggcuuagguaaua

SEQ ID NO: 501153 - RNA, 19 nt, Artificial Sequence
  Description of Artificial Sequence: Synthetic oligonucleotide
cuccucccaccacaauguu

SEQ ID NO: 501154 - RNA, 19 nt, Artificial Sequence
  Description of Artificial Sequence: Synthetic oligonucleotide
ccaccgugcauugacucau

SEQ ID NO: 501155 - RNA, 19 nt, Artificial Sequence
  Description of Artificial Sequence: Synthetic oligonucleotide
cccugccaggacccuauua

SEQ ID NO: 501156 - RNA, 19 nt, Artificial Sequence
  Description of Artificial Sequence: Synthetic oligonucleotide
gcgggccagccuacacccc

SEQ ID NO: 501157 - RNA, 19 nt, Artificial Sequence
  Description of Artificial Sequence: Synthetic oligonucleotide
ccucaggaaggugacuguu

SEQ ID NO: 501158 - RNA, 19 nt, Artificial Sequence
  Description of Artificial Sequence: Synthetic oligonucleotide
cgcuugguguagagcauuu

SEQ ID NO: 501159 - RNA, 19 nt, Artificial Sequence
  Description of Artificial Sequence: Synthetic oligonucleotide
ccauuacauaucggcccau

SEQ ID NO: 501160 - RNA, 19 nt, Artificial Sequence
  Description of Artificial Sequence: Synthetic oligonucleotide
ccuguccaccaccgugcau

SEQ ID NO: 501161 - RNA, 19 nt, Artificial Sequence
  Description of Artificial Sequence: Synthetic oligonucleotide
ccccuaggccagugacccu

SEQ ID NO: 501162 - RNA, 19 nt, Artificial Sequence
  Description of Artificial Sequence: Synthetic oligonucleotide
aauagaguacucuuugcuc

SEQ ID NO: 501163 - RNA, 19 nt, Artificial Sequence
  Description of Artificial Sequence: Synthetic oligonucleotide
ucuguagugccccagauag

SEQ ID NO: 501164 - RNA, 19 nt, Artificial Sequence
  Description of Artificial Sequence: Synthetic oligonucleotide
auagaguacucuuugcucc

SEQ ID NO: 501165 - RNA, 19 nt, Artificial Sequence
  Description of Artificial Sequence: Synthetic oligonucleotide
aguaccuguucauugagcc

SEQ ID NO: 501166 - RNA, 19 nt, Artificial Sequence
  Description of Artificial Sequence: Synthetic oligonucleotide
uuuacaaucucacgguagg

SEQ ID NO: 501167 - RNA, 19 nt, Artificial Sequence
  Description of Artificial Sequence: Synthetic oligonucleotide
gguaagauccccuacaucg

SEQ ID NO: 501168 - RNA, 19 nt, Artificial Sequence
  Description of Artificial Sequence: Synthetic oligonucleotide
ucugauauguaccacgcug

SEQ ID NO: 501169 - RNA, 19 nt, Artificial Sequence
  Description of Artificial Sequence: Synthetic oligonucleotide
accuguaugucuuacagag

SEQ ID NO: 501170 - RNA, 19 nt, Artificial Sequence
  Description of Artificial Sequence: Synthetic oligonucleotide
uucauugagccccacacag

SEQ ID NO: 501171 - RNA, 19 nt, Artificial Sequence
  Description of Artificial Sequence: Synthetic oligonucleotide
acggaaaccaaauucauca

SEQ ID NO: 501172 - RNA, 19 nt, Artificial Sequence
  Description of Artificial Sequence: Synthetic oligonucleotide
aguccugcggcguacaacc

SEQ ID NO: 501173 - RNA, 19 nt, Artificial Sequence
  Description of Artificial Sequence: Synthetic oligonucleotide
uuucacguccauuugugcg

SEQ ID NO: 501174 - RNA, 19 nt, Artificial Sequence
  Description of Artificial Sequence: Synthetic oligonucleotide
acaacuguggccucaugcc

SEQ ID NO: 501175 - RNA, 19 nt, Artificial Sequence
  Description of Artificial Sequence: Synthetic oligonucleotide
ucuaaggccguucagcuca

SEQ ID NO: 501176 - RNA, 19 nt, Artificial Sequence
  Description of Artificial Sequence: Synthetic oligonucleotide
uugaucuggacccagccag

SEQ ID NO: 501177 - RNA, 19 nt, Artificial Sequence
  Description of Artificial Sequence: Synthetic oligonucleotide
uuuucggaagccuagcuca

SEQ ID NO: 501178 - RNA, 19 nt, Artificial Sequence
  Description of Artificial Sequence: Synthetic oligonucleotide
auaauggcacacaucaucc

SEQ ID NO: 501179 - RNA, 19 nt, Artificial Sequence
  Description of Artificial Sequence: Synthetic oligonucleotide
aacaguuuguccaagcgag

SEQ ID NO: 501180 - RNA, 19 nt, Artificial Sequence
  Description of Artificial Sequence: Synthetic oligonucleotide
agcggaguuucucagagcg

SEQ ID NO: 501181 - RNA, 19 nt, Artificial Sequence
  Description of Artificial Sequence: Synthetic oligonucleotide
uccucaauaaacagccagg

SEQ ID NO: 501182 - RNA, 19 nt, Artificial Sequence
  Description of Artificial Sequence: Synthetic oligonucleotide
uguucauugagccccacac

SEQ ID NO: 501183 - RNA, 19 nt, Artificial Sequence
  Description of Artificial Sequence: Synthetic oligonucleotide
cuuacagagcaccaggcgg

SEQ ID NO: 501184 - RNA, 19 nt, Artificial Sequence
  Description of Artificial Sequence: Synthetic oligonucleotide
ugaacaaucagguggcgca

SEQ ID NO: 501185 - RNA, 19 nt, Artificial Sequence
  Description of Artificial Sequence: Synthetic oligonucleotide
uuacagagcaccaggcggg

SEQ ID NO: 501186 - RNA, 19 nt, Artificial Sequence
  Description of Artificial Sequence: Synthetic oligonucleotide
acaaacuuggcuggaaacc

SEQ ID NO: 501187 - RNA, 19 nt, Artificial Sequence
  Description of Artificial Sequence: Synthetic oligonucleotide
gaaguggcgagccacacgc

SEQ ID NO: 501188 - RNA, 19 nt, Artificial Sequence
  Description of Artificial Sequence: Synthetic oligonucleotide
cacacuacaguucuugggg

SEQ ID NO: 501189 - RNA, 19 nt, Artificial Sequence
  Description of Artificial Sequence: Synthetic oligonucleotide
aaaccagccucuaaggccg

SEQ ID NO: 501190 - RNA, 19 nt, Artificial Sequence
  Description of Artificial Sequence: Synthetic oligonucleotide
aaggccguucagcucaccc

SEQ ID NO: 501191 - RNA, 19 nt, Artificial Sequence
  Description of Artificial Sequence: Synthetic oligonucleotide
aaacaggucccagaugcgc

SEQ ID NO: 501192 - RNA, 19 nt, Artificial Sequence
  Description of Artificial Sequence: Synthetic oligonucleotide
aagugagcggaguuucacg

SEQ ID NO: 501193 - RNA, 19 nt, Artificial Sequence
  Description of Artificial Sequence: Synthetic oligonucleotide
accuccacaaacuuggcug

SEQ ID NO: 501194 - RNA, 19 nt, Artificial Sequence
  Description of Artificial Sequence: Synthetic oligonucleotide
aaaugaucgugaugauguc

SEQ ID NO: 501195 - RNA, 19 nt, Artificial Sequence
  Description of Artificial Sequence: Synthetic oligonucleotide
uucuuuacaaucucacggu

SEQ ID NO: 501196 - RNA, 19 nt, Artificial Sequence
  Description of Artificial Sequence: Synthetic oligonucleotide
uguaguaccuguucauuga

SEQ ID NO: 501197 - RNA, 19 nt, Artificial Sequence
  Description of Artificial Sequence: Synthetic oligonucleotide
caucauagcagaacucagg

SEQ ID NO: 501198 - RNA, 19 nt, Artificial Sequence
  Description of Artificial Sequence: Synthetic oligonucleotide
aggucuucgauaauggcac

SEQ ID NO: 501199 - RNA, 19 nt, Artificial Sequence
  Description of Artificial Sequence: Synthetic oligonucleotide
aacaacaccagggagcccu

SEQ ID NO: 501200 - RNA, 19 nt, Artificial Sequence
  Description of Artificial Sequence: Synthetic oligonucleotide
ugggaugccagccagcacu

SEQ ID NO: 501201 - RNA, 19 nt, Artificial Sequence
  Description of Artificial Sequence: Synthetic oligonucleotide
ucucuuagcagggagcucc

SEQ ID NO: 501202 - RNA, 19 nt, Artificial Sequence
  Description of Artificial Sequence: Synthetic oligonucleotide
aauaaacagccaggggugg

SEQ ID NO: 501203 - RNA, 19 nt, Artificial Sequence
  Description of Artificial Sequence: Synthetic oligonucleotide
ugagcggaguuucacgucc

SEQ ID NO: 501204 - RNA, 19 nt, Artificial Sequence
  Description of Artificial Sequence: Synthetic oligonucleotide
uuugcuccguucauccagg

SEQ ID NO: 501205 - RNA, 19 nt, Artificial Sequence
  Description of Artificial Sequence: Synthetic oligonucleotide
ugugaucagggacaacuca

SEQ ID NO: 501206 - RNA, 19 nt, Artificial Sequence
  Description of Artificial Sequence: Synthetic oligonucleotide
agcucugucugcuugauau

SEQ ID NO: 501207 - RNA, 19 nt, Artificial Sequence
  Description of Artificial Sequence: Synthetic oligonucleotide
cagucugauauguaccacg

SEQ ID NO: 501208 - RNA, 19 nt, Artificial Sequence
  Description of Artificial Sequence: Synthetic oligonucleotide
ucaucaauuggaacuguuc

SEQ ID NO: 501209 - RNA, 19 nt, Artificial Sequence
  Description of Artificial Sequence: Synthetic oligonucleotide
cauggugcggagcaggucc

SEQ ID NO: 501210 - RNA, 19 nt, Artificial Sequence
  Description of Artificial Sequence: Synthetic oligonucleotide
acagguguaguaccuguuc

SEQ ID NO: 501211 - RNA, 19 nt, Artificial Sequence
  Description of Artificial Sequence: Synthetic oligonucleotide
caaccuguaugucuuacag

SEQ ID NO: 501212 - RNA, 19 nt, Artificial Sequence
  Description of Artificial Sequence: Synthetic oligonucleotide
agucugauauguaccacgc

SEQ ID NO: 501213 - RNA, 19 nt, Artificial Sequence
  Description of Artificial Sequence: Synthetic oligonucleotide
uagaguacucuuugcuccg

SEQ ID NO: 501214 - RNA, 19 nt, Artificial Sequence
  Description of Artificial Sequence: Synthetic oligonucleotide
aacuuggcuggaaaccagc

SEQ ID NO: 501215 - RNA, 19 nt, Artificial Sequence
  Description of Artificial Sequence: Synthetic oligonucleotide
ucacgguaggacaacucag

SEQ ID NO: 501216 - RNA, 19 nt, Artificial Sequence
  Description of Artificial Sequence: Synthetic oligonucleotide
gagagucccucgcacaagg

SEQ ID NO: 501217 - RNA, 19 nt, Artificial Sequence
  Description of Artificial Sequence: Synthetic oligonucleotide
cuccucaauaaacagccag

SEQ ID NO: 501218 - RNA, 19 nt, Artificial Sequence
  Description of Artificial Sequence: Synthetic oligonucleotide
gucuggaacaacaccaggg

SEQ ID NO: 501219 - RNA, 19 nt, Artificial Sequence
  Description of Artificial Sequence: Synthetic oligonucleotide
uaagauccccuacaucgug

SEQ ID NO: 501220 - RNA, 19 nt, Artificial Sequence
  Description of Artificial Sequence: Synthetic oligonucleotide
ugauauguaccacgcuggc

SEQ ID NO: 501221 - RNA, 19 nt, Artificial Sequence
  Description of Artificial Sequence: Synthetic oligonucleotide
ugcgcaggaaggaccaggg

SEQ ID NO: 501222 - RNA, 19 nt, Artificial Sequence
  Description of Artificial Sequence: Synthetic oligonucleotide
cacaacuguggccucaugc

SEQ ID NO: 501223 - RNA, 19 nt, Artificial Sequence
  Description of Artificial Sequence: Synthetic oligonucleotide
cuaugucccagcugaagag

SEQ ID NO: 501224 - RNA, 19 nt, Artificial Sequence
  Description of Artificial Sequence: Synthetic oligonucleotide
gauauguaccacgcuggcg

SEQ ID NO: 501225 - RNA, 19 nt, Artificial Sequence
  Description of Artificial Sequence: Synthetic oligonucleotide
aaugccgugaggaaccagu

SEQ ID NO: 501226 - RNA, 19 nt, Artificial Sequence
  Description of Artificial Sequence: Synthetic oligonucleotide
agugagcggaguuucacgu

SEQ ID NO: 501227 - RNA, 19 nt, Artificial Sequence
  Description of Artificial Sequence: Synthetic oligonucleotide
uccuuaaggcgcagcaugc

SEQ ID NO: 501228 - RNA, 19 nt, Artificial Sequence
  Description of Artificial Sequence: Synthetic oligonucleotide
uucacguccauuugugcgu

SEQ ID NO: 501229 - RNA, 19 nt, Artificial Sequence
  Description of Artificial Sequence: Synthetic oligonucleotide
uaggacaacucagaguucu

SEQ ID NO: 501230 - RNA, 19 nt, Artificial Sequence
  Description of Artificial Sequence: Synthetic oligonucleotide
gaucagggacaacucaaug

SEQ ID NO: 501231 - RNA, 19 nt, Artificial Sequence
  Description of Artificial Sequence: Synthetic oligonucleotide
aaccuguaugucuuacaga

SEQ ID NO: 501232 - RNA, 19 nt, Artificial Sequence
  Description of Artificial Sequence: Synthetic oligonucleotide
guagccaaucucuggguag

SEQ ID NO: 501233 - RNA, 19 nt, Artificial Sequence
  Description of Artificial Sequence: Synthetic oligonucleotide
aaucucacgguaggacaac

SEQ ID NO: 501234 - RNA, 19 nt, Artificial Sequence
  Description of Artificial Sequence: Synthetic oligonucleotide
auuugcgucucugacuguc

SEQ ID NO: 501235 - RNA, 19 nt, Artificial Sequence
  Description of Artificial Sequence: Synthetic oligonucleotide
gugguuguggguaaacucc

SEQ ID NO: 501236 - RNA, 19 nt, Artificial Sequence
  Description of Artificial Sequence: Synthetic oligonucleotide
aaaacaggucccagaugcg

SEQ ID NO: 501237 - RNA, 19 nt, Artificial Sequence
  Description of Artificial Sequence: Synthetic oligonucleotide
uccuccuuaaggcgcagca

SEQ ID NO: 501238 - RNA, 19 nt, Artificial Sequence
  Description of Artificial Sequence: Synthetic oligonucleotide
uacaaucucacgguaggac

SEQ ID NO: 501239 - RNA, 19 nt, Artificial Sequence
  Description of Artificial Sequence: Synthetic oligonucleotide
ugaucuggacccagccagg

SEQ ID NO: 501240 - RNA, 19 nt, Artificial Sequence
  Description of Artificial Sequence: Synthetic oligonucleotide
cauguccugaacacccucc

SEQ ID NO: 501241 - RNA, 19 nt, Artificial Sequence
  Description of Artificial Sequence: Synthetic oligonucleotide
guaguaccuguucauugag

SEQ ID NO: 501242 - RNA, 19 nt, Artificial Sequence
  Description of Artificial Sequence: Synthetic oligonucleotide
ucuuuacaaucucacggua

SEQ ID NO: 501243 - RNA, 19 nt, Artificial Sequence
  Description of Artificial Sequence: Synthetic oligonucleotide
uucgauaauggcacacauc

SEQ ID NO: 501244 - RNA, 19 nt, Artificial Sequence
  Description of Artificial Sequence: Synthetic oligonucleotide
auaaacagccagggguggc

SEQ ID NO: 501245 - RNA, 19 nt, Artificial Sequence
  Description of Artificial Sequence: Synthetic oligonucleotide
guggccucaugccaugugg

SEQ ID NO: 501246 - RNA, 19 nt, Artificial Sequence
  Description of Artificial Sequence: Synthetic oligonucleotide
uguaccacgcuggcgaaug

SEQ ID NO: 501247 - RNA, 19 nt, Artificial Sequence
  Description of Artificial Sequence: Synthetic oligonucleotide
aacaaucagguggcgcagg

SEQ ID NO: 501248 - RNA, 19 nt, Artificial Sequence
  Description of Artificial Sequence: Synthetic oligonucleotide
uggagucaggacuuugcca

SEQ ID NO: 501249 - RNA, 19 nt, Artificial Sequence
  Description of Artificial Sequence: Synthetic oligonucleotide
uuugcgucucugacugucc

SEQ ID NO: 501250 - RNA, 19 nt, Artificial Sequence
  Description of Artificial Sequence: Synthetic oligonucleotide
ggcgggaauacacagaauc

SEQ ID NO: 501251 - RNA, 19 nt, Artificial Sequence
  Description of Artificial Sequence: Synthetic oligonucleotide
agguaagauccccuacauc

SEQ ID NO: 501252 - RNA, 19 nt, Artificial Sequence
  Description of Artificial Sequence: Synthetic oligonucleotide
gcggcguacaaccugagag

SEQ ID NO: 501253 - RNA, 19 nt, Artificial Sequence
  Description of Artificial Sequence: Synthetic oligonucleotide
aucgugaugaugucguuuu

SEQ ID NO: 501254 - RNA, 19 nt, Artificial Sequence
  Description of Artificial Sequence: Synthetic oligonucleotide
ucuucgauaauggcacaca

SEQ ID NO: 501255 - RNA, 19 nt, Artificial Sequence
  Description of Artificial Sequence: Synthetic oligonucleotide
gauagccgcauccacaacu

SEQ ID NO: 501256 - RNA, 19 nt, Artificial Sequence
  Description of Artificial Sequence: Synthetic oligonucleotide
agagccaggccagugcucg

SEQ ID NO: 501257 - RNA, 19 nt, Artificial Sequence
  Description of Artificial Sequence: Synthetic oligonucleotide
gcugauaccacuucuccac

SEQ ID NO: 501258 - RNA, 19 nt, Artificial Sequence
  Description of Artificial Sequence: Synthetic oligonucleotide
cucucucuuagcagggagc

SEQ ID NO: 501259 - RNA, 19 nt, Artificial Sequence
  Description of Artificial Sequence: Synthetic oligonucleotide
cuucucggaggucagcuac

SEQ ID NO: 501260 - RNA, 19 nt, Artificial Sequence
  Description of Artificial Sequence: Synthetic oligonucleotide
guucacguuggcaaagcag

SEQ ID NO: 501261 - RNA, 19 nt, Artificial Sequence
  Description of Artificial Sequence: Synthetic oligonucleotide
aucaauuggaacuguucuu

SEQ ID NO: 501262 - RNA, 19 nt, Artificial Sequence
  Description of Artificial Sequence: Synthetic oligonucleotide
uugugcgugugcagcauca

SEQ ID NO: 501263 - RNA, 19 nt, Artificial Sequence
  Description of Artificial Sequence: Synthetic oligonucleotide
ugaucagggacaacucaau

SEQ ID NO: 501264 - RNA, 19 nt, Artificial Sequence
  Description of Artificial Sequence: Synthetic oligonucleotide
cuggaacaacaccagggag

SEQ ID NO: 501265 - RNA, 19 nt, Artificial Sequence
  Description of Artificial Sequence: Synthetic oligonucleotide
uccgcugaguccugcggcg

SEQ ID NO: 501266 - RNA, 19 nt, Artificial Sequence
  Description of Artificial Sequence: Synthetic oligonucleotide
aguuucacguccauuugug

SEQ ID NO: 501267 - RNA, 19 nt, Artificial Sequence
  Description of Artificial Sequence: Synthetic oligonucleotide
uccugaacacccuccuuca

SEQ ID NO: 501268 - RNA, 19 nt, Artificial Sequence
  Description of Artificial Sequence: Synthetic oligonucleotide
aguuuguccaagcgaggca

SEQ ID NO: 501269 - RNA, 19 nt, Artificial Sequence
  Description of Artificial Sequence: Synthetic oligonucleotide
guuucacguccauuugugc

SEQ ID NO: 501270 - RNA, 19 nt, Artificial Sequence
  Description of Artificial Sequence: Synthetic oligonucleotide
uacaucgugguugugggua

SEQ ID NO: 501271 - RNA, 19 nt, Artificial Sequence
  Description of Artificial Sequence: Synthetic oligonucleotide
aguagcucggcauccucca

SEQ ID NO: 501272 - RNA, 19 nt, Artificial Sequence
  Description of Artificial Sequence: Synthetic oligonucleotide
ugucaugcuccugcaacag

SEQ ID NO: 501273 - RNA, 19 nt, Artificial Sequence
  Description of Artificial Sequence: Synthetic oligonucleotide
ucaugccgcucaaagucca

SEQ ID NO: 501274 - RNA, 19 nt, Artificial Sequence
  Description of Artificial Sequence: Synthetic oligonucleotide
caguuuguccaagcgaggc

SEQ ID NO: 501275 - RNA, 19 nt, Artificial Sequence
  Description of Artificial Sequence: Synthetic oligonucleotide
uagggagcggaguuucuca

SEQ ID NO: 501276 - RNA, 19 nt, Artificial Sequence
  Description of Artificial Sequence: Synthetic oligonucleotide
aagcgaggcagguacugaa

SEQ ID NO: 501277 - RNA, 19 nt, Artificial Sequence
  Description of Artificial Sequence: Synthetic oligonucleotide
ggucucaucaauuggaacu

SEQ ID NO: 501278 - RNA, 19 nt, Artificial Sequence
  Description of Artificial Sequence: Synthetic oligonucleotide
uaagugagcggaguuucac

SEQ ID NO: 501279 - RNA, 19 nt, Artificial Sequence
  Description of Artificial Sequence: Synthetic oligonucleotide
ggagcggaguuucucagag

SEQ ID NO: 501280 - RNA, 19 nt, Artificial Sequence
  Description of Artificial Sequence: Synthetic oligonucleotide
gcguaagcaugccacauag

SEQ ID NO: 501281 - RNA, 19 nt, Artificial Sequence
  Description of Artificial Sequence: Synthetic oligonucleotide
ccuacaucgugguuguggg

SEQ ID NO: 501282 - RNA, 19 nt, Artificial Sequence
  Description of Artificial Sequence: Synthetic oligonucleotide
uaaggcgcagcaugcccag

SEQ ID NO: 501283 - RNA, 19 nt, Artificial Sequence
  Description of Artificial Sequence: Synthetic oligonucleotide
cacggaaaccaaauucauc

SEQ ID NO: 501284 - RNA, 19 nt, Artificial Sequence
  Description of Artificial Sequence: Synthetic oligonucleotide
caucaauuggaacuguucu

SEQ ID NO: 501285 - RNA, 19 nt, Artificial Sequence
  Description of Artificial Sequence: Synthetic oligonucleotide
cacagauaagugagcggag

SEQ ID NO: 501286 - RNA, 19 nt, Artificial Sequence
  Description of Artificial Sequence: Synthetic oligonucleotide
gaggacgcggagcucacac

SEQ ID NO: 501287 - RNA, 19 nt, Artificial Sequence
  Description of Artificial Sequence: Synthetic oligonucleotide
agaaccuuccuuguccaca

SEQ ID NO: 501288 - RNA, 19 nt, Artificial Sequence
  Description of Artificial Sequence: Synthetic oligonucleotide
guaccuguucauugagccc

SEQ ID NO: 501289 - RNA, 19 nt, Artificial Sequence
  Description of Artificial Sequence: Synthetic oligonucleotide
gcagcagucugauauguac

SEQ ID NO: 501290 - RNA, 19 nt, Artificial Sequence
  Description of Artificial Sequence: Synthetic oligonucleotide
gaucuggacccagccaggg

SEQ ID NO: 501291 - RNA, 19 nt, Artificial Sequence
  Description of Artificial Sequence: Synthetic oligonucleotide
cugaacaaucagguggcgc

SEQ ID NO: 501292 - RNA, 19 nt, Artificial Sequence
  Description of Artificial Sequence: Synthetic oligonucleotide
gcaaucuugucccagguaa

SEQ ID NO: 501293 - RNA, 19 nt, Artificial Sequence
  Description of Artificial Sequence: Synthetic oligonucleotide
uucucggaggucagcuacc

SEQ ID NO: 501294 - RNA, 19 nt, Artificial Sequence
  Description of Artificial Sequence: Synthetic oligonucleotide
acaaccugagagagguugg

SEQ ID NO: 501295 - RNA, 19 nt, Artificial Sequence
  Description of Artificial Sequence: Synthetic oligonucleotide
aaccuuccuuguccacacg

SEQ ID NO: 501296 - RNA, 19 nt, Artificial Sequence
  Description of Artificial Sequence: Synthetic oligonucleotide
aagccuagcucaucaucau

SEQ ID NO: 501297 - RNA, 19 nt, Artificial Sequence
  Description of Artificial Sequence: Synthetic oligonucleotide
uuacaaucucacgguagga

SEQ ID NO: 501298 - RNA, 19 nt, Artificial Sequence
  Description of Artificial Sequence: Synthetic oligonucleotide
cacagcccgauacagcaac

SEQ ID NO: 501299 - RNA, 19 nt, Artificial Sequence
  Description of Artificial Sequence: Synthetic oligonucleotide
cucacgguaggacaacuca

SEQ ID NO: 501300 - RNA, 19 nt, Artificial Sequence
  Description of Artificial Sequence: Synthetic oligonucleotide
agcacuagggagcggaguu

SEQ ID NO: 501301 - RNA, 19 nt, Artificial Sequence
  Description of Artificial Sequence: Synthetic oligonucleotide
ugccgugaggaaccagugc

SEQ ID NO: 501302 - RNA, 19 nt, Artificial Sequence
  Description of Artificial Sequence: Synthetic oligonucleotide
aacaggucccagaugcgca

SEQ ID NO: 501303 - RNA, 19 nt, Artificial Sequence
  Description of Artificial Sequence: Synthetic oligonucleotide
uucuguagugccccagaua

SEQ ID NO: 501304 - RNA, 19 nt, Artificial Sequence
  Description of Artificial Sequence: Synthetic oligonucleotide
gcguguugaagauggaggc

SEQ ID NO: 501305 - RNA, 19 nt, Artificial Sequence
  Description of Artificial Sequence: Synthetic oligonucleotide
gaugcgcagcagcagucug

SEQ ID NO: 501306 - RNA, 19 nt, Artificial Sequence
  Description of Artificial Sequence: Synthetic oligonucleotide
uccugcggcguacaaccug

SEQ ID NO: 501307 - RNA, 19 nt, Artificial Sequence
  Description of Artificial Sequence: Synthetic oligonucleotide
uguggccucaugccaugug

SEQ ID NO: 501308 - RNA, 19 nt, Artificial Sequence
  Description of Artificial Sequence: Synthetic oligonucleotide
agcguagucuggaacaaca

SEQ ID NO: 501309 - RNA, 19 nt, Artificial Sequence
  Description of Artificial Sequence: Synthetic oligonucleotide
gcaauagaguacucuuugc

SEQ ID NO: 501310 - RNA, 19 nt, Artificial Sequence
  Description of Artificial Sequence: Synthetic oligonucleotide
agauccccuacaucguggu

SEQ ID NO: 501311 - RNA, 19 nt, Artificial Sequence
  Description of Artificial Sequence: Synthetic oligonucleotide
ccucaauaaacagccaggg

SEQ ID NO: 501312 - RNA, 19 nt, Artificial Sequence
  Description of Artificial Sequence: Synthetic oligonucleotide
agcuaccagcucugucugc

SEQ ID NO: 501313 - RNA, 19 nt, Artificial Sequence
  Description of Artificial Sequence: Synthetic oligonucleotide
agucccucgcacaaggucu

SEQ ID NO: 501314 - RNA, 19 nt, Artificial Sequence
  Description of Artificial Sequence: Synthetic oligonucleotide
ucucacgguaggacaacuc

SEQ ID NO: 501315 - RNA, 19 nt, Artificial Sequence
  Description of Artificial Sequence: Synthetic oligonucleotide
cagugcucguccuucugag

SEQ ID NO: 501316 - RNA, 19 nt, Artificial Sequence
  Description of Artificial Sequence: Synthetic oligonucleotide
agauagccgcauccacaac

SEQ ID NO: 501317 - RNA, 19 nt, Artificial Sequence
  Description of Artificial Sequence: Synthetic oligonucleotide
agcagaacucagguugguc

SEQ ID NO: 501318 - RNA, 19 nt, Artificial Sequence
  Description of Artificial Sequence: Synthetic oligonucleotide
uccacacggaaaccaaauu

SEQ ID NO: 501319 - RNA, 19 nt, Artificial Sequence
  Description of Artificial Sequence: Synthetic oligonucleotide
agaacucagguugguccac

SEQ ID NO: 501320 - RNA, 19 nt, Artificial Sequence
  Description of Artificial Sequence: Synthetic oligonucleotide
gagucccucgcacaagguc

SEQ ID NO: 501321 - RNA, 19 nt, Artificial Sequence
  Description of Artificial Sequence: Synthetic oligonucleotide
ugcaaucuugucccaggua

SEQ ID NO: 501322 - RNA, 19 nt, Artificial Sequence
  Description of Artificial Sequence: Synthetic oligonucleotide
ucuuugcuccguucaucca

SEQ ID NO: 501323 - RNA, 19 nt, Artificial Sequence
  Description of Artificial Sequence: Synthetic oligonucleotide
ugcguaagcaugccacaua

SEQ ID NO: 501324 - RNA, 19 nt, Artificial Sequence
  Description of Artificial Sequence: Synthetic oligonucleotide
uggcgagccacacgcaaaa

SEQ ID NO: 501325 - RNA, 19 nt, Artificial Sequence
  Description of Artificial Sequence: Synthetic oligonucleotide
gaacuguucuuuacaaucu

SEQ ID NO: 501326 - RNA, 19 nt, Artificial Sequence
  Description of Artificial Sequence: Synthetic oligonucleotide
gacugcaaucuugucccag

SEQ ID NO: 501327 - RNA, 19 nt, Artificial Sequence
  Description of Artificial Sequence: Synthetic oligonucleotide
ucucucgaccucccggccu

SEQ ID NO: 501328 - RNA, 19 nt, Artificial Sequence
  Description of Artificial Sequence: Synthetic oligonucleotide
aucgugguuguggguaaac

SEQ ID NO: 501329 - RNA, 19 nt, Artificial Sequence
  Description of Artificial Sequence: Synthetic oligonucleotide
uagccaaucucuggguaga

SEQ ID NO: 501330 - RNA, 19 nt, Artificial Sequence
  Description of Artificial Sequence: Synthetic oligonucleotide
auagccgcauccacaacug

SEQ ID NO: 501331 - RNA, 19 nt, Artificial Sequence
  Description of Artificial Sequence: Synthetic oligonucleotide
ccacacggaaaccaaauuc

SEQ ID NO: 501332 - RNA, 19 nt, Artificial Sequence
  Description of Artificial Sequence: Synthetic oligonucleotide
agauaagugagcggaguuu

SEQ ID NO: 501333 - RNA, 19 nt, Artificial Sequence
  Description of Artificial Sequence: Synthetic oligonucleotide
ccacacuacaguucuuggg

SEQ ID NO: 501334 - RNA, 19 nt, Artificial Sequence
  Description of Artificial Sequence: Synthetic oligonucleotide
accacgcuggcgaaugccg

SEQ ID NO: 501335 - RNA, 19 nt, Artificial Sequence
  Description of Artificial Sequence: Synthetic oligonucleotide
cagauagccgcauccacaa

SEQ ID NO: 501336 - RNA, 19 nt, Artificial Sequence
  Description of Artificial Sequence: Synthetic oligonucleotide
caaucucacgguaggacaa

SEQ ID NO: 501337 - RNA, 19 nt, Artificial Sequence
  Description of Artificial Sequence: Synthetic oligonucleotide
caccguagccucugugggg

SEQ ID NO: 501338 - RNA, 19 nt, Artificial Sequence
  Description of Artificial Sequence: Synthetic oligonucleotide
cuggcgaaugccgugagga

SEQ ID NO: 501339 - RNA, 19 nt, Artificial Sequence
  Description of Artificial Sequence: Synthetic oligonucleotide
cuggucagucuggacaccc

SEQ ID NO: 501340 - RNA, 19 nt, Artificial Sequence
  Description of Artificial Sequence: Synthetic oligonucleotide
aacuguggccucaugccau

SEQ ID NO: 501341 - RNA, 19 nt, Artificial Sequence
  Description of Artificial Sequence: Synthetic oligonucleotide
cacgguaggacaacucaga

SEQ ID NO: 501342 - RNA, 19 nt, Artificial Sequence
  Description of Artificial Sequence: Synthetic oligonucleotide
uccaaccuguaugucuuac

SEQ ID NO: 501343 - RNA, 19 nt, Artificial Sequence
  Description of Artificial Sequence: Synthetic oligonucleotide
gauaccacuucuccacagu

SEQ ID NO: 501344 - RNA, 19 nt, Artificial Sequence
  Description of Artificial Sequence: Synthetic oligonucleotide
cacccaucuaugucccagc

SEQ ID NO: 501345 - RNA, 19 nt, Artificial Sequence
  Description of Artificial Sequence: Synthetic oligonucleotide
uauguaccacgcuggcgaa

SEQ ID NO: 501346 - RNA, 19 nt, Artificial Sequence
  Description of Artificial Sequence: Synthetic oligonucleotide
ggcguacaaccugagagag

SEQ ID NO: 501347 - RNA, 19 nt, Artificial Sequence
  Description of Artificial Sequence: Synthetic oligonucleotide
gcaccugccaucuggcugc

SEQ ID NO: 501348 - RNA, 19 nt, Artificial Sequence
  Description of Artificial Sequence: Synthetic oligonucleotide
gguaaacuccaggugggcc

SEQ ID NO: 501349 - RNA, 19 nt, Artificial Sequence
  Description of Artificial Sequence: Synthetic oligonucleotide
cuccgcugaguccugcggc

SEQ ID NO: 501350 - RNA, 19 nt, Artificial Sequence
  Description of Artificial Sequence: Synthetic oligonucleotide
agggcugcgcaggaaggac

SEQ ID NO: 501351 - RNA, 19 nt, Artificial Sequence
  Description of Artificial Sequence: Synthetic oligonucleotide
aggccguucagcucaccca

SEQ ID NO: 501352 - RNA, 19 nt, Artificial Sequence
  Description of Artificial Sequence: Synthetic oligonucleotide
ucgugguuguggguaaacu

SEQ ID NO: 501353 - RNA, 19 nt, Artificial Sequence
  Description of Artificial Sequence: Synthetic oligonucleotide
caggcgggaauacacagaa

SEQ ID NO: 501354 - RNA, 19 nt, Artificial Sequence
  Description of Artificial Sequence: Synthetic oligonucleotide
ugcgucucugacuguccug

SEQ ID NO: 501355 - RNA, 19 nt, Artificial Sequence
  Description of Artificial Sequence: Synthetic oligonucleotide
agcgaggcagguacugaac

SEQ ID NO: 501356 - RNA, 19 nt, Artificial Sequence
  Description of Artificial Sequence: Synthetic oligonucleotide
gccgugaggaaccagugca

SEQ ID NO: 501357 - RNA, 19 nt, Artificial Sequence
  Description of Artificial Sequence: Synthetic oligonucleotide
ucacguccauuugugcgug

SEQ ID NO: 501358 - RNA, 19 nt, Artificial Sequence
  Description of Artificial Sequence: Synthetic oligonucleotide
augccugugcccuggcagu

SEQ ID NO: 501359 - RNA, 19 nt, Artificial Sequence
  Description of Artificial Sequence: Synthetic oligonucleotide
ggaagccuagcucaucauc

SEQ ID NO: 501360 - RNA, 19 nt, Artificial Sequence
  Description of Artificial Sequence: Synthetic oligonucleotide
ucucggaggucagcuacca

SEQ ID NO: 501361 - RNA, 19 nt, Artificial Sequence
  Description of Artificial Sequence: Synthetic oligonucleotide
cucaugccaugugggaugc

SEQ ID NO: 501362 - RNA, 19 nt, Artificial Sequence
  Description of Artificial Sequence: Synthetic oligonucleotide
gacaacucagaguucuuuu

SEQ ID NO: 501363 - RNA, 19 nt, Artificial Sequence
  Description of Artificial Sequence: Synthetic oligonucleotide
guguaccuuugccaggauc

SEQ ID NO: 501364 - RNA, 19 nt, Artificial Sequence
  Description of Artificial Sequence: Synthetic oligonucleotide
guccauuugugcgugugca

SEQ ID NO: 501365 - RNA, 19 nt, Artificial Sequence
  Description of Artificial Sequence: Synthetic oligonucleotide
gugaucagggacaacucaa

SEQ ID NO: 501366 - RNA, 19 nt, Artificial Sequence
  Description of Artificial Sequence: Synthetic oligonucleotide
gucuucgauaauggcacac

SEQ ID NO: 501367 - RNA, 19 nt, Artificial Sequence
  Description of Artificial Sequence: Synthetic oligonucleotide
gagcggaguuucucagagc

SEQ ID NO: 501368 - RNA, 19 nt, Artificial Sequence
  Description of Artificial Sequence: Synthetic oligonucleotide
ggagucaggacuuugccau

SEQ ID NO: 501369 - RNA, 19 nt, Artificial Sequence
  Description of Artificial Sequence: Synthetic oligonucleotide
ugacagcguguugaagaug

SEQ ID NO: 501370 - RNA, 19 nt, Artificial Sequence
  Description of Artificial Sequence: Synthetic oligonucleotide
agugcucguccuucugaga

SEQ ID NO: 501371 - RNA, 19 nt, Artificial Sequence
  Description of Artificial Sequence: Synthetic oligonucleotide
cucuaaggccguucagcuc

SEQ ID NO: 501372 - RNA, 19 nt, Artificial Sequence
  Description of Artificial Sequence: Synthetic oligonucleotide
acgcggagcucacacuuga

SEQ ID NO: 501373 - RNA, 19 nt, Artificial Sequence
  Description of Artificial Sequence: Synthetic oligonucleotide
agcagugcucguccuucug

SEQ ID NO: 501374 - RNA, 19 nt, Artificial Sequence
  Description of Artificial Sequence: Synthetic oligonucleotide
cgcaauagaguacucuuug

SEQ ID NO: 501375 - RNA, 19 nt, Artificial Sequence
  Description of Artificial Sequence: Synthetic oligonucleotide
caugccaugugggaugcca

SEQ ID NO: 501376 - RNA, 19 nt, Artificial Sequence
  Description of Artificial Sequence: Synthetic oligonucleotide
uggcugcguaagcaugcca

SEQ ID NO: 501377 - RNA, 19 nt, Artificial Sequence
  Description of Artificial Sequence: Synthetic oligonucleotide
cccuacaucgugguugugg

SEQ ID NO: 501378 - RNA, 19 nt, Artificial Sequence
  Description of Artificial Sequence: Synthetic oligonucleotide
gcgaaugccgugaggaacc

SEQ ID NO: 501379 - RNA, 19 nt, Artificial Sequence
  Description of Artificial Sequence: Synthetic oligonucleotide
cuagggagcggaguuucuc

SEQ ID NO: 501380 - RNA, 19 nt, Artificial Sequence
  Description of Artificial Sequence: Synthetic oligonucleotide
ccauuugugcgugugcagc

SEQ ID NO: 501381 - RNA, 19 nt, Artificial Sequence
  Description of Artificial Sequence: Synthetic oligonucleotide
caugccgcucaaaguccag

SEQ ID NO: 501382 - RNA, 19 nt, Artificial Sequence
  Description of Artificial Sequence: Synthetic oligonucleotide
auaagugagcggaguuuca

SEQ ID NO: 501383 - RNA, 19 nt, Artificial Sequence
  Description of Artificial Sequence: Synthetic oligonucleotide
cuaguccccagggucuggc

SEQ ID NO: 501384 - RNA, 19 nt, Artificial Sequence
  Description of Artificial Sequence: Synthetic oligonucleotide
cacuagggagcggaguuuc

SEQ ID NO: 501385 - RNA, 19 nt, Artificial Sequence
  Description of Artificial Sequence: Synthetic oligonucleotide
aggugcuugcggcguuggg

SEQ ID NO: 501386 - RNA, 19 nt, Artificial Sequence
  Description of Artificial Sequence: Synthetic oligonucleotide
ggacccgcuggucagucug

SEQ ID NO: 501387 - RNA, 19 nt, Artificial Sequence
  Description of Artificial Sequence: Synthetic oligonucleotide
cacgcuggcgaaugccgug

SEQ ID NO: 501388 - RNA, 19 nt, Artificial Sequence
  Description of Artificial Sequence: Synthetic oligonucleotide
ccuguaugucuuacagagc

SEQ ID NO: 501389 - RNA, 19 nt, Artificial Sequence
  Description of Artificial Sequence: Synthetic oligonucleotide
ggcugcguaagcaugccac

SEQ ID NO: 501390 - RNA, 19 nt, Artificial Sequence
  Description of Artificial Sequence: Synthetic oligonucleotide
gcugccuccucaauaaaca

SEQ ID NO: 501391 - RNA, 19 nt, Artificial Sequence
  Description of Artificial Sequence: Synthetic oligonucleotide
acguccauuugugcgugug

SEQ ID NO: 501392 - RNA, 19 nt, Artificial Sequence
  Description of Artificial Sequence: Synthetic oligonucleotide
gccucuaaggccguucagc

SEQ ID NO: 501393 - RNA, 19 nt, Artificial Sequence
  Description of Artificial Sequence: Synthetic oligonucleotide
ccaccguagccucuguggg

SEQ ID NO: 501394 - RNA, 19 nt, Artificial Sequence
  Description of Artificial Sequence: Synthetic oligonucleotide
cucggaggacucugcgcag

SEQ ID NO: 501395 - RNA, 19 nt, Artificial Sequence
  Description of Artificial Sequence: Synthetic oligonucleotide
uggcgaaugccgugaggaa

SEQ ID NO: 501396 - RNA, 19 nt, Artificial Sequence
  Description of Artificial Sequence: Synthetic oligonucleotide
ugaguccugcggcguacaa

SEQ ID NO: 501397 - RNA, 19 nt, Artificial Sequence
  Description of Artificial Sequence: Synthetic oligonucleotide
ggcagagagucccucgcac

SEQ ID NO: 501398 - RNA, 19 nt, Artificial Sequence
  Description of Artificial Sequence: Synthetic oligonucleotide
ugcgcagcagcagucugau

SEQ ID NO: 501399 - RNA, 19 nt, Artificial Sequence
  Description of Artificial Sequence: Synthetic oligonucleotide
cgauacagcaacucuucug

SEQ ID NO: 501400 - RNA, 19 nt, Artificial Sequence
  Description of Artificial Sequence: Synthetic oligonucleotide
aggacucugcgcaggcggg

SEQ ID NO: 501401 - RNA, 19 nt, Artificial Sequence
  Description of Artificial Sequence: Synthetic oligonucleotide
gaguccugcggcguacaac

SEQ ID NO: 501402 - RNA, 19 nt, Artificial Sequence
  Description of Artificial Sequence: Synthetic oligonucleotide
uacagagcaccaggcggga

SEQ ID NO: 501403 - RNA, 19 nt, Artificial Sequence
  Description of Artificial Sequence: Synthetic oligonucleotide
ggccguucagcucacccac

SEQ ID NO: 501404 - RNA, 19 nt, Artificial Sequence
  Description of Artificial Sequence: Synthetic oligonucleotide
gaaugccgugaggaaccag

SEQ ID NO: 501405 - RNA, 19 nt, Artificial Sequence
  Description of Artificial Sequence: Synthetic oligonucleotide
aucucacgguaggacaacu

SEQ ID NO: 501406 - RNA, 19 nt, Artificial Sequence
  Description of Artificial Sequence: Synthetic oligonucleotide
ggcugauaccacuucucca

SEQ ID NO: 501407 - RNA, 19 nt, Artificial Sequence
  Description of Artificial Sequence: Synthetic oligonucleotide
gacucugcgcaggcggggc

SEQ ID NO: 501408 - RNA, 19 nt, Artificial Sequence
  Description of Artificial Sequence: Synthetic oligonucleotide
uggggccauaugcuuggau

SEQ ID NO: 501409 - RNA, 19 nt, Artificial Sequence
  Description of Artificial Sequence: Synthetic oligonucleotide
ugaucgugaugaugucguu

SEQ ID NO: 501410 - RNA, 19 nt, Artificial Sequence
  Description of Artificial Sequence: Synthetic oligonucleotide
aggacgcggagcucacacu

SEQ ID NO: 501411 - RNA, 19 nt, Artificial Sequence
  Description of Artificial Sequence: Synthetic oligonucleotide
cagagagucccucgcacaa

SEQ ID NO: 501412 - RNA, 19 nt, Artificial Sequence
  Description of Artificial Sequence: Synthetic oligonucleotide
gugagcggaguuucacguc

SEQ ID NO: 501413 - RNA, 19 nt, Artificial Sequence
  Description of Artificial Sequence: Synthetic oligonucleotide
cuaaggccguucagcucac

SEQ ID NO: 501414 - RNA, 19 nt, Artificial Sequence
  Description of Artificial Sequence: Synthetic oligonucleotide
ggcgaaugccgugaggaac

SEQ ID NO: 501415 - RNA, 19 nt, Artificial Sequence
  Description of Artificial Sequence: Synthetic oligonucleotide
cgugguuguggguaaacuc

SEQ ID NO: 501416 - RNA, 19 nt, Artificial Sequence
  Description of Artificial Sequence: Synthetic oligonucleotide
acuaguccccagggucugg

SEQ ID NO: 501417 - RNA, 19 nt, Artificial Sequence
  Description of Artificial Sequence: Synthetic oligonucleotide
uugcuccguucauccagga

SEQ ID NO: 501418 - RNA, 19 nt, Artificial Sequence
  Description of Artificial Sequence: Synthetic oligonucleotide
gacgcggagcucacacuug

SEQ ID NO: 501419 - RNA, 19 nt, Artificial Sequence
  Description of Artificial Sequence: Synthetic oligonucleotide
cucggcauccuccaucugu

SEQ ID NO: 501420 - RNA, 19 nt, Artificial Sequence
  Description of Artificial Sequence: Synthetic oligonucleotide
ugccaucuggcugcaucca

SEQ ID NO: 501421 - RNA, 19 nt, Artificial Sequence
  Description of Artificial Sequence: Synthetic oligonucleotide
cuucgauaauggcacacau

SEQ ID NO: 501422 - RNA, 19 nt, Artificial Sequence
  Description of Artificial Sequence: Synthetic oligonucleotide
gucugacagcguguugaag

SEQ ID NO: 501423 - RNA, 19 nt, Artificial Sequence
  Description of Artificial Sequence: Synthetic oligonucleotide
ugcuugcggcguugggucu

SEQ ID NO: 501424 - RNA, 19 nt, Artificial Sequence
  Description of Artificial Sequence: Synthetic oligonucleotide
gccauaugcuuggauuugc

SEQ ID NO: 501425 - RNA, 19 nt, Artificial Sequence
  Description of Artificial Sequence: Synthetic oligonucleotide
augccgugaggaaccagug

SEQ ID NO: 501426 - RNA, 19 nt, Artificial Sequence
  Description of Artificial Sequence: Synthetic oligonucleotide
ccagauagccgcauccaca

SEQ ID NO: 501427 - RNA, 19 nt, Artificial Sequence
  Description of Artificial Sequence: Synthetic oligonucleotide
caaucuguuuggcagcaau

SEQ ID NO: 501428 - RNA, 19 nt, Artificial Sequence
  Description of Artificial Sequence: Synthetic oligonucleotide
agccaaucucuggguagag

SEQ ID NO: 501429 - RNA, 19 nt, Artificial Sequence
  Description of Artificial Sequence: Synthetic oligonucleotide
cucggaggucagcuaccag

SEQ ID NO: 501430 - RNA, 19 nt, Artificial Sequence
  Description of Artificial Sequence: Synthetic oligonucleotide
augcccagcguagucugga

SEQ ID NO: 501431 - RNA, 19 nt, Artificial Sequence
  Description of Artificial Sequence: Synthetic oligonucleotide
gagaaaugaucgugaugau

SEQ ID NO: 501432 - RNA, 19 nt, Artificial Sequence
  Description of Artificial Sequence: Synthetic oligonucleotide
caccaggcgggaauacaca

SEQ ID NO: 501433 - RNA, 19 nt, Artificial Sequence
  Description of Artificial Sequence: Synthetic oligonucleotide
cugcaacaguuuguccaag

SEQ ID NO: 501434 - RNA, 19 nt, Artificial Sequence
  Description of Artificial Sequence: Synthetic oligonucleotide
guaagauccccuacaucgu

SEQ ID NO: 501435 - RNA, 19 nt, Artificial Sequence
  Description of Artificial Sequence: Synthetic oligonucleotide
ggugcaccugccaucuggc

SEQ ID NO: 501436 - RNA, 19 nt, Artificial Sequence
  Description of Artificial Sequence: Synthetic oligonucleotide
gcgggaauacacagaauca

SEQ ID NO: 501437 - RNA, 19 nt, Artificial Sequence
  Description of Artificial Sequence: Synthetic oligonucleotide
gaccucccggccugcugcc

SEQ ID NO: 501438 - RNA, 19 nt, Artificial Sequence
  Description of Artificial Sequence: Synthetic oligonucleotide
ugcggcguugggucuccac

SEQ ID NO: 501439 - RNA, 19 nt, Artificial Sequence
  Description of Artificial Sequence: Synthetic oligonucleotide
gaucgugaugaugucguuu

SEQ ID NO: 501440 - RNA, 19 nt, Artificial Sequence
  Description of Artificial Sequence: Synthetic oligonucleotide
gcggagcucacacuugauc

SEQ ID NO: 501441 - RNA, 19 nt, Artificial Sequence
  Description of Artificial Sequence: Synthetic oligonucleotide
gcucacacuugaucuggac

SEQ ID NO: 501442 - RNA, 19 nt, Artificial Sequence
  Description of Artificial Sequence: Synthetic oligonucleotide
cagugcucggaggacucug

SEQ ID NO: 501443 - RNA, 19 nt, Artificial Sequence
  Description of Artificial Sequence: Synthetic oligonucleotide
cagcaugcccagcguaguc

SEQ ID NO: 501444 - RNA, 19 nt, Artificial Sequence
  Description of Artificial Sequence: Synthetic oligonucleotide
guggcugcguaagcaugcc

SEQ ID NO: 501445 - RNA, 19 nt, Artificial Sequence
  Description of Artificial Sequence: Synthetic oligonucleotide
ugugcgugugcagcaucau

SEQ ID NO: 501446 - RNA, 19 nt, Artificial Sequence
  Description of Artificial Sequence: Synthetic oligonucleotide
ugcccagcguagucuggaa

SEQ ID NO: 501447 - RNA, 19 nt, Artificial Sequence
  Description of Artificial Sequence: Synthetic oligonucleotide
cagaggacgcggagcucac

SEQ ID NO: 501448 - RNA, 19 nt, Artificial Sequence
  Description of Artificial Sequence: Synthetic oligonucleotide
caucuggcugcauccaggu

SEQ ID NO: 501449 - RNA, 19 nt, Artificial Sequence
  Description of Artificial Sequence: Synthetic oligonucleotide
cuugcggcguugggucucc

SEQ ID NO: 501450 - RNA, 19 nt, Artificial Sequence
  Description of Artificial Sequence: Synthetic oligonucleotide
ccgugaggaaccagugcag

SEQ ID NO: 501451 - RNA, 19 nt, Artificial Sequence
  Description of Artificial Sequence: Synthetic oligonucleotide
agguugguccacagacucu

SEQ ID NO: 501452 - RNA, 19 nt, Artificial Sequence
  Description of Artificial Sequence: Synthetic oligonucleotide
augcgcagcagcagucuga

SEQ ID NO: 501453 - RNA, 19 nt, Artificial Sequence
  Description of Artificial Sequence: Synthetic oligonucleotide
acgcuggcgaaugccguga

SEQ ID NO: 501454 - RNA, 19 nt, Artificial Sequence
  Description of Artificial Sequence: Synthetic oligonucleotide
cccagauagccgcauccac

SEQ ID NO: 501455 - RNA, 19 nt, Artificial Sequence
  Description of Artificial Sequence: Synthetic oligonucleotide
aaguggcgagccacacgca

SEQ ID NO: 501456 - RNA, 19 nt, Artificial Sequence
  Description of Artificial Sequence: Synthetic oligonucleotide
cagcguagucuggaacaac

SEQ ID NO: 501457 - RNA, 19 nt, Artificial Sequence
  Description of Artificial Sequence: Synthetic oligonucleotide
ccuuaaggcgcagcaugcc

SEQ ID NO: 501458 - RNA, 19 nt, Artificial Sequence
  Description of Artificial Sequence: Synthetic oligonucleotide
gcauguccugaacacccuc

SEQ ID NO: 501459 - RNA, 19 nt, Artificial Sequence
  Description of Artificial Sequence: Synthetic oligonucleotide
cagguaagauccccuacau

SEQ ID NO: 501460 - RNA, 19 nt, Artificial Sequence
  Description of Artificial Sequence: Synthetic oligonucleotide
cugcggcguacaaccugag

SEQ ID NO: 501461 - RNA, 19 nt, Artificial Sequence
  Description of Artificial Sequence: Synthetic oligonucleotide
cagauaagugagcggaguu

SEQ ID NO: 501462 - RNA, 19 nt, Artificial Sequence
  Description of Artificial Sequence: Synthetic oligonucleotide
gcguacaaccugagagagg

SEQ ID NO: 501463 - RNA, 19 nt, Artificial Sequence
  Description of Artificial Sequence: Synthetic oligonucleotide
cacaaggucugugacuccu

SEQ ID NO: 501464 - RNA, 19 nt, Artificial Sequence
  Description of Artificial Sequence: Synthetic oligonucleotide
cgcagcaugcccagcguag

SEQ ID NO: 501465 - RNA, 19 nt, Artificial Sequence
  Description of Artificial Sequence: Synthetic oligonucleotide
caucuaugucccagcugaa

SEQ ID NO: 501466 - RNA, 19 nt, Artificial Sequence
  Description of Artificial Sequence: Synthetic oligonucleotide
ugggugcaccugccaucug

SEQ ID NO: 501467 - RNA, 19 nt, Artificial Sequence
  Description of Artificial Sequence: Synthetic oligonucleotide
agagucccucgcacaaggu

SEQ ID NO: 501468 - RNA, 19 nt, Artificial Sequence
  Description of Artificial Sequence: Synthetic oligonucleotide
ggggauccuccaccauggg

SEQ ID NO: 501469 - RNA, 19 nt, Artificial Sequence
  Description of Artificial Sequence: Synthetic oligonucleotide
acagcccgauacagcaacu

SEQ ID NO: 501470 - RNA, 19 nt, Artificial Sequence
  Description of Artificial Sequence: Synthetic oligonucleotide
ggacggcuucuucagucca

SEQ ID NO: 501471 - RNA, 19 nt, Artificial Sequence
  Description of Artificial Sequence: Synthetic oligonucleotide
gcggcguugggucuccaca

SEQ ID NO: 501472 - RNA, 19 nt, Artificial Sequence
  Description of Artificial Sequence: Synthetic oligonucleotide
ccgcuggucagucuggaca

SEQ ID NO: 501473 - RNA, 19 nt, Artificial Sequence
  Description of Artificial Sequence: Synthetic oligonucleotide
gagcggaguuucacgucca

SEQ ID NO: 501474 - RNA, 19 nt, Artificial Sequence
  Description of Artificial Sequence: Synthetic oligonucleotide
gcggaguuucucagagcgg

SEQ ID NO: 501475 - RNA, 19 nt, Artificial Sequence
  Description of Artificial Sequence: Synthetic oligonucleotide
ccaaccuguaugucuuaca

SEQ ID NO: 501476 - RNA, 19 nt, Artificial Sequence
  Description of Artificial Sequence: Synthetic oligonucleotide
gccuuggucugcaaugaga

SEQ ID NO: 501477 - RNA, 19 nt, Artificial Sequence
  Description of Artificial Sequence: Synthetic oligonucleotide
ggucuucgauaauggcaca

SEQ ID NO: 501478 - RNA, 19 nt, Artificial Sequence
  Description of Artificial Sequence: Synthetic oligonucleotide
gcguagucuggaacaacac

SEQ ID NO: 501479 - RNA, 19 nt, Artificial Sequence
  Description of Artificial Sequence: Synthetic oligonucleotide
gauuugcgucucugacugu

SEQ ID NO: 501480 - RNA, 19 nt, Artificial Sequence
  Description of Artificial Sequence: Synthetic oligonucleotide
cagggcugauaccacuucu

SEQ ID NO: 501481 - RNA, 19 nt, Artificial Sequence
  Description of Artificial Sequence: Synthetic oligonucleotide
guccacacggaaaccaaau

SEQ ID NO: 501482 - RNA, 19 nt, Artificial Sequence
  Description of Artificial Sequence: Synthetic oligonucleotide
cguccauuugugcgugugc

SEQ ID NO: 501483 - RNA, 19 nt, Artificial Sequence
  Description of Artificial Sequence: Synthetic oligonucleotide
gggagacugcaaucuuguc

SEQ ID NO: 501484 - RNA, 19 nt, Artificial Sequence
  Description of Artificial Sequence: Synthetic oligonucleotide
ccucuaaggccguucagcu

SEQ ID NO: 501485 - RNA, 19 nt, Artificial Sequence
  Description of Artificial Sequence: Synthetic oligonucleotide
gaguacucuuugcuccguu

SEQ ID NO: 501486 - RNA, 19 nt, Artificial Sequence
  Description of Artificial Sequence: Synthetic oligonucleotide
auguaccacgcuggcgaau

SEQ ID NO: 501487 - RNA, 19 nt, Artificial Sequence
  Description of Artificial Sequence: Synthetic oligonucleotide
cgaccucccggccugcugc

SEQ ID NO: 501488 - RNA, 19 nt, Artificial Sequence
  Description of Artificial Sequence: Synthetic oligonucleotide
agaggacgcggagcucaca

SEQ ID NO: 501489 - RNA, 19 nt, Artificial Sequence
  Description of Artificial Sequence: Synthetic oligonucleotide
guggcgagccacacgcaaa

SEQ ID NO: 501490 - RNA, 19 nt, Artificial Sequence
  Description of Artificial Sequence: Synthetic oligonucleotide
gggauccuccaccaugggu

SEQ ID NO: 501491 - RNA, 19 nt, Artificial Sequence
  Description of Artificial Sequence: Synthetic oligonucleotide
gcuaccagcucugucugcu

SEQ ID NO: 501492 - RNA, 19 nt, Artificial Sequence
  Description of Artificial Sequence: Synthetic oligonucleotide
cuacaucgugguugugggu

SEQ ID NO: 501493 - RNA, 19 nt, Artificial Sequence
  Description of Artificial Sequence: Synthetic oligonucleotide
ucccucgcacaaggucugu

SEQ ID NO: 501494 - RNA, 19 nt, Artificial Sequence
  Description of Artificial Sequence: Synthetic oligonucleotide
ggacgcggagcucacacuu

SEQ ID NO: 501495 - RNA, 19 nt, Artificial Sequence
  Description of Artificial Sequence: Synthetic oligonucleotide
gcgcaggacccgcugguca

SEQ ID NO: 501496 - RNA, 19 nt, Artificial Sequence
  Description of Artificial Sequence: Synthetic oligonucleotide
gcugaguccugcggcguac

SEQ ID NO: 501497 - RNA, 19 nt, Artificial Sequence
  Description of Artificial Sequence: Synthetic oligonucleotide
cagggagcccucguagaaa

SEQ ID NO: 501498 - RNA, 19 nt, Artificial Sequence
  Description of Artificial Sequence: Synthetic oligonucleotide
aggccccuccaagcaagga

SEQ ID NO: 501499 - RNA, 19 nt, Artificial Sequence
  Description of Artificial Sequence: Synthetic oligonucleotide
gguguaguaccuguucauu

SEQ ID NO: 501500 - RNA, 19 nt, Artificial Sequence
  Description of Artificial Sequence: Synthetic oligonucleotide
gccgguggcugcguaagca

SEQ ID NO: 501501 - RNA, 19 nt, Artificial Sequence
  Description of Artificial Sequence: Synthetic oligonucleotide
cacagguguaguaccuguu

SEQ ID NO: 501502 - RNA, 19 nt, Artificial Sequence
  Description of Artificial Sequence: Synthetic oligonucleotide
cggcguacaaccugagaga

SEQ ID NO: 501503 - RNA, 19 nt, Artificial Sequence
  Description of Artificial Sequence: Synthetic oligonucleotide
cugaguccugcggcguaca

SEQ ID NO: 501504 - RNA, 19 nt, Artificial Sequence
  Description of Artificial Sequence: Synthetic oligonucleotide
gacggcuucuucaguccau

SEQ ID NO: 501505 - RNA, 19 nt, Artificial Sequence
  Description of Artificial Sequence: Synthetic oligonucleotide
gcaaugagauaggccaggu

SEQ ID NO: 501506 - RNA, 19 nt, Artificial Sequence
  Description of Artificial Sequence: Synthetic oligonucleotide
gcgccgguggcugcguaag

SEQ ID NO: 501507 - RNA, 19 nt, Artificial Sequence
  Description of Artificial Sequence: Synthetic oligonucleotide
cccgcaauagaguacucuu

SEQ ID NO: 501508 - RNA, 19 nt, Artificial Sequence
  Description of Artificial Sequence: Synthetic oligonucleotide
cgguggcugcguaagcaug

SEQ ID NO: 501509 - RNA, 19 nt, Artificial Sequence
  Description of Artificial Sequence: Synthetic oligonucleotide
cacacgcaaaauggcuucu

SEQ ID NO: 501510 - RNA, 19 nt, Artificial Sequence
  Description of Artificial Sequence: Synthetic oligonucleotide
cugcguaagcaugccacau

SEQ ID NO: 501511 - RNA, 19 nt, Artificial Sequence
  Description of Artificial Sequence: Synthetic oligonucleotide
aggcgggaauacacagaau

SEQ ID NO: 501512 - RNA, 19 nt, Artificial Sequence
  Description of Artificial Sequence: Synthetic oligonucleotide
ggacaacucagaguucuuu

SEQ ID NO: 501513 - RNA, 19 nt, Artificial Sequence
  Description of Artificial Sequence: Synthetic oligonucleotide
ggccugccaccguagccuc

SEQ ID NO: 501514 - RNA, 19 nt, Artificial Sequence
  Description of Artificial Sequence: Synthetic oligonucleotide
ccacagguguaguaccugu

SEQ ID NO: 501515 - RNA, 19 nt, Artificial Sequence
  Description of Artificial Sequence: Synthetic oligonucleotide
caucgugguuguggguaaa

SEQ ID NO: 501516 - RNA, 19 nt, Artificial Sequence
  Description of Artificial Sequence: Synthetic oligonucleotide
guagcucggcauccuccau

SEQ ID NO: 501517 - RNA, 19 nt, Artificial Sequence
  Description of Artificial Sequence: Synthetic oligonucleotide
gugcggagcagguccuuuu

SEQ ID NO: 501518 - RNA, 19 nt, Artificial Sequence
  Description of Artificial Sequence: Synthetic oligonucleotide
cccgcuggucagucuggac

SEQ ID NO: 501519 - RNA, 19 nt, Artificial Sequence
  Description of Artificial Sequence: Synthetic oligonucleotide
gccacacgcaaaauggcuu

SEQ ID NO: 501520 - RNA, 19 nt, Artificial Sequence
  Description of Artificial Sequence: Synthetic oligonucleotide
gcuugcggcguugggucuc

SEQ ID NO: 501521 - RNA, 19 nt, Artificial Sequence
  Description of Artificial Sequence: Synthetic oligonucleotide
cagcacuagggagcggagu

SEQ ID NO: 501522 - RNA, 19 nt, Artificial Sequence
  Description of Artificial Sequence: Synthetic oligonucleotide
ccagcguagucuggaacaa

SEQ ID NO: 501523 - RNA, 19 nt, Artificial Sequence
  Description of Artificial Sequence: Synthetic oligonucleotide
cccucgcacaaggucugug

SEQ ID NO: 501524 - RNA, 19 nt, Artificial Sequence
  Description of Artificial Sequence: Synthetic oligonucleotide
gccucaugccaugugggau

SEQ ID NO: 501525 - RNA, 19 nt, Artificial Sequence
  Description of Artificial Sequence: Synthetic oligonucleotide
ggcgccgguggcugcguaa

SEQ ID NO: 501526 - RNA, 19 nt, Artificial Sequence
  Description of Artificial Sequence: Synthetic oligonucleotide
uugcggcguugggucucca

SEQ ID NO: 501527 - RNA, 19 nt, Artificial Sequence
  Description of Artificial Sequence: Synthetic oligonucleotide
gcgcagcaugcccagcgua

SEQ ID NO: 501528 - RNA, 19 nt, Artificial Sequence
  Description of Artificial Sequence: Synthetic oligonucleotide
accagccucuaaggccguu

SEQ ID NO: 501529 - RNA, 19 nt, Artificial Sequence
  Description of Artificial Sequence: Synthetic oligonucleotide
ccgcaauagaguacucuuu

SEQ ID NO: 501530 - RNA, 19 nt, Artificial Sequence
  Description of Artificial Sequence: Synthetic oligonucleotide
ccaugccugugcccuggca

SEQ ID NO: 501531 - RNA, 19 nt, Artificial Sequence
  Description of Artificial Sequence: Synthetic oligonucleotide
ggacacccaguaagguggu

SEQ ID NO: 501532 - RNA, 19 nt, Artificial Sequence
  Description of Artificial Sequence: Synthetic oligonucleotide
guccugcggcguacaaccu

SEQ ID NO: 501533 - RNA, 19 nt, Artificial Sequence
  Description of Artificial Sequence: Synthetic oligonucleotide
guacaaccugagagagguu

SEQ ID NO: 501534 - RNA, 19 nt, Artificial Sequence
  Description of Artificial Sequence: Synthetic oligonucleotide
ccacgcuggcgaaugccgu

SEQ ID NO: 501535 - RNA, 19 nt, Artificial Sequence
  Description of Artificial Sequence: Synthetic oligonucleotide
ccccgcaauagaguacucu

SEQ ID NO: 501536 - RNA, 19 nt, Artificial Sequence
  Description of Artificial Sequence: Synthetic oligonucleotide
cgugaggaaccagugcagu

SEQ ID NO: 501537 - RNA, 19 nt, Artificial Sequence
  Description of Artificial Sequence: Synthetic oligonucleotide
ccgguggcugcguaagcau

SEQ ID NO: 501538 - RNA, 19 nt, Artificial Sequence
  Description of Artificial Sequence: Synthetic oligonucleotide
cugccaccguagccucugu

SEQ ID NO: 501539 - RNA, 19 nt, Artificial Sequence
  Description of Artificial Sequence: Synthetic oligonucleotide
cgaaugccgugaggaacca

SEQ ID NO: 501540 - RNA, 19 nt, Artificial Sequence
  Description of Artificial Sequence: Synthetic oligonucleotide
gcggaguuucacguccauu

SEQ ID NO: 501541 - RNA, 19 nt, Artificial Sequence
  Description of Artificial Sequence: Synthetic oligonucleotide
caggugggccugccaccgu

SEQ ID NO: 501542 - RNA, 19 nt, Artificial Sequence
  Description of Artificial Sequence: Synthetic oligonucleotide
cucgaccucccggccugcu

SEQ ID NO: 501543 - RNA, 19 nt, Artificial Sequence
  Description of Artificial Sequence: Synthetic oligonucleotide
ccccuacaucgugguugug

SEQ ID NO: 501544 - RNA, 19 nt, Artificial Sequence
  Description of Artificial Sequence: Synthetic oligonucleotide
cccggccugcugccuccuc

SEQ ID NO: 501545 - RNA, 19 nt, Artificial Sequence
  Description of Artificial Sequence: Synthetic oligonucleotide
ccagugcucggaggacucu

SEQ ID NO: 501546 - RNA, 19 nt, Artificial Sequence
  Description of Artificial Sequence: Synthetic oligonucleotide
cgcugaguccugcggcgua

SEQ ID NO: 501547 - RNA, 19 nt, Artificial Sequence
  Description of Artificial Sequence: Synthetic oligonucleotide
ccgcugaguccugcggcgu

SEQ ID NO: 501548 - RNA, 19 nt, Artificial Sequence
  Description of Artificial Sequence: Synthetic oligonucleotide
cgcggagcucacacuugau

SEQ ID NO: 501549 - RNA, 19 nt, Artificial Sequence
  Description of Artificial Sequence: Synthetic oligonucleotide
agcauuaugauguucaucc

SEQ ID NO: 501550 - RNA, 19 nt, Artificial Sequence
  Description of Artificial Sequence: Synthetic oligonucleotide
aacaauuggcccuaaaagg

SEQ ID NO: 501551 - RNA, 19 nt, Artificial Sequence
  Description of Artificial Sequence: Synthetic oligonucleotide
uauaaaguguccaggaugg

SEQ ID NO: 501552 - RNA, 19 nt, Artificial Sequence
  Description of Artificial Sequence: Synthetic oligonucleotide
aucuauguauaguugagcc

SEQ ID NO: 501553 - RNA, 19 nt, Artificial Sequence
  Description of Artificial Sequence: Synthetic oligonucleotide
cauaacaaggccaagaaug

SEQ ID NO: 501554 - RNA, 19 nt, Artificial Sequence
  Description of Artificial Sequence: Synthetic oligonucleotide
uauaguugagccuuuggcg

SEQ ID NO: 501555 - RNA, 19 nt, Artificial Sequence
  Description of Artificial Sequence: Synthetic oligonucleotide
uaaauaaaggcccauuaca

SEQ ID NO: 501556 - RNA, 19 nt, Artificial Sequence
  Description of Artificial Sequence: Synthetic oligonucleotide
aaauaaaggcccauuacac

SEQ ID NO: 501557 - RNA, 19 nt, Artificial Sequence
  Description of Artificial Sequence: Synthetic oligonucleotide
aaggaaguaaaacccuccc

SEQ ID NO: 501558 - RNA, 19 nt, Artificial Sequence
  Description of Artificial Sequence: Synthetic oligonucleotide
acuugaaucucacagacug

SEQ ID NO: 501559 - RNA, 19 nt, Artificial Sequence
  Description of Artificial Sequence: Synthetic oligonucleotide
ucuaguacuggaaccaccg

SEQ ID NO: 501560 - RNA, 19 nt, Artificial Sequence
  Description of Artificial Sequence: Synthetic oligonucleotide
aaggagaucacaguacagc

SEQ ID NO: 501561 - RNA, 19 nt, Artificial Sequence
  Description of Artificial Sequence: Synthetic oligonucleotide
aaagaaagucgggauaacc

SEQ ID NO: 501562 - RNA, 19 nt, Artificial Sequence
  Description of Artificial Sequence: Synthetic oligonucleotide
cuuaguucagacauuuugg

SEQ ID NO: 501563 - RNA, 19 nt, Artificial Sequence
  Description of Artificial Sequence: Synthetic oligonucleotide
ucucaccuaacacagauug

SEQ ID NO: 501564 - RNA, 19 nt, Artificial Sequence
  Description of Artificial Sequence: Synthetic oligonucleotide
agcacuaucuucuggaggg

SEQ ID NO: 501565 - RNA, 19 nt, Artificial Sequence
  Description of Artificial Sequence: Synthetic oligonucleotide
uuuucacucaacaauuggc

SEQ ID NO: 501566 - RNA, 19 nt, Artificial Sequence
  Description of Artificial Sequence: Synthetic oligonucleotide
uuuaucuacuugcugaaca

SEQ ID NO: 501567 - RNA, 19 nt, Artificial Sequence
  Description of Artificial Sequence: Synthetic oligonucleotide
  modified_base (3)..(3): a, c, u, g, unknown or other
canaaagaaggaaccaucg

SEQ ID NO: 501568 - RNA, 19 nt, Artificial Sequence
  Description of Artificial Sequence: Synthetic oligonucleotide
aaaaccuugcaauugcaga

SEQ ID NO: 501569 - RNA, 19 nt, Artificial Sequence
  Description of Artificial Sequence: Synthetic oligonucleotide
aaucuauguauaguugagc

SEQ ID NO: 501570 - RNA, 19 nt, Artificial Sequence
  Description of Artificial Sequence: Synthetic oligonucleotide
agcuacaucagccuccacc

SEQ ID NO: 501571 - RNA, 19 nt, Artificial Sequence
  Description of Artificial Sequence: Synthetic oligonucleotide
uuucacucaacaauuggcc

SEQ ID NO: 501572 - RNA, 19 nt, Artificial Sequence
  Description of Artificial Sequence: Synthetic oligonucleotide
uuaaguagaaauacuguuc

SEQ ID NO: 501573 - RNA, 19 nt, Artificial Sequence
  Description of Artificial Sequence: Synthetic oligonucleotide
cuacagacauucaugaggg

SEQ ID NO: 501574 - RNA, 19 nt, Artificial Sequence
  Description of Artificial Sequence: Synthetic oligonucleotide
acaauuggcccuaaaaggc

SEQ ID NO: 501575 - RNA, 19 nt, Artificial Sequence
  Description of Artificial Sequence: Synthetic oligonucleotide
guaaacucuuccuuguugg

SEQ ID NO: 501576 - RNA, 19 nt, Artificial Sequence
  Description of Artificial Sequence: Synthetic oligonucleotide
agaauaaauuucucugaac

SEQ ID NO: 501577 - RNA, 19 nt, Artificial Sequence
  Description of Artificial Sequence: Synthetic oligonucleotide
cagaauaacaacuuggaca

SEQ ID NO: 501578 - RNA, 19 nt, Artificial Sequence
  Description of Artificial Sequence: Synthetic oligonucleotide
aauaguggcauuugagaga

SEQ ID NO: 501579 - RNA, 19 nt, Artificial Sequence
  Description of Artificial Sequence: Synthetic oligonucleotide
gagagaucaaugcaugcgg

SEQ ID NO: 501580 - RNA, 19 nt, Artificial Sequence
  Description of Artificial Sequence: Synthetic oligonucleotide
aacucaacacguuagcaga

SEQ ID NO: 501581 - RNA, 19 nt, Artificial Sequence
  Description of Artificial Sequence: Synthetic oligonucleotide
uggcacuaaagaaagucgg

SEQ ID NO: 501582 - RNA, 19 nt, Artificial Sequence
  Description of Artificial Sequence: Synthetic oligonucleotide
uguaggaccaaguuugucu

SEQ ID NO: 501583 - RNA, 19 nt, Artificial Sequence
  Description of Artificial Sequence: Synthetic oligonucleotide
ucauauaaaguguccagga

SEQ ID NO: 501584 - RNA, 19 nt, Artificial Sequence
  Description of Artificial Sequence: Synthetic oligonucleotide
agaaucuauguauaguuga

SEQ ID NO: 501585 - RNA, 19 nt, Artificial Sequence
  Description of Artificial Sequence: Synthetic oligonucleotide
aauuugagaccucucuuca

SEQ ID NO: 501586 - RNA, 19 nt, Artificial Sequence
  Description of Artificial Sequence: Synthetic oligonucleotide
ucuuuuacgguuagugcag

SEQ ID NO: 501587 - RNA, 19 nt, Artificial Sequence
  Description of Artificial Sequence: Synthetic oligonucleotide
  modified_base (2)..(2): a, c, u, g, unknown or other
anaaagaaggaaccaucga

SEQ ID NO: 501588 - RNA, 19 nt, Artificial Sequence
  Description of Artificial Sequence: Synthetic oligonucleotide
ugcaaaacuacagacauuc

SEQ ID NO: 501589 - RNA, 19 nt, Artificial Sequence
  Description of Artificial Sequence: Synthetic oligonucleotide
uucaguaucucaccugucc

SEQ ID NO: 501590 - RNA, 19 nt, Artificial Sequence
  Description of Artificial Sequence: Synthetic oligonucleotide
acagaauaacaacuuggac

SEQ ID NO: 501591 - RNA, 19 nt, Artificial Sequence
  Description of Artificial Sequence: Synthetic oligonucleotide
acguuagcagacuuuauuc

SEQ ID NO: 501592 - RNA, 19 nt, Artificial Sequence
  Description of Artificial Sequence: Synthetic oligonucleotide
uuugucuaguacuggaacc

SEQ ID NO: 501593 - RNA, 19 nt, Artificial Sequence
  Description of Artificial Sequence: Synthetic oligonucleotide
agaaagucgggauaaccuc

SEQ ID NO: 501594 - RNA, 19 nt, Artificial Sequence
  Description of Artificial Sequence: Synthetic oligonucleotide
caacaauuggcccuaaaag

SEQ ID NO: 501595 - RNA, 19 nt, Artificial Sequence
  Description of Artificial Sequence: Synthetic oligonucleotide
agaauaguggcauuugaga

SEQ ID NO: 501596 - RNA, 19 nt, Artificial Sequence
  Description of Artificial Sequence: Synthetic oligonucleotide
uguauaguugagccuuugg

SEQ ID NO: 501597 - RNA, 19 nt, Artificial Sequence
  Description of Artificial Sequence: Synthetic oligonucleotide
ugagagaucaaugcaugcg

SEQ ID NO: 501598 - RNA, 19 nt, Artificial Sequence
  Description of Artificial Sequence: Synthetic oligonucleotide
ucuaaauaaaggcccauua

SEQ ID NO: 501599 - RNA, 19 nt, Artificial Sequence
  Description of Artificial Sequence: Synthetic oligonucleotide
auaacaaggccaagaaugc

SEQ ID NO: 501600 - RNA, 19 nt, Artificial Sequence
  Description of Artificial Sequence: Synthetic oligonucleotide
auacaugggguucugugcg

SEQ ID NO: 501601 - RNA, 19 nt, Artificial Sequence
  Description of Artificial Sequence: Synthetic oligonucleotide
ugucccauuaucaucugug

SEQ ID NO: 501602 - RNA, 19 nt, Artificial Sequence
  Description of Artificial Sequence: Synthetic oligonucleotide
ucaacaauuggcccuaaaa

SEQ ID NO: 501603 - RNA, 19 nt, Artificial Sequence
  Description of Artificial Sequence: Synthetic oligonucleotide
aacaaggagaucacaguac

SEQ ID NO: 501604 - RNA, 19 nt, Artificial Sequence
  Description of Artificial Sequence: Synthetic oligonucleotide
aaugacauucuagugaaau

SEQ ID NO: 501605 - RNA, 19 nt, Artificial Sequence
  Description of Artificial Sequence: Synthetic oligonucleotide
uagugaaaucucaugacac

SEQ ID NO: 501606 - RNA, 19 nt, Artificial Sequence
  Description of Artificial Sequence: Synthetic oligonucleotide
uuggaguuuaacuuguuuc

SEQ ID NO: 501607 - RNA, 19 nt, Artificial Sequence
  Description of Artificial Sequence: Synthetic oligonucleotide
aggaaguaaaacccucccc

SEQ ID NO: 501608 - RNA, 19 nt, Artificial Sequence
  Description of Artificial Sequence: Synthetic oligonucleotide
acagccuuaguucagacau

SEQ ID NO: 501609 - RNA, 19 nt, Artificial Sequence
  Description of Artificial Sequence: Synthetic oligonucleotide
uguuuguucuucauagaga

SEQ ID NO: 501610 - RNA, 19 nt, Artificial Sequence
  Description of Artificial Sequence: Synthetic oligonucleotide
aaccccucgaacuacccag

SEQ ID NO: 501611 - RNA, 19 nt, Artificial Sequence
  Description of Artificial Sequence: Synthetic oligonucleotide
guauaguugagccuuuggc

SEQ ID NO: 501612 - RNA, 19 nt, Artificial Sequence
  Description of Artificial Sequence: Synthetic oligonucleotide
ucguugucuuuccagacag

SEQ ID NO: 501613 - RNA, 19 nt, Artificial Sequence
  Description of Artificial Sequence: Synthetic oligonucleotide
cuaaauaaaggcccauuac

SEQ ID NO: 501614 - RNA, 19 nt, Artificial Sequence
  Description of Artificial Sequence: Synthetic oligonucleotide
aaugcaugcgggcaacuca

SEQ ID NO: 501615 - RNA, 19 nt, Artificial Sequence
  Description of Artificial Sequence: Synthetic oligonucleotide
uucugugcggaugagauca

SEQ ID NO: 501616 - RNA, 19 nt, Artificial Sequence
  Description of Artificial Sequence: Synthetic oligonucleotide
ucuagugaaaucucaugac

SEQ ID NO: 501617 - RNA, 19 nt, Artificial Sequence
  Description of Artificial Sequence: Synthetic oligonucleotide
accaaguuugucuaguacu

SEQ ID NO: 501618 - RNA, 19 nt, Artificial Sequence
  Description of Artificial Sequence: Synthetic oligonucleotide
auaguugagccuuuggcgu

SEQ ID NO: 501619 - RNA, 19 nt, Artificial Sequence
  Description of Artificial Sequence: Synthetic oligonucleotide
uucaaauacaaggaacucu

SEQ ID NO: 501620 - RNA, 19 nt, Artificial Sequence
  Description of Artificial Sequence: Synthetic oligonucleotide
aagaaagucgggauaaccu

SEQ ID NO: 501621 - RNA, 19 nt, Artificial Sequence
  Description of Artificial Sequence: Synthetic oligonucleotide
ugcagaacuaaacauuaau

SEQ ID NO: 501622 - RNA, 19 nt, Artificial Sequence
  Description of Artificial Sequence: Synthetic oligonucleotide
cauuacacuaagcagccac

SEQ ID NO: 501623 - RNA, 19 nt, Artificial Sequence
  Description of Artificial Sequence: Synthetic oligonucleotide
ugaaaucucaugacacaug

SEQ ID NO: 501624 - RNA, 19 nt, Artificial Sequence
  Description of Artificial Sequence: Synthetic oligonucleotide
aguuccuaaccugagcuac

SEQ ID NO: 501625 - RNA, 19 nt, Artificial Sequence
  Description of Artificial Sequence: Synthetic oligonucleotide
ucacacauuacccguguca

SEQ ID NO: 501626 - RNA, 19 nt, Artificial Sequence
  Description of Artificial Sequence: Synthetic oligonucleotide
cuucauagagacaccacac

SEQ ID NO: 501627 - RNA, 19 nt, Artificial Sequence
  Description of Artificial Sequence: Synthetic oligonucleotide
uuccccagggauuaucagg

SEQ ID NO: 501628 - RNA, 19 nt, Artificial Sequence
  Description of Artificial Sequence: Synthetic oligonucleotide
gggauuaucagguccaugc

SEQ ID NO: 501629 - RNA, 19 nt, Artificial Sequence
  Description of Artificial Sequence: Synthetic oligonucleotide
uucacucaacaauuggccc

SEQ ID NO: 501630 - RNA, 19 nt, Artificial Sequence
  Description of Artificial Sequence: Synthetic oligonucleotide
gaaucuauguauaguugag

SEQ ID NO: 501631 - RNA, 19 nt, Artificial Sequence
  Description of Artificial Sequence: Synthetic oligonucleotide
uuauguacuucugauuuac

SEQ ID NO: 501632 - RNA, 19 nt, Artificial Sequence
  Description of Artificial Sequence: Synthetic oligonucleotide
ucuauguauaguugagccu

SEQ ID NO: 501633 - RNA, 19 nt, Artificial Sequence
  Description of Artificial Sequence: Synthetic oligonucleotide
cagaauaguggcauuugag

SEQ ID NO: 501634 - RNA, 19 nt, Artificial Sequence
  Description of Artificial Sequence: Synthetic oligonucleotide
ugcaaucuacuucugugga

SEQ ID NO: 501635 - RNA, 19 nt, Artificial Sequence
  Description of Artificial Sequence: Synthetic oligonucleotide
ugccguaugcguuauucag

SEQ ID NO: 501636 - RNA, 19 nt, Artificial Sequence
  Description of Artificial Sequence: Synthetic oligonucleotide
acgacugcagaacuaaaca

SEQ ID NO: 501637 - RNA, 19 nt, Artificial Sequence
  Description of Artificial Sequence: Synthetic oligonucleotide
auuaucagguccaugcgag

SEQ ID NO: 501638 - RNA, 19 nt, Artificial Sequence
  Description of Artificial Sequence: Synthetic oligonucleotide
ugccgaaugacauucuagu

SEQ ID NO: 501639 - RNA, 19 nt, Artificial Sequence
  Description of Artificial Sequence: Synthetic oligonucleotide
agucgggauaaccucuucg

SEQ ID NO: 501640 - RNA, 19 nt, Artificial Sequence
  Description of Artificial Sequence: Synthetic oligonucleotide
ugucaggcaggccuuagca

SEQ ID NO: 501641 - RNA, 19 nt, Artificial Sequence
  Description of Artificial Sequence: Synthetic oligonucleotide
acauucaugaggguacgac

SEQ ID NO: 501642 - RNA, 19 nt, Artificial Sequence
  Description of Artificial Sequence: Synthetic oligonucleotide
aggcccauuacacuaagca

SEQ ID NO: 501643 - RNA, 19 nt, Artificial Sequence
  Description of Artificial Sequence: Synthetic oligonucleotide
agacccuagggccaccagc

SEQ ID NO: 501644 - RNA, 19 nt, Artificial Sequence
  Description of Artificial Sequence: Synthetic oligonucleotide
guaauguuuugccguaugc

SEQ ID NO: 501645 - RNA, 19 nt, Artificial Sequence
  Description of Artificial Sequence: Synthetic oligonucleotide
auacugagagacaagaggu

SEQ ID NO: 501646 - RNA, 19 nt, Artificial Sequence
  Description of Artificial Sequence: Synthetic oligonucleotide
uuacacuaagcagccacgg

SEQ ID NO: 501647 - RNA, 19 nt, Artificial Sequence
  Description of Artificial Sequence: Synthetic oligonucleotide
uacgacugcagaacuaaac

SEQ ID NO: 501648 - RNA, 19 nt, Artificial Sequence
  Description of Artificial Sequence: Synthetic oligonucleotide
gguaguaaacucuuccuug

SEQ ID NO: 501649 - RNA, 19 nt, Artificial Sequence
  Description of Artificial Sequence: Synthetic oligonucleotide
ucacucaacaauuggcccu

SEQ ID NO: 501650 - RNA, 19 nt, Artificial Sequence
  Description of Artificial Sequence: Synthetic oligonucleotide
uuucacaggugcaaacacu

SEQ ID NO: 501651 - RNA, 19 nt, Artificial Sequence
  Description of Artificial Sequence: Synthetic oligonucleotide
uuucacaacuguucaacuc

SEQ ID NO: 501652 - RNA, 19 nt, Artificial Sequence
  Description of Artificial Sequence: Synthetic oligonucleotide
ucguaauaggacaguauuc

SEQ ID NO: 501653 - RNA, 19 nt, Artificial Sequence
  Description of Artificial Sequence: Synthetic oligonucleotide
guaauaggacaguauuccc

SEQ ID NO: 501654 - RNA, 19 nt, Artificial Sequence
  Description of Artificial Sequence: Synthetic oligonucleotide
acaagaauucugaaaaccu

SEQ ID NO: 501655 - RNA, 19 nt, Artificial Sequence
  Description of Artificial Sequence: Synthetic oligonucleotide
uuacgguuagugcagccac

SEQ ID NO: 501656 - RNA, 19 nt, Artificial Sequence
  Description of Artificial Sequence: Synthetic oligonucleotide
gagaaucguaauaggacag

SEQ ID NO: 501657 - RNA, 19 nt, Artificial Sequence
  Description of Artificial Sequence: Synthetic oligonucleotide
gauuaucagguccaugcga

SEQ ID NO: 501658 - RNA, 19 nt, Artificial Sequence
  Description of Artificial Sequence: Synthetic oligonucleotide
ucaccuaacacagauuguc

SEQ ID NO: 501659 - RNA, 19 nt, Artificial Sequence
  Description of Artificial Sequence: Synthetic oligonucleotide
guggucaccuucuuuuacg

SEQ ID NO: 501660 - RNA, 19 nt, Artificial Sequence
  Description of Artificial Sequence: Synthetic oligonucleotide
uaugcguuauucagugcug

SEQ ID NO: 501661 - RNA, 19 nt, Artificial Sequence
  Description of Artificial Sequence: Synthetic oligonucleotide
acuaaagaaagucgggaua

SEQ ID NO: 501662 - RNA, 19 nt, Artificial Sequence
  Description of Artificial Sequence: Synthetic oligonucleotide
gcauuugagagaucaaugc

SEQ ID NO: 501663 - RNA, 19 nt, Artificial Sequence
  Description of Artificial Sequence: Synthetic oligonucleotide
uugagagaucaaugcaugc

SEQ ID NO: 501664 - RNA, 19 nt, Artificial Sequence
  Description of Artificial Sequence: Synthetic oligonucleotide
augcgggcaacucaacacg

SEQ ID NO: 501665 - RNA, 19 nt, Artificial Sequence
  Description of Artificial Sequence: Synthetic oligonucleotide
gaaccaccgcauaacaagg

SEQ ID NO: 501666 - RNA, 19 nt, Artificial Sequence
  Description of Artificial Sequence: Synthetic oligonucleotide
cagccaauuucacaugagg

SEQ ID NO: 501667 - RNA, 19 nt, Artificial Sequence
  Description of Artificial Sequence: Synthetic oligonucleotide
aaaaccccucgaacuaccc

SEQ ID NO: 501668 - RNA, 19 nt, Artificial Sequence
  Description of Artificial Sequence: Synthetic oligonucleotide
augcuagguugauggaacc

SEQ ID NO: 501669 - RNA, 19 nt, Artificial Sequence
  Description of Artificial Sequence: Synthetic oligonucleotide
ugugggaaugccacugucu

SEQ ID NO: 501670 - RNA, 19 nt, Artificial Sequence
  Description of Artificial Sequence: Synthetic oligonucleotide
ucacuugacaugcugcaau

SEQ ID NO: 501671 - RNA, 19 nt, Artificial Sequence
  Description of Artificial Sequence: Synthetic oligonucleotide
uccuaucagcauuaugaug

SEQ ID NO: 501672 - RNA, 19 nt, Artificial Sequence
  Description of Artificial Sequence: Synthetic oligonucleotide
gagaucaaugcaugcgggc

SEQ ID NO: 501673 - RNA, 19 nt, Artificial Sequence
  Description of Artificial Sequence: Synthetic oligonucleotide
cuagugaaaucucaugaca

SEQ ID NO: 501674 - RNA, 19 nt, Artificial Sequence
  Description of Artificial Sequence: Synthetic oligonucleotide
guccaugcgaguguuaucc

SEQ ID NO: 501675 - RNA, 19 nt, Artificial Sequence
  Description of Artificial Sequence: Synthetic oligonucleotide
ucgaacuacccagccaugg

SEQ ID NO: 501676 - RNA, 19 nt, Artificial Sequence
  Description of Artificial Sequence: Synthetic oligonucleotide
cuaaccugagcuacaucag

SEQ ID NO: 501677 - RNA, 19 nt, Artificial Sequence
  Description of Artificial Sequence: Synthetic oligonucleotide
auuacacuaagcagccacg

SEQ ID NO: 501678 - RNA, 19 nt, Artificial Sequence
  Description of Artificial Sequence: Synthetic oligonucleotide
ugccguaauguuuugccgu

SEQ ID NO: 501679 - RNA, 19 nt, Artificial Sequence
  Description of Artificial Sequence: Synthetic oligonucleotide
aaccaccgcauaacaaggc

SEQ ID NO: 501680 - RNA, 19 nt, Artificial Sequence
  Description of Artificial Sequence: Synthetic oligonucleotide
uuuacgguuagugcagcca

SEQ ID NO: 501681 - RNA, 19 nt, Artificial Sequence
  Description of Artificial Sequence: Synthetic oligonucleotide
cuacuaucugucaggcagg

SEQ ID NO: 501682 - RNA, 19 nt, Artificial Sequence
  Description of Artificial Sequence: Synthetic oligonucleotide
caugcgggcaacucaacac

SEQ ID NO: 501683 - RNA, 19 nt, Artificial Sequence
  Description of Artificial Sequence: Synthetic oligonucleotide
aacacguuagcagacuuua

SEQ ID NO: 501684 - RNA, 19 nt, Artificial Sequence
  Description of Artificial Sequence: Synthetic oligonucleotide
accuaacacagauugucca

SEQ ID NO: 501685 - RNA, 19 nt, Artificial Sequence
  Description of Artificial Sequence: Synthetic oligonucleotide
acccgugucaugaagcugg

SEQ ID NO: 501686 - RNA, 19 nt, Artificial Sequence
  Description of Artificial Sequence: Synthetic oligonucleotide
ggagaaucguaauaggaca

SEQ ID NO: 501687 - RNA, 19 nt, Artificial Sequence
  Description of Artificial Sequence: Synthetic oligonucleotide
uuuuacgguuagugcagcc

SEQ ID NO: 501688 - RNA, 19 nt, Artificial Sequence
  Description of Artificial Sequence: Synthetic oligonucleotide
caccuaacacagauugucc

SEQ ID NO: 501689 - RNA, 19 nt, Artificial Sequence
  Description of Artificial Sequence: Synthetic oligonucleotide
auaagauggugcugcccuc

SEQ ID NO: 501690 - RNA, 19 nt, Artificial Sequence
  Description of Artificial Sequence: Synthetic oligonucleotide
uguagcugucacaccaccu

SEQ ID NO: 501691 - RNA, 19 nt, Artificial Sequence
  Description of Artificial Sequence: Synthetic oligonucleotide
gagaccucucuucagccac

SEQ ID NO: 501692 - RNA, 19 nt, Artificial Sequence
  Description of Artificial Sequence: Synthetic oligonucleotide
agagaucaaugcaugcggg

SEQ ID NO: 501693 - RNA, 19 nt, Artificial Sequence
  Description of Artificial Sequence: Synthetic oligonucleotide
aaaccccucgaacuaccca

SEQ ID NO: 501694 - RNA, 19 nt, Artificial Sequence
  Description of Artificial Sequence: Synthetic oligonucleotide
agagacaagaggugacaca

SEQ ID NO: 501695 - RNA, 19 nt, Artificial Sequence
  Description of Artificial Sequence: Synthetic oligonucleotide
uaaaggcccauuacacuaa

SEQ ID NO: 501696 - RNA, 19 nt, Artificial Sequence
  Description of Artificial Sequence: Synthetic oligonucleotide
gaccaaguuugucuaguac

SEQ ID NO: 501697 - RNA, 19 nt, Artificial Sequence
  Description of Artificial Sequence: Synthetic oligonucleotide
acagauuguccacagccaa

SEQ ID NO: 501698 - RNA, 19 nt, Artificial Sequence
  Description of Artificial Sequence: Synthetic oligonucleotide
guuuuccucacuugacaug

SEQ ID NO: 501699 - RNA, 19 nt, Artificial Sequence
  Description of Artificial Sequence: Synthetic oligonucleotide
ugaggguacgacugcagaa

SEQ ID NO: 501700 - RNA, 19 nt, Artificial Sequence
  Description of Artificial Sequence: Synthetic oligonucleotide
aaucguaauaggacaguau

SEQ ID NO: 501701 - RNA, 19 nt, Artificial Sequence
  Description of Artificial Sequence: Synthetic oligonucleotide
aagucgggauaaccucuuc

SEQ ID NO: 501702 - RNA, 19 nt, Artificial Sequence
  Description of Artificial Sequence: Synthetic oligonucleotide
ucaugauuccccagguuuu

SEQ ID NO: 501703 - RNA, 19 nt, Artificial Sequence
  Description of Artificial Sequence: Synthetic oligonucleotide
guaugcguuauucagugcu

SEQ ID NO: 501704 - RNA, 19 nt, Artificial Sequence
  Description of Artificial Sequence: Synthetic oligonucleotide
caggagaaucguaauagga

SEQ ID NO: 501705 - RNA, 19 nt, Artificial Sequence
  Description of Artificial Sequence: Synthetic oligonucleotide
ggauuaucagguccaugcg

SEQ ID NO: 501706 - RNA, 19 nt, Artificial Sequence
  Description of Artificial Sequence: Synthetic oligonucleotide
agaucaaugcaugcgggca

SEQ ID NO: 501707 - RNA, 19 nt, Artificial Sequence
  Description of Artificial Sequence: Synthetic oligonucleotide
augcgaguguuauccacag

SEQ ID NO: 501708 - RNA, 19 nt, Artificial Sequence
  Description of Artificial Sequence: Synthetic oligonucleotide
  modified_base (4)..(4): a, c, u, g, unknown or other
ccanaaagaaggaaccauc

SEQ ID NO: 501709 - RNA, 19 nt, Artificial Sequence
  Description of Artificial Sequence: Synthetic oligonucleotide
cugccgaaugacauucuag

SEQ ID NO: 501710 - RNA, 19 nt, Artificial Sequence
  Description of Artificial Sequence: Synthetic oligonucleotide
aacuacccagccauggugu

SEQ ID NO: 501711 - RNA, 19 nt, Artificial Sequence
  Description of Artificial Sequence: Synthetic oligonucleotide
ccaauuucacaugagguag

SEQ ID NO: 501712 - RNA, 19 nt, Artificial Sequence
  Description of Artificial Sequence: Synthetic oligonucleotide
gaaccaucgagcugccaac

SEQ ID NO: 501713 - RNA, 19 nt, Artificial Sequence
  Description of Artificial Sequence: Synthetic oligonucleotide
caaguuugucuaguacugg

SEQ ID NO: 501714 - RNA, 19 nt, Artificial Sequence
  Description of Artificial Sequence: Synthetic oligonucleotide
cuucguugucuuuccagac

SEQ ID NO: 501715 - RNA, 19 nt, Artificial Sequence
  Description of Artificial Sequence: Synthetic oligonucleotide
ucaacacguuagcagacuu

SEQ ID NO: 501716 - RNA, 19 nt, Artificial Sequence
  Description of Artificial Sequence: Synthetic oligonucleotide
uacacuaagcagccacggu

SEQ ID NO: 501717 - RNA, 19 nt, Artificial Sequence
  Description of Artificial Sequence: Synthetic oligonucleotide
agccaauuucacaugaggu

SEQ ID NO: 501718 - RNA, 19 nt, Artificial Sequence
  Description of Artificial Sequence: Synthetic oligonucleotide
ugcagaauaguggcauuug

SEQ ID NO: 501719 - RNA, 19 nt, Artificial Sequence
  Description of Artificial Sequence: Synthetic oligonucleotide
cagcacuaucuucuggagg

SEQ ID NO: 501720 - RNA, 19 nt, Artificial Sequence
  Description of Artificial Sequence: Synthetic oligonucleotide
ccguggaucucauauaaag

SEQ ID NO: 501721 - RNA, 19 nt, Artificial Sequence
  Description of Artificial Sequence: Synthetic oligonucleotide
aauuucacaugagguaguu

SEQ ID NO: 501722 - RNA, 19 nt, Artificial Sequence
  Description of Artificial Sequence: Synthetic oligonucleotide
gacccuagggccaccagcc

SEQ ID NO: 501723 - RNA, 19 nt, Artificial Sequence
  Description of Artificial Sequence: Synthetic oligonucleotide
cguaauaggacaguauucc

SEQ ID NO: 501724 - RNA, 19 nt, Artificial Sequence
  Description of Artificial Sequence: Synthetic oligonucleotide
cauuacccgugucaugaag

SEQ ID NO: 501725 - RNA, 19 nt, Artificial Sequence
  Description of Artificial Sequence: Synthetic oligonucleotide
cacauuacccgugucauga

SEQ ID NO: 501726 - RNA, 19 nt, Artificial Sequence
  Description of Artificial Sequence: Synthetic oligonucleotide
uagcagacuuuauucccug

SEQ ID NO: 501727 - RNA, 19 nt, Artificial Sequence
  Description of Artificial Sequence: Synthetic oligonucleotide
uuuuaucuacuugcugaac

SEQ ID NO: 501728 - RNA, 19 nt, Artificial Sequence
  Description of Artificial Sequence: Synthetic oligonucleotide
aucaaugcaugcgggcaac

SEQ ID NO: 501729 - RNA, 19 nt, Artificial Sequence
  Description of Artificial Sequence: Synthetic oligonucleotide
guaguugggcugccgaaug

SEQ ID NO: 501730 - RNA, 19 nt, Artificial Sequence
  Description of Artificial Sequence: Synthetic oligonucleotide
gacacaugggaaucacaca

SEQ ID NO: 501731 - RNA, 19 nt, Artificial Sequence
  Description of Artificial Sequence: Synthetic oligonucleotide
gaggguacgacugcagaac

SEQ ID NO: 501732 - RNA, 19 nt, Artificial Sequence
  Description of Artificial Sequence: Synthetic oligonucleotide
acacuguaggaccaaguuu

SEQ ID NO: 501733 - RNA, 19 nt, Artificial Sequence
  Description of Artificial Sequence: Synthetic oligonucleotide
augaggguacgacugcaga

SEQ ID NO: 501734 - RNA, 19 nt, Artificial Sequence
  Description of Artificial Sequence: Synthetic oligonucleotide
aucacacauuacccguguc

SEQ ID NO: 501735 - RNA, 19 nt, Artificial Sequence
  Description of Artificial Sequence: Synthetic oligonucleotide
acucaacacguuagcagac

SEQ ID NO: 501736 - RNA, 19 nt, Artificial Sequence
  Description of Artificial Sequence: Synthetic oligonucleotide
ccaaguuugucuaguacug

SEQ ID NO: 501737 - RNA, 19 nt, Artificial Sequence
  Description of Artificial Sequence: Synthetic oligonucleotide
ucugugggaaugccacugu

SEQ ID NO: 501738 - RNA, 19 nt, Artificial Sequence
  Description of Artificial Sequence: Synthetic oligonucleotide
agguaggaggugcuguucu

SEQ ID NO: 501739 - RNA, 19 nt, Artificial Sequence
  Description of Artificial Sequence: Synthetic oligonucleotide
gacauucuagugaaaucuc

SEQ ID NO: 501740 - RNA, 19 nt, Artificial Sequence
  Description of Artificial Sequence: Synthetic oligonucleotide
aggugcaaacacuguagga

SEQ ID NO: 501741 - RNA, 19 nt, Artificial Sequence
  Description of Artificial Sequence: Synthetic oligonucleotide
ggcccauuacacuaagcag

SEQ ID NO: 501742 - RNA, 19 nt, Artificial Sequence
  Description of Artificial Sequence: Synthetic oligonucleotide
cagaaguucaaugucacua

SEQ ID NO: 501743 - RNA, 19 nt, Artificial Sequence
  Description of Artificial Sequence: Synthetic oligonucleotide
ucccauuaucaucuguguu

SEQ ID NO: 501744 - RNA, 19 nt, Artificial Sequence
  Description of Artificial Sequence: Synthetic oligonucleotide
cacucauggcacuaaagaa

SEQ ID NO: 501745 - RNA, 19 nt, Artificial Sequence
  Description of Artificial Sequence: Synthetic oligonucleotide
ggugacacaggguucugug

SEQ ID NO: 501746 - RNA, 19 nt, Artificial Sequence
  Description of Artificial Sequence: Synthetic oligonucleotide
ucucaccugucccauuauc

SEQ ID NO: 501747 - RNA, 19 nt, Artificial Sequence
  Description of Artificial Sequence: Synthetic oligonucleotide
ggcauuugagagaucaaug

SEQ ID NO: 501748 - RNA, 19 nt, Artificial Sequence
  Description of Artificial Sequence: Synthetic oligonucleotide
gaucaaugcaugcgggcaa

SEQ ID NO: 501749 - RNA, 19 nt, Artificial Sequence
  Description of Artificial Sequence: Synthetic oligonucleotide
uucuaaauaaaggcccauu

SEQ ID NO: 501750 - RNA, 19 nt, Artificial Sequence
  Description of Artificial Sequence: Synthetic oligonucleotide
agaaucguaauaggacagu

SEQ ID NO: 501751 - RNA, 19 nt, Artificial Sequence
  Description of Artificial Sequence: Synthetic oligonucleotide
guaguaaacucuuccuugu

SEQ ID NO: 501752 - RNA, 19 nt, Artificial Sequence
  Description of Artificial Sequence: Synthetic oligonucleotide
cccauuacacuaagcagcc

SEQ ID NO: 501753 - RNA, 19 nt, Artificial Sequence
  Description of Artificial Sequence: Synthetic oligonucleotide
gcgaguguuauccacagaa

SEQ ID NO: 501754 - RNA, 19 nt, Artificial Sequence
  Description of Artificial Sequence: Synthetic oligonucleotide
gugcggaugagaucagcug

SEQ ID NO: 501755 - RNA, 19 nt, Artificial Sequence
  Description of Artificial Sequence: Synthetic oligonucleotide
uacuaucugucaggcaggc

SEQ ID NO: 501756 - RNA, 19 nt, Artificial Sequence
  Description of Artificial Sequence: Synthetic oligonucleotide
uuuggcgucuggugugaca

SEQ ID NO: 501757 - RNA, 19 nt, Artificial Sequence
  Description of Artificial Sequence: Synthetic oligonucleotide
uauguauaguugagccuuu

SEQ ID NO: 501758 - RNA, 19 nt, Artificial Sequence
  Description of Artificial Sequence: Synthetic oligonucleotide
ugcgggcaacucaacacgu

SEQ ID NO: 501759 - RNA, 19 nt, Artificial Sequence
  Description of Artificial Sequence: Synthetic oligonucleotide
uaguugggcugccgaauga

SEQ ID NO: 501760 - RNA, 19 nt, Artificial Sequence
  Description of Artificial Sequence: Synthetic oligonucleotide
uggaaccaauuuacaauuu

SEQ ID NO: 501761 - RNA, 19 nt, Artificial Sequence
  Description of Artificial Sequence: Synthetic oligonucleotide
aguacagccuuaguucaga

SEQ ID NO: 501762 - RNA, 19 nt, Artificial Sequence
  Description of Artificial Sequence: Synthetic oligonucleotide
uuaucagguccaugcgagu

SEQ ID NO: 501763 - RNA, 19 nt, Artificial Sequence
  Description of Artificial Sequence: Synthetic oligonucleotide
cccuaaaaggcuccaauac

SEQ ID NO: 501764 - RNA, 19 nt, Artificial Sequence
  Description of Artificial Sequence: Synthetic oligonucleotide
aggguacgacugcagaacu

SEQ ID NO: 501765 - RNA, 19 nt, Artificial Sequence
  Description of Artificial Sequence: Synthetic oligonucleotide
acuaucugucaggcaggcc

SEQ ID NO: 501766 - RNA, 19 nt, Artificial Sequence
  Description of Artificial Sequence: Synthetic oligonucleotide
cauagagacaccacacugu

SEQ ID NO: 501767 - RNA, 19 nt, Artificial Sequence
  Description of Artificial Sequence: Synthetic oligonucleotide
uggccgaguuccuaaccug

SEQ ID NO: 501768 - RNA, 19 nt, Artificial Sequence
  Description of Artificial Sequence: Synthetic oligonucleotide
gaaucguaauaggacagua

SEQ ID NO: 501769 - RNA, 19 nt, Artificial Sequence
  Description of Artificial Sequence: Synthetic oligonucleotide
caugacacaugggaaucac

SEQ ID NO: 501770 - RNA, 19 nt, Artificial Sequence
  Description of Artificial Sequence: Synthetic oligonucleotide
cuuuuacgguuagugcagc

SEQ ID NO: 501771 - RNA, 19 nt, Artificial Sequence
  Description of Artificial Sequence: Synthetic oligonucleotide
ugucuaguacuggaaccac

SEQ ID NO: 501772 - RNA, 19 nt, Artificial Sequence
  Description of Artificial Sequence: Synthetic oligonucleotide
ggagguaaagacugagguc

SEQ ID NO: 501773 - RNA, 19 nt, Artificial Sequence
  Description of Artificial Sequence: Synthetic oligonucleotide
cuggguccuacuaucuguc

SEQ ID NO: 501774 - RNA, 19 nt, Artificial Sequence
  Description of Artificial Sequence: Synthetic oligonucleotide
uaguugagccuuuggcguc

SEQ ID NO: 501775 - RNA, 19 nt, Artificial Sequence
  Description of Artificial Sequence: Synthetic oligonucleotide
cguuagcagacuuuauucc

SEQ ID NO: 501776 - RNA, 19 nt, Artificial Sequence
  Description of Artificial Sequence: Synthetic oligonucleotide
acuaaagcuggcacucaug

SEQ ID NO: 501777 - RNA, 19 nt, Artificial Sequence
  Description of Artificial Sequence: Synthetic oligonucleotide
ggaaccaucgagcugccaa

SEQ ID NO: 501778 - RNA, 19 nt, Artificial Sequence
  Description of Artificial Sequence: Synthetic oligonucleotide
gcuucgguggccgaguucc

SEQ ID NO: 501779 - RNA, 19 nt, Artificial Sequence
  Description of Artificial Sequence: Synthetic oligonucleotide
ucgggauaaccucuucguu

SEQ ID NO: 501780 - RNA, 19 nt, Artificial Sequence
  Description of Artificial Sequence: Synthetic oligonucleotide
ggguccuacuaucugucag

SEQ ID NO: 501781 - RNA, 19 nt, Artificial Sequence
  Description of Artificial Sequence: Synthetic oligonucleotide
ccuaacacagauuguccac

SEQ ID NO: 501782 - RNA, 19 nt, Artificial Sequence
  Description of Artificial Sequence: Synthetic oligonucleotide
uacaaccuuuccaggcauc

SEQ ID NO: 501783 - RNA, 19 nt, Artificial Sequence
  Description of Artificial Sequence: Synthetic oligonucleotide
ugcguuauucagugcuguc

SEQ ID NO: 501784 - RNA, 19 nt, Artificial Sequence
  Description of Artificial Sequence: Synthetic oligonucleotide
gucuaguacuggaaccacc

SEQ ID NO: 501785 - RNA, 19 nt, Artificial Sequence
  Description of Artificial Sequence: Synthetic oligonucleotide
gggagguaaagacugaggu

SEQ ID NO: 501786 - RNA, 19 nt, Artificial Sequence
  Description of Artificial Sequence: Synthetic oligonucleotide
aggaccaaguuugucuagu

SEQ ID NO: 501787 - RNA, 19 nt, Artificial Sequence
  Description of Artificial Sequence: Synthetic oligonucleotide
cuauguauaguugagccuu

SEQ ID NO: 501788 - RNA, 19 nt, Artificial Sequence
  Description of Artificial Sequence: Synthetic oligonucleotide
uccaugcgaguguuaucca

SEQ ID NO: 501789 - RNA, 19 nt, Artificial Sequence
  Description of Artificial Sequence: Synthetic oligonucleotide
cauucaugaggguacgacu

SEQ ID NO: 501790 - RNA, 19 nt, Artificial Sequence
  Description of Artificial Sequence: Synthetic oligonucleotide
ccguaugcguuauucagug

SEQ ID NO: 501791 - RNA, 19 nt, Artificial Sequence
  Description of Artificial Sequence: Synthetic oligonucleotide
uaucagcauuaugauguuc

SEQ ID NO: 501792 - RNA, 19 nt, Artificial Sequence
  Description of Artificial Sequence: Synthetic oligonucleotide
agacaagaggugacacagg

SEQ ID NO: 501793 - RNA, 19 nt, Artificial Sequence
  Description of Artificial Sequence: Synthetic oligonucleotide
agcagacuuuauucccuga

SEQ ID NO: 501794 - RNA, 19 nt, Artificial Sequence
  Description of Artificial Sequence: Synthetic oligonucleotide
ggaaucacacauuacccgu

SEQ ID NO: 501795 - RNA, 19 nt, Artificial Sequence
  Description of Artificial Sequence: Synthetic oligonucleotide
uggguccuacuaucuguca

SEQ ID NO: 501796 - RNA, 19 nt, Artificial Sequence
  Description of Artificial Sequence: Synthetic oligonucleotide
aaagucgggauaaccucuu

SEQ ID NO: 501797 - RNA, 19 nt, Artificial Sequence
  Description of Artificial Sequence: Synthetic oligonucleotide
gccaauuucacaugaggua

SEQ ID NO: 501798 - RNA, 19 nt, Artificial Sequence
  Description of Artificial Sequence: Synthetic oligonucleotide
ugcgaguguuauccacaga

SEQ ID NO: 501799 - RNA, 19 nt, Artificial Sequence
  Description of Artificial Sequence: Synthetic oligonucleotide
ucgguggccgaguuccuaa

SEQ ID NO: 501800 - RNA, 19 nt, Artificial Sequence
  Description of Artificial Sequence: Synthetic oligonucleotide
cugucaggcaggccuuagc

SEQ ID NO: 501801 - RNA, 19 nt, Artificial Sequence
  Description of Artificial Sequence: Synthetic oligonucleotide
cauucuagugaaaucucau

SEQ ID NO: 501802 - RNA, 19 nt, Artificial Sequence
  Description of Artificial Sequence: Synthetic oligonucleotide
gcuccaauacauuucuaaa

SEQ ID NO: 501803 - RNA, 19 nt, Artificial Sequence
  Description of Artificial Sequence: Synthetic oligonucleotide
augcguuauucagugcugu

SEQ ID NO: 501804 - RNA, 19 nt, Artificial Sequence
  Description of Artificial Sequence: Synthetic oligonucleotide
gucgggauaaccucuucgu

SEQ ID NO: 501805 - RNA, 19 nt, Artificial Sequence
  Description of Artificial Sequence: Synthetic oligonucleotide
uuccuaaccugagcuacau

SEQ ID NO: 501806 - RNA, 19 nt, Artificial Sequence
  Description of Artificial Sequence: Synthetic oligonucleotide
gcuacaucagccuccaccu

SEQ ID NO: 501807 - RNA, 19 nt, Artificial Sequence
  Description of Artificial Sequence: Synthetic oligonucleotide
agguccaugcgaguguuau

SEQ ID NO: 501808 - RNA, 19 nt, Artificial Sequence
  Description of Artificial Sequence: Synthetic oligonucleotide
cagcauuaugauguucauc

SEQ ID NO: 501809 - RNA, 19 nt, Artificial Sequence
  Description of Artificial Sequence: Synthetic oligonucleotide
agguaguugggcugccgaa

SEQ ID NO: 501810 - RNA, 19 nt, Artificial Sequence
  Description of Artificial Sequence: Synthetic oligonucleotide
cacuaaagaaagucgggau

SEQ ID NO: 501811 - RNA, 19 nt, Artificial Sequence
  Description of Artificial Sequence: Synthetic oligonucleotide
cugcccucagugccaacgc

SEQ ID NO: 501812 - RNA, 19 nt, Artificial Sequence
  Description of Artificial Sequence: Synthetic oligonucleotide
caacaccagauguggccac

SEQ ID NO: 501813 - RNA, 19 nt, Artificial Sequence
  Description of Artificial Sequence: Synthetic oligonucleotide
gcacuaaagaaagucggga

SEQ ID NO: 501814 - RNA, 19 nt, Artificial Sequence
  Description of Artificial Sequence: Synthetic oligonucleotide
cauauaaaguguccaggau

SEQ ID NO: 501815 - RNA, 19 nt, Artificial Sequence
  Description of Artificial Sequence: Synthetic oligonucleotide
gguggucaccuucuuuuac

SEQ ID NO: 501816 - RNA, 19 nt, Artificial Sequence
  Description of Artificial Sequence: Synthetic oligonucleotide
accccucgaacuacccagc

SEQ ID NO: 501817 - RNA, 19 nt, Artificial Sequence
  Description of Artificial Sequence: Synthetic oligonucleotide
gaguuccuaaccugagcua

SEQ ID NO: 501818 - RNA, 19 nt, Artificial Sequence
  Description of Artificial Sequence: Synthetic oligonucleotide
uacccgugucaugaagcug

SEQ ID NO: 501819 - RNA, 19 nt, Artificial Sequence
  Description of Artificial Sequence: Synthetic oligonucleotide
gguacgacugcagaacuaa

SEQ ID NO: 501820 - RNA, 19 nt, Artificial Sequence
  Description of Artificial Sequence: Synthetic oligonucleotide
auguuuugccguaugcguu

SEQ ID NO: 501821 - RNA, 19 nt, Artificial Sequence
  Description of Artificial Sequence: Synthetic oligonucleotide
caccgcauaacaaggccaa

SEQ ID NO: 501822 - RNA, 19 nt, Artificial Sequence
  Description of Artificial Sequence: Synthetic oligonucleotide
cucgaacuacccagccaug

SEQ ID NO: 501823 - RNA, 19 nt, Artificial Sequence
  Description of Artificial Sequence: Synthetic oligonucleotide
ugcaugcgggcaacucaac

SEQ ID NO: 501824 - RNA, 19 nt, Artificial Sequence
  Description of Artificial Sequence: Synthetic oligonucleotide
ucaaugcaugcgggcaacu

SEQ ID NO: 501825 - RNA, 19 nt, Artificial Sequence
  Description of Artificial Sequence: Synthetic oligonucleotide
caccuucuuuuacgguuag

SEQ ID NO: 501826 - RNA, 19 nt, Artificial Sequence
  Description of Artificial Sequence: Synthetic oligonucleotide
caaugcaugcgggcaacuc

SEQ ID NO: 501827 - RNA, 19 nt, Artificial Sequence
  Description of Artificial Sequence: Synthetic oligonucleotide
acauuacccgugucaugaa

SEQ ID NO: 501828 - RNA, 19 nt, Artificial Sequence
  Description of Artificial Sequence: Synthetic oligonucleotide
acgguuagugcagccacaa

SEQ ID NO: 501829 - RNA, 19 nt, Artificial Sequence
  Description of Artificial Sequence: Synthetic oligonucleotide
cgaaugacauucuagugaa

SEQ ID NO: 501830 - RNA, 19 nt, Artificial Sequence
  Description of Artificial Sequence: Synthetic oligonucleotide
cugguggucaccuucuuuu

SEQ ID NO: 501831 - RNA, 19 nt, Artificial Sequence
  Description of Artificial Sequence: Synthetic oligonucleotide
augcaugcgggcaacucaa

SEQ ID NO: 501832 - RNA, 19 nt, Artificial Sequence
  Description of Artificial Sequence: Synthetic oligonucleotide
gaagguaggaggugcuguu

SEQ ID NO: 501833 - RNA, 19 nt, Artificial Sequence
  Description of Artificial Sequence: Synthetic oligonucleotide
uguuuccuaucagcauuau

SEQ ID NO: 501834 - RNA, 19 nt, Artificial Sequence
  Description of Artificial Sequence: Synthetic oligonucleotide
gacauucaugaggguacga

SEQ ID NO: 501835 - RNA, 19 nt, Artificial Sequence
  Description of Artificial Sequence: Synthetic oligonucleotide
caauuucacaugagguagu

SEQ ID NO: 501836 - RNA, 19 nt, Artificial Sequence
  Description of Artificial Sequence: Synthetic oligonucleotide
ccagggauuaucaggucca

SEQ ID NO: 501837 - RNA, 19 nt, Artificial Sequence
  Description of Artificial Sequence: Synthetic oligonucleotide
cuguaggaccaaguuuguc

SEQ ID NO: 501838 - RNA, 19 nt, Artificial Sequence
  Description of Artificial Sequence: Synthetic oligonucleotide
cugugcggaugagaucagc

SEQ ID NO: 501839 - RNA, 19 nt, Artificial Sequence
  Description of Artificial Sequence: Synthetic oligonucleotide
guggccgaguuccuaaccu

SEQ ID NO: 501840 - RNA, 19 nt, Artificial Sequence
  Description of Artificial Sequence: Synthetic oligonucleotide
ccaagagaaucuauguaua

SEQ ID NO: 501841 - RNA, 19 nt, Artificial Sequence
  Description of Artificial Sequence: Synthetic oligonucleotide
gcuuuuaaguagaaauacu

SEQ ID NO: 501842 - RNA, 19 nt, Artificial Sequence
  Description of Artificial Sequence: Synthetic oligonucleotide
cacguuagcagacuuuauu

SEQ ID NO: 501843 - RNA, 19 nt, Artificial Sequence
  Description of Artificial Sequence: Synthetic oligonucleotide
guuccuaaccugagcuaca

SEQ ID NO: 501844 - RNA, 19 nt, Artificial Sequence
  Description of Artificial Sequence: Synthetic oligonucleotide
accgcauaacaaggccaag

SEQ ID NO: 501845 - RNA, 19 nt, Artificial Sequence
  Description of Artificial Sequence: Synthetic oligonucleotide
cacaccaccucaucagacu

SEQ ID NO: 501846 - RNA, 19 nt, Artificial Sequence
  Description of Artificial Sequence: Synthetic oligonucleotide
agcccguggaucucauaua

SEQ ID NO: 501847 - RNA, 19 nt, Artificial Sequence
  Description of Artificial Sequence: Synthetic oligonucleotide
auguggcucugcaaaacua

SEQ ID NO: 501848 - RNA, 19 nt, Artificial Sequence
  Description of Artificial Sequence: Synthetic oligonucleotide
guguugccguaauguuuug

SEQ ID NO: 501849 - RNA, 19 nt, Artificial Sequence
  Description of Artificial Sequence: Synthetic oligonucleotide
cguaauguuuugccguaug

SEQ ID NO: 501850 - RNA, 19 nt, Artificial Sequence
  Description of Artificial Sequence: Synthetic oligonucleotide
aggugacacaggguucugu

SEQ ID NO: 501851 - RNA, 19 nt, Artificial Sequence
  Description of Artificial Sequence: Synthetic oligonucleotide
ccgaguuccuaaccugagc

SEQ ID NO: 501852 - RNA, 19 nt, Artificial Sequence
  Description of Artificial Sequence: Synthetic oligonucleotide
ccauccccuccucagaguc

SEQ ID NO: 501853 - RNA, 19 nt, Artificial Sequence
  Description of Artificial Sequence: Synthetic oligonucleotide
gcaugcgggcaacucaaca

SEQ ID NO: 501854 - RNA, 19 nt, Artificial Sequence
  Description of Artificial Sequence: Synthetic oligonucleotide
gcaucccagugcugaaagc

SEQ ID NO: 501855 - RNA, 19 nt, Artificial Sequence
  Description of Artificial Sequence: Synthetic oligonucleotide
caucagacuccagcccgug

SEQ ID NO: 501856 - RNA, 19 nt, Artificial Sequence
  Description of Artificial Sequence: Synthetic oligonucleotide
gcccguggaucucauauaa

SEQ ID NO: 501857 - RNA, 19 nt, Artificial Sequence
  Description of Artificial Sequence: Synthetic oligonucleotide
agcagacccuagggccacc

SEQ ID NO: 501858 - RNA, 19 nt, Artificial Sequence
  Description of Artificial Sequence: Synthetic oligonucleotide
gcggaugagaucagcugug

SEQ ID NO: 501859 - RNA, 19 nt, Artificial Sequence
  Description of Artificial Sequence: Synthetic oligonucleotide
aggccuuagcagacccuag

SEQ ID NO: 501860 - RNA, 19 nt, Artificial Sequence
  Description of Artificial Sequence: Synthetic oligonucleotide
gcccuaaaaggcuccaaua

SEQ ID NO: 501861 - RNA, 19 nt, Artificial Sequence
  Description of Artificial Sequence: Synthetic oligonucleotide
gguguugccguaauguuuu

SEQ ID NO: 501862 - RNA, 19 nt, Artificial Sequence
  Description of Artificial Sequence: Synthetic oligonucleotide
accuucuuuuacgguuagu

SEQ ID NO: 501863 - RNA, 19 nt, Artificial Sequence
  Description of Artificial Sequence: Synthetic oligonucleotide
ccaccgcauaacaaggcca

SEQ ID NO: 501864 - RNA, 19 nt, Artificial Sequence
  Description of Artificial Sequence: Synthetic oligonucleotide
ccuucaguaucucaccugu

SEQ ID NO: 501865 - RNA, 19 nt, Artificial Sequence
  Description of Artificial Sequence: Synthetic oligonucleotide
uucgguggccgaguuccua

SEQ ID NO: 501866 - RNA, 19 nt, Artificial Sequence
  Description of Artificial Sequence: Synthetic oligonucleotide
guacuggaaccaccgcaua

SEQ ID NO: 501867 - RNA, 19 nt, Artificial Sequence
  Description of Artificial Sequence: Synthetic oligonucleotide
agcugucacaccaccucau

SEQ ID NO: 501868 - RNA, 19 nt, Artificial Sequence
  Description of Artificial Sequence: Synthetic oligonucleotide
gaggucccucugcauccca

SEQ ID NO: 501869 - RNA, 19 nt, Artificial Sequence
  Description of Artificial Sequence: Synthetic oligonucleotide
ggaccaaguuugucuagua

SEQ ID NO: 501870 - RNA, 19 nt, Artificial Sequence
  Description of Artificial Sequence: Synthetic oligonucleotide
uggcccuaaaaggcuccaa

SEQ ID NO: 501871 - RNA, 19 nt, Artificial Sequence
  Description of Artificial Sequence: Synthetic oligonucleotide
gguccaugcgaguguuauc

SEQ ID NO: 501872 - RNA, 19 nt, Artificial Sequence
  Description of Artificial Sequence: Synthetic oligonucleotide
caggccuuagcagacccua

SEQ ID NO: 501873 - RNA, 19 nt, Artificial Sequence
  Description of Artificial Sequence: Synthetic oligonucleotide
gccgaguuccuaaccugag

SEQ ID NO: 501874 - RNA, 19 nt, Artificial Sequence
  Description of Artificial Sequence: Synthetic oligonucleotide
cuuuggcgucuggugugac

SEQ ID NO: 501875 - RNA, 19 nt, Artificial Sequence
  Description of Artificial Sequence: Synthetic oligonucleotide
cguaugcguuauucagugc

SEQ ID NO: 501876 - RNA, 19 nt, Artificial Sequence
  Description of Artificial Sequence: Synthetic oligonucleotide
gcaaaacuacagacauuca

SEQ ID NO: 501877 - RNA, 19 nt, Artificial Sequence
  Description of Artificial Sequence: Synthetic oligonucleotide
cgcauaacaaggccaagaa

SEQ ID NO: 501878 - RNA, 19 nt, Artificial Sequence
  Description of Artificial Sequence: Synthetic oligonucleotide
guacgacugcagaacuaaa

SEQ ID NO: 501879 - RNA, 19 nt, Artificial Sequence
  Description of Artificial Sequence: Synthetic oligonucleotide
gccguaauguuuugccgua

SEQ ID NO: 501880 - RNA, 19 nt, Artificial Sequence
  Description of Artificial Sequence: Synthetic oligonucleotide
ggccgaguuccuaaccuga

SEQ ID NO: 501881 - RNA, 19 nt, Artificial Sequence
  Description of Artificial Sequence: Synthetic oligonucleotide
gcguuauucagugcugucu

SEQ ID NO: 501882 - RNA, 19 nt, Artificial Sequence
  Description of Artificial Sequence: Synthetic oligonucleotide
cacuaucuucuggagggua

SEQ ID NO: 501883 - RNA, 19 nt, Artificial Sequence
  Description of Artificial Sequence: Synthetic oligonucleotide
caacacguuagcagacuuu

SEQ ID NO: 501884 - RNA, 19 nt, Artificial Sequence
  Description of Artificial Sequence: Synthetic oligonucleotide
ccucgaacuacccagccau

SEQ ID NO: 501885 - RNA, 19 nt, Artificial Sequence
  Description of Artificial Sequence: Synthetic oligonucleotide
ccccucgaacuacccagcc

SEQ ID NO: 501886 - RNA, 19 nt, Artificial Sequence
  Description of Artificial Sequence: Synthetic oligonucleotide
ggccacuucuuuuguuuua

SEQ ID NO: 501887 - RNA, 19 nt, Artificial Sequence
  Description of Artificial Sequence: Synthetic oligonucleotide
ccgcauaacaaggccaaga

SEQ ID NO: 501888 - RNA, 19 nt, Artificial Sequence
  Description of Artificial Sequence: Synthetic oligonucleotide
cugucccauuaucaucugu

SEQ ID NO: 501889 - RNA, 19 nt, Artificial Sequence
  Description of Artificial Sequence: Synthetic oligonucleotide
  modified_base (6)..(6): a, c, u, g, unknown or other
ccccanaaagaaggaacca

SEQ ID NO: 501890 - RNA, 19 nt, Artificial Sequence
  Description of Artificial Sequence: Synthetic oligonucleotide
ggcgucuggugugacaugu

SEQ ID NO: 501891 - RNA, 19 nt, Artificial Sequence
  Description of Artificial Sequence: Synthetic oligonucleotide
cagccacgguugucugaug

SEQ ID NO: 501892 - RNA, 19 nt, Artificial Sequence
  Description of Artificial Sequence: Synthetic oligonucleotide
aggaaccaucgagcugcca

SEQ ID NO: 501893 - RNA, 19 nt, Artificial Sequence
  Description of Artificial Sequence: Synthetic oligonucleotide
  modified_base (5)..(5): a, c, u, g, unknown or other
cccanaaagaaggaaccau

SEQ ID NO: 501894 - RNA, 19 nt, Artificial Sequence
  Description of Artificial Sequence: Synthetic oligonucleotide
cacgguugucugaugcuuu

SEQ ID NO: 501895 - RNA, 19 nt, Artificial Sequence
  Description of Artificial Sequence: Synthetic oligonucleotide
cagugcugucuggauaucu

SEQ ID NO: 501896 - RNA, 19 nt, Artificial Sequence
  Description of Artificial Sequence: Synthetic oligonucleotide
gccguaugcguuauucagu

SEQ ID NO: 501897 - RNA, 19 nt, Artificial Sequence
  Description of Artificial Sequence: Synthetic oligonucleotide
guuuugccguaugcguuau

SEQ ID NO: 501898 - RNA, 19 nt, Artificial Sequence
  Description of Artificial Sequence: Synthetic oligonucleotide
cccucgaacuacccagcca

SEQ ID NO: 501899 - RNA, 19 nt, Artificial Sequence
  Description of Artificial Sequence: Synthetic oligonucleotide
cgacugcagaacuaaacau

SEQ ID NO: 501900 - RNA, 19 nt, Artificial Sequence
  Description of Artificial Sequence: Synthetic oligonucleotide
cccguggaucucauauaaa

SEQ ID NO: 501901 - RNA, 19 nt, Artificial Sequence
  Description of Artificial Sequence: Synthetic oligonucleotide
cagccuuaguucagacauu

SEQ ID NO: 501902 - RNA, 19 nt, Artificial Sequence
  Description of Artificial Sequence: Synthetic oligonucleotide
cuucgguggccgaguuccu

SEQ ID NO: 501903 - RNA, 19 nt, Artificial Sequence
  Description of Artificial Sequence: Synthetic oligonucleotide
cagggauuaucagguccau

SEQ ID NO: 501904 - RNA, 19 nt, Artificial Sequence
  Description of Artificial Sequence: Synthetic oligonucleotide
gccccacuucccaugaaau

SEQ ID NO: 501905 - RNA, 19 nt, Artificial Sequence
  Description of Artificial Sequence: Synthetic oligonucleotide
gcacuaucuucuggagggu

SEQ ID NO: 501906 - RNA, 19 nt, Artificial Sequence
  Description of Artificial Sequence: Synthetic oligonucleotide
ccagcccguggaucucaua

SEQ ID NO: 501907 - RNA, 19 nt, Artificial Sequence
  Description of Artificial Sequence: Synthetic oligonucleotide
gggcuucgguggccgaguu

SEQ ID NO: 501908 - RNA, 19 nt, Artificial Sequence
  Description of Artificial Sequence: Synthetic oligonucleotide
ccguaauguuuugccguau

SEQ ID NO: 501909 - RNA, 19 nt, Artificial Sequence
  Description of Artificial Sequence: Synthetic oligonucleotide
gcgucuggugugacauguu

SEQ ID NO: 501910 - RNA, 19 nt, Artificial Sequence
  Description of Artificial Sequence: Synthetic oligonucleotide
ccgugucaugaagcuggcu

SEQ ID NO: 501911 - RNA, 19 nt, Artificial Sequence
  Description of Artificial Sequence: Synthetic oligonucleotide
  modified_base (5)..(5): a, c, u, g, unknown or other
uuuunuuuuauccuucagg

SEQ ID NO: 501912 - RNA, 19 nt, Artificial Sequence
  Description of Artificial Sequence: Synthetic oligonucleotide
  modified_base (4)..(4): a, c, u, g, unknown or other
uuunuuuuauccuucaggc

SEQ ID NO: 501913 - RNA, 19 nt, Artificial Sequence
  Description of Artificial Sequence: Synthetic oligonucleotide
ucagagacaaauuuggagg

SEQ ID NO: 501914 - RNA, 19 nt, Artificial Sequence
  Description of Artificial Sequence: Synthetic oligonucleotide
aauauguaucaucaucccc

SEQ ID NO: 501915 - RNA, 19 nt, Artificial Sequence
  Description of Artificial Sequence: Synthetic oligonucleotide
aaauuaaccaaguaugagu

SEQ ID NO: 501916 - RNA, 19 nt, Artificial Sequence
  Description of Artificial Sequence: Synthetic oligonucleotide
ucaacagucacccuagagg

SEQ ID NO: 501917 - RNA, 19 nt, Artificial Sequence
  Description of Artificial Sequence: Synthetic oligonucleotide
aauggaacaauguugacua

SEQ ID NO: 501918 - RNA, 19 nt, Artificial Sequence
  Description of Artificial Sequence: Synthetic oligonucleotide
uguuaaguaaugcaagcag

SEQ ID NO: 501919 - RNA, 19 nt, Artificial Sequence
  Description of Artificial Sequence: Synthetic oligonucleotide
uauaagagaagaaaguuau

SEQ ID NO: 501920 - RNA, 19 nt, Artificial Sequence
  Description of Artificial Sequence: Synthetic oligonucleotide
aauggauucacuugagaug

SEQ ID NO: 501921 - RNA, 19 nt, Artificial Sequence
  Description of Artificial Sequence: Synthetic oligonucleotide
  modified_base (2)..(2): a, c, u, g, unknown or other
unuuuuauccuucaggcau

SEQ ID NO: 501922 - RNA, 19 nt, Artificial Sequence
  Description of Artificial Sequence: Synthetic oligonucleotide
uuccaugcaaccaugaccc

SEQ ID NO: 501923 - RNA, 19 nt, Artificial Sequence
  Description of Artificial Sequence: Synthetic oligonucleotide
aaaauauauggccaccuca

SEQ ID NO: 501924 - RNA, 19 nt, Artificial Sequence
  Description of Artificial Sequence: Synthetic oligonucleotide
ucugaaauggcucauccca

SEQ ID NO: 501925 - RNA, 19 nt, Artificial Sequence
  Description of Artificial Sequence: Synthetic oligonucleotide
gaggcuuagagauacauac

SEQ ID NO: 501926 - RNA, 19 nt, Artificial Sequence
  Description of Artificial Sequence: Synthetic oligonucleotide
agagauaggucauaccuuc

SEQ ID NO: 501927 - RNA, 19 nt, Artificial Sequence
  Description of Artificial Sequence: Synthetic oligonucleotide
uuuguaaauggaacaaugu

SEQ ID NO: 501928 - RNA, 19 nt, Artificial Sequence
  Description of Artificial Sequence: Synthetic oligonucleotide
cacccuaggacacagaccg

SEQ ID NO: 501929 - RNA, 19 nt, Artificial Sequence
  Description of Artificial Sequence: Synthetic oligonucleotide
uuauaagagaagaaaguua

SEQ ID NO: 501930 - RNA, 19 nt, Artificial Sequence
  Description of Artificial Sequence: Synthetic oligonucleotide
uaauucauccucaugacuu

SEQ ID NO: 501931 - RNA, 19 nt, Artificial Sequence
  Description of Artificial Sequence: Synthetic oligonucleotide
gaucaugucuggcuuaggg

SEQ ID NO: 501932 - RNA, 19 nt, Artificial Sequence
  Description of Artificial Sequence: Synthetic oligonucleotide
accaugucuguguucaugc

SEQ ID NO: 501933 - RNA, 19 nt, Artificial Sequence
  Description of Artificial Sequence: Synthetic oligonucleotide
aacccugcaucguaacugc

SEQ ID NO: 501934 - RNA, 19 nt, Artificial Sequence
  Description of Artificial Sequence: Synthetic oligonucleotide
ggcacuucuaagcagaugg

SEQ ID NO: 501935 - RNA, 19 nt, Artificial Sequence
  Description of Artificial Sequence: Synthetic oligonucleotide
uuaaccaaguaugagucag

SEQ ID NO: 501936 - RNA, 19 nt, Artificial Sequence
  Description of Artificial Sequence: Synthetic oligonucleotide
uuguagaccaccauaucca

SEQ ID NO: 501937 - RNA, 19 nt, Artificial Sequence
  Description of Artificial Sequence: Synthetic oligonucleotide
cucauaucuauucuuguag

SEQ ID NO: 501938 - RNA, 19 nt, Artificial Sequence
  Description of Artificial Sequence: Synthetic oligonucleotide
auguaucugacauacucag

SEQ ID NO: 501939 - RNA, 19 nt, Artificial Sequence
  Description of Artificial Sequence: Synthetic oligonucleotide
aguucaacauuuauaagag

SEQ ID NO: 501940 - RNA, 19 nt, Artificial Sequence
  Description of Artificial Sequence: Synthetic oligonucleotide
uaggacgucaccuuccucc

SEQ ID NO: 501941 - RNA, 19 nt, Artificial Sequence
  Description of Artificial Sequence: Synthetic oligonucleotide
cuucggaacaaauuuguac

SEQ ID NO: 501942 - RNA, 19 nt, Artificial Sequence
  Description of Artificial Sequence: Synthetic oligonucleotide
auauauggccaccucauca

SEQ ID NO: 501943 - RNA, 19 nt, Artificial Sequence
  Description of Artificial Sequence: Synthetic oligonucleotide
auacauacuaaaggcagac

SEQ ID NO: 501944 - RNA, 19 nt, Artificial Sequence
  Description of Artificial Sequence: Synthetic oligonucleotide
agugacgagcuucucaguc

SEQ ID NO: 501945 - RNA, 19 nt, Artificial Sequence
  Description of Artificial Sequence: Synthetic oligonucleotide
aaguaugagucaguggguc

SEQ ID NO: 501946 - RNA, 19 nt, Artificial Sequence
  Description of Artificial Sequence: Synthetic oligonucleotide
acuucauagucgugugucc

SEQ ID NO: 501947 - RNA, 19 nt, Artificial Sequence
  Description of Artificial Sequence: Synthetic oligonucleotide
uauucuuguagaguugaag

SEQ ID NO: 501948 - RNA, 19 nt, Artificial Sequence
  Description of Artificial Sequence: Synthetic oligonucleotide
  modified_base (3)..(3): a, c, u, g, unknown or other
uunuuuuauccuucaggca

SEQ ID NO: 501949 - RNA, 19 nt, Artificial Sequence
  Description of Artificial Sequence: Synthetic oligonucleotide
ucauaucuauucuuguaga

SEQ ID NO: 501950 - RNA, 19 nt, Artificial Sequence
  Description of Artificial Sequence: Synthetic oligonucleotide
ugcauugccucccugguga

SEQ ID NO: 501951 - RNA, 19 nt, Artificial Sequence
  Description of Artificial Sequence: Synthetic oligonucleotide
aauuuguacuuucugcaua

SEQ ID NO: 501952 - RNA, 19 nt, Artificial Sequence
  Description of Artificial Sequence: Synthetic oligonucleotide
guuccaugcaaccaugacc

SEQ ID NO: 501953 - RNA, 19 nt, Artificial Sequence
  Description of Artificial Sequence: Synthetic oligonucleotide
auagucguguguccggcgc

SEQ ID NO: 501954 - RNA, 19 nt, Artificial Sequence
  Description of Artificial Sequence: Synthetic oligonucleotide
acauacuaaaggcagacuu

SEQ ID NO: 501955 - RNA, 19 nt, Artificial Sequence
  Description of Artificial Sequence: Synthetic oligonucleotide
cauaucuauucuuguagag

SEQ ID NO: 501956 - RNA, 19 nt, Artificial Sequence
  Description of Artificial Sequence: Synthetic oligonucleotide
aaacuucccauuccucauc

SEQ ID NO: 501957 - RNA, 19 nt, Artificial Sequence
  Description of Artificial Sequence: Synthetic oligonucleotide
aaaccucccauucuuggga

SEQ ID NO: 501958 - RNA, 19 nt, Artificial Sequence
  Description of Artificial Sequence: Synthetic oligonucleotide
aaguccucagucauccacc

SEQ ID NO: 501959 - RNA, 19 nt, Artificial Sequence
  Description of Artificial Sequence: Synthetic oligonucleotide
ugguuuagagacaucuaca

SEQ ID NO: 501960 - RNA, 19 nt, Artificial Sequence
  Description of Artificial Sequence: Synthetic oligonucleotide
uuauguuuucagacaaacu

SEQ ID NO: 501961 - RNA, 19 nt, Artificial Sequence
  Description of Artificial Sequence: Synthetic oligonucleotide
uuaaccaaggguugccuca

SEQ ID NO: 501962 - RNA, 19 nt, Artificial Sequence
  Description of Artificial Sequence: Synthetic oligonucleotide
agauaggucauaccuucuc

SEQ ID NO: 501963 - RNA, 19 nt, Artificial Sequence
  Description of Artificial Sequence: Synthetic oligonucleotide
gaccaagacaggcuuuucg

SEQ ID NO: 501964 - RNA, 19 nt, Artificial Sequence
  Description of Artificial Sequence: Synthetic oligonucleotide
ccucaaaugauguaugggg

SEQ ID NO: 501965 - RNA, 19 nt, Artificial Sequence
  Description of Artificial Sequence: Synthetic oligonucleotide
ucuauucuuguagaguuga

SEQ ID NO: 501966 - RNA, 19 nt, Artificial Sequence
  Description of Artificial Sequence: Synthetic oligonucleotide
aggcuuuucgcccugguug

SEQ ID NO: 501967 - RNA, 19 nt, Artificial Sequence
  Description of Artificial Sequence: Synthetic oligonucleotide
ugcaagcagacaaaccagc

SEQ ID NO: 501968 - RNA, 19 nt, Artificial Sequence
  Description of Artificial Sequence: Synthetic oligonucleotide
ugugccacuucauagucgu

SEQ ID NO: 501969 - RNA, 19 nt, Artificial Sequence
  Description of Artificial Sequence: Synthetic oligonucleotide
caacuugaacccugcaucg

SEQ ID NO: 501970 - RNA, 19 nt, Artificial Sequence
  Description of Artificial Sequence: Synthetic oligonucleotide
uccucagucauccacccgu

SEQ ID NO: 501971 - RNA, 19 nt, Artificial Sequence
  Description of Artificial Sequence: Synthetic oligonucleotide
aucugcugacaacaggaac

SEQ ID NO: 501972 - RNA, 19 nt, Artificial Sequence
  Description of Artificial Sequence: Synthetic oligonucleotide
caucaaauagggcuggcac

SEQ ID NO: 501973 - RNA, 19 nt, Artificial Sequence
  Description of Artificial Sequence: Synthetic oligonucleotide
ucuucgcauuuccaguggg

SEQ ID NO: 501974 - RNA, 19 nt, Artificial Sequence
  Description of Artificial Sequence: Synthetic oligonucleotide
aauuucucccuaccuggug

SEQ ID NO: 501975 - RNA, 19 nt, Artificial Sequence
  Description of Artificial Sequence: Synthetic oligonucleotide
ugacuaugcucucuggcca

SEQ ID NO: 501976 - RNA, 19 nt, Artificial Sequence
  Description of Artificial Sequence: Synthetic oligonucleotide
gagacaucuacaagcagcc

SEQ ID NO: 501977 - RNA, 19 nt, Artificial Sequence
  Description of Artificial Sequence: Synthetic oligonucleotide
uguagaccaccauauccag

SEQ ID NO: 501978 - RNA, 19 nt, Artificial Sequence
  Description of Artificial Sequence: Synthetic oligonucleotide
cauacuaaaggcagacuuc

SEQ ID NO: 501979 - RNA, 19 nt, Artificial Sequence
  Description of Artificial Sequence: Synthetic oligonucleotide
aggucauaccuucucauca

SEQ ID NO: 501980 - RNA, 19 nt, Artificial Sequence
  Description of Artificial Sequence: Synthetic oligonucleotide
agaccggaggcuuagagau

SEQ ID NO: 501981 - RNA, 19 nt, Artificial Sequence
  Description of Artificial Sequence: Synthetic oligonucleotide
uuuucgccagucucgaaca

SEQ ID NO: 501982 - RNA, 19 nt, Artificial Sequence
  Description of Artificial Sequence: Synthetic oligonucleotide
caucugugccacuucauag

SEQ ID NO: 501983 - RNA, 19 nt, Artificial Sequence
  Description of Artificial Sequence: Synthetic oligonucleotide
uccugggcgauuucaagag

SEQ ID NO: 501984 - RNA, 19 nt, Artificial Sequence
  Description of Artificial Sequence: Synthetic oligonucleotide
augcucucuggccaguuac

SEQ ID NO: 501985 - RNA, 19 nt, Artificial Sequence
  Description of Artificial Sequence: Synthetic oligonucleotide
cucagugccagguuccccg

SEQ ID NO: 501986 - RNA, 19 nt, Artificial Sequence
  Description of Artificial Sequence: Synthetic oligonucleotide
agccuuaaaaguucaacau

SEQ ID NO: 501987 - RNA, 19 nt, Artificial Sequence
  Description of Artificial Sequence: Synthetic oligonucleotide
gguaugaccacccuaggac

SEQ ID NO: 501988 - RNA, 19 nt, Artificial Sequence
  Description of Artificial Sequence: Synthetic oligonucleotide
gaauacugggcccggacac

SEQ ID NO: 501989 - RNA, 19 nt, Artificial Sequence
  Description of Artificial Sequence: Synthetic oligonucleotide
cuuuucgccagucucgaac

SEQ ID NO: 501990 - RNA, 19 nt, Artificial Sequence
  Description of Artificial Sequence: Synthetic oligonucleotide
aaauggcucaucccaucug

SEQ ID NO: 501991 - RNA, 19 nt, Artificial Sequence
  Description of Artificial Sequence: Synthetic oligonucleotide
acguugguccaccagagca

SEQ ID NO: 501992 - RNA, 19 nt, Artificial Sequence
  Description of Artificial Sequence: Synthetic oligonucleotide
uggauuugaaucucguuuu

SEQ ID NO: 501993 - RNA, 19 nt, Artificial Sequence
  Description of Artificial Sequence: Synthetic oligonucleotide
gauaggucauaccuucuca

SEQ ID NO: 501994 - RNA, 19 nt, Artificial Sequence
  Description of Artificial Sequence: Synthetic oligonucleotide
ugucucgucugcauugccc

SEQ ID NO: 501995 - RNA, 19 nt, Artificial Sequence
  Description of Artificial Sequence: Synthetic oligonucleotide
ucaaaugauguauggggua

SEQ ID NO: 501996 - RNA, 19 nt, Artificial Sequence
  Description of Artificial Sequence: Synthetic oligonucleotide
uucgacaccagcccagacu

SEQ ID NO: 501997 - RNA, 19 nt, Artificial Sequence
  Description of Artificial Sequence: Synthetic oligonucleotide
auaucuauucuuguagagu

SEQ ID NO: 501998 - RNA, 19 nt, Artificial Sequence
  Description of Artificial Sequence: Synthetic oligonucleotide
ucauaccuucucaucauuc

SEQ ID NO: 501999 - RNA, 19 nt, Artificial Sequence
  Description of Artificial Sequence: Synthetic oligonucleotide
aacucucaacauucccuag

SEQ ID NO: 502000 - RNA, 19 nt, Artificial Sequence
  Description of Artificial Sequence: Synthetic oligonucleotide
aagacaggcuuuucgcccu

SEQ ID NO: 502001 - RNA, 19 nt, Artificial Sequence
  Description of Artificial Sequence: Synthetic oligonucleotide
uguugacuaugcucucugg

SEQ ID NO: 502002 - RNA, 19 nt, Artificial Sequence
  Description of Artificial Sequence: Synthetic oligonucleotide
uggaacaauguugacuaug

SEQ ID NO: 502003 - RNA, 19 nt, Artificial Sequence
  Description of Artificial Sequence: Synthetic oligonucleotide
auacuaaaggcagacuuca

SEQ ID NO: 502004 - RNA, 19 nt, Artificial Sequence
  Description of Artificial Sequence: Synthetic oligonucleotide
uaagcagaugggugucucg

SEQ ID NO: 502005 - RNA, 19 nt, Artificial Sequence
  Description of Artificial Sequence: Synthetic oligonucleotide
uuguugcuccgucaaaacu

SEQ ID NO: 502006 - RNA, 19 nt, Artificial Sequence
  Description of Artificial Sequence: Synthetic oligonucleotide
ugacauacucagccacacg

SEQ ID NO: 502007 - RNA, 19 nt, Artificial Sequence
  Description of Artificial Sequence: Synthetic oligonucleotide
aguuggaauacugggcccg

SEQ ID NO: 502008 - RNA, 19 nt, Artificial Sequence
  Description of Artificial Sequence: Synthetic oligonucleotide
agagucgguggcaugacac

SEQ ID NO: 502009 - RNA, 19 nt, Artificial Sequence
  Description of Artificial Sequence: Synthetic oligonucleotide
gacaacaggaacugucuga

SEQ ID NO: 502010 - RNA, 19 nt, Artificial Sequence
  Description of Artificial Sequence: Synthetic oligonucleotide
uuccuggauuugaaucucg

SEQ ID NO: 502011 - RNA, 19 nt, Artificial Sequence
  Description of Artificial Sequence: Synthetic oligonucleotide
caagaaauuaaccaaguau

SEQ ID NO: 502012 - RNA, 19 nt, Artificial Sequence
  Description of Artificial Sequence: Synthetic oligonucleotide
gacauacucagccacacgu

SEQ ID NO: 502013 - RNA, 19 nt, Artificial Sequence
  Description of Artificial Sequence: Synthetic oligonucleotide
uucuucgacaccagcccag

SEQ ID NO: 502014 - RNA, 19 nt, Artificial Sequence
  Description of Artificial Sequence: Synthetic oligonucleotide
gguggcaugacaccggaag

SEQ ID NO: 502015 - RNA, 19 nt, Artificial Sequence
  Description of Artificial Sequence: Synthetic oligonucleotide
aauguugacuaugcucucu

SEQ ID NO: 502016 - RNA, 19 nt, Artificial Sequence
  Description of Artificial Sequence: Synthetic oligonucleotide
ugguaugaccacccuagga

SEQ ID NO: 502017 - RNA, 19 nt, Artificial Sequence
  Description of Artificial Sequence: Synthetic oligonucleotide
cuucuucgcauuuccagug

SEQ ID NO: 502018 - RNA, 19 nt, Artificial Sequence
  Description of Artificial Sequence: Synthetic oligonucleotide
ugaaucucguuuucuugcu

SEQ ID NO: 502019 - RNA, 19 nt, Artificial Sequence
  Description of Artificial Sequence: Synthetic oligonucleotide
cuucauagucguguguccg

SEQ ID NO: 502020 - RNA, 19 nt, Artificial Sequence
  Description of Artificial Sequence: Synthetic oligonucleotide
aacuuccaaccagucuugc

SEQ ID NO: 502021 - RNA, 19 nt, Artificial Sequence
  Description of Artificial Sequence: Synthetic oligonucleotide
acuucuaagcagaugggug

SEQ ID NO: 502022 - RNA, 19 nt, Artificial Sequence
  Description of Artificial Sequence: Synthetic oligonucleotide
augauguuuuaaaacucuc

SEQ ID NO: 502023 - RNA, 19 nt, Artificial Sequence
  Description of Artificial Sequence: Synthetic oligonucleotide
uuaccugaacucuuccuuc

SEQ ID NO: 502024 - RNA, 19 nt, Artificial Sequence
  Description of Artificial Sequence: Synthetic oligonucleotide
agacaaauuuggaggauag

SEQ ID NO: 502025 - RNA, 19 nt, Artificial Sequence
  Description of Artificial Sequence: Synthetic oligonucleotide
uccccuuuggccugcaugu

SEQ ID NO: 502026 - RNA, 19 nt, Artificial Sequence
  Description of Artificial Sequence: Synthetic oligonucleotide
ggcaugggcauuuuggagc

SEQ ID NO: 502027 - RNA, 19 nt, Artificial Sequence
  Description of Artificial Sequence: Synthetic oligonucleotide
auguugacuaugcucucug

SEQ ID NO: 502028 - RNA, 19 nt, Artificial Sequence
  Description of Artificial Sequence: Synthetic oligonucleotide
ucuccacacaacuuccaac

SEQ ID NO: 502029 - RNA, 19 nt, Artificial Sequence
  Description of Artificial Sequence: Synthetic oligonucleotide
ggaacaauguugacuaugc

SEQ ID NO: 502030 - RNA, 19 nt, Artificial Sequence
  Description of Artificial Sequence: Synthetic oligonucleotide
guugucaacagucacccua

SEQ ID NO: 502031 - RNA, 19 nt, Artificial Sequence
  Description of Artificial Sequence: Synthetic oligonucleotide
cugaaagcagcugugguuc

SEQ ID NO: 502032 - RNA, 19 nt, Artificial Sequence
  Description of Artificial Sequence: Synthetic oligonucleotide
acucucaacauucccuaga

SEQ ID NO: 502033 - RNA, 19 nt, Artificial Sequence
  Description of Artificial Sequence: Synthetic oligonucleotide
uaugccgcagagauagguc

SEQ ID NO: 502034 - RNA, 19 nt, Artificial Sequence
  Description of Artificial Sequence: Synthetic oligonucleotide
uaaauggaacaauguugac

SEQ ID NO: 502035 - RNA, 19 nt, Artificial Sequence
  Description of Artificial Sequence: Synthetic oligonucleotide
cuucgcauuuccagugggg

SEQ ID NO: 502036 - RNA, 19 nt, Artificial Sequence
  Description of Artificial Sequence: Synthetic oligonucleotide
cagugacucauaucuauuc

SEQ ID NO: 502037 - RNA, 19 nt, Artificial Sequence
  Description of Artificial Sequence: Synthetic oligonucleotide
agucugaaagcagcugugg

SEQ ID NO: 502038 - RNA, 19 nt, Artificial Sequence
  Description of Artificial Sequence: Synthetic oligonucleotide
agaggaaagcaaguaauau

SEQ ID NO: 502039 - RNA, 19 nt, Artificial Sequence
  Description of Artificial Sequence: Synthetic oligonucleotide
acucauaucuauucuugua

SEQ ID NO: 502040 - RNA, 19 nt, Artificial Sequence
  Description of Artificial Sequence: Synthetic oligonucleotide
uguggaacuggcacuuuau

SEQ ID NO: 502041 - RNA, 19 nt, Artificial Sequence
  Description of Artificial Sequence: Synthetic oligonucleotide
ugaacccugcaucguaacu

SEQ ID NO: 502042 - RNA, 19 nt, Artificial Sequence
  Description of Artificial Sequence: Synthetic oligonucleotide
uuaugccgcagagauaggu

SEQ ID NO: 502043 - RNA, 19 nt, Artificial Sequence
  Description of Artificial Sequence: Synthetic oligonucleotide
accccuggacaauggauuc

SEQ ID NO: 502044 - RNA, 19 nt, Artificial Sequence
  Description of Artificial Sequence: Synthetic oligonucleotide
gacuaugcucucuggccag

SEQ ID NO: 502045 - RNA, 19 nt, Artificial Sequence
  Description of Artificial Sequence: Synthetic oligonucleotide
aagucugaaagcagcugug

SEQ ID NO: 502046 - RNA, 19 nt, Artificial Sequence
  Description of Artificial Sequence: Synthetic oligonucleotide
augccgcagagauagguca

SEQ ID NO: 502047 - RNA, 19 nt, Artificial Sequence
  Description of Artificial Sequence: Synthetic oligonucleotide
aaggguggcuucuucgcau

SEQ ID NO: 502048 - RNA, 19 nt, Artificial Sequence
  Description of Artificial Sequence: Synthetic oligonucleotide
guguguccggcgcagagcc

SEQ ID NO: 502049 - RNA, 19 nt, Artificial Sequence
  Description of Artificial Sequence: Synthetic oligonucleotide
uccacacaacuuccaacca

SEQ ID NO: 502050 - RNA, 19 nt, Artificial Sequence
  Description of Artificial Sequence: Synthetic oligonucleotide
uguaugggguaacuuccuc

SEQ ID NO: 502051 - RNA, 19 nt, Artificial Sequence
  Description of Artificial Sequence: Synthetic oligonucleotide
uuuaugccgcagagauagg

SEQ ID NO: 502052 - RNA, 19 nt, Artificial Sequence
  Description of Artificial Sequence: Synthetic oligonucleotide
uuuccaaccgacugaucau

SEQ ID NO: 502053 - RNA, 19 nt, Artificial Sequence
  Description of Artificial Sequence: Synthetic oligonucleotide
aaaaggcagugcaacuaug

SEQ ID NO: 502054 - RNA, 19 nt, Artificial Sequence
  Description of Artificial Sequence: Synthetic oligonucleotide
guaugaccacccuaggaca

SEQ ID NO: 502055 - RNA, 19 nt, Artificial Sequence
  Description of Artificial Sequence: Synthetic oligonucleotide
cagagacaaauuuggagga

SEQ ID NO: 502056 - RNA, 19 nt, Artificial Sequence
  Description of Artificial Sequence: Synthetic oligonucleotide
guagaguugaagucugaaa

SEQ ID NO: 502057 - RNA, 19 nt, Artificial Sequence
  Description of Artificial Sequence: Synthetic oligonucleotide
augguaugaccacccuagg

SEQ ID NO: 502058 - RNA, 19 nt, Artificial Sequence
  Description of Artificial Sequence: Synthetic oligonucleotide
aguugaagucugaaagcag

SEQ ID NO: 502059 - RNA, 19 nt, Artificial Sequence
  Description of Artificial Sequence: Synthetic oligonucleotide
aggcagugcaacuauguua

SEQ ID NO: 502060 - RNA, 19 nt, Artificial Sequence
  Description of Artificial Sequence: Synthetic oligonucleotide
ggacaauggauucacuuga

SEQ ID NO: 502061 - RNA, 19 nt, Artificial Sequence
  Description of Artificial Sequence: Synthetic oligonucleotide
ucgccagucucgaacauuu

SEQ ID NO: 502062 - RNA, 19 nt, Artificial Sequence
  Description of Artificial Sequence: Synthetic oligonucleotide
ucugaaccccuggacaaug

SEQ ID NO: 502063 - RNA, 19 nt, Artificial Sequence
  Description of Artificial Sequence: Synthetic oligonucleotide
auacucagccacacguugg

SEQ ID NO: 502064 - RNA, 19 nt, Artificial Sequence
  Description of Artificial Sequence: Synthetic oligonucleotide
cugcugguaagugacgagc

SEQ ID NO: 502065 - RNA, 19 nt, Artificial Sequence
  Description of Artificial Sequence: Synthetic oligonucleotide
guggcagcggauuuccaug

SEQ ID NO: 502066 - RNA, 19 nt, Artificial Sequence
  Description of Artificial Sequence: Synthetic oligonucleotide
cccagacuugccuugaacc

SEQ ID NO: 502067 - RNA, 19 nt, Artificial Sequence
  Description of Artificial Sequence: Synthetic oligonucleotide
uuccaaccgacugaucaug

SEQ ID NO: 502068 - RNA, 19 nt, Artificial Sequence
  Description of Artificial Sequence: Synthetic oligonucleotide
ccagucuugcaucaagucc

SEQ ID NO: 502069 - RNA, 19 nt, Artificial Sequence
  Description of Artificial Sequence: Synthetic oligonucleotide
uguuaaccaaggguugccu

SEQ ID NO: 502070 - RNA, 19 nt, Artificial Sequence
  Description of Artificial Sequence: Synthetic oligonucleotide
uccaaccgacugaucaugu

SEQ ID NO: 502071 - RNA, 19 nt, Artificial Sequence
  Description of Artificial Sequence: Synthetic oligonucleotide
accucccauucuugggacc

SEQ ID NO: 502072 - RNA, 19 nt, Artificial Sequence
  Description of Artificial Sequence: Synthetic oligonucleotide
uggcagcggauuuccaugc

SEQ ID NO: 502073 - RNA, 19 nt, Artificial Sequence
  Description of Artificial Sequence: Synthetic oligonucleotide
guuaaccaaggguugccuc

SEQ ID NO: 502074 - RNA, 19 nt, Artificial Sequence
  Description of Artificial Sequence: Synthetic oligonucleotide
cuagaggaaagcaaguaau

SEQ ID NO: 502075 - RNA, 19 nt, Artificial Sequence
  Description of Artificial Sequence: Synthetic oligonucleotide
ucguguguccggcgcagag

SEQ ID NO: 502076 - RNA, 19 nt, Artificial Sequence
  Description of Artificial Sequence: Synthetic oligonucleotide
aggguugccucauacuaau

SEQ ID NO: 502077 - RNA, 19 nt, Artificial Sequence
  Description of Artificial Sequence: Synthetic oligonucleotide
uucgcccugguugucaaca

SEQ ID NO: 502078 - RNA, 19 nt, Artificial Sequence
  Description of Artificial Sequence: Synthetic oligonucleotide
guggcaugacaccggaagc

SEQ ID NO: 502079 - RNA, 19 nt, Artificial Sequence
  Description of Artificial Sequence: Synthetic oligonucleotide
cauagucguguguccggcg

SEQ ID NO: 502080 - RNA, 19 nt, Artificial Sequence
  Description of Artificial Sequence: Synthetic oligonucleotide
augcaagcagacaaaccag

SEQ ID NO: 502081 - RNA, 19 nt, Artificial Sequence
  Description of Artificial Sequence: Synthetic oligonucleotide
caguuggaauacugggccc

SEQ ID NO: 502082 - RNA, 19 nt, Artificial Sequence
  Description of Artificial Sequence: Synthetic oligonucleotide
cugaaccccuggacaaugg

SEQ ID NO: 502083 - RNA, 19 nt, Artificial Sequence
  Description of Artificial Sequence: Synthetic oligonucleotide
accucggaaugcccgccgc

SEQ ID NO: 502084 - RNA, 19 nt, Artificial Sequence
  Description of Artificial Sequence: Synthetic oligonucleotide
ugcaaccaugacccacucc

SEQ ID NO: 502085 - RNA, 19 nt, Artificial Sequence
  Description of Artificial Sequence: Synthetic oligonucleotide
acuuccaaccagucuugca

SEQ ID NO: 502086 - RNA, 19 nt, Artificial Sequence
  Description of Artificial Sequence: Synthetic oligonucleotide
uacuuuucgccagucucga

SEQ ID NO: 502087 - RNA, 19 nt, Artificial Sequence
  Description of Artificial Sequence: Synthetic oligonucleotide
gaaauggcucaucccaucu

SEQ ID NO: 502088 - RNA, 19 nt, Artificial Sequence
  Description of Artificial Sequence: Synthetic oligonucleotide
gaaucucguuuucuugcuc

SEQ ID NO: 502089 - RNA, 19 nt, Artificial Sequence
  Description of Artificial Sequence: Synthetic oligonucleotide
uacauacuaaaggcagacu

SEQ ID NO: 502090 - RNA, 19 nt, Artificial Sequence
  Description of Artificial Sequence: Synthetic oligonucleotide
uugaacccugcaucguaac

SEQ ID NO: 502091 - RNA, 19 nt, Artificial Sequence
  Description of Artificial Sequence: Synthetic oligonucleotide
cucaaaugauguauggggu

SEQ ID NO: 502092 - RNA, 19 nt, Artificial Sequence
  Description of Artificial Sequence: Synthetic oligonucleotide
caaggguugccucauacua

SEQ ID NO: 502093 - RNA, 19 nt, Artificial Sequence
  Description of Artificial Sequence: Synthetic oligonucleotide
cuguuaaccaaggguugcc

SEQ ID NO: 502094 - RNA, 19 nt, Artificial Sequence
  Description of Artificial Sequence: Synthetic oligonucleotide
cagcggauuuccaugccac

SEQ ID NO: 502095 - RNA, 19 nt, Artificial Sequence
  Description of Artificial Sequence: Synthetic oligonucleotide
ggcuuagagauacauacua

SEQ ID NO: 502096 - RNA, 19 nt, Artificial Sequence
  Description of Artificial Sequence: Synthetic oligonucleotide
ccagacuugccuugaaccc

SEQ ID NO: 502097 - RNA, 19 nt, Artificial Sequence
  Description of Artificial Sequence: Synthetic oligonucleotide
cuucuaagcagaugggugu

SEQ ID NO: 502098 - RNA, 19 nt, Artificial Sequence
  Description of Artificial Sequence: Synthetic oligonucleotide
acaccggaagccauucagg

SEQ ID NO: 502099 - RNA, 19 nt, Artificial Sequence
  Description of Artificial Sequence: Synthetic oligonucleotide
accuucggaacaaauuugu

SEQ ID NO: 502100 - RNA, 19 nt, Artificial Sequence
  Description of Artificial Sequence: Synthetic oligonucleotide
cacacguugguccaccaga

SEQ ID NO: 502101 - RNA, 19 nt, Artificial Sequence
  Description of Artificial Sequence: Synthetic oligonucleotide
auaggacgucaccuuccuc

SEQ ID NO: 502102 - RNA, 19 nt, Artificial Sequence
  Description of Artificial Sequence: Synthetic oligonucleotide
auggacuaagaugauguuu

SEQ ID NO: 502103 - RNA, 19 nt, Artificial Sequence
  Description of Artificial Sequence: Synthetic oligonucleotide
gucagugggucuugucugc

SEQ ID NO: 502104 - RNA, 19 nt, Artificial Sequence
  Description of Artificial Sequence: Synthetic oligonucleotide
cuaaguugcuggagaugug

SEQ ID NO: 502105 - RNA, 19 nt, Artificial Sequence
  Description of Artificial Sequence: Synthetic oligonucleotide
guaacugcggcgggagccg

SEQ ID NO: 502106 - RNA, 19 nt, Artificial Sequence
  Description of Artificial Sequence: Synthetic oligonucleotide
aucguaacugcggcgggag

SEQ ID NO: 502107 - RNA, 19 nt, Artificial Sequence
  Description of Artificial Sequence: Synthetic oligonucleotide
cuggauuugaaucucguuu

SEQ ID NO: 502108 - RNA, 19 nt, Artificial Sequence
  Description of Artificial Sequence: Synthetic oligonucleotide
ccucaugacuucccgauag

SEQ ID NO: 502109 - RNA, 19 nt, Artificial Sequence
  Description of Artificial Sequence: Synthetic oligonucleotide
agucauccacccguagcgg

SEQ ID NO: 502110 - RNA, 19 nt, Artificial Sequence
  Description of Artificial Sequence: Synthetic oligonucleotide
ucgguggcaugacaccgga

SEQ ID NO: 502111 - RNA, 19 nt, Artificial Sequence
  Description of Artificial Sequence: Synthetic oligonucleotide
gagacaaauuuggaggaua

SEQ ID NO: 502112 - RNA, 19 nt, Artificial Sequence
  Description of Artificial Sequence: Synthetic oligonucleotide
cugcaucguaacugcggcg

SEQ ID NO: 502113 - RNA, 19 nt, Artificial Sequence
  Description of Artificial Sequence: Synthetic oligonucleotide
aaggguugccucauacuaa

SEQ ID NO: 502114 - RNA, 19 nt, Artificial Sequence
  Description of Artificial Sequence: Synthetic oligonucleotide
gaccucggaaugcccgccg

SEQ ID NO: 502115 - RNA, 19 nt, Artificial Sequence
  Description of Artificial Sequence: Synthetic oligonucleotide
gacuaagaugauguuuuaa

SEQ ID NO: 502116 - RNA, 19 nt, Artificial Sequence
  Description of Artificial Sequence: Synthetic oligonucleotide
cucauacuaauuaacuuuu

SEQ ID NO: 502117 - RNA, 19 nt, Artificial Sequence
  Description of Artificial Sequence: Synthetic oligonucleotide
guccccuuuggccugcaug

SEQ ID NO: 502118 - RNA, 19 nt, Artificial Sequence
  Description of Artificial Sequence: Synthetic oligonucleotide
uuuucgcccugguugucaa

SEQ ID NO: 502119 - RNA, 19 nt, Artificial Sequence
  Description of Artificial Sequence: Synthetic oligonucleotide
gugacgagcuucucaguca

SEQ ID NO: 502120 - RNA, 19 nt, Artificial Sequence
  Description of Artificial Sequence: Synthetic oligonucleotide
uucuaagcagauggguguc

SEQ ID NO: 502121 - RNA, 19 nt, Artificial Sequence
  Description of Artificial Sequence: Synthetic oligonucleotide
aucuauucuuguagaguug

SEQ ID NO: 502122 - RNA, 19 nt, Artificial Sequence
  Description of Artificial Sequence: Synthetic oligonucleotide
guuggaauacugggcccgg

SEQ ID NO: 502123 - RNA, 19 nt, Artificial Sequence
  Description of Artificial Sequence: Synthetic oligonucleotide
caggcaucugcugacaaca

SEQ ID NO: 502124 - RNA, 19 nt, Artificial Sequence
  Description of Artificial Sequence: Synthetic oligonucleotide
ccaagacaggcuuuucgcc

SEQ ID NO: 502125 - RNA, 19 nt, Artificial Sequence
  Description of Artificial Sequence: Synthetic oligonucleotide
uagucguguguccggcgca

SEQ ID NO: 502126 - RNA, 19 nt, Artificial Sequence
  Description of Artificial Sequence: Synthetic oligonucleotide
caaccaugacccacuccag

SEQ ID NO: 502127 - RNA, 19 nt, Artificial Sequence
  Description of Artificial Sequence: Synthetic oligonucleotide
ucggaaugcccgccgcaug

SEQ ID NO: 502128 - RNA, 19 nt, Artificial Sequence
  Description of Artificial Sequence: Synthetic oligonucleotide
acugaucaugucuggcuua

SEQ ID NO: 502129 - RNA, 19 nt, Artificial Sequence
  Description of Artificial Sequence: Synthetic oligonucleotide
acacguugguccaccagag

SEQ ID NO: 502130 - RNA, 19 nt, Artificial Sequence
  Description of Artificial Sequence: Synthetic oligonucleotide
cugcugacaacaggaacug

SEQ ID NO: 502131 - RNA, 19 nt, Artificial Sequence
  Description of Artificial Sequence: Synthetic oligonucleotide
gguugccucauacuaauua

SEQ ID NO: 502132 - RNA, 19 nt, Artificial Sequence
  Description of Artificial Sequence: Synthetic oligonucleotide
guuaccugaacucuuccuu

SEQ ID NO: 502133 - RNA, 19 nt, Artificial Sequence
  Description of Artificial Sequence: Synthetic oligonucleotide
caauguugacuaugcucuc

SEQ ID NO: 502134 - RNA, 19 nt, Artificial Sequence
  Description of Artificial Sequence: Synthetic oligonucleotide
caccggaagccauucagga

SEQ ID NO: 502135 - RNA, 19 nt, Artificial Sequence
  Description of Artificial Sequence: Synthetic oligonucleotide
cuuccaaccagucuugcau

SEQ ID NO: 502136 - RNA, 19 nt, Artificial Sequence
  Description of Artificial Sequence: Synthetic oligonucleotide
cuugaacccugcaucguaa

SEQ ID NO: 502137 - RNA, 19 nt, Artificial Sequence
  Description of Artificial Sequence: Synthetic oligonucleotide
ucagugccagguuccccgc

SEQ ID NO: 502138 - RNA, 19 nt, Artificial Sequence
  Description of Artificial Sequence: Synthetic oligonucleotide
auauggccaccucaucaaa

SEQ ID NO: 502139 - RNA, 19 nt, Artificial Sequence
  Description of Artificial Sequence: Synthetic oligonucleotide
guugcuccgucaaaacuuc

SEQ ID NO: 502140 - RNA, 19 nt, Artificial Sequence
  Description of Artificial Sequence: Synthetic oligonucleotide
ugagucagugggucuuguc

SEQ ID NO: 502141 - RNA, 19 nt, Artificial Sequence
  Description of Artificial Sequence: Synthetic oligonucleotide
gcaaauuacuauuguggaa

SEQ ID NO: 502142 - RNA, 19 nt, Artificial Sequence
  Description of Artificial Sequence: Synthetic oligonucleotide
cauucccuagaggaaagca

SEQ ID NO: 502143 - RNA, 19 nt, Artificial Sequence
  Description of Artificial Sequence: Synthetic oligonucleotide
cacccaugcaccuucggaa

SEQ ID NO: 502144 - RNA, 19 nt, Artificial Sequence
  Description of Artificial Sequence: Synthetic oligonucleotide
ucuucgacaccagcccaga

SEQ ID NO: 502145 - RNA, 19 nt, Artificial Sequence
  Description of Artificial Sequence: Synthetic oligonucleotide
ggacacugucauucagagg

SEQ ID NO: 502146 - RNA, 19 nt, Artificial Sequence
  Description of Artificial Sequence: Synthetic oligonucleotide
agcggauuuccaugccacu

SEQ ID NO: 502147 - RNA, 19 nt, Artificial Sequence
  Description of Artificial Sequence: Synthetic oligonucleotide
ucguaacugcggcgggagc

SEQ ID NO: 502148 - RNA, 19 nt, Artificial Sequence
  Description of Artificial Sequence: Synthetic oligonucleotide
ccuaccuggugucuugacc

SEQ ID NO: 502149 - RNA, 19 nt, Artificial Sequence
  Description of Artificial Sequence: Synthetic oligonucleotide
cauccacccguagcggugg

SEQ ID NO: 502150 - RNA, 19 nt, Artificial Sequence
  Description of Artificial Sequence: Synthetic oligonucleotide
uggauucacuugagaugcu

SEQ ID NO: 502151 - RNA, 19 nt, Artificial Sequence
  Description of Artificial Sequence: Synthetic oligonucleotide
ccuagagggcacuucuaag

SEQ ID NO: 502152 - RNA, 19 nt, Artificial Sequence
  Description of Artificial Sequence: Synthetic oligonucleotide
uccucaugacuucccgaua

SEQ ID NO: 502153 - RNA, 19 nt, Artificial Sequence
  Description of Artificial Sequence: Synthetic oligonucleotide
agagacaaauuuggaggau

SEQ ID NO: 502154 - RNA, 19 nt, Artificial Sequence
  Description of Artificial Sequence: Synthetic oligonucleotide
ccauaggacgucaccuucc

SEQ ID NO: 502155 - RNA, 19 nt, Artificial Sequence
  Description of Artificial Sequence: Synthetic oligonucleotide
cagaccggaggcuuagaga

SEQ ID NO: 502156 - RNA, 19 nt, Artificial Sequence
  Description of Artificial Sequence: Synthetic oligonucleotide
ggauuugaaucucguuuuc

SEQ ID NO: 502157 - RNA, 19 nt, Artificial Sequence
  Description of Artificial Sequence: Synthetic oligonucleotide
ccacacaacuuccaaccag

SEQ ID NO: 502158 - RNA, 19 nt, Artificial Sequence
  Description of Artificial Sequence: Synthetic oligonucleotide
ggaauacugggcccggaca

SEQ ID NO: 502159 - RNA, 19 nt, Artificial Sequence
  Description of Artificial Sequence: Synthetic oligonucleotide
cucaucccaucugaaguuc

SEQ ID NO: 502160 - RNA, 19 nt, Artificial Sequence
  Description of Artificial Sequence: Synthetic oligonucleotide
uuucgccagucucgaacau

SEQ ID NO: 502161 - RNA, 19 nt, Artificial Sequence
  Description of Artificial Sequence: Synthetic oligonucleotide
aacugcggcgggagccgcc

SEQ ID NO: 502162 - RNA, 19 nt, Artificial Sequence
  Description of Artificial Sequence: Synthetic oligonucleotide
gucgguggcaugacaccgg

SEQ ID NO: 502163 - RNA, 19 nt, Artificial Sequence
  Description of Artificial Sequence: Synthetic oligonucleotide
ccccucaaaugauguaugg

SEQ ID NO: 502164 - RNA, 19 nt, Artificial Sequence
  Description of Artificial Sequence: Synthetic oligonucleotide
agcgguggcagcggauuuc

SEQ ID NO: 502165 - RNA, 19 nt, Artificial Sequence
  Description of Artificial Sequence: Synthetic oligonucleotide
aaugcccgccgcauggcau

SEQ ID NO: 502166 - RNA, 19 nt, Artificial Sequence
  Description of Artificial Sequence: Synthetic oligonucleotide
cacguugguccaccagagc

SEQ ID NO: 502167 - RNA, 19 nt, Artificial Sequence
  Description of Artificial Sequence: Synthetic oligonucleotide
cucccuaccuggugucuug

SEQ ID NO: 502168 - RNA, 19 nt, Artificial Sequence
  Description of Artificial Sequence: Synthetic oligonucleotide
ggcucaucccaucugaagu

SEQ ID NO: 502169 - RNA, 19 nt, Artificial Sequence
  Description of Artificial Sequence: Synthetic oligonucleotide
augcccgccgcauggcaug

SEQ ID NO: 502170 - RNA, 19 nt, Artificial Sequence
  Description of Artificial Sequence: Synthetic oligonucleotide
ccauggacuaagaugaugu

SEQ ID NO: 502171 - RNA, 19 nt, Artificial Sequence
  Description of Artificial Sequence: Synthetic oligonucleotide
aggcuuagagauacauacu

SEQ ID NO: 502172 - RNA, 19 nt, Artificial Sequence
  Description of Artificial Sequence: Synthetic oligonucleotide
gacugaucaugucuggcuu

SEQ ID NO: 502173 - RNA, 19 nt, Artificial Sequence
  Description of Artificial Sequence: Synthetic oligonucleotide
ccuguuaaccaaggguugc

SEQ ID NO: 502174 - RNA, 19 nt, Artificial Sequence
  Description of Artificial Sequence: Synthetic oligonucleotide
cuccucuaaguugcuggag

SEQ ID NO: 502175 - RNA, 19 nt, Artificial Sequence
  Description of Artificial Sequence: Synthetic oligonucleotide
uccaugcaaccaugaccca

SEQ ID NO: 502176 - RNA, 19 nt, Artificial Sequence
  Description of Artificial Sequence: Synthetic oligonucleotide
cacucaucagaauuaggau

SEQ ID NO: 502177 - RNA, 19 nt, Artificial Sequence
  Description of Artificial Sequence: Synthetic oligonucleotide
agucguguguccggcgcag

SEQ ID NO: 502178 - RNA, 19 nt, Artificial Sequence
  Description of Artificial Sequence: Synthetic oligonucleotide
ccucccaucagccaacaca

SEQ ID NO: 502179 - RNA, 19 nt, Artificial Sequence
  Description of Artificial Sequence: Synthetic oligonucleotide
auccacccguagcgguggc

SEQ ID NO: 502180 - RNA, 19 nt, Artificial Sequence
  Description of Artificial Sequence: Synthetic oligonucleotide
gaggauaggcugggaacuc

SEQ ID NO: 502181 - RNA, 19 nt, Artificial Sequence
  Description of Artificial Sequence: Synthetic oligonucleotide
gacaggcuuuucgcccugg

SEQ ID NO: 502182 - RNA, 19 nt, Artificial Sequence
  Description of Artificial Sequence: Synthetic oligonucleotide
gacuucccgauagagggcu

SEQ ID NO: 502183 - RNA, 19 nt, Artificial Sequence
  Description of Artificial Sequence: Synthetic oligonucleotide
ccaguuaccugaacucuuc

SEQ ID NO: 502184 - RNA, 19 nt, Artificial Sequence
  Description of Artificial Sequence: Synthetic oligonucleotide
caauuucccauaggacguc

SEQ ID NO: 502185 - RNA, 19 nt, Artificial Sequence
  Description of Artificial Sequence: Synthetic oligonucleotide
ccuagaggaaagcaaguaa

SEQ ID NO: 502186 - RNA, 19 nt, Artificial Sequence
  Description of Artificial Sequence: Synthetic oligonucleotide
ccgucaaaacuucccauuc

SEQ ID NO: 502187 - RNA, 19 nt, Artificial Sequence
  Description of Artificial Sequence: Synthetic oligonucleotide
gugucucgucugcauugcc

SEQ ID NO: 502188 - RNA, 19 nt, Artificial Sequence
  Description of Artificial Sequence: Synthetic oligonucleotide
uuggaauacugggcccgga

SEQ ID NO: 502189 - RNA, 19 nt, Artificial Sequence
  Description of Artificial Sequence: Synthetic oligonucleotide
agcagaugguuuagagaca

SEQ ID NO: 502190 - RNA, 19 nt, Artificial Sequence
  Description of Artificial Sequence: Synthetic oligonucleotide
cgucaaaacuucccauucc

SEQ ID NO: 502191 - RNA, 19 nt, Artificial Sequence
  Description of Artificial Sequence: Synthetic oligonucleotide
cuucgacaccagcccagac

SEQ ID NO: 502192 - RNA, 19 nt, Artificial Sequence
  Description of Artificial Sequence: Synthetic oligonucleotide
uguguccggcgcagagcca

SEQ ID NO: 502193 - RNA, 19 nt, Artificial Sequence
  Description of Artificial Sequence: Synthetic oligonucleotide
cuuuucgcccugguuguca

SEQ ID NO: 502194 - RNA, 19 nt, Artificial Sequence
  Description of Artificial Sequence: Synthetic oligonucleotide
gcaucguaacugcggcggg

SEQ ID NO: 502195 - RNA, 19 nt, Artificial Sequence
  Description of Artificial Sequence: Synthetic oligonucleotide
ccucauacuaauuaacuuu

SEQ ID NO: 502196 - RNA, 19 nt, Artificial Sequence
  Description of Artificial Sequence: Synthetic oligonucleotide
cacaacuuccaaccagucu

SEQ ID NO: 502197 - RNA, 19 nt, Artificial Sequence
  Description of Artificial Sequence: Synthetic oligonucleotide
ccgucuccacacaacuucc

SEQ ID NO: 502198 - RNA, 19 nt, Artificial Sequence
  Description of Artificial Sequence: Synthetic oligonucleotide
acauacucagccacacguu

SEQ ID NO: 502199 - RNA, 19 nt, Artificial Sequence
  Description of Artificial Sequence: Synthetic oligonucleotide
aggcccaaucccucccacu

SEQ ID NO: 502200 - RNA, 19 nt, Artificial Sequence
  Description of Artificial Sequence: Synthetic oligonucleotide
uuucgcccugguugucaac

SEQ ID NO: 502201 - RNA, 19 nt, Artificial Sequence
  Description of Artificial Sequence: Synthetic oligonucleotide
gccugacaguuguuggugc

SEQ ID NO: 502202 - RNA, 19 nt, Artificial Sequence
  Description of Artificial Sequence: Synthetic oligonucleotide
uucgccagucucgaacauu

SEQ ID NO: 502203 - RNA, 19 nt, Artificial Sequence
  Description of Artificial Sequence: Synthetic oligonucleotide
uacugggcccggacacugu

SEQ ID NO: 502204 - RNA, 19 nt, Artificial Sequence
  Description of Artificial Sequence: Synthetic oligonucleotide
ggugucucgucugcauugc

SEQ ID NO: 502205 - RNA, 19 nt, Artificial Sequence
  Description of Artificial Sequence: Synthetic oligonucleotide
aaccaaggguugccucaua

SEQ ID NO: 502206 - RNA, 19 nt, Artificial Sequence
  Description of Artificial Sequence: Synthetic oligonucleotide
gcauuuuggagcuguggcu

SEQ ID NO: 502207 - RNA, 19 nt, Artificial Sequence
  Description of Artificial Sequence: Synthetic oligonucleotide
acuuuucgccagucucgaa

SEQ ID NO: 502208 - RNA, 19 nt, Artificial Sequence
  Description of Artificial Sequence: Synthetic oligonucleotide
gcgauuucaagagcuuuca

SEQ ID NO: 502209 - RNA, 19 nt, Artificial Sequence
  Description of Artificial Sequence: Synthetic oligonucleotide
acuaugcucucuggccagu

SEQ ID NO: 502210 - RNA, 19 nt, Artificial Sequence
  Description of Artificial Sequence: Synthetic oligonucleotide
cagugcaacuauguuaagu

SEQ ID NO: 502211 - RNA, 19 nt, Artificial Sequence
  Description of Artificial Sequence: Synthetic oligonucleotide
gccuguuaaccaaggguug

SEQ ID NO: 502212 - RNA, 19 nt, Artificial Sequence
  Description of Artificial Sequence: Synthetic oligonucleotide
ucccuaccuggugucuuga

SEQ ID NO: 502213 - RNA, 19 nt, Artificial Sequence
  Description of Artificial Sequence: Synthetic oligonucleotide
gcagcggauuuccaugcca

SEQ ID NO: 502214 - RNA, 19 nt, Artificial Sequence
  Description of Artificial Sequence: Synthetic oligonucleotide
gccacucaucagaauuagg

SEQ ID NO: 502215 - RNA, 19 nt, Artificial Sequence
  Description of Artificial Sequence: Synthetic oligonucleotide
cagagauaggucauaccuu

SEQ ID NO: 502216 - RNA, 19 nt, Artificial Sequence
  Description of Artificial Sequence: Synthetic oligonucleotide
gggcaugguaugaccaccc

SEQ ID NO: 502217 - RNA, 19 nt, Artificial Sequence
  Description of Artificial Sequence: Synthetic oligonucleotide
augagucagugggucuugu

SEQ ID NO: 502218 - RNA, 19 nt, Artificial Sequence
  Description of Artificial Sequence: Synthetic oligonucleotide
acccugcaucguaacugcg

SEQ ID NO: 502219 - RNA, 19 nt, Artificial Sequence
  Description of Artificial Sequence: Synthetic oligonucleotide
gucauccacccguagcggu

SEQ ID NO: 502220 - RNA, 19 nt, Artificial Sequence
  Description of Artificial Sequence: Synthetic oligonucleotide
cacccguagcgguggcagc

SEQ ID NO: 502221 - RNA, 19 nt, Artificial Sequence
  Description of Artificial Sequence: Synthetic oligonucleotide
ggaggauaggcugggaacu

SEQ ID NO: 502222 - RNA, 19 nt, Artificial Sequence
  Description of Artificial Sequence: Synthetic oligonucleotide
uaacugcggcgggagccgc

SEQ ID NO: 502223 - RNA, 19 nt, Artificial Sequence
  Description of Artificial Sequence: Synthetic oligonucleotide
ccaugcaaccaugacccac

SEQ ID NO: 502224 - RNA, 19 nt, Artificial Sequence
  Description of Artificial Sequence: Synthetic oligonucleotide
gagauaggucauaccuucu

SEQ ID NO: 502225 - RNA, 19 nt, Artificial Sequence
  Description of Artificial Sequence: Synthetic oligonucleotide
gccuuaaaaguucaacauu

SEQ ID NO: 502226 - RNA, 19 nt, Artificial Sequence
  Description of Artificial Sequence: Synthetic oligonucleotide
ggcacccaugcaccuucgg

SEQ ID NO: 502227 - RNA, 19 nt, Artificial Sequence
  Description of Artificial Sequence: Synthetic oligonucleotide
cuguguucaugcuuuccau

SEQ ID NO: 502228 - RNA, 19 nt, Artificial Sequence
  Description of Artificial Sequence: Synthetic oligonucleotide
acuuuaugccgcagagaua

SEQ ID NO: 502229 - RNA, 19 nt, Artificial Sequence
  Description of Artificial Sequence: Synthetic oligonucleotide
caaggcccaaucccuccca

SEQ ID NO: 502230 - RNA, 19 nt, Artificial Sequence
  Description of Artificial Sequence: Synthetic oligonucleotide
ggcagcggauuuccaugcc

SEQ ID NO: 502231 - RNA, 19 nt, Artificial Sequence
  Description of Artificial Sequence: Synthetic oligonucleotide
cauugccucccuggugaug

SEQ ID NO: 502232 - RNA, 19 nt, Artificial Sequence
  Description of Artificial Sequence: Synthetic oligonucleotide
cagagucgguggcaugaca

SEQ ID NO: 502233 - RNA, 19 nt, Artificial Sequence
  Description of Artificial Sequence: Synthetic oligonucleotide
gccucauacuaauuaacuu

SEQ ID NO: 502234 - RNA, 19 nt, Artificial Sequence
  Description of Artificial Sequence: Synthetic oligonucleotide
caucguaacugcggcggga

SEQ ID NO: 502235 - RNA, 19 nt, Artificial Sequence
  Description of Artificial Sequence: Synthetic oligonucleotide
ggauaggcugggaacucca

SEQ ID NO: 502236 - RNA, 19 nt, Artificial Sequence
  Description of Artificial Sequence: Synthetic oligonucleotide
cgcagagauaggucauacc

SEQ ID NO: 502237 - RNA, 19 nt, Artificial Sequence
  Description of Artificial Sequence: Synthetic oligonucleotide
ggccuguuaaccaaggguu

SEQ ID NO: 502238 - RNA, 19 nt, Artificial Sequence
  Description of Artificial Sequence: Synthetic oligonucleotide
uccacccguagcgguggca

SEQ ID NO: 502239 - RNA, 19 nt, Artificial Sequence
  Description of Artificial Sequence: Synthetic oligonucleotide
ggucauaccuucucaucau

SEQ ID NO: 502240 - RNA, 19 nt, Artificial Sequence
  Description of Artificial Sequence: Synthetic oligonucleotide
gcagugcaacuauguuaag

SEQ ID NO: 502241 - RNA, 19 nt, Artificial Sequence
  Description of Artificial Sequence: Synthetic oligonucleotide
acccuaggacacagaccgg

SEQ ID NO: 502242 - RNA, 19 nt, Artificial Sequence
  Description of Artificial Sequence: Synthetic oligonucleotide
ccaaccgacugaucauguc

SEQ ID NO: 502243 - RNA, 19 nt, Artificial Sequence
  Description of Artificial Sequence: Synthetic oligonucleotide
ggcuuuucgcccugguugu

SEQ ID NO: 502244 - RNA, 19 nt, Artificial Sequence
  Description of Artificial Sequence: Synthetic oligonucleotide
auggcucaucccaucugaa

SEQ ID NO: 502245 - RNA, 19 nt, Artificial Sequence
  Description of Artificial Sequence: Synthetic oligonucleotide
augcaccuucggaacaaau

SEQ ID NO: 502246 - RNA, 19 nt, Artificial Sequence
  Description of Artificial Sequence: Synthetic oligonucleotide
gcccaaucccucccacugc

SEQ ID NO: 502247 - RNA, 19 nt, Artificial Sequence
  Description of Artificial Sequence: Synthetic oligonucleotide
gucauaccuucucaucauu

SEQ ID NO: 502248 - RNA, 19 nt, Artificial Sequence
  Description of Artificial Sequence: Synthetic oligonucleotide
cauggacuaagaugauguu

SEQ ID NO: 502249 - RNA, 19 nt, Artificial Sequence
  Description of Artificial Sequence: Synthetic oligonucleotide
ggaggcuuagagauacaua

SEQ ID NO: 502250 - RNA, 19 nt, Artificial Sequence
  Description of Artificial Sequence: Synthetic oligonucleotide
cugggcaacuggcucucaa

SEQ ID NO: 502251 - RNA, 19 nt, Artificial Sequence
  Description of Artificial Sequence: Synthetic oligonucleotide
caugacaccggaagccauu

SEQ ID NO: 502252 - RNA, 19 nt, Artificial Sequence
  Description of Artificial Sequence: Synthetic oligonucleotide
gguggcagcggauuuccau

SEQ ID NO: 502253 - RNA, 19 nt, Artificial Sequence
  Description of Artificial Sequence: Synthetic oligonucleotide
ccacccguagcgguggcag

SEQ ID NO: 502254 - RNA, 19 nt, Artificial Sequence
  Description of Artificial Sequence: Synthetic oligonucleotide
gcgguggcagcggauuucc

SEQ ID NO: 502255 - RNA, 19 nt, Artificial Sequence
  Description of Artificial Sequence: Synthetic oligonucleotide
gauaggcugggaacuccau

SEQ ID NO: 502256 - RNA, 19 nt, Artificial Sequence
  Description of Artificial Sequence: Synthetic oligonucleotide
agggcacuucuaagcagau

SEQ ID NO: 502257 - RNA, 19 nt, Artificial Sequence
  Description of Artificial Sequence: Synthetic oligonucleotide
cccggacacugucauucag

SEQ ID NO: 502258 - RNA, 19 nt, Artificial Sequence
  Description of Artificial Sequence: Synthetic oligonucleotide
ccgcagagauaggucauac

SEQ ID NO: 502259 - RNA, 19 nt, Artificial Sequence
  Description of Artificial Sequence: Synthetic oligonucleotide
agccgccacucaucagaau

SEQ ID NO: 502260 - RNA, 19 nt, Artificial Sequence
  Description of Artificial Sequence: Synthetic oligonucleotide
gcucaucccaucugaaguu

SEQ ID NO: 502261 - RNA, 19 nt, Artificial Sequence
  Description of Artificial Sequence: Synthetic oligonucleotide
cccgccgcauggcaugggc

SEQ ID NO: 502262 - RNA, 19 nt, Artificial Sequence
  Description of Artificial Sequence: Synthetic oligonucleotide
ccuucggaacaaauuugua

SEQ ID NO: 502263 - RNA, 19 nt, Artificial Sequence
  Description of Artificial Sequence: Synthetic oligonucleotide
gguuccccgccagaagcca

SEQ ID NO: 502264 - RNA, 19 nt, Artificial Sequence
  Description of Artificial Sequence: Synthetic oligonucleotide
gaccggaggcuuagagaua

SEQ ID NO: 502265 - RNA, 19 nt, Artificial Sequence
  Description of Artificial Sequence: Synthetic oligonucleotide
cccuaccuggugucuugac

SEQ ID NO: 502266 - RNA, 19 nt, Artificial Sequence
  Description of Artificial Sequence: Synthetic oligonucleotide
cguguguccggcgcagagc

SEQ ID NO: 502267 - RNA, 19 nt, Artificial Sequence
  Description of Artificial Sequence: Synthetic oligonucleotide
ccucuaaguugcuggagau

SEQ ID NO: 502268 - RNA, 19 nt, Artificial Sequence
  Description of Artificial Sequence: Synthetic oligonucleotide
ccgccacucaucagaauua

SEQ ID NO: 502269 - RNA, 19 nt, Artificial Sequence
  Description of Artificial Sequence: Synthetic oligonucleotide
guccggcgcagagccagca

SEQ ID NO: 502270 - RNA, 19 nt, Artificial Sequence
  Description of Artificial Sequence: Synthetic oligonucleotide
gcucucuggccaguuaccu

SEQ ID NO: 502271 - RNA, 19 nt, Artificial Sequence
  Description of Artificial Sequence: Synthetic oligonucleotide
gguugucaacagucacccu

SEQ ID NO: 502272 - RNA, 19 nt, Artificial Sequence
  Description of Artificial Sequence: Synthetic oligonucleotide
cccguagcgguggcagcgg

SEQ ID NO: 502273 - RNA, 19 nt, Artificial Sequence
  Description of Artificial Sequence: Synthetic oligonucleotide
acuucccgauagagggcuu

SEQ ID NO: 502274 - RNA, 19 nt, Artificial Sequence
  Description of Artificial Sequence: Synthetic oligonucleotide
cacagaccggaggcuuaga

SEQ ID NO: 502275 - RNA, 19 nt, Artificial Sequence
  Description of Artificial Sequence: Synthetic oligonucleotide
cuucccgauagagggcuuu

SEQ ID NO: 502276 - RNA, 19 nt, Artificial Sequence
  Description of Artificial Sequence: Synthetic oligonucleotide
ccgcuguuugggcacagcu

SEQ ID NO: 502277 - RNA, 19 nt, Artificial Sequence
  Description of Artificial Sequence: Synthetic oligonucleotide
cugcggcgggagccgccac

SEQ ID NO: 502278 - RNA, 19 nt, Artificial Sequence
  Description of Artificial Sequence: Synthetic oligonucleotide
gcgggagccgccacucauc

SEQ ID NO: 502279 - RNA, 19 nt, Artificial Sequence
  Description of Artificial Sequence: Synthetic oligonucleotide
gcuuuucgcccugguuguc

SEQ ID NO: 502280 - RNA, 19 nt, Artificial Sequence
  Description of Artificial Sequence: Synthetic oligonucleotide
ccucagucauccacccgua

SEQ ID NO: 502281 - RNA, 19 nt, Artificial Sequence
  Description of Artificial Sequence: Synthetic oligonucleotide
gccaguuaccugaacucuu

SEQ ID NO: 502282 - RNA, 19 nt, Artificial Sequence
  Description of Artificial Sequence: Synthetic oligonucleotide
cccgcuguuugggcacagc

SEQ ID NO: 502283 - RNA, 19 nt, Artificial Sequence
  Description of Artificial Sequence: Synthetic oligonucleotide
ggcuggcacccaugcaccu

SEQ ID NO: 502284 - RNA, 19 nt, Artificial Sequence
  Description of Artificial Sequence: Synthetic oligonucleotide
cuaugcucucuggccaguu

SEQ ID NO: 502285 - RNA, 19 nt, Artificial Sequence
  Description of Artificial Sequence: Synthetic oligonucleotide
gccgcagagauaggucaua

SEQ ID NO: 502286 - RNA, 19 nt, Artificial Sequence
  Description of Artificial Sequence: Synthetic oligonucleotide
ccccgccagaagccaguug

SEQ ID NO: 502287 - RNA, 19 nt, Artificial Sequence
  Description of Artificial Sequence: Synthetic oligonucleotide
ccaaccagucuugcaucaa

SEQ ID NO: 502288 - RNA, 19 nt, Artificial Sequence
  Description of Artificial Sequence: Synthetic oligonucleotide
cacucucucccugggucau

SEQ ID NO: 502289 - RNA, 19 nt, Artificial Sequence
  Description of Artificial Sequence: Synthetic oligonucleotide
ccggaggcuuagagauaca

SEQ ID NO: 502290 - RNA, 19 nt, Artificial Sequence
  Description of Artificial Sequence: Synthetic oligonucleotide
ccguagcgguggcagcgga

SEQ ID NO: 502291 - RNA, 19 nt, Artificial Sequence
  Description of Artificial Sequence: Synthetic oligonucleotide
cggaggcuuagagauacau

SEQ ID NO: 502292 - RNA, 19 nt, Artificial Sequence
  Description of Artificial Sequence: Synthetic oligonucleotide
aaucgaauaaaccaaacag

SEQ ID NO: 502293 - RNA, 19 nt, Artificial Sequence
  Description of Artificial Sequence: Synthetic oligonucleotide
aauaaugacacccauggag

SEQ ID NO: 502294 - RNA, 19 nt, Artificial Sequence
  Description of Artificial Sequence: Synthetic oligonucleotide
ugugccaucgcaaagaacg

SEQ ID NO: 502295 - RNA, 19 nt, Artificial Sequence
  Description of Artificial Sequence: Synthetic oligonucleotide
aaauccaugauauacuggu

SEQ ID NO: 502296 - RNA, 19 nt, Artificial Sequence
  Description of Artificial Sequence: Synthetic oligonucleotide
uguaaggucauaaugugcc

SEQ ID NO: 502297 - RNA, 19 nt, Artificial Sequence
  Description of Artificial Sequence: Synthetic oligonucleotide
guucagauaaccuucaucc

SEQ ID NO: 502298 - RNA, 19 nt, Artificial Sequence
  Description of Artificial Sequence: Synthetic oligonucleotide
aagaacgggagcaagacgc

SEQ ID NO: 502299 - RNA, 19 nt, Artificial Sequence
  Description of Artificial Sequence: Synthetic oligonucleotide
uuaagcauauacuucagca

SEQ ID NO: 502300 - RNA, 19 nt, Artificial Sequence
  Description of Artificial Sequence: Synthetic oligonucleotide
aagagguaucccuaauucc

SEQ ID NO: 502301 - RNA, 19 nt, Artificial Sequence
  Description of Artificial Sequence: Synthetic oligonucleotide
aauacaaucuaucgccauc

SEQ ID NO: 502302 - RNA, 19 nt, Artificial Sequence
  Description of Artificial Sequence: Synthetic oligonucleotide
aggaggcaaaucuagaagc

SEQ ID NO: 502303 - RNA, 19 nt, Artificial Sequence
  Description of Artificial Sequence: Synthetic oligonucleotide
ugcaauauauauucacugg

SEQ ID NO: 502304 - RNA, 19 nt, Artificial Sequence
  Description of Artificial Sequence: Synthetic oligonucleotide
uuuagcaagguccccauag

SEQ ID NO: 502305 - RNA, 19 nt, Artificial Sequence
  Description of Artificial Sequence: Synthetic oligonucleotide
ucuaaugaggcacucagac

SEQ ID NO: 502306 - RNA, 19 nt, Artificial Sequence
  Description of Artificial Sequence: Synthetic oligonucleotide
uaugugaaauccaugauau

SEQ ID NO: 502307 - RNA, 19 nt, Artificial Sequence
  Description of Artificial Sequence: Synthetic oligonucleotide
agccuugcaauauauauuc

SEQ ID NO: 502308 - RNA, 19 nt, Artificial Sequence
  Description of Artificial Sequence: Synthetic oligonucleotide
ucagggguaaucuucacag

SEQ ID NO: 502309 - RNA, 19 nt, Artificial Sequence
  Description of Artificial Sequence: Synthetic oligonucleotide
cucuaguaaagucugauag

SEQ ID NO: 502310 - RNA, 19 nt, Artificial Sequence
  Description of Artificial Sequence: Synthetic oligonucleotide
uggugagcaauauacaugc

SEQ ID NO: 502311 - RNA, 19 nt, Artificial Sequence
  Description of Artificial Sequence: Synthetic oligonucleotide
auacugguucaccaaaacc

SEQ ID NO: 502312 - RNA, 19 nt, Artificial Sequence
  Description of Artificial Sequence: Synthetic oligonucleotide
uauauauucacuggcagga

SEQ ID NO: 502313 - RNA, 19 nt, Artificial Sequence
  Description of Artificial Sequence: Synthetic oligonucleotide
ucuuauuagcaaaaugaga

SEQ ID NO: 502314 - RNA, 19 nt, Artificial Sequence
  Description of Artificial Sequence: Synthetic oligonucleotide
cacaucguggaacaaaugg

SEQ ID NO: 502315 - RNA, 19 nt, Artificial Sequence
  Description of Artificial Sequence: Synthetic oligonucleotide
uccuguaaggucauaaugu

SEQ ID NO: 502316 - RNA, 19 nt, Artificial Sequence
  Description of Artificial Sequence: Synthetic oligonucleotide
ugagcaauauacaugcagu

SEQ ID NO: 502317 - RNA, 19 nt, Artificial Sequence
  Description of Artificial Sequence: Synthetic oligonucleotide
ugaaauccaugauauacug

SEQ ID NO: 502318 - RNA, 19 nt, Artificial Sequence
  Description of Artificial Sequence: Synthetic oligonucleotide
ugaccaaaugauuuuagcu

SEQ ID NO: 502319 - RNA, 19 nt, Artificial Sequence
  Description of Artificial Sequence: Synthetic oligonucleotide
ucuucuguagacuguauga

SEQ ID NO: 502320 - RNA, 19 nt, Artificial Sequence
  Description of Artificial Sequence: Synthetic oligonucleotide
aaaguauuguacaaauucu

SEQ ID NO: 502321 - RNA, 19 nt, Artificial Sequence
  Description of Artificial Sequence: Synthetic oligonucleotide
uuugcaaaagccucaggug

SEQ ID NO: 502322 - RNA, 19 nt, Artificial Sequence
  Description of Artificial Sequence: Synthetic oligonucleotide
ugcaacuugcugcuguucg

SEQ ID NO: 502323 - RNA, 19 nt, Artificial Sequence
  Description of Artificial Sequence: Synthetic oligonucleotide
acaaggcacggauuaaagc

SEQ ID NO: 502324 - RNA, 19 nt, Artificial Sequence
  Description of Artificial Sequence: Synthetic oligonucleotide
uguugguaccacaucgugg

SEQ ID NO: 502325 - RNA, 19 nt, Artificial Sequence
  Description of Artificial Sequence: Synthetic oligonucleotide
aaaugauuuuagcuuggug

SEQ ID NO: 502326 - RNA, 19 nt, Artificial Sequence
  Description of Artificial Sequence: Synthetic oligonucleotide
aauuggaucuuugcaaaag

SEQ ID NO: 502327 - RNA, 19 nt, Artificial Sequence
  Description of Artificial Sequence: Synthetic oligonucleotide
auuccgagcguauuucagc

SEQ ID NO: 502328 - RNA, 19 nt, Artificial Sequence
  Description of Artificial Sequence: Synthetic oligonucleotide
auaaugacacccauggagg

SEQ ID NO: 502329 - RNA, 19 nt, Artificial Sequence
  Description of Artificial Sequence: Synthetic oligonucleotide
aguucagauaaccuucauc

SEQ ID NO: 502330 - RNA, 19 nt, Artificial Sequence
  Description of Artificial Sequence: Synthetic oligonucleotide
aaagcgaaugguaacggag

SEQ ID NO: 502331 - RNA, 19 nt, Artificial Sequence
  Description of Artificial Sequence: Synthetic oligonucleotide
ugcugguaucuuuugacgg

SEQ ID NO: 502332 - RNA, 19 nt, Artificial Sequence
  Description of Artificial Sequence: Synthetic oligonucleotide
uggaaaagcuccuagcacu

SEQ ID NO: 502333 - RNA, 19 nt, Artificial Sequence
  Description of Artificial Sequence: Synthetic oligonucleotide
uuugacggcggaaacuucc

SEQ ID NO: 502334 - RNA, 19 nt, Artificial Sequence
  Description of Artificial Sequence: Synthetic oligonucleotide
uuuuacuucgcuggaagag

SEQ ID NO: 502335 - RNA, 19 nt, Artificial Sequence
  Description of Artificial Sequence: Synthetic oligonucleotide
auggaaaacgccaagagga

SEQ ID NO: 502336 - RNA, 19 nt, Artificial Sequence
  Description of Artificial Sequence: Synthetic oligonucleotide
uaaagcuuuuacuucgcug

SEQ ID NO: 502337 - RNA, 19 nt, Artificial Sequence
  Description of Artificial Sequence: Synthetic oligonucleotide
agucaaggaacucagugcu

SEQ ID NO: 502338 - RNA, 19 nt, Artificial Sequence
  Description of Artificial Sequence: Synthetic oligonucleotide
aguuguuauggugaauggc

SEQ ID NO: 502339 - RNA, 19 nt, Artificial Sequence
  Description of Artificial Sequence: Synthetic oligonucleotide
uguguucuggaacaaggca

SEQ ID NO: 502340 - RNA, 19 nt, Artificial Sequence
  Description of Artificial Sequence: Synthetic oligonucleotide
ugaacccuaacuuuggaau

SEQ ID NO: 502341 - RNA, 19 nt, Artificial Sequence
  Description of Artificial Sequence: Synthetic oligonucleotide
auacuuguggcccuucauc

SEQ ID NO: 502342 - RNA, 19 nt, Artificial Sequence
  Description of Artificial Sequence: Synthetic oligonucleotide
gugggaaucgaauaaacca

SEQ ID NO: 502343 - RNA, 19 nt, Artificial Sequence
  Description of Artificial Sequence: Synthetic oligonucleotide
gaaucgaauaaaccaaaca

SEQ ID NO: 502344 - RNA, 19 nt, Artificial Sequence
  Description of Artificial Sequence: Synthetic oligonucleotide
ucuccaauuucuugcaagc

SEQ ID NO: 502345 - RNA, 19 nt, Artificial Sequence
  Description of Artificial Sequence: Synthetic oligonucleotide
uaucccuaauuccuguaag

SEQ ID NO: 502346 - RNA, 19 nt, Artificial Sequence
  Description of Artificial Sequence: Synthetic oligonucleotide
uuguuauggugaauggcag

SEQ ID NO: 502347 - RNA, 19 nt, Artificial Sequence
  Description of Artificial Sequence: Synthetic oligonucleotide
caaucuaucgccaucuuca

SEQ ID NO: 502348 - RNA, 19 nt, Artificial Sequence
  Description of Artificial Sequence: Synthetic oligonucleotide
uauauucacuggcaggacu

SEQ ID NO: 502349 - RNA, 19 nt, Artificial Sequence
  Description of Artificial Sequence: Synthetic oligonucleotide
ugggaaucgaauaaaccaa

SEQ ID NO: 502350 - RNA, 19 nt, Artificial Sequence
  Description of Artificial Sequence: Synthetic oligonucleotide
ucauuagguuucuagcagc

SEQ ID NO: 502351 - RNA, 19 nt, Artificial Sequence
  Description of Artificial Sequence: Synthetic oligonucleotide
gacagguccucccagauca

SEQ ID NO: 502352 - RNA, 19 nt, Artificial Sequence
  Description of Artificial Sequence: Synthetic oligonucleotide
uuauuagcaaaaugagagu

SEQ ID NO: 502353 - RNA, 19 nt, Artificial Sequence
  Description of Artificial Sequence: Synthetic oligonucleotide
aagguaguugugccaucgc

SEQ ID NO: 502354 - RNA, 19 nt, Artificial Sequence
  Description of Artificial Sequence: Synthetic oligonucleotide
uucugaacccuaacuuugg

SEQ ID NO: 502355 - RNA, 19 nt, Artificial Sequence
  Description of Artificial Sequence: Synthetic oligonucleotide
aggcacaagguccacaaag

SEQ ID NO: 502356 - RNA, 19 nt, Artificial Sequence
  Description of Artificial Sequence: Synthetic oligonucleotide
uuguaggcaagacucuaag

SEQ ID NO: 502357 - RNA, 19 nt, Artificial Sequence
  Description of Artificial Sequence: Synthetic oligonucleotide
acggauuaaagcuuuuacu

SEQ ID NO: 502358 - RNA, 19 nt, Artificial Sequence
  Description of Artificial Sequence: Synthetic oligonucleotide
ucaccaaaaccagugagug

SEQ ID NO: 502359 - RNA, 19 nt, Artificial Sequence
  Description of Artificial Sequence: Synthetic oligonucleotide
gucauuagguuucuagcag

SEQ ID NO: 502360 - RNA, 19 nt, Artificial Sequence
  Description of Artificial Sequence: Synthetic oligonucleotide
ucuaggucaguaucaggag

SEQ ID NO: 502361 - RNA, 19 nt, Artificial Sequence
  Description of Artificial Sequence: Synthetic oligonucleotide
cauguggguaaagaaaagg

SEQ ID NO: 502362 - RNA, 19 nt, Artificial Sequence
  Description of Artificial Sequence: Synthetic oligonucleotide
acggcggaaacuuccacac

SEQ ID NO: 502363 - RNA, 19 nt, Artificial Sequence
  Description of Artificial Sequence: Synthetic oligonucleotide
gcaauauauauucacuggc

SEQ ID NO: 502364 - RNA, 19 nt, Artificial Sequence
  Description of Artificial Sequence: Synthetic oligonucleotide
ugaaagcgaaugguaacgg

SEQ ID NO: 502365 - RNA, 19 nt, Artificial Sequence
  Description of Artificial Sequence: Synthetic oligonucleotide
uauuccgagcguauuucag

SEQ ID NO: 502366 - RNA, 19 nt, Artificial Sequence
  Description of Artificial Sequence: Synthetic oligonucleotide
uaggcaagacucuaagcug

SEQ ID NO: 502367 - RNA, 19 nt, Artificial Sequence
  Description of Artificial Sequence: Synthetic oligonucleotide
auugaucacuacuuguggu

SEQ ID NO: 502368 - RNA, 19 nt, Artificial Sequence
  Description of Artificial Sequence: Synthetic oligonucleotide
cuagccugcagcauuauca

SEQ ID NO: 502369 - RNA, 19 nt, Artificial Sequence
  Description of Artificial Sequence: Synthetic oligonucleotide
guuauggugaauggcagcc

SEQ ID NO: 502370 - RNA, 19 nt, Artificial Sequence
  Description of Artificial Sequence: Synthetic oligonucleotide
cugaaagcgaaugguaacg

SEQ ID NO: 502371 - RNA, 19 nt, Artificial Sequence
  Description of Artificial Sequence: Synthetic oligonucleotide
agcaagacgcaaucugaac

SEQ ID NO: 502372 - RNA, 19 nt, Artificial Sequence
  Description of Artificial Sequence: Synthetic oligonucleotide
uauccaguucagauaaccu

SEQ ID NO: 502373 - RNA, 19 nt, Artificial Sequence
  Description of Artificial Sequence: Synthetic oligonucleotide
cuuaagcauauacuucagc

SEQ ID NO: 502374 - RNA, 19 nt, Artificial Sequence
  Description of Artificial Sequence: Synthetic oligonucleotide
guuguuauggugaauggca

SEQ ID NO: 502375 - RNA, 19 nt, Artificial Sequence
  Description of Artificial Sequence: Synthetic oligonucleotide
caagacgcaaucugaacug

SEQ ID NO: 502376 - RNA, 19 nt, Artificial Sequence
  Description of Artificial Sequence: Synthetic oligonucleotide
acacaacucucagagggcc

SEQ ID NO: 502377 - RNA, 19 nt, Artificial Sequence
  Description of Artificial Sequence: Synthetic oligonucleotide
aggcaagacucuaagcugc

SEQ ID NO: 502378 - RNA, 19 nt, Artificial Sequence
  Description of Artificial Sequence: Synthetic oligonucleotide
uuagcaagguccccauagc

SEQ ID NO: 502379 - RNA, 19 nt, Artificial Sequence
  Description of Artificial Sequence: Synthetic oligonucleotide
aaucacagcauggagugau

SEQ ID NO: 502380 - RNA, 19 nt, Artificial Sequence
  Description of Artificial Sequence: Synthetic oligonucleotide
aauguggguccagugaugu

SEQ ID NO: 502381 - RNA, 19 nt, Artificial Sequence
  Description of Artificial Sequence: Synthetic oligonucleotide
uuuacuucgcuggaagaga

SEQ ID NO: 502382 - RNA, 19 nt, Artificial Sequence
  Description of Artificial Sequence: Synthetic oligonucleotide
aaauacuuguggcccuuca

SEQ ID NO: 502383 - RNA, 19 nt, Artificial Sequence
  Description of Artificial Sequence: Synthetic oligonucleotide
aucgaauaaaccaaacagu

SEQ ID NO: 502384 - RNA, 19 nt, Artificial Sequence
  Description of Artificial Sequence: Synthetic oligonucleotide
aucuuuugacggcggaaac

SEQ ID NO: 502385 - RNA, 19 nt, Artificial Sequence
  Description of Artificial Sequence: Synthetic oligonucleotide
guaguaucgccuuuuaaaa

SEQ ID NO: 502386 - RNA, 19 nt, Artificial Sequence
  Description of Artificial Sequence: Synthetic oligonucleotide
uguuccgggcuccaagugc

SEQ ID NO: 502387 - RNA, 19 nt, Artificial Sequence
  Description of Artificial Sequence: Synthetic oligonucleotide
guaggcaagacucuaagcu

SEQ ID NO: 502388 - RNA, 19 nt, Artificial Sequence
  Description of Artificial Sequence: Synthetic oligonucleotide
uuaaagcuuuuacuucgcu

SEQ ID NO: 502389 - RNA, 19 nt, Artificial Sequence
  Description of Artificial Sequence: Synthetic oligonucleotide
aacgccaagaggacagaac

SEQ ID NO: 502390 - RNA, 19 nt, Artificial Sequence
  Description of Artificial Sequence: Synthetic oligonucleotide
uggagugaugggcaaguca

SEQ ID NO: 502391 - RNA, 19 nt, Artificial Sequence
  Description of Artificial Sequence: Synthetic oligonucleotide
augacacccauggaggaac

SEQ ID NO: 502392 - RNA, 19 nt, Artificial Sequence
  Description of Artificial Sequence: Synthetic oligonucleotide
ugcuuaaagugauaucuua

SEQ ID NO: 502393 - RNA, 19 nt, Artificial Sequence
  Description of Artificial Sequence: Synthetic oligonucleotide
ugauauuccgagcguauuu

SEQ ID NO: 502394 - RNA, 19 nt, Artificial Sequence
  Description of Artificial Sequence: Synthetic oligonucleotide
gaacugauagguggcagag

SEQ ID NO: 502395 - RNA, 19 nt, Artificial Sequence
  Description of Artificial Sequence: Synthetic oligonucleotide
uucagauaaccuucaucca

SEQ ID NO: 502396 - RNA, 19 nt, Artificial Sequence
  Description of Artificial Sequence: Synthetic oligonucleotide
cacggauuaaagcuuuuac

SEQ ID NO: 502397 - RNA, 19 nt, Artificial Sequence
  Description of Artificial Sequence: Synthetic oligonucleotide
aucgcaaagaacgggagca

SEQ ID NO: 502398 - RNA, 19 nt, Artificial Sequence
  Description of Artificial Sequence: Synthetic oligonucleotide
cuccagagcaguaauucug

SEQ ID NO: 502399 - RNA, 19 nt, Artificial Sequence
  Description of Artificial Sequence: Synthetic oligonucleotide
gaccaauuggaucuuugca

SEQ ID NO: 502400 - RNA, 19 nt, Artificial Sequence
  Description of Artificial Sequence: Synthetic oligonucleotide
agaggacagaacugauagg

SEQ ID NO: 502401 - RNA, 19 nt, Artificial Sequence
  Description of Artificial Sequence: Synthetic oligonucleotide
uguucgugggaaucgaaua

SEQ ID NO: 502402 - RNA, 19 nt, Artificial Sequence
  Description of Artificial Sequence: Synthetic oligonucleotide
ucguccauguuggaaaagc

SEQ ID NO: 502403 - RNA, 19 nt, Artificial Sequence
  Description of Artificial Sequence: Synthetic oligonucleotide
auacaaucuaucgccaucu

SEQ ID NO: 502404 - RNA, 19 nt, Artificial Sequence
  Description of Artificial Sequence: Synthetic oligonucleotide
agaacugauagguggcaga

SEQ ID NO: 502405 - RNA, 19 nt, Artificial Sequence
  Description of Artificial Sequence: Synthetic oligonucleotide
aggaauguggguccaguga

SEQ ID NO: 502406 - RNA, 19 nt, Artificial Sequence
  Description of Artificial Sequence: Synthetic oligonucleotide
aagucaguaguaucgccuu

SEQ ID NO: 502407 - RNA, 19 nt, Artificial Sequence
  Description of Artificial Sequence: Synthetic oligonucleotide
ugguauguugguaccacau

SEQ ID NO: 502408 - RNA, 19 nt, Artificial Sequence
  Description of Artificial Sequence: Synthetic oligonucleotide
uggaaaacgccaagaggac

SEQ ID NO: 502409 - RNA, 19 nt, Artificial Sequence
  Description of Artificial Sequence: Synthetic oligonucleotide
gauaaccuucauccaggcc

SEQ ID NO: 502410 - RNA, 19 nt, Artificial Sequence
  Description of Artificial Sequence: Synthetic oligonucleotide
aaaagccucagguggugau

SEQ ID NO: 502411 - RNA, 19 nt, Artificial Sequence
  Description of Artificial Sequence: Synthetic oligonucleotide
gauauuccgagcguauuuc

SEQ ID NO: 502412 - RNA, 19 nt, Artificial Sequence
  Description of Artificial Sequence: Synthetic oligonucleotide
uaucuuuugacggcggaaa

SEQ ID NO: 502413 - RNA, 19 nt, Artificial Sequence
  Description of Artificial Sequence: Synthetic oligonucleotide
agaauggaaaacgccaaga

SEQ ID NO: 502414 - RNA, 19 nt, Artificial Sequence
  Description of Artificial Sequence: Synthetic oligonucleotide
uucuaaugaggcacucaga

SEQ ID NO: 502415 - RNA, 19 nt, Artificial Sequence
  Description of Artificial Sequence: Synthetic oligonucleotide
uugaucacuacuugugguu

SEQ ID NO: 502416 - RNA, 19 nt, Artificial Sequence
  Description of Artificial Sequence: Synthetic oligonucleotide
ucgugggaaucgaauaaac

SEQ ID NO: 502417 - RNA, 19 nt, Artificial Sequence
  Description of Artificial Sequence: Synthetic oligonucleotide
gguccagugauguuccggg

SEQ ID NO: 502418 - RNA, 19 nt, Artificial Sequence
  Description of Artificial Sequence: Synthetic oligonucleotide
ucugaacccuaacuuugga

SEQ ID NO: 502419 - RNA, 19 nt, Artificial Sequence
  Description of Artificial Sequence: Synthetic oligonucleotide
ccuaauuccuguaagguca

SEQ ID NO: 502420 - RNA, 19 nt, Artificial Sequence
  Description of Artificial Sequence: Synthetic oligonucleotide
agugagugauucugagaag

SEQ ID NO: 502421 - RNA, 19 nt, Artificial Sequence
  Description of Artificial Sequence: Synthetic oligonucleotide
acaguguugugaauuucac

SEQ ID NO: 502422 - RNA, 19 nt, Artificial Sequence
  Description of Artificial Sequence: Synthetic oligonucleotide
ugguaucuuuugacggcgg

SEQ ID NO: 502423 - RNA, 19 nt, Artificial Sequence
  Description of Artificial Sequence: Synthetic oligonucleotide
auauauucacuggcaggac

SEQ ID NO: 502424 - RNA, 19 nt, Artificial Sequence
  Description of Artificial Sequence: Synthetic oligonucleotide
guaaagucugauaggcaag

SEQ ID NO: 502425 - RNA, 19 nt, Artificial Sequence
  Description of Artificial Sequence: Synthetic oligonucleotide
gugcaaauacuuguggccc

SEQ ID NO: 502426 - RNA, 19 nt, Artificial Sequence
  Description of Artificial Sequence: Synthetic oligonucleotide
ucuuaauauccaguucaga

SEQ ID NO: 502427 - RNA, 19 nt, Artificial Sequence
  Description of Artificial Sequence: Synthetic oligonucleotide
auucacuggcaggacuucc

SEQ ID NO: 502428 - RNA, 19 nt, Artificial Sequence
  Description of Artificial Sequence: Synthetic oligonucleotide
ugcagaaaugaaguucugu

SEQ ID NO: 502429 - RNA, 19 nt, Artificial Sequence
  Description of Artificial Sequence: Synthetic oligonucleotide
cuuugcaaaagccucaggu

SEQ ID NO: 502430 - RNA, 19 nt, Artificial Sequence
  Description of Artificial Sequence: Synthetic oligonucleotide
uagccuugcaauauauauu

SEQ ID NO: 502431 - RNA, 19 nt, Artificial Sequence
  Description of Artificial Sequence: Synthetic oligonucleotide
ucuuuugacggcggaaacu

SEQ ID NO: 502432 - RNA, 19 nt, Artificial Sequence
  Description of Artificial Sequence: Synthetic oligonucleotide
guaaggucauaaugugccc

SEQ ID NO: 502433 - RNA, 19 nt, Artificial Sequence
  Description of Artificial Sequence: Synthetic oligonucleotide
ggccacauagacuggaacc

SEQ ID NO: 502434 - RNA, 19 nt, Artificial Sequence
  Description of Artificial Sequence: Synthetic oligonucleotide
aguugagauguccuccaga

SEQ ID NO: 502435 - RNA, 19 nt, Artificial Sequence
  Description of Artificial Sequence: Synthetic oligonucleotide
gaaagcgaaugguaacgga

SEQ ID NO: 502436 - RNA, 19 nt, Artificial Sequence
  Description of Artificial Sequence: Synthetic oligonucleotide
aagcgaaugguaacggagu

SEQ ID NO: 502437 - RNA, 19 nt, Artificial Sequence
  Description of Artificial Sequence: Synthetic oligonucleotide
cugguaucuuuugacggcg

SEQ ID NO: 502438 - RNA, 19 nt, Artificial Sequence
  Description of Artificial Sequence: Synthetic oligonucleotide
auauugcugcaacuugcug

SEQ ID NO: 502439 - RNA, 19 nt, Artificial Sequence
  Description of Artificial Sequence: Synthetic oligonucleotide
aucagggguaaucuucaca

SEQ ID NO: 502440 - RNA, 19 nt, Artificial Sequence
  Description of Artificial Sequence: Synthetic oligonucleotide
auauuccgagcguauuuca

SEQ ID NO: 502441 - RNA, 19 nt, Artificial Sequence
  Description of Artificial Sequence: Synthetic oligonucleotide
accgaucuccaauuucuug

SEQ ID NO: 502442 - RNA, 19 nt, Artificial Sequence
  Description of Artificial Sequence: Synthetic oligonucleotide
ugauucugagaaguucuga

SEQ ID NO: 502443 - RNA, 19 nt, Artificial Sequence
  Description of Artificial Sequence: Synthetic oligonucleotide
ggucauuagguuucuagca

SEQ ID NO: 502444 - RNA, 19 nt, Artificial Sequence
  Description of Artificial Sequence: Synthetic oligonucleotide
uccuagcacuugauaaucu

SEQ ID NO: 502445 - RNA, 19 nt, Artificial Sequence
  Description of Artificial Sequence: Synthetic oligonucleotide
ugcaaauacuuguggcccu

SEQ ID NO: 502446 - RNA, 19 nt, Artificial Sequence
  Description of Artificial Sequence: Synthetic oligonucleotide
caucgcaaagaacgggagc

SEQ ID NO: 502447 - RNA, 19 nt, Artificial Sequence
  Description of Artificial Sequence: Synthetic oligonucleotide
ugugguauguugguaccac

SEQ ID NO: 502448 - RNA, 19 nt, Artificial Sequence
  Description of Artificial Sequence: Synthetic oligonucleotide
uucugcacgccuucuguac

SEQ ID NO: 502449 - RNA, 19 nt, Artificial Sequence
  Description of Artificial Sequence: Synthetic oligonucleotide
uggggucuaaaauuacaau

SEQ ID NO: 502450 - RNA, 19 nt, Artificial Sequence
  Description of Artificial Sequence: Synthetic oligonucleotide
aucuuaauauccaguucag

SEQ ID NO: 502451 - RNA, 19 nt, Artificial Sequence
  Description of Artificial Sequence: Synthetic oligonucleotide
ugccaucgcaaagaacggg

SEQ ID NO: 502452 - RNA, 19 nt, Artificial Sequence
  Description of Artificial Sequence: Synthetic oligonucleotide
cuggguaagucugggacag

SEQ ID NO: 502453 - RNA, 19 nt, Artificial Sequence
  Description of Artificial Sequence: Synthetic oligonucleotide
caugauuucaggaacuuuu

SEQ ID NO: 502454 - RNA, 19 nt, Artificial Sequence
  Description of Artificial Sequence: Synthetic oligonucleotide
acgccuucuguacuugcag

SEQ ID NO: 502455 - RNA, 19 nt, Artificial Sequence
  Description of Artificial Sequence: Synthetic oligonucleotide
uugacggcggaaacuucca

SEQ ID NO: 502456 - RNA, 19 nt, Artificial Sequence
  Description of Artificial Sequence: Synthetic oligonucleotide
augcaguugccaggggucc

SEQ ID NO: 502457 - RNA, 19 nt, Artificial Sequence
  Description of Artificial Sequence: Synthetic oligonucleotide
ugagugauucugagaaguu

SEQ ID NO: 502458 - RNA, 19 nt, Artificial Sequence
  Description of Artificial Sequence: Synthetic oligonucleotide
ggagugaugggcaagucac

SEQ ID NO: 502459 - RNA, 19 nt, Artificial Sequence
  Description of Artificial Sequence: Synthetic oligonucleotide
ggggucuaaaauuacaaua

SEQ ID NO: 502460 - RNA, 19 nt, Artificial Sequence
  Description of Artificial Sequence: Synthetic oligonucleotide
ugguaacggaguugggcug

SEQ ID NO: 502461 - RNA, 19 nt, Artificial Sequence
  Description of Artificial Sequence: Synthetic oligonucleotide
cugauagguggcagagggg

SEQ ID NO: 502462 - RNA, 19 nt, Artificial Sequence
  Description of Artificial Sequence: Synthetic oligonucleotide
cuguacuugcagcuuguug

SEQ ID NO: 502463 - RNA, 19 nt, Artificial Sequence
  Description of Artificial Sequence: Synthetic oligonucleotide
aggcaaaucuagaagcugu

SEQ ID NO: 502464 - RNA, 19 nt, Artificial Sequence
  Description of Artificial Sequence: Synthetic oligonucleotide
acagcacauugaucacuac

SEQ ID NO: 502465 - RNA, 19 nt, Artificial Sequence
  Description of Artificial Sequence: Synthetic oligonucleotide
gacugaaagcgaaugguaa

SEQ ID NO: 502466 - RNA, 19 nt, Artificial Sequence
  Description of Artificial Sequence: Synthetic oligonucleotide
gcaauauacaugcaguugu

SEQ ID NO: 502467 - RNA, 19 nt, Artificial Sequence
  Description of Artificial Sequence: Synthetic oligonucleotide
aaugacacccauggaggaa

SEQ ID NO: 502468 - RNA, 19 nt, Artificial Sequence
  Description of Artificial Sequence: Synthetic oligonucleotide
cuugcaagcuagccugcag

SEQ ID NO: 502469 - RNA, 19 nt, Artificial Sequence
  Description of Artificial Sequence: Synthetic oligonucleotide
ucucagugaucacuguguu

SEQ ID NO: 502470 - RNA, 19 nt, Artificial Sequence
  Description of Artificial Sequence: Synthetic oligonucleotide
aagacgcaaucugaacuga

SEQ ID NO: 502471 - RNA, 19 nt, Artificial Sequence
  Description of Artificial Sequence: Synthetic oligonucleotide
gacggcggaaacuuccaca

SEQ ID NO: 502472 - RNA, 19 nt, Artificial Sequence
  Description of Artificial Sequence: Synthetic oligonucleotide
aauggagagcagcgacagu

SEQ ID NO: 502473 - RNA, 19 nt, Artificial Sequence
  Description of Artificial Sequence: Synthetic oligonucleotide
aacugaugacccaggguca

SEQ ID NO: 502474 - RNA, 19 nt, Artificial Sequence
  Description of Artificial Sequence: Synthetic oligonucleotide
ucaguaguaucgccuuuua

SEQ ID NO: 502475 - RNA, 19 nt, Artificial Sequence
  Description of Artificial Sequence: Synthetic oligonucleotide
gcugguaucuuuugacggc

SEQ ID NO: 502476 - RNA, 19 nt, Artificial Sequence
  Description of Artificial Sequence: Synthetic oligonucleotide
agguaucccuaauuccugu

SEQ ID NO: 502477 - RNA, 19 nt, Artificial Sequence
  Description of Artificial Sequence: Synthetic oligonucleotide
ugguaccacaucguggaac

SEQ ID NO: 502478 - RNA, 19 nt, Artificial Sequence
  Description of Artificial Sequence: Synthetic oligonucleotide
gaaugcaguugccaggggu

SEQ ID NO: 502479 - RNA, 19 nt, Artificial Sequence
  Description of Artificial Sequence: Synthetic oligonucleotide
uuguccacgucuggccugg

SEQ ID NO: 502480 - RNA, 19 nt, Artificial Sequence
  Description of Artificial Sequence: Synthetic oligonucleotide
auguccaaagcuggggucu

SEQ ID NO: 502481 - RNA, 19 nt, Artificial Sequence
  Description of Artificial Sequence: Synthetic oligonucleotide
ugcggcauguggguaaaga

SEQ ID NO: 502482 - RNA, 19 nt, Artificial Sequence
  Description of Artificial Sequence: Synthetic oligonucleotide
agcggcucuucuuucugug

SEQ ID NO: 502483 - RNA, 19 nt, Artificial Sequence
  Description of Artificial Sequence: Synthetic oligonucleotide
ucucuuuagcuggugcagu

SEQ ID NO: 502484 - RNA, 19 nt, Artificial Sequence
  Description of Artificial Sequence: Synthetic oligonucleotide
uuuugacggcggaaacuuc

SEQ ID NO: 502485 - RNA, 19 nt, Artificial Sequence
  Description of Artificial Sequence: Synthetic oligonucleotide
gacucuaagcugcugguau

SEQ ID NO: 502486 - RNA, 19 nt, Artificial Sequence
  Description of Artificial Sequence: Synthetic oligonucleotide
gagagcagcgacagucaag

SEQ ID NO: 502487 - RNA, 19 nt, Artificial Sequence
  Description of Artificial Sequence: Synthetic oligonucleotide
uaccacaucguggaacaaa

SEQ ID NO: 502488 - RNA, 19 nt, Artificial Sequence
  Description of Artificial Sequence: Synthetic oligonucleotide
gcagcgacagucaaggaac

SEQ ID NO: 502489 - RNA, 19 nt, Artificial Sequence
  Description of Artificial Sequence: Synthetic oligonucleotide
guaucccuaauuccuguaa

SEQ ID NO: 502490 - RNA, 19 nt, Artificial Sequence
  Description of Artificial Sequence: Synthetic oligonucleotide
guuccgggcuccaagugcc

SEQ ID NO: 502491 - RNA, 19 nt, Artificial Sequence
  Description of Artificial Sequence: Synthetic oligonucleotide
aguugauauuccgagcgua

SEQ ID NO: 502492 - RNA, 19 nt, Artificial Sequence
  Description of Artificial Sequence: Synthetic oligonucleotide
ugcuugcugccgaauaauu

SEQ ID NO: 502493 - RNA, 19 nt, Artificial Sequence
  Description of Artificial Sequence: Synthetic oligonucleotide
cuggucagugcagaaauga

SEQ ID NO: 502494 - RNA, 19 nt, Artificial Sequence
  Description of Artificial Sequence: Synthetic oligonucleotide
auauucacuggcaggacuu

SEQ ID NO: 502495 - RNA, 19 nt, Artificial Sequence
  Description of Artificial Sequence: Synthetic oligonucleotide
ccuaacuuuggaaugucca

SEQ ID NO: 502496 - RNA, 19 nt, Artificial Sequence
  Description of Artificial Sequence: Synthetic oligonucleotide
ucucagccaacaugauuuc

SEQ ID NO: 502497 - RNA, 19 nt, Artificial Sequence
  Description of Artificial Sequence: Synthetic oligonucleotide
cuccuuuagggacuuuuca

SEQ ID NO: 502498 - RNA, 19 nt, Artificial Sequence
  Description of Artificial Sequence: Synthetic oligonucleotide
cuccuagcacuugauaauc

SEQ ID NO: 502499 - RNA, 19 nt, Artificial Sequence
  Description of Artificial Sequence: Synthetic oligonucleotide
ugcccagcagauucauacu

SEQ ID NO: 502500 - RNA, 19 nt, Artificial Sequence
  Description of Artificial Sequence: Synthetic oligonucleotide
cagaggugcaaauacuugu

SEQ ID NO: 502501 - RNA, 19 nt, Artificial Sequence
  Description of Artificial Sequence: Synthetic oligonucleotide
aauccaugauauacugguu

SEQ ID NO: 502502 - RNA, 19 nt, Artificial Sequence
  Description of Artificial Sequence: Synthetic oligonucleotide
agacagaggugcaaauacu

SEQ ID NO: 502503 - RNA, 19 nt, Artificial Sequence
  Description of Artificial Sequence: Synthetic oligonucleotide
gagcguauuucagcaaguc

SEQ ID NO: 502504 - RNA, 19 nt, Artificial Sequence
  Description of Artificial Sequence: Synthetic oligonucleotide
guuucuaaugaggcacuca

SEQ ID NO: 502505 - RNA, 19 nt, Artificial Sequence
  Description of Artificial Sequence: Synthetic oligonucleotide
uuuuagcuugguggguagu

SEQ ID NO: 502506 - RNA, 19 nt, Artificial Sequence
  Description of Artificial Sequence: Synthetic oligonucleotide
ggcggaaacuuccacacaa

SEQ ID NO: 502507 - RNA, 19 nt, Artificial Sequence
  Description of Artificial Sequence: Synthetic oligonucleotide
guugccaggggucccuuuc

SEQ ID NO: 502508 - RNA, 19 nt, Artificial Sequence
  Description of Artificial Sequence: Synthetic oligonucleotide
cgugggaaucgaauaaacc

SEQ ID NO: 502509 - RNA, 19 nt, Artificial Sequence
  Description of Artificial Sequence: Synthetic oligonucleotide
ugacggcggaaacuuccac

SEQ ID NO: 502510 - RNA, 19 nt, Artificial Sequence
  Description of Artificial Sequence: Synthetic oligonucleotide
gugccaucgcaaagaacgg

SEQ ID NO: 502511 - RNA, 19 nt, Artificial Sequence
  Description of Artificial Sequence: Synthetic oligonucleotide
ggaaucgaauaaaccaaac

SEQ ID NO: 502512 - RNA, 19 nt, Artificial Sequence
  Description of Artificial Sequence: Synthetic oligonucleotide
agacugaaagcgaauggua

SEQ ID NO: 502513 - RNA, 19 nt, Artificial Sequence
  Description of Artificial Sequence: Synthetic oligonucleotide
cugccacucuucuccgagg

SEQ ID NO: 502514 - RNA, 19 nt, Artificial Sequence
  Description of Artificial Sequence: Synthetic oligonucleotide
cuuuccaucugcccaccga

SEQ ID NO: 502515 - RNA, 19 nt, Artificial Sequence
  Description of Artificial Sequence: Synthetic oligonucleotide
uacaaucuaucgccaucuu

SEQ ID NO: 502516 - RNA, 19 nt, Artificial Sequence
  Description of Artificial Sequence: Synthetic oligonucleotide
auucugcacgccuucugua

SEQ ID NO: 502517 - RNA, 19 nt, Artificial Sequence
  Description of Artificial Sequence: Synthetic oligonucleotide
uauucacuggcaggacuuc

SEQ ID NO: 502518 - RNA, 19 nt, Artificial Sequence
  Description of Artificial Sequence: Synthetic oligonucleotide
uuccaucugcccaccgauc

SEQ ID NO: 502519 - RNA, 19 nt, Artificial Sequence
  Description of Artificial Sequence: Synthetic oligonucleotide
ccgaauaauucucuucauc

SEQ ID NO: 502520 - RNA, 19 nt, Artificial Sequence
  Description of Artificial Sequence: Synthetic oligonucleotide
ugcuguucgugggaaucga

SEQ ID NO: 502521 - RNA, 19 nt, Artificial Sequence
  Description of Artificial Sequence: Synthetic oligonucleotide
ccgagcguauuucagcaag

SEQ ID NO: 502522 - RNA, 19 nt, Artificial Sequence
  Description of Artificial Sequence: Synthetic oligonucleotide
caguugagauguccuccag

SEQ ID NO: 502523 - RNA, 19 nt, Artificial Sequence
  Description of Artificial Sequence: Synthetic oligonucleotide
caaagguaguugugccauc

SEQ ID NO: 502524 - RNA, 19 nt, Artificial Sequence
  Description of Artificial Sequence: Synthetic oligonucleotide
agggagggagaacuauuua

SEQ ID NO: 502525 - RNA, 19 nt, Artificial Sequence
  Description of Artificial Sequence: Synthetic oligonucleotide
gugguauguugguaccaca

SEQ ID NO: 502526 - RNA, 19 nt, Artificial Sequence
  Description of Artificial Sequence: Synthetic oligonucleotide
gcuuaaagugauaucuuaa

SEQ ID NO: 502527 - RNA, 19 nt, Artificial Sequence
  Description of Artificial Sequence: Synthetic oligonucleotide
gagcaagacgcaaucugaa

SEQ ID NO: 502528 - RNA, 19 nt, Artificial Sequence
  Description of Artificial Sequence: Synthetic oligonucleotide
guuuugcacagggaauaca

SEQ ID NO: 502529 - RNA, 19 nt, Artificial Sequence
  Description of Artificial Sequence: Synthetic oligonucleotide
uggguccagugauguuccg

SEQ ID NO: 502530 - RNA, 19 nt, Artificial Sequence
  Description of Artificial Sequence: Synthetic oligonucleotide
ugcccaccgaucuccaauu

SEQ ID NO: 502531 - RNA, 19 nt, Artificial Sequence
  Description of Artificial Sequence: Synthetic oligonucleotide
ggaauacaaucuaucgcca

SEQ ID NO: 502532 - RNA, 19 nt, Artificial Sequence
  Description of Artificial Sequence: Synthetic oligonucleotide
gguaacggaguugggcugc

SEQ ID NO: 502533 - RNA, 19 nt, Artificial Sequence
  Description of Artificial Sequence: Synthetic oligonucleotide
gaguugauauuccgagcgu

SEQ ID NO: 502534 - RNA, 19 nt, Artificial Sequence
  Description of Artificial Sequence: Synthetic oligonucleotide
gggucuaaaauuacaauau

SEQ ID NO: 502535 - RNA, 19 nt, Artificial Sequence
  Description of Artificial Sequence: Synthetic oligonucleotide
ugcauucugcacgccuucu

SEQ ID NO: 502536 - RNA, 19 nt, Artificial Sequence
  Description of Artificial Sequence: Synthetic oligonucleotide
uugguaccacaucguggaa

SEQ ID NO: 502537 - RNA, 19 nt, Artificial Sequence
  Description of Artificial Sequence: Synthetic oligonucleotide
uccgagcguauuucagcaa

SEQ ID NO: 502538 - RNA, 19 nt, Artificial Sequence
  Description of Artificial Sequence: Synthetic oligonucleotide
ccaauuggaucuuugcaaa

SEQ ID NO: 502539 - RNA, 19 nt, Artificial Sequence
  Description of Artificial Sequence: Synthetic oligonucleotide
guaucuuuugacggcggaa

SEQ ID NO: 502540 - RNA, 19 nt, Artificial Sequence
  Description of Artificial Sequence: Synthetic oligonucleotide
gguaucuuuugacggcgga

SEQ ID NO: 502541 - RNA, 19 nt, Artificial Sequence
  Description of Artificial Sequence: Synthetic oligonucleotide
aucguccauguuggaaaag

SEQ ID NO: 502542 - RNA, 19 nt, Artificial Sequence
  Description of Artificial Sequence: Synthetic oligonucleotide
agucaguaguaucgccuuu

SEQ ID NO: 502543 - RNA, 19 nt, Artificial Sequence
  Description of Artificial Sequence: Synthetic oligonucleotide
cuguaugaucuccucauau

SEQ ID NO: 502544 - RNA, 19 nt, Artificial Sequence
  Description of Artificial Sequence: Synthetic oligonucleotide
ccugccacacaguuccaag

SEQ ID NO: 502545 - RNA, 19 nt, Artificial Sequence
  Description of Artificial Sequence: Synthetic oligonucleotide
ugcaguugccagggguccc

SEQ ID NO: 502546 - RNA, 19 nt, Artificial Sequence
  Description of Artificial Sequence: Synthetic oligonucleotide
cacauagacuggaaccucu

SEQ ID NO: 502547 - RNA, 19 nt, Artificial Sequence
  Description of Artificial Sequence: Synthetic oligonucleotide
ugcacgccuucuguacuug

SEQ ID NO: 502548 - RNA, 19 nt, Artificial Sequence
  Description of Artificial Sequence: Synthetic oligonucleotide
ccaucgcaaagaacgggag

SEQ ID NO: 502549 - RNA, 19 nt, Artificial Sequence
  Description of Artificial Sequence: Synthetic oligonucleotide
cccuaacuuuggaaugucc

SEQ ID NO: 502550 - RNA, 19 nt, Artificial Sequence
  Description of Artificial Sequence: Synthetic oligonucleotide
cuagcacuugauaaucuuu

SEQ ID NO: 502551 - RNA, 19 nt, Artificial Sequence
  Description of Artificial Sequence: Synthetic oligonucleotide
cagcacauugaucacuacu

SEQ ID NO: 502552 - RNA, 19 nt, Artificial Sequence
  Description of Artificial Sequence: Synthetic oligonucleotide
aagcuagccugcagcauua

SEQ ID NO: 502553 - RNA, 19 nt, Artificial Sequence
  Description of Artificial Sequence: Synthetic oligonucleotide
ggaauguggguccagugau

SEQ ID NO: 502554 - RNA, 19 nt, Artificial Sequence
  Description of Artificial Sequence: Synthetic oligonucleotide
uccuugugguauguuggua

SEQ ID NO: 502555 - RNA, 19 nt, Artificial Sequence
  Description of Artificial Sequence: Synthetic oligonucleotide
cacgccuucuguacuugca

SEQ ID NO: 502556 - RNA, 19 nt, Artificial Sequence
  Description of Artificial Sequence: Synthetic oligonucleotide
cgacagucaaggaacucag

SEQ ID NO: 502557 - RNA, 19 nt, Artificial Sequence
  Description of Artificial Sequence: Synthetic oligonucleotide
agaacgggagcaagacgca

SEQ ID NO: 502558 - RNA, 19 nt, Artificial Sequence
  Description of Artificial Sequence: Synthetic oligonucleotide
caacucucagagggccugg

SEQ ID NO: 502559 - RNA, 19 nt, Artificial Sequence
  Description of Artificial Sequence: Synthetic oligonucleotide
ucgcaaagaacgggagcaa

SEQ ID NO: 502560 - RNA, 19 nt, Artificial Sequence
  Description of Artificial Sequence: Synthetic oligonucleotide
gcaaagaacgggagcaaga

SEQ ID NO: 502561 - RNA, 19 nt, Artificial Sequence
  Description of Artificial Sequence: Synthetic oligonucleotide
cuuuugacggcggaaacuu

SEQ ID NO: 502562 - RNA, 19 nt, Artificial Sequence
  Description of Artificial Sequence: Synthetic oligonucleotide
gagucaagagaagcuuucu

SEQ ID NO: 502563 - RNA, 19 nt, Artificial Sequence
  Description of Artificial Sequence: Synthetic oligonucleotide
ggugauggaugcuccaagu

SEQ ID NO: 502564 - RNA, 19 nt, Artificial Sequence
  Description of Artificial Sequence: Synthetic oligonucleotide
gggaaucgaauaaaccaaa

SEQ ID NO: 502565 - RNA, 19 nt, Artificial Sequence
  Description of Artificial Sequence: Synthetic oligonucleotide
caguaguaucgccuuuuaa

SEQ ID NO: 502566 - RNA, 19 nt, Artificial Sequence
  Description of Artificial Sequence: Synthetic oligonucleotide
ucuguacuugcagcuuguu

SEQ ID NO: 502567 - RNA, 19 nt, Artificial Sequence
  Description of Artificial Sequence: Synthetic oligonucleotide
caucugaccaaaugauuuu

SEQ ID NO: 502568 - RNA, 19 nt, Artificial Sequence
  Description of Artificial Sequence: Synthetic oligonucleotide
gccaucgcaaagaacggga

SEQ ID NO: 502569 - RNA, 19 nt, Artificial Sequence
  Description of Artificial Sequence: Synthetic oligonucleotide
cucagccaacaugauuuca

SEQ ID NO: 502570 - RNA, 19 nt, Artificial Sequence
  Description of Artificial Sequence: Synthetic oligonucleotide
caagcuagccugcagcauu

SEQ ID NO: 502571 - RNA, 19 nt, Artificial Sequence
  Description of Artificial Sequence: Synthetic oligonucleotide
gcggcauguggguaaagaa

SEQ ID NO: 502572 - RNA, 19 nt, Artificial Sequence
  Description of Artificial Sequence: Synthetic oligonucleotide
cuguucgugggaaucgaau

SEQ ID NO: 502573 - RNA, 19 nt, Artificial Sequence
  Description of Artificial Sequence: Synthetic oligonucleotide
cacgucuggccuggguaag

SEQ ID NO: 502574 - RNA, 19 nt, Artificial Sequence
  Description of Artificial Sequence: Synthetic oligonucleotide
cuaagcugcugguaucuuu

SEQ ID NO: 502575 - RNA, 19 nt, Artificial Sequence
  Description of Artificial Sequence: Synthetic oligonucleotide
guggaacaaauggaauaua

SEQ ID NO: 502576 - RNA, 19 nt, Artificial Sequence
  Description of Artificial Sequence: Synthetic oligonucleotide
acucgcugaugcggcaugu

SEQ ID NO: 502577 - RNA, 19 nt, Artificial Sequence
  Description of Artificial Sequence: Synthetic oligonucleotide
ggaggcaaaucuagaagcu

SEQ ID NO: 502578 - RNA, 19 nt, Artificial Sequence
  Description of Artificial Sequence: Synthetic oligonucleotide
cucgcugaugcggcaugug

SEQ ID NO: 502579 - RNA, 19 nt, Artificial Sequence
  Description of Artificial Sequence: Synthetic oligonucleotide
gcauggagugaugggcaag

SEQ ID NO: 502580 - RNA, 19 nt, Artificial Sequence
  Description of Artificial Sequence: Synthetic oligonucleotide
gagcagcgacagucaagga

SEQ ID NO: 502581 - RNA, 19 nt, Artificial Sequence
  Description of Artificial Sequence: Synthetic oligonucleotide
gcaaguggugagcaauaua

SEQ ID NO: 502582 - RNA, 19 nt, Artificial Sequence
  Description of Artificial Sequence: Synthetic oligonucleotide
ccaccgaucuccaauuucu

SEQ ID NO: 502583 - RNA, 19 nt, Artificial Sequence
  Description of Artificial Sequence: Synthetic oligonucleotide
cccaaaaguauuguacaaa

SEQ ID NO: 502584 - RNA, 19 nt, Artificial Sequence
  Description of Artificial Sequence: Synthetic oligonucleotide
ccacaucguggaacaaaug

SEQ ID NO: 502585 - RNA, 19 nt, Artificial Sequence
  Description of Artificial Sequence: Synthetic oligonucleotide
gcuccuagcacuugauaau

SEQ ID NO: 502586 - RNA, 19 nt, Artificial Sequence
  Description of Artificial Sequence: Synthetic oligonucleotide
cuacuugugguugccucua

SEQ ID NO: 502587 - RNA, 19 nt, Artificial Sequence
  Description of Artificial Sequence: Synthetic oligonucleotide
gcugaugcggcaugugggu

SEQ ID NO: 502588 - RNA, 19 nt, Artificial Sequence
  Description of Artificial Sequence: Synthetic oligonucleotide
gcccagugucauugaacug

SEQ ID NO: 502589 - RNA, 19 nt, Artificial Sequence
  Description of Artificial Sequence: Synthetic oligonucleotide
gcacgccuucuguacuugc

SEQ ID NO: 502590 - RNA, 19 nt, Artificial Sequence
  Description of Artificial Sequence: Synthetic oligonucleotide
cagacucgcugaugcggca

SEQ ID NO: 502591 - RNA, 19 nt, Artificial Sequence
  Description of Artificial Sequence: Synthetic oligonucleotide
gucaguaguaucgccuuuu

SEQ ID NO: 502592 - RNA, 19 nt, Artificial Sequence
  Description of Artificial Sequence: Synthetic oligonucleotide
ggguaagucugggacagcu

SEQ ID NO: 502593 - RNA, 19 nt, Artificial Sequence
  Description of Artificial Sequence: Synthetic oligonucleotide
uguccacgucuggccuggg

SEQ ID NO: 502594 - RNA, 19 nt, Artificial Sequence
  Description of Artificial Sequence: Synthetic oligonucleotide
ggaacaaggcacggauuaa

SEQ ID NO: 502595 - RNA, 19 nt, Artificial Sequence
  Description of Artificial Sequence: Synthetic oligonucleotide
guggcccuucauccaucac

SEQ ID NO: 502596 - RNA, 19 nt, Artificial Sequence
  Description of Artificial Sequence: Synthetic oligonucleotide
cacaacucucagagggccu

SEQ ID NO: 502597 - RNA, 19 nt, Artificial Sequence
  Description of Artificial Sequence: Synthetic oligonucleotide
ggugagcaauauacaugca

SEQ ID NO: 502598 - RNA, 19 nt, Artificial Sequence
  Description of Artificial Sequence: Synthetic oligonucleotide
gcaacuugcugcuguucgu

SEQ ID NO: 502599 - RNA, 19 nt, Artificial Sequence
  Description of Artificial Sequence: Synthetic oligonucleotide
cggcauguggguaaagaaa

SEQ ID NO: 502600 - RNA, 19 nt, Artificial Sequence
  Description of Artificial Sequence: Synthetic oligonucleotide
cugcccaccgaucuccaau

SEQ ID NO: 502601 - RNA, 19 nt, Artificial Sequence
  Description of Artificial Sequence: Synthetic oligonucleotide
augcggcauguggguaaag

SEQ ID NO: 502602 - RNA, 19 nt, Artificial Sequence
  Description of Artificial Sequence: Synthetic oligonucleotide
ggaaccucuuccugguauu

SEQ ID NO: 502603 - RNA, 19 nt, Artificial Sequence
  Description of Artificial Sequence: Synthetic oligonucleotide
cagcgacagucaaggaacu

SEQ ID NO: 502604 - RNA, 19 nt, Artificial Sequence
  Description of Artificial Sequence: Synthetic oligonucleotide
ccgggcuccaagugcccag

SEQ ID NO: 502605 - RNA, 19 nt, Artificial Sequence
  Description of Artificial Sequence: Synthetic oligonucleotide
cugaugcggcaugugggua

SEQ ID NO: 502606 - RNA, 19 nt, Artificial Sequence
  Description of Artificial Sequence: Synthetic oligonucleotide
ccauagccuugcaauauau

SEQ ID NO: 502607 - RNA, 19 nt, Artificial Sequence
  Description of Artificial Sequence: Synthetic oligonucleotide
ccuagcacuugauaaucuu

SEQ ID NO: 502608 - RNA, 19 nt, Artificial Sequence
  Description of Artificial Sequence: Synthetic oligonucleotide
gccgaauaauucucuucau

SEQ ID NO: 502609 - RNA, 19 nt, Artificial Sequence
  Description of Artificial Sequence: Synthetic oligonucleotide
cgaauaaaccaaacaguuu

SEQ ID NO: 502610 - RNA, 19 nt, Artificial Sequence
  Description of Artificial Sequence: Synthetic oligonucleotide
caccgaucuccaauuucuu

SEQ ID NO: 502611 - RNA, 19 nt, Artificial Sequence
  Description of Artificial Sequence: Synthetic oligonucleotide
gcuguucgugggaaucgaa

SEQ ID NO: 502612 - RNA, 19 nt, Artificial Sequence
  Description of Artificial Sequence: Synthetic oligonucleotide
gguucuccuugugguaugu

SEQ ID NO: 502613 - RNA, 19 nt, Artificial Sequence
  Description of Artificial Sequence: Synthetic oligonucleotide
cgagcguauuucagcaagu

SEQ ID NO: 502614 - RNA, 19 nt, Artificial Sequence
  Description of Artificial Sequence: Synthetic oligonucleotide
gcaguugccaggggucccu

SEQ ID NO: 502615 - RNA, 19 nt, Artificial Sequence
  Description of Artificial Sequence: Synthetic oligonucleotide
gcaagcuagccugcagcau

SEQ ID NO: 502616 - RNA, 19 nt, Artificial Sequence
  Description of Artificial Sequence: Synthetic oligonucleotide
gcggaaacuuccacacaau

SEQ ID NO: 502617 - RNA, 19 nt, Artificial Sequence
  Description of Artificial Sequence: Synthetic oligonucleotide
ccaaaaccagugagugauu

SEQ ID NO: 502618 - RNA, 19 nt, Artificial Sequence
  Description of Artificial Sequence: Synthetic oligonucleotide
cggcggaaacuuccacaca

SEQ ID NO: 502619 - RNA, 19 nt, Artificial Sequence
  Description of Artificial Sequence: Synthetic oligonucleotide
gcccaccgaucuccaauuu

SEQ ID NO: 502620 - RNA, 19 nt, Artificial Sequence
  Description of Artificial Sequence: Synthetic oligonucleotide
cgggagcaagacgcaaucu

SEQ ID NO: 502621 - RNA, 19 nt, Artificial Sequence
  Description of Artificial Sequence: Synthetic oligonucleotide
ggcccucauuugggccaaa

SEQ ID NO: 502622 - RNA, 19 nt, Artificial Sequence
  Description of Artificial Sequence: Synthetic oligonucleotide
aauacguucaucuugauug

SEQ ID NO: 502623 - RNA, 19 nt, Artificial Sequence
  Description of Artificial Sequence: Synthetic oligonucleotide
aauucguccagucuugugc

SEQ ID NO: 502624 - RNA, 19 nt, Artificial Sequence
  Description of Artificial Sequence: Synthetic oligonucleotide
aaugagaucgcuuuucuug

SEQ ID NO: 502625 - RNA, 19 nt, Artificial Sequence
  Description of Artificial Sequence: Synthetic oligonucleotide
uuaucuuugaaaacggaag

SEQ ID NO: 502626 - RNA, 19 nt, Artificial Sequence
  Description of Artificial Sequence: Synthetic oligonucleotide
ugagguaguggacauaugg

SEQ ID NO: 502627 - RNA, 19 nt, Artificial Sequence
  Description of Artificial Sequence: Synthetic oligonucleotide
uucaaggagaugaggaucg

SEQ ID NO: 502628 - RNA, 19 nt, Artificial Sequence
  Description of Artificial Sequence: Synthetic oligonucleotide
aagaguacccagucagucc

SEQ ID NO: 502629 - RNA, 19 nt, Artificial Sequence
  Description of Artificial Sequence: Synthetic oligonucleotide
aaugauacugguauccggg

SEQ ID NO: 502630 - RNA, 19 nt, Artificial Sequence
  Description of Artificial Sequence: Synthetic oligonucleotide
ugucuuuuaucuuugaaaa

SEQ ID NO: 502631 - RNA, 19 nt, Artificial Sequence
  Description of Artificial Sequence: Synthetic oligonucleotide
augauaaugguguuaucac

SEQ ID NO: 502632 - RNA, 19 nt, Artificial Sequence
  Description of Artificial Sequence: Synthetic oligonucleotide
aaccugaucauuauguggg

SEQ ID NO: 502633 - RNA, 19 nt, Artificial Sequence
  Description of Artificial Sequence: Synthetic oligonucleotide
uucaacaugccccugggcc

SEQ ID NO: 502634 - RNA, 19 nt, Artificial Sequence
  Description of Artificial Sequence: Synthetic oligonucleotide
ugugcugcgagugagacag

SEQ ID NO: 502635 - RNA, 19 nt, Artificial Sequence
  Description of Artificial Sequence: Synthetic oligonucleotide
augaagagcgauugguucc

SEQ ID NO: 502636 - RNA, 19 nt, Artificial Sequence
  Description of Artificial Sequence: Synthetic oligonucleotide
uguagugaaguucaacaug

SEQ ID NO: 502637 - RNA, 19 nt, Artificial Sequence
  Description of Artificial Sequence: Synthetic oligonucleotide
ucuaaaaucaccacagguu

SEQ ID NO: 502638 - RNA, 19 nt, Artificial Sequence
  Description of Artificial Sequence: Synthetic oligonucleotide
ugaaccgcuggcaauaacc

SEQ ID NO: 502639 - RNA, 19 nt, Artificial Sequence
  Description of Artificial Sequence: Synthetic oligonucleotide
aggauuugucaauucgucc

SEQ ID NO: 502640 - RNA, 19 nt, Artificial Sequence
  Description of Artificial Sequence: Synthetic oligonucleotide
guauccgggucauagaagg

SEQ ID NO: 502641 - RNA, 19 nt, Artificial Sequence
  Description of Artificial Sequence: Synthetic oligonucleotide
ugcauaucguccaaguuga

SEQ ID NO: 502642 - RNA, 19 nt, Artificial Sequence
  Description of Artificial Sequence: Synthetic oligonucleotide
cuaaaaucaccacagguuc

SEQ ID NO: 502643 - RNA, 19 nt, Artificial Sequence
  Description of Artificial Sequence: Synthetic oligonucleotide
agguaguggacauaugggg

SEQ ID NO: 502644 - RNA, 19 nt, Artificial Sequence
  Description of Artificial Sequence: Synthetic oligonucleotide
auaaugguguuaucacagc

SEQ ID NO: 502645 - RNA, 19 nt, Artificial Sequence
  Description of Artificial Sequence: Synthetic oligonucleotide
acuauggccacucuauaag

SEQ ID NO: 502646 - RNA, 19 nt, Artificial Sequence
  Description of Artificial Sequence: Synthetic oligonucleotide
uuuugagugacccucuaaa

SEQ ID NO: 502647 - RNA, 19 nt, Artificial Sequence
  Description of Artificial Sequence: Synthetic oligonucleotide
aaauagcggauacugcugu

SEQ ID NO: 502648 - RNA, 19 nt, Artificial Sequence
  Description of Artificial Sequence: Synthetic oligonucleotide
aaugugcccacaccagcac

SEQ ID NO: 502649 - RNA, 19 nt, Artificial Sequence
  Description of Artificial Sequence: Synthetic oligonucleotide
uacccuguagauuugcuug

SEQ ID NO: 502650 - RNA, 19 nt, Artificial Sequence
  Description of Artificial Sequence: Synthetic oligonucleotide
guagugaaguucaacaugc

SEQ ID NO: 502651 - RNA, 19 nt, Artificial Sequence
  Description of Artificial Sequence: Synthetic oligonucleotide
acuggucguuuucacagcc

SEQ ID NO: 502652 - RNA, 19 nt, Artificial Sequence
  Description of Artificial Sequence: Synthetic oligonucleotide
uagauuugcuugcagccag

SEQ ID NO: 502653 - RNA, 19 nt, Artificial Sequence
  Description of Artificial Sequence: Synthetic oligonucleotide
uggaauguacccaugcuuc

SEQ ID NO: 502654 - RNA, 19 nt, Artificial Sequence
  Description of Artificial Sequence: Synthetic oligonucleotide
guccaucucaugaagagcg

SEQ ID NO: 502655 - RNA, 19 nt, Artificial Sequence
  Description of Artificial Sequence: Synthetic oligonucleotide
aggggaauugaguucuuac

SEQ ID NO: 502656 - RNA, 19 nt, Artificial Sequence
  Description of Artificial Sequence: Synthetic oligonucleotide
gggagcacuaaugagaucg

SEQ ID NO: 502657 - RNA, 19 nt, Artificial Sequence
  Description of Artificial Sequence: Synthetic oligonucleotide
gugaaguucaacaugcccc

SEQ ID NO: 502658 - RNA, 19 nt, Artificial Sequence
  Description of Artificial Sequence: Synthetic oligonucleotide
acauauggggacucguccg

SEQ ID NO: 502659 - RNA, 19 nt, Artificial Sequence
  Description of Artificial Sequence: Synthetic oligonucleotide
ucuaugaugauggcaacga

SEQ ID NO: 502660 - RNA, 19 nt, Artificial Sequence
  Description of Artificial Sequence: Synthetic oligonucleotide
ucguuuugcacgcuggcug

SEQ ID NO: 502661 - RNA, 19 nt, Artificial Sequence
  Description of Artificial Sequence: Synthetic oligonucleotide
ucuauguccagcacggguc

SEQ ID NO: 502662 - RNA, 19 nt, Artificial Sequence
  Description of Artificial Sequence: Synthetic oligonucleotide
gacauauggggacucgucc

SEQ ID NO: 502663 - RNA, 19 nt, Artificial Sequence
  Description of Artificial Sequence: Synthetic oligonucleotide
guaaaucaugucugaaugc

SEQ ID NO: 502664 - RNA, 19 nt, Artificial Sequence
  Description of Artificial Sequence: Synthetic oligonucleotide
auugcuuguguccaucuca

SEQ ID NO: 502665 - RNA, 19 nt, Artificial Sequence
  Description of Artificial Sequence: Synthetic oligonucleotide
ucuucgcagauuugggagg

SEQ ID NO: 502666 - RNA, 19 nt, Artificial Sequence
  Description of Artificial Sequence: Synthetic oligonucleotide
cagucuauguccagcacgg

SEQ ID NO: 502667 - RNA, 19 nt, Artificial Sequence
  Description of Artificial Sequence: Synthetic oligonucleotide
acuaaugagaucgcuuuuc

SEQ ID NO: 502668 - RNA, 19 nt, Artificial Sequence
  Description of Artificial Sequence: Synthetic oligonucleotide
gaauguggccuaucgcugg

SEQ ID NO: 502669 - RNA, 19 nt, Artificial Sequence
  Description of Artificial Sequence: Synthetic oligonucleotide
auaaccugaucauuaugug

SEQ ID NO: 502670 - RNA, 19 nt, Artificial Sequence
  Description of Artificial Sequence: Synthetic oligonucleotide
uuguaaaucaugucugaau

SEQ ID NO: 502671 - RNA, 19 nt, Artificial Sequence
  Description of Artificial Sequence: Synthetic oligonucleotide
cuguagauuugcuugcagc

SEQ ID NO: 502672 - RNA, 19 nt, Artificial Sequence
  Description of Artificial Sequence: Synthetic oligonucleotide
gauacugguauccggguca

SEQ ID NO: 502673 - RNA, 19 nt, Artificial Sequence
  Description of Artificial Sequence: Synthetic oligonucleotide
cacuaaggagcacauuucg

SEQ ID NO: 502674 - RNA, 19 nt, Artificial Sequence
  Description of Artificial Sequence: Synthetic oligonucleotide
acgaacacaugcuaaggug

SEQ ID NO: 502675 - RNA, 19 nt, Artificial Sequence
  Description of Artificial Sequence: Synthetic oligonucleotide
uucuaugaugauggcaacg

SEQ ID NO: 502676 - RNA, 19 nt, Artificial Sequence
  Description of Artificial Sequence: Synthetic oligonucleotide
ucugccucugucccgauac

SEQ ID NO: 502677 - RNA, 19 nt, Artificial Sequence
  Description of Artificial Sequence: Synthetic oligonucleotide
uguuuugacagaacacuau

SEQ ID NO: 502678 - RNA, 19 nt, Artificial Sequence
  Description of Artificial Sequence: Synthetic oligonucleotide
acucuauaagaguggaucu

SEQ ID NO: 502679 - RNA, 19 nt, Artificial Sequence
  Description of Artificial Sequence: Synthetic oligonucleotide
aaugguguuaucacagccu

SEQ ID NO: 502680 - RNA, 19 nt, Artificial Sequence
  Description of Artificial Sequence: Synthetic oligonucleotide
gagguaguggacauauggg

SEQ ID NO: 502681 - RNA, 19 nt, Artificial Sequence
  Description of Artificial Sequence: Synthetic oligonucleotide
agcacgaacacaugcuaag

SEQ ID NO: 502682 - RNA, 19 nt, Artificial Sequence
  Description of Artificial Sequence: Synthetic oligonucleotide
ucuugggagcacuaaugag

SEQ ID NO: 502683 - RNA, 19 nt, Artificial Sequence
  Description of Artificial Sequence: Synthetic oligonucleotide
guacccaugcuucaaggag

SEQ ID NO: 502684 - RNA, 19 nt, Artificial Sequence
  Description of Artificial Sequence: Synthetic oligonucleotide
agaguacccagucagucca

SEQ ID NO: 502685 - RNA, 19 nt, Artificial Sequence
  Description of Artificial Sequence: Synthetic oligonucleotide
ucucaugaagagcgauugg

SEQ ID NO: 502686 - RNA, 19 nt, Artificial Sequence
  Description of Artificial Sequence: Synthetic oligonucleotide
aaaauucagaauaccuggu

SEQ ID NO: 502687 - RNA, 19 nt, Artificial Sequence
  Description of Artificial Sequence: Synthetic oligonucleotide
ugucccgauacccuguaga

SEQ ID NO: 502688 - RNA, 19 nt, Artificial Sequence
  Description of Artificial Sequence: Synthetic oligonucleotide
uggauuugaucucuuuuaa

SEQ ID NO: 502689 - RNA, 19 nt, Artificial Sequence
  Description of Artificial Sequence: Synthetic oligonucleotide
uuucuucgcagauuuggga

SEQ ID NO: 502690 - RNA, 19 nt, Artificial Sequence
  Description of Artificial Sequence: Synthetic oligonucleotide
ccugguauugucaauguag

SEQ ID NO: 502691 - RNA, 19 nt, Artificial Sequence
  Description of Artificial Sequence: Synthetic oligonucleotide
cacucuauaagaguggauc

SEQ ID NO: 502692 - RNA, 19 nt, Artificial Sequence
  Description of Artificial Sequence: Synthetic oligonucleotide
aaugcauaucguccaaguu

SEQ ID NO: 502693 - RNA, 19 nt, Artificial Sequence
  Description of Artificial Sequence: Synthetic oligonucleotide
cugaucauuaugugggcac

SEQ ID NO: 502694 - RNA, 19 nt, Artificial Sequence
  Description of Artificial Sequence: Synthetic oligonucleotide
ugggaaucuuuucuuacaa

SEQ ID NO: 502695 - RNA, 19 nt, Artificial Sequence
  Description of Artificial Sequence: Synthetic oligonucleotide
auguacccaugcuucaagg

SEQ ID NO: 502696 - RNA, 19 nt, Artificial Sequence
  Description of Artificial Sequence: Synthetic oligonucleotide
uggucguuuucacagccug

SEQ ID NO: 502697 - RNA, 19 nt, Artificial Sequence
  Description of Artificial Sequence: Synthetic oligonucleotide
gggaauugaguucuuacug

SEQ ID NO: 502698 - RNA, 19 nt, Artificial Sequence
  Description of Artificial Sequence: Synthetic oligonucleotide
auuaugugggcaccagucu

SEQ ID NO: 502699 - RNA, 19 nt, Artificial Sequence
  Description of Artificial Sequence: Synthetic oligonucleotide
gauaggcucacacuuucuc

SEQ ID NO: 502700 - RNA, 19 nt, Artificial Sequence
  Description of Artificial Sequence: Synthetic oligonucleotide
uuacaagaguacccaguca

SEQ ID NO: 502701 - RNA, 19 nt, Artificial Sequence
  Description of Artificial Sequence: Synthetic oligonucleotide
cuuuuauggauuugaucuc

SEQ ID NO: 502702 - RNA, 19 nt, Artificial Sequence
  Description of Artificial Sequence: Synthetic oligonucleotide
auacacggagcaaagguag

SEQ ID NO: 502703 - RNA, 19 nt, Artificial Sequence
  Description of Artificial Sequence: Synthetic oligonucleotide
accugaucauuaugugggc

SEQ ID NO: 502704 - RNA, 19 nt, Artificial Sequence
  Description of Artificial Sequence: Synthetic oligonucleotide
cagaauaccugguauuguc

SEQ ID NO: 502705 - RNA, 19 nt, Artificial Sequence
  Description of Artificial Sequence: Synthetic oligonucleotide
uguacccaugcuucaagga

SEQ ID NO: 502706 - RNA, 19 nt, Artificial Sequence
  Description of Artificial Sequence: Synthetic oligonucleotide
aucucaugaagagcgauug

SEQ ID NO: 502707 - RNA, 19 nt, Artificial Sequence
  Description of Artificial Sequence: Synthetic oligonucleotide
gcuagcaaccccuguaugg

SEQ ID NO: 502708 - RNA, 19 nt, Artificial Sequence
  Description of Artificial Sequence: Synthetic oligonucleotide
acaccguaaagcuuccuga

SEQ ID NO: 502709 - RNA, 19 nt, Artificial Sequence
  Description of Artificial Sequence: Synthetic oligonucleotide
auaggcucacacuuucucu

SEQ ID NO: 502710 - RNA, 19 nt, Artificial Sequence
  Description of Artificial Sequence: Synthetic oligonucleotide
guaguggacauauggggac

SEQ ID NO: 502711 - RNA, 19 nt, Artificial Sequence
  Description of Artificial Sequence: Synthetic oligonucleotide
uuaugugggcaccagucua

SEQ ID NO: 502712 - RNA, 19 nt, Artificial Sequence
  Description of Artificial Sequence: Synthetic oligonucleotide
caggguacaggucaucuug

SEQ ID NO: 502713 - RNA, 19 nt, Artificial Sequence
  Description of Artificial Sequence: Synthetic oligonucleotide
auguagugaaguucaacau

SEQ ID NO: 502714 - RNA, 19 nt, Artificial Sequence
  Description of Artificial Sequence: Synthetic oligonucleotide
ucguccgugauuucaaaau

SEQ ID NO: 502715 - RNA, 19 nt, Artificial Sequence
  Description of Artificial Sequence: Synthetic oligonucleotide
cuggggacggucaugauga

SEQ ID NO: 502716 - RNA, 19 nt, Artificial Sequence
  Description of Artificial Sequence: Synthetic oligonucleotide
acuaaggagcacauuucgg

SEQ ID NO: 502717 - RNA, 19 nt, Artificial Sequence
  Description of Artificial Sequence: Synthetic oligonucleotide
ugguauugucaauguagug

SEQ ID NO: 502718 - RNA, 19 nt, Artificial Sequence
  Description of Artificial Sequence: Synthetic oligonucleotide
aacugccgcucgcucauuc

SEQ ID NO: 502719 - RNA, 19 nt, Artificial Sequence
  Description of Artificial Sequence: Synthetic oligonucleotide
agcgauugguuccugcaug

SEQ ID NO: 502720 - RNA, 19 nt, Artificial Sequence
  Description of Artificial Sequence: Synthetic oligonucleotide
uaugcccuuggaguugugg

SEQ ID NO: 502721 - RNA, 19 nt, Artificial Sequence
  Description of Artificial Sequence: Synthetic oligonucleotide
caguccacacacucuaagc

SEQ ID NO: 502722 - RNA, 19 nt, Artificial Sequence
  Description of Artificial Sequence: Synthetic oligonucleotide
aucuugauugcagauugug

SEQ ID NO: 502723 - RNA, 19 nt, Artificial Sequence
  Description of Artificial Sequence: Synthetic oligonucleotide
uccccgcuuagacauguag

SEQ ID NO: 502724 - RNA, 19 nt, Artificial Sequence
  Description of Artificial Sequence: Synthetic oligonucleotide
agcggauacugcugucacc

SEQ ID NO: 502725 - RNA, 19 nt, Artificial Sequence
  Description of Artificial Sequence: Synthetic oligonucleotide
ggccccauucaucaaaagg

SEQ ID NO: 502726 - RNA, 19 nt, Artificial Sequence
  Description of Artificial Sequence: Synthetic oligonucleotide
ugaggaucgggucugcauu

SEQ ID NO: 502727 - RNA, 19 nt, Artificial Sequence
  Description of Artificial Sequence: Synthetic oligonucleotide
ucgcucauucggcuaaagc

SEQ ID NO: 502728 - RNA, 19 nt, Artificial Sequence
  Description of Artificial Sequence: Synthetic oligonucleotide
caaucucacauuuguugac

SEQ ID NO: 502729 - RNA, 19 nt, Artificial Sequence
  Description of Artificial Sequence: Synthetic oligonucleotide
cucauucggcuaaagccag

SEQ ID NO: 502730 - RNA, 19 nt, Artificial Sequence
  Description of Artificial Sequence: Synthetic oligonucleotide
agagcgauugguuccugca

SEQ ID NO: 502731 - RNA, 19 nt, Artificial Sequence
  Description of Artificial Sequence: Synthetic oligonucleotide
ugcgagugagacagcacug

SEQ ID NO: 502732 - RNA, 19 nt, Artificial Sequence
  Description of Artificial Sequence: Synthetic oligonucleotide
aaugagcagcugccauccg

SEQ ID NO: 502733 - RNA, 19 nt, Artificial Sequence
  Description of Artificial Sequence: Synthetic oligonucleotide
uagugaaguucaacaugcc

SEQ ID NO: 502734 - RNA, 19 nt, Artificial Sequence
  Description of Artificial Sequence: Synthetic oligonucleotide
uuuucggguuccagagugc

SEQ ID NO: 502735 - RNA, 19 nt, Artificial Sequence
  Description of Artificial Sequence: Synthetic oligonucleotide
gacggucaugaugauaggc

SEQ ID NO: 502736 - RNA, 19 nt, Artificial Sequence
  Description of Artificial Sequence: Synthetic oligonucleotide
acguuguaaaucaugucug

SEQ ID NO: 502737 - RNA, 19 nt, Artificial Sequence
  Description of Artificial Sequence: Synthetic oligonucleotide
uuugugcugcgagugagac

SEQ ID NO: 502738 - RNA, 19 nt, Artificial Sequence
  Description of Artificial Sequence: Synthetic oligonucleotide
caaagguagcguuggcccc

SEQ ID NO: 502739 - RNA, 19 nt, Artificial Sequence
  Description of Artificial Sequence: Synthetic oligonucleotide
uuucggguuccagagugcc

SEQ ID NO: 502740 - RNA, 19 nt, Artificial Sequence
  Description of Artificial Sequence: Synthetic oligonucleotide
agcuuucauuucuucgcag

SEQ ID NO: 502741 - RNA, 19 nt, Artificial Sequence
  Description of Artificial Sequence: Synthetic oligonucleotide
aucugccaaaccaucacag

SEQ ID NO: 502742 - RNA, 19 nt, Artificial Sequence
  Description of Artificial Sequence: Synthetic oligonucleotide
guaggguaggauuugucaa

SEQ ID NO: 502743 - RNA, 19 nt, Artificial Sequence
  Description of Artificial Sequence: Synthetic oligonucleotide
uguggccuaucgcuggcug

SEQ ID NO: 502744 - RNA, 19 nt, Artificial Sequence
  Description of Artificial Sequence: Synthetic oligonucleotide
uaggguaggauuugucaau

SEQ ID NO: 502745 - RNA, 19 nt, Artificial Sequence
  Description of Artificial Sequence: Synthetic oligonucleotide
cagguguuuugacagaaca

SEQ ID NO: 502746 - RNA, 19 nt, Artificial Sequence
  Description of Artificial Sequence: Synthetic oligonucleotide
acaaagguuccuaugcccu

SEQ ID NO: 502747 - RNA, 19 nt, Artificial Sequence
  Description of Artificial Sequence: Synthetic oligonucleotide
auguccggguuugugcugc

SEQ ID NO: 502748 - RNA, 19 nt, Artificial Sequence
  Description of Artificial Sequence: Synthetic oligonucleotide
gguuccuaugcccuuggag

SEQ ID NO: 502749 - RNA, 19 nt, Artificial Sequence
  Description of Artificial Sequence: Synthetic oligonucleotide
uuggaaauacguucaucuu

SEQ ID NO: 502750 - RNA, 19 nt, Artificial Sequence
  Description of Artificial Sequence: Synthetic oligonucleotide
aacgaaucugggguugaca

SEQ ID NO: 502751 - RNA, 19 nt, Artificial Sequence
  Description of Artificial Sequence: Synthetic oligonucleotide
gaaugcauaucguccaagu

SEQ ID NO: 502752 - RNA, 19 nt, Artificial Sequence
  Description of Artificial Sequence: Synthetic oligonucleotide
ggaucaaugacucucacuu

SEQ ID NO: 502753 - RNA, 19 nt, Artificial Sequence
  Description of Artificial Sequence: Synthetic oligonucleotide
ucagaauaccugguauugu

SEQ ID NO: 502754 - RNA, 19 nt, Artificial Sequence
  Description of Artificial Sequence: Synthetic oligonucleotide
cacucgagagacucggaug

SEQ ID NO: 502755 - RNA, 19 nt, Artificial Sequence
  Description of Artificial Sequence: Synthetic oligonucleotide
ggaaauacguucaucuuga

SEQ ID NO: 502756 - RNA, 19 nt, Artificial Sequence
  Description of Artificial Sequence: Synthetic oligonucleotide
auucggcuaaagccaguag

SEQ ID NO: 502757 - RNA, 19 nt, Artificial Sequence
  Description of Artificial Sequence: Synthetic oligonucleotide
augauacugguauccgggu

SEQ ID NO: 502758 - RNA, 19 nt, Artificial Sequence
  Description of Artificial Sequence: Synthetic oligonucleotide
cuucgcagauuugggaggg

SEQ ID NO: 502759 - RNA, 19 nt, Artificial Sequence
  Description of Artificial Sequence: Synthetic oligonucleotide
aaaucaugucugaaugcau

SEQ ID NO: 502760 - RNA, 19 nt, Artificial Sequence
  Description of Artificial Sequence: Synthetic oligonucleotide
cucuauaagaguggaucug

SEQ ID NO: 502761 - RNA, 19 nt, Artificial Sequence
  Description of Artificial Sequence: Synthetic oligonucleotide
gacagcacuguguggcuac

SEQ ID NO: 502762 - RNA, 19 nt, Artificial Sequence
  Description of Artificial Sequence: Synthetic oligonucleotide
cuggaauguggccuaucgc

SEQ ID NO: 502763 - RNA, 19 nt, Artificial Sequence
  Description of Artificial Sequence: Synthetic oligonucleotide
aggacacuaggcuggggug

SEQ ID NO: 502764 - RNA, 19 nt, Artificial Sequence
  Description of Artificial Sequence: Synthetic oligonucleotide
caaacaccguaaagcuucc

SEQ ID NO: 502765 - RNA, 19 nt, Artificial Sequence
  Description of Artificial Sequence: Synthetic oligonucleotide
cccgcuuagacauguagcc

SEQ ID NO: 502766 - RNA, 19 nt, Artificial Sequence
  Description of Artificial Sequence: Synthetic oligonucleotide
acacaugcuaaggugugug

SEQ ID NO: 502767 - RNA, 19 nt, Artificial Sequence
  Description of Artificial Sequence: Synthetic oligonucleotide
uccaaauggcagugccucc

SEQ ID NO: 502768 - RNA, 19 nt, Artificial Sequence
  Description of Artificial Sequence: Synthetic oligonucleotide
ugguguuaucacagccugc

SEQ ID NO: 502769 - RNA, 19 nt, Artificial Sequence
  Description of Artificial Sequence: Synthetic oligonucleotide
agaauaccugguauuguca

SEQ ID NO: 502770 - RNA, 19 nt, Artificial Sequence
  Description of Artificial Sequence: Synthetic oligonucleotide
uaccugguauugucaaugu

SEQ ID NO: 502771 - RNA, 19 nt, Artificial Sequence
  Description of Artificial Sequence: Synthetic oligonucleotide
uugcgguuccagcucacgu

SEQ ID NO: 502772 - RNA, 19 nt, Artificial Sequence
  Description of Artificial Sequence: Synthetic oligonucleotide
cuucuaugaugauggcaac

SEQ ID NO: 502773 - RNA, 19 nt, Artificial Sequence
  Description of Artificial Sequence: Synthetic oligonucleotide
ucgagagacucggauguca

SEQ ID NO: 502774 - RNA, 19 nt, Artificial Sequence
  Description of Artificial Sequence: Synthetic oligonucleotide
gacccucuaaaaucaccac

SEQ ID NO: 502775 - RNA, 19 nt, Artificial Sequence
  Description of Artificial Sequence: Synthetic oligonucleotide
uccugaucaaaagcucagc

SEQ ID NO: 502776 - RNA, 19 nt, Artificial Sequence
  Description of Artificial Sequence: Synthetic oligonucleotide
uugccuggaauguacccau

SEQ ID NO: 502777 - RNA, 19 nt, Artificial Sequence
  Description of Artificial Sequence: Synthetic oligonucleotide
cagcucacguuguaaauca

SEQ ID NO: 502778 - RNA, 19 nt, Artificial Sequence
  Description of Artificial Sequence: Synthetic oligonucleotide
agcacggguccuguguggc

SEQ ID NO: 502779 - RNA, 19 nt, Artificial Sequence
  Description of Artificial Sequence: Synthetic oligonucleotide
uauggggacucguccguga

SEQ ID NO: 502780 - RNA, 19 nt, Artificial Sequence
  Description of Artificial Sequence: Synthetic oligonucleotide
auagcacuggucguuuuca

SEQ ID NO: 502781 - RNA, 19 nt, Artificial Sequence
  Description of Artificial Sequence: Synthetic oligonucleotide
auacccuguagauuugcuu

SEQ ID NO: 502782 - RNA, 19 nt, Artificial Sequence
  Description of Artificial Sequence: Synthetic oligonucleotide
agggucaguccauuuucug

SEQ ID NO: 502783 - RNA, 19 nt, Artificial Sequence
  Description of Artificial Sequence: Synthetic oligonucleotide
cuauggccacucuauaaga

SEQ ID NO: 502784 - RNA, 19 nt, Artificial Sequence
  Description of Artificial Sequence: Synthetic oligonucleotide
uaaugagaucgcuuuucuu

SEQ ID NO: 502785 - RNA, 19 nt, Artificial Sequence
  Description of Artificial Sequence: Synthetic oligonucleotide
gugggcaccagucuauguc

SEQ ID NO: 502786 - RNA, 19 nt, Artificial Sequence
  Description of Artificial Sequence: Synthetic oligonucleotide
gggaaucuuuucuuacaag

SEQ ID NO: 502787 - RNA, 19 nt, Artificial Sequence
  Description of Artificial Sequence: Synthetic oligonucleotide
cauagcacuggucguuuuc

SEQ ID NO: 502788 - RNA, 19 nt, Artificial Sequence
  Description of Artificial Sequence: Synthetic oligonucleotide
gaucaaaagcucagcuuuc

SEQ ID NO: 502789 - RNA, 19 nt, Artificial Sequence
  Description of Artificial Sequence: Synthetic oligonucleotide
acguucaucuugauugcag

SEQ ID NO: 502790 - RNA, 19 nt, Artificial Sequence
  Description of Artificial Sequence: Synthetic oligonucleotide
gucaauucguccagucuug

SEQ ID NO: 502791 - RNA, 19 nt, Artificial Sequence
  Description of Artificial Sequence: Synthetic oligonucleotide
cugggaaucuuuucuuaca

SEQ ID NO: 502792 - RNA, 19 nt, Artificial Sequence
  Description of Artificial Sequence: Synthetic oligonucleotide
aaccccuguauggauggcu

SEQ ID NO: 502793 - RNA, 19 nt, Artificial Sequence
  Description of Artificial Sequence: Synthetic oligonucleotide
ggucacucgagagacucgg

SEQ ID NO: 502794 - RNA, 19 nt, Artificial Sequence
  Description of Artificial Sequence: Synthetic oligonucleotide
uguggcuacgcugauuguu

SEQ ID NO: 502795 - RNA, 19 nt, Artificial Sequence
  Description of Artificial Sequence: Synthetic oligonucleotide
cuuucuccgccacaaucuc

SEQ ID NO: 502796 - RNA, 19 nt, Artificial Sequence
  Description of Artificial Sequence: Synthetic oligonucleotide
augaggaucgggucugcau

SEQ ID NO: 502797 - RNA, 19 nt, Artificial Sequence
  Description of Artificial Sequence: Synthetic oligonucleotide
ugcugcgagugagacagca

SEQ ID NO: 502798 - RNA, 19 nt, Artificial Sequence
  Description of Artificial Sequence: Synthetic oligonucleotide
gauguccggguuugugcug

SEQ ID NO: 502799 - RNA, 19 nt, Artificial Sequence
  Description of Artificial Sequence: Synthetic oligonucleotide
ucguuuucacagccuguuc

SEQ ID NO: 502800 - RNA, 19 nt, Artificial Sequence
  Description of Artificial Sequence: Synthetic oligonucleotide
caauucguccagucuugug

SEQ ID NO: 502801 - RNA, 19 nt, Artificial Sequence
  Description of Artificial Sequence: Synthetic oligonucleotide
uccgccacaaucuccuguu

SEQ ID NO: 502802 - RNA, 19 nt, Artificial Sequence
  Description of Artificial Sequence: Synthetic oligonucleotide
gcggauacugcugucaccc

SEQ ID NO: 502803 - RNA, 19 nt, Artificial Sequence
  Description of Artificial Sequence: Synthetic oligonucleotide
ugauugcagauugugucuu

SEQ ID NO: 502804 - RNA, 19 nt, Artificial Sequence
  Description of Artificial Sequence: Synthetic oligonucleotide
cugccgcucgcucauucgg

SEQ ID NO: 502805 - RNA, 19 nt, Artificial Sequence
  Description of Artificial Sequence: Synthetic oligonucleotide
uucguccagucuugugcag

SEQ ID NO: 502806 - RNA, 19 nt, Artificial Sequence
  Description of Artificial Sequence: Synthetic oligonucleotide
cugguauugucaauguagu

SEQ ID NO: 502807 - RNA, 19 nt, Artificial Sequence
  Description of Artificial Sequence: Synthetic oligonucleotide
caggucacucgagagacuc

SEQ ID NO: 502808 - RNA, 19 nt, Artificial Sequence
  Description of Artificial Sequence: Synthetic oligonucleotide
gguguuuugacagaacacu

SEQ ID NO: 502809 - RNA, 19 nt, Artificial Sequence
  Description of Artificial Sequence: Synthetic oligonucleotide
guuguggagcuagcaaccc

SEQ ID NO: 502810 - RNA, 19 nt, Artificial Sequence
  Description of Artificial Sequence: Synthetic oligonucleotide
caggcgacgaugccaacuc

SEQ ID NO: 502811 - RNA, 19 nt, Artificial Sequence
  Description of Artificial Sequence: Synthetic oligonucleotide
uacguucaucuugauugca

SEQ ID NO: 502812 - RNA, 19 nt, Artificial Sequence
  Description of Artificial Sequence: Synthetic oligonucleotide
uggacauauggggacucgu

SEQ ID NO: 502813 - RNA, 19 nt, Artificial Sequence
  Description of Artificial Sequence: Synthetic oligonucleotide
cccacuugcuucuaugaug

SEQ ID NO: 502814 - RNA, 19 nt, Artificial Sequence
  Description of Artificial Sequence: Synthetic oligonucleotide
ugugggcaccagucuaugu

SEQ ID NO: 502815 - RNA, 19 nt, Artificial Sequence
  Description of Artificial Sequence: Synthetic oligonucleotide
auacuguaggguaggauuu

SEQ ID NO: 502816 - RNA, 19 nt, Artificial Sequence
  Description of Artificial Sequence: Synthetic oligonucleotide
cacuggucguuuucacagc

SEQ ID NO: 502817 - RNA, 19 nt, Artificial Sequence
  Description of Artificial Sequence: Synthetic oligonucleotide
ugccgcucgcucauucggc

SEQ ID NO: 502818 - RNA, 19 nt, Artificial Sequence
  Description of Artificial Sequence: Synthetic oligonucleotide
uugcuucuaugaugauggc

SEQ ID NO: 502819 - RNA, 19 nt, Artificial Sequence
  Description of Artificial Sequence: Synthetic oligonucleotide
ucaauucguccagucuugu

SEQ ID NO: 502820 - RNA, 19 nt, Artificial Sequence
  Description of Artificial Sequence: Synthetic oligonucleotide
uggagcuagcaaccccugu

SEQ ID NO: 502821 - RNA, 19 nt, Artificial Sequence
  Description of Artificial Sequence: Synthetic oligonucleotide
gcaaugugcccacaccagc

SEQ ID NO: 502822 - RNA, 19 nt, Artificial Sequence
  Description of Artificial Sequence: Synthetic oligonucleotide
guuggccccauucaucaaa

SEQ ID NO: 502823 - RNA, 19 nt, Artificial Sequence
  Description of Artificial Sequence: Synthetic oligonucleotide
uccuaugcccuuggaguug

SEQ ID NO: 502824 - RNA, 19 nt, Artificial Sequence
  Description of Artificial Sequence: Synthetic oligonucleotide
uguucuugccuggaaugua

SEQ ID NO: 502825 - RNA, 19 nt, Artificial Sequence
  Description of Artificial Sequence: Synthetic oligonucleotide
cuuaggccgccaucuucgc

SEQ ID NO: 502826 - RNA, 19 nt, Artificial Sequence
  Description of Artificial Sequence: Synthetic oligonucleotide
agcguuggccccauucauc

SEQ ID NO: 502827 - RNA, 19 nt, Artificial Sequence
  Description of Artificial Sequence: Synthetic oligonucleotide
gucagggaaagggucaguc

SEQ ID NO: 502828 - RNA, 19 nt, Artificial Sequence
  Description of Artificial Sequence: Synthetic oligonucleotide
gguagcguuggccccauuc

SEQ ID NO: 502829 - RNA, 19 nt, Artificial Sequence
  Description of Artificial Sequence: Synthetic oligonucleotide
uugugcugcgagugagaca

SEQ ID NO: 502830 - RNA, 19 nt, Artificial Sequence
  Description of Artificial Sequence: Synthetic oligonucleotide
ccguaaagcuuccugauca

SEQ ID NO: 502831 - RNA, 19 nt, Artificial Sequence
  Description of Artificial Sequence: Synthetic oligonucleotide
uggcuacgcugauuguucu

SEQ ID NO: 502832 - RNA, 19 nt, Artificial Sequence
  Description of Artificial Sequence: Synthetic oligonucleotide
acuguaggguaggauuugu

SEQ ID NO: 502833 - RNA, 19 nt, Artificial Sequence
  Description of Artificial Sequence: Synthetic oligonucleotide
agcacuaaugagaucgcuu

SEQ ID NO: 502834 - RNA, 19 nt, Artificial Sequence
  Description of Artificial Sequence: Synthetic oligonucleotide
gcuacgcugauuguucuug

SEQ ID NO: 502835 - RNA, 19 nt, Artificial Sequence
  Description of Artificial Sequence: Synthetic oligonucleotide
acggagcaaagguagcguu

SEQ ID NO: 502836 - RNA, 19 nt, Artificial Sequence
  Description of Artificial Sequence: Synthetic oligonucleotide
ucugucccgauacccugua

SEQ ID NO: 502837 - RNA, 19 nt, Artificial Sequence
  Description of Artificial Sequence: Synthetic oligonucleotide
uggccuaucgcuggcugac

SEQ ID NO: 502838 - RNA, 19 nt, Artificial Sequence
  Description of Artificial Sequence: Synthetic oligonucleotide
guggcuacgcugauuguuc

SEQ ID NO: 502839 - RNA, 19 nt, Artificial Sequence
  Description of Artificial Sequence: Synthetic oligonucleotide
ucaaaccacuccuccgcuu

SEQ ID NO: 502840 - RNA, 19 nt, Artificial Sequence
  Description of Artificial Sequence: Synthetic oligonucleotide
uggccccauucaucaaaag

SEQ ID NO: 502841 - RNA, 19 nt, Artificial Sequence
  Description of Artificial Sequence: Synthetic oligonucleotide
ccucuaaaaucaccacagg

SEQ ID NO: 502842 - RNA, 19 nt, Artificial Sequence
  Description of Artificial Sequence: Synthetic oligonucleotide
cacgugauuucucaacucu

SEQ ID NO: 502843 - RNA, 19 nt, Artificial Sequence
  Description of Artificial Sequence: Synthetic oligonucleotide
guacccagucaguccacac

SEQ ID NO: 502844 - RNA, 19 nt, Artificial Sequence
  Description of Artificial Sequence: Synthetic oligonucleotide
acauacuguaggguaggau

SEQ ID NO: 502845 - RNA, 19 nt, Artificial Sequence
  Description of Artificial Sequence: Synthetic oligonucleotide
gucuauguccagcacgggu

SEQ ID NO: 502846 - RNA, 19 nt, Artificial Sequence
  Description of Artificial Sequence: Synthetic oligonucleotide
ucggaugccaggcgacgau

SEQ ID NO: 502847 - RNA, 19 nt, Artificial Sequence
  Description of Artificial Sequence: Synthetic oligonucleotide
gguauccgggucauagaag

SEQ ID NO: 502848 - RNA, 19 nt, Artificial Sequence
  Description of Artificial Sequence: Synthetic oligonucleotide
ggaguuguggagcuagcaa

SEQ ID NO: 502849 - RNA, 19 nt, Artificial Sequence
  Description of Artificial Sequence: Synthetic oligonucleotide
ugccuggaauguacccaug

SEQ ID NO: 502850 - RNA, 19 nt, Artificial Sequence
  Description of Artificial Sequence: Synthetic oligonucleotide
cucuaagcagcugccacca

SEQ ID NO: 502851 - RNA, 19 nt, Artificial Sequence
  Description of Artificial Sequence: Synthetic oligonucleotide
ggucagacuuccuggggac

SEQ ID NO: 502852 - RNA, 19 nt, Artificial Sequence
  Description of Artificial Sequence: Synthetic oligonucleotide
uggcaauaaccugaucauu

SEQ ID NO: 502853 - RNA, 19 nt, Artificial Sequence
  Description of Artificial Sequence: Synthetic oligonucleotide
cagcacggguccugugugg

SEQ ID NO: 502854 - RNA, 19 nt, Artificial Sequence
  Description of Artificial Sequence: Synthetic oligonucleotide
guguuuugacagaacacua

SEQ ID NO: 502855 - RNA, 19 nt, Artificial Sequence
  Description of Artificial Sequence: Synthetic oligonucleotide
caugcuaaggugugugggu

SEQ ID NO: 502856 - RNA, 19 nt, Artificial Sequence
  Description of Artificial Sequence: Synthetic oligonucleotide
ccccgcuuagacauguagc

SEQ ID NO: 502857 - RNA, 19 nt, Artificial Sequence
  Description of Artificial Sequence: Synthetic oligonucleotide
guguuaucacagccugcac

SEQ ID NO: 502858 - RNA, 19 nt, Artificial Sequence
  Description of Artificial Sequence: Synthetic oligonucleotide
uuaucacagccugcacuaa

SEQ ID NO: 502859 - RNA, 19 nt, Artificial Sequence
  Description of Artificial Sequence: Synthetic oligonucleotide
ucugaaccgcuggcaauaa

SEQ ID NO: 502860 - RNA, 19 nt, Artificial Sequence
  Description of Artificial Sequence: Synthetic oligonucleotide
cugcgagugagacagcacu

SEQ ID NO: 502861 - RNA, 19 nt, Artificial Sequence
  Description of Artificial Sequence: Synthetic oligonucleotide
ggccacucuauaagagugg

SEQ ID NO: 502862 - RNA, 19 nt, Artificial Sequence
  Description of Artificial Sequence: Synthetic oligonucleotide
uccgggcccgcugugucag

SEQ ID NO: 502863 - RNA, 19 nt, Artificial Sequence
  Description of Artificial Sequence: Synthetic oligonucleotide
cacgaacacaugcuaaggu

SEQ ID NO: 502864 - RNA, 19 nt, Artificial Sequence
  Description of Artificial Sequence: Synthetic oligonucleotide
uaucgcuggcugacagauc

SEQ ID NO: 502865 - RNA, 19 nt, Artificial Sequence
  Description of Artificial Sequence: Synthetic oligonucleotide
uggcaacgaaucugggguu

SEQ ID NO: 502866 - RNA, 19 nt, Artificial Sequence
  Description of Artificial Sequence: Synthetic oligonucleotide
cauucaucaaaaggugugu

SEQ ID NO: 502867 - RNA, 19 nt, Artificial Sequence
  Description of Artificial Sequence: Synthetic oligonucleotide
ggagcuagcaaccccugua

SEQ ID NO: 502868 - RNA, 19 nt, Artificial Sequence
  Description of Artificial Sequence: Synthetic oligonucleotide
cucguccgugauuucaaaa

SEQ ID NO: 502869 - RNA, 19 nt, Artificial Sequence
  Description of Artificial Sequence: Synthetic oligonucleotide
gccuaucgcuggcugacag

SEQ ID NO: 502870 - RNA, 19 nt, Artificial Sequence
  Description of Artificial Sequence: Synthetic oligonucleotide
acucguccgugauuucaaa

SEQ ID NO: 502871 - RNA, 19 nt, Artificial Sequence
  Description of Artificial Sequence: Synthetic oligonucleotide
gagcuagcaaccccuguau

SEQ ID NO: 502872 - RNA, 19 nt, Artificial Sequence
  Description of Artificial Sequence: Synthetic oligonucleotide
ugccaacugccgcucgcuc

SEQ ID NO: 502873 - RNA, 19 nt, Artificial Sequence
  Description of Artificial Sequence: Synthetic oligonucleotide
gagaucgcuuuucuuguuu

SEQ ID NO: 502874 - RNA, 19 nt, Artificial Sequence
  Description of Artificial Sequence: Synthetic oligonucleotide
gauggcgcgcaugggccug

SEQ ID NO: 502875 - RNA, 19 nt, Artificial Sequence
  Description of Artificial Sequence: Synthetic oligonucleotide
gucccuuggaauacacgga

SEQ ID NO: 502876 - RNA, 19 nt, Artificial Sequence
  Description of Artificial Sequence: Synthetic oligonucleotide
gacucguccgugauuucaa

SEQ ID NO: 502877 - RNA, 19 nt, Artificial Sequence
  Description of Artificial Sequence: Synthetic oligonucleotide
gaagagcgauugguuccug

SEQ ID NO: 502878 - RNA, 19 nt, Artificial Sequence
  Description of Artificial Sequence: Synthetic oligonucleotide
ggcaacgaaucugggguug

SEQ ID NO: 502879 - RNA, 19 nt, Artificial Sequence
  Description of Artificial Sequence: Synthetic oligonucleotide
guucagucagggaaagggu

SEQ ID NO: 502880 - RNA, 19 nt, Artificial Sequence
  Description of Artificial Sequence: Synthetic oligonucleotide
gcacuaaugagaucgcuuu

SEQ ID NO: 502881 - RNA, 19 nt, Artificial Sequence
  Description of Artificial Sequence: Synthetic oligonucleotide
uguguggguccacgugauu

SEQ ID NO: 502882 - RNA, 19 nt, Artificial Sequence
  Description of Artificial Sequence: Synthetic oligonucleotide
cccuuggaauacacggagc

SEQ ID NO: 502883 - RNA, 19 nt, Artificial Sequence
  Description of Artificial Sequence: Synthetic oligonucleotide
cugccucugucccgauacc

SEQ ID NO: 502884 - RNA, 19 nt, Artificial Sequence
  Description of Artificial Sequence: Synthetic oligonucleotide
cagagugccaacugccgcu

SEQ ID NO: 502885 - RNA, 19 nt, Artificial Sequence
  Description of Artificial Sequence: Synthetic oligonucleotide
ggagcacuaaugagaucgc

SEQ ID NO: 502886 - RNA, 19 nt, Artificial Sequence
  Description of Artificial Sequence: Synthetic oligonucleotide
caacgaaucugggguugac

SEQ ID NO: 502887 - RNA, 19 nt, Artificial Sequence
  Description of Artificial Sequence: Synthetic oligonucleotide
aggcgacgaugccaacucu

SEQ ID NO: 502888 - RNA, 19 nt, Artificial Sequence
  Description of Artificial Sequence: Synthetic oligonucleotide
auacugguauccgggucau

SEQ ID NO: 502889 - RNA, 19 nt, Artificial Sequence
  Description of Artificial Sequence: Synthetic oligonucleotide
uucgccaguugcugcucua

SEQ ID NO: 502890 - RNA, 19 nt, Artificial Sequence
  Description of Artificial Sequence: Synthetic oligonucleotide
guggccuaucgcuggcuga

SEQ ID NO: 502891 - RNA, 19 nt, Artificial Sequence
  Description of Artificial Sequence: Synthetic oligonucleotide
cugucccgauacccuguag

SEQ ID NO: 502892 - RNA, 19 nt, Artificial Sequence
  Description of Artificial Sequence: Synthetic oligonucleotide
cgcuuagacauguagccca

SEQ ID NO: 502893 - RNA, 19 nt, Artificial Sequence
  Description of Artificial Sequence: Synthetic oligonucleotide
ucgccaguugcugcucuaa

SEQ ID NO: 502894 - RNA, 19 nt, Artificial Sequence
  Description of Artificial Sequence: Synthetic oligonucleotide
ggacauauggggacucguc

SEQ ID NO: 502895 - RNA, 19 nt, Artificial Sequence
  Description of Artificial Sequence: Synthetic oligonucleotide
cucugaaccgcuggcaaua

SEQ ID NO: 502896 - RNA, 19 nt, Artificial Sequence
  Description of Artificial Sequence: Synthetic oligonucleotide
gucaggguacaggucaucu

SEQ ID NO: 502897 - RNA, 19 nt, Artificial Sequence
  Description of Artificial Sequence: Synthetic oligonucleotide
gcacuaaggagcacauuuc

SEQ ID NO: 502898 - RNA, 19 nt, Artificial Sequence
  Description of Artificial Sequence: Synthetic oligonucleotide
cucgcucauucggcuaaag

SEQ ID NO: 502899 - RNA, 19 nt, Artificial Sequence
  Description of Artificial Sequence: Synthetic oligonucleotide
cuaucgcuggcugacagau

SEQ ID NO: 502900 - RNA, 19 nt, Artificial Sequence
  Description of Artificial Sequence: Synthetic oligonucleotide
gucccgauacccuguagau

SEQ ID NO: 502901 - RNA, 19 nt, Artificial Sequence
  Description of Artificial Sequence: Synthetic oligonucleotide
aguggaucugggagcaguu

SEQ ID NO: 502902 - RNA, 19 nt, Artificial Sequence
  Description of Artificial Sequence: Synthetic oligonucleotide
aggaucgggucugcauucu

SEQ ID NO: 502903 - RNA, 19 nt, Artificial Sequence
  Description of Artificial Sequence: Synthetic oligonucleotide
caucaaguccccgcuuaga

SEQ ID NO: 502904 - RNA, 19 nt, Artificial Sequence
  Description of Artificial Sequence: Synthetic oligonucleotide
ucgggccgucggaugccag

SEQ ID NO: 502905 - RNA, 19 nt, Artificial Sequence
  Description of Artificial Sequence: Synthetic oligonucleotide
cgaaucugggguugacagc

SEQ ID NO: 502906 - RNA, 19 nt, Artificial Sequence
  Description of Artificial Sequence: Synthetic oligonucleotide
ccugaucaaaagcucagcu

SEQ ID NO: 502907 - RNA, 19 nt, Artificial Sequence
  Description of Artificial Sequence: Synthetic oligonucleotide
guggagcuagcaaccccug

SEQ ID NO: 502908 - RNA, 19 nt, Artificial Sequence
  Description of Artificial Sequence: Synthetic oligonucleotide
ggacucguccgugauuuca

SEQ ID NO: 502909 - RNA, 19 nt, Artificial Sequence
  Description of Artificial Sequence: Synthetic oligonucleotide
gaguacccagucaguccac

SEQ ID NO: 502910 - RNA, 19 nt, Artificial Sequence
  Description of Artificial Sequence: Synthetic oligonucleotide
gaggggaauugaguucuua

SEQ ID NO: 502911 - RNA, 19 nt, Artificial Sequence
  Description of Artificial Sequence: Synthetic oligonucleotide
gggaggggaauugaguucu

SEQ ID NO: 502912 - RNA, 19 nt, Artificial Sequence
  Description of Artificial Sequence: Synthetic oligonucleotide
cccgauacccuguagauuu

SEQ ID NO: 502913 - RNA, 19 nt, Artificial Sequence
  Description of Artificial Sequence: Synthetic oligonucleotide
gagcacuaaugagaucgcu

SEQ ID NO: 502914 - RNA, 19 nt, Artificial Sequence
  Description of Artificial Sequence: Synthetic oligonucleotide
ccccuguauggauggcugg

SEQ ID NO: 502915 - RNA, 19 nt, Artificial Sequence
  Description of Artificial Sequence: Synthetic oligonucleotide
aagguagcguuggccccau

SEQ ID NO: 502916 - RNA, 19 nt, Artificial Sequence
  Description of Artificial Sequence: Synthetic oligonucleotide
caccguaaagcuuccugau

SEQ ID NO: 502917 - RNA, 19 nt, Artificial Sequence
  Description of Artificial Sequence: Synthetic oligonucleotide
ccgcuuagacauguagccc

SEQ ID NO: 502918 - RNA, 19 nt, Artificial Sequence
  Description of Artificial Sequence: Synthetic oligonucleotide
ccagcacggguccugugug

SEQ ID NO: 502919 - RNA, 19 nt, Artificial Sequence
  Description of Artificial Sequence: Synthetic oligonucleotide
gucguuuucacagccuguu

SEQ ID NO: 502920 - RNA, 19 nt, Artificial Sequence
  Description of Artificial Sequence: Synthetic oligonucleotide
gccuuaggccgccaucuuc

SEQ ID NO: 502921 - RNA, 19 nt, Artificial Sequence
  Description of Artificial Sequence: Synthetic oligonucleotide
caucuugauugcagauugu

SEQ ID NO: 502922 - RNA, 19 nt, Artificial Sequence
  Description of Artificial Sequence: Synthetic oligonucleotide
gucggaugccaggcgacga

SEQ ID NO: 502923 - RNA, 19 nt, Artificial Sequence
  Description of Artificial Sequence: Synthetic oligonucleotide
guguggguccacgugauuu

SEQ ID NO: 502924 - RNA, 19 nt, Artificial Sequence
  Description of Artificial Sequence: Synthetic oligonucleotide
cucgagagacucggauguc

SEQ ID NO: 502925 - RNA, 19 nt, Artificial Sequence
  Description of Artificial Sequence: Synthetic oligonucleotide
gcuaaggugugugggucca

SEQ ID NO: 502926 - RNA, 19 nt, Artificial Sequence
  Description of Artificial Sequence: Synthetic oligonucleotide
cgcgcaugggccuggcucc

SEQ ID NO: 502927 - RNA, 19 nt, Artificial Sequence
  Description of Artificial Sequence: Synthetic oligonucleotide
cuaugcccuuggaguugug

SEQ ID NO: 502928 - RNA, 19 nt, Artificial Sequence
  Description of Artificial Sequence: Synthetic oligonucleotide
ggccgucggaugccaggcg

SEQ ID NO: 502929 - RNA, 19 nt, Artificial Sequence
  Description of Artificial Sequence: Synthetic oligonucleotide
gccugucaaacaccguaaa

SEQ ID NO: 502930 - RNA, 19 nt, Artificial Sequence
  Description of Artificial Sequence: Synthetic oligonucleotide
cuggucguuuucacagccu

SEQ ID NO: 502931 - RNA, 19 nt, Artificial Sequence
  Description of Artificial Sequence: Synthetic oligonucleotide
caucauagcacuggucguu

SEQ ID NO: 502932 - RNA, 19 nt, Artificial Sequence
  Description of Artificial Sequence: Synthetic oligonucleotide
gcgauugguuccugcaugu

SEQ ID NO: 502933 - RNA, 19 nt, Artificial Sequence
  Description of Artificial Sequence: Synthetic oligonucleotide
uggggacggucaugaugau

SEQ ID NO: 502934 - RNA, 19 nt, Artificial Sequence
  Description of Artificial Sequence: Synthetic oligonucleotide
gucacucgagagacucgga

SEQ ID NO: 502935 - RNA, 19 nt, Artificial Sequence
  Description of Artificial Sequence: Synthetic oligonucleotide
gggccgucggaugccaggc

SEQ ID NO: 502936 - RNA, 19 nt, Artificial Sequence
  Description of Artificial Sequence: Synthetic oligonucleotide
uccuggggacggucaugau

SEQ ID NO: 502937 - RNA, 19 nt, Artificial Sequence
  Description of Artificial Sequence: Synthetic oligonucleotide
gcacggguccuguguggcc

SEQ ID NO: 502938 - RNA, 19 nt, Artificial Sequence
  Description of Artificial Sequence: Synthetic oligonucleotide
cacuaaugagaucgcuuuu

SEQ ID NO: 502939 - RNA, 19 nt, Artificial Sequence
  Description of Artificial Sequence: Synthetic oligonucleotide
ccgauacccuguagauuug

SEQ ID NO: 502940 - RNA, 19 nt, Artificial Sequence
  Description of Artificial Sequence: Synthetic oligonucleotide
gcugcgagugagacagcac

SEQ ID NO: 502941 - RNA, 19 nt, Artificial Sequence
  Description of Artificial Sequence: Synthetic oligonucleotide
caugccccugggccuguca

SEQ ID NO: 502942 - RNA, 19 nt, Artificial Sequence
  Description of Artificial Sequence: Synthetic oligonucleotide
ccuaucgcuggcugacaga

SEQ ID NO: 502943 - RNA, 19 nt, Artificial Sequence
  Description of Artificial Sequence: Synthetic oligonucleotide
acaugccccugggccuguc

SEQ ID NO: 502944 - RNA, 19 nt, Artificial Sequence
  Description of Artificial Sequence: Synthetic oligonucleotide
ccgucggaugccaggcgac

SEQ ID NO: 502945 - RNA, 19 nt, Artificial Sequence
  Description of Artificial Sequence: Synthetic oligonucleotide
ggggacucguccgugauuu

SEQ ID NO: 502946 - RNA, 19 nt, Artificial Sequence
  Description of Artificial Sequence: Synthetic oligonucleotide
uggcuucguuuugcacgcu

SEQ ID NO: 502947 - RNA, 19 nt, Artificial Sequence
  Description of Artificial Sequence: Synthetic oligonucleotide
ccuggaauguacccaugcu

SEQ ID NO: 502948 - RNA, 19 nt, Artificial Sequence
  Description of Artificial Sequence: Synthetic oligonucleotide
cguccgugauuucaaaaua

SEQ ID NO: 502949 - RNA, 19 nt, Artificial Sequence
  Description of Artificial Sequence: Synthetic oligonucleotide
cgggccgucggaugccagg

SEQ ID NO: 502950 - RNA, 19 nt, Artificial Sequence
  Description of Artificial Sequence: Synthetic oligonucleotide
gcgagugagacagcacugu

SEQ ID NO: 502951 - RNA, 19 nt, Artificial Sequence
  Description of Artificial Sequence: Synthetic oligonucleotide
cgucggaugccaggcgacg

SEQ ID NO: 502952 - RNA, 19 nt, Artificial Sequence
  Description of Artificial Sequence: Synthetic oligonucleotide
guguggcuacgcugauugu

SEQ ID NO: 502953 - RNA, 19 nt, Artificial Sequence
  Description of Artificial Sequence: Synthetic oligonucleotide
ggucguuuucacagccugu

SEQ ID NO: 502954 - RNA, 19 nt, Artificial Sequence
  Description of Artificial Sequence: Synthetic oligonucleotide
gggacucguccgugauuuc

SEQ ID NO: 502955 - RNA, 19 nt, Artificial Sequence
  Description of Artificial Sequence: Synthetic oligonucleotide
gccgcucgcucauucggcu

SEQ ID NO: 502956 - RNA, 19 nt, Artificial Sequence
  Description of Artificial Sequence: Synthetic oligonucleotide
ggggacggucaugaugaua

SEQ ID NO: 502957 - RNA, 19 nt, Artificial Sequence
  Description of Artificial Sequence: Synthetic oligonucleotide
gcuuagacauguagcccau

SEQ ID NO: 502958 - RNA, 19 nt, Artificial Sequence
  Description of Artificial Sequence: Synthetic oligonucleotide
ggcuacgcugauuguucuu

SEQ ID NO: 502959 - RNA, 19 nt, Artificial Sequence
  Description of Artificial Sequence: Synthetic oligonucleotide
ggccuaucgcuggcugaca

SEQ ID NO: 502960 - RNA, 19 nt, Artificial Sequence
  Description of Artificial Sequence: Synthetic oligonucleotide
agguagcguuggccccauu

SEQ ID NO: 502961 - RNA, 19 nt, Artificial Sequence
  Description of Artificial Sequence: Synthetic oligonucleotide
ggaucgggucugcauucuu

SEQ ID NO: 502962 - RNA, 19 nt, Artificial Sequence
  Description of Artificial Sequence: Synthetic oligonucleotide
ccuaugcccuuggaguugu

SEQ ID NO: 502963 - RNA, 19 nt, Artificial Sequence
  Description of Artificial Sequence: Synthetic oligonucleotide
ccacucuauaagaguggau

SEQ ID NO: 502964 - RNA, 19 nt, Artificial Sequence
  Description of Artificial Sequence: Synthetic oligonucleotide
cccgcugaggcuccuugcu

SEQ ID NO: 502965 - RNA, 19 nt, Artificial Sequence
  Description of Artificial Sequence: Synthetic oligonucleotide
gcucgcucauucggcuaaa

SEQ ID NO: 502966 - RNA, 19 nt, Artificial Sequence
  Description of Artificial Sequence: Synthetic oligonucleotide
ccgggcccgcugugucagg

SEQ ID NO: 502967 - RNA, 19 nt, Artificial Sequence
  Description of Artificial Sequence: Synthetic oligonucleotide
ggcgcgcaugggccuggcu

SEQ ID NO: 502968 - RNA, 19 nt, Artificial Sequence
  Description of Artificial Sequence: Synthetic oligonucleotide
cgacgaugccaacucuuuu

SEQ ID NO: 502969 - RNA, 19 nt, Artificial Sequence
  Description of Artificial Sequence: Synthetic oligonucleotide
cggauacugcugucacccu

SEQ ID NO: 502970 - RNA, 19 nt, Artificial Sequence
  Description of Artificial Sequence: Synthetic oligonucleotide
caacugccgcucgcucauu

SEQ ID NO: 502971 - RNA, 19 nt, Artificial Sequence
  Description of Artificial Sequence: Synthetic oligonucleotide
ccgccacaaucuccuguuu

SEQ ID NO: 502972 - RNA, 19 nt, Artificial Sequence
  Description of Artificial Sequence: Synthetic oligonucleotide
aauaguaugcacuacguac

SEQ ID NO: 502973 - RNA, 19 nt, Artificial Sequence
  Description of Artificial Sequence: Synthetic oligonucleotide
aacaaguucucuaagaugc

SEQ ID NO: 502974 - RNA, 19 nt, Artificial Sequence
  Description of Artificial Sequence: Synthetic oligonucleotide
uaauguaacucuuagcugg

SEQ ID NO: 502975 - RNA, 19 nt, Artificial Sequence
  Description of Artificial Sequence: Synthetic oligonucleotide
aacuagugaaugcauaggc

SEQ ID NO: 502976 - RNA, 19 nt, Artificial Sequence
  Description of Artificial Sequence: Synthetic oligonucleotide
ugaacgauggcacauacag

SEQ ID NO: 502977 - RNA, 19 nt, Artificial Sequence
  Description of Artificial Sequence: Synthetic oligonucleotide
acuaauguaacucuuagcu

SEQ ID NO: 502978 - RNA, 19 nt, Artificial Sequence
  Description of Artificial Sequence: Synthetic oligonucleotide
ucaaccaugaucuuuacca

SEQ ID NO: 502979 - RNA, 19 nt, Artificial Sequence
  Description of Artificial Sequence: Synthetic oligonucleotide
cugacuaagacauauuugg

SEQ ID NO: 502980 - RNA, 19 nt, Artificial Sequence
  Description of Artificial Sequence: Synthetic oligonucleotide
uauguaaucuuguaaauga

SEQ ID NO: 502981 - RNA, 19 nt, Artificial Sequence
  Description of Artificial Sequence: Synthetic oligonucleotide
ugacauguuaucaaaaugu

SEQ ID NO: 502982 - RNA, 19 nt, Artificial Sequence
  Description of Artificial Sequence: Synthetic oligonucleotide
acuaauaguaugcacuacg

SEQ ID NO: 502983 - RNA, 19 nt, Artificial Sequence
  Description of Artificial Sequence: Synthetic oligonucleotide
aauaccuaguaaaccaugc

SEQ ID NO: 502984 - RNA, 19 nt, Artificial Sequence
  Description of Artificial Sequence: Synthetic oligonucleotide
aaacaacuagguuuggcuc

SEQ ID NO: 502985 - RNA, 19 nt, Artificial Sequence
  Description of Artificial Sequence: Synthetic oligonucleotide
uuuagcucagaacaguuca

SEQ ID NO: 502986 - RNA, 19 nt, Artificial Sequence
  Description of Artificial Sequence: Synthetic oligonucleotide
ucaucucuuaucacgauag

SEQ ID NO: 502987 - RNA, 19 nt, Artificial Sequence
  Description of Artificial Sequence: Synthetic oligonucleotide
ugauagucaagccggauag

SEQ ID NO: 502988 - RNA, 19 nt, Artificial Sequence
  Description of Artificial Sequence: Synthetic oligonucleotide
uauagaauagccucuucag

SEQ ID NO: 502989 - RNA, 19 nt, Artificial Sequence
  Description of Artificial Sequence: Synthetic oligonucleotide
ugugccgaaaacuugagac

SEQ ID NO: 502990 - RNA, 19 nt, Artificial Sequence
  Description of Artificial Sequence: Synthetic oligonucleotide
guaacaaguacaauuacag

SEQ ID NO: 502991 - RNA, 19 nt, Artificial Sequence
  Description of Artificial Sequence: Synthetic oligonucleotide
cuagugaaugcauaggccc

SEQ ID NO: 502992 - RNA, 19 nt, Artificial Sequence
  Description of Artificial Sequence: Synthetic oligonucleotide
augccuauagaauagccuc

SEQ ID NO: 502993 - RNA, 19 nt, Artificial Sequence
  Description of Artificial Sequence: Synthetic oligonucleotide
uuaacaacguagcgaacgg

SEQ ID NO: 502994 - RNA, 19 nt, Artificial Sequence
  Description of Artificial Sequence: Synthetic oligonucleotide
ucucuuaucacgauagccu

SEQ ID NO: 502995 - RNA, 19 nt, Artificial Sequence
  Description of Artificial Sequence: Synthetic oligonucleotide
aaacaaguucucuaagaug

SEQ ID NO: 502996 - RNA, 19 nt, Artificial Sequence
  Description of Artificial Sequence: Synthetic oligonucleotide
uucuuaaugucagugagcc

SEQ ID NO: 502997 - RNA, 19 nt, Artificial Sequence
  Description of Artificial Sequence: Synthetic oligonucleotide
aguguuucgacauuaauua

SEQ ID NO: 502998 - RNA, 19 nt, Artificial Sequence
  Description of Artificial Sequence: Synthetic oligonucleotide
acuaaaugaagcuuccuca

SEQ ID NO: 502999 - RNA, 19 nt, Artificial Sequence
  Description of Artificial Sequence: Synthetic oligonucleotide
ucgauuggcagccaaacca

SEQ ID NO: 503000 - RNA, 19 nt, Artificial Sequence
  Description of Artificial Sequence: Synthetic oligonucleotide
uuugagguacucaaaugcc

SEQ ID NO: 503001 - RNA, 19 nt, Artificial Sequence
  Description of Artificial Sequence: Synthetic oligonucleotide
cuuaacaacguagcgaacg

SEQ ID NO: 503002 - RNA, 19 nt, Artificial Sequence
  Description of Artificial Sequence: Synthetic oligonucleotide
uguuucgacauuaauuacu

SEQ ID NO: 503003 - RNA, 19 nt, Artificial Sequence
  Description of Artificial Sequence: Synthetic oligonucleotide
ugcggagucacacuggaag

SEQ ID NO: 503004 - RNA, 19 nt, Artificial Sequence
  Description of Artificial Sequence: Synthetic oligonucleotide
agagacuuccuuaacaacg

SEQ ID NO: 503005 - RNA, 19 nt, Artificial Sequence
  Description of Artificial Sequence: Synthetic oligonucleotide
auaccuaguaaaccaugcc

SEQ ID NO: 503006 - RNA, 19 nt, Artificial Sequence
  Description of Artificial Sequence: Synthetic oligonucleotide
uagauuagcugacuaagac

SEQ ID NO: 503007 - RNA, 19 nt, Artificial Sequence
  Description of Artificial Sequence: Synthetic oligonucleotide
ucugccgugaaucugaauu

SEQ ID NO: 503008 - RNA, 19 nt, Artificial Sequence
  Description of Artificial Sequence: Synthetic oligonucleotide
uucgacauuaauuacuuua

SEQ ID NO: 503009 - RNA, 19 nt, Artificial Sequence
  Description of Artificial Sequence: Synthetic oligonucleotide
ugagcuauggggacuaaug

SEQ ID NO: 503010 - RNA, 19 nt, Artificial Sequence
  Description of Artificial Sequence: Synthetic oligonucleotide
aucucuuaucacgauagcc

SEQ ID NO: 503011 - RNA, 19 nt, Artificial Sequence
  Description of Artificial Sequence: Synthetic oligonucleotide
acaauuugucaauaccuag

SEQ ID NO: 503012 - RNA, 19 nt, Artificial Sequence
  Description of Artificial Sequence: Synthetic oligonucleotide
uaaaccaugccuauagaau

SEQ ID NO: 503013 - RNA, 19 nt, Artificial Sequence
  Description of Artificial Sequence: Synthetic oligonucleotide
uacaauuaggggcuugacc

SEQ ID NO: 503014 - RNA, 19 nt, Artificial Sequence
  Description of Artificial Sequence: Synthetic oligonucleotide
ucgacauuaauuacuuuac

SEQ ID NO: 503015 - RNA, 19 nt, Artificial Sequence
  Description of Artificial Sequence: Synthetic oligonucleotide
ugagcacauaaauuaaaca

SEQ ID NO: 503016 - RNA, 19 nt, Artificial Sequence
  Description of Artificial Sequence: Synthetic oligonucleotide
cucaacgcuguuuacaaag

SEQ ID NO: 503017 - RNA, 19 nt, Artificial Sequence
  Description of Artificial Sequence: Synthetic oligonucleotide
aaugucagugagccauucg

SEQ ID NO: 503018 - RNA, 19 nt, Artificial Sequence
  Description of Artificial Sequence: Synthetic oligonucleotide
acuuccuuaacaacguagc

SEQ ID NO: 503019 - RNA, 19 nt, Artificial Sequence
  Description of Artificial Sequence: Synthetic oligonucleotide
uccuuaacaacguagcgaa

SEQ ID NO: 503020 - RNA, 19 nt, Artificial Sequence
  Description of Artificial Sequence: Synthetic oligonucleotide
cuuagauuagcugacuaag

SEQ ID NO: 503021 - RNA, 19 nt, Artificial Sequence
  Description of Artificial Sequence: Synthetic oligonucleotide
cuaaaugaagcuuccucag

SEQ ID NO: 503022 - RNA, 19 nt, Artificial Sequence
  Description of Artificial Sequence: Synthetic oligonucleotide
gucaauaccuaguaaacca

SEQ ID NO: 503023 - RNA, 19 nt, Artificial Sequence
  Description of Artificial Sequence: Synthetic oligonucleotide
uuagauuagcugacuaaga

SEQ ID NO: 503024 - RNA, 19 nt, Artificial Sequence
  Description of Artificial Sequence: Synthetic oligonucleotide
ugucccgugccacuaauag

SEQ ID NO: 503025 - RNA, 19 nt, Artificial Sequence
  Description of Artificial Sequence: Synthetic oligonucleotide
ucuuaucacgauagccucg

SEQ ID NO: 503026 - RNA, 19 nt, Artificial Sequence
  Description of Artificial Sequence: Synthetic oligonucleotide
auuuggguuaccuuacugu

SEQ ID NO: 503027 - RNA, 19 nt, Artificial Sequence
  Description of Artificial Sequence: Synthetic oligonucleotide
ugcacuaauugaacuagug

SEQ ID NO: 503028 - RNA, 19 nt, Artificial Sequence
  Description of Artificial Sequence: Synthetic oligonucleotide
ucggugaucgcauaugaga

SEQ ID NO: 503029 - RNA, 19 nt, Artificial Sequence
  Description of Artificial Sequence: Synthetic oligonucleotide
acuagugaaugcauaggcc

SEQ ID NO: 503030 - RNA, 19 nt, Artificial Sequence
  Description of Artificial Sequence: Synthetic oligonucleotide
uaagaaggugagcuauggg

SEQ ID NO: 503031 - RNA, 19 nt, Artificial Sequence
  Description of Artificial Sequence: Synthetic oligonucleotide
uggcagaaaauuucuacug

SEQ ID NO: 503032 - RNA, 19 nt, Artificial Sequence
  Description of Artificial Sequence: Synthetic oligonucleotide
ugcaauucccucuuugaca

SEQ ID NO: 503033 - RNA, 19 nt, Artificial Sequence
  Description of Artificial Sequence: Synthetic oligonucleotide
ucuaagaugcugccacuag

SEQ ID NO: 503034 - RNA, 19 nt, Artificial Sequence
  Description of Artificial Sequence: Synthetic oligonucleotide
ucugugauucguccugccg

SEQ ID NO: 503035 - RNA, 19 nt, Artificial Sequence
  Description of Artificial Sequence: Synthetic oligonucleotide
cacugaauuggcacuaugc

SEQ ID NO: 503036 - RNA, 19 nt, Artificial Sequence
  Description of Artificial Sequence: Synthetic oligonucleotide
uguaacuucuggaucugga

SEQ ID NO: 503037 - RNA, 19 nt, Artificial Sequence
  Description of Artificial Sequence: Synthetic oligonucleotide
uggcugaugggcuaaucgg

SEQ ID NO: 503038 - RNA, 19 nt, Artificial Sequence
  Description of Artificial Sequence: Synthetic oligonucleotide
cuaauguaacucuuagcug

SEQ ID NO: 503039 - RNA, 19 nt, Artificial Sequence
  Description of Artificial Sequence: Synthetic oligonucleotide
ugucagguccuaaaaugcc

SEQ ID NO: 503040 - RNA, 19 nt, Artificial Sequence
  Description of Artificial Sequence: Synthetic oligonucleotide
aacguagcgaacggcaggg

SEQ ID NO: 503041 - RNA, 19 nt, Artificial Sequence
  Description of Artificial Sequence: Synthetic oligonucleotide
acugaacgauggcacauac

SEQ ID NO: 503042 - RNA, 19 nt, Artificial Sequence
  Description of Artificial Sequence: Synthetic oligonucleotide
uaaucggugaugaggaaau

SEQ ID NO: 503043 - RNA, 19 nt, Artificial Sequence
  Description of Artificial Sequence: Synthetic oligonucleotide
ugucaauaccuaguaaacc

SEQ ID NO: 503044 - RNA, 19 nt, Artificial Sequence
  Description of Artificial Sequence: Synthetic oligonucleotide
cuaagaugcugccacuagg

SEQ ID NO: 503045 - RNA, 19 nt, Artificial Sequence
  Description of Artificial Sequence: Synthetic oligonucleotide
acuacguacugaacgaugg

SEQ ID NO: 503046 - RNA, 19 nt, Artificial Sequence
  Description of Artificial Sequence: Synthetic oligonucleotide
cuauccguccuuguaaugg

SEQ ID NO: 503047 - RNA, 19 nt, Artificial Sequence
  Description of Artificial Sequence: Synthetic oligonucleotide
uauccguccuuguaauggg

SEQ ID NO: 503048 - RNA, 19 nt, Artificial Sequence
  Description of Artificial Sequence: Synthetic oligonucleotide
uuggauacagaaacuuacu

SEQ ID NO: 503049 - RNA, 19 nt, Artificial Sequence
  Description of Artificial Sequence: Synthetic oligonucleotide
uaaucuuguaaaugacaca

SEQ ID NO: 503050 - RNA, 19 nt, Artificial Sequence
  Description of Artificial Sequence: Synthetic oligonucleotide
gacuaauguaacucuuagc

SEQ ID NO: 503051 - RNA, 19 nt, Artificial Sequence
  Description of Artificial Sequence: Synthetic oligonucleotide
ugcacuacguacugaacga

SEQ ID NO: 503052 - RNA, 19 nt, Artificial Sequence
  Description of Artificial Sequence: Synthetic oligonucleotide
agagagacuuccuuaacaa

SEQ ID NO: 503053 - RNA, 19 nt, Artificial Sequence
  Description of Artificial Sequence: Synthetic oligonucleotide
acugaucaaguggugaggg

SEQ ID NO: 503054 - RNA, 19 nt, Artificial Sequence
  Description of Artificial Sequence: Synthetic oligonucleotide
aagccucuuacgaugcggc

SEQ ID NO: 503055 - RNA, 19 nt, Artificial Sequence
  Description of Artificial Sequence: Synthetic oligonucleotide
aggaacuguggcaaagucc

SEQ ID NO: 503056 - RNA, 19 nt, Artificial Sequence
  Description of Artificial Sequence: Synthetic oligonucleotide
ucccgugccacuaauagua

SEQ ID NO: 503057 - RNA, 19 nt, Artificial Sequence
  Description of Artificial Sequence: Synthetic oligonucleotide
gaacuagugaaugcauagg

SEQ ID NO: 503058 - RNA, 19 nt, Artificial Sequence
  Description of Artificial Sequence: Synthetic oligonucleotide
cuuccuuaacaacguagcg

SEQ ID NO: 503059 - RNA, 19 nt, Artificial Sequence
  Description of Artificial Sequence: Synthetic oligonucleotide
uguaugguuugaaccauuc

SEQ ID NO: 503060 - RNA, 19 nt, Artificial Sequence
  Description of Artificial Sequence: Synthetic oligonucleotide
gagacaccaugucauacgc

SEQ ID NO: 503061 - RNA, 19 nt, Artificial Sequence
  Description of Artificial Sequence: Synthetic oligonucleotide
uuccuuaacaacguagcga

SEQ ID NO: 503062 - RNA, 19 nt, Artificial Sequence
  Description of Artificial Sequence: Synthetic oligonucleotide
acuuacuacauuuggguua

SEQ ID NO: 503063 - RNA, 19 nt, Artificial Sequence
  Description of Artificial Sequence: Synthetic oligonucleotide
aucgauacauguuugccau

SEQ ID NO: 503064 - RNA, 19 nt, Artificial Sequence
  Description of Artificial Sequence: Synthetic oligonucleotide
auacaguccaccacagagc

SEQ ID NO: 503065 - RNA, 19 nt, Artificial Sequence
  Description of Artificial Sequence: Synthetic oligonucleotide
aacaacguagcgaacggca

SEQ ID NO: 503066 - RNA, 19 nt, Artificial Sequence
  Description of Artificial Sequence: Synthetic oligonucleotide
aacgcuguuuacaaagaug

SEQ ID NO: 503067 - RNA, 19 nt, Artificial Sequence
  Description of Artificial Sequence: Synthetic oligonucleotide
uccgguacugcucgauugg

SEQ ID NO: 503068 - RNA, 19 nt, Artificial Sequence
  Description of Artificial Sequence: Synthetic oligonucleotide
aguaacaaguacaauuaca

SEQ ID NO: 503069 - RNA, 19 nt, Artificial Sequence
  Description of Artificial Sequence: Synthetic oligonucleotide
caccauagacuguaugacg

SEQ ID NO: 503070 - RNA, 19 nt, Artificial Sequence
  Description of Artificial Sequence: Synthetic oligonucleotide
ggauacagaaacuuacuac

SEQ ID NO: 503071 - RNA, 19 nt, Artificial Sequence
  Description of Artificial Sequence: Synthetic oligonucleotide
gacuuccuuaacaacguag

SEQ ID NO: 503072 - RNA, 19 nt, Artificial Sequence
  Description of Artificial Sequence: Synthetic oligonucleotide
ugauucguccugccgaaca

SEQ ID NO: 503073 - RNA, 19 nt, Artificial Sequence
  Description of Artificial Sequence: Synthetic oligonucleotide
cuauagaauagccucuuca

SEQ ID NO: 503074 - RNA, 19 nt, Artificial Sequence
  Description of Artificial Sequence: Synthetic oligonucleotide
ucucauaaauggucugagc

SEQ ID NO: 503075 - RNA, 19 nt, Artificial Sequence
  Description of Artificial Sequence: Synthetic oligonucleotide
cuggcugaugggcuaaucg

SEQ ID NO: 503076 - RNA, 19 nt, Artificial Sequence
  Description of Artificial Sequence: Synthetic oligonucleotide
uggagcggagcuuugcugc

SEQ ID NO: 503077 - RNA, 19 nt, Artificial Sequence
  Description of Artificial Sequence: Synthetic oligonucleotide
uuacugugccgaaaacuug

SEQ ID NO: 503078 - RNA, 19 nt, Artificial Sequence
  Description of Artificial Sequence: Synthetic oligonucleotide
ucaacgcuguuuacaaaga

SEQ ID NO: 503079 - RNA, 19 nt, Artificial Sequence
  Description of Artificial Sequence: Synthetic oligonucleotide
uagugaaugcauaggccca

SEQ ID NO: 503080 - RNA, 19 nt, Artificial Sequence
  Description of Artificial Sequence: Synthetic oligonucleotide
gaucaaguggugagggagg

SEQ ID NO: 503081 - RNA, 19 nt, Artificial Sequence
  Description of Artificial Sequence: Synthetic oligonucleotide
uccauagagaugccacacc

SEQ ID NO: 503082 - RNA, 19 nt, Artificial Sequence
  Description of Artificial Sequence: Synthetic oligonucleotide
ucgucaaccaugaucuuua

SEQ ID NO: 503083 - RNA, 19 nt, Artificial Sequence
  Description of Artificial Sequence: Synthetic oligonucleotide
uaguaugcacuacguacug

SEQ ID NO: 503084 - RNA, 19 nt, Artificial Sequence
  Description of Artificial Sequence: Synthetic oligonucleotide
aagacauauuuggaguacu

SEQ ID NO: 503085 - RNA, 19 nt, Artificial Sequence
  Description of Artificial Sequence: Synthetic oligonucleotide
aacaauuugucaauaccua

SEQ ID NO: 503086 - RNA, 19 nt, Artificial Sequence
  Description of Artificial Sequence: Synthetic oligonucleotide
uugaacuagugaaugcaua

SEQ ID NO: 503087 - RNA, 19 nt, Artificial Sequence
  Description of Artificial Sequence: Synthetic oligonucleotide
agcacaccuugacucaacg

SEQ ID NO: 503088 - RNA, 19 nt, Artificial Sequence
  Description of Artificial Sequence: Synthetic oligonucleotide
cauguuugccaugauaguc

SEQ ID NO: 503089 - RNA, 19 nt, Artificial Sequence
  Description of Artificial Sequence: Synthetic oligonucleotide
gaagcaucaguccucccca

SEQ ID NO: 503090 - RNA, 19 nt, Artificial Sequence
  Description of Artificial Sequence: Synthetic oligonucleotide
uggcacuaugcuuugggga

SEQ ID NO: 503091 - RNA, 19 nt, Artificial Sequence
  Description of Artificial Sequence: Synthetic oligonucleotide
uucggugaucgcauaugag

SEQ ID NO: 503092 - RNA, 19 nt, Artificial Sequence
  Description of Artificial Sequence: Synthetic oligonucleotide
auaguaugcacuacguacu

SEQ ID NO: 503093 - RNA, 19 nt, Artificial Sequence
  Description of Artificial Sequence: Synthetic oligonucleotide
uacguacugaacgauggca

SEQ ID NO: 503094 - RNA, 19 nt, Artificial Sequence
  Description of Artificial Sequence: Synthetic oligonucleotide
uaagacauauuuggaguac

SEQ ID NO: 503095 - RNA, 19 nt, Artificial Sequence
  Description of Artificial Sequence: Synthetic oligonucleotide
cauacgcagucucugcugc

SEQ ID NO: 503096 - RNA, 19 nt, Artificial Sequence
  Description of Artificial Sequence: Synthetic oligonucleotide
ggacuaauguaacucuuag

SEQ ID NO: 503097 - RNA, 19 nt, Artificial Sequence
  Description of Artificial Sequence: Synthetic oligonucleotide
uacuuagauuagcugacua

SEQ ID NO: 503098 - RNA, 19 nt, Artificial Sequence
  Description of Artificial Sequence: Synthetic oligonucleotide
ugucucauaaauggucuga

SEQ ID NO: 503099 - RNA, 19 nt, Artificial Sequence
  Description of Artificial Sequence: Synthetic oligonucleotide
ugauccaucgauacauguu

SEQ ID NO: 503100 - RNA, 19 nt, Artificial Sequence
  Description of Artificial Sequence: Synthetic oligonucleotide
ucugcggagucacacugga

SEQ ID NO: 503101 - RNA, 19 nt, Artificial Sequence
  Description of Artificial Sequence: Synthetic oligonucleotide
uauggggacuaauguaacu

SEQ ID NO: 503102 - RNA, 19 nt, Artificial Sequence
  Description of Artificial Sequence: Synthetic oligonucleotide
acguacugaacgauggcac

SEQ ID NO: 503103 - RNA, 19 nt, Artificial Sequence
  Description of Artificial Sequence: Synthetic oligonucleotide
cacuaggacaccgugcucc

SEQ ID NO: 503104 - RNA, 19 nt, Artificial Sequence
  Description of Artificial Sequence: Synthetic oligonucleotide
cauagagaugccacaccag

SEQ ID NO: 503105 - RNA, 19 nt, Artificial Sequence
  Description of Artificial Sequence: Synthetic oligonucleotide
uggggacuaauguaacucu

SEQ ID NO: 503106 - RNA, 19 nt, Artificial Sequence
  Description of Artificial Sequence: Synthetic oligonucleotide
auagucaagccggauagga

SEQ ID NO: 503107 - RNA, 19 nt, Artificial Sequence
  Description of Artificial Sequence: Synthetic oligonucleotide
cuuuagcucagaacaguuc

SEQ ID NO: 503108 - RNA, 19 nt, Artificial Sequence
  Description of Artificial Sequence: Synthetic oligonucleotide
guagcgaacggcagggacg

SEQ ID NO: 503109 - RNA, 19 nt, Artificial Sequence
  Description of Artificial Sequence: Synthetic oligonucleotide
ugacucaacgcuguuuaca

SEQ ID NO: 503110 - RNA, 19 nt, Artificial Sequence
  Description of Artificial Sequence: Synthetic oligonucleotide
ggaagcaucaguccucccc

SEQ ID NO: 503111 - RNA, 19 nt, Artificial Sequence
  Description of Artificial Sequence: Synthetic oligonucleotide
acucugcggagucacacug

SEQ ID NO: 503112 - RNA, 19 nt, Artificial Sequence
  Description of Artificial Sequence: Synthetic oligonucleotide
ucacugaauuggcacuaug

SEQ ID NO: 503113 - RNA, 19 nt, Artificial Sequence
  Description of Artificial Sequence: Synthetic oligonucleotide
accaugccuauagaauagc

SEQ ID NO: 503114 - RNA, 19 nt, Artificial Sequence
  Description of Artificial Sequence: Synthetic oligonucleotide
aagcuccacuuacuguaag

SEQ ID NO: 503115 - RNA, 19 nt, Artificial Sequence
  Description of Artificial Sequence: Synthetic oligonucleotide
uaacucuuagcuggagaag

SEQ ID NO: 503116 - RNA, 19 nt, Artificial Sequence
  Description of Artificial Sequence: Synthetic oligonucleotide
uccguccuuguaaugggca

SEQ ID NO: 503117 - RNA, 19 nt, Artificial Sequence
  Description of Artificial Sequence: Synthetic oligonucleotide
aguaaaccaugccuauaga

SEQ ID NO: 503118 - RNA, 19 nt, Artificial Sequence
  Description of Artificial Sequence: Synthetic oligonucleotide
ugcuccuuagcuccucaca

SEQ ID NO: 503119 - RNA, 19 nt, Artificial Sequence
  Description of Artificial Sequence: Synthetic oligonucleotide
uaugcacuacguacugaac

SEQ ID NO: 503120 - RNA, 19 nt, Artificial Sequence
  Description of Artificial Sequence: Synthetic oligonucleotide
uacuacauuuggguuaccu

SEQ ID NO: 503121 - RNA, 19 nt, Artificial Sequence
  Description of Artificial Sequence: Synthetic oligonucleotide
acaccgugcuccuuagcuc

SEQ ID NO: 503122 - RNA, 19 nt, Artificial Sequence
  Description of Artificial Sequence: Synthetic oligonucleotide
aauguaacucuuagcugga

SEQ ID NO: 503123 - RNA, 19 nt, Artificial Sequence
  Description of Artificial Sequence: Synthetic oligonucleotide
cauuuggguuaccuuacug

SEQ ID NO: 503124 - RNA, 19 nt, Artificial Sequence
  Description of Artificial Sequence: Synthetic oligonucleotide
agccaaaccaaguccuuca

SEQ ID NO: 503125 - RNA, 19 nt, Artificial Sequence
  Description of Artificial Sequence: Synthetic oligonucleotide
guaugcacuacguacugaa

SEQ ID NO: 503126 - RNA, 19 nt, Artificial Sequence
  Description of Artificial Sequence: Synthetic oligonucleotide
auggcacauacaguccacc

SEQ ID NO: 503127 - RNA, 19 nt, Artificial Sequence
  Description of Artificial Sequence: Synthetic oligonucleotide
gauagucaagccggauagg

SEQ ID NO: 503128 - RNA, 19 nt, Artificial Sequence
  Description of Artificial Sequence: Synthetic oligonucleotide
ugccgaaaacuugagacau

SEQ ID NO: 503129 - RNA, 19 nt, Artificial Sequence
  Description of Artificial Sequence: Synthetic oligonucleotide
cauauuuggaguacuuuua

SEQ ID NO: 503130 - RNA, 19 nt, Artificial Sequence
  Description of Artificial Sequence: Synthetic oligonucleotide
caacguagcgaacggcagg

SEQ ID NO: 503131 - RNA, 19 nt, Artificial Sequence
  Description of Artificial Sequence: Synthetic oligonucleotide
guaaugggcagacugaaau

SEQ ID NO: 503132 - RNA, 19 nt, Artificial Sequence
  Description of Artificial Sequence: Synthetic oligonucleotide
acuuacuguaagaaagacu

SEQ ID NO: 503133 - RNA, 19 nt, Artificial Sequence
  Description of Artificial Sequence: Synthetic oligonucleotide
ggagcuuugcugcuauccg

SEQ ID NO: 503134 - RNA, 19 nt, Artificial Sequence
  Description of Artificial Sequence: Synthetic oligonucleotide
uguaaugggcagacugaaa

SEQ ID NO: 503135 - RNA, 19 nt, Artificial Sequence
  Description of Artificial Sequence: Synthetic oligonucleotide
agccucuuacgaugcggcc

SEQ ID NO: 503136 - RNA, 19 nt, Artificial Sequence
  Description of Artificial Sequence: Synthetic oligonucleotide
accuuacugugccgaaaac

SEQ ID NO: 503137 - RNA, 19 nt, Artificial Sequence
  Description of Artificial Sequence: Synthetic oligonucleotide
cuauggggacuaauguaac

SEQ ID NO: 503138 - RNA, 19 nt, Artificial Sequence
  Description of Artificial Sequence: Synthetic oligonucleotide
aucaaguggugagggaggg

SEQ ID NO: 503139 - RNA, 19 nt, Artificial Sequence
  Description of Artificial Sequence: Synthetic oligonucleotide
ugugauucguccugccgaa

SEQ ID NO: 503140 - RNA, 19 nt, Artificial Sequence
  Description of Artificial Sequence: Synthetic oligonucleotide
acacucugcggagucacac

SEQ ID NO: 503141 - RNA, 19 nt, Artificial Sequence
  Description of Artificial Sequence: Synthetic oligonucleotide
gauccaucgauacauguuu

SEQ ID NO: 503142 - RNA, 19 nt, Artificial Sequence
  Description of Artificial Sequence: Synthetic oligonucleotide
augcauaggcccaacaccu

SEQ ID NO: 503143 - RNA, 19 nt, Artificial Sequence
  Description of Artificial Sequence: Synthetic oligonucleotide
ugacguccgugccuuguag

SEQ ID NO: 503144 - RNA, 19 nt, Artificial Sequence
  Description of Artificial Sequence: Synthetic oligonucleotide
gugaucgcauaugagaaca

SEQ ID NO: 503145 - RNA, 19 nt, Artificial Sequence
  Description of Artificial Sequence: Synthetic oligonucleotide
agguuguuuuggcccaggg

SEQ ID NO: 503146 - RNA, 19 nt, Artificial Sequence
  Description of Artificial Sequence: Synthetic oligonucleotide
uugcacuaauugaacuagu

SEQ ID NO: 503147 - RNA, 19 nt, Artificial Sequence
  Description of Artificial Sequence: Synthetic oligonucleotide
cauaggcccaacaccuccc

SEQ ID NO: 503148 - RNA, 19 nt, Artificial Sequence
  Description of Artificial Sequence: Synthetic oligonucleotide
aaucggugaugaggaaauc

SEQ ID NO: 503149 - RNA, 19 nt, Artificial Sequence
  Description of Artificial Sequence: Synthetic oligonucleotide
cacuacguacugaacgaug

SEQ ID NO: 503150 - RNA, 19 nt, Artificial Sequence
  Description of Artificial Sequence: Synthetic oligonucleotide
cuaagaauaaagcccauuu

SEQ ID NO: 503151 - RNA, 19 nt, Artificial Sequence
  Description of Artificial Sequence: Synthetic oligonucleotide
ugccacuaauaguaugcac

SEQ ID NO: 503152 - RNA, 19 nt, Artificial Sequence
  Description of Artificial Sequence: Synthetic oligonucleotide
uuguaaugggcagacugaa

SEQ ID NO: 503153 - RNA, 19 nt, Artificial Sequence
  Description of Artificial Sequence: Synthetic oligonucleotide
uguaugacguccgugccuu

SEQ ID NO: 503154 - RNA, 19 nt, Artificial Sequence
  Description of Artificial Sequence: Synthetic oligonucleotide
gucaaccaugaucuuuacc

SEQ ID NO: 503155 - RNA, 19 nt, Artificial Sequence
  Description of Artificial Sequence: Synthetic oligonucleotide
cucgauuggcagccaaacc

SEQ ID NO: 503156 - RNA, 19 nt, Artificial Sequence
  Description of Artificial Sequence: Synthetic oligonucleotide
ugcucucguguucucgagc

SEQ ID NO: 503157 - RNA, 19 nt, Artificial Sequence
  Description of Artificial Sequence: Synthetic oligonucleotide
ucuuaaugucagugagcca

SEQ ID NO: 503158 - RNA, 19 nt, Artificial Sequence
  Description of Artificial Sequence: Synthetic oligonucleotide
ugccaccauagacuguaug

SEQ ID NO: 503159 - RNA, 19 nt, Artificial Sequence
  Description of Artificial Sequence: Synthetic oligonucleotide
cuacguacugaacgauggc

SEQ ID NO: 503160 - RNA, 19 nt, Artificial Sequence
  Description of Artificial Sequence: Synthetic oligonucleotide
acgauagccucgucaacca

SEQ ID NO: 503161 - RNA, 19 nt, Artificial Sequence
  Description of Artificial Sequence: Synthetic oligonucleotide
agguacgccugucauugug

SEQ ID NO: 503162 - RNA, 19 nt, Artificial Sequence
  Description of Artificial Sequence: Synthetic oligonucleotide
uucuacugaccaccagcca

SEQ ID NO: 503163 - RNA, 19 nt, Artificial Sequence
  Description of Artificial Sequence: Synthetic oligonucleotide
gggcuaaucggugaugagg

SEQ ID NO: 503164 - RNA, 19 nt, Artificial Sequence
  Description of Artificial Sequence: Synthetic oligonucleotide
ugcaaguguuucgacauua

SEQ ID NO: 503165 - RNA, 19 nt, Artificial Sequence
  Description of Artificial Sequence: Synthetic oligonucleotide
caauuaggggcuugaccac

SEQ ID NO: 503166 - RNA, 19 nt, Artificial Sequence
  Description of Artificial Sequence: Synthetic oligonucleotide
agcuccacuuacuguaaga

SEQ ID NO: 503167 - RNA, 19 nt, Artificial Sequence
  Description of Artificial Sequence: Synthetic oligonucleotide
agaauacagaagucaucau

SEQ ID NO: 503168 - RNA, 19 nt, Artificial Sequence
  Description of Artificial Sequence: Synthetic oligonucleotide
guguuucgacauuaauuac

SEQ ID NO: 503169 - RNA, 19 nt, Artificial Sequence
  Description of Artificial Sequence: Synthetic oligonucleotide
ugagaacaauuugucaaua

SEQ ID NO: 503170 - RNA, 19 nt, Artificial Sequence
  Description of Artificial Sequence: Synthetic oligonucleotide
ugcuauccguccuuguaau

SEQ ID NO: 503171 - RNA, 19 nt, Artificial Sequence
  Description of Artificial Sequence: Synthetic oligonucleotide
gacaccgugcuccuuagcu

SEQ ID NO: 503172 - RNA, 19 nt, Artificial Sequence
  Description of Artificial Sequence: Synthetic oligonucleotide
cugugauucguccugccga

SEQ ID NO: 503173 - RNA, 19 nt, Artificial Sequence
  Description of Artificial Sequence: Synthetic oligonucleotide
cugccgugaaucugaauuc

SEQ ID NO: 503174 - RNA, 19 nt, Artificial Sequence
  Description of Artificial Sequence: Synthetic oligonucleotide
cauggcgccauuucuguga

SEQ ID NO: 503175 - RNA, 19 nt, Artificial Sequence
  Description of Artificial Sequence: Synthetic oligonucleotide
ggggcuugaccacugcugg

SEQ ID NO: 503176 - RNA, 19 nt, Artificial Sequence
  Description of Artificial Sequence: Synthetic oligonucleotide
cgugccacuaauaguaugc

SEQ ID NO: 503177 - RNA, 19 nt, Artificial Sequence
  Description of Artificial Sequence: Synthetic oligonucleotide
cucucgucagggaacagga

SEQ ID NO: 503178 - RNA, 19 nt, Artificial Sequence
  Description of Artificial Sequence: Synthetic oligonucleotide
caucucuuaucacgauagc

SEQ ID NO: 503179 - RNA, 19 nt, Artificial Sequence
  Description of Artificial Sequence: Synthetic oligonucleotide
uuaaugucagugagccauu

SEQ ID NO: 503180 - RNA, 19 nt, Artificial Sequence
  Description of Artificial Sequence: Synthetic oligonucleotide
caggagacuuuguaacuuc

SEQ ID NO: 503181 - RNA, 19 nt, Artificial Sequence
  Description of Artificial Sequence: Synthetic oligonucleotide
cacugaucaaguggugagg

SEQ ID NO: 503182 - RNA, 19 nt, Artificial Sequence
  Description of Artificial Sequence: Synthetic oligonucleotide
auugaacuagugaaugcau

SEQ ID NO: 503183 - RNA, 19 nt, Artificial Sequence
  Description of Artificial Sequence: Synthetic oligonucleotide
cucuggaagccucuuacga

SEQ ID NO: 503184 - RNA, 19 nt, Artificial Sequence
  Description of Artificial Sequence: Synthetic oligonucleotide
cugucucauaaauggucug

SEQ ID NO: 503185 - RNA, 19 nt, Artificial Sequence
  Description of Artificial Sequence: Synthetic oligonucleotide
cucaauggagaggguaccc

SEQ ID NO: 503186 - RNA, 19 nt, Artificial Sequence
  Description of Artificial Sequence: Synthetic oligonucleotide
ugagccgugucugcaauuc

SEQ ID NO: 503187 - RNA, 19 nt, Artificial Sequence
  Description of Artificial Sequence: Synthetic oligonucleotide
cacaccuugacucaacgcu

SEQ ID NO: 503188 - RNA, 19 nt, Artificial Sequence
  Description of Artificial Sequence: Synthetic oligonucleotide
ccuaacacauuugauguug

SEQ ID NO: 503189 - RNA, 19 nt, Artificial Sequence
  Description of Artificial Sequence: Synthetic oligonucleotide
uacgaugcggccgucuuuc

SEQ ID NO: 503190 - RNA, 19 nt, Artificial Sequence
  Description of Artificial Sequence: Synthetic oligonucleotide
gcacuaauugaacuaguga

SEQ ID NO: 503191 - RNA, 19 nt, Artificial Sequence
  Description of Artificial Sequence: Synthetic oligonucleotide
cugccuguaugguuugaac

SEQ ID NO: 503192 - RNA, 19 nt, Artificial Sequence
  Description of Artificial Sequence: Synthetic oligonucleotide
auagccucgucaaccauga

SEQ ID NO: 503193 - RNA, 19 nt, Artificial Sequence
  Description of Artificial Sequence: Synthetic oligonucleotide
augggcuaaucggugauga

SEQ ID NO: 503194 - RNA, 19 nt, Artificial Sequence
  Description of Artificial Sequence: Synthetic oligonucleotide
ggucacuaaaugaagcuuc

SEQ ID NO: 503195 - RNA, 19 nt, Artificial Sequence
  Description of Artificial Sequence: Synthetic oligonucleotide
gccaccauagacuguauga

SEQ ID NO: 503196 - RNA, 19 nt, Artificial Sequence
  Description of Artificial Sequence: Synthetic oligonucleotide
gugccgaaaacuugagaca

SEQ ID NO: 503197 - RNA, 19 nt, Artificial Sequence
  Description of Artificial Sequence: Synthetic oligonucleotide
acaacguagcgaacggcag

SEQ ID NO: 503198 - RNA, 19 nt, Artificial Sequence
  Description of Artificial Sequence: Synthetic oligonucleotide
ugggcuaaucggugaugag

SEQ ID NO: 503199 - RNA, 19 nt, Artificial Sequence
  Description of Artificial Sequence: Synthetic oligonucleotide
acauuuggguuaccuuacu

SEQ ID NO: 503200 - RNA, 19 nt, Artificial Sequence
  Description of Artificial Sequence: Synthetic oligonucleotide
gugagccauucggugaucg

SEQ ID NO: 503201 - RNA, 19 nt, Artificial Sequence
  Description of Artificial Sequence: Synthetic oligonucleotide
uggucacuaaaugaagcuu

SEQ ID NO: 503202 - RNA, 19 nt, Artificial Sequence
  Description of Artificial Sequence: Synthetic oligonucleotide
cauucggugaucgcauaug

SEQ ID NO: 503203 - RNA, 19 nt, Artificial Sequence
  Description of Artificial Sequence: Synthetic oligonucleotide
ucgauacauguuugccaug

SEQ ID NO: 503204 - RNA, 19 nt, Artificial Sequence
  Description of Artificial Sequence: Synthetic oligonucleotide
ugccgugaaucugaauucu

SEQ ID NO: 503205 - RNA, 19 nt, Artificial Sequence
  Description of Artificial Sequence: Synthetic oligonucleotide
cacuaugcuuuggggaagg

SEQ ID NO: 503206 - RNA, 19 nt, Artificial Sequence
  Description of Artificial Sequence: Synthetic oligonucleotide
acaccuugacucaacgcug

SEQ ID NO: 503207 - RNA, 19 nt, Artificial Sequence
  Description of Artificial Sequence: Synthetic oligonucleotide
acuaggacaccgugcuccu

SEQ ID NO: 503208 - RNA, 19 nt, Artificial Sequence
  Description of Artificial Sequence: Synthetic oligonucleotide
aucgcauaugagaacaauu

SEQ ID NO: 503209 - RNA, 19 nt, Artificial Sequence
  Description of Artificial Sequence: Synthetic oligonucleotide
ggagaggguacccggagac

SEQ ID NO: 503210 - RNA, 19 nt, Artificial Sequence
  Description of Artificial Sequence: Synthetic oligonucleotide
uaugacguccgugccuugu

SEQ ID NO: 503211 - RNA, 19 nt, Artificial Sequence
  Description of Artificial Sequence: Synthetic oligonucleotide
gaugggcuaaucggugaug

SEQ ID NO: 503212 - RNA, 19 nt, Artificial Sequence
  Description of Artificial Sequence: Synthetic oligonucleotide
acccggagacaccauguca

SEQ ID NO: 503213 - RNA, 19 nt, Artificial Sequence
  Description of Artificial Sequence: Synthetic oligonucleotide
ugcucgauuggcagccaaa

SEQ ID NO: 503214 - RNA, 19 nt, Artificial Sequence
  Description of Artificial Sequence: Synthetic oligonucleotide
uugaaccauucuguuugug

SEQ ID NO: 503215 - RNA, 19 nt, Artificial Sequence
  Description of Artificial Sequence: Synthetic oligonucleotide
uuuccgguacugcucgauu

SEQ ID NO: 503216 - RNA, 19 nt, Artificial Sequence
  Description of Artificial Sequence: Synthetic oligonucleotide
uuacuugcauuuggauaca

SEQ ID NO: 503217 - RNA, 19 nt, Artificial Sequence
  Description of Artificial Sequence: Synthetic oligonucleotide
cacauuugauguugcuuca

SEQ ID NO: 503218 - RNA, 19 nt, Artificial Sequence
  Description of Artificial Sequence: Synthetic oligonucleotide
cuaaucggugaugaggaaa

SEQ ID NO: 503219 - RNA, 19 nt, Artificial Sequence
  Description of Artificial Sequence: Synthetic oligonucleotide
guggagcggagcuuugcug

SEQ ID NO: 503220 - RNA, 19 nt, Artificial Sequence
  Description of Artificial Sequence: Synthetic oligonucleotide
gcuccuuagcuccucacac

SEQ ID NO: 503221 - RNA, 19 nt, Artificial Sequence
  Description of Artificial Sequence: Synthetic oligonucleotide
gauggcacauacaguccac

SEQ ID NO: 503222 - RNA, 19 nt, Artificial Sequence
  Description of Artificial Sequence: Synthetic oligonucleotide
ggcuaaucggugaugagga

SEQ ID NO: 503223 - RNA, 19 nt, Artificial Sequence
  Description of Artificial Sequence: Synthetic oligonucleotide
agguccuaaaaugccacaa

SEQ ID NO: 503224 - RNA, 19 nt, Artificial Sequence
  Description of Artificial Sequence: Synthetic oligonucleotide
gucagguccuaaaaugcca

SEQ ID NO: 503225 - RNA, 19 nt, Artificial Sequence
  Description of Artificial Sequence: Synthetic oligonucleotide
ggcgccauuucugugauuc

SEQ ID NO: 503226 - RNA, 19 nt, Artificial Sequence
  Description of Artificial Sequence: Synthetic oligonucleotide
auaggcccaacaccuccca

SEQ ID NO: 503227 - RNA, 19 nt, Artificial Sequence
  Description of Artificial Sequence: Synthetic oligonucleotide
uuucgacauuaauuacuuu

SEQ ID NO: 503228 - RNA, 19 nt, Artificial Sequence
  Description of Artificial Sequence: Synthetic oligonucleotide
acaacuagguuuggcuccu

SEQ ID NO: 503229 - RNA, 19 nt, Artificial Sequence
  Description of Artificial Sequence: Synthetic oligonucleotide
gcuauggggacuaauguaa

SEQ ID NO: 503230 - RNA, 19 nt, Artificial Sequence
  Description of Artificial Sequence: Synthetic oligonucleotide
uuaccuuacugugccgaaa

SEQ ID NO: 503231 - RNA, 19 nt, Artificial Sequence
  Description of Artificial Sequence: Synthetic oligonucleotide
gucaucucuuaucacgaua

SEQ ID NO: 503232 - RNA, 19 nt, Artificial Sequence
  Description of Artificial Sequence: Synthetic oligonucleotide
ugcauaggcccaacaccuc

SEQ ID NO: 503233 - RNA, 19 nt, Artificial Sequence
  Description of Artificial Sequence: Synthetic oligonucleotide
acgaugcggccgucuuucc

SEQ ID NO: 503234 - RNA, 19 nt, Artificial Sequence
  Description of Artificial Sequence: Synthetic oligonucleotide
cauaaauggucugagccgu

SEQ ID NO: 503235 - RNA, 19 nt, Artificial Sequence
  Description of Artificial Sequence: Synthetic oligonucleotide
aggcuggucacuaaaugaa

SEQ ID NO: 503236 - RNA, 19 nt, Artificial Sequence
  Description of Artificial Sequence: Synthetic oligonucleotide
acuguaagaaagacuccau

SEQ ID NO: 503237 - RNA, 19 nt, Artificial Sequence
  Description of Artificial Sequence: Synthetic oligonucleotide
cacuaauaguaugcacuac

SEQ ID NO: 503238 - RNA, 19 nt, Artificial Sequence
  Description of Artificial Sequence: Synthetic oligonucleotide
gagacuuccuuaacaacgu

SEQ ID NO: 503239 - RNA, 19 nt, Artificial Sequence
  Description of Artificial Sequence: Synthetic oligonucleotide
agucaucucuuaucacgau

SEQ ID NO: 503240 - RNA, 19 nt, Artificial Sequence
  Description of Artificial Sequence: Synthetic oligonucleotide
aguaugcacuacguacuga

SEQ ID NO: 503241 - RNA, 19 nt, Artificial Sequence
  Description of Artificial Sequence: Synthetic oligonucleotide
ggugaucgcauaugagaac

SEQ ID NO: 503242 - RNA, 19 nt, Artificial Sequence
  Description of Artificial Sequence: Synthetic oligonucleotide
gaagguuguuuuggcccag

SEQ ID NO: 503243 - RNA, 19 nt, Artificial Sequence
  Description of Artificial Sequence: Synthetic oligonucleotide
uacccggagacaccauguc

SEQ ID NO: 503244 - RNA, 19 nt, Artificial Sequence
  Description of Artificial Sequence: Synthetic oligonucleotide
gagccgugucugcaauucc

SEQ ID NO: 503245 - RNA, 19 nt, Artificial Sequence
  Description of Artificial Sequence: Synthetic oligonucleotide
gguacccggagacaccaug

SEQ ID NO: 503246 - RNA, 19 nt, Artificial Sequence
  Description of Artificial Sequence: Synthetic oligonucleotide
ggaagguuguuuuggccca

SEQ ID NO: 503247 - RNA, 19 nt, Artificial Sequence
  Description of Artificial Sequence: Synthetic oligonucleotide
cauuuucagcagguacgcc

SEQ ID NO: 503248 - RNA, 19 nt, Artificial Sequence
  Description of Artificial Sequence: Synthetic oligonucleotide
cuacaauuaggggcuugac

SEQ ID NO: 503249 - RNA, 19 nt, Artificial Sequence
  Description of Artificial Sequence: Synthetic oligonucleotide
aggggcuugaccacugcug

SEQ ID NO: 503250 - RNA, 19 nt, Artificial Sequence
  Description of Artificial Sequence: Synthetic oligonucleotide
gccggauaggaacuucugc

SEQ ID NO: 503251 - RNA, 19 nt, Artificial Sequence
  Description of Artificial Sequence: Synthetic oligonucleotide
ucucgucagggaacaggaa

SEQ ID NO: 503252 - RNA, 19 nt, Artificial Sequence
  Description of Artificial Sequence: Synthetic oligonucleotide
auguaacucuuagcuggag

SEQ ID NO: 503253 - RNA, 19 nt, Artificial Sequence
  Description of Artificial Sequence: Synthetic oligonucleotide
ccaucgauacauguuugcc

SEQ ID NO: 503254 - RNA, 19 nt, Artificial Sequence
  Description of Artificial Sequence: Synthetic oligonucleotide
aggagacuuuguaacuucu

SEQ ID NO: 503255 - RNA, 19 nt, Artificial Sequence
  Description of Artificial Sequence: Synthetic oligonucleotide
uggucuaauuugguuucuc

SEQ ID NO: 503256 - RNA, 19 nt, Artificial Sequence
  Description of Artificial Sequence: Synthetic oligonucleotide
uuacgaugcggccgucuuu

SEQ ID NO: 503257 - RNA, 19 nt, Artificial Sequence
  Description of Artificial Sequence: Synthetic oligonucleotide
guuaccuuacugugccgaa

SEQ ID NO: 503258 - RNA, 19 nt, Artificial Sequence
  Description of Artificial Sequence: Synthetic oligonucleotide
guuucgacauuaauuacuu

SEQ ID NO: 503259 - RNA, 19 nt, Artificial Sequence
  Description of Artificial Sequence: Synthetic oligonucleotide
aggguacccggagacacca

SEQ ID NO: 503260 - RNA, 19 nt, Artificial Sequence
  Description of Artificial Sequence: Synthetic oligonucleotide
acucaacgcuguuuacaaa

SEQ ID NO: 503261 - RNA, 19 nt, Artificial Sequence
  Description of Artificial Sequence: Synthetic oligonucleotide
gcggagucacacuggaagc

SEQ ID NO: 503262 - RNA, 19 nt, Artificial Sequence
  Description of Artificial Sequence: Synthetic oligonucleotide
ccauagagaugccacacca

SEQ ID NO: 503263 - RNA, 19 nt, Artificial Sequence
  Description of Artificial Sequence: Synthetic oligonucleotide
caaaaucccagccaauguu

SEQ ID NO: 503264 - RNA, 19 nt, Artificial Sequence
  Description of Artificial Sequence: Synthetic oligonucleotide
ucguccugccgaacaucug

SEQ ID NO: 503265 - RNA, 19 nt, Artificial Sequence
  Description of Artificial Sequence: Synthetic oligonucleotide
aauagccucuucagcuuua

SEQ ID NO: 503266 - RNA, 19 nt, Artificial Sequence
  Description of Artificial Sequence: Synthetic oligonucleotide
gccacuaauaguaugcacu

SEQ ID NO: 503267 - RNA, 19 nt, Artificial Sequence
  Description of Artificial Sequence: Synthetic oligonucleotide
uacugaacgauggcacaua

SEQ ID NO: 503268 - RNA, 19 nt, Artificial Sequence
  Description of Artificial Sequence: Synthetic oligonucleotide
guaugguuugaaccauucu

SEQ ID NO: 503269 - RNA, 19 nt, Artificial Sequence
  Description of Artificial Sequence: Synthetic oligonucleotide
auacgcagucucugcugcu

SEQ ID NO: 503270 - RNA, 19 nt, Artificial Sequence
  Description of Artificial Sequence: Synthetic oligonucleotide
cugaacgauggcacauaca

SEQ ID NO: 503271 - RNA, 19 nt, Artificial Sequence
  Description of Artificial Sequence: Synthetic oligonucleotide
ggaagccucuuacgaugcg

SEQ ID NO: 503272 - RNA, 19 nt, Artificial Sequence
  Description of Artificial Sequence: Synthetic oligonucleotide
guucucgagcugcugucuc

SEQ ID NO: 503273 - RNA, 19 nt, Artificial Sequence
  Description of Artificial Sequence: Synthetic oligonucleotide
uuaucacgauagccucguc

SEQ ID NO: 503274 - RNA, 19 nt, Artificial Sequence
  Description of Artificial Sequence: Synthetic oligonucleotide
auaaauggucugagccgug

SEQ ID NO: 503275 - RNA, 19 nt, Artificial Sequence
  Description of Artificial Sequence: Synthetic oligonucleotide
agacauauuuggaguacuu

SEQ ID NO: 503276 - RNA, 19 nt, Artificial Sequence
  Description of Artificial Sequence: Synthetic oligonucleotide
ggacacacucccacucucg

SEQ ID NO: 503277 - RNA, 19 nt, Artificial Sequence
  Description of Artificial Sequence: Synthetic oligonucleotide
gacauauuuggaguacuuu

SEQ ID NO: 503278 - RNA, 19 nt, Artificial Sequence
  Description of Artificial Sequence: Synthetic oligonucleotide
agacuuccuuaacaacgua

SEQ ID NO: 503279 - RNA, 19 nt, Artificial Sequence
  Description of Artificial Sequence: Synthetic oligonucleotide
auggcgccauuucugugau

SEQ ID NO: 503280 - RNA, 19 nt, Artificial Sequence
  Description of Artificial Sequence: Synthetic oligonucleotide
gucauacgcagucucugcu

SEQ ID NO: 503281 - RNA, 19 nt, Artificial Sequence
  Description of Artificial Sequence: Synthetic oligonucleotide
ggcagacugaaauagucau

SEQ ID NO: 503282 - RNA, 19 nt, Artificial Sequence
  Description of Artificial Sequence: Synthetic oligonucleotide
gauucguccugccgaacau

SEQ ID NO: 503283 - RNA, 19 nt, Artificial Sequence
  Description of Artificial Sequence: Synthetic oligonucleotide
gcacaccuugacucaacgc

SEQ ID NO: 503284 - RNA, 19 nt, Artificial Sequence
  Description of Artificial Sequence: Synthetic oligonucleotide
cuacugaccaccagccacu

SEQ ID NO: 503285 - RNA, 19 nt, Artificial Sequence
  Description of Artificial Sequence: Synthetic oligonucleotide
ucaggucuacuggcugaug

SEQ ID NO: 503286 - RNA, 19 nt, Artificial Sequence
  Description of Artificial Sequence: Synthetic oligonucleotide
caaugagaucuugucagua

SEQ ID NO: 503287 - RNA, 19 nt, Artificial Sequence
  Description of Artificial Sequence: Synthetic oligonucleotide
caauucccucuuugacaac

SEQ ID NO: 503288 - RNA, 19 nt, Artificial Sequence
  Description of Artificial Sequence: Synthetic oligonucleotide
gcuacaauuaggggcuuga

SEQ ID NO: 503289 - RNA, 19 nt, Artificial Sequence
  Description of Artificial Sequence: Synthetic oligonucleotide
gugccacuaauaguaugca

SEQ ID NO: 503290 - RNA, 19 nt, Artificial Sequence
  Description of Artificial Sequence: Synthetic oligonucleotide
ucaagccggauaggaacuu

SEQ ID NO: 503291 - RNA, 19 nt, Artificial Sequence
  Description of Artificial Sequence: Synthetic oligonucleotide
augacguccgugccuugua

SEQ ID NO: 503292 - RNA, 19 nt, Artificial Sequence
  Description of Artificial Sequence: Synthetic oligonucleotide
cagguccuaaaaugccaca

SEQ ID NO: 503293 - RNA, 19 nt, Artificial Sequence
  Description of Artificial Sequence: Synthetic oligonucleotide
gcuauccguccuuguaaug

SEQ ID NO: 503294 - RNA, 19 nt, Artificial Sequence
  Description of Artificial Sequence: Synthetic oligonucleotide
cugugccgaaaacuugaga

SEQ ID NO: 503295 - RNA, 19 nt, Artificial Sequence
  Description of Artificial Sequence: Synthetic oligonucleotide
gcucaauggagaggguacc

SEQ ID NO: 503296 - RNA, 19 nt, Artificial Sequence
  Description of Artificial Sequence: Synthetic oligonucleotide
ccaacaccucccaggauuc

SEQ ID NO: 503297 - RNA, 19 nt, Artificial Sequence
  Description of Artificial Sequence: Synthetic oligonucleotide
cucucguguucucgagcug

SEQ ID NO: 503298 - RNA, 19 nt, Artificial Sequence
  Description of Artificial Sequence: Synthetic oligonucleotide
agccauucggugaucgcau

SEQ ID NO: 503299 - RNA, 19 nt, Artificial Sequence
  Description of Artificial Sequence: Synthetic oligonucleotide
gccacuaggacaccgugcu

SEQ ID NO: 503300 - RNA, 19 nt, Artificial Sequence
  Description of Artificial Sequence: Synthetic oligonucleotide
gcucgauuggcagccaaac

SEQ ID NO: 503301 - RNA, 19 nt, Artificial Sequence
  Description of Artificial Sequence: Synthetic oligonucleotide
ccuugcacuaauugaacua

SEQ ID NO: 503302 - RNA, 19 nt, Artificial Sequence
  Description of Artificial Sequence: Synthetic oligonucleotide
ccacuaauaguaugcacua

SEQ ID NO: 503303 - RNA, 19 nt, Artificial Sequence
  Description of Artificial Sequence: Synthetic oligonucleotide
cuaguaaaccaugccuaua

SEQ ID NO: 503304 - RNA, 19 nt, Artificial Sequence
  Description of Artificial Sequence: Synthetic oligonucleotide
ccguccuuguaaugggcag

SEQ ID NO: 503305 - RNA, 19 nt, Artificial Sequence
  Description of Artificial Sequence: Synthetic oligonucleotide
gagaggguacccggagaca

SEQ ID NO: 503306 - RNA, 19 nt, Artificial Sequence
  Description of Artificial Sequence: Synthetic oligonucleotide
caaguguuucgacauuaau

SEQ ID NO: 503307 - RNA, 19 nt, Artificial Sequence
  Description of Artificial Sequence: Synthetic oligonucleotide
gugaaugcauaggcccaac

SEQ ID NO: 503308 - RNA, 19 nt, Artificial Sequence
  Description of Artificial Sequence: Synthetic oligonucleotide
gcugucucauaaauggucu

SEQ ID NO: 503309 - RNA, 19 nt, Artificial Sequence
  Description of Artificial Sequence: Synthetic oligonucleotide
uucugccgugaaucugaau

SEQ ID NO: 503310 - RNA, 19 nt, Artificial Sequence
  Description of Artificial Sequence: Synthetic oligonucleotide
gcgccauuucugugauucg

SEQ ID NO: 503311 - RNA, 19 nt, Artificial Sequence
  Description of Artificial Sequence: Synthetic oligonucleotide
gucaagccggauaggaacu

SEQ ID NO: 503312 - RNA, 19 nt, Artificial Sequence
  Description of Artificial Sequence: Synthetic oligonucleotide
augcggccgucuuuccggu

SEQ ID NO: 503313 - RNA, 19 nt, Artificial Sequence
  Description of Artificial Sequence: Synthetic oligonucleotide
guaugacguccgugccuug

SEQ ID NO: 503314 - RNA, 19 nt, Artificial Sequence
  Description of Artificial Sequence: Synthetic oligonucleotide
gcagcgccucucuggaagc

SEQ ID NO: 503315 - RNA, 19 nt, Artificial Sequence
  Description of Artificial Sequence: Synthetic oligonucleotide
guacuuagauuagcugacu

SEQ ID NO: 503316 - RNA, 19 nt, Artificial Sequence
  Description of Artificial Sequence: Synthetic oligonucleotide
ggccuugcacuaauugaac

SEQ ID NO: 503317 - RNA, 19 nt, Artificial Sequence
  Description of Artificial Sequence: Synthetic oligonucleotide
gcgaacggcagggacgggc

SEQ ID NO: 503318 - RNA, 19 nt, Artificial Sequence
  Description of Artificial Sequence: Synthetic oligonucleotide
cacagagcacacaguuuua

SEQ ID NO: 503319 - RNA, 19 nt, Artificial Sequence
  Description of Artificial Sequence: Synthetic oligonucleotide
ccuuaacaacguagcgaac

SEQ ID NO: 503320 - RNA, 19 nt, Artificial Sequence
  Description of Artificial Sequence: Synthetic oligonucleotide
cguagcgaacggcagggac

SEQ ID NO: 503321 - RNA, 19 nt, Artificial Sequence
  Description of Artificial Sequence: Synthetic oligonucleotide
guacugaacgauggcacau

SEQ ID NO: 503322 - RNA, 19 nt, Artificial Sequence
  Description of Artificial Sequence: Synthetic oligonucleotide
caggcaagugucagguccu

SEQ ID NO: 503323 - RNA, 19 nt, Artificial Sequence
  Description of Artificial Sequence: Synthetic oligonucleotide
gucccgugccacuaauagu

SEQ ID NO: 503324 - RNA, 19 nt, Artificial Sequence
  Description of Artificial Sequence: Synthetic oligonucleotide
gccuugcacuaauugaacu

SEQ ID NO: 503325 - RNA, 19 nt, Artificial Sequence
  Description of Artificial Sequence: Synthetic oligonucleotide
ccgugccacuaauaguaug

SEQ ID NO: 503326 - RNA, 19 nt, Artificial Sequence
  Description of Artificial Sequence: Synthetic oligonucleotide
guacccggagacaccaugu

SEQ ID NO: 503327 - RNA, 19 nt, Artificial Sequence
  Description of Artificial Sequence: Synthetic oligonucleotide
gacgggcagguggagcgga

SEQ ID NO: 503328 - RNA, 19 nt, Artificial Sequence
  Description of Artificial Sequence: Synthetic oligonucleotide
ccgaaaacuugagacaucu

SEQ ID NO: 503329 - RNA, 19 nt, Artificial Sequence
  Description of Artificial Sequence: Synthetic oligonucleotide
ccauuuccagugucccgug

SEQ ID NO: 503330 - RNA, 19 nt, Artificial Sequence
  Description of Artificial Sequence: Synthetic oligonucleotide
cuuugccuucuugggcuca

SEQ ID NO: 503331 - RNA, 19 nt, Artificial Sequence
  Description of Artificial Sequence: Synthetic oligonucleotide
gugauucguccugccgaac

SEQ ID NO: 503332 - RNA, 19 nt, Artificial Sequence
  Description of Artificial Sequence: Synthetic oligonucleotide
gguuuuggcugcaaguguu

SEQ ID NO: 503333 - RNA, 19 nt, Artificial Sequence
  Description of Artificial Sequence: Synthetic oligonucleotide
gcuaaucggugaugaggaa

SEQ ID NO: 503334 - RNA, 19 nt, Artificial Sequence
  Description of Artificial Sequence: Synthetic oligonucleotide
uagccucgucaaccaugau

SEQ ID NO: 503335 - RNA, 19 nt, Artificial Sequence
  Description of Artificial Sequence: Synthetic oligonucleotide
ccuuacugugccgaaaacu

SEQ ID NO: 503336 - RNA, 19 nt, Artificial Sequence
  Description of Artificial Sequence: Synthetic oligonucleotide
cgaugcggccgucuuuccg

SEQ ID NO: 503337 - RNA, 19 nt, Artificial Sequence
  Description of Artificial Sequence: Synthetic oligonucleotide
cacucucgucagggaacag

SEQ ID NO: 503338 - RNA, 19 nt, Artificial Sequence
  Description of Artificial Sequence: Synthetic oligonucleotide
ccaugauagucaagccgga

SEQ ID NO: 503339 - RNA, 19 nt, Artificial Sequence
  Description of Artificial Sequence: Synthetic oligonucleotide
ccauggcgccauuucugug

SEQ ID NO: 503340 - RNA, 19 nt, Artificial Sequence
  Description of Artificial Sequence: Synthetic oligonucleotide
gguacgccugucauugugu

SEQ ID NO: 503341 - RNA, 19 nt, Artificial Sequence
  Description of Artificial Sequence: Synthetic oligonucleotide
ccuaguaaaccaugccuau

SEQ ID NO: 503342 - RNA, 19 nt, Artificial Sequence
  Description of Artificial Sequence: Synthetic oligonucleotide
caugauagucaagccggau

SEQ ID NO: 503343 - RNA, 19 nt, Artificial Sequence
  Description of Artificial Sequence: Synthetic oligonucleotide
cugcucgauuggcagccaa

SEQ ID NO: 503344 - RNA, 19 nt, Artificial Sequence
  Description of Artificial Sequence: Synthetic oligonucleotide
acguagcgaacggcaggga

SEQ ID NO: 503345 - RNA, 19 nt, Artificial Sequence
  Description of Artificial Sequence: Synthetic oligonucleotide
cugcggagucacacuggaa

SEQ ID NO: 503346 - RNA, 19 nt, Artificial Sequence
  Description of Artificial Sequence: Synthetic oligonucleotide
ccaaugagaucuugucagu

SEQ ID NO: 503347 - RNA, 19 nt, Artificial Sequence
  Description of Artificial Sequence: Synthetic oligonucleotide
aggcagcgccucucuggaa

SEQ ID NO: 503348 - RNA, 19 nt, Artificial Sequence
  Description of Artificial Sequence: Synthetic oligonucleotide
gccgaaaacuugagacauc

SEQ ID NO: 503349 - RNA, 19 nt, Artificial Sequence
  Description of Artificial Sequence: Synthetic oligonucleotide
aggcaagugucagguccua

SEQ ID NO: 503350 - RNA, 19 nt, Artificial Sequence
  Description of Artificial Sequence: Synthetic oligonucleotide
gugagcuauggggacuaau

SEQ ID NO: 503351 - RNA, 19 nt, Artificial Sequence
  Description of Artificial Sequence: Synthetic oligonucleotide
gagcggagcuuugcugcua

SEQ ID NO: 503352 - RNA, 19 nt, Artificial Sequence
  Description of Artificial Sequence: Synthetic oligonucleotide
cgaacggcagggacgggca

SEQ ID NO: 503353 - RNA, 19 nt, Artificial Sequence
  Description of Artificial Sequence: Synthetic oligonucleotide
ccacucucgucagggaaca

SEQ ID NO: 503354 - RNA, 19 nt, Artificial Sequence
  Description of Artificial Sequence: Synthetic oligonucleotide
cucgagcugcugucucaua

SEQ ID NO: 503355 - RNA, 19 nt, Artificial Sequence
  Description of Artificial Sequence: Synthetic oligonucleotide
uggcgccauuucugugauu

SEQ ID NO: 503356 - RNA, 19 nt, Artificial Sequence
  Description of Artificial Sequence: Synthetic oligonucleotide
ccgaacaucuggucuaauu

SEQ ID NO: 503357 - RNA, 19 nt, Artificial Sequence
  Description of Artificial Sequence: Synthetic oligonucleotide
ggcaagugucagguccuaa

SEQ ID NO: 503358 - RNA, 19 nt, Artificial Sequence
  Description of Artificial Sequence: Synthetic oligonucleotide
gccauucggugaucgcaua

SEQ ID NO: 503359 - RNA, 19 nt, Artificial Sequence
  Description of Artificial Sequence: Synthetic oligonucleotide
ccuuagcuccucacacucu

SEQ ID NO: 503360 - RNA, 19 nt, Artificial Sequence
  Description of Artificial Sequence: Synthetic oligonucleotide
cagguacgccugucauugu

SEQ ID NO: 503361 - RNA, 19 nt, Artificial Sequence
  Description of Artificial Sequence: Synthetic oligonucleotide
ccauucggugaucgcauau

SEQ ID NO: 503362 - RNA, 19 nt, Artificial Sequence
  Description of Artificial Sequence: Synthetic oligonucleotide
gcacuacguacugaacgau

SEQ ID NO: 503363 - RNA, 19 nt, Artificial Sequence
  Description of Artificial Sequence: Synthetic oligonucleotide
ggugagcuauggggacuaa

SEQ ID NO: 503364 - RNA, 19 nt, Artificial Sequence
  Description of Artificial Sequence: Synthetic oligonucleotide
gcgcaggacuucacccaca

SEQ ID NO: 503365 - RNA, 19 nt, Artificial Sequence
  Description of Artificial Sequence: Synthetic oligonucleotide
ccuugacucaacgcuguuu

SEQ ID NO: 503366 - RNA, 19 nt, Artificial Sequence
  Description of Artificial Sequence: Synthetic oligonucleotide
ccgugcuccuuagcuccuc

SEQ ID NO: 503367 - RNA, 19 nt, Artificial Sequence
  Description of Artificial Sequence: Synthetic oligonucleotide
cccgugccacuaauaguau

SEQ ID NO: 503368 - RNA, 19 nt, Artificial Sequence
  Description of Artificial Sequence: Synthetic oligonucleotide
cgauagccucgucaaccau

SEQ ID NO: 503369 - RNA, 19 nt, Artificial Sequence
  Description of Artificial Sequence: Synthetic oligonucleotide
gccgaacaucuggucuaau

SEQ ID NO: 503370 - RNA, 19 nt, Artificial Sequence
  Description of Artificial Sequence: Synthetic oligonucleotide
ccucgucaaccaugaucuu

SEQ ID NO: 503371 - RNA, 19 nt, Artificial Sequence
  Description of Artificial Sequence: Synthetic oligonucleotide
ggguacccggagacaccau

SEQ ID NO: 503372 - RNA, 19 nt, Artificial Sequence
  Description of Artificial Sequence: Synthetic oligonucleotide
aaguuuaacacacacacac

SEQ ID NO: 503373 - RNA, 19 nt, Artificial Sequence
  Description of Artificial Sequence: Synthetic oligonucleotide
uuaaguuuaacacacacac

SEQ ID NO: 503374 - RNA, 19 nt, Artificial Sequence
  Description of Artificial Sequence: Synthetic oligonucleotide
uuuagaaugagauccaacc

SEQ ID NO: 503375 - RNA, 19 nt, Artificial Sequence
  Description of Artificial Sequence: Synthetic oligonucleotide
acuucuucgaaucaugagc

SEQ ID NO: 503376 - RNA, 19 nt, Artificial Sequence
  Description of Artificial Sequence: Synthetic oligonucleotide
aaccgugucaaccacagac

SEQ ID NO: 503377 - RNA, 19 nt, Artificial Sequence
  Description of Artificial Sequence: Synthetic oligonucleotide
aacacacacacacacacac

SEQ ID NO: 503378 - RNA, 19 nt, Artificial Sequence
  Description of Artificial Sequence: Synthetic oligonucleotide
uuauacacuaccuaauucc

SEQ ID NO: 503379 - RNA, 19 nt, Artificial Sequence
  Description of Artificial Sequence: Synthetic oligonucleotide
ugugguaugaauaaggcau

SEQ ID NO: 503380 - RNA, 19 nt, Artificial Sequence
  Description of Artificial Sequence: Synthetic oligonucleotide
uauuucuacguuaagcucc

SEQ ID NO: 503381 - RNA, 19 nt, Artificial Sequence
  Description of Artificial Sequence: Synthetic oligonucleotide
acacacaacacacacacac

SEQ ID NO: 503382 - RNA, 19 nt, Artificial Sequence
  Description of Artificial Sequence: Synthetic oligonucleotide
aacauuugcaccaagacca

SEQ ID NO: 503383 - RNA, 19 nt, Artificial Sequence
  Description of Artificial Sequence: Synthetic oligonucleotide
acacacacaacacacacac

SEQ ID NO: 503384 - RNA, 19 nt, Artificial Sequence
  Description of Artificial Sequence: Synthetic oligonucleotide
caguucauuacuuagacug

SEQ ID NO: 503385 - RNA, 19 nt, Artificial Sequence
  Description of Artificial Sequence: Synthetic oligonucleotide
acaacacacacacacacac

SEQ ID NO: 503386 - RNA, 19 nt, Artificial Sequence
  Description of Artificial Sequence: Synthetic oligonucleotide
uuaacacacacacacacac

SEQ ID NO: 503387 - RNA, 19 nt, Artificial Sequence
  Description of Artificial Sequence: Synthetic oligonucleotide
uaaacaucgcucaagacaa

SEQ ID NO: 503388 - RNA, 19 nt, Artificial Sequence
  Description of Artificial Sequence: Synthetic oligonucleotide
aaaacucuaaaccgcuuuc

SEQ ID NO: 503389 - RNA, 19 nt, Artificial Sequence
  Description of Artificial Sequence: Synthetic oligonucleotide
guaacauacaaccauaauc

SEQ ID NO: 503390 - RNA, 19 nt, Artificial Sequence
  Description of Artificial Sequence: Synthetic oligonucleotide
auuauacacuaccuaauuc

SEQ ID NO: 503391 - RNA, 19 nt, Artificial Sequence
  Description of Artificial Sequence: Synthetic oligonucleotide
aagcuaacugguugaaucg

SEQ ID NO: 503392 - RNA, 19 nt, Artificial Sequence
  Description of Artificial Sequence: Synthetic oligonucleotide
uucgaaaucugucucuuag

SEQ ID NO: 503393 - RNA, 19 nt, Artificial Sequence
  Description of Artificial Sequence: Synthetic oligonucleotide
agaauguacaagcuaacug

SEQ ID NO: 503394 - RNA, 19 nt, Artificial Sequence
  Description of Artificial Sequence: Synthetic oligonucleotide
agcaguucauuacuuagac

SEQ ID NO: 503395 - RNA, 19 nt, Artificial Sequence
  Description of Artificial Sequence: Synthetic oligonucleotide
acacaacacacacacacac

SEQ ID NO: 503396 - RNA, 19 nt, Artificial Sequence
  Description of Artificial Sequence: Synthetic oligonucleotide
agcuaggugagauccaagc

SEQ ID NO: 503397 - RNA, 19 nt, Artificial Sequence
  Description of Artificial Sequence: Synthetic oligonucleotide
uccucaacggauuauacac

SEQ ID NO: 503398 - RNA, 19 nt, Artificial Sequence
  Description of Artificial Sequence: Synthetic oligonucleotide
cuucuucgaaucaugagcc

SEQ ID NO: 503399 - RNA, 19 nt, Artificial Sequence
  Description of Artificial Sequence: Synthetic oligonucleotide
aacugguugaaucgaguuc

SEQ ID NO: 503400 - RNA, 19 nt, Artificial Sequence
  Description of Artificial Sequence: Synthetic oligonucleotide
ucuuggucaagugugaaag

SEQ ID NO: 503401 - RNA, 19 nt, Artificial Sequence
  Description of Artificial Sequence: Synthetic oligonucleotide
cacacauacacacacacac

SEQ ID NO: 503402 - RNA, 19 nt, Artificial Sequence
  Description of Artificial Sequence: Synthetic oligonucleotide
aaacucuaaaccgcuuucc

SEQ ID NO: 503403 - RNA, 19 nt, Artificial Sequence
  Description of Artificial Sequence: Synthetic oligonucleotide
agcaagcuaggugagaucc

SEQ ID NO: 503404 - RNA, 19 nt, Artificial Sequence
  Description of Artificial Sequence: Synthetic oligonucleotide
acacacacacaccauacac

SEQ ID NO: 503405 - RNA, 19 nt, Artificial Sequence
  Description of Artificial Sequence: Synthetic oligonucleotide
acacacacacaacacacac

SEQ ID NO: 503406 - RNA, 19 nt, Artificial Sequence
  Description of Artificial Sequence: Synthetic oligonucleotide
acacacacaccacacacac

SEQ ID NO: 503407 - RNA, 19 nt, Artificial Sequence
  Description of Artificial Sequence: Synthetic oligonucleotide
acacacacacaccacacac

SEQ ID NO: 503408 - RNA, 19 nt, Artificial Sequence
  Description of Artificial Sequence: Synthetic oligonucleotide
uacacacacacacacacac

SEQ ID NO: 503409 - RNA, 19 nt, Artificial Sequence
  Description of Artificial Sequence: Synthetic oligonucleotide
ucaguuagaauaugguaca

SEQ ID NO: 503410 - RNA, 19 nt, Artificial Sequence
  Description of Artificial Sequence: Synthetic oligonucleotide
acacacaccacacacacca

SEQ ID NO: 503411 - RNA, 19 nt, Artificial Sequence
  Description of Artificial Sequence: Synthetic oligonucleotide
cauacacacacacacacac

SEQ ID NO: 503412 - RNA, 19 nt, Artificial Sequence
  Description of Artificial Sequence: Synthetic oligonucleotide
ucuaacugugguaugaaua

SEQ ID NO: 503413 - RNA, 19 nt, Artificial Sequence
  Description of Artificial Sequence: Synthetic oligonucleotide
ugaauguaaaccauauuuu

SEQ ID NO: 503414 - RNA, 19 nt, Artificial Sequence
  Description of Artificial Sequence: Synthetic oligonucleotide
guuuaacacacacacacac

SEQ ID NO: 503415 - RNA, 19 nt, Artificial Sequence
  Description of Artificial Sequence: Synthetic oligonucleotide
cuaaacaucgcucaagaca

SEQ ID NO: 503416 - RNA, 19 nt, Artificial Sequence
  Description of Artificial Sequence: Synthetic oligonucleotide
aaaccgcuuuccuccaacc

SEQ ID NO: 503417 - RNA, 19 nt, Artificial Sequence
  Description of Artificial Sequence: Synthetic oligonucleotide
gauaccgagggucuacagg

SEQ ID NO: 503418 - RNA, 19 nt, Artificial Sequence
  Description of Artificial Sequence: Synthetic oligonucleotide
uauacacuaccuaauuccu

SEQ ID NO: 503419 - RNA, 19 nt, Artificial Sequence
  Description of Artificial Sequence: Synthetic oligonucleotide
ugucaaacucuaaaugaca

SEQ ID NO: 503420 - RNA, 19 nt, Artificial Sequence
  Description of Artificial Sequence: Synthetic oligonucleotide
acaaguuaucaugucaaac

SEQ ID NO: 503421 - RNA, 19 nt, Artificial Sequence
  Description of Artificial Sequence: Synthetic oligonucleotide
caagcuaacugguugaauc

SEQ ID NO: 503422 - RNA, 19 nt, Artificial Sequence
  Description of Artificial Sequence: Synthetic oligonucleotide
auaugguacauagugcaac

SEQ ID NO: 503423 - RNA, 19 nt, Artificial Sequence
  Description of Artificial Sequence: Synthetic oligonucleotide
uuccuuaaguuuucaggcg

SEQ ID NO: 503424 - RNA, 19 nt, Artificial Sequence
  Description of Artificial Sequence: Synthetic oligonucleotide
acgguaaugaacuccagga

SEQ ID NO: 503425 - RNA, 19 nt, Artificial Sequence
  Description of Artificial Sequence: Synthetic oligonucleotide
uacacgguaaugaacucca

SEQ ID NO: 503426 - RNA, 19 nt, Artificial Sequence
  Description of Artificial Sequence: Synthetic oligonucleotide
uuuaacacacacacacaca

SEQ ID NO: 503427 - RNA, 19 nt, Artificial Sequence
  Description of Artificial Sequence: Synthetic oligonucleotide
cacacacacacauacacac

SEQ ID NO: 503428 - RNA, 19 nt, Artificial Sequence
  Description of Artificial Sequence: Synthetic oligonucleotide
caugucaaacucuaaauga

SEQ ID NO: 503429 - RNA, 19 nt, Artificial Sequence
  Description of Artificial Sequence: Synthetic oligonucleotide
ugcgaguauaccaagucgu

SEQ ID NO: 503430 - RNA, 19 nt, Artificial Sequence
  Description of Artificial Sequence: Synthetic oligonucleotide
uucuacguuaagcuccucc

SEQ ID NO: 503431 - RNA, 19 nt, Artificial Sequence
  Description of Artificial Sequence: Synthetic oligonucleotide
cacacacacacacacauac

SEQ ID NO: 503432 - RNA, 19 nt, Artificial Sequence
  Description of Artificial Sequence: Synthetic oligonucleotide
uccuuaaguuuucaggcga

SEQ ID NO: 503433 - RNA, 19 nt, Artificial Sequence
  Description of Artificial Sequence: Synthetic oligonucleotide
auacacgguaaugaacucc

SEQ ID NO: 503434 - RNA, 19 nt, Artificial Sequence
  Description of Artificial Sequence: Synthetic oligonucleotide
ucuacguuaagcuccuccu

SEQ ID NO: 503435 - RNA, 19 nt, Artificial Sequence
  Description of Artificial Sequence: Synthetic oligonucleotide
uaggccauagugcaaacaa

SEQ ID NO: 503436 - RNA, 19 nt, Artificial Sequence
  Description of Artificial Sequence: Synthetic oligonucleotide
auaccgagggucuacagga

SEQ ID NO: 503437 - RNA, 19 nt, Artificial Sequence
  Description of Artificial Sequence: Synthetic oligonucleotide
cacauacacacacacacac

SEQ ID NO: 503438 - RNA, 19 nt, Artificial Sequence
  Description of Artificial Sequence: Synthetic oligonucleotide
uguauacuucuucgaauca

SEQ ID NO: 503439 - RNA, 19 nt, Artificial Sequence
  Description of Artificial Sequence: Synthetic oligonucleotide
uaccaagucgugaagcucu

SEQ ID NO: 503440 - RNA, 19 nt, Artificial Sequence
  Description of Artificial Sequence: Synthetic oligonucleotide
uuuggcuucgaaaucuguc

SEQ ID NO: 503441 - RNA, 19 nt, Artificial Sequence
  Description of Artificial Sequence: Synthetic oligonucleotide
cuguauacuucuucgaauc

SEQ ID NO: 503442 - RNA, 19 nt, Artificial Sequence
  Description of Artificial Sequence: Synthetic oligonucleotide
uuaaagccgucuucuuugg

SEQ ID NO: 503443 - RNA, 19 nt, Artificial Sequence
  Description of Artificial Sequence: Synthetic oligonucleotide
aguaccuccugucugccag

SEQ ID NO: 503444 - RNA, 19 nt, Artificial Sequence
  Description of Artificial Sequence: Synthetic oligonucleotide
caccacacaacacacacac

SEQ ID NO: 503445 - RNA, 19 nt, Artificial Sequence
  Description of Artificial Sequence: Synthetic oligonucleotide
uuauuucuacguuaagcuc

SEQ ID NO: 503446 - RNA, 19 nt, Artificial Sequence
  Description of Artificial Sequence: Synthetic oligonucleotide
uuccaaacugcuugguucc

SEQ ID NO: 503447 - RNA, 19 nt, Artificial Sequence
  Description of Artificial Sequence: Synthetic oligonucleotide
acacacaccacacaacaca

SEQ ID NO: 503448 - RNA, 19 nt, Artificial Sequence
  Description of Artificial Sequence: Synthetic oligonucleotide
ugaaucgaguucuccaucu

SEQ ID NO: 503449 - RNA, 19 nt, Artificial Sequence
  Description of Artificial Sequence: Synthetic oligonucleotide
gagacgggcaguuaaugug

SEQ ID NO: 503450 - RNA, 19 nt, Artificial Sequence
  Description of Artificial Sequence: Synthetic oligonucleotide
cacacacacacacauacac

SEQ ID NO: 503451 - RNA, 19 nt, Artificial Sequence
  Description of Artificial Sequence: Synthetic oligonucleotide
acucuaaaccgcuuuccuc

SEQ ID NO: 503452 - RNA, 19 nt, Artificial Sequence
  Description of Artificial Sequence: Synthetic oligonucleotide
acacacacacacaacacac

SEQ ID NO: 503453 - RNA, 19 nt, Artificial Sequence
  Description of Artificial Sequence: Synthetic oligonucleotide
uuagaauaugguacauagu

SEQ ID NO: 503454 - RNA, 19 nt, Artificial Sequence
  Description of Artificial Sequence: Synthetic oligonucleotide
gucaaacucuaaaugacag

SEQ ID NO: 503455 - RNA, 19 nt, Artificial Sequence
  Description of Artificial Sequence: Synthetic oligonucleotide
guaucgcugacacacauuc

SEQ ID NO: 503456 - RNA, 19 nt, Artificial Sequence
  Description of Artificial Sequence: Synthetic oligonucleotide
cacacacacacacacacac

SEQ ID NO: 503457 - RNA, 19 nt, Artificial Sequence
  Description of Artificial Sequence: Synthetic oligonucleotide
cacacacacauacacacac

SEQ ID NO: 503458 - RNA, 19 nt, Artificial Sequence
  Description of Artificial Sequence: Synthetic oligonucleotide
uacacuaccuaauuccuua

SEQ ID NO: 503459 - RNA, 19 nt, Artificial Sequence
  Description of Artificial Sequence: Synthetic oligonucleotide
gaauaaggcauaacuaaca

SEQ ID NO: 503460 - RNA, 19 nt, Artificial Sequence
  Description of Artificial Sequence: Synthetic oligonucleotide
aacggggccagauuagggu

SEQ ID NO: 503461 - RNA, 19 nt, Artificial Sequence
  Description of Artificial Sequence: Synthetic oligonucleotide
aauguacaagcuaacuggu

SEQ ID NO: 503462 - RNA, 19 nt, Artificial Sequence
  Description of Artificial Sequence: Synthetic oligonucleotide
cacacacauacacacacac

SEQ ID NO: 503463 - RNA, 19 nt, Artificial Sequence
  Description of Artificial Sequence: Synthetic oligonucleotide
acguuaagcuccuccuccc

SEQ ID NO: 503464 - RNA, 19 nt, Artificial Sequence
  Description of Artificial Sequence: Synthetic oligonucleotide
cacaccacacaacacacac

SEQ ID NO: 503465 - RNA, 19 nt, Artificial Sequence
  Description of Artificial Sequence: Synthetic oligonucleotide
cuaacugugguaugaauaa

SEQ ID NO: 503466 - RNA, 19 nt, Artificial Sequence
  Description of Artificial Sequence: Synthetic oligonucleotide
uuggucaagugugaaagcu

SEQ ID NO: 503467 - RNA, 19 nt, Artificial Sequence
  Description of Artificial Sequence: Synthetic oligonucleotide
cauuacuuagacuggucuc

SEQ ID NO: 503468 - RNA, 19 nt, Artificial Sequence
  Description of Artificial Sequence: Synthetic oligonucleotide
ucuucgaaucaugagccug

SEQ ID NO: 503469 - RNA, 19 nt, Artificial Sequence
  Description of Artificial Sequence: Synthetic oligonucleotide
aauaagaaacugugucaua

SEQ ID NO: 503470 - RNA, 19 nt, Artificial Sequence
  Description of Artificial Sequence: Synthetic oligonucleotide
gaguauaccaagucgugaa

SEQ ID NO: 503471 - RNA, 19 nt, Artificial Sequence
  Description of Artificial Sequence: Synthetic oligonucleotide
ucguucuugaggcugcuuc

SEQ ID NO: 503472 - RNA, 19 nt, Artificial Sequence
  Description of Artificial Sequence: Synthetic oligonucleotide
cuagauucugcaccccugc

SEQ ID NO: 503473 - RNA, 19 nt, Artificial Sequence
  Description of Artificial Sequence: Synthetic oligonucleotide
aacggauuauacacuaccu

SEQ ID NO: 503474 - RNA, 19 nt, Artificial Sequence
  Description of Artificial Sequence: Synthetic oligonucleotide
uugcagagcggacaauaug

SEQ ID NO: 503475 - RNA, 19 nt, Artificial Sequence
  Description of Artificial Sequence: Synthetic oligonucleotide
uggcguguggucuaaacau

SEQ ID NO: 503476 - RNA, 19 nt, Artificial Sequence
  Description of Artificial Sequence: Synthetic oligonucleotide
ucuaaacaucgcucaagac

SEQ ID NO: 503477 - RNA, 19 nt, Artificial Sequence
  Description of Artificial Sequence: Synthetic oligonucleotide
acgguuuaagcuuccuuug

SEQ ID NO: 503478 - RNA, 19 nt, Artificial Sequence
  Description of Artificial Sequence: Synthetic oligonucleotide
accuuacaagcuuauuucu

SEQ ID NO: 503479 - RNA, 19 nt, Artificial Sequence
  Description of Artificial Sequence: Synthetic oligonucleotide
gcgacaauaagucacacaa

SEQ ID NO: 503480 - RNA, 19 nt, Artificial Sequence
  Description of Artificial Sequence: Synthetic oligonucleotide
uacaacggggccagauuag

SEQ ID NO: 503481 - RNA, 19 nt, Artificial Sequence
  Description of Artificial Sequence: Synthetic oligonucleotide
cacacacacacacacaaca

SEQ ID NO: 503482 - RNA, 19 nt, Artificial Sequence
  Description of Artificial Sequence: Synthetic oligonucleotide
acacacacacacaccauac

SEQ ID NO: 503483 - RNA, 19 nt, Artificial Sequence
  Description of Artificial Sequence: Synthetic oligonucleotide
ucgaaaucugucucuuaga

SEQ ID NO: 503484 - RNA, 19 nt, Artificial Sequence
  Description of Artificial Sequence: Synthetic oligonucleotide
uucauuacuuagacugguc

SEQ ID NO: 503485 - RNA, 19 nt, Artificial Sequence
  Description of Artificial Sequence: Synthetic oligonucleotide
uaacacacacacacacaca

SEQ ID NO: 503486 - RNA, 19 nt, Artificial Sequence
  Description of Artificial Sequence: Synthetic oligonucleotide
ucgcucaagacaauucuua

SEQ ID NO: 503487 - RNA, 19 nt, Artificial Sequence
  Description of Artificial Sequence: Synthetic oligonucleotide
uuaaaccagcacugggugu

SEQ ID NO: 503488 - RNA, 19 nt, Artificial Sequence
  Description of Artificial Sequence: Synthetic oligonucleotide
ugucacagcacggugcucu

SEQ ID NO: 503489 - RNA, 19 nt, Artificial Sequence
  Description of Artificial Sequence: Synthetic oligonucleotide
agagacgggcaguuaaugu

SEQ ID NO: 503490 - RNA, 19 nt, Artificial Sequence
  Description of Artificial Sequence: Synthetic oligonucleotide
cacacaccacacaacacac

SEQ ID NO: 503491 - RNA, 19 nt, Artificial Sequence
  Description of Artificial Sequence: Synthetic oligonucleotide
auacaaguuaucaugucaa

SEQ ID NO: 503492 - RNA, 19 nt, Artificial Sequence
  Description of Artificial Sequence: Synthetic oligonucleotide
acaaucuggccuacaacgg

SEQ ID NO: 503493 - RNA, 19 nt, Artificial Sequence
  Description of Artificial Sequence: Synthetic oligonucleotide
ugagcacgguuuaagcuuc

SEQ ID NO: 503494 - RNA, 19 nt, Artificial Sequence
  Description of Artificial Sequence: Synthetic oligonucleotide
cacacacacacacacacca

SEQ ID NO: 503495 - RNA, 19 nt, Artificial Sequence
  Description of Artificial Sequence: Synthetic oligonucleotide
agagcggacaauauggcgu

SEQ ID NO: 503496 - RNA, 19 nt, Artificial Sequence
  Description of Artificial Sequence: Synthetic oligonucleotide
cuuggucaagugugaaagc

SEQ ID NO: 503497 - RNA, 19 nt, Artificial Sequence
  Description of Artificial Sequence: Synthetic oligonucleotide
uuugcagagcggacaauau

SEQ ID NO: 503498 - RNA, 19 nt, Artificial Sequence
  Description of Artificial Sequence: Synthetic oligonucleotide
ucaacggauuauacacuac

SEQ ID NO: 503499 - RNA, 19 nt, Artificial Sequence
  Description of Artificial Sequence: Synthetic oligonucleotide
ccacacaacacacacacac

SEQ ID NO: 503500 - RNA, 19 nt, Artificial Sequence
  Description of Artificial Sequence: Synthetic oligonucleotide
acaaauauugggacauucu

SEQ ID NO: 503501 - RNA, 19 nt, Artificial Sequence
  Description of Artificial Sequence: Synthetic oligonucleotide
acucuaaaugacagagacg

SEQ ID NO: 503502 - RNA, 19 nt, Artificial Sequence
  Description of Artificial Sequence: Synthetic oligonucleotide
acacacacacacacaacac

SEQ ID NO: 503503 - RNA, 19 nt, Artificial Sequence
  Description of Artificial Sequence: Synthetic oligonucleotide
acacaguaccuccugucug

SEQ ID NO: 503504 - RNA, 19 nt, Artificial Sequence
  Description of Artificial Sequence: Synthetic oligonucleotide
cacaccacacacaccacac

SEQ ID NO: 503505 - RNA, 19 nt, Artificial Sequence
  Description of Artificial Sequence: Synthetic oligonucleotide
uauggcguguggucuaaac

SEQ ID NO: 503506 - RNA, 19 nt, Artificial Sequence
  Description of Artificial Sequence: Synthetic oligonucleotide
aagcaguucauuacuuaga

SEQ ID NO: 503507 - RNA, 19 nt, Artificial Sequence
  Description of Artificial Sequence: Synthetic oligonucleotide
augaauggaugcacaguac

SEQ ID NO: 503508 - RNA, 19 nt, Artificial Sequence
  Description of Artificial Sequence: Synthetic oligonucleotide
auuucgaauuuguaacaua

SEQ ID NO: 503509 - RNA, 19 nt, Artificial Sequence
  Description of Artificial Sequence: Synthetic oligonucleotide
acacacacacacaccacac

SEQ ID NO: 503510 - RNA, 19 nt, Artificial Sequence
  Description of Artificial Sequence: Synthetic oligonucleotide
auaccaagucgugaagcuc

SEQ ID NO: 503511 - RNA, 19 nt, Artificial Sequence
  Description of Artificial Sequence: Synthetic oligonucleotide
agcuuccuuugacaggcuc

SEQ ID NO: 503512 - RNA, 19 nt, Artificial Sequence
  Description of Artificial Sequence: Synthetic oligonucleotide
guacaagcuaacugguuga

SEQ ID NO: 503513 - RNA, 19 nt, Artificial Sequence
  Description of Artificial Sequence: Synthetic oligonucleotide
uacuuagacuggucucuag

SEQ ID NO: 503514 - RNA, 19 nt, Artificial Sequence
  Description of Artificial Sequence: Synthetic oligonucleotide
ucuaaaccgcuuuccucca

SEQ ID NO: 503515 - RNA, 19 nt, Artificial Sequence
  Description of Artificial Sequence: Synthetic oligonucleotide
uaucgcugacacacauucc

SEQ ID NO: 503516 - RNA, 19 nt, Artificial Sequence
  Description of Artificial Sequence: Synthetic oligonucleotide
gguuuuaacacacguucca

SEQ ID NO: 503517 - RNA, 19 nt, Artificial Sequence
  Description of Artificial Sequence: Synthetic oligonucleotide
acggauuauacacuaccua

SEQ ID NO: 503518 - RNA, 19 nt, Artificial Sequence
  Description of Artificial Sequence: Synthetic oligonucleotide
uucuuggucaagugugaaa

SEQ ID NO: 503519 - RNA, 19 nt, Artificial Sequence
  Description of Artificial Sequence: Synthetic oligonucleotide
caagucgugaagcucucuc

SEQ ID NO: 503520 - RNA, 19 nt, Artificial Sequence
  Description of Artificial Sequence: Synthetic oligonucleotide
uacuuaguucaguuagaau

SEQ ID NO: 503521 - RNA, 19 nt, Artificial Sequence
  Description of Artificial Sequence: Synthetic oligonucleotide
acacaccacacacaccaca

SEQ ID NO: 503522 - RNA, 19 nt, Artificial Sequence
  Description of Artificial Sequence: Synthetic oligonucleotide
cacacacacacacacacaa

SEQ ID NO: 503523 - RNA, 19 nt, Artificial Sequence
  Description of Artificial Sequence: Synthetic oligonucleotide
acacacacacacacacacc

SEQ ID NO: 503524 - RNA, 19 nt, Artificial Sequence
  Description of Artificial Sequence: Synthetic oligonucleotide
gguuuaagcuuccuuugac

SEQ ID NO: 503525 - RNA, 19 nt, Artificial Sequence
  Description of Artificial Sequence: Synthetic oligonucleotide
ccuagaauguacaagcuaa

SEQ ID NO: 503526 - RNA, 19 nt, Artificial Sequence
  Description of Artificial Sequence: Synthetic oligonucleotide
uccaaccgugucaaccaca

SEQ ID NO: 503527 - RNA, 19 nt, Artificial Sequence
  Description of Artificial Sequence: Synthetic oligonucleotide
ugaagcucucucagacucu

SEQ ID NO: 503528 - RNA, 19 nt, Artificial Sequence
  Description of Artificial Sequence: Synthetic oligonucleotide
acaacggggccagauuagg

SEQ ID NO: 503529 - RNA, 19 nt, Artificial Sequence
  Description of Artificial Sequence: Synthetic oligonucleotide
agguauucauuugcagauc

SEQ ID NO: 503530 - RNA, 19 nt, Artificial Sequence
  Description of Artificial Sequence: Synthetic oligonucleotide
gauccucaacggauuauac

SEQ ID NO: 503531 - RNA, 19 nt, Artificial Sequence
  Description of Artificial Sequence: Synthetic oligonucleotide
uggucuaaacaucgcucaa

SEQ ID NO: 503532 - RNA, 19 nt, Artificial Sequence
  Description of Artificial Sequence: Synthetic oligonucleotide
cacacacacacacaacaca

SEQ ID NO: 503533 - RNA, 19 nt, Artificial Sequence
  Description of Artificial Sequence: Synthetic oligonucleotide
aguuuaacacacacacaca

SEQ ID NO: 503534 - RNA, 19 nt, Artificial Sequence
  Description of Artificial Sequence: Synthetic oligonucleotide
uucuucgaaucaugagccu

SEQ ID NO: 503535 - RNA, 19 nt, Artificial Sequence
  Description of Artificial Sequence: Synthetic oligonucleotide
cugggucguccucuggucg

SEQ ID NO: 503536 - RNA, 19 nt, Artificial Sequence
  Description of Artificial Sequence: Synthetic oligonucleotide
gcacggagagcugauaccg

SEQ ID NO: 503537 - RNA, 19 nt, Artificial Sequence
  Description of Artificial Sequence: Synthetic oligonucleotide
accacacacaccacacaac

SEQ ID NO: 503538 - RNA, 19 nt, Artificial Sequence
  Description of Artificial Sequence: Synthetic oligonucleotide
cacggugcucuaacugugg

SEQ ID NO: 503539 - RNA, 19 nt, Artificial Sequence
  Description of Artificial Sequence: Synthetic oligonucleotide
cucaacggauuauacacua

SEQ ID NO: 503540 - RNA, 19 nt, Artificial Sequence
  Description of Artificial Sequence: Synthetic oligonucleotide
cacacacacacacaccaca

SEQ ID NO: 503541 - RNA, 19 nt, Artificial Sequence
  Description of Artificial Sequence: Synthetic oligonucleotide
uguaucgcugacacacauu

SEQ ID NO: 503542 - RNA, 19 nt, Artificial Sequence
  Description of Artificial Sequence: Synthetic oligonucleotide
cacacacaccacacaacac

SEQ ID NO: 503543 - RNA, 19 nt, Artificial Sequence
  Description of Artificial Sequence: Synthetic oligonucleotide
auuucuacguuaagcuccu

SEQ ID NO: 503544 - RNA, 19 nt, Artificial Sequence
  Description of Artificial Sequence: Synthetic oligonucleotide
aguuagaauaugguacaua

SEQ ID NO: 503545 - RNA, 19 nt, Artificial Sequence
  Description of Artificial Sequence: Synthetic oligonucleotide
acacacacacacacacaac

SEQ ID NO: 503546 - RNA, 19 nt, Artificial Sequence
  Description of Artificial Sequence: Synthetic oligonucleotide
ggucuaaacaucgcucaag

SEQ ID NO: 503547 - RNA, 19 nt, Artificial Sequence
  Description of Artificial Sequence: Synthetic oligonucleotide
ugucaaccacagaccuucc

SEQ ID NO: 503548 - RNA, 19 nt, Artificial Sequence
  Description of Artificial Sequence: Synthetic oligonucleotide
guaucugggcucaaauaca

SEQ ID NO: 503549 - RNA, 19 nt, Artificial Sequence
  Description of Artificial Sequence: Synthetic oligonucleotide
uggccuacaacggggccag

SEQ ID NO: 503550 - RNA, 19 nt, Artificial Sequence
  Description of Artificial Sequence: Synthetic oligonucleotide
aauauggcguguggucuaa

SEQ ID NO: 503551 - RNA, 19 nt, Artificial Sequence
  Description of Artificial Sequence: Synthetic oligonucleotide
aggacacccgucuuuuaaa

SEQ ID NO: 503552 - RNA, 19 nt, Artificial Sequence
  Description of Artificial Sequence: Synthetic oligonucleotide
acacacacacacacaccac

SEQ ID NO: 503553 - RNA, 19 nt, Artificial Sequence
  Description of Artificial Sequence: Synthetic oligonucleotide
agacgggcaguuaauguga

SEQ ID NO: 503554 - RNA, 19 nt, Artificial Sequence
  Description of Artificial Sequence: Synthetic oligonucleotide
cacacaacacacacacaca

SEQ ID NO: 503555 - RNA, 19 nt, Artificial Sequence
  Description of Artificial Sequence: Synthetic oligonucleotide
aagcuaggugagauccaag

SEQ ID NO: 503556 - RNA, 19 nt, Artificial Sequence
  Description of Artificial Sequence: Synthetic oligonucleotide
agcuaacugguugaaucga

SEQ ID NO: 503557 - RNA, 19 nt, Artificial Sequence
  Description of Artificial Sequence: Synthetic oligonucleotide
aggcauugacccaaagugu

SEQ ID NO: 503558 - RNA, 19 nt, Artificial Sequence
  Description of Artificial Sequence: Synthetic oligonucleotide
cuacaacggggccagauua

SEQ ID NO: 503559 - RNA, 19 nt, Artificial Sequence
  Description of Artificial Sequence: Synthetic oligonucleotide
cacacacaccacacacacc

SEQ ID NO: 503560 - RNA, 19 nt, Artificial Sequence
  Description of Artificial Sequence: Synthetic oligonucleotide
gcguguggucuaaacaucg

SEQ ID NO: 503561 - RNA, 19 nt, Artificial Sequence
  Description of Artificial Sequence: Synthetic oligonucleotide
acacacacacacauacaca

SEQ ID NO: 503562 - RNA, 19 nt, Artificial Sequence
  Description of Artificial Sequence: Synthetic oligonucleotide
cacaacacacacacacaca

SEQ ID NO: 503563 - RNA, 19 nt, Artificial Sequence
  Description of Artificial Sequence: Synthetic oligonucleotide
acaccacacacaccacaca

SEQ ID NO: 503564 - RNA, 19 nt, Artificial Sequence
  Description of Artificial Sequence: Synthetic oligonucleotide
gcucaagacaauucuuaca

SEQ ID NO: 503565 - RNA, 19 nt, Artificial Sequence
  Description of Artificial Sequence: Synthetic oligonucleotide
ucgaaucaugagccuguau

SEQ ID NO: 503566 - RNA, 19 nt, Artificial Sequence
  Description of Artificial Sequence: Synthetic oligonucleotide
acacauacacacacacaca

SEQ ID NO: 503567 - RNA, 19 nt, Artificial Sequence
  Description of Artificial Sequence: Synthetic oligonucleotide
acauacacacacacacaca

SEQ ID NO: 503568 - RNA, 19 nt, Artificial Sequence
  Description of Artificial Sequence: Synthetic oligonucleotide
auaggccauagugcaaaca

SEQ ID NO: 503569 - RNA, 19 nt, Artificial Sequence
  Description of Artificial Sequence: Synthetic oligonucleotide
cacacacacacaacacaca

SEQ ID NO: 503570 - RNA, 19 nt, Artificial Sequence
  Description of Artificial Sequence: Synthetic oligonucleotide
cacacacacaacacacaca

SEQ ID NO: 503571 - RNA, 19 nt, Artificial Sequence
  Description of Artificial Sequence: Synthetic oligonucleotide
cacacacacaccacacaca

SEQ ID NO: 503572 - RNA, 19 nt, Artificial Sequence
  Description of Artificial Sequence: Synthetic oligonucleotide
caccacacacaccacacaa

SEQ ID NO: 503573 - RNA, 19 nt, Artificial Sequence
  Description of Artificial Sequence: Synthetic oligonucleotide
cacacacacacacacacau

SEQ ID NO: 503574 - RNA, 19 nt, Artificial Sequence
  Description of Artificial Sequence: Synthetic oligonucleotide
gcuaacugguugaaucgag

SEQ ID NO: 503575 - RNA, 19 nt, Artificial Sequence
  Description of Artificial Sequence: Synthetic oligonucleotide
cuuaaguuuucaggcgaca

SEQ ID NO: 503576 - RNA, 19 nt, Artificial Sequence
  Description of Artificial Sequence: Synthetic oligonucleotide
acacacauacacacacaca

SEQ ID NO: 503577 - RNA, 19 nt, Artificial Sequence
  Description of Artificial Sequence: Synthetic oligonucleotide
cuuugcagagcggacaaua

SEQ ID NO: 503578 - RNA, 19 nt, Artificial Sequence
  Description of Artificial Sequence: Synthetic oligonucleotide
cacgguuuaagcuuccuuu

SEQ ID NO: 503579 - RNA, 19 nt, Artificial Sequence
  Description of Artificial Sequence: Synthetic oligonucleotide
cuaacugguugaaucgagu

SEQ ID NO: 503580 - RNA, 19 nt, Artificial Sequence
  Description of Artificial Sequence: Synthetic oligonucleotide
caacacacacacacacaca

SEQ ID NO: 503581 - RNA, 19 nt, Artificial Sequence
  Description of Artificial Sequence: Synthetic oligonucleotide
auacacacacacacacaca

SEQ ID NO: 503582 - RNA, 19 nt, Artificial Sequence
  Description of Artificial Sequence: Synthetic oligonucleotide
ccagauacucuuuuaagcu

SEQ ID NO: 503583 - RNA, 19 nt, Artificial Sequence
  Description of Artificial Sequence: Synthetic oligonucleotide
gagugaggcucuuccacua

SEQ ID NO: 503584 - RNA, 19 nt, Artificial Sequence
  Description of Artificial Sequence: Synthetic oligonucleotide
ccuuaaguuuucaggcgac

SEQ ID NO: 503585 - RNA, 19 nt, Artificial Sequence
  Description of Artificial Sequence: Synthetic oligonucleotide
cacacacacacacaccaua

SEQ ID NO: 503586 - RNA, 19 nt, Artificial Sequence
  Description of Artificial Sequence: Synthetic oligonucleotide
ccaagaccagaguaaaaca

SEQ ID NO: 503587 - RNA, 19 nt, Artificial Sequence
  Description of Artificial Sequence: Synthetic oligonucleotide
gaaucgaguucuccaucua

SEQ ID NO: 503588 - RNA, 19 nt, Artificial Sequence
  Description of Artificial Sequence: Synthetic oligonucleotide
cacacacacacaccauaca

SEQ ID NO: 503589 - RNA, 19 nt, Artificial Sequence
  Description of Artificial Sequence: Synthetic oligonucleotide
cugagcacgguuuaagcuu

SEQ ID NO: 503590 - RNA, 19 nt, Artificial Sequence
  Description of Artificial Sequence: Synthetic oligonucleotide
cacacacacacaccacaca

SEQ ID NO: 503591 - RNA, 19 nt, Artificial Sequence
  Description of Artificial Sequence: Synthetic oligonucleotide
acacacacacauacacaca

SEQ ID NO: 503592 - RNA, 19 nt, Artificial Sequence
  Description of Artificial Sequence: Synthetic oligonucleotide
acacacacauacacacaca

SEQ ID NO: 503593 - RNA, 19 nt, Artificial Sequence
  Description of Artificial Sequence: Synthetic oligonucleotide
ccacacacaccacacaaca

SEQ ID NO: 503594 - RNA, 19 nt, Artificial Sequence
  Description of Artificial Sequence: Synthetic oligonucleotide
acacacacacacacauaca

SEQ ID NO: 503595 - RNA, 19 nt, Artificial Sequence
  Description of Artificial Sequence: Synthetic oligonucleotide
cacacaccacacacaccac

SEQ ID NO: 503596 - RNA, 19 nt, Artificial Sequence
  Description of Artificial Sequence: Synthetic oligonucleotide
aggcuugcgaguauaccaa

SEQ ID NO: 503597 - RNA, 19 nt, Artificial Sequence
  Description of Artificial Sequence: Synthetic oligonucleotide
ggauaggccauagugcaaa

SEQ ID NO: 503598 - RNA, 19 nt, Artificial Sequence
  Description of Artificial Sequence: Synthetic oligonucleotide
caagcuaggugagauccaa

SEQ ID NO: 503599 - RNA, 19 nt, Artificial Sequence
  Description of Artificial Sequence: Synthetic oligonucleotide
auacacuaccuaauuccuu

SEQ ID NO: 503600 - RNA, 19 nt, Artificial Sequence
  Description of Artificial Sequence: Synthetic oligonucleotide
acacacacacacacacaca

SEQ ID NO: 503601 - RNA, 19 nt, Artificial Sequence
  Description of Artificial Sequence: Synthetic oligonucleotide
agcucauccgguagauacu

SEQ ID NO: 503602 - RNA, 19 nt, Artificial Sequence
  Description of Artificial Sequence: Synthetic oligonucleotide
ggugcucuaacugugguau

SEQ ID NO: 503603 - RNA, 19 nt, Artificial Sequence
  Description of Artificial Sequence: Synthetic oligonucleotide
cguucuugaggcugcuucc

SEQ ID NO: 503604 - RNA, 19 nt, Artificial Sequence
  Description of Artificial Sequence: Synthetic oligonucleotide
uucgaaucaugagccugua

SEQ ID NO: 503605 - RNA, 19 nt, Artificial Sequence
  Description of Artificial Sequence: Synthetic oligonucleotide
acaccacacaacacacaca

SEQ ID NO: 503606 - RNA, 19 nt, Artificial Sequence
  Description of Artificial Sequence: Synthetic oligonucleotide
uccucucagacagcucauc

SEQ ID NO: 503607 - RNA, 19 nt, Artificial Sequence
  Description of Artificial Sequence: Synthetic oligonucleotide
ggagagugaggcucuucca

SEQ ID NO: 503608 - RNA, 19 nt, Artificial Sequence
  Description of Artificial Sequence: Synthetic oligonucleotide
cggggaugcaaguauuuac

SEQ ID NO: 503609 - RNA, 19 nt, Artificial Sequence
  Description of Artificial Sequence: Synthetic oligonucleotide
aucugggcucaaauacaug

SEQ ID NO: 503610 - RNA, 19 nt, Artificial Sequence
  Description of Artificial Sequence: Synthetic oligonucleotide
gcauugacccaaaguguug

SEQ ID NO: 503611 - RNA, 19 nt, Artificial Sequence
  Description of Artificial Sequence: Synthetic oligonucleotide
gcgaguauaccaagucgug

SEQ ID NO: 503612 - RNA, 19 nt, Artificial Sequence
  Description of Artificial Sequence: Synthetic oligonucleotide
agcggacaaucuggccuac

SEQ ID NO: 503613 - RNA, 19 nt, Artificial Sequence
  Description of Artificial Sequence: Synthetic oligonucleotide
acacaccacacaacacaca

SEQ ID NO: 503614 - RNA, 19 nt, Artificial Sequence
  Description of Artificial Sequence: Synthetic oligonucleotide
cacacacaacacacacaca

SEQ ID NO: 503615 - RNA, 19 nt, Artificial Sequence
  Description of Artificial Sequence: Synthetic oligonucleotide
acggggaugcaaguauuua

SEQ ID NO: 503616 - RNA, 19 nt, Artificial Sequence
  Description of Artificial Sequence: Synthetic oligonucleotide
acccgucuuuuaaagccgu

SEQ ID NO: 503617 - RNA, 19 nt, Artificial Sequence
  Description of Artificial Sequence: Synthetic oligonucleotide
gcugauaccgagggucuac

SEQ ID NO: 503618 - RNA, 19 nt, Artificial Sequence
  Description of Artificial Sequence: Synthetic oligonucleotide
acacacacacacacaccau

SEQ ID NO: 503619 - RNA, 19 nt, Artificial Sequence
  Description of Artificial Sequence: Synthetic oligonucleotide
ggccauagugcaaacaaau

SEQ ID NO: 503620 - RNA, 19 nt, Artificial Sequence
  Description of Artificial Sequence: Synthetic oligonucleotide
cagcggacaaucuggccua

SEQ ID NO: 503621 - RNA, 19 nt, Artificial Sequence
  Description of Artificial Sequence: Synthetic oligonucleotide
cagggcuaagagcaagcua

SEQ ID NO: 503622 - RNA, 19 nt, Artificial Sequence
  Description of Artificial Sequence: Synthetic oligonucleotide
guaccuccugucugccaga

SEQ ID NO: 503623 - RNA, 19 nt, Artificial Sequence
  Description of Artificial Sequence: Synthetic oligonucleotide
gacgggcaguuaaugugaa

SEQ ID NO: 503624 - RNA, 19 nt, Artificial Sequence
  Description of Artificial Sequence: Synthetic oligonucleotide
accacacaacacacacaca

SEQ ID NO: 503625 - RNA, 19 nt, Artificial Sequence
  Description of Artificial Sequence: Synthetic oligonucleotide
ggcguguggucuaaacauc

SEQ ID NO: 503626 - RNA, 19 nt, Artificial Sequence
  Description of Artificial Sequence: Synthetic oligonucleotide
acacacacacacacacaua

SEQ ID NO: 503627 - RNA, 19 nt, Artificial Sequence
  Description of Artificial Sequence: Synthetic oligonucleotide
cuaaaccgcuuuccuccaa

SEQ ID NO: 503628 - RNA, 19 nt, Artificial Sequence
  Description of Artificial Sequence: Synthetic oligonucleotide
uuucuacguuaagcuccuc

SEQ ID NO: 503629 - RNA, 19 nt, Artificial Sequence
  Description of Artificial Sequence: Synthetic oligonucleotide
cccuagaauguacaagcua

SEQ ID NO: 503630 - RNA, 19 nt, Artificial Sequence
  Description of Artificial Sequence: Synthetic oligonucleotide
agcggacaauauggcgugu

SEQ ID NO: 503631 - RNA, 19 nt, Artificial Sequence
  Description of Artificial Sequence: Synthetic oligonucleotide
agcugauaccgagggucua

SEQ ID NO: 503632 - RNA, 19 nt, Artificial Sequence
  Description of Artificial Sequence: Synthetic oligonucleotide
auauggcguguggucuaaa

SEQ ID NO: 503633 - RNA, 19 nt, Artificial Sequence
  Description of Artificial Sequence: Synthetic oligonucleotide
gggguuguuacuggcucaa

SEQ ID NO: 503634 - RNA, 19 nt, Artificial Sequence
  Description of Artificial Sequence: Synthetic oligonucleotide
cacgaguacuuaguucagu

SEQ ID NO: 503635 - RNA, 19 nt, Artificial Sequence
  Description of Artificial Sequence: Synthetic oligonucleotide
cgaguauaccaagucguga

SEQ ID NO: 503636 - RNA, 19 nt, Artificial Sequence
  Description of Artificial Sequence: Synthetic oligonucleotide
gcaagcuaggugagaucca

SEQ ID NO: 503637 - RNA, 19 nt, Artificial Sequence
  Description of Artificial Sequence: Synthetic oligonucleotide
cacggggaugcaaguauuu

SEQ ID NO: 503638 - RNA, 19 nt, Artificial Sequence
  Description of Artificial Sequence: Synthetic oligonucleotide
ccucaacggauuauacacu

SEQ ID NO: 503639 - RNA, 19 nt, Artificial Sequence
  Description of Artificial Sequence: Synthetic oligonucleotide
caguuagaauaugguacau

SEQ ID NO: 503640 - RNA, 19 nt, Artificial Sequence
  Description of Artificial Sequence: Synthetic oligonucleotide
cgacaauaagucacacaaa

SEQ ID NO: 503641 - RNA, 19 nt, Artificial Sequence
  Description of Artificial Sequence: Synthetic oligonucleotide
ccgugucaaccacagaccu

SEQ ID NO: 503642 - RNA, 19 nt, Artificial Sequence
  Description of Artificial Sequence: Synthetic oligonucleotide
gcucauccgguagauacuu

SEQ ID NO: 503643 - RNA, 19 nt, Artificial Sequence
  Description of Artificial Sequence: Synthetic oligonucleotide
ccgucuuuuaaagccgucu

SEQ ID NO: 503644 - RNA, 19 nt, Artificial Sequence
  Description of Artificial Sequence: Synthetic oligonucleotide
ccgguagauacuucacuau

SEQ ID NO: 503645 - RNA, 19 nt, Artificial Sequence
  Description of Artificial Sequence: Synthetic oligonucleotide
gcacgguuuaagcuuccuu

SEQ ID NO: 503646 - RNA, 19 nt, Artificial Sequence
  Description of Artificial Sequence: Synthetic oligonucleotide
ccuacaacggggccagauu

SEQ ID NO: 503647 - RNA, 19 nt, Artificial Sequence
  Description of Artificial Sequence: Synthetic oligonucleotide
ggaccuaguugaagguauu

SEQ ID NO: 503648 - RNA, 19 nt, Artificial Sequence
  Description of Artificial Sequence: Synthetic oligonucleotide
gucguucuugaggcugcuu

SEQ ID NO: 503649 - RNA, 19 nt, Artificial Sequence
  Description of Artificial Sequence: Synthetic oligonucleotide
ggucguucuugaggcugcu

SEQ ID NO: 503650 - RNA, 19 nt, Artificial Sequence
  Description of Artificial Sequence: Synthetic oligonucleotide
cgugucaaccacagaccuu

SEQ ID NO: 503651 - RNA, 19 nt, Artificial Sequence
  Description of Artificial Sequence: Synthetic oligonucleotide
ccaagucgugaagcucucu

SEQ ID NO: 503652 - RNA, 19 nt, Artificial Sequence
  Description of Artificial Sequence: Synthetic oligonucleotide
ggccuacaacggggccaga

SEQ ID NO: 503653 - RNA, 19 nt, Artificial Sequence
  Description of Artificial Sequence: Synthetic oligonucleotide
uuaaagucauuuaugaugc

SEQ ID NO: 503654 - RNA, 19 nt, Artificial Sequence
  Description of Artificial Sequence: Synthetic oligonucleotide
aauucaagcgcuuuaauga

SEQ ID NO: 503655 - RNA, 19 nt, Artificial Sequence
  Description of Artificial Sequence: Synthetic oligonucleotide
guaucuaagguuuacauug

SEQ ID NO: 503656 - RNA, 19 nt, Artificial Sequence
  Description of Artificial Sequence: Synthetic oligonucleotide
ugagcauugauucgaagcg

SEQ ID NO: 503657 - RNA, 19 nt, Artificial Sequence
  Description of Artificial Sequence: Synthetic oligonucleotide
aauaucgacagcagcaucc

SEQ ID NO: 503658 - RNA, 19 nt, Artificial Sequence
  Description of Artificial Sequence: Synthetic oligonucleotide
uuaauuauuuucccuuccg

SEQ ID NO: 503659 - RNA, 19 nt, Artificial Sequence
  Description of Artificial Sequence: Synthetic oligonucleotide
acuauuauccacaaugcgc

SEQ ID NO: 503660 - RNA, 19 nt, Artificial Sequence
  Description of Artificial Sequence: Synthetic oligonucleotide
aaugacagauccugacucc

SEQ ID NO: 503661 - RNA, 19 nt, Artificial Sequence
  Description of Artificial Sequence: Synthetic oligonucleotide
ugucauauugaucaauacc

SEQ ID NO: 503662 - RNA, 19 nt, Artificial Sequence
  Description of Artificial Sequence: Synthetic oligonucleotide
aagaccgucagcaugcucc

SEQ ID NO: 503663 - RNA, 19 nt, Artificial Sequence
  Description of Artificial Sequence: Synthetic oligonucleotide
gauaugucuaaacaugggc

SEQ ID NO: 503664 - RNA, 19 nt, Artificial Sequence
  Description of Artificial Sequence: Synthetic oligonucleotide
ugaaaguguaggcauaacc

SEQ ID NO: 503665 - RNA, 19 nt, Artificial Sequence
  Description of Artificial Sequence: Synthetic oligonucleotide
ucaaucgccaaguaaaucu

SEQ ID NO: 503666 - RNA, 19 nt, Artificial Sequence
  Description of Artificial Sequence: Synthetic oligonucleotide
uuacaucacaauuucaaug

SEQ ID NO: 503667 - RNA, 19 nt, Artificial Sequence
  Description of Artificial Sequence: Synthetic oligonucleotide
agcauagcgagcuugaucu

SEQ ID NO: 503668 - RNA, 19 nt, Artificial Sequence
  Description of Artificial Sequence: Synthetic oligonucleotide
ugauaauggccuaaaagcu

SEQ ID NO: 503669 - RNA, 19 nt, Artificial Sequence
  Description of Artificial Sequence: Synthetic oligonucleotide
caugauaugucuaaacaug

SEQ ID NO: 503670 - RNA, 19 nt, Artificial Sequence
  Description of Artificial Sequence: Synthetic oligonucleotide
agaauuagauguuucacgu

SEQ ID NO: 503671 - RNA, 19 nt, Artificial Sequence
  Description of Artificial Sequence: Synthetic oligonucleotide
uccaugauaugucuaaaca

SEQ ID NO: 503672 - RNA, 19 nt, Artificial Sequence
  Description of Artificial Sequence: Synthetic oligonucleotide
uaaucuucauaaugguugg

SEQ ID NO: 503673 - RNA, 19 nt, Artificial Sequence
  Description of Artificial Sequence: Synthetic oligonucleotide
ucuaccugagacucgaugc

SEQ ID NO: 503674 - RNA, 19 nt, Artificial Sequence
  Description of Artificial Sequence: Synthetic oligonucleotide
aaagauucacucugcccac

SEQ ID NO: 503675 - RNA, 19 nt, Artificial Sequence
  Description of Artificial Sequence: Synthetic oligonucleotide
acgauuacaucacaauuuc

SEQ ID NO: 503676 - RNA, 19 nt, Artificial Sequence
  Description of Artificial Sequence: Synthetic oligonucleotide
uucaaucacaaucacuugu

SEQ ID NO: 503677 - RNA, 19 nt, Artificial Sequence
  Description of Artificial Sequence: Synthetic oligonucleotide
ucaggacggacuauuaucc

SEQ ID NO: 503678 - RNA, 19 nt, Artificial Sequence
  Description of Artificial Sequence: Synthetic oligonucleotide
cauauugaucaauaccucc

SEQ ID NO: 503679 - RNA, 19 nt, Artificial Sequence
  Description of Artificial Sequence: Synthetic oligonucleotide
ugauaugucuaaacauggg

SEQ ID NO: 503680 - RNA, 19 nt, Artificial Sequence
  Description of Artificial Sequence: Synthetic oligonucleotide
guaggcauaacccuuguug

SEQ ID NO: 503681 - RNA, 19 nt, Artificial Sequence
  Description of Artificial Sequence: Synthetic oligonucleotide
aagauuugugacccgacca

SEQ ID NO: 503682 - RNA, 19 nt, Artificial Sequence
  Description of Artificial Sequence: Synthetic oligonucleotide
gauccugcggaccaaagcc

SEQ ID NO: 503683 - RNA, 19 nt, Artificial Sequence
  Description of Artificial Sequence: Synthetic oligonucleotide
gacuauuauccacaaugcg

SEQ ID NO: 503684 - RNA, 19 nt, Artificial Sequence
  Description of Artificial Sequence: Synthetic oligonucleotide
acaaauauaaugacagauc

SEQ ID NO: 503685 - RNA, 19 nt, Artificial Sequence
  Description of Artificial Sequence: Synthetic oligonucleotide
uacauugggaacaucacau

SEQ ID NO: 503686 - RNA, 19 nt, Artificial Sequence
  Description of Artificial Sequence: Synthetic oligonucleotide
uauaauacuuuguaucguc

SEQ ID NO: 503687 - RNA, 19 nt, Artificial Sequence
  Description of Artificial Sequence: Synthetic oligonucleotide
aaaagcucgagcaauuuca

SEQ ID NO: 503688 - RNA, 19 nt, Artificial Sequence
  Description of Artificial Sequence: Synthetic oligonucleotide
agacauuuaagaguauugg

SEQ ID NO: 503689 - RNA, 19 nt, Artificial Sequence
  Description of Artificial Sequence: Synthetic oligonucleotide
gaucaauaccuccaugaag

SEQ ID NO: 503690 - RNA, 19 nt, Artificial Sequence
  Description of Artificial Sequence: Synthetic oligonucleotide
uguaucguccuuuauuugu

SEQ ID NO: 503691 - RNA, 19 nt, Artificial Sequence
  Description of Artificial Sequence: Synthetic oligonucleotide
uucguuggcacuuucaauc

SEQ ID NO: 503692 - RNA, 19 nt, Artificial Sequence
  Description of Artificial Sequence: Synthetic oligonucleotide
ucuuacauucuuuagugau

SEQ ID NO: 503693 - RNA, 19 nt, Artificial Sequence
  Description of Artificial Sequence: Synthetic oligonucleotide
uaucuaagguuuacauugg

SEQ ID NO: 503694 - RNA, 19 nt, Artificial Sequence
  Description of Artificial Sequence: Synthetic oligonucleotide
ucuucgaaaacuucuuaca

SEQ ID NO: 503695 - RNA, 19 nt, Artificial Sequence
  Description of Artificial Sequence: Synthetic oligonucleotide
uugguaugaauuuugcagu

SEQ ID NO: 503696 - RNA, 19 nt, Artificial Sequence
  Description of Artificial Sequence: Synthetic oligonucleotide
aaccugaacuucaaugggc

SEQ ID NO: 503697 - RNA, 19 nt, Artificial Sequence
  Description of Artificial Sequence: Synthetic oligonucleotide
agauuugugacccgaccac

SEQ ID NO: 503698 - RNA, 19 nt, Artificial Sequence
  Description of Artificial Sequence: Synthetic oligonucleotide
ugacuuuccaccuugccgu

SEQ ID NO: 503699 - RNA, 19 nt, Artificial Sequence
  Description of Artificial Sequence: Synthetic oligonucleotide
uggccuaaaagcucgagca

SEQ ID NO: 503700 - RNA, 19 nt, Artificial Sequence
  Description of Artificial Sequence: Synthetic oligonucleotide
ucuaagguuuacauuggga

SEQ ID NO: 503701 - RNA, 19 nt, Artificial Sequence
  Description of Artificial Sequence: Synthetic oligonucleotide
uuacauugggaacaucaca

SEQ ID NO: 503702 - RNA, 19 nt, Artificial Sequence
  Description of Artificial Sequence: Synthetic oligonucleotide
auggccuaaaagcucgagc

SEQ ID NO: 503703 - RNA, 19 nt, Artificial Sequence
  Description of Artificial Sequence: Synthetic oligonucleotide
cuuucaaucgccaaguaaa

SEQ ID NO: 503704 - RNA, 19 nt, Artificial Sequence
  Description of Artificial Sequence: Synthetic oligonucleotide
auaauggccuaaaagcucg

SEQ ID NO: 503705 - RNA, 19 nt, Artificial Sequence
  Description of Artificial Sequence: Synthetic oligonucleotide
auaauacuuuguaucgucc

SEQ ID NO: 503706 - RNA, 19 nt, Artificial Sequence
  Description of Artificial Sequence: Synthetic oligonucleotide
aguacuuacugacaacuga

SEQ ID NO: 503707 - RNA, 19 nt, Artificial Sequence
  Description of Artificial Sequence: Synthetic oligonucleotide
agcucgagcaauuucaaga

SEQ ID NO: 503708 - RNA, 19 nt, Artificial Sequence
  Description of Artificial Sequence: Synthetic oligonucleotide
gagcaaaccacacuccugc

SEQ ID NO: 503709 - RNA, 19 nt, Artificial Sequence
  Description of Artificial Sequence: Synthetic oligonucleotide
uguucugcgaugguuuucg

SEQ ID NO: 503710 - RNA, 19 nt, Artificial Sequence
  Description of Artificial Sequence: Synthetic oligonucleotide
aguagacugaaaccauaac

SEQ ID NO: 503711 - RNA, 19 nt, Artificial Sequence
  Description of Artificial Sequence: Synthetic oligonucleotide
aguauugguaucuaagguu

SEQ ID NO: 503712 - RNA, 19 nt, Artificial Sequence
  Description of Artificial Sequence: Synthetic oligonucleotide
caacauacgucacucuucg

SEQ ID NO: 503713 - RNA, 19 nt, Artificial Sequence
  Description of Artificial Sequence: Synthetic oligonucleotide
uuuucgcagacaccguggg

SEQ ID NO: 503714 - RNA, 19 nt, Artificial Sequence
  Description of Artificial Sequence: Synthetic oligonucleotide
cauugugaacuucacagac

SEQ ID NO: 503715 - RNA, 19 nt, Artificial Sequence
  Description of Artificial Sequence: Synthetic oligonucleotide
augauaugucuaaacaugg

SEQ ID NO: 503716 - RNA, 19 nt, Artificial Sequence
  Description of Artificial Sequence: Synthetic oligonucleotide
uuagauguuucacgucuag

SEQ ID NO: 503717 - RNA, 19 nt, Artificial Sequence
  Description of Artificial Sequence: Synthetic oligonucleotide
uuuauuuguugguugguau

SEQ ID NO: 503718 - RNA, 19 nt, Artificial Sequence
  Description of Artificial Sequence: Synthetic oligonucleotide
aacaacauacgucacucuu

SEQ ID NO: 503719 - RNA, 19 nt, Artificial Sequence
  Description of Artificial Sequence: Synthetic oligonucleotide
aaucauucgaccaggugug

SEQ ID NO: 503720 - RNA, 19 nt, Artificial Sequence
  Description of Artificial Sequence: Synthetic oligonucleotide
uaagguuuacauugggaac

SEQ ID NO: 503721 - RNA, 19 nt, Artificial Sequence
  Description of Artificial Sequence: Synthetic oligonucleotide
uaugucuaaacaugggcaa

SEQ ID NO: 503722 - RNA, 19 nt, Artificial Sequence
  Description of Artificial Sequence: Synthetic oligonucleotide
accucuuuucagcucagcg

SEQ ID NO: 503723 - RNA, 19 nt, Artificial Sequence
  Description of Artificial Sequence: Synthetic oligonucleotide
agcaugcuccugcuuaucc

SEQ ID NO: 503724 - RNA, 19 nt, Artificial Sequence
  Description of Artificial Sequence: Synthetic oligonucleotide
agcgcuuuaaugaugucac

SEQ ID NO: 503725 - RNA, 19 nt, Artificial Sequence
  Description of Artificial Sequence: Synthetic oligonucleotide
ucagaguauucgcugauuc

SEQ ID NO: 503726 - RNA, 19 nt, Artificial Sequence
  Description of Artificial Sequence: Synthetic oligonucleotide
gaagauuugugacccgacc

SEQ ID NO: 503727 - RNA, 19 nt, Artificial Sequence
  Description of Artificial Sequence: Synthetic oligonucleotide
uaauacuuuguaucguccu

SEQ ID NO: 503728 - RNA, 19 nt, Artificial Sequence
  Description of Artificial Sequence: Synthetic oligonucleotide
ucucugauccaugauaugu

SEQ ID NO: 503729 - RNA, 19 nt, Artificial Sequence
  Description of Artificial Sequence: Synthetic oligonucleotide
cuuacugacaacugacuuc

SEQ ID NO: 503730 - RNA, 19 nt, Artificial Sequence
  Description of Artificial Sequence: Synthetic oligonucleotide
ucggguuggagucaugaug

SEQ ID NO: 503731 - RNA, 19 nt, Artificial Sequence
  Description of Artificial Sequence: Synthetic oligonucleotide
uguaacaaacacugguuuc

SEQ ID NO: 503732 - RNA, 19 nt, Artificial Sequence
  Description of Artificial Sequence: Synthetic oligonucleotide
uggagauggaguuuggauc

SEQ ID NO: 503733 - RNA, 19 nt, Artificial Sequence
  Description of Artificial Sequence: Synthetic oligonucleotide
accgucagcaugcuccugc

SEQ ID NO: 503734 - RNA, 19 nt, Artificial Sequence
  Description of Artificial Sequence: Synthetic oligonucleotide
cagaagaccgucagcaugc

SEQ ID NO: 503735 - RNA, 19 nt, Artificial Sequence
  Description of Artificial Sequence: Synthetic oligonucleotide
uuagccgcuaacaugucaa

SEQ ID NO: 503736 - RNA, 19 nt, Artificial Sequence
  Description of Artificial Sequence: Synthetic oligonucleotide
aggacggacuauuauccac

SEQ ID NO: 503737 - RNA, 19 nt, Artificial Sequence
  Description of Artificial Sequence: Synthetic oligonucleotide
aucaauaucgacagcagca

SEQ ID NO: 503738 - RNA, 19 nt, Artificial Sequence
  Description of Artificial Sequence: Synthetic oligonucleotide
cauacgucacucuucgaag

SEQ ID NO: 503739 - RNA, 19 nt, Artificial Sequence
  Description of Artificial Sequence: Synthetic oligonucleotide
ucgagcaauuucaagaauu

SEQ ID NO: 503740 - RNA, 19 nt, Artificial Sequence
  Description of Artificial Sequence: Synthetic oligonucleotide
ugauccaugauaugucuaa

SEQ ID NO: 503741 - RNA, 19 nt, Artificial Sequence
  Description of Artificial Sequence: Synthetic oligonucleotide
aggcauaacccuuguugcc

SEQ ID NO: 503742 - RNA, 19 nt, Artificial Sequence
  Description of Artificial Sequence: Synthetic oligonucleotide
ucguuggcacuuucaaucg

SEQ ID NO: 503743 - RNA, 19 nt, Artificial Sequence
  Description of Artificial Sequence: Synthetic oligonucleotide
ucauauugaucaauaccuc

SEQ ID NO: 503744 - RNA, 19 nt, Artificial Sequence
  Description of Artificial Sequence: Synthetic oligonucleotide
uacuaccacauucaacaca

SEQ ID NO: 503745 - RNA, 19 nt, Artificial Sequence
  Description of Artificial Sequence: Synthetic oligonucleotide
cuuuagugaucuguaaagc

SEQ ID NO: 503746 - RNA, 19 nt, Artificial Sequence
  Description of Artificial Sequence: Synthetic oligonucleotide
ucuagggaaaguagacuga

SEQ ID NO: 503747 - RNA, 19 nt, Artificial Sequence
  Description of Artificial Sequence: Synthetic oligonucleotide
auaugucuaaacaugggca

SEQ ID NO: 503748 - RNA, 19 nt, Artificial Sequence
  Description of Artificial Sequence: Synthetic oligonucleotide
caaguaaaucuuccgcucc

SEQ ID NO: 503749 - RNA, 19 nt, Artificial Sequence
  Description of Artificial Sequence: Synthetic oligonucleotide
aucuaagguuuacauuggg

SEQ ID NO: 503750 - RNA, 19 nt, Artificial Sequence
  Description of Artificial Sequence: Synthetic oligonucleotide
ugaauuaaacaugcucuca

SEQ ID NO: 503751 - RNA, 19 nt, Artificial Sequence
  Description of Artificial Sequence: Synthetic oligonucleotide
uccuucagaagaccgucag

SEQ ID NO: 503752 - RNA, 19 nt, Artificial Sequence
  Description of Artificial Sequence: Synthetic oligonucleotide
acauacgucacucuucgaa

SEQ ID NO: 503753 - RNA, 19 nt, Artificial Sequence
  Description of Artificial Sequence: Synthetic oligonucleotide
gacaugcaaggguaagagg

SEQ ID NO: 503754 - RNA, 19 nt, Artificial Sequence
  Description of Artificial Sequence: Synthetic oligonucleotide
uuggagacgauuacaucac

SEQ ID NO: 503755 - RNA, 19 nt, Artificial Sequence
  Description of Artificial Sequence: Synthetic oligonucleotide
gacccgaccacuguuagcc

SEQ ID NO: 503756 - RNA, 19 nt, Artificial Sequence
  Description of Artificial Sequence: Synthetic oligonucleotide
ugaucaauaccuccaugaa

SEQ ID NO: 503757 - RNA, 19 nt, Artificial Sequence
  Description of Artificial Sequence: Synthetic oligonucleotide
ucucguuggccaaagccug

SEQ ID NO: 503758 - RNA, 19 nt, Artificial Sequence
  Description of Artificial Sequence: Synthetic oligonucleotide
acagcuauuggccccucuc

SEQ ID NO: 503759 - RNA, 19 nt, Artificial Sequence
  Description of Artificial Sequence: Synthetic oligonucleotide
aagcgcuuuaaugauguca

SEQ ID NO: 503760 - RNA, 19 nt, Artificial Sequence
  Description of Artificial Sequence: Synthetic oligonucleotide
uuuacccuuucguuggaga

SEQ ID NO: 503761 - RNA, 19 nt, Artificial Sequence
  Description of Artificial Sequence: Synthetic oligonucleotide
gacugacacacuuuacuac

SEQ ID NO: 503762 - RNA, 19 nt, Artificial Sequence
  Description of Artificial Sequence: Synthetic oligonucleotide
gauaauggccuaaaagcuc

SEQ ID NO: 503763 - RNA, 19 nt, Artificial Sequence
  Description of Artificial Sequence: Synthetic oligonucleotide
ugguaucuaagguuuacau

SEQ ID NO: 503764 - RNA, 19 nt, Artificial Sequence
  Description of Artificial Sequence: Synthetic oligonucleotide
uauugaucaauaccuccau

SEQ ID NO: 503765 - RNA, 19 nt, Artificial Sequence
  Description of Artificial Sequence: Synthetic oligonucleotide
cauugggaacaucacauuc

SEQ ID NO: 503766 - RNA, 19 nt, Artificial Sequence
  Description of Artificial Sequence: Synthetic oligonucleotide
uucacgucuagaccucgag

SEQ ID NO: 503767 - RNA, 19 nt, Artificial Sequence
  Description of Artificial Sequence: Synthetic oligonucleotide
ugguugguaugaauuuugc

SEQ ID NO: 503768 - RNA, 19 nt, Artificial Sequence
  Description of Artificial Sequence: Synthetic oligonucleotide
auauugaucaauaccucca

SEQ ID NO: 503769 - RNA, 19 nt, Artificial Sequence
  Description of Artificial Sequence: Synthetic oligonucleotide
uucaagcgcuuuaaugaug

SEQ ID NO: 503770 - RNA, 19 nt, Artificial Sequence
  Description of Artificial Sequence: Synthetic oligonucleotide
gccacgagaaguuugcagg

SEQ ID NO: 503771 - RNA, 19 nt, Artificial Sequence
  Description of Artificial Sequence: Synthetic oligonucleotide
uagcucuagggaaaguaga

SEQ ID NO: 503772 - RNA, 19 nt, Artificial Sequence
  Description of Artificial Sequence: Synthetic oligonucleotide
agacgauuacaucacaauu

SEQ ID NO: 503773 - RNA, 19 nt, Artificial Sequence
  Description of Artificial Sequence: Synthetic oligonucleotide
uuuaugagccuggugauuu

SEQ ID NO: 503774 - RNA, 19 nt, Artificial Sequence
  Description of Artificial Sequence: Synthetic oligonucleotide
aaaacuucuuacauucuuu

SEQ ID NO: 503775 - RNA, 19 nt, Artificial Sequence
  Description of Artificial Sequence: Synthetic oligonucleotide
ucuaaugaucucugaucca

SEQ ID NO: 503776 - RNA, 19 nt, Artificial Sequence
  Description of Artificial Sequence: Synthetic oligonucleotide
acauucuuuagugaucugu

SEQ ID NO: 503777 - RNA, 19 nt, Artificial Sequence
  Description of Artificial Sequence: Synthetic oligonucleotide
auaauugagcuuggcauug

SEQ ID NO: 503778 - RNA, 19 nt, Artificial Sequence
  Description of Artificial Sequence: Synthetic oligonucleotide
acauuuaagaguauuggua

SEQ ID NO: 503779 - RNA, 19 nt, Artificial Sequence
  Description of Artificial Sequence: Synthetic oligonucleotide
uuucaaucgccaaguaaau

SEQ ID NO: 503780 - RNA, 19 nt, Artificial Sequence
  Description of Artificial Sequence: Synthetic oligonucleotide
ugacugacacacuuuacua

SEQ ID NO: 503781 - RNA, 19 nt, Artificial Sequence
  Description of Artificial Sequence: Synthetic oligonucleotide
ugacaacugacuucuguaa

SEQ ID NO: 503782 - RNA, 19 nt, Artificial Sequence
  Description of Artificial Sequence: Synthetic oligonucleotide
auacauugugaacuucaca

SEQ ID NO: 503783 - RNA, 19 nt, Artificial Sequence
  Description of Artificial Sequence: Synthetic oligonucleotide
gugcaaacaauaaucucag

SEQ ID NO: 503784 - RNA, 19 nt, Artificial Sequence
  Description of Artificial Sequence: Synthetic oligonucleotide
ucacgucuagaccucgagc

SEQ ID NO: 503785 - RNA, 19 nt, Artificial Sequence
  Description of Artificial Sequence: Synthetic oligonucleotide
ucguuggagacgauuacau

SEQ ID NO: 503786 - RNA, 19 nt, Artificial Sequence
  Description of Artificial Sequence: Synthetic oligonucleotide
cagaucaggaggcacugcc

SEQ ID NO: 503787 - RNA, 19 nt, Artificial Sequence
  Description of Artificial Sequence: Synthetic oligonucleotide
gacauuuaagaguauuggu

SEQ ID NO: 503788 - RNA, 19 nt, Artificial Sequence
  Description of Artificial Sequence: Synthetic oligonucleotide
uaagaguauugguaucuaa

SEQ ID NO: 503789 - RNA, 19 nt, Artificial Sequence
  Description of Artificial Sequence: Synthetic oligonucleotide
ucgcugauucucugcaggg

SEQ ID NO: 503790 - RNA, 19 nt, Artificial Sequence
  Description of Artificial Sequence: Synthetic oligonucleotide
aacccuuguugccugcucu

SEQ ID NO: 503791 - RNA, 19 nt, Artificial Sequence
  Description of Artificial Sequence: Synthetic oligonucleotide
cuaaaacaacauacgucac

SEQ ID NO: 503792 - RNA, 19 nt, Artificial Sequence
  Description of Artificial Sequence: Synthetic oligonucleotide
uuucguuggagacgauuac

SEQ ID NO: 503793 - RNA, 19 nt, Artificial Sequence
  Description of Artificial Sequence: Synthetic oligonucleotide
acauugugaacuucacaga

SEQ ID NO: 503794 - RNA, 19 nt, Artificial Sequence
  Description of Artificial Sequence: Synthetic oligonucleotide
gaauuagauguuucacguc

SEQ ID NO: 503795 - RNA, 19 nt, Artificial Sequence
  Description of Artificial Sequence: Synthetic oligonucleotide
gaggugacuuuccaccuug

SEQ ID NO: 503796 - RNA, 19 nt, Artificial Sequence
  Description of Artificial Sequence: Synthetic oligonucleotide
auagcucuagggaaaguag

SEQ ID NO: 503797 - RNA, 19 nt, Artificial Sequence
  Description of Artificial Sequence: Synthetic oligonucleotide
caaucauucgaccaggugu

SEQ ID NO: 503798 - RNA, 19 nt, Artificial Sequence
  Description of Artificial Sequence: Synthetic oligonucleotide
aguccuucagaagaccguc

SEQ ID NO: 503799 - RNA, 19 nt, Artificial Sequence
  Description of Artificial Sequence: Synthetic oligonucleotide
cacgucuagaccucgagca

SEQ ID NO: 503800 - RNA, 19 nt, Artificial Sequence
  Description of Artificial Sequence: Synthetic oligonucleotide
cuaccugagacucgaugcc

SEQ ID NO: 503801 - RNA, 19 nt, Artificial Sequence
  Description of Artificial Sequence: Synthetic oligonucleotide
aguucguuggcacuuucaa

SEQ ID NO: 503802 - RNA, 19 nt, Artificial Sequence
  Description of Artificial Sequence: Synthetic oligonucleotide
ugguaugaauuuugcaguc

SEQ ID NO: 503803 - RNA, 19 nt, Artificial Sequence
  Description of Artificial Sequence: Synthetic oligonucleotide
guacuuacugacaacugac

SEQ ID NO: 503804 - RNA, 19 nt, Artificial Sequence
  Description of Artificial Sequence: Synthetic oligonucleotide
cggacuauuauccacaaug

SEQ ID NO: 503805 - RNA, 19 nt, Artificial Sequence
  Description of Artificial Sequence: Synthetic oligonucleotide
aguauucgcugauucucug

SEQ ID NO: 503806 - RNA, 19 nt, Artificial Sequence
  Description of Artificial Sequence: Synthetic oligonucleotide
ucacucuucgaagauuugu

SEQ ID NO: 503807 - RNA, 19 nt, Artificial Sequence
  Description of Artificial Sequence: Synthetic oligonucleotide
auacgucacucuucgaaga

SEQ ID NO: 503808 - RNA, 19 nt, Artificial Sequence
  Description of Artificial Sequence: Synthetic oligonucleotide
uacccuuucguuggagacg

SEQ ID NO: 503809 - RNA, 19 nt, Artificial Sequence
  Description of Artificial Sequence: Synthetic oligonucleotide
cuuggcgaucucuagcuuc

SEQ ID NO: 503810 - RNA, 19 nt, Artificial Sequence
  Description of Artificial Sequence: Synthetic oligonucleotide
cauuuaagaguauugguau

SEQ ID NO: 503811 - RNA, 19 nt, Artificial Sequence
  Description of Artificial Sequence: Synthetic oligonucleotide
guuuucgcagacaccgugg

SEQ ID NO: 503812 - RNA, 19 nt, Artificial Sequence
  Description of Artificial Sequence: Synthetic oligonucleotide
uugauucgaagcgccagcc

SEQ ID NO: 503813 - RNA, 19 nt, Artificial Sequence
  Description of Artificial Sequence: Synthetic oligonucleotide
aacagacguggccacgaga

SEQ ID NO: 503814 - RNA, 19 nt, Artificial Sequence
  Description of Artificial Sequence: Synthetic oligonucleotide
cacauaauugagcuuggca

SEQ ID NO: 503815 - RNA, 19 nt, Artificial Sequence
  Description of Artificial Sequence: Synthetic oligonucleotide
gaguauugguaucuaaggu

SEQ ID NO: 503816 - RNA, 19 nt, Artificial Sequence
  Description of Artificial Sequence: Synthetic oligonucleotide
uucguuggagacgauuaca

SEQ ID NO: 503817 - RNA, 19 nt, Artificial Sequence
  Description of Artificial Sequence: Synthetic oligonucleotide
aaggguaagaggcccucau

SEQ ID NO: 503818 - RNA, 19 nt, Artificial Sequence
  Description of Artificial Sequence: Synthetic oligonucleotide
guauucgcugauucucugc

SEQ ID NO: 503819 - RNA, 19 nt, Artificial Sequence
  Description of Artificial Sequence: Synthetic oligonucleotide
ucgaagauuugugacccga

SEQ ID NO: 503820 - RNA, 19 nt, Artificial Sequence
  Description of Artificial Sequence: Synthetic oligonucleotide
guagguuccucugauugug

SEQ ID NO: 503821 - RNA, 19 nt, Artificial Sequence
  Description of Artificial Sequence: Synthetic oligonucleotide
uagaggugacuuuccaccu

SEQ ID NO: 503822 - RNA, 19 nt, Artificial Sequence
  Description of Artificial Sequence: Synthetic oligonucleotide
guuggcacuuucaaucgcc

SEQ ID NO: 503823 - RNA, 19 nt, Artificial Sequence
  Description of Artificial Sequence: Synthetic oligonucleotide
uucgaagauuugugacccg

SEQ ID NO: 503824 - RNA, 19 nt, Artificial Sequence
  Description of Artificial Sequence: Synthetic oligonucleotide
uugguaucuaagguuuaca

SEQ ID NO: 503825 - RNA, 19 nt, Artificial Sequence
  Description of Artificial Sequence: Synthetic oligonucleotide
agggaaguagguuccucug

SEQ ID NO: 503826 - RNA, 19 nt, Artificial Sequence
  Description of Artificial Sequence: Synthetic oligonucleotide
ugaucgcggcuucagagua

SEQ ID NO: 503827 - RNA, 19 nt, Artificial Sequence
  Description of Artificial Sequence: Synthetic oligonucleotide
acuagaugugcccggugca

SEQ ID NO: 503828 - RNA, 19 nt, Artificial Sequence
  Description of Artificial Sequence: Synthetic oligonucleotide
ccaugaagagacaugcaag

SEQ ID NO: 503829 - RNA, 19 nt, Artificial Sequence
  Description of Artificial Sequence: Synthetic oligonucleotide
cuuucguuggagacgauua

SEQ ID NO: 503830 - RNA, 19 nt, Artificial Sequence
  Description of Artificial Sequence: Synthetic oligonucleotide
ugacagauccugacuccug

SEQ ID NO: 503831 - RNA, 19 nt, Artificial Sequence
  Description of Artificial Sequence: Synthetic oligonucleotide
accauaacugucugucggu

SEQ ID NO: 503832 - RNA, 19 nt, Artificial Sequence
  Description of Artificial Sequence: Synthetic oligonucleotide
gguaugaauuuugcagucg

SEQ ID NO: 503833 - RNA, 19 nt, Artificial Sequence
  Description of Artificial Sequence: Synthetic oligonucleotide
aucgacagcagcauccuca

SEQ ID NO: 503834 - RNA, 19 nt, Artificial Sequence
  Description of Artificial Sequence: Synthetic oligonucleotide
ugucucugucauauugauc

SEQ ID NO: 503835 - RNA, 19 nt, Artificial Sequence
  Description of Artificial Sequence: Synthetic oligonucleotide
ggacuauuauccacaaugc

SEQ ID NO: 503836 - RNA, 19 nt, Artificial Sequence
  Description of Artificial Sequence: Synthetic oligonucleotide
uuuuacccuuucguuggag

SEQ ID NO: 503837 - RNA, 19 nt, Artificial Sequence
  Description of Artificial Sequence: Synthetic oligonucleotide
caguacuuacugacaacug

SEQ ID NO: 503838 - RNA, 19 nt, Artificial Sequence
  Description of Artificial Sequence: Synthetic oligonucleotide
caguucucggguuggaguc

SEQ ID NO: 503839 - RNA, 19 nt, Artificial Sequence
  Description of Artificial Sequence: Synthetic oligonucleotide
auucgcugauucucugcag

SEQ ID NO: 503840 - RNA, 19 nt, Artificial Sequence
  Description of Artificial Sequence: Synthetic oligonucleotide
uauugguaucuaagguuua

SEQ ID NO: 503841 - RNA, 19 nt, Artificial Sequence
  Description of Artificial Sequence: Synthetic oligonucleotide
agcuauuggccccucuccu

SEQ ID NO: 503842 - RNA, 19 nt, Artificial Sequence
  Description of Artificial Sequence: Synthetic oligonucleotide
uuucacgucuagaccucga

SEQ ID NO: 503843 - RNA, 19 nt, Artificial Sequence
  Description of Artificial Sequence: Synthetic oligonucleotide
gugacugacacacuuuacu

SEQ ID NO: 503844 - RNA, 19 nt, Artificial Sequence
  Description of Artificial Sequence: Synthetic oligonucleotide
uacgucacucuucgaagau

SEQ ID NO: 503845 - RNA, 19 nt, Artificial Sequence
  Description of Artificial Sequence: Synthetic oligonucleotide
aguguaggcauaacccuug

SEQ ID NO: 503846 - RNA, 19 nt, Artificial Sequence
  Description of Artificial Sequence: Synthetic oligonucleotide
acgucuagaccucgagcag

SEQ ID NO: 503847 - RNA, 19 nt, Artificial Sequence
  Description of Artificial Sequence: Synthetic oligonucleotide
gcgagcuugaucuucugug

SEQ ID NO: 503848 - RNA, 19 nt, Artificial Sequence
  Description of Artificial Sequence: Synthetic oligonucleotide
uucaaucgccaaguaaauc

SEQ ID NO: 503849 - RNA, 19 nt, Artificial Sequence
  Description of Artificial Sequence: Synthetic oligonucleotide
cagcuauuggccccucucc

SEQ ID NO: 503850 - RNA, 19 nt, Artificial Sequence
  Description of Artificial Sequence: Synthetic oligonucleotide
auauaaugacagauccuga

SEQ ID NO: 503851 - RNA, 19 nt, Artificial Sequence
  Description of Artificial Sequence: Synthetic oligonucleotide
gccgcuaacaugucaauca

SEQ ID NO: 503852 - RNA, 19 nt, Artificial Sequence
  Description of Artificial Sequence: Synthetic oligonucleotide
uuaagaguauugguaucua

SEQ ID NO: 503853 - RNA, 19 nt, Artificial Sequence
  Description of Artificial Sequence: Synthetic oligonucleotide
agacguggccacgagaagu

SEQ ID NO: 503854 - RNA, 19 nt, Artificial Sequence
  Description of Artificial Sequence: Synthetic oligonucleotide
gacgauuacaucacaauuu

SEQ ID NO: 503855 - RNA, 19 nt, Artificial Sequence
  Description of Artificial Sequence: Synthetic oligonucleotide
acuacaagaauuagauguu

SEQ ID NO: 503856 - RNA, 19 nt, Artificial Sequence
  Description of Artificial Sequence: Synthetic oligonucleotide
agaucaggaggcacugccg

SEQ ID NO: 503857 - RNA, 19 nt, Artificial Sequence
  Description of Artificial Sequence: Synthetic oligonucleotide
acagacguggccacgagaa

SEQ ID NO: 503858 - RNA, 19 nt, Artificial Sequence
  Description of Artificial Sequence: Synthetic oligonucleotide
aaggcacauaauugagcuu

SEQ ID NO: 503859 - RNA, 19 nt, Artificial Sequence
  Description of Artificial Sequence: Synthetic oligonucleotide
caaugcgcaugaccugugg

SEQ ID NO: 503860 - RNA, 19 nt, Artificial Sequence
  Description of Artificial Sequence: Synthetic oligonucleotide
aaagcucgagcaauuucaa

SEQ ID NO: 503861 - RNA, 19 nt, Artificial Sequence
  Description of Artificial Sequence: Synthetic oligonucleotide
gguuuucgcagacaccgug

SEQ ID NO: 503862 - RNA, 19 nt, Artificial Sequence
  Description of Artificial Sequence: Synthetic oligonucleotide
gacaaagugccuccaagau

SEQ ID NO: 503863 - RNA, 19 nt, Artificial Sequence
  Description of Artificial Sequence: Synthetic oligonucleotide
aacauacgucacucuucga

SEQ ID NO: 503864 - RNA, 19 nt, Artificial Sequence
  Description of Artificial Sequence: Synthetic oligonucleotide
uagguuccucugauuguga

SEQ ID NO: 503865 - RNA, 19 nt, Artificial Sequence
  Description of Artificial Sequence: Synthetic oligonucleotide
gagacgauuacaucacaau

SEQ ID NO: 503866 - RNA, 19 nt, Artificial Sequence
  Description of Artificial Sequence: Synthetic oligonucleotide
auuugugacccgaccacug

SEQ ID NO: 503867 - RNA, 19 nt, Artificial Sequence
  Description of Artificial Sequence: Synthetic oligonucleotide
accugaacuucaaugggcu

SEQ ID NO: 503868 - RNA, 19 nt, Artificial Sequence
  Description of Artificial Sequence: Synthetic oligonucleotide
ugucggucaggacggacua

SEQ ID NO: 503869 - RNA, 19 nt, Artificial Sequence
  Description of Artificial Sequence: Synthetic oligonucleotide
aucucugauccaugauaug

SEQ ID NO: 503870 - RNA, 19 nt, Artificial Sequence
  Description of Artificial Sequence: Synthetic oligonucleotide
aucauucgaccaggugugc

SEQ ID NO: 503871 - RNA, 19 nt, Artificial Sequence
  Description of Artificial Sequence: Synthetic oligonucleotide
ucauucgaccaggugugca

SEQ ID NO: 503872 - RNA, 19 nt, Artificial Sequence
  Description of Artificial Sequence: Synthetic oligonucleotide
uacauucuuuagugaucug

SEQ ID NO: 503873 - RNA, 19 nt, Artificial Sequence
  Description of Artificial Sequence: Synthetic oligonucleotide
ugcgcaugaccugugguuc

SEQ ID NO: 503874 - RNA, 19 nt, Artificial Sequence
  Description of Artificial Sequence: Synthetic oligonucleotide
guuagccgcuaacauguca

SEQ ID NO: 503875 - RNA, 19 nt, Artificial Sequence
  Description of Artificial Sequence: Synthetic oligonucleotide
agccgcuaacaugucaauc

SEQ ID NO: 503876 - RNA, 19 nt, Artificial Sequence
  Description of Artificial Sequence: Synthetic oligonucleotide
cuagaugugcccggugcag

SEQ ID NO: 503877 - RNA, 19 nt, Artificial Sequence
  Description of Artificial Sequence: Synthetic oligonucleotide
cauaacccuuguugccugc

SEQ ID NO: 503878 - RNA, 19 nt, Artificial Sequence
  Description of Artificial Sequence: Synthetic oligonucleotide
gaucucugauccaugauau

SEQ ID NO: 503879 - RNA, 19 nt, Artificial Sequence
  Description of Artificial Sequence: Synthetic oligonucleotide
augaaagaggagaggccag

SEQ ID NO: 503880 - RNA, 19 nt, Artificial Sequence
  Description of Artificial Sequence: Synthetic oligonucleotide
ugauugugaucgcggcuuc

SEQ ID NO: 503881 - RNA, 19 nt, Artificial Sequence
  Description of Artificial Sequence: Synthetic oligonucleotide
ccucucguuggccaaagcc

SEQ ID NO: 503882 - RNA, 19 nt, Artificial Sequence
  Description of Artificial Sequence: Synthetic oligonucleotide
uaacugucugucggucagg

SEQ ID NO: 503883 - RNA, 19 nt, Artificial Sequence
  Description of Artificial Sequence: Synthetic oligonucleotide
auaucgacagcagcauccu

SEQ ID NO: 503884 - RNA, 19 nt, Artificial Sequence
  Description of Artificial Sequence: Synthetic oligonucleotide
augacagauccugacuccu

SEQ ID NO: 503885 - RNA, 19 nt, Artificial Sequence
  Description of Artificial Sequence: Synthetic oligonucleotide
gugacccgaccacuguuag

SEQ ID NO: 503886 - RNA, 19 nt, Artificial Sequence
  Description of Artificial Sequence: Synthetic oligonucleotide
acauugggaacaucacauu

SEQ ID NO: 503887 - RNA, 19 nt, Artificial Sequence
  Description of Artificial Sequence: Synthetic oligonucleotide
uccugcggaccaaagccuc

SEQ ID NO: 503888 - RNA, 19 nt, Artificial Sequence
  Description of Artificial Sequence: Synthetic oligonucleotide
acccuuucguuggagacga

SEQ ID NO: 503889 - RNA, 19 nt, Artificial Sequence
  Description of Artificial Sequence: Synthetic oligonucleotide
ccaaguaaaucuuccgcuc

SEQ ID NO: 503890 - RNA, 19 nt, Artificial Sequence
  Description of Artificial Sequence: Synthetic oligonucleotide
augcgcaugaccugugguu

SEQ ID NO: 503891 - RNA, 19 nt, Artificial Sequence
  Description of Artificial Sequence: Synthetic oligonucleotide
uuuuaugagccuggugauu

SEQ ID NO: 503892 - RNA, 19 nt, Artificial Sequence
  Description of Artificial Sequence: Synthetic oligonucleotide
ccucauaucucuugaaaga

SEQ ID NO: 503893 - RNA, 19 nt, Artificial Sequence
  Description of Artificial Sequence: Synthetic oligonucleotide
gcaagcuguucugcgaugg

SEQ ID NO: 503894 - RNA, 19 nt, Artificial Sequence
  Description of Artificial Sequence: Synthetic oligonucleotide
caaucacuuguuguuccac

SEQ ID NO: 503895 - RNA, 19 nt, Artificial Sequence
  Description of Artificial Sequence: Synthetic oligonucleotide
uguaggcauaacccuuguu

SEQ ID NO: 503896 - RNA, 19 nt, Artificial Sequence
  Description of Artificial Sequence: Synthetic oligonucleotide
cauugccugcagucggggc

SEQ ID NO: 503897 - RNA, 19 nt, Artificial Sequence
  Description of Artificial Sequence: Synthetic oligonucleotide
uaaagccaguucucggguu

SEQ ID NO: 503898 - RNA, 19 nt, Artificial Sequence
  Description of Artificial Sequence: Synthetic oligonucleotide
ggauccugcggaccaaagc

SEQ ID NO: 503899 - RNA, 19 nt, Artificial Sequence
  Description of Artificial Sequence: Synthetic oligonucleotide
guauugguaucuaagguuu

SEQ ID NO: 503900 - RNA, 19 nt, Artificial Sequence
  Description of Artificial Sequence: Synthetic oligonucleotide
cuuagugacugacacacuu

SEQ ID NO: 503901 - RNA, 19 nt, Artificial Sequence
  Description of Artificial Sequence: Synthetic oligonucleotide
ugagucccaaggucuucga

SEQ ID NO: 503902 - RNA, 19 nt, Artificial Sequence
  Description of Artificial Sequence: Synthetic oligonucleotide
cucucguuggccaaagccu

SEQ ID NO: 503903 - RNA, 19 nt, Artificial Sequence
  Description of Artificial Sequence: Synthetic oligonucleotide
uaacccuuguugccugcuc

SEQ ID NO: 503904 - RNA, 19 nt, Artificial Sequence
  Description of Artificial Sequence: Synthetic oligonucleotide
cuucgaaaacuucuuacau

SEQ ID NO: 503905 - RNA, 19 nt, Artificial Sequence
  Description of Artificial Sequence: Synthetic oligonucleotide
guggccacgagaaguuugc

SEQ ID NO: 503906 - RNA, 19 nt, Artificial Sequence
  Description of Artificial Sequence: Synthetic oligonucleotide
gaccacucugagucccaag

SEQ ID NO: 503907 - RNA, 19 nt, Artificial Sequence
  Description of Artificial Sequence: Synthetic oligonucleotide
ggccacgagaaguuugcag

SEQ ID NO: 503908 - RNA, 19 nt, Artificial Sequence
  Description of Artificial Sequence: Synthetic oligonucleotide
ugguuuucgcagacaccgu

SEQ ID NO: 503909 - RNA, 19 nt, Artificial Sequence
  Description of Artificial Sequence: Synthetic oligonucleotide
ugacccgaccacuguuagc

SEQ ID NO: 503910 - RNA, 19 nt, Artificial Sequence
  Description of Artificial Sequence: Synthetic oligonucleotide
ggugacuuuccaccuugcc

SEQ ID NO: 503911 - RNA, 19 nt, Artificial Sequence
  Description of Artificial Sequence: Synthetic oligonucleotide
ucugauggagauggaguuu

SEQ ID NO: 503912 - RNA, 19 nt, Artificial Sequence
  Description of Artificial Sequence: Synthetic oligonucleotide
gagucaugaugacagcuau

SEQ ID NO: 503913 - RNA, 19 nt, Artificial Sequence
  Description of Artificial Sequence: Synthetic oligonucleotide
auaaugguuggggcagcug

SEQ ID NO: 503914 - RNA, 19 nt, Artificial Sequence
  Description of Artificial Sequence: Synthetic oligonucleotide
gacggacuauuauccacaa

SEQ ID NO: 503915 - RNA, 19 nt, Artificial Sequence
  Description of Artificial Sequence: Synthetic oligonucleotide
uauuggccccucuccuucu

SEQ ID NO: 503916 - RNA, 19 nt, Artificial Sequence
  Description of Artificial Sequence: Synthetic oligonucleotide
agcaacagacguggccacg

SEQ ID NO: 503917 - RNA, 19 nt, Artificial Sequence
  Description of Artificial Sequence: Synthetic oligonucleotide
aacaugcucucaaucuguu

SEQ ID NO: 503918 - RNA, 19 nt, Artificial Sequence
  Description of Artificial Sequence: Synthetic oligonucleotide
cauucgaccaggugugcaa

SEQ ID NO: 503919 - RNA, 19 nt, Artificial Sequence
  Description of Artificial Sequence: Synthetic oligonucleotide
guaaagccaguucucgggu

SEQ ID NO: 503920 - RNA, 19 nt, Artificial Sequence
  Description of Artificial Sequence: Synthetic oligonucleotide
aggugacuuuccaccuugc

SEQ ID NO: 503921 - RNA, 19 nt, Artificial Sequence
  Description of Artificial Sequence: Synthetic oligonucleotide
augucuaaacaugggcaaa

SEQ ID NO: 503922 - RNA, 19 nt, Artificial Sequence
  Description of Artificial Sequence: Synthetic oligonucleotide
uguuagccgcuaacauguc

SEQ ID NO: 503923 - RNA, 19 nt, Artificial Sequence
  Description of Artificial Sequence: Synthetic oligonucleotide
acccgaccacuguuagccg

SEQ ID NO: 503924 - RNA, 19 nt, Artificial Sequence
  Description of Artificial Sequence: Synthetic oligonucleotide
gcucgagcaauuucaagaa

SEQ ID NO: 503925 - RNA, 19 nt, Artificial Sequence
  Description of Artificial Sequence: Synthetic oligonucleotide
augacagcuauuggccccu

SEQ ID NO: 503926 - RNA, 19 nt, Artificial Sequence
  Description of Artificial Sequence: Synthetic oligonucleotide
uccucucguuggccaaagc

SEQ ID NO: 503927 - RNA, 19 nt, Artificial Sequence
  Description of Artificial Sequence: Synthetic oligonucleotide
ucuuggcgaucucuagcuu

SEQ ID NO: 503928 - RNA, 19 nt, Artificial Sequence
  Description of Artificial Sequence: Synthetic oligonucleotide
agaggugacuuuccaccuu

SEQ ID NO: 503929 - RNA, 19 nt, Artificial Sequence
  Description of Artificial Sequence: Synthetic oligonucleotide
uacugacaacugacuucug

SEQ ID NO: 503930 - RNA, 19 nt, Artificial Sequence
  Description of Artificial Sequence: Synthetic oligonucleotide
ucucggcauugccugcagu

SEQ ID NO: 503931 - RNA, 19 nt, Artificial Sequence
  Description of Artificial Sequence: Synthetic oligonucleotide
cgaugguuuucgcagacac

SEQ ID NO: 503932 - RNA, 19 nt, Artificial Sequence
  Description of Artificial Sequence: Synthetic oligonucleotide
ucggucaggacggacuauu

SEQ ID NO: 503933 - RNA, 19 nt, Artificial Sequence
  Description of Artificial Sequence: Synthetic oligonucleotide
gauuugugacccgaccacu

SEQ ID NO: 503934 - RNA, 19 nt, Artificial Sequence
  Description of Artificial Sequence: Synthetic oligonucleotide
caacagacguggccacgag

SEQ ID NO: 503935 - RNA, 19 nt, Artificial Sequence
  Description of Artificial Sequence: Synthetic oligonucleotide
gacaccgugggagccagaa

SEQ ID NO: 503936 - RNA, 19 nt, Artificial Sequence
  Description of Artificial Sequence: Synthetic oligonucleotide
gaguauucgcugauucucu

SEQ ID NO: 503937 - RNA, 19 nt, Artificial Sequence
  Description of Artificial Sequence: Synthetic oligonucleotide
gcauaacccuuguugccug

SEQ ID NO: 503938 - RNA, 19 nt, Artificial Sequence
  Description of Artificial Sequence: Synthetic oligonucleotide
gucuagaccucgagcagca

SEQ ID NO: 503939 - RNA, 19 nt, Artificial Sequence
  Description of Artificial Sequence: Synthetic oligonucleotide
uccgccuucugcuggucuu

SEQ ID NO: 503940 - RNA, 19 nt, Artificial Sequence
  Description of Artificial Sequence: Synthetic oligonucleotide
cugauccaugauaugucua

SEQ ID NO: 503941 - RNA, 19 nt, Artificial Sequence
  Description of Artificial Sequence: Synthetic oligonucleotide
gguaucuaagguuuacauu

SEQ ID NO: 503942 - RNA, 19 nt, Artificial Sequence
  Description of Artificial Sequence: Synthetic oligonucleotide
gauugugaucgcggcuuca

SEQ ID NO: 503943 - RNA, 19 nt, Artificial Sequence
  Description of Artificial Sequence: Synthetic oligonucleotide
uagccgcuaacaugucaau

SEQ ID NO: 503944 - RNA, 19 nt, Artificial Sequence
  Description of Artificial Sequence: Synthetic oligonucleotide
cagguuccauucuuaaagu

SEQ ID NO: 503945 - RNA, 19 nt, Artificial Sequence
  Description of Artificial Sequence: Synthetic oligonucleotide
gcaguacuuacugacaacu

SEQ ID NO: 503946 - RNA, 19 nt, Artificial Sequence
  Description of Artificial Sequence: Synthetic oligonucleotide
cagaguauucgcugauucu

SEQ ID NO: 503947 - RNA, 19 nt, Artificial Sequence
  Description of Artificial Sequence: Synthetic oligonucleotide
gaccucgagcagcaacaga

SEQ ID NO: 503948 - RNA, 19 nt, Artificial Sequence
  Description of Artificial Sequence: Synthetic oligonucleotide
caggacggacuauuaucca

SEQ ID NO: 503949 - RNA, 19 nt, Artificial Sequence
  Description of Artificial Sequence: Synthetic oligonucleotide
cagcuguaauuuacuacaa

SEQ ID NO: 503950 - RNA, 19 nt, Artificial Sequence
  Description of Artificial Sequence: Synthetic oligonucleotide
auucgaccaggugugcaaa

SEQ ID NO: 503951 - RNA, 19 nt, Artificial Sequence
  Description of Artificial Sequence: Synthetic oligonucleotide
ccuucagaagaccgucagc

SEQ ID NO: 503952 - RNA, 19 nt, Artificial Sequence
  Description of Artificial Sequence: Synthetic oligonucleotide
acggacuauuauccacaau

SEQ ID NO: 503953 - RNA, 19 nt, Artificial Sequence
  Description of Artificial Sequence: Synthetic oligonucleotide
acaaugcgcaugaccugug

SEQ ID NO: 503954 - RNA, 19 nt, Artificial Sequence
  Description of Artificial Sequence: Synthetic oligonucleotide
gugaucgcggcuucagagu

SEQ ID NO: 503955 - RNA, 19 nt, Artificial Sequence
  Description of Artificial Sequence: Synthetic oligonucleotide
cgaucucuagcuucucggc

SEQ ID NO: 503956 - RNA, 19 nt, Artificial Sequence
  Description of Artificial Sequence: Synthetic oligonucleotide
cugccgugccugacaauuc

SEQ ID NO: 503957 - RNA, 19 nt, Artificial Sequence
  Description of Artificial Sequence: Synthetic oligonucleotide
uucucggguuggagucaug

SEQ ID NO: 503958 - RNA, 19 nt, Artificial Sequence
  Description of Artificial Sequence: Synthetic oligonucleotide
guuggggcagcuguaauuu

SEQ ID NO: 503959 - RNA, 19 nt, Artificial Sequence
  Description of Artificial Sequence: Synthetic oligonucleotide
gucuuacuuuacaauacau

SEQ ID NO: 503960 - RNA, 19 nt, Artificial Sequence
  Description of Artificial Sequence: Synthetic oligonucleotide
aggauccugcggaccaaag

SEQ ID NO: 503961 - RNA, 19 nt, Artificial Sequence
  Description of Artificial Sequence: Synthetic oligonucleotide
gcaugcuccugcuuaucca

SEQ ID NO: 503962 - RNA, 19 nt, Artificial Sequence
  Description of Artificial Sequence: Synthetic oligonucleotide
augugcccggugcagccau

SEQ ID NO: 503963 - RNA, 19 nt, Artificial Sequence
  Description of Artificial Sequence: Synthetic oligonucleotide
guucguuggcacuuucaau

SEQ ID NO: 503964 - RNA, 19 nt, Artificial Sequence
  Description of Artificial Sequence: Synthetic oligonucleotide
cucgagcagcaacagacgu

SEQ ID NO: 503965 - RNA, 19 nt, Artificial Sequence
  Description of Artificial Sequence: Synthetic oligonucleotide
ugcggaccaaagccuccau

SEQ ID NO: 503966 - RNA, 19 nt, Artificial Sequence
  Description of Artificial Sequence: Synthetic oligonucleotide
ggucuucgaaaacuucuua

SEQ ID NO: 503967 - RNA, 19 nt, Artificial Sequence
  Description of Artificial Sequence: Synthetic oligonucleotide
cagauccugacuccugaua

SEQ ID NO: 503968 - RNA, 19 nt, Artificial Sequence
  Description of Artificial Sequence: Synthetic oligonucleotide
cccgaccacuguuagccgc

SEQ ID NO: 503969 - RNA, 19 nt, Artificial Sequence
  Description of Artificial Sequence: Synthetic oligonucleotide
cacaaugcgcaugaccugu

SEQ ID NO: 503970 - RNA, 19 nt, Artificial Sequence
  Description of Artificial Sequence: Synthetic oligonucleotide
ggucugauggagauggagu

SEQ ID NO: 503971 - RNA, 19 nt, Artificial Sequence
  Description of Artificial Sequence: Synthetic oligonucleotide
ggagucaugaugacagcua

SEQ ID NO: 503972 - RNA, 19 nt, Artificial Sequence
  Description of Artificial Sequence: Synthetic oligonucleotide
caaucgccaaguaaaucuu

SEQ ID NO: 503973 - RNA, 19 nt, Artificial Sequence
  Description of Artificial Sequence: Synthetic oligonucleotide
uggccacgagaaguuugca

SEQ ID NO: 503974 - RNA, 19 nt, Artificial Sequence
  Description of Artificial Sequence: Synthetic oligonucleotide
aucgcggcuucagaguauu

SEQ ID NO: 503975 - RNA, 19 nt, Artificial Sequence
  Description of Artificial Sequence: Synthetic oligonucleotide
gaugugcccggugcagcca

SEQ ID NO: 503976 - RNA, 19 nt, Artificial Sequence
  Description of Artificial Sequence: Synthetic oligonucleotide
cgaagauuugugacccgac

SEQ ID NO: 503977 - RNA, 19 nt, Artificial Sequence
  Description of Artificial Sequence: Synthetic oligonucleotide
cugauugugaucgcggcuu

SEQ ID NO: 503978 - RNA, 19 nt, Artificial Sequence
  Description of Artificial Sequence: Synthetic oligonucleotide
gcgcuuuaaugaugucacc

SEQ ID NO: 503979 - RNA, 19 nt, Artificial Sequence
  Description of Artificial Sequence: Synthetic oligonucleotide
acgucacucuucgaagauu

SEQ ID NO: 503980 - RNA, 19 nt, Artificial Sequence
  Description of Artificial Sequence: Synthetic oligonucleotide
cuugccgucugugggaagu

SEQ ID NO: 503981 - RNA, 19 nt, Artificial Sequence
  Description of Artificial Sequence: Synthetic oligonucleotide
ccacaaugcgcaugaccug

SEQ ID NO: 503982 - RNA, 19 nt, Artificial Sequence
  Description of Artificial Sequence: Synthetic oligonucleotide
ucuagaccucgagcagcaa

SEQ ID NO: 503983 - RNA, 19 nt, Artificial Sequence
  Description of Artificial Sequence: Synthetic oligonucleotide
ggcauaacccuuguugccu

SEQ ID NO: 503984 - RNA, 19 nt, Artificial Sequence
  Description of Artificial Sequence: Synthetic oligonucleotide
auaccuccaugaagagaca

SEQ ID NO: 503985 - RNA, 19 nt, Artificial Sequence
  Description of Artificial Sequence: Synthetic oligonucleotide
gcaacagacguggccacga

SEQ ID NO: 503986 - RNA, 19 nt, Artificial Sequence
  Description of Artificial Sequence: Synthetic oligonucleotide
ccaagauguuuauaauacu

SEQ ID NO: 503987 - RNA, 19 nt, Artificial Sequence
  Description of Artificial Sequence: Synthetic oligonucleotide
cagaccacucugaguccca

SEQ ID NO: 503988 - RNA, 19 nt, Artificial Sequence
  Description of Artificial Sequence: Synthetic oligonucleotide
cgucuagaccucgagcagc

SEQ ID NO: 503989 - RNA, 19 nt, Artificial Sequence
  Description of Artificial Sequence: Synthetic oligonucleotide
ucgcggcuucagaguauuc

SEQ ID NO: 503990 - RNA, 19 nt, Artificial Sequence
  Description of Artificial Sequence: Synthetic oligonucleotide
caaggguaagaggcccuca

SEQ ID NO: 503991 - RNA, 19 nt, Artificial Sequence
  Description of Artificial Sequence: Synthetic oligonucleotide
cguuggagacgauuacauc

SEQ ID NO: 503992 - RNA, 19 nt, Artificial Sequence
  Description of Artificial Sequence: Synthetic oligonucleotide
gacagcuauuggccccucu

SEQ ID NO: 503993 - RNA, 19 nt, Artificial Sequence
  Description of Artificial Sequence: Synthetic oligonucleotide
cgagcuugaucuucuguga

SEQ ID NO: 503994 - RNA, 19 nt, Artificial Sequence
  Description of Artificial Sequence: Synthetic oligonucleotide
gugaucuguaaagccaguu

SEQ ID NO: 503995 - RNA, 19 nt, Artificial Sequence
  Description of Artificial Sequence: Synthetic oligonucleotide
gcguugguggcuugcugca

SEQ ID NO: 503996 - RNA, 19 nt, Artificial Sequence
  Description of Artificial Sequence: Synthetic oligonucleotide
guguaggcauaacccuugu

SEQ ID NO: 503997 - RNA, 19 nt, Artificial Sequence
  Description of Artificial Sequence: Synthetic oligonucleotide
gacguggccacgagaaguu

SEQ ID NO: 503998 - RNA, 19 nt, Artificial Sequence
  Description of Artificial Sequence: Synthetic oligonucleotide
cgauuacaucacaauuuca

SEQ ID NO: 503999 - RNA, 19 nt, Artificial Sequence
  Description of Artificial Sequence: Synthetic oligonucleotide
cucgagcaauuucaagaau

SEQ ID NO: 504000 - RNA, 19 nt, Artificial Sequence
  Description of Artificial Sequence: Synthetic oligonucleotide
gcauugauucgaagcgcca

SEQ ID NO: 504001 - RNA, 19 nt, Artificial Sequence
  Description of Artificial Sequence: Synthetic oligonucleotide
ggucaggacggacuauuau

SEQ ID NO: 504002 - RNA, 19 nt, Artificial Sequence
  Description of Artificial Sequence: Synthetic oligonucleotide
cauucaacacagaguccuu

SEQ ID NO: 504003 - RNA, 19 nt, Artificial Sequence
  Description of Artificial Sequence: Synthetic oligonucleotide
gcucuagggaaaguagacu

SEQ ID NO: 504004 - RNA, 19 nt, Artificial Sequence
  Description of Artificial Sequence: Synthetic oligonucleotide
cucguuggccaaagccugu

SEQ ID NO: 504005 - RNA, 19 nt, Artificial Sequence
  Description of Artificial Sequence: Synthetic oligonucleotide
caggucugauggagaugga

SEQ ID NO: 504006 - RNA, 19 nt, Artificial Sequence
  Description of Artificial Sequence: Synthetic oligonucleotide
gcgcaugaccugugguuca

SEQ ID NO: 504007 - RNA, 19 nt, Artificial Sequence
  Description of Artificial Sequence: Synthetic oligonucleotide
ugacagcuauuggccccuc

SEQ ID NO: 504008 - RNA, 19 nt, Artificial Sequence
  Description of Artificial Sequence: Synthetic oligonucleotide
ccacgagaaguuugcaggu

SEQ ID NO: 504009 - RNA, 19 nt, Artificial Sequence
  Description of Artificial Sequence: Synthetic oligonucleotide
ggaucaguguggggcagua

SEQ ID NO: 504010 - RNA, 19 nt, Artificial Sequence
  Description of Artificial Sequence: Synthetic oligonucleotide
gaucgcggcuucagaguau

SEQ ID NO: 504011 - RNA, 19 nt, Artificial Sequence
  Description of Artificial Sequence: Synthetic oligonucleotide
gcuauuggccccucuccuu

SEQ ID NO: 504012 - RNA, 19 nt, Artificial Sequence
  Description of Artificial Sequence: Synthetic oligonucleotide
gcggaccaaagccuccaua

SEQ ID NO: 504013 - RNA, 19 nt, Artificial Sequence
  Description of Artificial Sequence: Synthetic oligonucleotide
gccugacaauucaagcgcu

SEQ ID NO: 504014 - RNA, 19 nt, Artificial Sequence
  Description of Artificial Sequence: Synthetic oligonucleotide
ccuugccgucugugggaag

SEQ ID NO: 504015 - RNA, 19 nt, Artificial Sequence
  Description of Artificial Sequence: Synthetic oligonucleotide
cgaccaggugugcaaacaa

SEQ ID NO: 504016 - RNA, 19 nt, Artificial Sequence
  Description of Artificial Sequence: Synthetic oligonucleotide
cgaaaacuucuuacauucu

SEQ ID NO: 504017 - RNA, 19 nt, Artificial Sequence
  Description of Artificial Sequence: Synthetic oligonucleotide
cacgagaaguuugcagguu

SEQ ID NO: 504018 - RNA, 19 nt, Artificial Sequence
  Description of Artificial Sequence: Synthetic oligonucleotide
caucuaccugagacucgau

SEQ ID NO: 504019 - RNA, 19 nt, Artificial Sequence
  Description of Artificial Sequence: Synthetic oligonucleotide
gugcccggugcagccaugu

SEQ ID NO: 504020 - RNA, 19 nt, Artificial Sequence
  Description of Artificial Sequence: Synthetic oligonucleotide
cgucugugggaagucauua

SEQ ID NO: 504021 - RNA, 19 nt, Artificial Sequence
  Description of Artificial Sequence: Synthetic oligonucleotide
cggaucaguucuucuuuua

SEQ ID NO: 504022 - RNA, 19 nt, Artificial Sequence
  Description of Artificial Sequence: Synthetic oligonucleotide
ccgcuaacaugucaaucau

SEQ ID NO: 504023 - RNA, 19 nt, Artificial Sequence
  Description of Artificial Sequence: Synthetic oligonucleotide
ccgaccacuguuagccgcu

SEQ ID NO: 504024 - RNA, 19 nt, Artificial Sequence
  Description of Artificial Sequence: Synthetic oligonucleotide
ccuuucguuggagacgauu

SEQ ID NO: 504025 - RNA, 19 nt, Artificial Sequence
  Description of Artificial Sequence: Synthetic oligonucleotide
gucggucaggacggacuau

SEQ ID NO: 504026 - RNA, 19 nt, Artificial Sequence
  Description of Artificial Sequence: Synthetic oligonucleotide
cggucaggacggacuauua

SEQ ID NO: 504027 - RNA, 19 nt, Artificial Sequence
  Description of Artificial Sequence: Synthetic oligonucleotide
cacugccgugccugacaau

SEQ ID NO: 504028 - RNA, 19 nt, Artificial Sequence
  Description of Artificial Sequence: Synthetic oligonucleotide
gccaguucguuggcacuuu

SEQ ID NO: 504029 - RNA, 19 nt, Artificial Sequence
  Description of Artificial Sequence: Synthetic oligonucleotide
cgaccacuguuagccgcua

SEQ ID NO: 504030 - RNA, 19 nt, Artificial Sequence
  Description of Artificial Sequence: Synthetic oligonucleotide
cccuuucguuggagacgau

SEQ ID NO: 504031 - RNA, 19 nt, Artificial Sequence
  Description of Artificial Sequence: Synthetic oligonucleotide
aacuauaugacauuaaggc

SEQ ID NO: 504032 - RNA, 19 nt, Artificial Sequence
  Description of Artificial Sequence: Synthetic oligonucleotide
aacaauguaaauccuaacc

SEQ ID NO: 504033 - RNA, 19 nt, Artificial Sequence
  Description of Artificial Sequence: Synthetic oligonucleotide
aaguacuucauacacgacc

SEQ ID NO: 504034 - RNA, 19 nt, Artificial Sequence
  Description of Artificial Sequence: Synthetic oligonucleotide
agaagcauaaaauuuacuc

SEQ ID NO: 504035 - RNA, 19 nt, Artificial Sequence
  Description of Artificial Sequence: Synthetic oligonucleotide
aaacuugaaucauagaaug

SEQ ID NO: 504036 - RNA, 19 nt, Artificial Sequence
  Description of Artificial Sequence: Synthetic oligonucleotide
uuuaucuugaggcaaguag

SEQ ID NO: 504037 - RNA, 19 nt, Artificial Sequence
  Description of Artificial Sequence: Synthetic oligonucleotide
acaauguaaauccuaaccg

SEQ ID NO: 504038 - RNA, 19 nt, Artificial Sequence
  Description of Artificial Sequence: Synthetic oligonucleotide
aauguaauggucucggucu

SEQ ID NO: 504039 - RNA, 19 nt, Artificial Sequence
  Description of Artificial Sequence: Synthetic oligonucleotide
augacauuaaggcacagac

SEQ ID NO: 504040 - RNA, 19 nt, Artificial Sequence
  Description of Artificial Sequence: Synthetic oligonucleotide
uuuaagaggguccauagcu

SEQ ID NO: 504041 - RNA, 19 nt, Artificial Sequence
  Description of Artificial Sequence: Synthetic oligonucleotide
uuuuagagacuauacagag

SEQ ID NO: 504042 - RNA, 19 nt, Artificial Sequence
  Description of Artificial Sequence: Synthetic oligonucleotide
cuauaugacauuaaggcac

SEQ ID NO: 504043 - RNA, 19 nt, Artificial Sequence
  Description of Artificial Sequence: Synthetic oligonucleotide
aagcauaaaauuuacucca

SEQ ID NO: 504044 - RNA, 19 nt, Artificial Sequence
  Description of Artificial Sequence: Synthetic oligonucleotide
aacgggaaaacaaaucucc

SEQ ID NO: 504045 - RNA, 19 nt, Artificial Sequence
  Description of Artificial Sequence: Synthetic oligonucleotide
aaaauugccuucgccaucc

SEQ ID NO: 504046 - RNA, 19 nt, Artificial Sequence
  Description of Artificial Sequence: Synthetic oligonucleotide
ugaaugaucagucgagggg

SEQ ID NO: 504047 - RNA, 19 nt, Artificial Sequence
  Description of Artificial Sequence: Synthetic oligonucleotide
uuuaauguacggaucacac

SEQ ID NO: 504048 - RNA, 19 nt, Artificial Sequence
  Description of Artificial Sequence: Synthetic oligonucleotide
ucccauaucugaaugauca

SEQ ID NO: 504049 - RNA, 19 nt, Artificial Sequence
  Description of Artificial Sequence: Synthetic oligonucleotide
uuuccggucgguuuggugg

SEQ ID NO: 504050 - RNA, 19 nt, Artificial Sequence
  Description of Artificial Sequence: Synthetic oligonucleotide
uauccgagaaaucugucag

SEQ ID NO: 504051 - RNA, 19 nt, Artificial Sequence
  Description of Artificial Sequence: Synthetic oligonucleotide
ucuguuugaucaaugcucc

SEQ ID NO: 504052 - RNA, 19 nt, Artificial Sequence
  Description of Artificial Sequence: Synthetic oligonucleotide
uccaagauaacguccuugg

SEQ ID NO: 504053 - RNA, 19 nt, Artificial Sequence
  Description of Artificial Sequence: Synthetic oligonucleotide
aaauucauccagaugguag

SEQ ID NO: 504054 - RNA, 19 nt, Artificial Sequence
  Description of Artificial Sequence: Synthetic oligonucleotide
auauccuccccugugaugc

SEQ ID NO: 504055 - RNA, 19 nt, Artificial Sequence
  Description of Artificial Sequence: Synthetic oligonucleotide
gauagugcgauguaaguca

SEQ ID NO: 504056 - RNA, 19 nt, Artificial Sequence
  Description of Artificial Sequence: Synthetic oligonucleotide
agucucguccuccauaucg

SEQ ID NO: 504057 - RNA, 19 nt, Artificial Sequence
  Description of Artificial Sequence: Synthetic oligonucleotide
aauaguucggcaaugagua

SEQ ID NO: 504058 - RNA, 19 nt, Artificial Sequence
  Description of Artificial Sequence: Synthetic oligonucleotide
aaauccuaaccgugcauuc

SEQ ID NO: 504059 - RNA, 19 nt, Artificial Sequence
  Description of Artificial Sequence: Synthetic oligonucleotide
uacucugaaaauaagcuua

SEQ ID NO: 504060 - RNA, 19 nt, Artificial Sequence
  Description of Artificial Sequence: Synthetic oligonucleotide
ugcgauguaagucaaguuc

SEQ ID NO: 504061 - RNA, 19 nt, Artificial Sequence
  Description of Artificial Sequence: Synthetic oligonucleotide
cacacgaugaaucgcaugg

SEQ ID NO: 504062 - RNA, 19 nt, Artificial Sequence
  Description of Artificial Sequence: Synthetic oligonucleotide
aguucauacauucugccga

SEQ ID NO: 504063 - RNA, 19 nt, Artificial Sequence
  Description of Artificial Sequence: Synthetic oligonucleotide
auugauaaauaguucggca

SEQ ID NO: 504064 - RNA, 19 nt, Artificial Sequence
  Description of Artificial Sequence: Synthetic oligonucleotide
ugaucacccacuugaaccg

SEQ ID NO: 504065 - RNA, 19 nt, Artificial Sequence
  Description of Artificial Sequence: Synthetic oligonucleotide
auguacggaucacacaggc

SEQ ID NO: 504066 - RNA, 19 nt, Artificial Sequence
  Description of Artificial Sequence: Synthetic oligonucleotide
uaucugaaugaucagucga

SEQ ID NO: 504067 - RNA, 19 nt, Artificial Sequence
  Description of Artificial Sequence: Synthetic oligonucleotide
aaagugcugugcaaagucc

SEQ ID NO: 504068 - RNA, 19 nt, Artificial Sequence
  Description of Artificial Sequence: Synthetic oligonucleotide
aaauuuacuccaccaguca

SEQ ID NO: 504069 - RNA, 19 nt, Artificial Sequence
  Description of Artificial Sequence: Synthetic oligonucleotide
aguucacagucauagaucu

SEQ ID NO: 504070 - RNA, 19 nt, Artificial Sequence
  Description of Artificial Sequence: Synthetic oligonucleotide
uugaaucauagaauggaga

SEQ ID NO: 504071 - RNA, 19 nt, Artificial Sequence
  Description of Artificial Sequence: Synthetic oligonucleotide
acaauuugaaaguauccga

SEQ ID NO: 504072 - RNA, 19 nt, Artificial Sequence
  Description of Artificial Sequence: Synthetic oligonucleotide
acuggauugagaguguugg

SEQ ID NO: 504073 - RNA, 19 nt, Artificial Sequence
  Description of Artificial Sequence: Synthetic oligonucleotide
cuuagcuuuaagagggucc

SEQ ID NO: 504074 - RNA, 19 nt, Artificial Sequence
  Description of Artificial Sequence: Synthetic oligonucleotide
aauccuaaccgugcauucc

SEQ ID NO: 504075 - RNA, 19 nt, Artificial Sequence
  Description of Artificial Sequence: Synthetic oligonucleotide
aaauaguucggcaaugagu

SEQ ID NO: 504076 - RNA, 19 nt, Artificial Sequence
  Description of Artificial Sequence: Synthetic oligonucleotide
uuuagagacuauacagagc

SEQ ID NO: 504077 - RNA, 19 nt, Artificial Sequence
  Description of Artificial Sequence: Synthetic oligonucleotide
cuugaaucauagaauggag

SEQ ID NO: 504078 - RNA, 19 nt, Artificial Sequence
  Description of Artificial Sequence: Synthetic oligonucleotide
uguaaauccuaaccgugca

SEQ ID NO: 504079 - RNA, 19 nt, Artificial Sequence
  Description of Artificial Sequence: Synthetic oligonucleotide
ucauagaucuugaguuugg

SEQ ID NO: 504080 - RNA, 19 nt, Artificial Sequence
  Description of Artificial Sequence: Synthetic oligonucleotide
uuaaaauugccuucgccau

SEQ ID NO: 504081 - RNA, 19 nt, Artificial Sequence
  Description of Artificial Sequence: Synthetic oligonucleotide
ugauaaauaguucggcaau

SEQ ID NO: 504082 - RNA, 19 nt, Artificial Sequence
  Description of Artificial Sequence: Synthetic oligonucleotide
ucuccaguuaaaauugccu

SEQ ID NO: 504083 - RNA, 19 nt, Artificial Sequence
  Description of Artificial Sequence: Synthetic oligonucleotide
aauuuacuccaccagucaa

SEQ ID NO: 504084 - RNA, 19 nt, Artificial Sequence
  Description of Artificial Sequence: Synthetic oligonucleotide
uaaccgugcauuccugugg

SEQ ID NO: 504085 - RNA, 19 nt, Artificial Sequence
  Description of Artificial Sequence: Synthetic oligonucleotide
uuuagacccgcuaggaacu

SEQ ID NO: 504086 - RNA, 19 nt, Artificial Sequence
  Description of Artificial Sequence: Synthetic oligonucleotide
uacauucugccgaacacug

SEQ ID NO: 504087 - RNA, 19 nt, Artificial Sequence
  Description of Artificial Sequence: Synthetic oligonucleotide
ucauacauucugccgaaca

SEQ ID NO: 504088 - RNA, 19 nt, Artificial Sequence
  Description of Artificial Sequence: Synthetic oligonucleotide
guuuagacccgcuaggaac

SEQ ID NO: 504089 - RNA, 19 nt, Artificial Sequence
  Description of Artificial Sequence: Synthetic oligonucleotide
aaacgggaaaacaaaucuc

SEQ ID NO: 504090 - RNA, 19 nt, Artificial Sequence
  Description of Artificial Sequence: Synthetic oligonucleotide
uccaaauugcacuucucug

SEQ ID NO: 504091 - RNA, 19 nt, Artificial Sequence
  Description of Artificial Sequence: Synthetic oligonucleotide
aaccgugcauuccuguggg

SEQ ID NO: 504092 - RNA, 19 nt, Artificial Sequence
  Description of Artificial Sequence: Synthetic oligonucleotide
aacuugaaucauagaaugg

SEQ ID NO: 504093 - RNA, 19 nt, Artificial Sequence
  Description of Artificial Sequence: Synthetic oligonucleotide
uguuugaucaaugcuccag

SEQ ID NO: 504094 - RNA, 19 nt, Artificial Sequence
  Description of Artificial Sequence: Synthetic oligonucleotide
acuugaaucauagaaugga

SEQ ID NO: 504095 - RNA, 19 nt, Artificial Sequence
  Description of Artificial Sequence: Synthetic oligonucleotide
guccugagaauauggaggg

SEQ ID NO: 504096 - RNA, 19 nt, Artificial Sequence
  Description of Artificial Sequence: Synthetic oligonucleotide
ugacauuaaggcacagacc

SEQ ID NO: 504097 - RNA, 19 nt, Artificial Sequence
  Description of Artificial Sequence: Synthetic oligonucleotide
uggugggucaaguuugggg

SEQ ID NO: 504098 - RNA, 19 nt, Artificial Sequence
  Description of Artificial Sequence: Synthetic oligonucleotide
gaauguaauggucucgguc

SEQ ID NO: 504099 - RNA, 19 nt, Artificial Sequence
  Description of Artificial Sequence: Synthetic oligonucleotide
cugaaugaucagucgaggg

SEQ ID NO: 504100 - RNA, 19 nt, Artificial Sequence
  Description of Artificial Sequence: Synthetic oligonucleotide
auguaaauccuaaccgugc

SEQ ID NO: 504101 - RNA, 19 nt, Artificial Sequence
  Description of Artificial Sequence: Synthetic oligonucleotide
uauuccagaugaucacacg

SEQ ID NO: 504102 - RNA, 19 nt, Artificial Sequence
  Description of Artificial Sequence: Synthetic oligonucleotide
aacgauuucuuccuccuuu

SEQ ID NO: 504103 - RNA, 19 nt, Artificial Sequence
  Description of Artificial Sequence: Synthetic oligonucleotide
aauaagcuuaaaguuuaga

SEQ ID NO: 504104 - RNA, 19 nt, Artificial Sequence
  Description of Artificial Sequence: Synthetic oligonucleotide
auugucccauaucugaaug

SEQ ID NO: 504105 - RNA, 19 nt, Artificial Sequence
  Description of Artificial Sequence: Synthetic oligonucleotide
ucuccuaccacagaugggu

SEQ ID NO: 504106 - RNA, 19 nt, Artificial Sequence
  Description of Artificial Sequence: Synthetic oligonucleotide
uaauuucccaaacuugaau

SEQ ID NO: 504107 - RNA, 19 nt, Artificial Sequence
  Description of Artificial Sequence: Synthetic oligonucleotide
aucgcauggucuugcaugg

SEQ ID NO: 504108 - RNA, 19 nt, Artificial Sequence
  Description of Artificial Sequence: Synthetic oligonucleotide
ugugaggcaacucuguauu

SEQ ID NO: 504109 - RNA, 19 nt, Artificial Sequence
  Description of Artificial Sequence: Synthetic oligonucleotide
ggaaauccagccuuugacg

SEQ ID NO: 504110 - RNA, 19 nt, Artificial Sequence
  Description of Artificial Sequence: Synthetic oligonucleotide
gauaaauaguucggcaaug

SEQ ID NO: 504111 - RNA, 19 nt, Artificial Sequence
  Description of Artificial Sequence: Synthetic oligonucleotide
auaacguccuugguauucc

SEQ ID NO: 504112 - RNA, 19 nt, Artificial Sequence
  Description of Artificial Sequence: Synthetic oligonucleotide
uacuccaccagucaacgau

SEQ ID NO: 504113 - RNA, 19 nt, Artificial Sequence
  Description of Artificial Sequence: Synthetic oligonucleotide
aucggauucugcuuccauc

SEQ ID NO: 504114 - RNA, 19 nt, Artificial Sequence
  Description of Artificial Sequence: Synthetic oligonucleotide
aaugcuccagaaaugcucu

SEQ ID NO: 504115 - RNA, 19 nt, Artificial Sequence
  Description of Artificial Sequence: Synthetic oligonucleotide
ucauuaugcauuuggccuc

SEQ ID NO: 504116 - RNA, 19 nt, Artificial Sequence
  Description of Artificial Sequence: Synthetic oligonucleotide
cuguauugcugguugacug

SEQ ID NO: 504117 - RNA, 19 nt, Artificial Sequence
  Description of Artificial Sequence: Synthetic oligonucleotide
uugccuucgccauccaagg

SEQ ID NO: 504118 - RNA, 19 nt, Artificial Sequence
  Description of Artificial Sequence: Synthetic oligonucleotide
aacaaaucuccaguuaaaa

SEQ ID NO: 504119 - RNA, 19 nt, Artificial Sequence
  Description of Artificial Sequence: Synthetic oligonucleotide
auuuacuccaccagucaac

SEQ ID NO: 504120 - RNA, 19 nt, Artificial Sequence
  Description of Artificial Sequence: Synthetic oligonucleotide
caguucauacauucugccg

SEQ ID NO: 504121 - RNA, 19 nt, Artificial Sequence
  Description of Artificial Sequence: Synthetic oligonucleotide
uccgagaaaucugucaggc

SEQ ID NO: 504122 - RNA, 19 nt, Artificial Sequence
  Description of Artificial Sequence: Synthetic oligonucleotide
uuugucauugucccauauc

SEQ ID NO: 504123 - RNA, 19 nt, Artificial Sequence
  Description of Artificial Sequence: Synthetic oligonucleotide
ucaacgauuucuuccuccu

SEQ ID NO: 504124 - RNA, 19 nt, Artificial Sequence
  Description of Artificial Sequence: Synthetic oligonucleotide
guuugugaaccagaggaag

SEQ ID NO: 504125 - RNA, 19 nt, Artificial Sequence
  Description of Artificial Sequence: Synthetic oligonucleotide
uaagaacuauaugacauua

SEQ ID NO: 504126 - RNA, 19 nt, Artificial Sequence
  Description of Artificial Sequence: Synthetic oligonucleotide
ugcauuuggccucacgauc

SEQ ID NO: 504127 - RNA, 19 nt, Artificial Sequence
  Description of Artificial Sequence: Synthetic oligonucleotide
agugucaucucgacuuucc

SEQ ID NO: 504128 - RNA, 19 nt, Artificial Sequence
  Description of Artificial Sequence: Synthetic oligonucleotide
uucggaaggagccuuuaaa

SEQ ID NO: 504129 - RNA, 19 nt, Artificial Sequence
  Description of Artificial Sequence: Synthetic oligonucleotide
uucccugggaaauguuugg

SEQ ID NO: 504130 - RNA, 19 nt, Artificial Sequence
  Description of Artificial Sequence: Synthetic oligonucleotide
acgaagguaguacuucuug

SEQ ID NO: 504131 - RNA, 19 nt, Artificial Sequence
  Description of Artificial Sequence: Synthetic oligonucleotide
uguuuacuccagaaacaca

SEQ ID NO: 504132 - RNA, 19 nt, Artificial Sequence
  Description of Artificial Sequence: Synthetic oligonucleotide
auguuggguucacugcgcc

SEQ ID NO: 504133 - RNA, 19 nt, Artificial Sequence
  Description of Artificial Sequence: Synthetic oligonucleotide
cauacacgaccugaggugg

SEQ ID NO: 504134 - RNA, 19 nt, Artificial Sequence
  Description of Artificial Sequence: Synthetic oligonucleotide
acaugucuuggugaaguac

SEQ ID NO: 504135 - RNA, 19 nt, Artificial Sequence
  Description of Artificial Sequence: Synthetic oligonucleotide
aaauugcacuucucugaug

SEQ ID NO: 504136 - RNA, 19 nt, Artificial Sequence
  Description of Artificial Sequence: Synthetic oligonucleotide
aaguauccgagaaaucugu

SEQ ID NO: 504137 - RNA, 19 nt, Artificial Sequence
  Description of Artificial Sequence: Synthetic oligonucleotide
caagacgcucuucaggggc

SEQ ID NO: 504138 - RNA, 19 nt, Artificial Sequence
  Description of Artificial Sequence: Synthetic oligonucleotide
cuuuaagaggguccauagc

SEQ ID NO: 504139 - RNA, 19 nt, Artificial Sequence
  Description of Artificial Sequence: Synthetic oligonucleotide
auaagaacuauaugacauu

SEQ ID NO: 504140 - RNA, 19 nt, Artificial Sequence
  Description of Artificial Sequence: Synthetic oligonucleotide
ugauagugcgauguaaguc

SEQ ID NO: 504141 - RNA, 19 nt, Artificial Sequence
  Description of Artificial Sequence: Synthetic oligonucleotide
ucucagcugaucucgccag

SEQ ID NO: 504142 - RNA, 19 nt, Artificial Sequence
  Description of Artificial Sequence: Synthetic oligonucleotide
gugaaguacuucauacacg

SEQ ID NO: 504143 - RNA, 19 nt, Artificial Sequence
  Description of Artificial Sequence: Synthetic oligonucleotide
agcauaaaauuuacuccac

SEQ ID NO: 504144 - RNA, 19 nt, Artificial Sequence
  Description of Artificial Sequence: Synthetic oligonucleotide
uacuucauacacgaccuga

SEQ ID NO: 504145 - RNA, 19 nt, Artificial Sequence
  Description of Artificial Sequence: Synthetic oligonucleotide
uguacggaucacacaggcc

SEQ ID NO: 504146 - RNA, 19 nt, Artificial Sequence
  Description of Artificial Sequence: Synthetic oligonucleotide
uaguucggcaaugaguaca

SEQ ID NO: 504147 - RNA, 19 nt, Artificial Sequence
  Description of Artificial Sequence: Synthetic oligonucleotide
aagacgcucuucaggggcc

SEQ ID NO: 504148 - RNA, 19 nt, Artificial Sequence
  Description of Artificial Sequence: Synthetic oligonucleotide
uugucagcguagcacggcc

SEQ ID NO: 504149 - RNA, 19 nt, Artificial Sequence
  Description of Artificial Sequence: Synthetic oligonucleotide
auaaauaguucggcaauga

SEQ ID NO: 504150 - RNA, 19 nt, Artificial Sequence
  Description of Artificial Sequence: Synthetic oligonucleotide
gucaaguuccaggaaaccc

SEQ ID NO: 504151 - RNA, 19 nt, Artificial Sequence
  Description of Artificial Sequence: Synthetic oligonucleotide
gauguaagucaaguuccag

SEQ ID NO: 504152 - RNA, 19 nt, Artificial Sequence
  Description of Artificial Sequence: Synthetic oligonucleotide
auaguucggcaaugaguac

SEQ ID NO: 504153 - RNA, 19 nt, Artificial Sequence
  Description of Artificial Sequence: Synthetic oligonucleotide
auccgagaaaucugucagg

SEQ ID NO: 504154 - RNA, 19 nt, Artificial Sequence
  Description of Artificial Sequence: Synthetic oligonucleotide
gagguuuccggucgguuug

SEQ ID NO: 504155 - RNA, 19 nt, Artificial Sequence
  Description of Artificial Sequence: Synthetic oligonucleotide
gauaacguccuugguauuc

SEQ ID NO: 504156 - RNA, 19 nt, Artificial Sequence
  Description of Artificial Sequence: Synthetic oligonucleotide
uugccucuguacaauuuga

SEQ ID NO: 504157 - RNA, 19 nt, Artificial Sequence
  Description of Artificial Sequence: Synthetic oligonucleotide
gaugguagucucguccucc

SEQ ID NO: 504158 - RNA, 19 nt, Artificial Sequence
  Description of Artificial Sequence: Synthetic oligonucleotide
ugggaauguaauggucucg

SEQ ID NO: 504159 - RNA, 19 nt, Artificial Sequence
  Description of Artificial Sequence: Synthetic oligonucleotide
ccaaacuugaaucauagaa

SEQ ID NO: 504160 - RNA, 19 nt, Artificial Sequence
  Description of Artificial Sequence: Synthetic oligonucleotide
guuugaucaaugcuccaga

SEQ ID NO: 504161 - RNA, 19 nt, Artificial Sequence
  Description of Artificial Sequence: Synthetic oligonucleotide
cucgccagguguuuacucc

SEQ ID NO: 504162 - RNA, 19 nt, Artificial Sequence
  Description of Artificial Sequence: Synthetic oligonucleotide
cuuugucagcguagcacgg

SEQ ID NO: 504163 - RNA, 19 nt, Artificial Sequence
  Description of Artificial Sequence: Synthetic oligonucleotide
ucuaagccuugaacaaugu

SEQ ID NO: 504164 - RNA, 19 nt, Artificial Sequence
  Description of Artificial Sequence: Synthetic oligonucleotide
gaucaaugcuccagaaaug

SEQ ID NO: 504165 - RNA, 19 nt, Artificial Sequence
  Description of Artificial Sequence: Synthetic oligonucleotide
uggaauagccuuucugaau

SEQ ID NO: 504166 - RNA, 19 nt, Artificial Sequence
  Description of Artificial Sequence: Synthetic oligonucleotide
ugacguagaugucacucau

SEQ ID NO: 504167 - RNA, 19 nt, Artificial Sequence
  Description of Artificial Sequence: Synthetic oligonucleotide
cgagaaaucugucaggccc

SEQ ID NO: 504168 - RNA, 19 nt, Artificial Sequence
  Description of Artificial Sequence: Synthetic oligonucleotide
uauugcugguugacugaag

SEQ ID NO: 504169 - RNA, 19 nt, Artificial Sequence
  Description of Artificial Sequence: Synthetic oligonucleotide
cacagaccauuucaaauuc

SEQ ID NO: 504170 - RNA, 19 nt, Artificial Sequence
  Description of Artificial Sequence: Synthetic oligonucleotide
caagauaacguccuuggua

SEQ ID NO: 504171 - RNA, 19 nt, Artificial Sequence
  Description of Artificial Sequence: Synthetic oligonucleotide
ucagcggggagguagucaa

SEQ ID NO: 504172 - RNA, 19 nt, Artificial Sequence
  Description of Artificial Sequence: Synthetic oligonucleotide
gucauagacagagauuuuc

SEQ ID NO: 504173 - RNA, 19 nt, Artificial Sequence
  Description of Artificial Sequence: Synthetic oligonucleotide
uaagaggguccauagcuuu

SEQ ID NO: 504174 - RNA, 19 nt, Artificial Sequence
  Description of Artificial Sequence: Synthetic oligonucleotide
auccuaaccgugcauuccu

SEQ ID NO: 504175 - RNA, 19 nt, Artificial Sequence
  Description of Artificial Sequence: Synthetic oligonucleotide
uugaaccgccgccacacga

SEQ ID NO: 504176 - RNA, 19 nt, Artificial Sequence
  Description of Artificial Sequence: Synthetic oligonucleotide
cuaaccgugcauuccugug

SEQ ID NO: 504177 - RNA, 19 nt, Artificial Sequence
  Description of Artificial Sequence: Synthetic oligonucleotide
auggucucggucuucaauu

SEQ ID NO: 504178 - RNA, 19 nt, Artificial Sequence
  Description of Artificial Sequence: Synthetic oligonucleotide
gcucaguucauacauucug

SEQ ID NO: 504179 - RNA, 19 nt, Artificial Sequence
  Description of Artificial Sequence: Synthetic oligonucleotide
uuccggucgguuugguggg

SEQ ID NO: 504180 - RNA, 19 nt, Artificial Sequence
  Description of Artificial Sequence: Synthetic oligonucleotide
acacgaagguaguacuucu

SEQ ID NO: 504181 - RNA, 19 nt, Artificial Sequence
  Description of Artificial Sequence: Synthetic oligonucleotide
auacauucugccgaacacu

SEQ ID NO: 504182 - RNA, 19 nt, Artificial Sequence
  Description of Artificial Sequence: Synthetic oligonucleotide
agacuauacagagcugcuc

SEQ ID NO: 504183 - RNA, 19 nt, Artificial Sequence
  Description of Artificial Sequence: Synthetic oligonucleotide
uagucauccagggaaaauu

SEQ ID NO: 504184 - RNA, 19 nt, Artificial Sequence
  Description of Artificial Sequence: Synthetic oligonucleotide
acuucauacacgaccugag

SEQ ID NO: 504185 - RNA, 19 nt, Artificial Sequence
  Description of Artificial Sequence: Synthetic oligonucleotide
gaaggagguuuccggucgg

SEQ ID NO: 504186 - RNA, 19 nt, Artificial Sequence
  Description of Artificial Sequence: Synthetic oligonucleotide
cuggauugagaguguuggg

SEQ ID NO: 504187 - RNA, 19 nt, Artificial Sequence
  Description of Artificial Sequence: Synthetic oligonucleotide
gcauaaaauuuacuccacc

SEQ ID NO: 504188 - RNA, 19 nt, Artificial Sequence
  Description of Artificial Sequence: Synthetic oligonucleotide
gggaauguaauggucucgg

SEQ ID NO: 504189 - RNA, 19 nt, Artificial Sequence
  Description of Artificial Sequence: Synthetic oligonucleotide
caucucgacuuucccagcc

SEQ ID NO: 504190 - RNA, 19 nt, Artificial Sequence
  Description of Artificial Sequence: Synthetic oligonucleotide
guaguggacaucuguuuuc

SEQ ID NO: 504191 - RNA, 19 nt, Artificial Sequence
  Description of Artificial Sequence: Synthetic oligonucleotide
gggaaaauuugucauuguc

SEQ ID NO: 504192 - RNA, 19 nt, Artificial Sequence
  Description of Artificial Sequence: Synthetic oligonucleotide
uuugucagcguagcacggc

SEQ ID NO: 504193 - RNA, 19 nt, Artificial Sequence
  Description of Artificial Sequence: Synthetic oligonucleotide
ggaauagccuuucugaaua

SEQ ID NO: 504194 - RNA, 19 nt, Artificial Sequence
  Description of Artificial Sequence: Synthetic oligonucleotide
aauuugucauugucccaua

SEQ ID NO: 504195 - RNA, 19 nt, Artificial Sequence
  Description of Artificial Sequence: Synthetic oligonucleotide
uccauaucggauucugcuu

SEQ ID NO: 504196 - RNA, 19 nt, Artificial Sequence
  Description of Artificial Sequence: Synthetic oligonucleotide
cucccacuuucucaucucg

SEQ ID NO: 504197 - RNA, 19 nt, Artificial Sequence
  Description of Artificial Sequence: Synthetic oligonucleotide
agcggggagguagucaaac

SEQ ID NO: 504198 - RNA, 19 nt, Artificial Sequence
  Description of Artificial Sequence: Synthetic oligonucleotide
aggagcacagccacgaaca

SEQ ID NO: 504199 - RNA, 19 nt, Artificial Sequence
  Description of Artificial Sequence: Synthetic oligonucleotide
cacacgggagccaucuuug

SEQ ID NO: 504200 - RNA, 19 nt, Artificial Sequence
  Description of Artificial Sequence: Synthetic oligonucleotide
aguucggcaaugaguacag

SEQ ID NO: 504201 - RNA, 19 nt, Artificial Sequence
  Description of Artificial Sequence: Synthetic oligonucleotide
gugguccuaagcucuuggg

SEQ ID NO: 504202 - RNA, 19 nt, Artificial Sequence
  Description of Artificial Sequence: Synthetic oligonucleotide
agaugguagucucguccuc

SEQ ID NO: 504203 - RNA, 19 nt, Artificial Sequence
  Description of Artificial Sequence: Synthetic oligonucleotide
aagucggcuacguccucca

SEQ ID NO: 504204 - RNA, 19 nt, Artificial Sequence
  Description of Artificial Sequence: Synthetic oligonucleotide
gcgauguaagucaaguucc

SEQ ID NO: 504205 - RNA, 19 nt, Artificial Sequence
  Description of Artificial Sequence: Synthetic oligonucleotide
uguuggguucacugcgccc

SEQ ID NO: 504206 - RNA, 19 nt, Artificial Sequence
  Description of Artificial Sequence: Synthetic oligonucleotide
cucaucucgggugaaggug

SEQ ID NO: 504207 - RNA, 19 nt, Artificial Sequence
  Description of Artificial Sequence: Synthetic oligonucleotide
ucugaguuugggguuuaga

SEQ ID NO: 504208 - RNA, 19 nt, Artificial Sequence
  Description of Artificial Sequence: Synthetic oligonucleotide
auccaagauaacguccuug

SEQ ID NO: 504209 - RNA, 19 nt, Artificial Sequence
  Description of Artificial Sequence: Synthetic oligonucleotide
ucuuagcuuuaagaggguc

SEQ ID NO: 504210 - RNA, 19 nt, Artificial Sequence
  Description of Artificial Sequence: Synthetic oligonucleotide
agucaaacgggaaaacaaa

SEQ ID NO: 504211 - RNA, 19 nt, Artificial Sequence
  Description of Artificial Sequence: Synthetic oligonucleotide
uucagugugugaggcaacu

SEQ ID NO: 504212 - RNA, 19 nt, Artificial Sequence
  Description of Artificial Sequence: Synthetic oligonucleotide
ucggcuacguccuccaguu

SEQ ID NO: 504213 - RNA, 19 nt, Artificial Sequence
  Description of Artificial Sequence: Synthetic oligonucleotide
augcauuuggccucacgau

SEQ ID NO: 504214 - RNA, 19 nt, Artificial Sequence
  Description of Artificial Sequence: Synthetic oligonucleotide
aacguccuugguauuccag

SEQ ID NO: 504215 - RNA, 19 nt, Artificial Sequence
  Description of Artificial Sequence: Synthetic oligonucleotide
caugucuuggugaaguacu

SEQ ID NO: 504216 - RNA, 19 nt, Artificial Sequence
  Description of Artificial Sequence: Synthetic oligonucleotide
cacgaugaaucgcaugguc

SEQ ID NO: 504217 - RNA, 19 nt, Artificial Sequence
  Description of Artificial Sequence: Synthetic oligonucleotide
gggguuuagacccgcuagg

SEQ ID NO: 504218 - RNA, 19 nt, Artificial Sequence
  Description of Artificial Sequence: Synthetic oligonucleotide
gaucucgccagguguuuac

SEQ ID NO: 504219 - RNA, 19 nt, Artificial Sequence
  Description of Artificial Sequence: Synthetic oligonucleotide
ugcucaggaaugccgcagu

SEQ ID NO: 504220 - RNA, 19 nt, Artificial Sequence
  Description of Artificial Sequence: Synthetic oligonucleotide
aauagccuuucugaauaua

SEQ ID NO: 504221 - RNA, 19 nt, Artificial Sequence
  Description of Artificial Sequence: Synthetic oligonucleotide
gagaguguugggaauguaa

SEQ ID NO: 504222 - RNA, 19 nt, Artificial Sequence
  Description of Artificial Sequence: Synthetic oligonucleotide
cugaaguuuucccugggaa

SEQ ID NO: 504223 - RNA, 19 nt, Artificial Sequence
  Description of Artificial Sequence: Synthetic oligonucleotide
uccuaaccgugcauuccug

SEQ ID NO: 504224 - RNA, 19 nt, Artificial Sequence
  Description of Artificial Sequence: Synthetic oligonucleotide
ucucgacuuucccagccau

SEQ ID NO: 504225 - RNA, 19 nt, Artificial Sequence
  Description of Artificial Sequence: Synthetic oligonucleotide
acccgcuaggaacugacau

SEQ ID NO: 504226 - RNA, 19 nt, Artificial Sequence
  Description of Artificial Sequence: Synthetic oligonucleotide
cucuccuaccacagauggg

SEQ ID NO: 504227 - RNA, 19 nt, Artificial Sequence
  Description of Artificial Sequence: Synthetic oligonucleotide
uagugcgauguaagucaag

SEQ ID NO: 504228 - RNA, 19 nt, Artificial Sequence
  Description of Artificial Sequence: Synthetic oligonucleotide
cauagaauggagaccacau

SEQ ID NO: 504229 - RNA, 19 nt, Artificial Sequence
  Description of Artificial Sequence: Synthetic oligonucleotide
ugucagcguagcacggcca

SEQ ID NO: 504230 - RNA, 19 nt, Artificial Sequence
  Description of Artificial Sequence: Synthetic oligonucleotide
agggcaagacgcucuucag

SEQ ID NO: 504231 - RNA, 19 nt, Artificial Sequence
  Description of Artificial Sequence: Synthetic oligonucleotide
uucugccgaacacuggauu

SEQ ID NO: 504232 - RNA, 19 nt, Artificial Sequence
  Description of Artificial Sequence: Synthetic oligonucleotide
uuucuucgcugccggaaau

SEQ ID NO: 504233 - RNA, 19 nt, Artificial Sequence
  Description of Artificial Sequence: Synthetic oligonucleotide
ugggaaauguuugguugga

SEQ ID NO: 504234 - RNA, 19 nt, Artificial Sequence
  Description of Artificial Sequence: Synthetic oligonucleotide
agacccgcuaggaacugac

SEQ ID NO: 504235 - RNA, 19 nt, Artificial Sequence
  Description of Artificial Sequence: Synthetic oligonucleotide
ggggagguagucaaacggg

SEQ ID NO: 504236 - RNA, 19 nt, Artificial Sequence
  Description of Artificial Sequence: Synthetic oligonucleotide
cacacgaagguaguacuuc

SEQ ID NO: 504237 - RNA, 19 nt, Artificial Sequence
  Description of Artificial Sequence: Synthetic oligonucleotide
gggcaagacgcucuucagg

SEQ ID NO: 504238 - RNA, 19 nt, Artificial Sequence
  Description of Artificial Sequence: Synthetic oligonucleotide
cuugaggcaaguagcagcu

SEQ ID NO: 504239 - RNA, 19 nt, Artificial Sequence
  Description of Artificial Sequence: Synthetic oligonucleotide
ugggacccgaaccgggaca

SEQ ID NO: 504240 - RNA, 19 nt, Artificial Sequence
  Description of Artificial Sequence: Synthetic oligonucleotide
gagggaagccuuugaaucu

SEQ ID NO: 504241 - RNA, 19 nt, Artificial Sequence
  Description of Artificial Sequence: Synthetic oligonucleotide
uugggguuuagacccgcua

SEQ ID NO: 504242 - RNA, 19 nt, Artificial Sequence
  Description of Artificial Sequence: Synthetic oligonucleotide
ccgaugaucacccacuuga

SEQ ID NO: 504243 - RNA, 19 nt, Artificial Sequence
  Description of Artificial Sequence: Synthetic oligonucleotide
auagucauagacagagauu

SEQ ID NO: 504244 - RNA, 19 nt, Artificial Sequence
  Description of Artificial Sequence: Synthetic oligonucleotide
cucauauccuccccuguga

SEQ ID NO: 504245 - RNA, 19 nt, Artificial Sequence
  Description of Artificial Sequence: Synthetic oligonucleotide
gucucagcugaucucgcca

SEQ ID NO: 504246 - RNA, 19 nt, Artificial Sequence
  Description of Artificial Sequence: Synthetic oligonucleotide
cagugggacccgaaccggg

SEQ ID NO: 504247 - RNA, 19 nt, Artificial Sequence
  Description of Artificial Sequence: Synthetic oligonucleotide
uaacguccuugguauucca

SEQ ID NO: 504248 - RNA, 19 nt, Artificial Sequence
  Description of Artificial Sequence: Synthetic oligonucleotide
ggauugagaguguugggaa

SEQ ID NO: 504249 - RNA, 19 nt, Artificial Sequence
  Description of Artificial Sequence: Synthetic oligonucleotide
ugccgaacacuggauugag

SEQ ID NO: 504250 - RNA, 19 nt, Artificial Sequence
  Description of Artificial Sequence: Synthetic oligonucleotide
uuacuccaccagucaacga

SEQ ID NO: 504251 - RNA, 19 nt, Artificial Sequence
  Description of Artificial Sequence: Synthetic oligonucleotide
ugucuuggugaaguacuuc

SEQ ID NO: 504252 - RNA, 19 nt, Artificial Sequence
  Description of Artificial Sequence: Synthetic oligonucleotide
aucucgacuuucccagcca

SEQ ID NO: 504253 - RNA, 19 nt, Artificial Sequence
  Description of Artificial Sequence: Synthetic oligonucleotide
uacggaucacacaggccau

SEQ ID NO: 504254 - RNA, 19 nt, Artificial Sequence
  Description of Artificial Sequence: Synthetic oligonucleotide
gccgccacacgaugaaucg

SEQ ID NO: 504255 - RNA, 19 nt, Artificial Sequence
  Description of Artificial Sequence: Synthetic oligonucleotide
ucccucucguugaggaccu

SEQ ID NO: 504256 - RNA, 19 nt, Artificial Sequence
  Description of Artificial Sequence: Synthetic oligonucleotide
gugaggcaacucuguauug

SEQ ID NO: 504257 - RNA, 19 nt, Artificial Sequence
  Description of Artificial Sequence: Synthetic oligonucleotide
aucauagaauggagaccac

SEQ ID NO: 504258 - RNA, 19 nt, Artificial Sequence
  Description of Artificial Sequence: Synthetic oligonucleotide
gaaccgggacaggaagcgg

SEQ ID NO: 504259 - RNA, 19 nt, Artificial Sequence
  Description of Artificial Sequence: Synthetic oligonucleotide
gaaccgccgccacacgaug

SEQ ID NO: 504260 - RNA, 19 nt, Artificial Sequence
  Description of Artificial Sequence: Synthetic oligonucleotide
auucggaaggagccuuuaa

SEQ ID NO: 504261 - RNA, 19 nt, Artificial Sequence
  Description of Artificial Sequence: Synthetic oligonucleotide
ucgguuuggugggucaagu

SEQ ID NO: 504262 - RNA, 19 nt, Artificial Sequence
  Description of Artificial Sequence: Synthetic oligonucleotide
aaauugccuucgccaucca

SEQ ID NO: 504263 - RNA, 19 nt, Artificial Sequence
  Description of Artificial Sequence: Synthetic oligonucleotide
gucagcguagcacggccac

SEQ ID NO: 504264 - RNA, 19 nt, Artificial Sequence
  Description of Artificial Sequence: Synthetic oligonucleotide
acucugaaaauaagcuuaa

SEQ ID NO: 504265 - RNA, 19 nt, Artificial Sequence
  Description of Artificial Sequence: Synthetic oligonucleotide
ccauaucggauucugcuuc

SEQ ID NO: 504266 - RNA, 19 nt, Artificial Sequence
  Description of Artificial Sequence: Synthetic oligonucleotide
uuuugcccaggguuauuuu

SEQ ID NO: 504267 - RNA, 19 nt, Artificial Sequence
  Description of Artificial Sequence: Synthetic oligonucleotide
uagauucggaaggagccuu

SEQ ID NO: 504268 - RNA, 19 nt, Artificial Sequence
  Description of Artificial Sequence: Synthetic oligonucleotide
caaugaguacaggagcaca

SEQ ID NO: 504269 - RNA, 19 nt, Artificial Sequence
  Description of Artificial Sequence: Synthetic oligonucleotide
cuucagugugugaggcaac

SEQ ID NO: 504270 - RNA, 19 nt, Artificial Sequence
  Description of Artificial Sequence: Synthetic oligonucleotide
auuaaggcacagaccauuu

SEQ ID NO: 504271 - RNA, 19 nt, Artificial Sequence
  Description of Artificial Sequence: Synthetic oligonucleotide
ccuucgccauccaaggacc

SEQ ID NO: 504272 - RNA, 19 nt, Artificial Sequence
  Description of Artificial Sequence: Synthetic oligonucleotide
auggucuugcauggguuug

SEQ ID NO: 504273 - RNA, 19 nt, Artificial Sequence
  Description of Artificial Sequence: Synthetic oligonucleotide
cuugaaccgccgccacacg

SEQ ID NO: 504274 - RNA, 19 nt, Artificial Sequence
  Description of Artificial Sequence: Synthetic oligonucleotide
cugagaauauggagggcaa

SEQ ID NO: 504275 - RNA, 19 nt, Artificial Sequence
  Description of Artificial Sequence: Synthetic oligonucleotide
ugccuucgccauccaagga

SEQ ID NO: 504276 - RNA, 19 nt, Artificial Sequence
  Description of Artificial Sequence: Synthetic oligonucleotide
acgggaaaacaaaucucca

SEQ ID NO: 504277 - RNA, 19 nt, Artificial Sequence
  Description of Artificial Sequence: Synthetic oligonucleotide
ggccuugcuuucauuaugc

SEQ ID NO: 504278 - RNA, 19 nt, Artificial Sequence
  Description of Artificial Sequence: Synthetic oligonucleotide
cacugucaggcaguucccg

SEQ ID NO: 504279 - RNA, 19 nt, Artificial Sequence
  Description of Artificial Sequence: Synthetic oligonucleotide
gguauuccagaugaucaca

SEQ ID NO: 504280 - RNA, 19 nt, Artificial Sequence
  Description of Artificial Sequence: Synthetic oligonucleotide
uuagacccgcuaggaacug

SEQ ID NO: 504281 - RNA, 19 nt, Artificial Sequence
  Description of Artificial Sequence: Synthetic oligonucleotide
guagucucguccuccauau

SEQ ID NO: 504282 - RNA, 19 nt, Artificial Sequence
  Description of Artificial Sequence: Synthetic oligonucleotide
cgggaaaacaaaucuccag

SEQ ID NO: 504283 - RNA, 19 nt, Artificial Sequence
  Description of Artificial Sequence: Synthetic oligonucleotide
uacacgaccugagguggac

SEQ ID NO: 504284 - RNA, 19 nt, Artificial Sequence
  Description of Artificial Sequence: Synthetic oligonucleotide
agccaucuuugucagcgua

SEQ ID NO: 504285 - RNA, 19 nt, Artificial Sequence
  Description of Artificial Sequence: Synthetic oligonucleotide
ugaucacacgaagguagua

SEQ ID NO: 504286 - RNA, 19 nt, Artificial Sequence
  Description of Artificial Sequence: Synthetic oligonucleotide
aguagcagcucaguucaua

SEQ ID NO: 504287 - RNA, 19 nt, Artificial Sequence
  Description of Artificial Sequence: Synthetic oligonucleotide
uucauacauucugccgaac

SEQ ID NO: 504288 - RNA, 19 nt, Artificial Sequence
  Description of Artificial Sequence: Synthetic oligonucleotide
ugcgccccuucccggcugg

SEQ ID NO: 504289 - RNA, 19 nt, Artificial Sequence
  Description of Artificial Sequence: Synthetic oligonucleotide
uccagaugguagucucguc

SEQ ID NO: 504290 - RNA, 19 nt, Artificial Sequence
  Description of Artificial Sequence: Synthetic oligonucleotide
uugucugaguuugggguuu

SEQ ID NO: 504291 - RNA, 19 nt, Artificial Sequence
  Description of Artificial Sequence: Synthetic oligonucleotide
cugcucaggaaugccgcag

SEQ ID NO: 504292 - RNA, 19 nt, Artificial Sequence
  Description of Artificial Sequence: Synthetic oligonucleotide
gacaugucuuggugaagua

SEQ ID NO: 504293 - RNA, 19 nt, Artificial Sequence
  Description of Artificial Sequence: Synthetic oligonucleotide
cggggagguagucaaacgg

SEQ ID NO: 504294 - RNA, 19 nt, Artificial Sequence
  Description of Artificial Sequence: Synthetic oligonucleotide
uuggguucacugcgccccu

SEQ ID NO: 504295 - RNA, 19 nt, Artificial Sequence
  Description of Artificial Sequence: Synthetic oligonucleotide
cagugugugaggcaacucu

SEQ ID NO: 504296 - RNA, 19 nt, Artificial Sequence
  Description of Artificial Sequence: Synthetic oligonucleotide
gacccgaaccgggacagga

SEQ ID NO: 504297 - RNA, 19 nt, Artificial Sequence
  Description of Artificial Sequence: Synthetic oligonucleotide
ucagcguagcacggccacc

SEQ ID NO: 504298 - RNA, 19 nt, Artificial Sequence
  Description of Artificial Sequence: Synthetic oligonucleotide
cauuaugcauuuggccuca

SEQ ID NO: 504299 - RNA, 19 nt, Artificial Sequence
  Description of Artificial Sequence: Synthetic oligonucleotide
acacgggagccaucuuugu

SEQ ID NO: 504300 - RNA, 19 nt, Artificial Sequence
  Description of Artificial Sequence: Synthetic oligonucleotide
aggccgaugaucacccacu

SEQ ID NO: 504301 - RNA, 19 nt, Artificial Sequence
  Description of Artificial Sequence: Synthetic oligonucleotide
aacugccugggaggggcug

SEQ ID NO: 504302 - RNA, 19 nt, Artificial Sequence
  Description of Artificial Sequence: Synthetic oligonucleotide
cugacaugucuuggugaag

SEQ ID NO: 504303 - RNA, 19 nt, Artificial Sequence
  Description of Artificial Sequence: Synthetic oligonucleotide
auagugcgauguaagucaa

SEQ ID NO: 504304 - RNA, 19 nt, Artificial Sequence
  Description of Artificial Sequence: Synthetic oligonucleotide
agguuuccggucgguuugg

SEQ ID NO: 504305 - RNA, 19 nt, Artificial Sequence
  Description of Artificial Sequence: Synthetic oligonucleotide
uccagccuuugacguagau

SEQ ID NO: 504306 - RNA, 19 nt, Artificial Sequence
  Description of Artificial Sequence: Synthetic oligonucleotide
cugggaugauagugcgaug

SEQ ID NO: 504307 - RNA, 19 nt, Artificial Sequence
  Description of Artificial Sequence: Synthetic oligonucleotide
cuccuaccacagauggguc

SEQ ID NO: 504308 - RNA, 19 nt, Artificial Sequence
  Description of Artificial Sequence: Synthetic oligonucleotide
agauaacguccuugguauu

SEQ ID NO: 504309 - RNA, 19 nt, Artificial Sequence
  Description of Artificial Sequence: Synthetic oligonucleotide
gagacuauacagagcugcu

SEQ ID NO: 504310 - RNA, 19 nt, Artificial Sequence
  Description of Artificial Sequence: Synthetic oligonucleotide
gcggggagguagucaaacg

SEQ ID NO: 504311 - RNA, 19 nt, Artificial Sequence
  Description of Artificial Sequence: Synthetic oligonucleotide
gaauagccuuucugaauau

SEQ ID NO: 504312 - RNA, 19 nt, Artificial Sequence
  Description of Artificial Sequence: Synthetic oligonucleotide
auaucggauucugcuucca

SEQ ID NO: 504313 - RNA, 19 nt, Artificial Sequence
  Description of Artificial Sequence: Synthetic oligonucleotide
gucgguuuggugggucaag

SEQ ID NO: 504314 - RNA, 19 nt, Artificial Sequence
  Description of Artificial Sequence: Synthetic oligonucleotide
gucaaacgggaaaacaaau

SEQ ID NO: 504315 - RNA, 19 nt, Artificial Sequence
  Description of Artificial Sequence: Synthetic oligonucleotide
gcccaggguuauuuuaaug

SEQ ID NO: 504316 - RNA, 19 nt, Artificial Sequence
  Description of Artificial Sequence: Synthetic oligonucleotide
cgcagugggacccgaaccg

SEQ ID NO: 504317 - RNA, 19 nt, Artificial Sequence
  Description of Artificial Sequence: Synthetic oligonucleotide
gccuuugacguagauguca

SEQ ID NO: 504318 - RNA, 19 nt, Artificial Sequence
  Description of Artificial Sequence: Synthetic oligonucleotide
gguuuagacccgcuaggaa

SEQ ID NO: 504319 - RNA, 19 nt, Artificial Sequence
  Description of Artificial Sequence: Synthetic oligonucleotide
gccucuguacaauuugaaa

SEQ ID NO: 504320 - RNA, 19 nt, Artificial Sequence
  Description of Artificial Sequence: Synthetic oligonucleotide
gguagucucguccuccaua

SEQ ID NO: 504321 - RNA, 19 nt, Artificial Sequence
  Description of Artificial Sequence: Synthetic oligonucleotide
agucggcuacguccuccag

SEQ ID NO: 504322 - RNA, 19 nt, Artificial Sequence
  Description of Artificial Sequence: Synthetic oligonucleotide
ugagaguguugggaaugua

SEQ ID NO: 504323 - RNA, 19 nt, Artificial Sequence
  Description of Artificial Sequence: Synthetic oligonucleotide
cccgcuaggaacugacaug

SEQ ID NO: 504324 - RNA, 19 nt, Artificial Sequence
  Description of Artificial Sequence: Synthetic oligonucleotide
ugaucucgccagguguuua

SEQ ID NO: 504325 - RNA, 19 nt, Artificial Sequence
  Description of Artificial Sequence: Synthetic oligonucleotide
gguucacugcgccccuucc

SEQ ID NO: 504326 - RNA, 19 nt, Artificial Sequence
  Description of Artificial Sequence: Synthetic oligonucleotide
uagacccgcuaggaacuga

SEQ ID NO: 504327 - RNA, 19 nt, Artificial Sequence
  Description of Artificial Sequence: Synthetic oligonucleotide
agccuuugacguagauguc

SEQ ID NO: 504328 - RNA, 19 nt, Artificial Sequence
  Description of Artificial Sequence: Synthetic oligonucleotide
caucucgggugaagguguc

SEQ ID NO: 504329 - RNA, 19 nt, Artificial Sequence
  Description of Artificial Sequence: Synthetic oligonucleotide
accgccgccacacgaugaa

SEQ ID NO: 504330 - RNA, 19 nt, Artificial Sequence
  Description of Artificial Sequence: Synthetic oligonucleotide
gcaaugaguacaggagcac

SEQ ID NO: 504331 - RNA, 19 nt, Artificial Sequence
  Description of Artificial Sequence: Synthetic oligonucleotide
agugggacccgaaccggga

SEQ ID NO: 504332 - RNA, 19 nt, Artificial Sequence
  Description of Artificial Sequence: Synthetic oligonucleotide
uagucucguccuccauauc

SEQ ID NO: 504333 - RNA, 19 nt, Artificial Sequence
  Description of Artificial Sequence: Synthetic oligonucleotide
aaccgccgccacacgauga

SEQ ID NO: 504334 - RNA, 19 nt, Artificial Sequence
  Description of Artificial Sequence: Synthetic oligonucleotide
gugugaggcaacucuguau

SEQ ID NO: 504335 - RNA, 19 nt, Artificial Sequence
  Description of Artificial Sequence: Synthetic oligonucleotide
cccgaaccgggacaggaag

SEQ ID NO: 504336 - RNA, 19 nt, Artificial Sequence
  Description of Artificial Sequence: Synthetic oligonucleotide
gaaucgcauggucuugcau

SEQ ID NO: 504337 - RNA, 19 nt, Artificial Sequence
  Description of Artificial Sequence: Synthetic oligonucleotide
ggaaugccgcagugggacc

SEQ ID NO: 504338 - RNA, 19 nt, Artificial Sequence
  Description of Artificial Sequence: Synthetic oligonucleotide
ccgaaacugccugggaggg

SEQ ID NO: 504339 - RNA, 19 nt, Artificial Sequence
  Description of Artificial Sequence: Synthetic oligonucleotide
ugccucccucucguugagg

SEQ ID NO: 504340 - RNA, 19 nt, Artificial Sequence
  Description of Artificial Sequence: Synthetic oligonucleotide
acgaccugagguggacuug

SEQ ID NO: 504341 - RNA, 19 nt, Artificial Sequence
  Description of Artificial Sequence: Synthetic oligonucleotide
gcauggguuugugaaccag

SEQ ID NO: 504342 - RNA, 19 nt, Artificial Sequence
  Description of Artificial Sequence: Synthetic oligonucleotide
acuugccucuguacaauuu

SEQ ID NO: 504343 - RNA, 19 nt, Artificial Sequence
  Description of Artificial Sequence: Synthetic oligonucleotide
aucucgccagguguuuacu

SEQ ID NO: 504344 - RNA, 19 nt, Artificial Sequence
  Description of Artificial Sequence: Synthetic oligonucleotide
ccgaaccgggacaggaagc

SEQ ID NO: 504345 - RNA, 19 nt, Artificial Sequence
  Description of Artificial Sequence: Synthetic oligonucleotide
cgaaccgggacaggaagcg

SEQ ID NO: 504346 - RNA, 19 nt, Artificial Sequence
  Description of Artificial Sequence: Synthetic oligonucleotide
gacguagaugucacucaua

SEQ ID NO: 504347 - RNA, 19 nt, Artificial Sequence
  Description of Artificial Sequence: Synthetic oligonucleotide
ggguuuagacccgcuagga

SEQ ID NO: 504348 - RNA, 19 nt, Artificial Sequence
  Description of Artificial Sequence: Synthetic oligonucleotide
cagcguagcacggccacca

SEQ ID NO: 504349 - RNA, 19 nt, Artificial Sequence
  Description of Artificial Sequence: Synthetic oligonucleotide
ccgcagugggacccgaacc

SEQ ID NO: 504350 - RNA, 19 nt, Artificial Sequence
  Description of Artificial Sequence: Synthetic oligonucleotide
gucggcuacguccuccagu

SEQ ID NO: 504351 - RNA, 19 nt, Artificial Sequence
  Description of Artificial Sequence: Synthetic oligonucleotide
auacacgaccugaggugga

SEQ ID NO: 504352 - RNA, 19 nt, Artificial Sequence
  Description of Artificial Sequence: Synthetic oligonucleotide
cagugucaucucgacuuuc

SEQ ID NO: 504353 - RNA, 19 nt, Artificial Sequence
  Description of Artificial Sequence: Synthetic oligonucleotide
acacgaccugagguggacu

SEQ ID NO: 504354 - RNA, 19 nt, Artificial Sequence
  Description of Artificial Sequence: Synthetic oligonucleotide
gaccuguaguggacaucug

SEQ ID NO: 504355 - RNA, 19 nt, Artificial Sequence
  Description of Artificial Sequence: Synthetic oligonucleotide
accgugcauuccuguggga

SEQ ID NO: 504356 - RNA, 19 nt, Artificial Sequence
  Description of Artificial Sequence: Synthetic oligonucleotide
cacuugaaccgccgccaca

SEQ ID NO: 504357 - RNA, 19 nt, Artificial Sequence
  Description of Artificial Sequence: Synthetic oligonucleotide
augcuccagaaaugcucuu

SEQ ID NO: 504358 - RNA, 19 nt, Artificial Sequence
  Description of Artificial Sequence: Synthetic oligonucleotide
ugcauuccugugggacacu

SEQ ID NO: 504359 - RNA, 19 nt, Artificial Sequence
  Description of Artificial Sequence: Synthetic oligonucleotide
cccgaagaagcauaaaauu

SEQ ID NO: 504360 - RNA, 19 nt, Artificial Sequence
  Description of Artificial Sequence: Synthetic oligonucleotide
aaguagcagcucaguucau

SEQ ID NO: 504361 - RNA, 19 nt, Artificial Sequence
  Description of Artificial Sequence: Synthetic oligonucleotide
cuuugacguagaugucacu

SEQ ID NO: 504362 - RNA, 19 nt, Artificial Sequence
  Description of Artificial Sequence: Synthetic oligonucleotide
agauucggaaggagccuuu

SEQ ID NO: 504363 - RNA, 19 nt, Artificial Sequence
  Description of Artificial Sequence: Synthetic oligonucleotide
aucacacgggagccaucuu

SEQ ID NO: 504364 - RNA, 19 nt, Artificial Sequence
  Description of Artificial Sequence: Synthetic oligonucleotide
gacccgcuaggaacugaca

SEQ ID NO: 504365 - RNA, 19 nt, Artificial Sequence
  Description of Artificial Sequence: Synthetic oligonucleotide
cgaaauucuguuugaucaa

SEQ ID NO: 504366 - RNA, 19 nt, Artificial Sequence
  Description of Artificial Sequence: Synthetic oligonucleotide
gccgcagugggacccgaac

SEQ ID NO: 504367 - RNA, 19 nt, Artificial Sequence
  Description of Artificial Sequence: Synthetic oligonucleotide
ugccgcagugggacccgaa

SEQ ID NO: 504368 - RNA, 19 nt, Artificial Sequence
  Description of Artificial Sequence: Synthetic oligonucleotide
ggaauguaauggucucggu

SEQ ID NO: 504369 - RNA, 19 nt, Artificial Sequence
  Description of Artificial Sequence: Synthetic oligonucleotide
gugcgauguaagucaaguu

SEQ ID NO: 504370 - RNA, 19 nt, Artificial Sequence
  Description of Artificial Sequence: Synthetic oligonucleotide
caccagucaacgauuucuu

SEQ ID NO: 504371 - RNA, 19 nt, Artificial Sequence
  Description of Artificial Sequence: Synthetic oligonucleotide
gcugguugacugaaggccu

SEQ ID NO: 504372 - RNA, 19 nt, Artificial Sequence
  Description of Artificial Sequence: Synthetic oligonucleotide
ggagguuuccggucgguuu

SEQ ID NO: 504373 - RNA, 19 nt, Artificial Sequence
  Description of Artificial Sequence: Synthetic oligonucleotide
ggguccuggugguccuaag

SEQ ID NO: 504374 - RNA, 19 nt, Artificial Sequence
  Description of Artificial Sequence: Synthetic oligonucleotide
ccccgaagaagcauaaaau

SEQ ID NO: 504375 - RNA, 19 nt, Artificial Sequence
  Description of Artificial Sequence: Synthetic oligonucleotide
cgccacacgaugaaucgca

SEQ ID NO: 504376 - RNA, 19 nt, Artificial Sequence
  Description of Artificial Sequence: Synthetic oligonucleotide
cacgaccugagguggacuu

SEQ ID NO: 504377 - RNA, 19 nt, Artificial Sequence
  Description of Artificial Sequence: Synthetic oligonucleotide
gugggucaaguuugggguu

SEQ ID NO: 504378 - RNA, 19 nt, Artificial Sequence
  Description of Artificial Sequence: Synthetic oligonucleotide
cguccuccauaucggauuc

SEQ ID NO: 504379 - RNA, 19 nt, Artificial Sequence
  Description of Artificial Sequence: Synthetic oligonucleotide
cuucgccauccaaggaccu

SEQ ID NO: 504380 - RNA, 19 nt, Artificial Sequence
  Description of Artificial Sequence: Synthetic oligonucleotide
cacgaagguaguacuucuu

SEQ ID NO: 504381 - RNA, 19 nt, Artificial Sequence
  Description of Artificial Sequence: Synthetic oligonucleotide
ccucucgucugccucccuc

SEQ ID NO: 504382 - RNA, 19 nt, Artificial Sequence
  Description of Artificial Sequence: Synthetic oligonucleotide
gccagguguuuacuccaga

SEQ ID NO: 504383 - RNA, 19 nt, Artificial Sequence
  Description of Artificial Sequence: Synthetic oligonucleotide
gggcacucgaaauucuguu

SEQ ID NO: 504384 - RNA, 19 nt, Artificial Sequence
  Description of Artificial Sequence: Synthetic oligonucleotide
uccggucgguuuggugggu

SEQ ID NO: 504385 - RNA, 19 nt, Artificial Sequence
  Description of Artificial Sequence: Synthetic oligonucleotide
acccgaaccgggacaggaa

SEQ ID NO: 504386 - RNA, 19 nt, Artificial Sequence
  Description of Artificial Sequence: Synthetic oligonucleotide
cgccgccacacgaugaauc

SEQ ID NO: 504387 - RNA, 19 nt, Artificial Sequence
  Description of Artificial Sequence: Synthetic oligonucleotide
cugcgccccuucccggcug

SEQ ID NO: 504388 - RNA, 19 nt, Artificial Sequence
  Description of Artificial Sequence: Synthetic oligonucleotide
caccauccuuucauggauu

SEQ ID NO: 504389 - RNA, 19 nt, Artificial Sequence
  Description of Artificial Sequence: Synthetic oligonucleotide
ccgcuaggaacugacaugu

SEQ ID NO: 504390 - RNA, 19 nt, Artificial Sequence
  Description of Artificial Sequence: Synthetic oligonucleotide
ggggcacucgaaauucugu

SEQ ID NO: 504391 - RNA, 19 nt, Artificial Sequence
  Description of Artificial Sequence: Synthetic oligonucleotide
ccgccacacgaugaaucgc

SEQ ID NO: 504392 - RNA, 19 nt, Artificial Sequence
  Description of Artificial Sequence: Synthetic oligonucleotide
ccuaaccgugcauuccugu

SEQ ID NO: 504393 - RNA, 19 nt, Artificial Sequence
  Description of Artificial Sequence: Synthetic oligonucleotide
cgccagguguuuacuccag

SEQ ID NO: 504394 - RNA, 19 nt, Artificial Sequence
  Description of Artificial Sequence: Synthetic oligonucleotide
gcucuaagccuugaacaau

SEQ ID NO: 504395 - RNA, 19 nt, Artificial Sequence
  Description of Artificial Sequence: Synthetic oligonucleotide
cauccaagauaacguccuu

SEQ ID NO: 504396 - RNA, 19 nt, Artificial Sequence
  Description of Artificial Sequence: Synthetic oligonucleotide
ggacccgaaccgggacagg

SEQ ID NO: 504397 - RNA, 19 nt, Artificial Sequence
  Description of Artificial Sequence: Synthetic oligonucleotide
cgaaacugccugggagggg

SEQ ID NO: 504398 - RNA, 19 nt, Artificial Sequence
  Description of Artificial Sequence: Synthetic oligonucleotide
ggcugggaugauagugcga

SEQ ID NO: 504399 - RNA, 19 nt, Artificial Sequence
  Description of Artificial Sequence: Synthetic oligonucleotide
ggucgguuuggugggucaa

SEQ ID NO: 504400 - RNA, 19 nt, Artificial Sequence
  Description of Artificial Sequence: Synthetic oligonucleotide
cauuuggccucacgaucuu

SEQ ID NO: 504401 - RNA, 19 nt, Artificial Sequence
  Description of Artificial Sequence: Synthetic oligonucleotide
cacccacaucugaaguuuu

SEQ ID NO: 504402 - RNA, 19 nt, Artificial Sequence
  Description of Artificial Sequence: Synthetic oligonucleotide
augccgcagugggacccga

SEQ ID NO: 504403 - RNA, 19 nt, Artificial Sequence
  Description of Artificial Sequence: Synthetic oligonucleotide
cagcggggagguagucaaa

SEQ ID NO: 504404 - RNA, 19 nt, Artificial Sequence
  Description of Artificial Sequence: Synthetic oligonucleotide
gcugaucucgccagguguu

SEQ ID NO: 504405 - RNA, 19 nt, Artificial Sequence
  Description of Artificial Sequence: Synthetic oligonucleotide
cgcuaggaacugacauguc

SEQ ID NO: 504406 - RNA, 19 nt, Artificial Sequence
  Description of Artificial Sequence: Synthetic oligonucleotide
gcuggccucucgucugccu

SEQ ID NO: 504407 - RNA, 19 nt, Artificial Sequence
  Description of Artificial Sequence: Synthetic oligonucleotide
ccuaccacagaugggucuu

SEQ ID NO: 504408 - RNA, 19 nt, Artificial Sequence
  Description of Artificial Sequence: Synthetic oligonucleotide
cggucgguuugguggguca

SEQ ID NO: 504409 - RNA, 19 nt, Artificial Sequence
  Description of Artificial Sequence: Synthetic oligonucleotide
ccggucgguuugguggguc

SEQ ID NO: 504410 - RNA, 19 nt, Artificial Sequence
  Description of Artificial Sequence: Synthetic oligonucleotide
cguugaggaccuccagugu

SEQ ID NO: 504411 - RNA, 19 nt, Artificial Sequence
  Description of Artificial Sequence: Synthetic oligonucleotide
gccacacgaugaaucgcau

SEQ ID NO: 504412 - RNA, 19 nt, Artificial Sequence
  Description of Artificial Sequence: Synthetic oligonucleotide
cggcuacguccuccaguuc

SEQ ID NO: 504413 - RNA, 19 nt, Artificial Sequence
  Description of Artificial Sequence: Synthetic oligonucleotide
gcgccccuucccggcuggc

SEQ ID NO: 504414 - RNA, 19 nt, Artificial Sequence
  Description of Artificial Sequence: Synthetic oligonucleotide
cccucucguugaggaccuc

SEQ ID NO: 504415 - RNA, 19 nt, Artificial Sequence
  Description of Artificial Sequence: Synthetic oligonucleotide
ccgccgccacacgaugaau

SEQ ID NO: 504416 - RNA, 19 nt, Artificial Sequence
  Description of Artificial Sequence: Synthetic oligonucleotide
auuagguaaaucuucaacc

SEQ ID NO: 504417 - RNA, 19 nt, Artificial Sequence
  Description of Artificial Sequence: Synthetic oligonucleotide
aaaagagugcuuuugcugc

SEQ ID NO: 504418 - RNA, 19 nt, Artificial Sequence
  Description of Artificial Sequence: Synthetic oligonucleotide
aauacaagaggacaucggc

SEQ ID NO: 504419 - RNA, 19 nt, Artificial Sequence
  Description of Artificial Sequence: Synthetic oligonucleotide
uuuuacuucaagaugacag

SEQ ID NO: 504420 - RNA, 19 nt, Artificial Sequence
  Description of Artificial Sequence: Synthetic oligonucleotide
ucuguuguaaagaagacag

SEQ ID NO: 504421 - RNA, 19 nt, Artificial Sequence
  Description of Artificial Sequence: Synthetic oligonucleotide
uuaacgagcagucugagag

SEQ ID NO: 504422 - RNA, 19 nt, Artificial Sequence
  Description of Artificial Sequence: Synthetic oligonucleotide
auuacugaguacuugagac

SEQ ID NO: 504423 - RNA, 19 nt, Artificial Sequence
  Description of Artificial Sequence: Synthetic oligonucleotide
aaacuauaagaacugagca

SEQ ID NO: 504424 - RNA, 19 nt, Artificial Sequence
  Description of Artificial Sequence: Synthetic oligonucleotide
uucuaaauuaaguaauucc

SEQ ID NO: 504425 - RNA, 19 nt, Artificial Sequence
  Description of Artificial Sequence: Synthetic oligonucleotide
ucuaauucuguuaaaggug

SEQ ID NO: 504426 - RNA, 19 nt, Artificial Sequence
  Description of Artificial Sequence: Synthetic oligonucleotide
aguuuguuauacuuggugg

SEQ ID NO: 504427 - RNA, 19 nt, Artificial Sequence
  Description of Artificial Sequence: Synthetic oligonucleotide
uuauauuuaucuacccacg

SEQ ID NO: 504428 - RNA, 19 nt, Artificial Sequence
  Description of Artificial Sequence: Synthetic oligonucleotide
ugucugagaagcuaaaugc

SEQ ID NO: 504429 - RNA, 19 nt, Artificial Sequence
  Description of Artificial Sequence: Synthetic oligonucleotide
uauauuuaucuacccacgg

SEQ ID NO: 504430 - RNA, 19 nt, Artificial Sequence
  Description of Artificial Sequence: Synthetic oligonucleotide
ucuauuaagaaauuucauc

SEQ ID NO: 504431 - RNA, 19 nt, Artificial Sequence
  Description of Artificial Sequence: Synthetic oligonucleotide
uuagaguacagaauuuucc

SEQ ID NO: 504432 - RNA, 19 nt, Artificial Sequence
  Description of Artificial Sequence: Synthetic oligonucleotide
uaacauaucccguucaugc

SEQ ID NO: 504433 - RNA, 19 nt, Artificial Sequence
  Description of Artificial Sequence: Synthetic oligonucleotide
uuaagcacgacauucaaaa

SEQ ID NO: 504434 - RNA, 19 nt, Artificial Sequence
  Description of Artificial Sequence: Synthetic oligonucleotide
uuuauuucgcauuggaaug

SEQ ID NO: 504435 - RNA, 19 nt, Artificial Sequence
  Description of Artificial Sequence: Synthetic oligonucleotide
aacugagcaauuaacgagc

SEQ ID NO: 504436 - RNA, 19 nt, Artificial Sequence
  Description of Artificial Sequence: Synthetic oligonucleotide
agcuuagaaacucacuggc

SEQ ID NO: 504437 - RNA, 19 nt, Artificial Sequence
  Description of Artificial Sequence: Synthetic oligonucleotide
auuaugcugcaguucaucc

SEQ ID NO: 504438 - RNA, 19 nt, Artificial Sequence
  Description of Artificial Sequence: Synthetic oligonucleotide
auaaaauagagccacccug

SEQ ID NO: 504439 - RNA, 19 nt, Artificial Sequence
  Description of Artificial Sequence: Synthetic oligonucleotide
uuauucaaaccuaaagaug

SEQ ID NO: 504440 - RNA, 19 nt, Artificial Sequence
  Description of Artificial Sequence: Synthetic oligonucleotide
uugguauggaacuauguag

SEQ ID NO: 504441 - RNA, 19 nt, Artificial Sequence
  Description of Artificial Sequence: Synthetic oligonucleotide
cuuacuagcuucuauaguc

SEQ ID NO: 504442 - RNA, 19 nt, Artificial Sequence
  Description of Artificial Sequence: Synthetic oligonucleotide
uuauaaauacaagaggaca

SEQ ID NO: 504443 - RNA, 19 nt, Artificial Sequence
  Description of Artificial Sequence: Synthetic oligonucleotide
uauacucauaauugcaucc

SEQ ID NO: 504444 - RNA, 19 nt, Artificial Sequence
  Description of Artificial Sequence: Synthetic oligonucleotide
aauagagccacccuguuuu

SEQ ID NO: 504445 - RNA, 19 nt, Artificial Sequence
  Description of Artificial Sequence: Synthetic oligonucleotide
aagaacugagcaauuaacg

SEQ ID NO: 504446 - RNA, 19 nt, Artificial Sequence
  Description of Artificial Sequence: Synthetic oligonucleotide
gaaacuauaagaacugagc

SEQ ID NO: 504447 - RNA, 19 nt, Artificial Sequence
  Description of Artificial Sequence: Synthetic oligonucleotide
uggauaaaagaaaucugag

SEQ ID NO: 504448 - RNA, 19 nt, Artificial Sequence
  Description of Artificial Sequence: Synthetic oligonucleotide
agucuaauucuguuaaagg

SEQ ID NO: 504449 - RNA, 19 nt, Artificial Sequence
  Description of Artificial Sequence: Synthetic oligonucleotide
gaacugagcaauuaacgag

SEQ ID NO: 504450 - RNA, 19 nt, Artificial Sequence
  Description of Artificial Sequence: Synthetic oligonucleotide
ugcacuucggauaucacca

SEQ ID NO: 504451 - RNA, 19 nt, Artificial Sequence
  Description of Artificial Sequence: Synthetic oligonucleotide
uuuugggaaagaguaaccg

SEQ ID NO: 504452 - RNA, 19 nt, Artificial Sequence
  Description of Artificial Sequence: Synthetic oligonucleotide
ugguuuauauuuaucuacc

SEQ ID NO: 504453 - RNA, 19 nt, Artificial Sequence
  Description of Artificial Sequence: Synthetic oligonucleotide
ucggauaucaccagaacac

SEQ ID NO: 504454 - RNA, 19 nt, Artificial Sequence
  Description of Artificial Sequence: Synthetic oligonucleotide
aguaucuaaaauauuccac

SEQ ID NO: 504455 - RNA, 19 nt, Artificial Sequence
  Description of Artificial Sequence: Synthetic oligonucleotide
ugguaagacaggauuaacc

SEQ ID NO: 504456 - RNA, 19 nt, Artificial Sequence
  Description of Artificial Sequence: Synthetic oligonucleotide
uuuauacucauaauugcau

SEQ ID NO: 504457 - RNA, 19 nt, Artificial Sequence
  Description of Artificial Sequence: Synthetic oligonucleotide
aacauaccaaaaugguguc

SEQ ID NO: 504458 - RNA, 19 nt, Artificial Sequence
  Description of Artificial Sequence: Synthetic oligonucleotide
agcaagauacggcaagagc

SEQ ID NO: 504459 - RNA, 19 nt, Artificial Sequence
  Description of Artificial Sequence: Synthetic oligonucleotide
ugagaaucccgauaaaacu

SEQ ID NO: 504460 - RNA, 19 nt, Artificial Sequence
  Description of Artificial Sequence: Synthetic oligonucleotide
aaaucuacguaguuuuggu

SEQ ID NO: 504461 - RNA, 19 nt, Artificial Sequence
  Description of Artificial Sequence: Synthetic oligonucleotide
uaaaauagagccacccugu

SEQ ID NO: 504462 - RNA, 19 nt, Artificial Sequence
  Description of Artificial Sequence: Synthetic oligonucleotide
ucuauagucaugauucuau

SEQ ID NO: 504463 - RNA, 19 nt, Artificial Sequence
  Description of Artificial Sequence: Synthetic oligonucleotide
ugagcuuuauuucgcauug

SEQ ID NO: 504464 - RNA, 19 nt, Artificial Sequence
  Description of Artificial Sequence: Synthetic oligonucleotide
aauuacugaguacuugaga

SEQ ID NO: 504465 - RNA, 19 nt, Artificial Sequence
  Description of Artificial Sequence: Synthetic oligonucleotide
uuucgcauuggaaugguca

SEQ ID NO: 504466 - RNA, 19 nt, Artificial Sequence
  Description of Artificial Sequence: Synthetic oligonucleotide
ugaauauucuggauuacuc

SEQ ID NO: 504467 - RNA, 19 nt, Artificial Sequence
  Description of Artificial Sequence: Synthetic oligonucleotide
aacuauaagaacugagcaa

SEQ ID NO: 504468 - RNA, 19 nt, Artificial Sequence
  Description of Artificial Sequence: Synthetic oligonucleotide
ugucagagauuauaaauac

SEQ ID NO: 504469 - RNA, 19 nt, Artificial Sequence
  Description of Artificial Sequence: Synthetic oligonucleotide
auaaagucugaauauucug

SEQ ID NO: 504470 - RNA, 19 nt, Artificial Sequence
  Description of Artificial Sequence: Synthetic oligonucleotide
cauacuucacaacauggcc

SEQ ID NO: 504471 - RNA, 19 nt, Artificial Sequence
  Description of Artificial Sequence: Synthetic oligonucleotide
aacgagcagucugagaggc

SEQ ID NO: 504472 - RNA, 19 nt, Artificial Sequence
  Description of Artificial Sequence: Synthetic oligonucleotide
uuuauugcacuucggauau

SEQ ID NO: 504473 - RNA, 19 nt, Artificial Sequence
  Description of Artificial Sequence: Synthetic oligonucleotide
uucggauaucaccagaaca

SEQ ID NO: 504474 - RNA, 19 nt, Artificial Sequence
  Description of Artificial Sequence: Synthetic oligonucleotide
ugguauggaacuauguaga

SEQ ID NO: 504475 - RNA, 19 nt, Artificial Sequence
  Description of Artificial Sequence: Synthetic oligonucleotide
uguacuauauucccugagu

SEQ ID NO: 504476 - RNA, 19 nt, Artificial Sequence
  Description of Artificial Sequence: Synthetic oligonucleotide
uuuacuucaagaugacaga

SEQ ID NO: 504477 - RNA, 19 nt, Artificial Sequence
  Description of Artificial Sequence: Synthetic oligonucleotide
agauguacuauauucccug

SEQ ID NO: 504478 - RNA, 19 nt, Artificial Sequence
  Description of Artificial Sequence: Synthetic oligonucleotide
aaguuucuacaccauaagu

SEQ ID NO: 504479 - RNA, 19 nt, Artificial Sequence
  Description of Artificial Sequence: Synthetic oligonucleotide
gaaaucuacguaguuuugg

SEQ ID NO: 504480 - RNA, 19 nt, Artificial Sequence
  Description of Artificial Sequence: Synthetic oligonucleotide
gauuaacccauucuuguac

SEQ ID NO: 504481 - RNA, 19 nt, Artificial Sequence
  Description of Artificial Sequence: Synthetic oligonucleotide
auacuaauuacugaguacu

SEQ ID NO: 504482 - RNA, 19 nt, Artificial Sequence
  Description of Artificial Sequence: Synthetic oligonucleotide
ucugugacuggaauuauuc

SEQ ID NO: 504483 - RNA, 19 nt, Artificial Sequence
  Description of Artificial Sequence: Synthetic oligonucleotide
agacuuuugauucuaaauu

SEQ ID NO: 504484 - RNA, 19 nt, Artificial Sequence
  Description of Artificial Sequence: Synthetic oligonucleotide
agaacugagcaauuaacga

SEQ ID NO: 504485 - RNA, 19 nt, Artificial Sequence
  Description of Artificial Sequence: Synthetic oligonucleotide
ucuacuauuuccucaggcu

SEQ ID NO: 504486 - RNA, 19 nt, Artificial Sequence
  Description of Artificial Sequence: Synthetic oligonucleotide
uaauuacugaguacuugag

SEQ ID NO: 504487 - RNA, 19 nt, Artificial Sequence
  Description of Artificial Sequence: Synthetic oligonucleotide
aucuacguaguuuugguga

SEQ ID NO: 504488 - RNA, 19 nt, Artificial Sequence
  Description of Artificial Sequence: Synthetic oligonucleotide
uuggugaagguauaaauua

SEQ ID NO: 504489 - RNA, 19 nt, Artificial Sequence
  Description of Artificial Sequence: Synthetic oligonucleotide
ucuuaacagaaagucauug

SEQ ID NO: 504490 - RNA, 19 nt, Artificial Sequence
  Description of Artificial Sequence: Synthetic oligonucleotide
uuuuggugaagguauaaau

SEQ ID NO: 504491 - RNA, 19 nt, Artificial Sequence
  Description of Artificial Sequence: Synthetic oligonucleotide
cacgacauucaaaacauac

SEQ ID NO: 504492 - RNA, 19 nt, Artificial Sequence
  Description of Artificial Sequence: Synthetic oligonucleotide
augagaaucccgauaaaac

SEQ ID NO: 504493 - RNA, 19 nt, Artificial Sequence
  Description of Artificial Sequence: Synthetic oligonucleotide
aguauagagcguguauucc

SEQ ID NO: 504494 - RNA, 19 nt, Artificial Sequence
  Description of Artificial Sequence: Synthetic oligonucleotide
uagucuaauucuguuaaag

SEQ ID NO: 504495 - RNA, 19 nt, Artificial Sequence
  Description of Artificial Sequence: Synthetic oligonucleotide
uuauuucgcauuggaaugg

SEQ ID NO: 504496 - RNA, 19 nt, Artificial Sequence
  Description of Artificial Sequence: Synthetic oligonucleotide
cuaucugagauugguaugg

SEQ ID NO: 504497 - RNA, 19 nt, Artificial Sequence
  Description of Artificial Sequence: Synthetic oligonucleotide
auuacuccuucacauuuuc

SEQ ID NO: 504498 - RNA, 19 nt, Artificial Sequence
  Description of Artificial Sequence: Synthetic oligonucleotide
aucccgauaaaacugauua

SEQ ID NO: 504499 - RNA, 19 nt, Artificial Sequence
  Description of Artificial Sequence: Synthetic oligonucleotide
acauacuucacaacauggc

SEQ ID NO: 504500 - RNA, 19 nt, Artificial Sequence
  Description of Artificial Sequence: Synthetic oligonucleotide
uccagggacauuuuaucag

SEQ ID NO: 504501 - RNA, 19 nt, Artificial Sequence
  Description of Artificial Sequence: Synthetic oligonucleotide
accgcugauugcuaucucc

SEQ ID NO: 504502 - RNA, 19 nt, Artificial Sequence
  Description of Artificial Sequence: Synthetic oligonucleotide
acauaucccguucaugcuc

SEQ ID NO: 504503 - RNA, 19 nt, Artificial Sequence
  Description of Artificial Sequence: Synthetic oligonucleotide
aauccccgggauuuauugg

SEQ ID NO: 504504 - RNA, 19 nt, Artificial Sequence
  Description of Artificial Sequence: Synthetic oligonucleotide
ugaaauccaacauuuuaau

SEQ ID NO: 504505 - RNA, 19 nt, Artificial Sequence
  Description of Artificial Sequence: Synthetic oligonucleotide
aggacaucggccaaucugc

SEQ ID NO: 504506 - RNA, 19 nt, Artificial Sequence
  Description of Artificial Sequence: Synthetic oligonucleotide
uuauacucauaauugcauc

SEQ ID NO: 504507 - RNA, 19 nt, Artificial Sequence
  Description of Artificial Sequence: Synthetic oligonucleotide
uccaauaucuuggauaaaa

SEQ ID NO: 504508 - RNA, 19 nt, Artificial Sequence
  Description of Artificial Sequence: Synthetic oligonucleotide
gagaaucccgauaaaacug

SEQ ID NO: 504509 - RNA, 19 nt, Artificial Sequence
  Description of Artificial Sequence: Synthetic oligonucleotide
cuguuacugucuaaugugg

SEQ ID NO: 504510 - RNA, 19 nt, Artificial Sequence
  Description of Artificial Sequence: Synthetic oligonucleotide
uuacuagcuucuauaguca

SEQ ID NO: 504511 - RNA, 19 nt, Artificial Sequence
  Description of Artificial Sequence: Synthetic oligonucleotide
gacuucagcuuuuaaccag

SEQ ID NO: 504512 - RNA, 19 nt, Artificial Sequence
  Description of Artificial Sequence: Synthetic oligonucleotide
guuacugucuaauguggag

SEQ ID NO: 504513 - RNA, 19 nt, Artificial Sequence
  Description of Artificial Sequence: Synthetic oligonucleotide
ucuggauuacuccuucaca

SEQ ID NO: 504514 - RNA, 19 nt, Artificial Sequence
  Description of Artificial Sequence: Synthetic oligonucleotide
uguuuauugcacuucggau

SEQ ID NO: 504515 - RNA, 19 nt, Artificial Sequence
  Description of Artificial Sequence: Synthetic oligonucleotide
agcaugagaaucccgauaa

SEQ ID NO: 504516 - RNA, 19 nt, Artificial Sequence
  Description of Artificial Sequence: Synthetic oligonucleotide
acacccuugacagagcaac

SEQ ID NO: 504517 - RNA, 19 nt, Artificial Sequence
  Description of Artificial Sequence: Synthetic oligonucleotide
gcagugauaguagugaugg

SEQ ID NO: 504518 - RNA, 19 nt, Artificial Sequence
  Description of Artificial Sequence: Synthetic oligonucleotide
uucgcauuggaauggucag

SEQ ID NO: 504519 - RNA, 19 nt, Artificial Sequence
  Description of Artificial Sequence: Synthetic oligonucleotide
ucaggcugaacaaguaaca

SEQ ID NO: 504520 - RNA, 19 nt, Artificial Sequence
  Description of Artificial Sequence: Synthetic oligonucleotide
agacacaaagcugguaggc

SEQ ID NO: 504521 - RNA, 19 nt, Artificial Sequence
  Description of Artificial Sequence: Synthetic oligonucleotide
gaggacaucggccaaucug

SEQ ID NO: 504522 - RNA, 19 nt, Artificial Sequence
  Description of Artificial Sequence: Synthetic oligonucleotide
uugcacuucggauaucacc

SEQ ID NO: 504523 - RNA, 19 nt, Artificial Sequence
  Description of Artificial Sequence: Synthetic oligonucleotide
cuacuauuuccucaggcug

SEQ ID NO: 504524 - RNA, 19 nt, Artificial Sequence
  Description of Artificial Sequence: Synthetic oligonucleotide
uauuggaaugcaucacacc

SEQ ID NO: 504525 - RNA, 19 nt, Artificial Sequence
  Description of Artificial Sequence: Synthetic oligonucleotide
auugguauggaacuaugua

SEQ ID NO: 504526 - RNA, 19 nt, Artificial Sequence
  Description of Artificial Sequence: Synthetic oligonucleotide
aacauaucccguucaugcu

SEQ ID NO: 504527 - RNA, 19 nt, Artificial Sequence
  Description of Artificial Sequence: Synthetic oligonucleotide
uugaaacuaauguuugcaa

SEQ ID NO: 504528 - RNA, 19 nt, Artificial Sequence
  Description of Artificial Sequence: Synthetic oligonucleotide
gaauccccgggauuuauug

SEQ ID NO: 504529 - RNA, 19 nt, Artificial Sequence
  Description of Artificial Sequence: Synthetic oligonucleotide
uguaaagcaugagaauccc

SEQ ID NO: 504530 - RNA, 19 nt, Artificial Sequence
  Description of Artificial Sequence: Synthetic oligonucleotide
accucuuguagcuacagau

SEQ ID NO: 504531 - RNA, 19 nt, Artificial Sequence
  Description of Artificial Sequence: Synthetic oligonucleotide
gugucugagaagcuaaaug

SEQ ID NO: 504532 - RNA, 19 nt, Artificial Sequence
  Description of Artificial Sequence: Synthetic oligonucleotide
uauugcacuucggauauca

SEQ ID NO: 504533 - RNA, 19 nt, Artificial Sequence
  Description of Artificial Sequence: Synthetic oligonucleotide
ucuuacuagcuucuauagu

SEQ ID NO: 504534 - RNA, 19 nt, Artificial Sequence
  Description of Artificial Sequence: Synthetic oligonucleotide
acuaauguuugcaauagaa

SEQ ID NO: 504535 - RNA, 19 nt, Artificial Sequence
  Description of Artificial Sequence: Synthetic oligonucleotide
ggggucgaaagcuugaucc

SEQ ID NO: 504536 - RNA, 19 nt, Artificial Sequence
  Description of Artificial Sequence: Synthetic oligonucleotide
uuuaagcacgacauucaaa

SEQ ID NO: 504537 - RNA, 19 nt, Artificial Sequence
  Description of Artificial Sequence: Synthetic oligonucleotide
gcauaugugacauuucuac

SEQ ID NO: 504538 - RNA, 19 nt, Artificial Sequence
  Description of Artificial Sequence: Synthetic oligonucleotide
ucuuccuaucaguugucag

SEQ ID NO: 504539 - RNA, 19 nt, Artificial Sequence
  Description of Artificial Sequence: Synthetic oligonucleotide
cauaccaaaauggugucug

SEQ ID NO: 504540 - RNA, 19 nt, Artificial Sequence
  Description of Artificial Sequence: Synthetic oligonucleotide
gaagcagugauaguaguga

SEQ ID NO: 504541 - RNA, 19 nt, Artificial Sequence
  Description of Artificial Sequence: Synthetic oligonucleotide
gaguauagagcguguauuc

SEQ ID NO: 504542 - RNA, 19 nt, Artificial Sequence
  Description of Artificial Sequence: Synthetic oligonucleotide
uuuguguauuagaaaccac

SEQ ID NO: 504543 - RNA, 19 nt, Artificial Sequence
  Description of Artificial Sequence: Synthetic oligonucleotide
gcaauuaacgagcagucug

SEQ ID NO: 504544 - RNA, 19 nt, Artificial Sequence
  Description of Artificial Sequence: Synthetic oligonucleotide
acaaguaacauaucccguu

SEQ ID NO: 504545 - RNA, 19 nt, Artificial Sequence
  Description of Artificial Sequence: Synthetic oligonucleotide
guuuauugcacuucggaua

SEQ ID NO: 504546 - RNA, 19 nt, Artificial Sequence
  Description of Artificial Sequence: Synthetic oligonucleotide
aauuaacgagcagucugag

SEQ ID NO: 504547 - RNA, 19 nt, Artificial Sequence
  Description of Artificial Sequence: Synthetic oligonucleotide
ugacuggaauuauucaaac

SEQ ID NO: 504548 - RNA, 19 nt, Artificial Sequence
  Description of Artificial Sequence: Synthetic oligonucleotide
aacuaauguuugcaauaga

SEQ ID NO: 504549 - RNA, 19 nt, Artificial Sequence
  Description of Artificial Sequence: Synthetic oligonucleotide
aggcauaugugacauuucu

SEQ ID NO: 504550 - RNA, 19 nt, Artificial Sequence
  Description of Artificial Sequence: Synthetic oligonucleotide
caagauacggcaagagcug

SEQ ID NO: 504551 - RNA, 19 nt, Artificial Sequence
  Description of Artificial Sequence: Synthetic oligonucleotide
ugagguuuauguagggguc

SEQ ID NO: 504552 - RNA, 19 nt, Artificial Sequence
  Description of Artificial Sequence: Synthetic oligonucleotide
acggcucaaugucagacag

SEQ ID NO: 504553 - RNA, 19 nt, Artificial Sequence
  Description of Artificial Sequence: Synthetic oligonucleotide
uccgacuucaaugacguuc

SEQ ID NO: 504554 - RNA, 19 nt, Artificial Sequence
  Description of Artificial Sequence: Synthetic oligonucleotide
uauguagacuuuugauucu

SEQ ID NO: 504555 - RNA, 19 nt, Artificial Sequence
  Description of Artificial Sequence: Synthetic oligonucleotide
guugaaacuaauguuugca

SEQ ID NO: 504556 - RNA, 19 nt, Artificial Sequence
  Description of Artificial Sequence: Synthetic oligonucleotide
uaacgagcagucugagagg

SEQ ID NO: 504557 - RNA, 19 nt, Artificial Sequence
  Description of Artificial Sequence: Synthetic oligonucleotide
uggugaagguauaaauuaa

SEQ ID NO: 504558 - RNA, 19 nt, Artificial Sequence
  Description of Artificial Sequence: Synthetic oligonucleotide
cugauauuuaagcacgaca

SEQ ID NO: 504559 - RNA, 19 nt, Artificial Sequence
  Description of Artificial Sequence: Synthetic oligonucleotide
auguacuauauucccugag

SEQ ID NO: 504560 - RNA, 19 nt, Artificial Sequence
  Description of Artificial Sequence: Synthetic oligonucleotide
accccauaaagucugaaua

SEQ ID NO: 504561 - RNA, 19 nt, Artificial Sequence
  Description of Artificial Sequence: Synthetic oligonucleotide
caggauuaacccauucuug

SEQ ID NO: 504562 - RNA, 19 nt, Artificial Sequence
  Description of Artificial Sequence: Synthetic oligonucleotide
ucccgauaaaacugauuag

SEQ ID NO: 504563 - RNA, 19 nt, Artificial Sequence
  Description of Artificial Sequence: Synthetic oligonucleotide
agggagcguagucuaauuc

SEQ ID NO: 504564 - RNA, 19 nt, Artificial Sequence
  Description of Artificial Sequence: Synthetic oligonucleotide
gagguuuauguaggggucg

SEQ ID NO: 504565 - RNA, 19 nt, Artificial Sequence
  Description of Artificial Sequence: Synthetic oligonucleotide
cuagcuucuauagucauga

SEQ ID NO: 504566 - RNA, 19 nt, Artificial Sequence
  Description of Artificial Sequence: Synthetic oligonucleotide
auucuguuaaaggugcucu

SEQ ID NO: 504567 - RNA, 19 nt, Artificial Sequence
  Description of Artificial Sequence: Synthetic oligonucleotide
uggcucuuaacagaaaguc

SEQ ID NO: 504568 - RNA, 19 nt, Artificial Sequence
  Description of Artificial Sequence: Synthetic oligonucleotide
auacggcaagagcugaguc

SEQ ID NO: 504569 - RNA, 19 nt, Artificial Sequence
  Description of Artificial Sequence: Synthetic oligonucleotide
aaauagagccacccuguuu

SEQ ID NO: 504570 - RNA, 19 nt, Artificial Sequence
  Description of Artificial Sequence: Synthetic oligonucleotide
gauugcuaucuccacugac

SEQ ID NO: 504571 - RNA, 19 nt, Artificial Sequence
  Description of Artificial Sequence: Synthetic oligonucleotide
cuuccuaucaguugucaga

SEQ ID NO: 504572 - RNA, 19 nt, Artificial Sequence
  Description of Artificial Sequence: Synthetic oligonucleotide
ucuacccacggcucaaugu

SEQ ID NO: 504573 - RNA, 19 nt, Artificial Sequence
  Description of Artificial Sequence: Synthetic oligonucleotide
acauuuacaacaccccaua

SEQ ID NO: 504574 - RNA, 19 nt, Artificial Sequence
  Description of Artificial Sequence: Synthetic oligonucleotide
uacggcaagagcugagucu

SEQ ID NO: 504575 - RNA, 19 nt, Artificial Sequence
  Description of Artificial Sequence: Synthetic oligonucleotide
ucuacguaguuuuggugaa

SEQ ID NO: 504576 - RNA, 19 nt, Artificial Sequence
  Description of Artificial Sequence: Synthetic oligonucleotide
aaaauagagccacccuguu

SEQ ID NO: 504577 - RNA, 19 nt, Artificial Sequence
  Description of Artificial Sequence: Synthetic oligonucleotide
uaaccagguuucaaccucu

SEQ ID NO: 504578 - RNA, 19 nt, Artificial Sequence
  Description of Artificial Sequence: Synthetic oligonucleotide
ggaaacuauaagaacugag

SEQ ID NO: 504579 - RNA, 19 nt, Artificial Sequence
  Description of Artificial Sequence: Synthetic oligonucleotide
ugaguauagagcguguauu

SEQ ID NO: 504580 - RNA, 19 nt, Artificial Sequence
  Description of Artificial Sequence: Synthetic oligonucleotide
aguaacauaucccguucau

SEQ ID NO: 504581 - RNA, 19 nt, Artificial Sequence
  Description of Artificial Sequence: Synthetic oligonucleotide
agucuguuacugucuaaug

SEQ ID NO: 504582 - RNA, 19 nt, Artificial Sequence
  Description of Artificial Sequence: Synthetic oligonucleotide
uaccaaaauggugucugag

SEQ ID NO: 504583 - RNA, 19 nt, Artificial Sequence
  Description of Artificial Sequence: Synthetic oligonucleotide
uaucaccagaacacccuug

SEQ ID NO: 504584 - RNA, 19 nt, Artificial Sequence
  Description of Artificial Sequence: Synthetic oligonucleotide
caauuaacgagcagucuga

SEQ ID NO: 504585 - RNA, 19 nt, Artificial Sequence
  Description of Artificial Sequence: Synthetic oligonucleotide
gagcguguauuccagucac

SEQ ID NO: 504586 - RNA, 19 nt, Artificial Sequence
  Description of Artificial Sequence: Synthetic oligonucleotide
uuccacuguacaacauacc

SEQ ID NO: 504587 - RNA, 19 nt, Artificial Sequence
  Description of Artificial Sequence: Synthetic oligonucleotide
aagcaugagaaucccgaua

SEQ ID NO: 504588 - RNA, 19 nt, Artificial Sequence
  Description of Artificial Sequence: Synthetic oligonucleotide
agucagcugcuuguaaugg

SEQ ID NO: 504589 - RNA, 19 nt, Artificial Sequence
  Description of Artificial Sequence: Synthetic oligonucleotide
auacuucacaacauggccu

SEQ ID NO: 504590 - RNA, 19 nt, Artificial Sequence
  Description of Artificial Sequence: Synthetic oligonucleotide
ucugauauuuaagcacgac

SEQ ID NO: 504591 - RNA, 19 nt, Artificial Sequence
  Description of Artificial Sequence: Synthetic oligonucleotide
cccgauaaaacugauuagg

SEQ ID NO: 504592 - RNA, 19 nt, Artificial Sequence
  Description of Artificial Sequence: Synthetic oligonucleotide
cuguuguaaagaagacagc

SEQ ID NO: 504593 - RNA, 19 nt, Artificial Sequence
  Description of Artificial Sequence: Synthetic oligonucleotide
uggaggaccuguuauuaau

SEQ ID NO: 504594 - RNA, 19 nt, Artificial Sequence
  Description of Artificial Sequence: Synthetic oligonucleotide
cuuggcagugagcgaaucc

SEQ ID NO: 504595 - RNA, 19 nt, Artificial Sequence
  Description of Artificial Sequence: Synthetic oligonucleotide
cauuggaauggucagcaga

SEQ ID NO: 504596 - RNA, 19 nt, Artificial Sequence
  Description of Artificial Sequence: Synthetic oligonucleotide
guaaagcaugagaaucccg

SEQ ID NO: 504597 - RNA, 19 nt, Artificial Sequence
  Description of Artificial Sequence: Synthetic oligonucleotide
gauguacuauauucccuga

SEQ ID NO: 504598 - RNA, 19 nt, Artificial Sequence
  Description of Artificial Sequence: Synthetic oligonucleotide
cuguuuauugcacuucgga

SEQ ID NO: 504599 - RNA, 19 nt, Artificial Sequence
  Description of Artificial Sequence: Synthetic oligonucleotide
aagcugguaggcagaaguc

SEQ ID NO: 504600 - RNA, 19 nt, Artificial Sequence
  Description of Artificial Sequence: Synthetic oligonucleotide
acaacucuuccuccguucu

SEQ ID NO: 504601 - RNA, 19 nt, Artificial Sequence
  Description of Artificial Sequence: Synthetic oligonucleotide
cuacccacggcucaauguc

SEQ ID NO: 504602 - RNA, 19 nt, Artificial Sequence
  Description of Artificial Sequence: Synthetic oligonucleotide
cagacagauacucuuuuga

SEQ ID NO: 504603 - RNA, 19 nt, Artificial Sequence
  Description of Artificial Sequence: Synthetic oligonucleotide
auuaacgagcagucugaga

SEQ ID NO: 504604 - RNA, 19 nt, Artificial Sequence
  Description of Artificial Sequence: Synthetic oligonucleotide
cagcagagcaagauacggc

SEQ ID NO: 504605 - RNA, 19 nt, Artificial Sequence
  Description of Artificial Sequence: Synthetic oligonucleotide
aucuucaaccagaauuauc

SEQ ID NO: 504606 - RNA, 19 nt, Artificial Sequence
  Description of Artificial Sequence: Synthetic oligonucleotide
ucagaucaucuccaagcau

SEQ ID NO: 504607 - RNA, 19 nt, Artificial Sequence
  Description of Artificial Sequence: Synthetic oligonucleotide
uccuccguucuuacuagcu

SEQ ID NO: 504608 - RNA, 19 nt, Artificial Sequence
  Description of Artificial Sequence: Synthetic oligonucleotide
acuugagaccuguuuuacu

SEQ ID NO: 504609 - RNA, 19 nt, Artificial Sequence
  Description of Artificial Sequence: Synthetic oligonucleotide
gucagaucaucuccaagca

SEQ ID NO: 504610 - RNA, 19 nt, Artificial Sequence
  Description of Artificial Sequence: Synthetic oligonucleotide
acugucuaauguggagggc

SEQ ID NO: 504611 - RNA, 19 nt, Artificial Sequence
  Description of Artificial Sequence: Synthetic oligonucleotide
agcacgacauucaaaacau

SEQ ID NO: 504612 - RNA, 19 nt, Artificial Sequence
  Description of Artificial Sequence: Synthetic oligonucleotide
uuguagcuacagauguacu

SEQ ID NO: 504613 - RNA, 19 nt, Artificial Sequence
  Description of Artificial Sequence: Synthetic oligonucleotide
gagcaauuaacgagcaguc

SEQ ID NO: 504614 - RNA, 19 nt, Artificial Sequence
  Description of Artificial Sequence: Synthetic oligonucleotide
guaacauaucccguucaug

SEQ ID NO: 504615 - RNA, 19 nt, Artificial Sequence
  Description of Artificial Sequence: Synthetic oligonucleotide
ugauugcuaucuccacuga

SEQ ID NO: 504616 - RNA, 19 nt, Artificial Sequence
  Description of Artificial Sequence: Synthetic oligonucleotide
cccuaaaccauucacaaga

SEQ ID NO: 504617 - RNA, 19 nt, Artificial Sequence
  Description of Artificial Sequence: Synthetic oligonucleotide
acuuuugauucuaaauuaa

SEQ ID NO: 504618 - RNA, 19 nt, Artificial Sequence
  Description of Artificial Sequence: Synthetic oligonucleotide
aagauacggcaagagcuga

SEQ ID NO: 504619 - RNA, 19 nt, Artificial Sequence
  Description of Artificial Sequence: Synthetic oligonucleotide
aaccgcugauugcuaucuc

SEQ ID NO: 504620 - RNA, 19 nt, Artificial Sequence
  Description of Artificial Sequence: Synthetic oligonucleotide
acgacauucaaaacauacu

SEQ ID NO: 504621 - RNA, 19 nt, Artificial Sequence
  Description of Artificial Sequence: Synthetic oligonucleotide
gacaggauuaacccauucu

SEQ ID NO: 504622 - RNA, 19 nt, Artificial Sequence
  Description of Artificial Sequence: Synthetic oligonucleotide
ucuaauguggagggcaauu

SEQ ID NO: 504623 - RNA, 19 nt, Artificial Sequence
  Description of Artificial Sequence: Synthetic oligonucleotide
aaucuucaaccagaauuau

SEQ ID NO: 504624 - RNA, 19 nt, Artificial Sequence
  Description of Artificial Sequence: Synthetic oligonucleotide
cucauaauugcauccuaaa

SEQ ID NO: 504625 - RNA, 19 nt, Artificial Sequence
  Description of Artificial Sequence: Synthetic oligonucleotide
gaaacucacuggcucucac

SEQ ID NO: 504626 - RNA, 19 nt, Artificial Sequence
  Description of Artificial Sequence: Synthetic oligonucleotide
ccauaaagucugaauauuc

SEQ ID NO: 504627 - RNA, 19 nt, Artificial Sequence
  Description of Artificial Sequence: Synthetic oligonucleotide
guaguuuuggugaagguau

SEQ ID NO: 504628 - RNA, 19 nt, Artificial Sequence
  Description of Artificial Sequence: Synthetic oligonucleotide
ucuguuaaaggugcucuuu

SEQ ID NO: 504629 - RNA, 19 nt, Artificial Sequence
  Description of Artificial Sequence: Synthetic oligonucleotide
ugcauccuaaauuguuuua

SEQ ID NO: 504630 - RNA, 19 nt, Artificial Sequence
  Description of Artificial Sequence: Synthetic oligonucleotide
aucaguugucagaucaucu

SEQ ID NO: 504631 - RNA, 19 nt, Artificial Sequence
  Description of Artificial Sequence: Synthetic oligonucleotide
gaacacuccucuugaaucu

SEQ ID NO: 504632 - RNA, 19 nt, Artificial Sequence
  Description of Artificial Sequence: Synthetic oligonucleotide
uucuauagucaugauucua

SEQ ID NO: 504633 - RNA, 19 nt, Artificial Sequence
  Description of Artificial Sequence: Synthetic oligonucleotide
uacuagcuucuauagucau

SEQ ID NO: 504634 - RNA, 19 nt, Artificial Sequence
  Description of Artificial Sequence: Synthetic oligonucleotide
uguacaggcgguccuccau

SEQ ID NO: 504635 - RNA, 19 nt, Artificial Sequence
  Description of Artificial Sequence: Synthetic oligonucleotide
gaccauaaacugcucucuc

SEQ ID NO: 504636 - RNA, 19 nt, Artificial Sequence
  Description of Artificial Sequence: Synthetic oligonucleotide
gucuguuacugucuaaugu

SEQ ID NO: 504637 - RNA, 19 nt, Artificial Sequence
  Description of Artificial Sequence: Synthetic oligonucleotide
agagugcuuuugcugccag

SEQ ID NO: 504638 - RNA, 19 nt, Artificial Sequence
  Description of Artificial Sequence: Synthetic oligonucleotide
gguauggaacuauguagac

SEQ ID NO: 504639 - RNA, 19 nt, Artificial Sequence
  Description of Artificial Sequence: Synthetic oligonucleotide
cauuaugcugcaguucauc

SEQ ID NO: 504640 - RNA, 19 nt, Artificial Sequence
  Description of Artificial Sequence: Synthetic oligonucleotide
uggauuacuccuucacauu

SEQ ID NO: 504641 - RNA, 19 nt, Artificial Sequence
  Description of Artificial Sequence: Synthetic oligonucleotide
caugagaaucccgauaaaa

SEQ ID NO: 504642 - RNA, 19 nt, Artificial Sequence
  Description of Artificial Sequence: Synthetic oligonucleotide
uauuucgcauuggaauggu

SEQ ID NO: 504643 - RNA, 19 nt, Artificial Sequence
  Description of Artificial Sequence: Synthetic oligonucleotide
uucugugacuggaauuauu

SEQ ID NO: 504644 - RNA, 19 nt, Artificial Sequence
  Description of Artificial Sequence: Synthetic oligonucleotide
agcguagucuaauucuguu

SEQ ID NO: 504645 - RNA, 19 nt, Artificial Sequence
  Description of Artificial Sequence: Synthetic oligonucleotide
ucacaacauggccucuccu

SEQ ID NO: 504646 - RNA, 19 nt, Artificial Sequence
  Description of Artificial Sequence: Synthetic oligonucleotide
aagggagcguagucuaauu

SEQ ID NO: 504647 - RNA, 19 nt, Artificial Sequence
  Description of Artificial Sequence: Synthetic oligonucleotide
auaucaccagaacacccuu

SEQ ID NO: 504648 - RNA, 19 nt, Artificial Sequence
  Description of Artificial Sequence: Synthetic oligonucleotide
agaaaucuacguaguuuug

SEQ ID NO: 504649 - RNA, 19 nt, Artificial Sequence
  Description of Artificial Sequence: Synthetic oligonucleotide
ggauaucaccagaacaccc

SEQ ID NO: 504650 - RNA, 19 nt, Artificial Sequence
  Description of Artificial Sequence: Synthetic oligonucleotide
gacgcugucagagauuaua

SEQ ID NO: 504651 - RNA, 19 nt, Artificial Sequence
  Description of Artificial Sequence: Synthetic oligonucleotide
agauugguauggaacuaug

SEQ ID NO: 504652 - RNA, 19 nt, Artificial Sequence
  Description of Artificial Sequence: Synthetic oligonucleotide
ugccacaggguugaaacua

SEQ ID NO: 504653 - RNA, 19 nt, Artificial Sequence
  Description of Artificial Sequence: Synthetic oligonucleotide
ugagauugguauggaacua

SEQ ID NO: 504654 - RNA, 19 nt, Artificial Sequence
  Description of Artificial Sequence: Synthetic oligonucleotide
cuugagaccuguuuuacuu

SEQ ID NO: 504655 - RNA, 19 nt, Artificial Sequence
  Description of Artificial Sequence: Synthetic oligonucleotide
agcaauuaacgagcagucu

SEQ ID NO: 504656 - RNA, 19 nt, Artificial Sequence
  Description of Artificial Sequence: Synthetic oligonucleotide
uucagcuuuuaaccagguu

SEQ ID NO: 504657 - RNA, 19 nt, Artificial Sequence
  Description of Artificial Sequence: Synthetic oligonucleotide
aucugagauugguauggaa

SEQ ID NO: 504658 - RNA, 19 nt, Artificial Sequence
  Description of Artificial Sequence: Synthetic oligonucleotide
ucuaagacuucagcuuuua

SEQ ID NO: 504659 - RNA, 19 nt, Artificial Sequence
  Description of Artificial Sequence: Synthetic oligonucleotide
gcaagauacggcaagagcu

SEQ ID NO: 504660 - RNA, 19 nt, Artificial Sequence
  Description of Artificial Sequence: Synthetic oligonucleotide
gucagagauuauaaauaca

SEQ ID NO: 504661 - RNA, 19 nt, Artificial Sequence
  Description of Artificial Sequence: Synthetic oligonucleotide
accuaaagaugaagcagug

SEQ ID NO: 504662 - RNA, 19 nt, Artificial Sequence
  Description of Artificial Sequence: Synthetic oligonucleotide
uuaucuacccacggcucaa

SEQ ID NO: 504663 - RNA, 19 nt, Artificial Sequence
  Description of Artificial Sequence: Synthetic oligonucleotide
gacaucggccaaucugcac

SEQ ID NO: 504664 - RNA, 19 nt, Artificial Sequence
  Description of Artificial Sequence: Synthetic oligonucleotide
cuggauuacuccuucacau

SEQ ID NO: 504665 - RNA, 19 nt, Artificial Sequence
  Description of Artificial Sequence: Synthetic oligonucleotide
acguaguuuuggugaaggu

SEQ ID NO: 504666 - RNA, 19 nt, Artificial Sequence
  Description of Artificial Sequence: Synthetic oligonucleotide
acuucggauaucaccagaa

SEQ ID NO: 504667 - RNA, 19 nt, Artificial Sequence
  Description of Artificial Sequence: Synthetic oligonucleotide
guuggugccacaggguuga

SEQ ID NO: 504668 - RNA, 19 nt, Artificial Sequence
  Description of Artificial Sequence: Synthetic oligonucleotide
ggguugaaacuaauguuug

SEQ ID NO: 504669 - RNA, 19 nt, Artificial Sequence
  Description of Artificial Sequence: Synthetic oligonucleotide
gcugucagagauuauaaau

SEQ ID NO: 504670 - RNA, 19 nt, Artificial Sequence
  Description of Artificial Sequence: Synthetic oligonucleotide
ucgcauuggaauggucagc

SEQ ID NO: 504671 - RNA, 19 nt, Artificial Sequence
  Description of Artificial Sequence: Synthetic oligonucleotide
acugagcaauuaacgagca

SEQ ID NO: 504672 - RNA, 19 nt, Artificial Sequence
  Description of Artificial Sequence: Synthetic oligonucleotide
gauugguauggaacuaugu

SEQ ID NO: 504673 - RNA, 19 nt, Artificial Sequence
  Description of Artificial Sequence: Synthetic oligonucleotide
auuucgcauuggaaugguc

SEQ ID NO: 504674 - RNA, 19 nt, Artificial Sequence
  Description of Artificial Sequence: Synthetic oligonucleotide
cuacuuccaugaagaaauc

SEQ ID NO: 504675 - RNA, 19 nt, Artificial Sequence
  Description of Artificial Sequence: Synthetic oligonucleotide
acauaccaaaauggugucu

SEQ ID NO: 504676 - RNA, 19 nt, Artificial Sequence
  Description of Artificial Sequence: Synthetic oligonucleotide
agcguguauuccagucacc

SEQ ID NO: 504677 - RNA, 19 nt, Artificial Sequence
  Description of Artificial Sequence: Synthetic oligonucleotide
ggagcguagucuaauucug

SEQ ID NO: 504678 - RNA, 19 nt, Artificial Sequence
  Description of Artificial Sequence: Synthetic oligonucleotide
gaucucucagcauccgacu

SEQ ID NO: 504679 - RNA, 19 nt, Artificial Sequence
  Description of Artificial Sequence: Synthetic oligonucleotide
ucuagcuggcagucuguua

SEQ ID NO: 504680 - RNA, 19 nt, Artificial Sequence
  Description of Artificial Sequence: Synthetic oligonucleotide
acaccauaagucuguugua

SEQ ID NO: 504681 - RNA, 19 nt, Artificial Sequence
  Description of Artificial Sequence: Synthetic oligonucleotide
acauacuuccuuagaacuu

SEQ ID NO: 504682 - RNA, 19 nt, Artificial Sequence
  Description of Artificial Sequence: Synthetic oligonucleotide
agauacggcaagagcugag

SEQ ID NO: 504683 - RNA, 19 nt, Artificial Sequence
  Description of Artificial Sequence: Synthetic oligonucleotide
ggugaagguauaaauuaaa

SEQ ID NO: 504684 - RNA, 19 nt, Artificial Sequence
  Description of Artificial Sequence: Synthetic oligonucleotide
caugcuccuuuguauagua

SEQ ID NO: 504685 - RNA, 19 nt, Artificial Sequence
  Description of Artificial Sequence: Synthetic oligonucleotide
caggcauaugugacauuuc

SEQ ID NO: 504686 - RNA, 19 nt, Artificial Sequence
  Description of Artificial Sequence: Synthetic oligonucleotide
caggcaagggagcguaguc

SEQ ID NO: 504687 - RNA, 19 nt, Artificial Sequence
  Description of Artificial Sequence: Synthetic oligonucleotide
uccagucaccaccgaggac

SEQ ID NO: 504688 - RNA, 19 nt, Artificial Sequence
  Description of Artificial Sequence: Synthetic oligonucleotide
cuacguaguuuuggugaag

SEQ ID NO: 504689 - RNA, 19 nt, Artificial Sequence
  Description of Artificial Sequence: Synthetic oligonucleotide
auauucuggauuacuccuu

SEQ ID NO: 504690 - RNA, 19 nt, Artificial Sequence
  Description of Artificial Sequence: Synthetic oligonucleotide
cacauuuacaacaccccau

SEQ ID NO: 504691 - RNA, 19 nt, Artificial Sequence
  Description of Artificial Sequence: Synthetic oligonucleotide
agguuuauguaggggucga

SEQ ID NO: 504692 - RNA, 19 nt, Artificial Sequence
  Description of Artificial Sequence: Synthetic oligonucleotide
cauaucccguucaugcucu

SEQ ID NO: 504693 - RNA, 19 nt, Artificial Sequence
  Description of Artificial Sequence: Synthetic oligonucleotide
ugaguacuugagaccuguu

SEQ ID NO: 504694 - RNA, 19 nt, Artificial Sequence
  Description of Artificial Sequence: Synthetic oligonucleotide
gauacggcaagagcugagu

SEQ ID NO: 504695 - RNA, 19 nt, Artificial Sequence
  Description of Artificial Sequence: Synthetic oligonucleotide
guauggaacuauguagacu

SEQ ID NO: 504696 - RNA, 19 nt, Artificial Sequence
  Description of Artificial Sequence: Synthetic oligonucleotide
cagauguacuauauucccu

SEQ ID NO: 504697 - RNA, 19 nt, Artificial Sequence
  Description of Artificial Sequence: Synthetic oligonucleotide
uacaggcgguccuccauua

SEQ ID NO: 504698 - RNA, 19 nt, Artificial Sequence
  Description of Artificial Sequence: Synthetic oligonucleotide
augugacauuucuacuauu

SEQ ID NO: 504699 - RNA, 19 nt, Artificial Sequence
  Description of Artificial Sequence: Synthetic oligonucleotide
ccgggauuuauuggaaugc

SEQ ID NO: 504700 - RNA, 19 nt, Artificial Sequence
  Description of Artificial Sequence: Synthetic oligonucleotide
gggagcguagucuaauucu

SEQ ID NO: 504701 - RNA, 19 nt, Artificial Sequence
  Description of Artificial Sequence: Synthetic oligonucleotide
auacuuccuuagaacuuca

SEQ ID NO: 504702 - RNA, 19 nt, Artificial Sequence
  Description of Artificial Sequence: Synthetic oligonucleotide
cacggcucaaugucagaca

SEQ ID NO: 504703 - RNA, 19 nt, Artificial Sequence
  Description of Artificial Sequence: Synthetic oligonucleotide
gagauugguauggaacuau

SEQ ID NO: 504704 - RNA, 19 nt, Artificial Sequence
  Description of Artificial Sequence: Synthetic oligonucleotide
cugacgcugucagagauua

SEQ ID NO: 504705 - RNA, 19 nt, Artificial Sequence
  Description of Artificial Sequence: Synthetic oligonucleotide
acgcugucagagauuauaa

SEQ ID NO: 504706 - RNA, 19 nt, Artificial Sequence
  Description of Artificial Sequence: Synthetic oligonucleotide
aacaccccauaaagucuga

SEQ ID NO: 504707 - RNA, 19 nt, Artificial Sequence
  Description of Artificial Sequence: Synthetic oligonucleotide
cacuucggauaucaccaga

SEQ ID NO: 504708 - RNA, 19 nt, Artificial Sequence
  Description of Artificial Sequence: Synthetic oligonucleotide
aacacccuugacagagcaa

SEQ ID NO: 504709 - RNA, 19 nt, Artificial Sequence
  Description of Artificial Sequence: Synthetic oligonucleotide
ggauuacuccuucacauuu

SEQ ID NO: 504710 - RNA, 19 nt, Artificial Sequence
  Description of Artificial Sequence: Synthetic oligonucleotide
auaucccguucaugcucug

SEQ ID NO: 504711 - RNA, 19 nt, Artificial Sequence
  Description of Artificial Sequence: Synthetic oligonucleotide
guaggggucgaaagcuuga

SEQ ID NO: 504712 - RNA, 19 nt, Artificial Sequence
  Description of Artificial Sequence: Synthetic oligonucleotide
cauaaacugcucucucccu

SEQ ID NO: 504713 - RNA, 19 nt, Artificial Sequence
  Description of Artificial Sequence: Synthetic oligonucleotide
ggugcucuuuuagaguaca

SEQ ID NO: 504714 - RNA, 19 nt, Artificial Sequence
  Description of Artificial Sequence: Synthetic oligonucleotide
acugaguacuugagaccug

SEQ ID NO: 504715 - RNA, 19 nt, Artificial Sequence
  Description of Artificial Sequence: Synthetic oligonucleotide
gcguguauuccagucacca

SEQ ID NO: 504716 - RNA, 19 nt, Artificial Sequence
  Description of Artificial Sequence: Synthetic oligonucleotide
cugaguauagagcguguau

SEQ ID NO: 504717 - RNA, 19 nt, Artificial Sequence
  Description of Artificial Sequence: Synthetic oligonucleotide
ccaugaagaaaucuacgua

SEQ ID NO: 504718 - RNA, 19 nt, Artificial Sequence
  Description of Artificial Sequence: Synthetic oligonucleotide
ccuugacagagcaacucca

SEQ ID NO: 504719 - RNA, 19 nt, Artificial Sequence
  Description of Artificial Sequence: Synthetic oligonucleotide
gcugauugcuaucuccacu

SEQ ID NO: 504720 - RNA, 19 nt, Artificial Sequence
  Description of Artificial Sequence: Synthetic oligonucleotide
cugcuaucugagauuggua

SEQ ID NO: 504721 - RNA, 19 nt, Artificial Sequence
  Description of Artificial Sequence: Synthetic oligonucleotide
ggcaauuuucccgauacuu

SEQ ID NO: 504722 - RNA, 19 nt, Artificial Sequence
  Description of Artificial Sequence: Synthetic oligonucleotide
uuauugcacuucggauauc

SEQ ID NO: 504723 - RNA, 19 nt, Artificial Sequence
  Description of Artificial Sequence: Synthetic oligonucleotide
ccgauaaaacugauuaggu

SEQ ID NO: 504724 - RNA, 19 nt, Artificial Sequence
  Description of Artificial Sequence: Synthetic oligonucleotide
guggcucuuaacagaaagu

SEQ ID NO: 504725 - RNA, 19 nt, Artificial Sequence
  Description of Artificial Sequence: Synthetic oligonucleotide
cugaguacuugagaccugu

SEQ ID NO: 504726 - RNA, 19 nt, Artificial Sequence
  Description of Artificial Sequence: Synthetic oligonucleotide
ccgaggacaucugcaaagc

SEQ ID NO: 504727 - RNA, 19 nt, Artificial Sequence
  Description of Artificial Sequence: Synthetic oligonucleotide
cuguuaaaggugcucuuuu

SEQ ID NO: 504728 - RNA, 19 nt, Artificial Sequence
  Description of Artificial Sequence: Synthetic oligonucleotide
acaggcgguccuccauuau

SEQ ID NO: 504729 - RNA, 19 nt, Artificial Sequence
  Description of Artificial Sequence: Synthetic oligonucleotide
cgauaaaacugauuaggua

SEQ ID NO: 504730 - RNA, 19 nt, Artificial Sequence
  Description of Artificial Sequence: Synthetic oligonucleotide
gcguagucuaauucuguua

SEQ ID NO: 504731 - RNA, 19 nt, Artificial Sequence
  Description of Artificial Sequence: Synthetic oligonucleotide
caccucuuguagcuacaga

SEQ ID NO: 504732 - RNA, 19 nt, Artificial Sequence
  Description of Artificial Sequence: Synthetic oligonucleotide
gagcguagucuaauucugu

SEQ ID NO: 504733 - RNA, 19 nt, Artificial Sequence
  Description of Artificial Sequence: Synthetic oligonucleotide
aaccagguuucaaccucuu

SEQ ID NO: 504734 - RNA, 19 nt, Artificial Sequence
  Description of Artificial Sequence: Synthetic oligonucleotide
ugacgcugucagagauuau

SEQ ID NO: 504735 - RNA, 19 nt, Artificial Sequence
  Description of Artificial Sequence: Synthetic oligonucleotide
cucuuaacagaaagucauu

SEQ ID NO: 504736 - RNA, 19 nt, Artificial Sequence
  Description of Artificial Sequence: Synthetic oligonucleotide
caccccauaaagucugaau

SEQ ID NO: 504737 - RNA, 19 nt, Artificial Sequence
  Description of Artificial Sequence: Synthetic oligonucleotide
acaccccauaaagucugaa

SEQ ID NO: 504738 - RNA, 19 nt, Artificial Sequence
  Description of Artificial Sequence: Synthetic oligonucleotide
auguaggggucgaaagcuu

SEQ ID NO: 504739 - RNA, 19 nt, Artificial Sequence
  Description of Artificial Sequence: Synthetic oligonucleotide
ggaggaccuguuauuaaua

SEQ ID NO: 504740 - RNA, 19 nt, Artificial Sequence
  Description of Artificial Sequence: Synthetic oligonucleotide
acccuguuuuggcuucauu

SEQ ID NO: 504741 - RNA, 19 nt, Artificial Sequence
  Description of Artificial Sequence: Synthetic oligonucleotide
cacugacgcugucagagau

SEQ ID NO: 504742 - RNA, 19 nt, Artificial Sequence
  Description of Artificial Sequence: Synthetic oligonucleotide
ccgcugauugcuaucucca

SEQ ID NO: 504743 - RNA, 19 nt, Artificial Sequence
  Description of Artificial Sequence: Synthetic oligonucleotide
cuaucuccacugacgcugu

SEQ ID NO: 504744 - RNA, 19 nt, Artificial Sequence
  Description of Artificial Sequence: Synthetic oligonucleotide
ccgacuucaaugacguucu

SEQ ID NO: 504745 - RNA, 19 nt, Artificial Sequence
  Description of Artificial Sequence: Synthetic oligonucleotide
gaguaaccgcugauugcua

SEQ ID NO: 504746 - RNA, 19 nt, Artificial Sequence
  Description of Artificial Sequence: Synthetic oligonucleotide
gugagcgaauccccgggau

SEQ ID NO: 504747 - RNA, 19 nt, Artificial Sequence
  Description of Artificial Sequence: Synthetic oligonucleotide
guacaggcgguccuccauu

SEQ ID NO: 504748 - RNA, 19 nt, Artificial Sequence
  Description of Artificial Sequence: Synthetic oligonucleotide
gcuuagaaacucacuggcu

SEQ ID NO: 504749 - RNA, 19 nt, Artificial Sequence
  Description of Artificial Sequence: Synthetic oligonucleotide
cguaguuuuggugaaggua

SEQ ID NO: 504750 - RNA, 19 nt, Artificial Sequence
  Description of Artificial Sequence: Synthetic oligonucleotide
gcaugagaaucccgauaaa

SEQ ID NO: 504751 - RNA, 19 nt, Artificial Sequence
  Description of Artificial Sequence: Synthetic oligonucleotide
auccgacuucaaugacguu

SEQ ID NO: 504752 - RNA, 19 nt, Artificial Sequence
  Description of Artificial Sequence: Synthetic oligonucleotide
gggauuuauuggaaugcau

SEQ ID NO: 504753 - RNA, 19 nt, Artificial Sequence
  Description of Artificial Sequence: Synthetic oligonucleotide
agcgaauccccgggauuua

SEQ ID NO: 504754 - RNA, 19 nt, Artificial Sequence
  Description of Artificial Sequence: Synthetic oligonucleotide
gcaauagaacacuccucuu

SEQ ID NO: 504755 - RNA, 19 nt, Artificial Sequence
  Description of Artificial Sequence: Synthetic oligonucleotide
gccacaggguugaaacuaa

SEQ ID NO: 504756 - RNA, 19 nt, Artificial Sequence
  Description of Artificial Sequence: Synthetic oligonucleotide
cuucugugacuggaauuau

SEQ ID NO: 504757 - RNA, 19 nt, Artificial Sequence
  Description of Artificial Sequence: Synthetic oligonucleotide
cgggauuuauuggaaugca

SEQ ID NO: 504758 - RNA, 19 nt, Artificial Sequence
  Description of Artificial Sequence: Synthetic oligonucleotide
gucuaauguggagggcaau

SEQ ID NO: 504759 - RNA, 19 nt, Artificial Sequence
  Description of Artificial Sequence: Synthetic oligonucleotide
ccacugacgcugucagaga

SEQ ID NO: 504760 - RNA, 19 nt, Artificial Sequence
  Description of Artificial Sequence: Synthetic oligonucleotide
gcuuuugcugccaggcaau

SEQ ID NO: 504761 - RNA, 19 nt, Artificial Sequence
  Description of Artificial Sequence: Synthetic oligonucleotide
ggcgguccuccauuaugcu

SEQ ID NO: 504762 - RNA, 19 nt, Artificial Sequence
  Description of Artificial Sequence: Synthetic oligonucleotide
cccauaaagucugaauauu

SEQ ID NO: 504763 - RNA, 19 nt, Artificial Sequence
  Description of Artificial Sequence: Synthetic oligonucleotide
aucggccaaucugcacaua

SEQ ID NO: 504764 - RNA, 19 nt, Artificial Sequence
  Description of Artificial Sequence: Synthetic oligonucleotide
cuuggaucccaugcuccuu

SEQ ID NO: 504765 - RNA, 19 nt, Artificial Sequence
  Description of Artificial Sequence: Synthetic oligonucleotide
gcacgacauucaaaacaua

SEQ ID NO: 504766 - RNA, 19 nt, Artificial Sequence
  Description of Artificial Sequence: Synthetic oligonucleotide
gcgaauccccgggauuuau

SEQ ID NO: 504767 - RNA, 19 nt, Artificial Sequence
  Description of Artificial Sequence: Synthetic oligonucleotide
ccccgggauuuauuggaau

SEQ ID NO: 504768 - RNA, 19 nt, Artificial Sequence
  Description of Artificial Sequence: Synthetic oligonucleotide
ggaaugcaucacaccucuu

SEQ ID NO: 504769 - RNA, 19 nt, Artificial Sequence
  Description of Artificial Sequence: Synthetic oligonucleotide
aauagucgcucauagaggc

SEQ ID NO: 504770 - RNA, 19 nt, Artificial Sequence
  Description of Artificial Sequence: Synthetic oligonucleotide
acacacauaagcuugaccc

SEQ ID NO: 504771 - RNA, 19 nt, Artificial Sequence
  Description of Artificial Sequence: Synthetic oligonucleotide
aacagggcaauagacaucc

SEQ ID NO: 504772 - RNA, 19 nt, Artificial Sequence
  Description of Artificial Sequence: Synthetic oligonucleotide
aaccguauagcagaguccc

SEQ ID NO: 504773 - RNA, 19 nt, Artificial Sequence
  Description of Artificial Sequence: Synthetic oligonucleotide
gacucgauaggccacaggg

SEQ ID NO: 504774 - RNA, 19 nt, Artificial Sequence
  Description of Artificial Sequence: Synthetic oligonucleotide
aaagccaggcgcuuauagc

SEQ ID NO: 504775 - RNA, 19 nt, Artificial Sequence
  Description of Artificial Sequence: Synthetic oligonucleotide
uguauacuugacucgauag

SEQ ID NO: 504776 - RNA, 19 nt, Artificial Sequence
  Description of Artificial Sequence: Synthetic oligonucleotide
ggcuauauagcucacaagg

SEQ ID NO: 504777 - RNA, 19 nt, Artificial Sequence
  Description of Artificial Sequence: Synthetic oligonucleotide
auaagcuugaccccugugg

SEQ ID NO: 504778 - RNA, 19 nt, Artificial Sequence
  Description of Artificial Sequence: Synthetic oligonucleotide
gaaacaacagcguagugca

SEQ ID NO: 504779 - RNA, 19 nt, Artificial Sequence
  Description of Artificial Sequence: Synthetic oligonucleotide
ggaauagucgcucauagag

SEQ ID NO: 504780 - RNA, 19 nt, Artificial Sequence
  Description of Artificial Sequence: Synthetic oligonucleotide
ugaaacaacagcguagugc

SEQ ID NO: 504781 - RNA, 19 nt, Artificial Sequence
  Description of Artificial Sequence: Synthetic oligonucleotide
uguaagguguguaacccag

SEQ ID NO: 504782 - RNA, 19 nt, Artificial Sequence
  Description of Artificial Sequence: Synthetic oligonucleotide
aacgaugucuauuuauggu

SEQ ID NO: 504783 - RNA, 19 nt, Artificial Sequence
  Description of Artificial Sequence: Synthetic oligonucleotide
cuuugaaacaacagcguag

SEQ ID NO: 504784 - RNA, 19 nt, Artificial Sequence
  Description of Artificial Sequence: Synthetic oligonucleotide
gaacgaugucuauuuaugg

SEQ ID NO: 504785 - RNA, 19 nt, Artificial Sequence
  Description of Artificial Sequence: Synthetic oligonucleotide
uauauagcucacaaggaaa

SEQ ID NO: 504786 - RNA, 19 nt, Artificial Sequence
  Description of Artificial Sequence: Synthetic oligonucleotide
agagccgcguucuugagcg

SEQ ID NO: 504787 - RNA, 19 nt, Artificial Sequence
  Description of Artificial Sequence: Synthetic oligonucleotide
auuacauaaccaaaaguag

SEQ ID NO: 504788 - RNA, 19 nt, Artificial Sequence
  Description of Artificial Sequence: Synthetic oligonucleotide
agugauuccucaauaggcc

SEQ ID NO: 504789 - RNA, 19 nt, Artificial Sequence
  Description of Artificial Sequence: Synthetic oligonucleotide
aguucgguugaagacaagc

SEQ ID NO: 504790 - RNA, 19 nt, Artificial Sequence
  Description of Artificial Sequence: Synthetic oligonucleotide
aacagcguagugcaaguug

SEQ ID NO: 504791 - RNA, 19 nt, Artificial Sequence
  Description of Artificial Sequence: Synthetic oligonucleotide
guauacuugacucgauagg

SEQ ID NO: 504792 - RNA, 19 nt, Artificial Sequence
  Description of Artificial Sequence: Synthetic oligonucleotide
aauagucagaggcguaugu

SEQ ID NO: 504793 - RNA, 19 nt, Artificial Sequence
  Description of Artificial Sequence: Synthetic oligonucleotide
ugcguguagucguaggugg

SEQ ID NO: 504794 - RNA, 19 nt, Artificial Sequence
  Description of Artificial Sequence: Synthetic oligonucleotide
agugaauaaaggccuuggg

SEQ ID NO: 504795 - RNA, 19 nt, Artificial Sequence
  Description of Artificial Sequence: Synthetic oligonucleotide
cacccagugaauaaaggcc

SEQ ID NO: 504796 - RNA, 19 nt, Artificial Sequence
  Description of Artificial Sequence: Synthetic oligonucleotide
uccauuagagacagggucu

SEQ ID NO: 504797 - RNA, 19 nt, Artificial Sequence
  Description of Artificial Sequence: Synthetic oligonucleotide
ucgguugaagacaagcugu

SEQ ID NO: 504798 - RNA, 19 nt, Artificial Sequence
  Description of Artificial Sequence: Synthetic oligonucleotide
uuggcuauauagcucacaa

SEQ ID NO: 504799 - RNA, 19 nt, Artificial Sequence
  Description of Artificial Sequence: Synthetic oligonucleotide
aaaugguaccguuccacca

SEQ ID NO: 504800 - RNA, 19 nt, Artificial Sequence
  Description of Artificial Sequence: Synthetic oligonucleotide
uauaguucucaccugguuu

SEQ ID NO: 504801 - RNA, 19 nt, Artificial Sequence
  Description of Artificial Sequence: Synthetic oligonucleotide
uccagcgcauuacauaacc

SEQ ID NO: 504802 - RNA, 19 nt, Artificial Sequence
  Description of Artificial Sequence: Synthetic oligonucleotide
gaaaugguaccguuccacc

SEQ ID NO: 504803 - RNA, 19 nt, Artificial Sequence
  Description of Artificial Sequence: Synthetic oligonucleotide
gaauagucgcucauagagg

SEQ ID NO: 504804 - RNA, 19 nt, Artificial Sequence
  Description of Artificial Sequence: Synthetic oligonucleotide
ugcgguguauacuugacuc

SEQ ID NO: 504805 - RNA, 19 nt, Artificial Sequence
  Description of Artificial Sequence: Synthetic oligonucleotide
caaaccguauagcagaguc

SEQ ID NO: 504806 - RNA, 19 nt, Artificial Sequence
  Description of Artificial Sequence: Synthetic oligonucleotide
uggcauguccaauaugcag

SEQ ID NO: 504807 - RNA, 19 nt, Artificial Sequence
  Description of Artificial Sequence: Synthetic oligonucleotide
cuggucaaaauagucagag

SEQ ID NO: 504808 - RNA, 19 nt, Artificial Sequence
  Description of Artificial Sequence: Synthetic oligonucleotide
ccuuguuucgcucaggccg

SEQ ID NO: 504809 - RNA, 19 nt, Artificial Sequence
  Description of Artificial Sequence: Synthetic oligonucleotide
aaaauagucagaggcguau

SEQ ID NO: 504810 - RNA, 19 nt, Artificial Sequence
  Description of Artificial Sequence: Synthetic oligonucleotide
guagugcaaguugagacgg

SEQ ID NO: 504811 - RNA, 19 nt, Artificial Sequence
  Description of Artificial Sequence: Synthetic oligonucleotide
cuucauucgaaguguggcc

SEQ ID NO: 504812 - RNA, 19 nt, Artificial Sequence
  Description of Artificial Sequence: Synthetic oligonucleotide
ugagucgagaggccaaacc

SEQ ID NO: 504813 - RNA, 19 nt, Artificial Sequence
  Description of Artificial Sequence: Synthetic oligonucleotide
auauagcucacaaggaaag

SEQ ID NO: 504814 - RNA, 19 nt, Artificial Sequence
  Description of Artificial Sequence: Synthetic oligonucleotide
guugagacggccauauucc

SEQ ID NO: 504815 - RNA, 19 nt, Artificial Sequence
  Description of Artificial Sequence: Synthetic oligonucleotide
aagagucguggaucauccc

SEQ ID NO: 504816 - RNA, 19 nt, Artificial Sequence
  Description of Artificial Sequence: Synthetic oligonucleotide
aggcguaucucacacacca

SEQ ID NO: 504817 - RNA, 19 nt, Artificial Sequence
  Description of Artificial Sequence: Synthetic oligonucleotide
gcucaauggagucacaaag

SEQ ID NO: 504818 - RNA, 19 nt, Artificial Sequence
  Description of Artificial Sequence: Synthetic oligonucleotide
guauccaaggcgcucaaac

SEQ ID NO: 504819 - RNA, 19 nt, Artificial Sequence
  Description of Artificial Sequence: Synthetic oligonucleotide
acuuaggaauccaccaggc

SEQ ID NO: 504820 - RNA, 19 nt, Artificial Sequence
  Description of Artificial Sequence: Synthetic oligonucleotide
guaggaagaccgucgagcc

SEQ ID NO: 504821 - RNA, 19 nt, Artificial Sequence
  Description of Artificial Sequence: Synthetic oligonucleotide
guggaaaaccccugcgucg

SEQ ID NO: 504822 - RNA, 19 nt, Artificial Sequence
  Description of Artificial Sequence: Synthetic oligonucleotide
gaugacuccgcacguauuc

SEQ ID NO: 504823 - RNA, 19 nt, Artificial Sequence
  Description of Artificial Sequence: Synthetic oligonucleotide
augucuauuuaugguggcc

SEQ ID NO: 504824 - RNA, 19 nt, Artificial Sequence
  Description of Artificial Sequence: Synthetic oligonucleotide
ugucuauuuaugguggccu

SEQ ID NO: 504825 - RNA, 19 nt, Artificial Sequence
  Description of Artificial Sequence: Synthetic oligonucleotide
gaggccaaaccguauagca

SEQ ID NO: 504826 - RNA, 19 nt, Artificial Sequence
  Description of Artificial Sequence: Synthetic oligonucleotide
agagucguggaucauccca

SEQ ID NO: 504827 - RNA, 19 nt, Artificial Sequence
  Description of Artificial Sequence: Synthetic oligonucleotide
gaugucuauuuaugguggc

SEQ ID NO: 504828 - RNA, 19 nt, Artificial Sequence
  Description of Artificial Sequence: Synthetic oligonucleotide
uguaagugugaagagucgu

SEQ ID NO: 504829 - RNA, 19 nt, Artificial Sequence
  Description of Artificial Sequence: Synthetic oligonucleotide
uccauuguggucugugcca

SEQ ID NO: 504830 - RNA, 19 nt, Artificial Sequence
  Description of Artificial Sequence: Synthetic oligonucleotide
acguauucaagagcagcgc

SEQ ID NO: 504831 - RNA, 19 nt, Artificial Sequence
  Description of Artificial Sequence: Synthetic oligonucleotide
agugugacaguucgguuga

SEQ ID NO: 504832 - RNA, 19 nt, Artificial Sequence
  Description of Artificial Sequence: Synthetic oligonucleotide
cacacauaagcuugacccc

SEQ ID NO: 504833 - RNA, 19 nt, Artificial Sequence
  Description of Artificial Sequence: Synthetic oligonucleotide
uauccaaggcgcucaaacu

SEQ ID NO: 504834 - RNA, 19 nt, Artificial Sequence
  Description of Artificial Sequence: Synthetic oligonucleotide
cuguaagugugaagagucg

SEQ ID NO: 504835 - RNA, 19 nt, Artificial Sequence
  Description of Artificial Sequence: Synthetic oligonucleotide
agaggcguaugucacuuug

SEQ ID NO: 504836 - RNA, 19 nt, Artificial Sequence
  Description of Artificial Sequence: Synthetic oligonucleotide
aagacagacgccggguauc

SEQ ID NO: 504837 - RNA, 19 nt, Artificial Sequence
  Description of Artificial Sequence: Synthetic oligonucleotide
ucuauuuaugguggccucc

SEQ ID NO: 504838 - RNA, 19 nt, Artificial Sequence
  Description of Artificial Sequence: Synthetic oligonucleotide
auaguucucaccugguuua

SEQ ID NO: 504839 - RNA, 19 nt, Artificial Sequence
  Description of Artificial Sequence: Synthetic oligonucleotide
ugcgucguagggcuguaag

SEQ ID NO: 504840 - RNA, 19 nt, Artificial Sequence
  Description of Artificial Sequence: Synthetic oligonucleotide
ccgcuuugaaacaacagcg

SEQ ID NO: 504841 - RNA, 19 nt, Artificial Sequence
  Description of Artificial Sequence: Synthetic oligonucleotide
agagcgguccacuaaugcu

SEQ ID NO: 504842 - RNA, 19 nt, Artificial Sequence
  Description of Artificial Sequence: Synthetic oligonucleotide
gcaauagacauccagcgca

SEQ ID NO: 504843 - RNA, 19 nt, Artificial Sequence
  Description of Artificial Sequence: Synthetic oligonucleotide
gauaccauuguuggccuug

SEQ ID NO: 504844 - RNA, 19 nt, Artificial Sequence
  Description of Artificial Sequence: Synthetic oligonucleotide
uccgcacguauucaagagc

SEQ ID NO: 504845 - RNA, 19 nt, Artificial Sequence
  Description of Artificial Sequence: Synthetic oligonucleotide
ucguagggcuguaagugug

SEQ ID NO: 504846 - RNA, 19 nt, Artificial Sequence
  Description of Artificial Sequence: Synthetic oligonucleotide
uucauucgaaguguggccu

SEQ ID NO: 504847 - RNA, 19 nt, Artificial Sequence
  Description of Artificial Sequence: Synthetic oligonucleotide
cuauauagcucacaaggaa

SEQ ID NO: 504848 - RNA, 19 nt, Artificial Sequence
  Description of Artificial Sequence: Synthetic oligonucleotide
ucgugugcguaccuguccc

SEQ ID NO: 504849 - RNA, 19 nt, Artificial Sequence
  Description of Artificial Sequence: Synthetic oligonucleotide
ucgauaggccacagggucc

SEQ ID NO: 504850 - RNA, 19 nt, Artificial Sequence
  Description of Artificial Sequence: Synthetic oligonucleotide
guaugucucaggcccacag

SEQ ID NO: 504851 - RNA, 19 nt, Artificial Sequence
  Description of Artificial Sequence: Synthetic oligonucleotide
auagucagaggcguauguc

SEQ ID NO: 504852 - RNA, 19 nt, Artificial Sequence
  Description of Artificial Sequence: Synthetic oligonucleotide
ugcaaguugagacggccau

SEQ ID NO: 504853 - RNA, 19 nt, Artificial Sequence
  Description of Artificial Sequence: Synthetic oligonucleotide
uuguaagguguguaaccca

SEQ ID NO: 504854 - RNA, 19 nt, Artificial Sequence
  Description of Artificial Sequence: Synthetic oligonucleotide
agcgaugccggguucaggu

SEQ ID NO: 504855 - RNA, 19 nt, Artificial Sequence
  Description of Artificial Sequence: Synthetic oligonucleotide
ugucacgcccacccgagca

SEQ ID NO: 504856 - RNA, 19 nt, Artificial Sequence
  Description of Artificial Sequence: Synthetic oligonucleotide
guuucgcucaggccgaggc

SEQ ID NO: 504857 - RNA, 19 nt, Artificial Sequence
  Description of Artificial Sequence: Synthetic oligonucleotide
uggcuauauagcucacaag

SEQ ID NO: 504858 - RNA, 19 nt, Artificial Sequence
  Description of Artificial Sequence: Synthetic oligonucleotide
agcgcagaaaacagauacc

SEQ ID NO: 504859 - RNA, 19 nt, Artificial Sequence
  Description of Artificial Sequence: Synthetic oligonucleotide
gacguagccaguaugucuc

SEQ ID NO: 504860 - RNA, 19 nt, Artificial Sequence
  Description of Artificial Sequence: Synthetic oligonucleotide
gugacaguucgguugaaga

SEQ ID NO: 504861 - RNA, 19 nt, Artificial Sequence
  Description of Artificial Sequence: Synthetic oligonucleotide
uuggcauguccaauaugca

SEQ ID NO: 504862 - RNA, 19 nt, Artificial Sequence
  Description of Artificial Sequence: Synthetic oligonucleotide
augugguuccauugugguc

SEQ ID NO: 504863 - RNA, 19 nt, Artificial Sequence
  Description of Artificial Sequence: Synthetic oligonucleotide
accaccuguagcgaugccg

SEQ ID NO: 504864 - RNA, 19 nt, Artificial Sequence
  Description of Artificial Sequence: Synthetic oligonucleotide
agugcguguagucguaggu

SEQ ID NO: 504865 - RNA, 19 nt, Artificial Sequence
  Description of Artificial Sequence: Synthetic oligonucleotide
agacagugcguguagucgu

SEQ ID NO: 504866 - RNA, 19 nt, Artificial Sequence
  Description of Artificial Sequence: Synthetic oligonucleotide
uauuggaaaugguaccguu

SEQ ID NO: 504867 - RNA, 19 nt, Artificial Sequence
  Description of Artificial Sequence: Synthetic oligonucleotide
uugagacggccauauuccc

SEQ ID NO: 504868 - RNA, 19 nt, Artificial Sequence
  Description of Artificial Sequence: Synthetic oligonucleotide
ucaaugacguagccaguau

SEQ ID NO: 504869 - RNA, 19 nt, Artificial Sequence
  Description of Artificial Sequence: Synthetic oligonucleotide
cacuuggauguccaagggc

SEQ ID NO: 504870 - RNA, 19 nt, Artificial Sequence
  Description of Artificial Sequence: Synthetic oligonucleotide
uggaauagucgcucauaga

SEQ ID NO: 504871 - RNA, 19 nt, Artificial Sequence
  Description of Artificial Sequence: Synthetic oligonucleotide
aaguuagugaugacaacuu

SEQ ID NO: 504872 - RNA, 19 nt, Artificial Sequence
  Description of Artificial Sequence: Synthetic oligonucleotide
uauagcucacaaggaaaga

SEQ ID NO: 504873 - RNA, 19 nt, Artificial Sequence
  Description of Artificial Sequence: Synthetic oligonucleotide
caaugacguagccaguaug

SEQ ID NO: 504874 - RNA, 19 nt, Artificial Sequence
  Description of Artificial Sequence: Synthetic oligonucleotide
gagucguggaucaucccag

SEQ ID NO: 504875 - RNA, 19 nt, Artificial Sequence
  Description of Artificial Sequence: Synthetic oligonucleotide
agaccgucgagccuggaau

SEQ ID NO: 504876 - RNA, 19 nt, Artificial Sequence
  Description of Artificial Sequence: Synthetic oligonucleotide
agacagacgccggguaucc

SEQ ID NO: 504877 - RNA, 19 nt, Artificial Sequence
  Description of Artificial Sequence: Synthetic oligonucleotide
ugugacaguucgguugaag

SEQ ID NO: 504878 - RNA, 19 nt, Artificial Sequence
  Description of Artificial Sequence: Synthetic oligonucleotide
ggaacgaugucuauuuaug

SEQ ID NO: 504879 - RNA, 19 nt, Artificial Sequence
  Description of Artificial Sequence: Synthetic oligonucleotide
guaagugugaagagucgug

SEQ ID NO: 504880 - RNA, 19 nt, Artificial Sequence
  Description of Artificial Sequence: Synthetic oligonucleotide
uagacauccagcgcauuac

SEQ ID NO: 504881 - RNA, 19 nt, Artificial Sequence
  Description of Artificial Sequence: Synthetic oligonucleotide
uucacaccuuuccuggauc

SEQ ID NO: 504882 - RNA, 19 nt, Artificial Sequence
  Description of Artificial Sequence: Synthetic oligonucleotide
auaguauauggagugguua

SEQ ID NO: 504883 - RNA, 19 nt, Artificial Sequence
  Description of Artificial Sequence: Synthetic oligonucleotide
ucuugagcgucucgcgcgc

SEQ ID NO: 504884 - RNA, 19 nt, Artificial Sequence
  Description of Artificial Sequence: Synthetic oligonucleotide
guaggugggauagaugcac

SEQ ID NO: 504885 - RNA, 19 nt, Artificial Sequence
  Description of Artificial Sequence: Synthetic oligonucleotide
uccccugugcgauggugcg

SEQ ID NO: 504886 - RNA, 19 nt, Artificial Sequence
  Description of Artificial Sequence: Synthetic oligonucleotide
cuccgcacguauucaagag

SEQ ID NO: 504887 - RNA, 19 nt, Artificial Sequence
  Description of Artificial Sequence: Synthetic oligonucleotide
aguauauggagugguuaca

SEQ ID NO: 504888 - RNA, 19 nt, Artificial Sequence
  Description of Artificial Sequence: Synthetic oligonucleotide
aguuagugaugacaacuuu

SEQ ID NO: 504889 - RNA, 19 nt, Artificial Sequence
  Description of Artificial Sequence: Synthetic oligonucleotide
uucgaaguguggccucacc

SEQ ID NO: 504890 - RNA, 19 nt, Artificial Sequence
  Description of Artificial Sequence: Synthetic oligonucleotide
acuccgcacguauucaaga

SEQ ID NO: 504891 - RNA, 19 nt, Artificial Sequence
  Description of Artificial Sequence: Synthetic oligonucleotide
gcguagugcaaguugagac

SEQ ID NO: 504892 - RNA, 19 nt, Artificial Sequence
  Description of Artificial Sequence: Synthetic oligonucleotide
uggaucaucccagucccga

SEQ ID NO: 504893 - RNA, 19 nt, Artificial Sequence
  Description of Artificial Sequence: Synthetic oligonucleotide
agcgguccacuaaugcucc

SEQ ID NO: 504894 - RNA, 19 nt, Artificial Sequence
  Description of Artificial Sequence: Synthetic oligonucleotide
ggaucuacagagaaguauc

SEQ ID NO: 504895 - RNA, 19 nt, Artificial Sequence
  Description of Artificial Sequence: Synthetic oligonucleotide
aggcgcucaaacugaaacu

SEQ ID NO: 504896 - RNA, 19 nt, Artificial Sequence
  Description of Artificial Sequence: Synthetic oligonucleotide
gauggugcgguguauacuu

SEQ ID NO: 504897 - RNA, 19 nt, Artificial Sequence
  Description of Artificial Sequence: Synthetic oligonucleotide
acagcguagugcaaguuga

SEQ ID NO: 504898 - RNA, 19 nt, Artificial Sequence
  Description of Artificial Sequence: Synthetic oligonucleotide
auauuggaaaugguaccgu

SEQ ID NO: 504899 - RNA, 19 nt, Artificial Sequence
  Description of Artificial Sequence: Synthetic oligonucleotide
auggccucagguggaaaac

SEQ ID NO: 504900 - RNA, 19 nt, Artificial Sequence
  Description of Artificial Sequence: Synthetic oligonucleotide
uggugcgguguauacuuga

SEQ ID NO: 504901 - RNA, 19 nt, Artificial Sequence
  Description of Artificial Sequence: Synthetic oligonucleotide
agcuugaccccuguggaug

SEQ ID NO: 504902 - RNA, 19 nt, Artificial Sequence
  Description of Artificial Sequence: Synthetic oligonucleotide
acccagugaauaaaggccu

SEQ ID NO: 504903 - RNA, 19 nt, Artificial Sequence
  Description of Artificial Sequence: Synthetic oligonucleotide
uagggcuguaagugugaag

SEQ ID NO: 504904 - RNA, 19 nt, Artificial Sequence
  Description of Artificial Sequence: Synthetic oligonucleotide
ggagcaggaaaguuaguga

SEQ ID NO: 504905 - RNA, 19 nt, Artificial Sequence
  Description of Artificial Sequence: Synthetic oligonucleotide
gagcgguccacuaaugcuc

SEQ ID NO: 504906 - RNA, 19 nt, Artificial Sequence
  Description of Artificial Sequence: Synthetic oligonucleotide
auaccauuguuggccuugg

SEQ ID NO: 504907 - RNA, 19 nt, Artificial Sequence
  Description of Artificial Sequence: Synthetic oligonucleotide
uauuggcuauauagcucac

SEQ ID NO: 504908 - RNA, 19 nt, Artificial Sequence
  Description of Artificial Sequence: Synthetic oligonucleotide
uggcccaaagccaggcgcu

SEQ ID NO: 504909 - RNA, 19 nt, Artificial Sequence
  Description of Artificial Sequence: Synthetic oligonucleotide
ucauucgaaguguggccuc

SEQ ID NO: 504910 - RNA, 19 nt, Artificial Sequence
  Description of Artificial Sequence: Synthetic oligonucleotide
ccaccuguagcgaugccgg

SEQ ID NO: 504911 - RNA, 19 nt, Artificial Sequence
  Description of Artificial Sequence: Synthetic oligonucleotide
gcgguguauacuugacucg

SEQ ID NO: 504912 - RNA, 19 nt, Artificial Sequence
  Description of Artificial Sequence: Synthetic oligonucleotide
gucuauuuaugguggccuc

SEQ ID NO: 504913 - RNA, 19 nt, Artificial Sequence
  Description of Artificial Sequence: Synthetic oligonucleotide
gacuccgcacguauucaag

SEQ ID NO: 504914 - RNA, 19 nt, Artificial Sequence
  Description of Artificial Sequence: Synthetic oligonucleotide
cagugcguguagucguagg

SEQ ID NO: 504915 - RNA, 19 nt, Artificial Sequence
  Description of Artificial Sequence: Synthetic oligonucleotide
aggccaaaccguauagcag

SEQ ID NO: 504916 - RNA, 19 nt, Artificial Sequence
  Description of Artificial Sequence: Synthetic oligonucleotide
cagcgcauuacauaaccaa

SEQ ID NO: 504917 - RNA, 19 nt, Artificial Sequence
  Description of Artificial Sequence: Synthetic oligonucleotide
ugacuccgcacguauucaa

SEQ ID NO: 504918 - RNA, 19 nt, Artificial Sequence
  Description of Artificial Sequence: Synthetic oligonucleotide
aggcguaugucacuuugua

SEQ ID NO: 504919 - RNA, 19 nt, Artificial Sequence
  Description of Artificial Sequence: Synthetic oligonucleotide
agcgcauuacauaaccaaa

SEQ ID NO: 504920 - RNA, 19 nt, Artificial Sequence
  Description of Artificial Sequence: Synthetic oligonucleotide
agucgagaggccaaaccgu

SEQ ID NO: 504921 - RNA, 19 nt, Artificial Sequence
  Description of Artificial Sequence: Synthetic oligonucleotide
cagauccauaguauaugga

SEQ ID NO: 504922 - RNA, 19 nt, Artificial Sequence
  Description of Artificial Sequence: Synthetic oligonucleotide
agucacaaagacagugcgu

SEQ ID NO: 504923 - RNA, 19 nt, Artificial Sequence
  Description of Artificial Sequence: Synthetic oligonucleotide
guguauacuugacucgaua

SEQ ID NO: 504924 - RNA, 19 nt, Artificial Sequence
  Description of Artificial Sequence: Synthetic oligonucleotide
guaugggguggugaggcac

SEQ ID NO: 504925 - RNA, 19 nt, Artificial Sequence
  Description of Artificial Sequence: Synthetic oligonucleotide
agcguagugcaaguugaga

SEQ ID NO: 504926 - RNA, 19 nt, Artificial Sequence
  Description of Artificial Sequence: Synthetic oligonucleotide
ucgagaggccaaaccguau

SEQ ID NO: 504927 - RNA, 19 nt, Artificial Sequence
  Description of Artificial Sequence: Synthetic oligonucleotide
guaagguguguaacccagc

SEQ ID NO: 504928 - RNA, 19 nt, Artificial Sequence
  Description of Artificial Sequence: Synthetic oligonucleotide
cagcguagugcaaguugag

SEQ ID NO: 504929 - RNA, 19 nt, Artificial Sequence
  Description of Artificial Sequence: Synthetic oligonucleotide
cugagugcucagagccgcg

SEQ ID NO: 504930 - RNA, 19 nt, Artificial Sequence
  Description of Artificial Sequence: Synthetic oligonucleotide
cguggaucaucccaguccc

SEQ ID NO: 504931 - RNA, 19 nt, Artificial Sequence
  Description of Artificial Sequence: Synthetic oligonucleotide
cguaucucacacaccagag

SEQ ID NO: 504932 - RNA, 19 nt, Artificial Sequence
  Description of Artificial Sequence: Synthetic oligonucleotide
aguuuggcacuuggauguc

SEQ ID NO: 504933 - RNA, 19 nt, Artificial Sequence
  Description of Artificial Sequence: Synthetic oligonucleotide
uucacgccacauuccugcu

SEQ ID NO: 504934 - RNA, 19 nt, Artificial Sequence
  Description of Artificial Sequence: Synthetic oligonucleotide
ugggaacgaugucuauuua

SEQ ID NO: 504935 - RNA, 19 nt, Artificial Sequence
  Description of Artificial Sequence: Synthetic oligonucleotide
agccgcguucuugagcguc

SEQ ID NO: 504936 - RNA, 19 nt, Artificial Sequence
  Description of Artificial Sequence: Synthetic oligonucleotide
gacgccggguaucccugag

SEQ ID NO: 504937 - RNA, 19 nt, Artificial Sequence
  Description of Artificial Sequence: Synthetic oligonucleotide
gucucgcgcgccuuguuuc

SEQ ID NO: 504938 - RNA, 19 nt, Artificial Sequence
  Description of Artificial Sequence: Synthetic oligonucleotide
uggcucguggagcuguguu

SEQ ID NO: 504939 - RNA, 19 nt, Artificial Sequence
  Description of Artificial Sequence: Synthetic oligonucleotide
ugagugcucagagccgcgu

SEQ ID NO: 504940 - RNA, 19 nt, Artificial Sequence
  Description of Artificial Sequence: Synthetic oligonucleotide
ccgagcacagaaguuauug

SEQ ID NO: 504941 - RNA, 19 nt, Artificial Sequence
  Description of Artificial Sequence: Synthetic oligonucleotide
augacuccgcacguauuca

SEQ ID NO: 504942 - RNA, 19 nt, Artificial Sequence
  Description of Artificial Sequence: Synthetic oligonucleotide
acucgauaggccacagggu

SEQ ID NO: 504943 - RNA, 19 nt, Artificial Sequence
  Description of Artificial Sequence: Synthetic oligonucleotide
ccacuaaugcuccuuccac

SEQ ID NO: 504944 - RNA, 19 nt, Artificial Sequence
  Description of Artificial Sequence: Synthetic oligonucleotide
acagugcguguagucguag

SEQ ID NO: 504945 - RNA, 19 nt, Artificial Sequence
  Description of Artificial Sequence: Synthetic oligonucleotide
auccagcgcauuacauaac

SEQ ID NO: 504946 - RNA, 19 nt, Artificial Sequence
  Description of Artificial Sequence: Synthetic oligonucleotide
aguucucaccugguuuaug

SEQ ID NO: 504947 - RNA, 19 nt, Artificial Sequence
  Description of Artificial Sequence: Synthetic oligonucleotide
aaguugagacggccauauu

SEQ ID NO: 504948 - RNA, 19 nt, Artificial Sequence
  Description of Artificial Sequence: Synthetic oligonucleotide
ggaguaugggguggugagg

SEQ ID NO: 504949 - RNA, 19 nt, Artificial Sequence
  Description of Artificial Sequence: Synthetic oligonucleotide
caauaggccguucccucca

SEQ ID NO: 504950 - RNA, 19 nt, Artificial Sequence
  Description of Artificial Sequence: Synthetic oligonucleotide
guucgguugaagacaagcu

SEQ ID NO: 504951 - RNA, 19 nt, Artificial Sequence
  Description of Artificial Sequence: Synthetic oligonucleotide
gaggcguaucucacacacc

SEQ ID NO: 504952 - RNA, 19 nt, Artificial Sequence
  Description of Artificial Sequence: Synthetic oligonucleotide
gucguggaucaucccaguc

SEQ ID NO: 504953 - RNA, 19 nt, Artificial Sequence
  Description of Artificial Sequence: Synthetic oligonucleotide
accuguagcgaugccgggu

SEQ ID NO: 504954 - RNA, 19 nt, Artificial Sequence
  Description of Artificial Sequence: Synthetic oligonucleotide
guagcgaugccggguucag

SEQ ID NO: 504955 - RNA, 19 nt, Artificial Sequence
  Description of Artificial Sequence: Synthetic oligonucleotide
gucguaggugggauagaug

SEQ ID NO: 504956 - RNA, 19 nt, Artificial Sequence
  Description of Artificial Sequence: Synthetic oligonucleotide
cugggaacgaugucuauuu

SEQ ID NO: 504957 - RNA, 19 nt, Artificial Sequence
  Description of Artificial Sequence: Synthetic oligonucleotide
uagcgaugccggguucagg

SEQ ID NO: 504958 - RNA, 19 nt, Artificial Sequence
  Description of Artificial Sequence: Synthetic oligonucleotide
ggccguucccuccauggug

SEQ ID NO: 504959 - RNA, 19 nt, Artificial Sequence
  Description of Artificial Sequence: Synthetic oligonucleotide
caccuguagcgaugccggg

SEQ ID NO: 504960 - RNA, 19 nt, Artificial Sequence
  Description of Artificial Sequence: Synthetic oligonucleotide
guaugucacuuuguaaggu

SEQ ID NO: 504961 - RNA, 19 nt, Artificial Sequence
  Description of Artificial Sequence: Synthetic oligonucleotide
ccguauagcagagucccag

SEQ ID NO: 504962 - RNA, 19 nt, Artificial Sequence
  Description of Artificial Sequence: Synthetic oligonucleotide
ugcgauggugcgguguaua

SEQ ID NO: 504963 - RNA, 19 nt, Artificial Sequence
  Description of Artificial Sequence: Synthetic oligonucleotide
acguagccaguaugucuca

SEQ ID NO: 504964 - RNA, 19 nt, Artificial Sequence
  Description of Artificial Sequence: Synthetic oligonucleotide
gucacgcccacccgagcac

SEQ ID NO: 504965 - RNA, 19 nt, Artificial Sequence
  Description of Artificial Sequence: Synthetic oligonucleotide
ucgcucauagaggcguauc

SEQ ID NO: 504966 - RNA, 19 nt, Artificial Sequence
  Description of Artificial Sequence: Synthetic oligonucleotide
cauaguauauggagugguu

SEQ ID NO: 504967 - RNA, 19 nt, Artificial Sequence
  Description of Artificial Sequence: Synthetic oligonucleotide
aaacaacagcguagugcaa

SEQ ID NO: 504968 - RNA, 19 nt, Artificial Sequence
  Description of Artificial Sequence: Synthetic oligonucleotide
aggccguucccuccauggu

SEQ ID NO: 504969 - RNA, 19 nt, Artificial Sequence
  Description of Artificial Sequence: Synthetic oligonucleotide
gucguagggcuguaagugu

SEQ ID NO: 504970 - RNA, 19 nt, Artificial Sequence
  Description of Artificial Sequence: Synthetic oligonucleotide
cauggcucguggagcugug

SEQ ID NO: 504971 - RNA, 19 nt, Artificial Sequence
  Description of Artificial Sequence: Synthetic oligonucleotide
ggcguaugucacuuuguaa

SEQ ID NO: 504972 - RNA, 19 nt, Artificial Sequence
  Description of Artificial Sequence: Synthetic oligonucleotide
caaguugagacggccauau

SEQ ID NO: 504973 - RNA, 19 nt, Artificial Sequence
  Description of Artificial Sequence: Synthetic oligonucleotide
cauucgaaguguggccuca

SEQ ID NO: 504974 - RNA, 19 nt, Artificial Sequence
  Description of Artificial Sequence: Synthetic oligonucleotide
gccggguaucccugagucg

SEQ ID NO: 504975 - RNA, 19 nt, Artificial Sequence
  Description of Artificial Sequence: Synthetic oligonucleotide
ggccauauucccacugaac

SEQ ID NO: 504976 - RNA, 19 nt, Artificial Sequence
  Description of Artificial Sequence: Synthetic oligonucleotide
gggaacgaugucuauuuau

SEQ ID NO: 504977 - RNA, 19 nt, Artificial Sequence
  Description of Artificial Sequence: Synthetic oligonucleotide
caguucgguugaagacaag

SEQ ID NO: 504978 - RNA, 19 nt, Artificial Sequence
  Description of Artificial Sequence: Synthetic oligonucleotide
ucgcgcgccuuguuucgcu

SEQ ID NO: 504979 - RNA, 19 nt, Artificial Sequence
  Description of Artificial Sequence: Synthetic oligonucleotide
gagaaguauccaaggcgcu

SEQ ID NO: 504980 - RNA, 19 nt, Artificial Sequence
  Description of Artificial Sequence: Synthetic oligonucleotide
cacccgagcacagaaguua

SEQ ID NO: 504981 - RNA, 19 nt, Artificial Sequence
  Description of Artificial Sequence: Synthetic oligonucleotide
gugcuggaauagucgcuca

SEQ ID NO: 504982 - RNA, 19 nt, Artificial Sequence
  Description of Artificial Sequence: Synthetic oligonucleotide
gagcgucucgcgcgccuug

SEQ ID NO: 504983 - RNA, 19 nt, Artificial Sequence
  Description of Artificial Sequence: Synthetic oligonucleotide
gcgcauuacauaaccaaaa

SEQ ID NO: 504984 - RNA, 19 nt, Artificial Sequence
  Description of Artificial Sequence: Synthetic oligonucleotide
gcgcuuauagccugguucu

SEQ ID NO: 504985 - RNA, 19 nt, Artificial Sequence
  Description of Artificial Sequence: Synthetic oligonucleotide
cugucgggaucuacagaga

SEQ ID NO: 504986 - RNA, 19 nt, Artificial Sequence
  Description of Artificial Sequence: Synthetic oligonucleotide
gcgauggugcgguguauac

SEQ ID NO: 504987 - RNA, 19 nt, Artificial Sequence
  Description of Artificial Sequence: Synthetic oligonucleotide
cugucacgcccacccgagc

SEQ ID NO: 504988 - RNA, 19 nt, Artificial Sequence
  Description of Artificial Sequence: Synthetic oligonucleotide
acgccggguaucccugagu

SEQ ID NO: 504989 - RNA, 19 nt, Artificial Sequence
  Description of Artificial Sequence: Synthetic oligonucleotide
ggggaaucgugugcguacc

SEQ ID NO: 504990 - RNA, 19 nt, Artificial Sequence
  Description of Artificial Sequence: Synthetic oligonucleotide
gucgagaggccaaaccgua

SEQ ID NO: 504991 - RNA, 19 nt, Artificial Sequence
  Description of Artificial Sequence: Synthetic oligonucleotide
gggaucuacagagaaguau

SEQ ID NO: 504992 - RNA, 19 nt, Artificial Sequence
  Description of Artificial Sequence: Synthetic oligonucleotide
auggugcgguguauacuug

SEQ ID NO: 504993 - RNA, 19 nt, Artificial Sequence
  Description of Artificial Sequence: Synthetic oligonucleotide
gcguguagucguagguggg

SEQ ID NO: 504994 - RNA, 19 nt, Artificial Sequence
  Description of Artificial Sequence: Synthetic oligonucleotide
gccaggcgcuuauagccug

SEQ ID NO: 504995 - RNA, 19 nt, Artificial Sequence
  Description of Artificial Sequence: Synthetic oligonucleotide
guagggcuguaagugugaa

SEQ ID NO: 504996 - RNA, 19 nt, Artificial Sequence
  Description of Artificial Sequence: Synthetic oligonucleotide
acccgagcacagaaguuau

SEQ ID NO: 504997 - RNA, 19 nt, Artificial Sequence
  Description of Artificial Sequence: Synthetic oligonucleotide
agacgccggguaucccuga

SEQ ID NO: 504998 - RNA, 19 nt, Artificial Sequence
  Description of Artificial Sequence: Synthetic oligonucleotide
ccauuguggucugugccac

SEQ ID NO: 504999 - RNA, 19 nt, Artificial Sequence
  Description of Artificial Sequence: Synthetic oligonucleotide
cuguagcgaugccggguuc

SEQ ID NO: 505000 - RNA, 19 nt, Artificial Sequence
  Description of Artificial Sequence: Synthetic oligonucleotide
gacagugcguguagucgua

SEQ ID NO: 505001 - RNA, 19 nt, Artificial Sequence
  Description of Artificial Sequence: Synthetic oligonucleotide
ccaggcgcuuauagccugg

SEQ ID NO: 505002 - RNA, 19 nt, Artificial Sequence
  Description of Artificial Sequence: Synthetic oligonucleotide
cgccuuguuucgcucaggc

SEQ ID NO: 505003 - RNA, 19 nt, Artificial Sequence
  Description of Artificial Sequence: Synthetic oligonucleotide
gaggcguaugucacuuugu

SEQ ID NO: 505004 - RNA, 19 nt, Artificial Sequence
  Description of Artificial Sequence: Synthetic oligonucleotide
ccggguaucccugagucga

SEQ ID NO: 505005 - RNA, 19 nt, Artificial Sequence
  Description of Artificial Sequence: Synthetic oligonucleotide
ccagcgcauuacauaacca

SEQ ID NO: 505006 - RNA, 19 nt, Artificial Sequence
  Description of Artificial Sequence: Synthetic oligonucleotide
accguauagcagaguccca

SEQ ID NO: 505007 - RNA, 19 nt, Artificial Sequence
  Description of Artificial Sequence: Synthetic oligonucleotide
gaccgucgagccuggaauu

SEQ ID NO: 505008 - RNA, 19 nt, Artificial Sequence
  Description of Artificial Sequence: Synthetic oligonucleotide
caccaccuguagcgaugcc

SEQ ID NO: 505009 - RNA, 19 nt, Artificial Sequence
  Description of Artificial Sequence: Synthetic oligonucleotide
ugagcgucucgcgcgccuu

SEQ ID NO: 505010 - RNA, 19 nt, Artificial Sequence
  Description of Artificial Sequence: Synthetic oligonucleotide
auggcucguggagcugugu

SEQ ID NO: 505011 - RNA, 19 nt, Artificial Sequence
  Description of Artificial Sequence: Synthetic oligonucleotide
ccgagccucucccaucaac

SEQ ID NO: 505012 - RNA, 19 nt, Artificial Sequence
  Description of Artificial Sequence: Synthetic oligonucleotide
agcgucucgcgcgccuugu

SEQ ID NO: 505013 - RNA, 19 nt, Artificial Sequence
  Description of Artificial Sequence: Synthetic oligonucleotide
ccaaaaguaggaagaccgu

SEQ ID NO: 505014 - RNA, 19 nt, Artificial Sequence
  Description of Artificial Sequence: Synthetic oligonucleotide
gggaugacuccgcacguau

SEQ ID NO: 505015 - RNA, 19 nt, Artificial Sequence
  Description of Artificial Sequence: Synthetic oligonucleotide
gcgucguagggcuguaagu

SEQ ID NO: 505016 - RNA, 19 nt, Artificial Sequence
  Description of Artificial Sequence: Synthetic oligonucleotide
cgugugcguaccugucccc

SEQ ID NO: 505017 - RNA, 19 nt, Artificial Sequence
  Description of Artificial Sequence: Synthetic oligonucleotide
gccggguucaggucacuua

SEQ ID NO: 505018 - RNA, 19 nt, Artificial Sequence
  Description of Artificial Sequence: Synthetic oligonucleotide
cgaugccggguucagguca

SEQ ID NO: 505019 - RNA, 19 nt, Artificial Sequence
  Description of Artificial Sequence: Synthetic oligonucleotide
gcgaugccggguucagguc

SEQ ID NO: 505020 - RNA, 19 nt, Artificial Sequence
  Description of Artificial Sequence: Synthetic oligonucleotide
ggguaucccugagucgaga

SEQ ID NO: 505021 - RNA, 19 nt, Artificial Sequence
  Description of Artificial Sequence: Synthetic oligonucleotide
ccaaggcgcucaaacugaa

SEQ ID NO: 505022 - RNA, 19 nt, Artificial Sequence
  Description of Artificial Sequence: Synthetic oligonucleotide
gggaaucgugugcguaccu

SEQ ID NO: 505023 - RNA, 19 nt, Artificial Sequence
  Description of Artificial Sequence: Synthetic oligonucleotide
gguguauacuugacucgau

SEQ ID NO: 505024 - RNA, 19 nt, Artificial Sequence
  Description of Artificial Sequence: Synthetic oligonucleotide
cggguaucccugagucgag

SEQ ID NO: 505025 - RNA, 19 nt, Artificial Sequence
  Description of Artificial Sequence: Synthetic oligonucleotide
ccgaggccggugacagcgc

SEQ ID NO: 505026 - RNA, 19 nt, Artificial Sequence
  Description of Artificial Sequence: Synthetic oligonucleotide
augccggguucaggucacu

SEQ ID NO: 505027 - RNA, 19 nt, Artificial Sequence
  Description of Artificial Sequence: Synthetic oligonucleotide
gccuuugcgcauggccuca

SEQ ID NO: 505028 - RNA, 19 nt, Artificial Sequence
  Description of Artificial Sequence: Synthetic oligonucleotide
cccugagucgagaggccaa

SEQ ID NO: 505029 - RNA, 19 nt, Artificial Sequence
  Description of Artificial Sequence: Synthetic oligonucleotide
cgcucauagaggcguaucu

SEQ ID NO: 505030 - RNA, 19 nt, Artificial Sequence
  Description of Artificial Sequence: Synthetic oligonucleotide
gugugacaguucgguugaa

SEQ ID NO: 505031 - RNA, 19 nt, Artificial Sequence
  Description of Artificial Sequence: Synthetic oligonucleotide
ggggaugacuccgcacgua

SEQ ID NO: 505032 - RNA, 19 nt, Artificial Sequence
  Description of Artificial Sequence: Synthetic oligonucleotide
gagccgcguucuugagcgu

SEQ ID NO: 505033 - RNA, 19 nt, Artificial Sequence
  Description of Artificial Sequence: Synthetic oligonucleotide
caacagcguagugcaaguu

SEQ ID NO: 505034 - RNA, 19 nt, Artificial Sequence
  Description of Artificial Sequence: Synthetic oligonucleotide
cagaggcguaugucacuuu

SEQ ID NO: 505035 - RNA, 19 nt, Artificial Sequence
  Description of Artificial Sequence: Synthetic oligonucleotide
caggcgcuuauagccuggu

SEQ ID NO: 505036 - RNA, 19 nt, Artificial Sequence
  Description of Artificial Sequence: Synthetic oligonucleotide
gucgagccuggaauuccuu

SEQ ID NO: 505037 - RNA, 19 nt, Artificial Sequence
  Description of Artificial Sequence: Synthetic oligonucleotide
cccugugcgauggugcggu

SEQ ID NO: 505038 - RNA, 19 nt, Artificial Sequence
  Description of Artificial Sequence: Synthetic oligonucleotide
cugcgucguagggcuguaa

SEQ ID NO: 505039 - RNA, 19 nt, Artificial Sequence
  Description of Artificial Sequence: Synthetic oligonucleotide
ccauggcucguggagcugu

SEQ ID NO: 505040 - RNA, 19 nt, Artificial Sequence
  Description of Artificial Sequence: Synthetic oligonucleotide
gugcgauggugcgguguau

SEQ ID NO: 505041 - RNA, 19 nt, Artificial Sequence
  Description of Artificial Sequence: Synthetic oligonucleotide
ccaaaccguauagcagagu

SEQ ID NO: 505042 - RNA, 19 nt, Artificial Sequence
  Description of Artificial Sequence: Synthetic oligonucleotide
ccccugcgucguagggcug

SEQ ID NO: 505043 - RNA, 19 nt, Artificial Sequence
  Description of Artificial Sequence: Synthetic oligonucleotide
gcgguccacuaaugcuccu

SEQ ID NO: 505044 - RNA, 19 nt, Artificial Sequence
  Description of Artificial Sequence: Synthetic oligonucleotide
cgauggugcgguguauacu

SEQ ID NO: 505045 - RNA, 19 nt, Artificial Sequence
  Description of Artificial Sequence: Synthetic oligonucleotide
cccugcgucguagggcugu

SEQ ID NO: 505046 - RNA, 19 nt, Artificial Sequence
  Description of Artificial Sequence: Synthetic oligonucleotide
cgccacauuccugcucgaa

SEQ ID NO: 505047 - RNA, 19 nt, Artificial Sequence
  Description of Artificial Sequence: Synthetic oligonucleotide
cgucucgcgcgccuuguuu

SEQ ID NO: 505048 - RNA, 19 nt, Artificial Sequence
  Description of Artificial Sequence: Synthetic oligonucleotide
gcgucucgcgcgccuuguu

SEQ ID NO: 505049 - RNA, 19 nt, Artificial Sequence
  Description of Artificial Sequence: Synthetic oligonucleotide
cgguccacuaaugcuccuu

SEQ ID NO: 505050 - RNA, 19 nt, Artificial Sequence
  Description of Artificial Sequence: Synthetic oligonucleotide
aacaauaacaucaauggcc

SEQ ID NO: 505051 - RNA, 19 nt, Artificial Sequence
  Description of Artificial Sequence: Synthetic oligonucleotide
ugaacuauaguuuagaaac

SEQ ID NO: 505052 - RNA, 19 nt, Artificial Sequence
  Description of Artificial Sequence: Synthetic oligonucleotide
uaagauuuuguauauauga

SEQ ID NO: 505053 - RNA, 19 nt, Artificial Sequence
  Description of Artificial Sequence: Synthetic oligonucleotide
aauucguuaaacucaaaug

SEQ ID NO: 505054 - RNA, 19 nt, Artificial Sequence
  Description of Artificial Sequence: Synthetic oligonucleotide
aacaauaggagcugccacc

SEQ ID NO: 505055 - RNA, 19 nt, Artificial Sequence
  Description of Artificial Sequence: Synthetic oligonucleotide
ucaauauauagccaaagcu

SEQ ID NO: 505056 - RNA, 19 nt, Artificial Sequence
  Description of Artificial Sequence: Synthetic oligonucleotide
acagcuauagaggugaucc

SEQ ID NO: 505057 - RNA, 19 nt, Artificial Sequence
  Description of Artificial Sequence: Synthetic oligonucleotide
ucuaguuauuuuaagguug

SEQ ID NO: 505058 - RNA, 19 nt, Artificial Sequence
  Description of Artificial Sequence: Synthetic oligonucleotide
aauagagcccagcugguac

SEQ ID NO: 505059 - RNA, 19 nt, Artificial Sequence
  Description of Artificial Sequence: Synthetic oligonucleotide
aagaauaauucguuaaacu

SEQ ID NO: 505060 - RNA, 19 nt, Artificial Sequence
  Description of Artificial Sequence: Synthetic oligonucleotide
aauaaaggcauguuucucu

SEQ ID NO: 505061 - RNA, 19 nt, Artificial Sequence
  Description of Artificial Sequence: Synthetic oligonucleotide
uaacaaaggacuuaacuug

SEQ ID NO: 505062 - RNA, 19 nt, Artificial Sequence
  Description of Artificial Sequence: Synthetic oligonucleotide
ucuugcaugaagauaacug

SEQ ID NO: 505063 - RNA, 19 nt, Artificial Sequence
  Description of Artificial Sequence: Synthetic oligonucleotide
aggacaauacuacauugcc

SEQ ID NO: 505064 - RNA, 19 nt, Artificial Sequence
  Description of Artificial Sequence: Synthetic oligonucleotide
gacaaggacguucacaggg

SEQ ID NO: 505065 - RNA, 19 nt, Artificial Sequence
  Description of Artificial Sequence: Synthetic oligonucleotide
ugaagauaacuguagaaca

SEQ ID NO: 505066 - RNA, 19 nt, Artificial Sequence
  Description of Artificial Sequence: Synthetic oligonucleotide
uguuuaauaguccuauugu

SEQ ID NO: 505067 - RNA, 19 nt, Artificial Sequence
  Description of Artificial Sequence: Synthetic oligonucleotide
aaugcaaauagcaccugcc

SEQ ID NO: 505068 - RNA, 19 nt, Artificial Sequence
  Description of Artificial Sequence: Synthetic oligonucleotide
uuguaaucaagaauaauuc

SEQ ID NO: 505069 - RNA, 19 nt, Artificial Sequence
  Description of Artificial Sequence: Synthetic oligonucleotide
gucucuuauauucagauac

SEQ ID NO: 505070 - RNA, 19 nt, Artificial Sequence
  Description of Artificial Sequence: Synthetic oligonucleotide
uacaguauuguacuaguug

SEQ ID NO: 505071 - RNA, 19 nt, Artificial Sequence
  Description of Artificial Sequence: Synthetic oligonucleotide
augaagauaacuguagaac

SEQ ID NO: 505072 - RNA, 19 nt, Artificial Sequence
  Description of Artificial Sequence: Synthetic oligonucleotide
ucguacauaauaauuuacc

SEQ ID NO: 505073 - RNA, 19 nt, Artificial Sequence
  Description of Artificial Sequence: Synthetic oligonucleotide
aauacaguauuguacuagu

SEQ ID NO: 505074 - RNA, 19 nt, Artificial Sequence
  Description of Artificial Sequence: Synthetic oligonucleotide
gaccuuacuaaucagggcc

SEQ ID NO: 505075 - RNA, 19 nt, Artificial Sequence
  Description of Artificial Sequence: Synthetic oligonucleotide
uuguugggcaauuauacag

SEQ ID NO: 505076 - RNA, 19 nt, Artificial Sequence
  Description of Artificial Sequence: Synthetic oligonucleotide
aauaggagcugccaccuag

SEQ ID NO: 505077 - RNA, 19 nt, Artificial Sequence
  Description of Artificial Sequence: Synthetic oligonucleotide
uuaauuacagguuggaaua

SEQ ID NO: 505078 - RNA, 19 nt, Artificial Sequence
  Description of Artificial Sequence: Synthetic oligonucleotide
uucucuuuauagcugaaug

SEQ ID NO: 505079 - RNA, 19 nt, Artificial Sequence
  Description of Artificial Sequence: Synthetic oligonucleotide
guaccaauuguacaggagg

SEQ ID NO: 505080 - RNA, 19 nt, Artificial Sequence
  Description of Artificial Sequence: Synthetic oligonucleotide
cuaucaaugagugaauggg

SEQ ID NO: 505081 - RNA, 19 nt, Artificial Sequence
  Description of Artificial Sequence: Synthetic oligonucleotide
uguuguugggcaauuauac

SEQ ID NO: 505082 - RNA, 19 nt, Artificial Sequence
  Description of Artificial Sequence: Synthetic oligonucleotide
ucauccguggauuccaucg

SEQ ID NO: 505083 - RNA, 19 nt, Artificial Sequence
  Description of Artificial Sequence: Synthetic oligonucleotide
ugucaaauugugccaaagg

SEQ ID NO: 505084 - RNA, 19 nt, Artificial Sequence
  Description of Artificial Sequence: Synthetic oligonucleotide
aaccuuaaagguuuuacau

SEQ ID NO: 505085 - RNA, 19 nt, Artificial Sequence
  Description of Artificial Sequence: Synthetic oligonucleotide
aggguuccacaauagagcc

SEQ ID NO: 505086 - RNA, 19 nt, Artificial Sequence
  Description of Artificial Sequence: Synthetic oligonucleotide
uucugucaaagcaucaucc

SEQ ID NO: 505087 - RNA, 19 nt, Artificial Sequence
  Description of Artificial Sequence: Synthetic oligonucleotide
auaccuuguauguacacag

SEQ ID NO: 505088 - RNA, 19 nt, Artificial Sequence
  Description of Artificial Sequence: Synthetic oligonucleotide
aagauaacuguagaacagg

SEQ ID NO: 505089 - RNA, 19 nt, Artificial Sequence
  Description of Artificial Sequence: Synthetic oligonucleotide
cauauuguaccaauuguac

SEQ ID NO: 505090 - RNA, 19 nt, Artificial Sequence
  Description of Artificial Sequence: Synthetic oligonucleotide
cucuuaagcugaaauacgg

SEQ ID NO: 505091 - RNA, 19 nt, Artificial Sequence
  Description of Artificial Sequence: Synthetic oligonucleotide
aaguaccagaguuacagga

SEQ ID NO: 505092 - RNA, 19 nt, Artificial Sequence
  Description of Artificial Sequence: Synthetic oligonucleotide
uuuucuagggagcaaacau

SEQ ID NO: 505093 - RNA, 19 nt, Artificial Sequence
  Description of Artificial Sequence: Synthetic oligonucleotide
caucagaugaggcaaauac

SEQ ID NO: 505094 - RNA, 19 nt, Artificial Sequence
  Description of Artificial Sequence: Synthetic oligonucleotide
uaauucguuaaacucaaau

SEQ ID NO: 505095 - RNA, 19 nt, Artificial Sequence
  Description of Artificial Sequence: Synthetic oligonucleotide
auugcuuagauaagaaaac

SEQ ID NO: 505096 - RNA, 19 nt, Artificial Sequence
  Description of Artificial Sequence: Synthetic oligonucleotide
ucucuuuauagcugaaugc

SEQ ID NO: 505097 - RNA, 19 nt, Artificial Sequence
  Description of Artificial Sequence: Synthetic oligonucleotide
uacuggaucauaaacuuuc

SEQ ID NO: 505098 - RNA, 19 nt, Artificial Sequence
  Description of Artificial Sequence: Synthetic oligonucleotide
cugaccuuacuaaucaggg

SEQ ID NO: 505099 - RNA, 19 nt, Artificial Sequence
  Description of Artificial Sequence: Synthetic oligonucleotide
uauuucuagggaaaauugu

SEQ ID NO: 505100 - RNA, 19 nt, Artificial Sequence
  Description of Artificial Sequence: Synthetic oligonucleotide
agcagucauaguuugcuac

SEQ ID NO: 505101 - RNA, 19 nt, Artificial Sequence
  Description of Artificial Sequence: Synthetic oligonucleotide
uuaagcugaaauacggcac

SEQ ID NO: 505102 - RNA, 19 nt, Artificial Sequence
  Description of Artificial Sequence: Synthetic oligonucleotide
uuuucguuguucuuccugc

SEQ ID NO: 505103 - RNA, 19 nt, Artificial Sequence
  Description of Artificial Sequence: Synthetic oligonucleotide
aguuacaggacaauacuac

SEQ ID NO: 505104 - RNA, 19 nt, Artificial Sequence
  Description of Artificial Sequence: Synthetic oligonucleotide
aguccuauuguuguugggc

SEQ ID NO: 505105 - RNA, 19 nt, Artificial Sequence
  Description of Artificial Sequence: Synthetic oligonucleotide
cuagcaacaggauauaaca

SEQ ID NO: 505106 - RNA, 19 nt, Artificial Sequence
  Description of Artificial Sequence: Synthetic oligonucleotide
ggaaaaguauuauaguuug

SEQ ID NO: 505107 - RNA, 19 nt, Artificial Sequence
  Description of Artificial Sequence: Synthetic oligonucleotide
ucguuaaacucaaaugcug

SEQ ID NO: 505108 - RNA, 19 nt, Artificial Sequence
  Description of Artificial Sequence: Synthetic oligonucleotide
aauacuacauugccacuga

SEQ ID NO: 505109 - RNA, 19 nt, Artificial Sequence
  Description of Artificial Sequence: Synthetic oligonucleotide
aguccuaccucagacaugg

SEQ ID NO: 505110 - RNA, 19 nt, Artificial Sequence
  Description of Artificial Sequence: Synthetic oligonucleotide
uuggauaguuuucuguagc

SEQ ID NO: 505111 - RNA, 19 nt, Artificial Sequence
  Description of Artificial Sequence: Synthetic oligonucleotide
gaagauaacuguagaacag

SEQ ID NO: 505112 - RNA, 19 nt, Artificial Sequence
  Description of Artificial Sequence: Synthetic oligonucleotide
aauaguccuauuguuguug

SEQ ID NO: 505113 - RNA, 19 nt, Artificial Sequence
  Description of Artificial Sequence: Synthetic oligonucleotide
aaauacucucuugugcuuc

SEQ ID NO: 505114 - RNA, 19 nt, Artificial Sequence
  Description of Artificial Sequence: Synthetic oligonucleotide
aagcuagaacaauaacauc

SEQ ID NO: 505115 - RNA, 19 nt, Artificial Sequence
  Description of Artificial Sequence: Synthetic oligonucleotide
ucuuaagcugaaauacggc

SEQ ID NO: 505116 - RNA, 19 nt, Artificial Sequence
  Description of Artificial Sequence: Synthetic oligonucleotide
uaaucaagaauaauucguu

SEQ ID NO: 505117 - RNA, 19 nt, Artificial Sequence
  Description of Artificial Sequence: Synthetic oligonucleotide
aggcaagaauuucucauac

SEQ ID NO: 505118 - RNA, 19 nt, Artificial Sequence
  Description of Artificial Sequence: Synthetic oligonucleotide
guaacucucauuuggcaag

SEQ ID NO: 505119 - RNA, 19 nt, Artificial Sequence
  Description of Artificial Sequence: Synthetic oligonucleotide
cuuagcuuaugaaacuuug

SEQ ID NO: 505120 - RNA, 19 nt, Artificial Sequence
  Description of Artificial Sequence: Synthetic oligonucleotide
ugaauaaaugucucuaguu

SEQ ID NO: 505121 - RNA, 19 nt, Artificial Sequence
  Description of Artificial Sequence: Synthetic oligonucleotide
aauaauucguuaaacucaa

SEQ ID NO: 505122 - RNA, 19 nt, Artificial Sequence
  Description of Artificial Sequence: Synthetic oligonucleotide
uguaccaauuguacaggag

SEQ ID NO: 505123 - RNA, 19 nt, Artificial Sequence
  Description of Artificial Sequence: Synthetic oligonucleotide
ucauaaacuuuccagccau

SEQ ID NO: 505124 - RNA, 19 nt, Artificial Sequence
  Description of Artificial Sequence: Synthetic oligonucleotide
ugggcaauuauacaguauu

SEQ ID NO: 505125 - RNA, 19 nt, Artificial Sequence
  Description of Artificial Sequence: Synthetic oligonucleotide
augagauccucuuaagcug

SEQ ID NO: 505126 - RNA, 19 nt, Artificial Sequence
  Description of Artificial Sequence: Synthetic oligonucleotide
aaagcauaugaaggaaaag

SEQ ID NO: 505127 - RNA, 19 nt, Artificial Sequence
  Description of Artificial Sequence: Synthetic oligonucleotide
uuagcuuaugaaacuuuga

SEQ ID NO: 505128 - RNA, 19 nt, Artificial Sequence
  Description of Artificial Sequence: Synthetic oligonucleotide
uccacaauagagcccagcu

SEQ ID NO: 505129 - RNA, 19 nt, Artificial Sequence
  Description of Artificial Sequence: Synthetic oligonucleotide
uauuguacuaguuguuuaa

SEQ ID NO: 505130 - RNA, 19 nt, Artificial Sequence
  Description of Artificial Sequence: Synthetic oligonucleotide
auauuguaccaauuguaca

SEQ ID NO: 505131 - RNA, 19 nt, Artificial Sequence
  Description of Artificial Sequence: Synthetic oligonucleotide
uaacuguagaacagguagc

SEQ ID NO: 505132 - RNA, 19 nt, Artificial Sequence
  Description of Artificial Sequence: Synthetic oligonucleotide
auaguccuauuguuguugg

SEQ ID NO: 505133 - RNA, 19 nt, Artificial Sequence
  Description of Artificial Sequence: Synthetic oligonucleotide
caaauguaccacacaaaag

SEQ ID NO: 505134 - RNA, 19 nt, Artificial Sequence
  Description of Artificial Sequence: Synthetic oligonucleotide
gguauugacuuugagacag

SEQ ID NO: 505135 - RNA, 19 nt, Artificial Sequence
  Description of Artificial Sequence: Synthetic oligonucleotide
agaugaggcaaauacagua

SEQ ID NO: 505136 - RNA, 19 nt, Artificial Sequence
  Description of Artificial Sequence: Synthetic oligonucleotide
ggugaauuggcaucugugg

SEQ ID NO: 505137 - RNA, 19 nt, Artificial Sequence
  Description of Artificial Sequence: Synthetic oligonucleotide
cuuaagcugaaauacggca

SEQ ID NO: 505138 - RNA, 19 nt, Artificial Sequence
  Description of Artificial Sequence: Synthetic oligonucleotide
caggguuccacaauagagc

SEQ ID NO: 505139 - RNA, 19 nt, Artificial Sequence
  Description of Artificial Sequence: Synthetic oligonucleotide
uuaacaauaggagcugcca

SEQ ID NO: 505140 - RNA, 19 nt, Artificial Sequence
  Description of Artificial Sequence: Synthetic oligonucleotide
uaccaauuguacaggagga

SEQ ID NO: 505141 - RNA, 19 nt, Artificial Sequence
  Description of Artificial Sequence: Synthetic oligonucleotide
cauaguuugcuacauccug

SEQ ID NO: 505142 - RNA, 19 nt, Artificial Sequence
  Description of Artificial Sequence: Synthetic oligonucleotide
uguugggcaauuauacagu

SEQ ID NO: 505143 - RNA, 19 nt, Artificial Sequence
  Description of Artificial Sequence: Synthetic oligonucleotide
uuccucauauccuugcaca

SEQ ID NO: 505144 - RNA, 19 nt, Artificial Sequence
  Description of Artificial Sequence: Synthetic oligonucleotide
aaaagcauaugaaggaaaa

SEQ ID NO: 505145 - RNA, 19 nt, Artificial Sequence
  Description of Artificial Sequence: Synthetic oligonucleotide
gacucauacuagcaacagg

SEQ ID NO: 505146 - RNA, 19 nt, Artificial Sequence
  Description of Artificial Sequence: Synthetic oligonucleotide
ugguaugagauccucuuaa

SEQ ID NO: 505147 - RNA, 19 nt, Artificial Sequence
  Description of Artificial Sequence: Synthetic oligonucleotide
ucaaugagugaaugggaug

SEQ ID NO: 505148 - RNA, 19 nt, Artificial Sequence
  Description of Artificial Sequence: Synthetic oligonucleotide
uuacaggacaauacuacau

SEQ ID NO: 505149 - RNA, 19 nt, Artificial Sequence
  Description of Artificial Sequence: Synthetic oligonucleotide
uaucuuagcuuaugaaacu

SEQ ID NO: 505150 - RNA, 19 nt, Artificial Sequence
  Description of Artificial Sequence: Synthetic oligonucleotide
augugaacagguuauuccu

SEQ ID NO: 505151 - RNA, 19 nt, Artificial Sequence
  Description of Artificial Sequence: Synthetic oligonucleotide
cuaccuguacaagacaagg

SEQ ID NO: 505152 - RNA, 19 nt, Artificial Sequence
  Description of Artificial Sequence: Synthetic oligonucleotide
ugaaccuuaaagguuuuac

SEQ ID NO: 505153 - RNA, 19 nt, Artificial Sequence
  Description of Artificial Sequence: Synthetic oligonucleotide
uaacaauaggagcugccac

SEQ ID NO: 505154 - RNA, 19 nt, Artificial Sequence
  Description of Artificial Sequence: Synthetic oligonucleotide
uccaagugacucauacuag

SEQ ID NO: 505155 - RNA, 19 nt, Artificial Sequence
  Description of Artificial Sequence: Synthetic oligonucleotide
cagaguuacaggacaauac

SEQ ID NO: 505156 - RNA, 19 nt, Artificial Sequence
  Description of Artificial Sequence: Synthetic oligonucleotide
cugcauucaauguagcuuc

SEQ ID NO: 505157 - RNA, 19 nt, Artificial Sequence
  Description of Artificial Sequence: Synthetic oligonucleotide
uggugaauuggcaucugug

SEQ ID NO: 505158 - RNA, 19 nt, Artificial Sequence
  Description of Artificial Sequence: Synthetic oligonucleotide
ucauacuagcaacaggaua

SEQ ID NO: 505159 - RNA, 19 nt, Artificial Sequence
  Description of Artificial Sequence: Synthetic oligonucleotide
ugacaagcuagaacaauaa

SEQ ID NO: 505160 - RNA, 19 nt, Artificial Sequence
  Description of Artificial Sequence: Synthetic oligonucleotide
guauuucuagggaaaauug

SEQ ID NO: 505161 - RNA, 19 nt, Artificial Sequence
  Description of Artificial Sequence: Synthetic oligonucleotide
acuuaacuugcaaagaagu

SEQ ID NO: 505162 - RNA, 19 nt, Artificial Sequence
  Description of Artificial Sequence: Synthetic oligonucleotide
gcuuaugaaacuuugaaua

SEQ ID NO: 505163 - RNA, 19 nt, Artificial Sequence
  Description of Artificial Sequence: Synthetic oligonucleotide
auaugugaacagguuauuc

SEQ ID NO: 505164 - RNA, 19 nt, Artificial Sequence
  Description of Artificial Sequence: Synthetic oligonucleotide
gacuuaacuugcaaagaag

SEQ ID NO: 505165 - RNA, 19 nt, Artificial Sequence
  Description of Artificial Sequence: Synthetic oligonucleotide
ugaugcguucuauauguga

SEQ ID NO: 505166 - RNA, 19 nt, Artificial Sequence
  Description of Artificial Sequence: Synthetic oligonucleotide
caggacaauacuacauugc

SEQ ID NO: 505167 - RNA, 19 nt, Artificial Sequence
  Description of Artificial Sequence: Synthetic oligonucleotide
ugucucuaguuauuuuaag

SEQ ID NO: 505168 - RNA, 19 nt, Artificial Sequence
  Description of Artificial Sequence: Synthetic oligonucleotide
uucuagggaaaauuguuua

SEQ ID NO: 505169 - RNA, 19 nt, Artificial Sequence
  Description of Artificial Sequence: Synthetic oligonucleotide
agaagagaugguucgggug

SEQ ID NO: 505170 - RNA, 19 nt, Artificial Sequence
  Description of Artificial Sequence: Synthetic oligonucleotide
ucucuuauauucagauacu

SEQ ID NO: 505171 - RNA, 19 nt, Artificial Sequence
  Description of Artificial Sequence: Synthetic oligonucleotide
caggacacuagccuugucc

SEQ ID NO: 505172 - RNA, 19 nt, Artificial Sequence
  Description of Artificial Sequence: Synthetic oligonucleotide
agggcauaggaaaauaaag

SEQ ID NO: 505173 - RNA, 19 nt, Artificial Sequence
  Description of Artificial Sequence: Synthetic oligonucleotide
agaauaaaucaaaaguuaa

SEQ ID NO: 505174 - RNA, 19 nt, Artificial Sequence
  Description of Artificial Sequence: Synthetic oligonucleotide
uacaggaggacuucuugca

SEQ ID NO: 505175 - RNA, 19 nt, Artificial Sequence
  Description of Artificial Sequence: Synthetic oligonucleotide
aaacaugaaauaauugcuu

SEQ ID NO: 505176 - RNA, 19 nt, Artificial Sequence
  Description of Artificial Sequence: Synthetic oligonucleotide
gacaggagugacugagugg

SEQ ID NO: 505177 - RNA, 19 nt, Artificial Sequence
  Description of Artificial Sequence: Synthetic oligonucleotide
uggauaguuuucuguagca

SEQ ID NO: 505178 - RNA, 19 nt, Artificial Sequence
  Description of Artificial Sequence: Synthetic oligonucleotide
agcuuaugaaacuuugaau

SEQ ID NO: 505179 - RNA, 19 nt, Artificial Sequence
  Description of Artificial Sequence: Synthetic oligonucleotide
ucuagggaaaauuguuuaa

SEQ ID NO: 505180 - RNA, 19 nt, Artificial Sequence
  Description of Artificial Sequence: Synthetic oligonucleotide
acaggguuccacaauagag

SEQ ID NO: 505181 - RNA, 19 nt, Artificial Sequence
  Description of Artificial Sequence: Synthetic oligonucleotide
aguaccagaguuacaggac

SEQ ID NO: 505182 - RNA, 19 nt, Artificial Sequence
  Description of Artificial Sequence: Synthetic oligonucleotide
acauucuaguauuuaaaua

SEQ ID NO: 505183 - RNA, 19 nt, Artificial Sequence
  Description of Artificial Sequence: Synthetic oligonucleotide
gguuauuccuaacaaagga

SEQ ID NO: 505184 - RNA, 19 nt, Artificial Sequence
  Description of Artificial Sequence: Synthetic oligonucleotide
auaugccaaguuuucguug

SEQ ID NO: 505185 - RNA, 19 nt, Artificial Sequence
  Description of Artificial Sequence: Synthetic oligonucleotide
uagggagcaaacauauuau

SEQ ID NO: 505186 - RNA, 19 nt, Artificial Sequence
  Description of Artificial Sequence: Synthetic oligonucleotide
acucacagcaguccuaccu

SEQ ID NO: 505187 - RNA, 19 nt, Artificial Sequence
  Description of Artificial Sequence: Synthetic oligonucleotide
augcguucuauaugugaac

SEQ ID NO: 505188 - RNA, 19 nt, Artificial Sequence
  Description of Artificial Sequence: Synthetic oligonucleotide
aauuacagguuggaauaca

SEQ ID NO: 505189 - RNA, 19 nt, Artificial Sequence
  Description of Artificial Sequence: Synthetic oligonucleotide
uaugaaggaaaaguauuau

SEQ ID NO: 505190 - RNA, 19 nt, Artificial Sequence
  Description of Artificial Sequence: Synthetic oligonucleotide
ugcuaccucuaucaaugag

SEQ ID NO: 505191 - RNA, 19 nt, Artificial Sequence
  Description of Artificial Sequence: Synthetic oligonucleotide
acucaauauauagccaaag

SEQ ID NO: 505192 - RNA, 19 nt, Artificial Sequence
  Description of Artificial Sequence: Synthetic oligonucleotide
auuacagguuggaauacag

SEQ ID NO: 505193 - RNA, 19 nt, Artificial Sequence
  Description of Artificial Sequence: Synthetic oligonucleotide
uuuuaauuacagguuggaa

SEQ ID NO: 505194 - RNA, 19 nt, Artificial Sequence
  Description of Artificial Sequence: Synthetic oligonucleotide
aaaauaccuuguauguaca

SEQ ID NO: 505195 - RNA, 19 nt, Artificial Sequence
  Description of Artificial Sequence: Synthetic oligonucleotide
aauuucuauggguguugca

SEQ ID NO: 505196 - RNA, 19 nt, Artificial Sequence
  Description of Artificial Sequence: Synthetic oligonucleotide
uaccuguacaagacaagga

SEQ ID NO: 505197 - RNA, 19 nt, Artificial Sequence
  Description of Artificial Sequence: Synthetic oligonucleotide
ugaccuuacuaaucagggc

SEQ ID NO: 505198 - RNA, 19 nt, Artificial Sequence
  Description of Artificial Sequence: Synthetic oligonucleotide
uuguuguugggcaauuaua

SEQ ID NO: 505199 - RNA, 19 nt, Artificial Sequence
  Description of Artificial Sequence: Synthetic oligonucleotide
guuggaauacagugcauca

SEQ ID NO: 505200 - RNA, 19 nt, Artificial Sequence
  Description of Artificial Sequence: Synthetic oligonucleotide
caauacuacauugccacug

SEQ ID NO: 505201 - RNA, 19 nt, Artificial Sequence
  Description of Artificial Sequence: Synthetic oligonucleotide
uugcaugaagauaacugua

SEQ ID NO: 505202 - RNA, 19 nt, Artificial Sequence
  Description of Artificial Sequence: Synthetic oligonucleotide
uuacagguuggaauacagu

SEQ ID NO: 505203 - RNA, 19 nt, Artificial Sequence
  Description of Artificial Sequence: Synthetic oligonucleotide
ugcguucuauaugugaaca

SEQ ID NO: 505204 - RNA, 19 nt, Artificial Sequence
  Description of Artificial Sequence: Synthetic oligonucleotide
gaccagaucaccauuccac

SEQ ID NO: 505205 - RNA, 19 nt, Artificial Sequence
  Description of Artificial Sequence: Synthetic oligonucleotide
cguacauaauaauuuaccc

SEQ ID NO: 505206 - RNA, 19 nt, Artificial Sequence
  Description of Artificial Sequence: Synthetic oligonucleotide
cuagcugaccuuacuaauc

SEQ ID NO: 505207 - RNA, 19 nt, Artificial Sequence
  Description of Artificial Sequence: Synthetic oligonucleotide
agugguaugagauccucuu

SEQ ID NO: 505208 - RNA, 19 nt, Artificial Sequence
  Description of Artificial Sequence: Synthetic oligonucleotide
auauauagccaaagcugac

SEQ ID NO: 505209 - RNA, 19 nt, Artificial Sequence
  Description of Artificial Sequence: Synthetic oligonucleotide
uucuauaugugaacagguu

SEQ ID NO: 505210 - RNA, 19 nt, Artificial Sequence
  Description of Artificial Sequence: Synthetic oligonucleotide
uccugagacaacuauucua

SEQ ID NO: 505211 - RNA, 19 nt, Artificial Sequence
  Description of Artificial Sequence: Synthetic oligonucleotide
guaaucaagaauaauucgu

SEQ ID NO: 505212 - RNA, 19 nt, Artificial Sequence
  Description of Artificial Sequence: Synthetic oligonucleotide
aaacuacacuucaaguugu

SEQ ID NO: 505213 - RNA, 19 nt, Artificial Sequence
  Description of Artificial Sequence: Synthetic oligonucleotide
uuguuaacaauaggagcug

SEQ ID NO: 505214 - RNA, 19 nt, Artificial Sequence
  Description of Artificial Sequence: Synthetic oligonucleotide
caagcuagaacaauaacau

SEQ ID NO: 505215 - RNA, 19 nt, Artificial Sequence
  Description of Artificial Sequence: Synthetic oligonucleotide
ugguccauuugccacacua

SEQ ID NO: 505216 - RNA, 19 nt, Artificial Sequence
  Description of Artificial Sequence: Synthetic oligonucleotide
ugacucauacuagcaacag

SEQ ID NO: 505217 - RNA, 19 nt, Artificial Sequence
  Description of Artificial Sequence: Synthetic oligonucleotide
uuguaccaauuguacagga

SEQ ID NO: 505218 - RNA, 19 nt, Artificial Sequence
  Description of Artificial Sequence: Synthetic oligonucleotide
caaguaccagaguuacagg

SEQ ID NO: 505219 - RNA, 19 nt, Artificial Sequence
  Description of Artificial Sequence: Synthetic oligonucleotide
acuugaacuauaguuuaga

SEQ ID NO: 505220 - RNA, 19 nt, Artificial Sequence
  Description of Artificial Sequence: Synthetic oligonucleotide
accuuaaagguuuuacauu

SEQ ID NO: 505221 - RNA, 19 nt, Artificial Sequence
  Description of Artificial Sequence: Synthetic oligonucleotide
ccagccauuaacuggaaac

SEQ ID NO: 505222 - RNA, 19 nt, Artificial Sequence
  Description of Artificial Sequence: Synthetic oligonucleotide
aagggcauaggaaaauaaa

SEQ ID NO: 505223 - RNA, 19 nt, Artificial Sequence
  Description of Artificial Sequence: Synthetic oligonucleotide
aaagggcauaggaaaauaa

SEQ ID NO: 505224 - RNA, 19 nt, Artificial Sequence
  Description of Artificial Sequence: Synthetic oligonucleotide
ucguuguucuuccugcuua

SEQ ID NO: 505225 - RNA, 19 nt, Artificial Sequence
  Description of Artificial Sequence: Synthetic oligonucleotide
gggccuaauuccuaaaaug

SEQ ID NO: 505226 - RNA, 19 nt, Artificial Sequence
  Description of Artificial Sequence: Synthetic oligonucleotide
uauccuugcacacgaucuc

SEQ ID NO: 505227 - RNA, 19 nt, Artificial Sequence
  Description of Artificial Sequence: Synthetic oligonucleotide
cuauggguguugcaggcac

SEQ ID NO: 505228 - RNA, 19 nt, Artificial Sequence
  Description of Artificial Sequence: Synthetic oligonucleotide
cauauccuugcacacgauc

SEQ ID NO: 505229 - RNA, 19 nt, Artificial Sequence
  Description of Artificial Sequence: Synthetic oligonucleotide
acgaucucuauaccacaag

SEQ ID NO: 505230 - RNA, 19 nt, Artificial Sequence
  Description of Artificial Sequence: Synthetic oligonucleotide
cacuugaacuauaguuuag

SEQ ID NO: 505231 - RNA, 19 nt, Artificial Sequence
  Description of Artificial Sequence: Synthetic oligonucleotide
aaacaguucugugcuagaa

SEQ ID NO: 505232 - RNA, 19 nt, Artificial Sequence
  Description of Artificial Sequence: Synthetic oligonucleotide
ugguauugacuuugagaca

SEQ ID NO: 505233 - RNA, 19 nt, Artificial Sequence
  Description of Artificial Sequence: Synthetic oligonucleotide
ccucaagugggucacaggc

SEQ ID NO: 505234 - RNA, 19 nt, Artificial Sequence
  Description of Artificial Sequence: Synthetic oligonucleotide
aguauuguacuaguuguuu

SEQ ID NO: 505235 - RNA, 19 nt, Artificial Sequence
  Description of Artificial Sequence: Synthetic oligonucleotide
uaguccuauuguuguuggg

SEQ ID NO: 505236 - RNA, 19 nt, Artificial Sequence
  Description of Artificial Sequence: Synthetic oligonucleotide
gagcaaacauauuauaauu

SEQ ID NO: 505237 - RNA, 19 nt, Artificial Sequence
  Description of Artificial Sequence: Synthetic oligonucleotide
cuugaacuauaguuuagaa

SEQ ID NO: 505238 - RNA, 19 nt, Artificial Sequence
  Description of Artificial Sequence: Synthetic oligonucleotide
aguucagcagaugacuccu

SEQ ID NO: 505239 - RNA, 19 nt, Artificial Sequence
  Description of Artificial Sequence: Synthetic oligonucleotide
agauaacuguagaacaggu

SEQ ID NO: 505240 - RNA, 19 nt, Artificial Sequence
  Description of Artificial Sequence: Synthetic oligonucleotide
cacgucaaacagcaaguac

SEQ ID NO: 505241 - RNA, 19 nt, Artificial Sequence
  Description of Artificial Sequence: Synthetic oligonucleotide
acaagacaaggacguucac

SEQ ID NO: 505242 - RNA, 19 nt, Artificial Sequence
  Description of Artificial Sequence: Synthetic oligonucleotide
acccuauguuuaauagucc

SEQ ID NO: 505243 - RNA, 19 nt, Artificial Sequence
  Description of Artificial Sequence: Synthetic oligonucleotide
gguaugagauccucuuaag

SEQ ID NO: 505244 - RNA, 19 nt, Artificial Sequence
  Description of Artificial Sequence: Synthetic oligonucleotide
auaggagcugccaccuagc

SEQ ID NO: 505245 - RNA, 19 nt, Artificial Sequence
  Description of Artificial Sequence: Synthetic oligonucleotide
aggacguucacagggugag

SEQ ID NO: 505246 - RNA, 19 nt, Artificial Sequence
  Description of Artificial Sequence: Synthetic oligonucleotide
auacuacauugccacugag

SEQ ID NO: 505247 - RNA, 19 nt, Artificial Sequence
  Description of Artificial Sequence: Synthetic oligonucleotide
ucucuuaggcaagaauuuc

SEQ ID NO: 505248 - RNA, 19 nt, Artificial Sequence
  Description of Artificial Sequence: Synthetic oligonucleotide
uccguggauuccaucguac

SEQ ID NO: 505249 - RNA, 19 nt, Artificial Sequence
  Description of Artificial Sequence: Synthetic oligonucleotide
auagagcccagcugguaca

SEQ ID NO: 505250 - RNA, 19 nt, Artificial Sequence
  Description of Artificial Sequence: Synthetic oligonucleotide
auguaccacacaaaaguca

SEQ ID NO: 505251 - RNA, 19 nt, Artificial Sequence
  Description of Artificial Sequence: Synthetic oligonucleotide
auaacaucaauggccuggu

SEQ ID NO: 505252 - RNA, 19 nt, Artificial Sequence
  Description of Artificial Sequence: Synthetic oligonucleotide
uauguuuaauaguccuauu

SEQ ID NO: 505253 - RNA, 19 nt, Artificial Sequence
  Description of Artificial Sequence: Synthetic oligonucleotide
uuucguuguucuuccugcu

SEQ ID NO: 505254 - RNA, 19 nt, Artificial Sequence
  Description of Artificial Sequence: Synthetic oligonucleotide
augaggagaauaaaucaaa

SEQ ID NO: 505255 - RNA, 19 nt, Artificial Sequence
  Description of Artificial Sequence: Synthetic oligonucleotide
agaacucaauauauagcca

SEQ ID NO: 505256 - RNA, 19 nt, Artificial Sequence
  Description of Artificial Sequence: Synthetic oligonucleotide
aacucaauauauagccaaa

SEQ ID NO: 505257 - RNA, 19 nt, Artificial Sequence
  Description of Artificial Sequence: Synthetic oligonucleotide
ggaaauacucucuugugcu

SEQ ID NO: 505258 - RNA, 19 nt, Artificial Sequence
  Description of Artificial Sequence: Synthetic oligonucleotide
caucguacauaauaauuua

SEQ ID NO: 505259 - RNA, 19 nt, Artificial Sequence
  Description of Artificial Sequence: Synthetic oligonucleotide
uggggccuaauuccuaaaa

SEQ ID NO: 505260 - RNA, 19 nt, Artificial Sequence
  Description of Artificial Sequence: Synthetic oligonucleotide
uucuugcaugaagauaacu

SEQ ID NO: 505261 - RNA, 19 nt, Artificial Sequence
  Description of Artificial Sequence: Synthetic oligonucleotide
uaacucucauuuggcaagc

SEQ ID NO: 505262 - RNA, 19 nt, Artificial Sequence
  Description of Artificial Sequence: Synthetic oligonucleotide
acacuagccuuguccauca

SEQ ID NO: 505263 - RNA, 19 nt, Artificial Sequence
  Description of Artificial Sequence: Synthetic oligonucleotide
uugggcaauuauacaguau

SEQ ID NO: 505264 - RNA, 19 nt, Artificial Sequence
  Description of Artificial Sequence: Synthetic oligonucleotide
uaauaguccuauuguuguu

SEQ ID NO: 505265 - RNA, 19 nt, Artificial Sequence
  Description of Artificial Sequence: Synthetic oligonucleotide
ugcauucaauguagcuucu

SEQ ID NO: 505266 - RNA, 19 nt, Artificial Sequence
  Description of Artificial Sequence: Synthetic oligonucleotide
ggaugugccacgucaaaca

SEQ ID NO: 505267 - RNA, 19 nt, Artificial Sequence
  Description of Artificial Sequence: Synthetic oligonucleotide
agcugaccuuacuaaucag

SEQ ID NO: 505268 - RNA, 19 nt, Artificial Sequence
  Description of Artificial Sequence: Synthetic oligonucleotide
gacacuagccuuguccauc

SEQ ID NO: 505269 - RNA, 19 nt, Artificial Sequence
  Description of Artificial Sequence: Synthetic oligonucleotide
gaagugguaugagauccuc

SEQ ID NO: 505270 - RNA, 19 nt, Artificial Sequence
  Description of Artificial Sequence: Synthetic oligonucleotide
aagugguaugagauccucu

SEQ ID NO: 505271 - RNA, 19 nt, Artificial Sequence
  Description of Artificial Sequence: Synthetic oligonucleotide
gaugguucggguggccacc

SEQ ID NO: 505272 - RNA, 19 nt, Artificial Sequence
  Description of Artificial Sequence: Synthetic oligonucleotide
uggacaggagugacugagu

SEQ ID NO: 505273 - RNA, 19 nt, Artificial Sequence
  Description of Artificial Sequence: Synthetic oligonucleotide
gguuggauaguuuucugua

SEQ ID NO: 505274 - RNA, 19 nt, Artificial Sequence
  Description of Artificial Sequence: Synthetic oligonucleotide
aguacauauuguaccaauu

SEQ ID NO: 505275 - RNA, 19 nt, Artificial Sequence
  Description of Artificial Sequence: Synthetic oligonucleotide
caaggacguucacagggug

SEQ ID NO: 505276 - RNA, 19 nt, Artificial Sequence
  Description of Artificial Sequence: Synthetic oligonucleotide
acaggauauaacacauggu

SEQ ID NO: 505277 - RNA, 19 nt, Artificial Sequence
  Description of Artificial Sequence: Synthetic oligonucleotide
ggagcaaacauauuauaau

SEQ ID NO: 505278 - RNA, 19 nt, Artificial Sequence
  Description of Artificial Sequence: Synthetic oligonucleotide
cguucuauaugugaacagg

SEQ ID NO: 505279 - RNA, 19 nt, Artificial Sequence
  Description of Artificial Sequence: Synthetic oligonucleotide
uucguuguucuuccugcuu

SEQ ID NO: 505280 - RNA, 19 nt, Artificial Sequence
  Description of Artificial Sequence: Synthetic oligonucleotide
cugagauaacacaucugaa

SEQ ID NO: 505281 - RNA, 19 nt, Artificial Sequence
  Description of Artificial Sequence: Synthetic oligonucleotide
gaucaccauuccaccagcc

SEQ ID NO: 505282 - RNA, 19 nt, Artificial Sequence
  Description of Artificial Sequence: Synthetic oligonucleotide
gugacucauacuagcaaca

SEQ ID NO: 505283 - RNA, 19 nt, Artificial Sequence
  Description of Artificial Sequence: Synthetic oligonucleotide
guucuauaugugaacaggu

SEQ ID NO: 505284 - RNA, 19 nt, Artificial Sequence
  Description of Artificial Sequence: Synthetic oligonucleotide
caaaggacuuaacuugcaa

SEQ ID NO: 505285 - RNA, 19 nt, Artificial Sequence
  Description of Artificial Sequence: Synthetic oligonucleotide
uaccucuaucaaugaguga

SEQ ID NO: 505286 - RNA, 19 nt, Artificial Sequence
  Description of Artificial Sequence: Synthetic oligonucleotide
ggucacaggcuguucacac

SEQ ID NO: 505287 - RNA, 19 nt, Artificial Sequence
  Description of Artificial Sequence: Synthetic oligonucleotide
cuauguuuaauaguccuau

SEQ ID NO: 505288 - RNA, 19 nt, Artificial Sequence
  Description of Artificial Sequence: Synthetic oligonucleotide
ucuagggagcaaacauauu

SEQ ID NO: 505289 - RNA, 19 nt, Artificial Sequence
  Description of Artificial Sequence: Synthetic oligonucleotide
caacuuugacagccagaag

SEQ ID NO: 505290 - RNA, 19 nt, Artificial Sequence
  Description of Artificial Sequence: Synthetic oligonucleotide
ccuagccacacaaaugguc

SEQ ID NO: 505291 - RNA, 19 nt, Artificial Sequence
  Description of Artificial Sequence: Synthetic oligonucleotide
ggugagacugcccucaagu

SEQ ID NO: 505292 - RNA, 19 nt, Artificial Sequence
  Description of Artificial Sequence: Synthetic oligonucleotide
cacaucugaaaucuuaauu

SEQ ID NO: 505293 - RNA, 19 nt, Artificial Sequence
  Description of Artificial Sequence: Synthetic oligonucleotide
gcguucuauaugugaacag

SEQ ID NO: 505294 - RNA, 19 nt, Artificial Sequence
  Description of Artificial Sequence: Synthetic oligonucleotide
ugccaaguuuucguuguuc

SEQ ID NO: 505295 - RNA, 19 nt, Artificial Sequence
  Description of Artificial Sequence: Synthetic oligonucleotide
acaaaugguccuggggccu

SEQ ID NO: 505296 - RNA, 19 nt, Artificial Sequence
  Description of Artificial Sequence: Synthetic oligonucleotide
uauuguuguugggcaauua

SEQ ID NO: 505297 - RNA, 19 nt, Artificial Sequence
  Description of Artificial Sequence: Synthetic oligonucleotide
acaaggacguucacagggu

SEQ ID NO: 505298 - RNA, 19 nt, Artificial Sequence
  Description of Artificial Sequence: Synthetic oligonucleotide
caacuauucuaaacauaaa

SEQ ID NO: 505299 - RNA, 19 nt, Artificial Sequence
  Description of Artificial Sequence: Synthetic oligonucleotide
uagaaacaguucugugcua

SEQ ID NO: 505300 - RNA, 19 nt, Artificial Sequence
  Description of Artificial Sequence: Synthetic oligonucleotide
cucuaguuauuuuaagguu

SEQ ID NO: 505301 - RNA, 19 nt, Artificial Sequence
  Description of Artificial Sequence: Synthetic oligonucleotide
ccuaacaaaggacuuaacu

SEQ ID NO: 505302 - RNA, 19 nt, Artificial Sequence
  Description of Artificial Sequence: Synthetic oligonucleotide
cauggcugaugaugcguuc

SEQ ID NO: 505303 - RNA, 19 nt, Artificial Sequence
  Description of Artificial Sequence: Synthetic oligonucleotide
accugcccauuagaaagag

SEQ ID NO: 505304 - RNA, 19 nt, Artificial Sequence
  Description of Artificial Sequence: Synthetic oligonucleotide
cacgaucucuauaccacaa

SEQ ID NO: 505305 - RNA, 19 nt, Artificial Sequence
  Description of Artificial Sequence: Synthetic oligonucleotide
auggcaguuuauccauuua

SEQ ID NO: 505306 - RNA, 19 nt, Artificial Sequence
  Description of Artificial Sequence: Synthetic oligonucleotide
ggacaauacuacauugcca

SEQ ID NO: 505307 - RNA, 19 nt, Artificial Sequence
  Description of Artificial Sequence: Synthetic oligonucleotide
acuacacuucaaguuguuu

SEQ ID NO: 505308 - RNA, 19 nt, Artificial Sequence
  Description of Artificial Sequence: Synthetic oligonucleotide
ccaagcuaccuguacaaga

SEQ ID NO: 505309 - RNA, 19 nt, Artificial Sequence
  Description of Artificial Sequence: Synthetic oligonucleotide
acaauagagcccagcuggu

SEQ ID NO: 505310 - RNA, 19 nt, Artificial Sequence
  Description of Artificial Sequence: Synthetic oligonucleotide
cguuaaacucaaaugcuga

SEQ ID NO: 505311 - RNA, 19 nt, Artificial Sequence
  Description of Artificial Sequence: Synthetic oligonucleotide
guaccaggcuagcugaccu

SEQ ID NO: 505312 - RNA, 19 nt, Artificial Sequence
  Description of Artificial Sequence: Synthetic oligonucleotide
aacuacacuucaaguuguu

SEQ ID NO: 505313 - RNA, 19 nt, Artificial Sequence
  Description of Artificial Sequence: Synthetic oligonucleotide
uuggcaagcccugucucuu

SEQ ID NO: 505314 - RNA, 19 nt, Artificial Sequence
  Description of Artificial Sequence: Synthetic oligonucleotide
caauuguacaggaggacuu

SEQ ID NO: 505315 - RNA, 19 nt, Artificial Sequence
  Description of Artificial Sequence: Synthetic oligonucleotide
ggcuagcugaccuuacuaa

SEQ ID NO: 505316 - RNA, 19 nt, Artificial Sequence
  Description of Artificial Sequence: Synthetic oligonucleotide
gcuaccuguacaagacaag

SEQ ID NO: 505317 - RNA, 19 nt, Artificial Sequence
  Description of Artificial Sequence: Synthetic oligonucleotide
aggagugacugagugggua

SEQ ID NO: 505318 - RNA, 19 nt, Artificial Sequence
  Description of Artificial Sequence: Synthetic oligonucleotide
cucauccguggauuccauc

SEQ ID NO: 505319 - RNA, 19 nt, Artificial Sequence
  Description of Artificial Sequence: Synthetic oligonucleotide
auacaguauuguacuaguu

SEQ ID NO: 505320 - RNA, 19 nt, Artificial Sequence
  Description of Artificial Sequence: Synthetic oligonucleotide
cauugccacugagauaaca

SEQ ID NO: 505321 - RNA, 19 nt, Artificial Sequence
  Description of Artificial Sequence: Synthetic oligonucleotide
cuguaccaggcuagcugac

SEQ ID NO: 505322 - RNA, 19 nt, Artificial Sequence
  Description of Artificial Sequence: Synthetic oligonucleotide
auacuggaucauaaacuuu

SEQ ID NO: 505323 - RNA, 19 nt, Artificial Sequence
  Description of Artificial Sequence: Synthetic oligonucleotide
cugguacagaacucaauau

SEQ ID NO: 505324 - RNA, 19 nt, Artificial Sequence
  Description of Artificial Sequence: Synthetic oligonucleotide
ugccaccuagccacacaaa

SEQ ID NO: 505325 - RNA, 19 nt, Artificial Sequence
  Description of Artificial Sequence: Synthetic oligonucleotide
caguacauauuguaccaau

SEQ ID NO: 505326 - RNA, 19 nt, Artificial Sequence
  Description of Artificial Sequence: Synthetic oligonucleotide
auacuagcaacaggauaua

SEQ ID NO: 505327 - RNA, 19 nt, Artificial Sequence
  Description of Artificial Sequence: Synthetic oligonucleotide
accagaguuacaggacaau

SEQ ID NO: 505328 - RNA, 19 nt, Artificial Sequence
  Description of Artificial Sequence: Synthetic oligonucleotide
gugguaugagauccucuua

SEQ ID NO: 505329 - RNA, 19 nt, Artificial Sequence
  Description of Artificial Sequence: Synthetic oligonucleotide
cuacauugccacugagaua

SEQ ID NO: 505330 - RNA, 19 nt, Artificial Sequence
  Description of Artificial Sequence: Synthetic oligonucleotide
cugccaccuagccacacaa

SEQ ID NO: 505331 - RNA, 19 nt, Artificial Sequence
  Description of Artificial Sequence: Synthetic oligonucleotide
cagcuauagaggugaucca

SEQ ID NO: 505332 - RNA, 19 nt, Artificial Sequence
  Description of Artificial Sequence: Synthetic oligonucleotide
caccugcccauuagaaaga

SEQ ID NO: 505333 - RNA, 19 nt, Artificial Sequence
  Description of Artificial Sequence: Synthetic oligonucleotide
ccaucguacauaauaauuu

SEQ ID NO: 505334 - RNA, 19 nt, Artificial Sequence
  Description of Artificial Sequence: Synthetic oligonucleotide
guccacccuauguuuaaua

SEQ ID NO: 505335 - RNA, 19 nt, Artificial Sequence
  Description of Artificial Sequence: Synthetic oligonucleotide
ggaccagaucaccauucca

SEQ ID NO: 505336 - RNA, 19 nt, Artificial Sequence
  Description of Artificial Sequence: Synthetic oligonucleotide
gggaugugccacgucaaac

SEQ ID NO: 505337 - RNA, 19 nt, Artificial Sequence
  Description of Artificial Sequence: Synthetic oligonucleotide
gcauaugaaggaaaaguau

SEQ ID NO: 505338 - RNA, 19 nt, Artificial Sequence
  Description of Artificial Sequence: Synthetic oligonucleotide
uaccaggcuagcugaccuu

SEQ ID NO: 505339 - RNA, 19 nt, Artificial Sequence
  Description of Artificial Sequence: Synthetic oligonucleotide
accaggcuagcugaccuua

SEQ ID NO: 505340 - RNA, 19 nt, Artificial Sequence
  Description of Artificial Sequence: Synthetic oligonucleotide
auaauucguuaaacucaaa

SEQ ID NO: 505341 - RNA, 19 nt, Artificial Sequence
  Description of Artificial Sequence: Synthetic oligonucleotide
agcaaguaccagaguuaca

SEQ ID NO: 505342 - RNA, 19 nt, Artificial Sequence
  Description of Artificial Sequence: Synthetic oligonucleotide
ccuauguuuaauaguccua

SEQ ID NO: 505343 - RNA, 19 nt, Artificial Sequence
  Description of Artificial Sequence: Synthetic oligonucleotide
cucauacuagcaacaggau

SEQ ID NO: 505344 - RNA, 19 nt, Artificial Sequence
  Description of Artificial Sequence: Synthetic oligonucleotide
accuagccacacaaauggu

SEQ ID NO: 505345 - RNA, 19 nt, Artificial Sequence
  Description of Artificial Sequence: Synthetic oligonucleotide
cauggcaguuuauccauuu

SEQ ID NO: 505346 - RNA, 19 nt, Artificial Sequence
  Description of Artificial Sequence: Synthetic oligonucleotide
augccaaguuuucguuguu

SEQ ID NO: 505347 - RNA, 19 nt, Artificial Sequence
  Description of Artificial Sequence: Synthetic oligonucleotide
ccagaucaccauuccacca

SEQ ID NO: 505348 - RNA, 19 nt, Artificial Sequence
  Description of Artificial Sequence: Synthetic oligonucleotide
cacuagccuuguccaucag

SEQ ID NO: 505349 - RNA, 19 nt, Artificial Sequence
  Description of Artificial Sequence: Synthetic oligonucleotide
ggguuccacaauagagccc

SEQ ID NO: 505350 - RNA, 19 nt, Artificial Sequence
  Description of Artificial Sequence: Synthetic oligonucleotide
gcuagcugaccuuacuaau

SEQ ID NO: 505351 - RNA, 19 nt, Artificial Sequence
  Description of Artificial Sequence: Synthetic oligonucleotide
agggugagacugcccucaa

SEQ ID NO: 505352 - RNA, 19 nt, Artificial Sequence
  Description of Artificial Sequence: Synthetic oligonucleotide
cauccguggauuccaucgu

SEQ ID NO: 505353 - RNA, 19 nt, Artificial Sequence
  Description of Artificial Sequence: Synthetic oligonucleotide
caauagagcccagcuggua

SEQ ID NO: 505354 - RNA, 19 nt, Artificial Sequence
  Description of Artificial Sequence: Synthetic oligonucleotide
ugguucggguggccaccuc

SEQ ID NO: 505355 - RNA, 19 nt, Artificial Sequence
  Description of Artificial Sequence: Synthetic oligonucleotide
cccaagcuaccuguacaag

SEQ ID NO: 505356 - RNA, 19 nt, Artificial Sequence
  Description of Artificial Sequence: Synthetic oligonucleotide
auacggcacugcauucaau

SEQ ID NO: 505357 - RNA, 19 nt, Artificial Sequence
  Description of Artificial Sequence: Synthetic oligonucleotide
caggcuagcugaccuuacu

SEQ ID NO: 505358 - RNA, 19 nt, Artificial Sequence
  Description of Artificial Sequence: Synthetic oligonucleotide
agacagcuauagaggugau

SEQ ID NO: 505359 - RNA, 19 nt, Artificial Sequence
  Description of Artificial Sequence: Synthetic oligonucleotide
cagucauaguuugcuacau

SEQ ID NO: 505360 - RNA, 19 nt, Artificial Sequence
  Description of Artificial Sequence: Synthetic oligonucleotide
ccacccuauguuuaauagu

SEQ ID NO: 505361 - RNA, 19 nt, Artificial Sequence
  Description of Artificial Sequence: Synthetic oligonucleotide
caauaggagcugccaccua

SEQ ID NO: 505362 - RNA, 19 nt, Artificial Sequence
  Description of Artificial Sequence: Synthetic oligonucleotide
caaaugguccuggggccua

SEQ ID NO: 505363 - RNA, 19 nt, Artificial Sequence
  Description of Artificial Sequence: Synthetic oligonucleotide
caucuguaccaggcuagcu

SEQ ID NO: 505364 - RNA, 19 nt, Artificial Sequence
  Description of Artificial Sequence: Synthetic oligonucleotide
ccucuaucaaugagugaau

SEQ ID NO: 505365 - RNA, 19 nt, Artificial Sequence
  Description of Artificial Sequence: Synthetic oligonucleotide
ggacguucacagggugaga

SEQ ID NO: 505366 - RNA, 19 nt, Artificial Sequence
  Description of Artificial Sequence: Synthetic oligonucleotide
cguggauuccaucguacau

SEQ ID NO: 505367 - RNA, 19 nt, Artificial Sequence
  Description of Artificial Sequence: Synthetic oligonucleotide
gauucagcaacacagacag

SEQ ID NO: 505368 - RNA, 19 nt, Artificial Sequence
  Description of Artificial Sequence: Synthetic oligonucleotide
ucuuuauuaagcuugaguc

SEQ ID NO: 505369 - RNA, 19 nt, Artificial Sequence
  Description of Artificial Sequence: Synthetic oligonucleotide
uuguaaucgagcaacaaag

SEQ ID NO: 505370 - RNA, 19 nt, Artificial Sequence
  Description of Artificial Sequence: Synthetic oligonucleotide
aaugggauaaccccaacug

SEQ ID NO: 505371 - RNA, 19 nt, Artificial Sequence
  Description of Artificial Sequence: Synthetic oligonucleotide
aaucgagcaacaaagugcc

SEQ ID NO: 505372 - RNA, 19 nt, Artificial Sequence
  Description of Artificial Sequence: Synthetic oligonucleotide
aaugcugacaaagaugccg

SEQ ID NO: 505373 - RNA, 19 nt, Artificial Sequence
  Description of Artificial Sequence: Synthetic oligonucleotide
uaaucgagcaacaaagugc

SEQ ID NO: 505374 - RNA, 19 nt, Artificial Sequence
  Description of Artificial Sequence: Synthetic oligonucleotide
uuaagcuugagucucaagu

SEQ ID NO: 505375 - RNA, 19 nt, Artificial Sequence
  Description of Artificial Sequence: Synthetic oligonucleotide
aauuggaaaugggauaacc

SEQ ID NO: 505376 - RNA, 19 nt, Artificial Sequence
  Description of Artificial Sequence: Synthetic oligonucleotide
acauucuugacauccacac

SEQ ID NO: 505377 - RNA, 19 nt, Artificial Sequence
  Description of Artificial Sequence: Synthetic oligonucleotide
uccucuaaagcacugagca

SEQ ID NO: 505378 - RNA, 19 nt, Artificial Sequence
  Description of Artificial Sequence: Synthetic oligonucleotide
aaggagaguaguucagggc

SEQ ID NO: 505379 - RNA, 19 nt, Artificial Sequence
  Description of Artificial Sequence: Synthetic oligonucleotide
aaagcggccacuaguagcc

SEQ ID NO: 505380 - RNA, 19 nt, Artificial Sequence
  Description of Artificial Sequence: Synthetic oligonucleotide
aaaugaagaccugugauga

SEQ ID NO: 505381 - RNA, 19 nt, Artificial Sequence
  Description of Artificial Sequence: Synthetic oligonucleotide
aaaagaacccagccccagc

SEQ ID NO: 505382 - RNA, 19 nt, Artificial Sequence
  Description of Artificial Sequence: Synthetic oligonucleotide
aacucagacacccaugccu

SEQ ID NO: 505383 - RNA, 19 nt, Artificial Sequence
  Description of Artificial Sequence: Synthetic oligonucleotide
agcuccucuaagcacagcc

SEQ ID NO: 505384 - RNA, 19 nt, Artificial Sequence
  Description of Artificial Sequence: Synthetic oligonucleotide
cuuggaaugaugaugauaa

SEQ ID NO: 505385 - RNA, 19 nt, Artificial Sequence
  Description of Artificial Sequence: Synthetic oligonucleotide
agguagguuacgcagugcc

SEQ ID NO: 505386 - RNA, 19 nt, Artificial Sequence
  Description of Artificial Sequence: Synthetic oligonucleotide
aguuuaugccgcucaaagc

SEQ ID NO: 505387 - RNA, 19 nt, Artificial Sequence
  Description of Artificial Sequence: Synthetic oligonucleotide
aaguuaaagcgucuaugag

SEQ ID NO: 505388 - RNA, 19 nt, Artificial Sequence
  Description of Artificial Sequence: Synthetic oligonucleotide
ucuuauagagaguccaggc

SEQ ID NO: 505389 - RNA, 19 nt, Artificial Sequence
  Description of Artificial Sequence: Synthetic oligonucleotide
auuggaaaugggauaaccc

SEQ ID NO: 505390 - RNA, 19 nt, Artificial Sequence
  Description of Artificial Sequence: Synthetic oligonucleotide
ucuggauugaacugcagga

SEQ ID NO: 505391 - RNA, 19 nt, Artificial Sequence
  Description of Artificial Sequence: Synthetic oligonucleotide
uuauagagaguccaggcau

SEQ ID NO: 505392 - RNA, 19 nt, Artificial Sequence
  Description of Artificial Sequence: Synthetic oligonucleotide
aaauccaggccaucaauca

SEQ ID NO: 505393 - RNA, 19 nt, Artificial Sequence
  Description of Artificial Sequence: Synthetic oligonucleotide
gaaguuaaagcgucuauga

SEQ ID NO: 505394 - RNA, 19 nt, Artificial Sequence
  Description of Artificial Sequence: Synthetic oligonucleotide
uuuauuaagcuugagucuc

SEQ ID NO: 505395 - RNA, 19 nt, Artificial Sequence
  Description of Artificial Sequence: Synthetic oligonucleotide
uguaucuugggugaggaca

SEQ ID NO: 505396 - RNA, 19 nt, Artificial Sequence
  Description of Artificial Sequence: Synthetic oligonucleotide
cuuaguggaaggcaggaag

SEQ ID NO: 505397 - RNA, 19 nt, Artificial Sequence
  Description of Artificial Sequence: Synthetic oligonucleotide
ucacuugccacuccaaagc

SEQ ID NO: 505398 - RNA, 19 nt, Artificial Sequence
  Description of Artificial Sequence: Synthetic oligonucleotide
augaugauaaagcggccac

SEQ ID NO: 505399 - RNA, 19 nt, Artificial Sequence
  Description of Artificial Sequence: Synthetic oligonucleotide
acuaguagccagcuggcgg

SEQ ID NO: 505400 - RNA, 19 nt, Artificial Sequence
  Description of Artificial Sequence: Synthetic oligonucleotide
aaaugggauaaccccaacu

SEQ ID NO: 505401 - RNA, 19 nt, Artificial Sequence
  Description of Artificial Sequence: Synthetic oligonucleotide
aggguuagcugucugcagc

SEQ ID NO: 505402 - RNA, 19 nt, Artificial Sequence
  Description of Artificial Sequence: Synthetic oligonucleotide
cugcaucgaaguuaaagcg

SEQ ID NO: 505403 - RNA, 19 nt, Artificial Sequence
  Description of Artificial Sequence: Synthetic oligonucleotide
ugauaaagcggccacuagu

SEQ ID NO: 505404 - RNA, 19 nt, Artificial Sequence
  Description of Artificial Sequence: Synthetic oligonucleotide
agcgaauguaucuguuucc

SEQ ID NO: 505405 - RNA, 19 nt, Artificial Sequence
  Description of Artificial Sequence: Synthetic oligonucleotide
cucauuggcaccccuaucc

SEQ ID NO: 505406 - RNA, 19 nt, Artificial Sequence
  Description of Artificial Sequence: Synthetic oligonucleotide
aaagaacccagccccagcu

SEQ ID NO: 505407 - RNA, 19 nt, Artificial Sequence
  Description of Artificial Sequence: Synthetic oligonucleotide
ucgagcaacaaagugcccg

SEQ ID NO: 505408 - RNA, 19 nt, Artificial Sequence
  Description of Artificial Sequence: Synthetic oligonucleotide
caaaugaagaccugugaug

SEQ ID NO: 505409 - RNA, 19 nt, Artificial Sequence
  Description of Artificial Sequence: Synthetic oligonucleotide
guaaucgagcaacaaagug

SEQ ID NO: 505410 - RNA, 19 nt, Artificial Sequence
  Description of Artificial Sequence: Synthetic oligonucleotide
gaagcuacggauguagcag

SEQ ID NO: 505411 - RNA, 19 nt, Artificial Sequence
  Description of Artificial Sequence: Synthetic oligonucleotide
ggaaugaugaugauaaagc

SEQ ID NO: 505412 - RNA, 19 nt, Artificial Sequence
  Description of Artificial Sequence: Synthetic oligonucleotide
guuaaagcgucuaugagca

SEQ ID NO: 505413 - RNA, 19 nt, Artificial Sequence
  Description of Artificial Sequence: Synthetic oligonucleotide
agcuauucaugaucucugc

SEQ ID NO: 505414 - RNA, 19 nt, Artificial Sequence
  Description of Artificial Sequence: Synthetic oligonucleotide
cuauucaugaucucugcuc

SEQ ID NO: 505415 - RNA, 19 nt, Artificial Sequence
  Description of Artificial Sequence: Synthetic oligonucleotide
ucuaguccugggaacaggc

SEQ ID NO: 505416 - RNA, 19 nt, Artificial Sequence
  Description of Artificial Sequence: Synthetic oligonucleotide
uguaaucgagcaacaaagu

SEQ ID NO: 505417 - RNA, 19 nt, Artificial Sequence
  Description of Artificial Sequence: Synthetic oligonucleotide
uccaaaugaagaccuguga

SEQ ID NO: 505418 - RNA, 19 nt, Artificial Sequence
  Description of Artificial Sequence: Synthetic oligonucleotide
ugucuuaguggaaggcagg

SEQ ID NO: 505419 - RNA, 19 nt, Artificial Sequence
  Description of Artificial Sequence: Synthetic oligonucleotide
acggauguagcagaugcgc

SEQ ID NO: 505420 - RNA, 19 nt, Artificial Sequence
  Description of Artificial Sequence: Synthetic oligonucleotide
uaagcuugagucucaaguc

SEQ ID NO: 505421 - RNA, 19 nt, Artificial Sequence
  Description of Artificial Sequence: Synthetic oligonucleotide
uccgccauucgaaacuggg

SEQ ID NO: 505422 - RNA, 19 nt, Artificial Sequence
  Description of Artificial Sequence: Synthetic oligonucleotide
caguuuaugccgcucaaag

SEQ ID NO: 505423 - RNA, 19 nt, Artificial Sequence
  Description of Artificial Sequence: Synthetic oligonucleotide
agucucaagucucugccag

SEQ ID NO: 505424 - RNA, 19 nt, Artificial Sequence
  Description of Artificial Sequence: Synthetic oligonucleotide
ugcuagagucugcaugugg

SEQ ID NO: 505425 - RNA, 19 nt, Artificial Sequence
  Description of Artificial Sequence: Synthetic oligonucleotide
cuguuugcgugcuagaguc

SEQ ID NO: 505426 - RNA, 19 nt, Artificial Sequence
  Description of Artificial Sequence: Synthetic oligonucleotide
ucuuccuaagagccagggg

SEQ ID NO: 505427 - RNA, 19 nt, Artificial Sequence
  Description of Artificial Sequence: Synthetic oligonucleotide
gccacuaguagccagcugg

SEQ ID NO: 505428 - RNA, 19 nt, Artificial Sequence
  Description of Artificial Sequence: Synthetic oligonucleotide
uguccuuuccucucagaag

SEQ ID NO: 505429 - RNA, 19 nt, Artificial Sequence
  Description of Artificial Sequence: Synthetic oligonucleotide
ugggauaaccccaacuguc

SEQ ID NO: 505430 - RNA, 19 nt, Artificial Sequence
  Description of Artificial Sequence: Synthetic oligonucleotide
aacucugccuccagguacc

SEQ ID NO: 505431 - RNA, 19 nt, Artificial Sequence
  Description of Artificial Sequence: Synthetic oligonucleotide
cuaugcucugcuuccaggc

SEQ ID NO: 505432 - RNA, 19 nt, Artificial Sequence
  Description of Artificial Sequence: Synthetic oligonucleotide
agaugagcgagggaggagg

SEQ ID NO: 505433 - RNA, 19 nt, Artificial Sequence
  Description of Artificial Sequence: Synthetic oligonucleotide
uuccuaagagccaggggcc

SEQ ID NO: 505434 - RNA, 19 nt, Artificial Sequence
  Description of Artificial Sequence: Synthetic oligonucleotide
ucaaccaaucuccuuccac

SEQ ID NO: 505435 - RNA, 19 nt, Artificial Sequence
  Description of Artificial Sequence: Synthetic oligonucleotide
cuaugagcaguccggagag

SEQ ID NO: 505436 - RNA, 19 nt, Artificial Sequence
  Description of Artificial Sequence: Synthetic oligonucleotide
uguaaucgaagcugagcca

SEQ ID NO: 505437 - RNA, 19 nt, Artificial Sequence
  Description of Artificial Sequence: Synthetic oligonucleotide
acaaagugcccgaagcuac

SEQ ID NO: 505438 - RNA, 19 nt, Artificial Sequence
  Description of Artificial Sequence: Synthetic oligonucleotide
gauaaccccaacugucccc

SEQ ID NO: 505439 - RNA, 19 nt, Artificial Sequence
  Description of Artificial Sequence: Synthetic oligonucleotide
agcgucuaugagcaguccg

SEQ ID NO: 505440 - RNA, 19 nt, Artificial Sequence
  Description of Artificial Sequence: Synthetic oligonucleotide
uaaagcgucuaugagcagu

SEQ ID NO: 505441 - RNA, 19 nt, Artificial Sequence
  Description of Artificial Sequence: Synthetic oligonucleotide
cugucuuaguggaaggcag

SEQ ID NO: 505442 - RNA, 19 nt, Artificial Sequence
  Description of Artificial Sequence: Synthetic oligonucleotide
uuauuaagcuugagucuca

SEQ ID NO: 505443 - RNA, 19 nt, Artificial Sequence
  Description of Artificial Sequence: Synthetic oligonucleotide
uacggauguagcagaugcg

SEQ ID NO: 505444 - RNA, 19 nt, Artificial Sequence
  Description of Artificial Sequence: Synthetic oligonucleotide
ugggguuguccaaaugaag

SEQ ID NO: 505445 - RNA, 19 nt, Artificial Sequence
  Description of Artificial Sequence: Synthetic oligonucleotide
uuacgcagugccauguccu

SEQ ID NO: 505446 - RNA, 19 nt, Artificial Sequence
  Description of Artificial Sequence: Synthetic oligonucleotide
aaagccagcccgugcuuag

SEQ ID NO: 505447 - RNA, 19 nt, Artificial Sequence
  Description of Artificial Sequence: Synthetic oligonucleotide
ucaugagccuguuccgccg

SEQ ID NO: 505448 - RNA, 19 nt, Artificial Sequence
  Description of Artificial Sequence: Synthetic oligonucleotide
uccccuacagcucuuugcu

SEQ ID NO: 505449 - RNA, 19 nt, Artificial Sequence
  Description of Artificial Sequence: Synthetic oligonucleotide
auaaagcggccacuaguag

SEQ ID NO: 505450 - RNA, 19 nt, Artificial Sequence
  Description of Artificial Sequence: Synthetic oligonucleotide
aagaaaguggggccuugga

SEQ ID NO: 505451 - RNA, 19 nt, Artificial Sequence
  Description of Artificial Sequence: Synthetic oligonucleotide
gaucuuauagagaguccag

SEQ ID NO: 505452 - RNA, 19 nt, Artificial Sequence
  Description of Artificial Sequence: Synthetic oligonucleotide
agaugcgcaccaccgacuc

SEQ ID NO: 505453 - RNA, 19 nt, Artificial Sequence
  Description of Artificial Sequence: Synthetic oligonucleotide
aaagugcccgaagcuacgg

SEQ ID NO: 505454 - RNA, 19 nt, Artificial Sequence
  Description of Artificial Sequence: Synthetic oligonucleotide
cuuauagagaguccaggca

SEQ ID NO: 505455 - RNA, 19 nt, Artificial Sequence
  Description of Artificial Sequence: Synthetic oligonucleotide
uuaugccgcucaaagcucu

SEQ ID NO: 505456 - RNA, 19 nt, Artificial Sequence
  Description of Artificial Sequence: Synthetic oligonucleotide
cagcaacacagacaggcgg

SEQ ID NO: 505457 - RNA, 19 nt, Artificial Sequence
  Description of Artificial Sequence: Synthetic oligonucleotide
agaccucgagcuguaaucg

SEQ ID NO: 505458 - RNA, 19 nt, Artificial Sequence
  Description of Artificial Sequence: Synthetic oligonucleotide
ucgagcuguaaucgaagcu

SEQ ID NO: 505459 - RNA, 19 nt, Artificial Sequence
  Description of Artificial Sequence: Synthetic oligonucleotide
accaccgacuccucuaaag

SEQ ID NO: 505460 - RNA, 19 nt, Artificial Sequence
  Description of Artificial Sequence: Synthetic oligonucleotide
agugccauguccucuggga

SEQ ID NO: 505461 - RNA, 19 nt, Artificial Sequence
  Description of Artificial Sequence: Synthetic oligonucleotide
agcaacaaagugcccgaag

SEQ ID NO: 505462 - RNA, 19 nt, Artificial Sequence
  Description of Artificial Sequence: Synthetic oligonucleotide
uguccaaaugaagaccugu

SEQ ID NO: 505463 - RNA, 19 nt, Artificial Sequence
  Description of Artificial Sequence: Synthetic oligonucleotide
cuuguaaucgagcaacaaa

SEQ ID NO: 505464 - RNA, 19 nt, Artificial Sequence
  Description of Artificial Sequence: Synthetic oligonucleotide
aacaaagugcccgaagcua

SEQ ID NO: 505465 - RNA, 19 nt, Artificial Sequence
  Description of Artificial Sequence: Synthetic oligonucleotide
uucgaaacugggccugagc

SEQ ID NO: 505466 - RNA, 19 nt, Artificial Sequence
  Description of Artificial Sequence: Synthetic oligonucleotide
auuaagcuugagucucaag

SEQ ID NO: 505467 - RNA, 19 nt, Artificial Sequence
  Description of Artificial Sequence: Synthetic oligonucleotide
cagauucagcaacacagac

SEQ ID NO: 505468 - RNA, 19 nt, Artificial Sequence
  Description of Artificial Sequence: Synthetic oligonucleotide
uccuccgccauucgaaacu

SEQ ID NO: 505469 - RNA, 19 nt, Artificial Sequence
  Description of Artificial Sequence: Synthetic oligonucleotide
aaccccaacuguccccuag

SEQ ID NO: 505470 - RNA, 19 nt, Artificial Sequence
  Description of Artificial Sequence: Synthetic oligonucleotide
augggauaaccccaacugu

SEQ ID NO: 505471 - RNA, 19 nt, Artificial Sequence
  Description of Artificial Sequence: Synthetic oligonucleotide
cagaggccgaucugcaucg

SEQ ID NO: 505472 - RNA, 19 nt, Artificial Sequence
  Description of Artificial Sequence: Synthetic oligonucleotide
augauaaagcggccacuag

SEQ ID NO: 505473 - RNA, 19 nt, Artificial Sequence
  Description of Artificial Sequence: Synthetic oligonucleotide
guaucuugggugaggacag

SEQ ID NO: 505474 - RNA, 19 nt, Artificial Sequence
  Description of Artificial Sequence: Synthetic oligonucleotide
cucgagcuguaaucgaagc

SEQ ID NO: 505475 - RNA, 19 nt, Artificial Sequence
  Description of Artificial Sequence: Synthetic oligonucleotide
ugcuccuugggccaggguu

SEQ ID NO: 505476 - RNA, 19 nt, Artificial Sequence
  Description of Artificial Sequence: Synthetic oligonucleotide
accgacuccucuaaagcac

SEQ ID NO: 505477 - RNA, 19 nt, Artificial Sequence
  Description of Artificial Sequence: Synthetic oligonucleotide
ucgaaguuaaagcgucuau

SEQ ID NO: 505478 - RNA, 19 nt, Artificial Sequence
  Description of Artificial Sequence: Synthetic oligonucleotide
aggaucuuauagagagucc

SEQ ID NO: 505479 - RNA, 19 nt, Artificial Sequence
  Description of Artificial Sequence: Synthetic oligonucleotide
caaagugcccgaagcuacg

SEQ ID NO: 505480 - RNA, 19 nt, Artificial Sequence
  Description of Artificial Sequence: Synthetic oligonucleotide
cuuuauuaagcuugagucu

SEQ ID NO: 505481 - RNA, 19 nt, Artificial Sequence
  Description of Artificial Sequence: Synthetic oligonucleotide
cucaugagccuguuccgcc

SEQ ID NO: 505482 - RNA, 19 nt, Artificial Sequence
  Description of Artificial Sequence: Synthetic oligonucleotide
uccuguuugcgugcuagag

SEQ ID NO: 505483 - RNA, 19 nt, Artificial Sequence
  Description of Artificial Sequence: Synthetic oligonucleotide
ucucuuguucagacugagc

SEQ ID NO: 505484 - RNA, 19 nt, Artificial Sequence
  Description of Artificial Sequence: Synthetic oligonucleotide
ugccauguccucugggagc

SEQ ID NO: 505485 - RNA, 19 nt, Artificial Sequence
  Description of Artificial Sequence: Synthetic oligonucleotide
cagcgaauguaucuguuuc

SEQ ID NO: 505486 - RNA, 19 nt, Artificial Sequence
  Description of Artificial Sequence: Synthetic oligonucleotide
aguccggagagggagguag

SEQ ID NO: 505487 - RNA, 19 nt, Artificial Sequence
  Description of Artificial Sequence: Synthetic oligonucleotide
cugcgggccagucucaacc

SEQ ID NO: 505488 - RNA, 19 nt, Artificial Sequence
  Description of Artificial Sequence: Synthetic oligonucleotide
accggaucccaucccgggc

SEQ ID NO: 505489 - RNA, 19 nt, Artificial Sequence
  Description of Artificial Sequence: Synthetic oligonucleotide
auuggcaccccuaucccag

SEQ ID NO: 505490 - RNA, 19 nt, Artificial Sequence
  Description of Artificial Sequence: Synthetic oligonucleotide
gguaccggaucccaucccg

SEQ ID NO: 505491 - RNA, 19 nt, Artificial Sequence
  Description of Artificial Sequence: Synthetic oligonucleotide
acuguccuuggaaugauga

SEQ ID NO: 505492 - RNA, 19 nt, Artificial Sequence
  Description of Artificial Sequence: Synthetic oligonucleotide
guccuuggaaugaugauga

SEQ ID NO: 505493 - RNA, 19 nt, Artificial Sequence
  Description of Artificial Sequence: Synthetic oligonucleotide
cugcagagaaucaugcaga

SEQ ID NO: 505494 - RNA, 19 nt, Artificial Sequence
  Description of Artificial Sequence: Synthetic oligonucleotide
ucccgagcugccuuguccc

SEQ ID NO: 505495 - RNA, 19 nt, Artificial Sequence
  Description of Artificial Sequence: Synthetic oligonucleotide
uuugcgugcuagagucugc

SEQ ID NO: 505496 - RNA, 19 nt, Artificial Sequence
  Description of Artificial Sequence: Synthetic oligonucleotide
cuccccuacagcucuuugc

SEQ ID NO: 505497 - RNA, 19 nt, Artificial Sequence
  Description of Artificial Sequence: Synthetic oligonucleotide
gagcaguccggagagggag

SEQ ID NO: 505498 - RNA, 19 nt, Artificial Sequence
  Description of Artificial Sequence: Synthetic oligonucleotide
ggauugaacugcaggaugc

SEQ ID NO: 505499 - RNA, 19 nt, Artificial Sequence
  Description of Artificial Sequence: Synthetic oligonucleotide
gaacucagacacccaugcc

SEQ ID NO: 505500 - RNA, 19 nt, Artificial Sequence
  Description of Artificial Sequence: Synthetic oligonucleotide
gacccuggacuucaggaca

SEQ ID NO: 505501 - RNA, 19 nt, Artificial Sequence
  Description of Artificial Sequence: Synthetic oligonucleotide
gaugagcgagggaggaggg

SEQ ID NO: 505502 - RNA, 19 nt, Artificial Sequence
  Description of Artificial Sequence: Synthetic oligonucleotide
uuaaagcgucuaugagcag

SEQ ID NO: 505503 - RNA, 19 nt, Artificial Sequence
  Description of Artificial Sequence: Synthetic oligonucleotide
gagccuguuccgccgagcc

SEQ ID NO: 505504 - RNA, 19 nt, Artificial Sequence
  Description of Artificial Sequence: Synthetic oligonucleotide
aaucuggagucagccccac

SEQ ID NO: 505505 - RNA, 19 nt, Artificial Sequence
  Description of Artificial Sequence: Synthetic oligonucleotide
gguuguccaaaugaagacc

SEQ ID NO: 505506 - RNA, 19 nt, Artificial Sequence
  Description of Artificial Sequence: Synthetic oligonucleotide
agugcccgaagcuacggau

SEQ ID NO: 505507 - RNA, 19 nt, Artificial Sequence
  Description of Artificial Sequence: Synthetic oligonucleotide
ggaucuuauagagagucca

SEQ ID NO: 505508 - RNA, 19 nt, Artificial Sequence
  Description of Artificial Sequence: Synthetic oligonucleotide
agcccauaccccauguggg

SEQ ID NO: 505509 - RNA, 19 nt, Artificial Sequence
  Description of Artificial Sequence: Synthetic oligonucleotide
gaaaugggauaaccccaac

SEQ ID NO: 505510 - RNA, 19 nt, Artificial Sequence
  Description of Artificial Sequence: Synthetic oligonucleotide
ugacuacaggugguggucc

SEQ ID NO: 505511 - RNA, 19 nt, Artificial Sequence
  Description of Artificial Sequence: Synthetic oligonucleotide
ugcucucagggcaccauuc

SEQ ID NO: 505512 - RNA, 19 nt, Artificial Sequence
  Description of Artificial Sequence: Synthetic oligonucleotide
cagaauuggaaaugggaua

SEQ ID NO: 505513 - RNA, 19 nt, Artificial Sequence
  Description of Artificial Sequence: Synthetic oligonucleotide
acucagacacccaugccug

SEQ ID NO: 505514 - RNA, 19 nt, Artificial Sequence
  Description of Artificial Sequence: Synthetic oligonucleotide
uagguuacgcagugccaug

SEQ ID NO: 505515 - RNA, 19 nt, Artificial Sequence
  Description of Artificial Sequence: Synthetic oligonucleotide
aucuugggugaggacagag

SEQ ID NO: 505516 - RNA, 19 nt, Artificial Sequence
  Description of Artificial Sequence: Synthetic oligonucleotide
ugauuucaccuuggcaaca

SEQ ID NO: 505517 - RNA, 19 nt, Artificial Sequence
  Description of Artificial Sequence: Synthetic oligonucleotide
uauuaagcuugagucucaa

SEQ ID NO: 505518 - RNA, 19 nt, Artificial Sequence
  Description of Artificial Sequence: Synthetic oligonucleotide
gggaucuugccucucugcc

SEQ ID NO: 505519 - RNA, 19 nt, Artificial Sequence
  Description of Artificial Sequence: Synthetic oligonucleotide
gagaaucaugcagacagua

SEQ ID NO: 505520 - RNA, 19 nt, Artificial Sequence
  Description of Artificial Sequence: Synthetic oligonucleotide
uguuugcgugcuagagucu

SEQ ID NO: 505521 - RNA, 19 nt, Artificial Sequence
  Description of Artificial Sequence: Synthetic oligonucleotide
uggcggaugagagggaggu

SEQ ID NO: 505522 - RNA, 19 nt, Artificial Sequence
  Description of Artificial Sequence: Synthetic oligonucleotide
auagagaguccaggcaucu

SEQ ID NO: 505523 - RNA, 19 nt, Artificial Sequence
  Description of Artificial Sequence: Synthetic oligonucleotide
guuccgccgagccucuucc

SEQ ID NO: 505524 - RNA, 19 nt, Artificial Sequence
  Description of Artificial Sequence: Synthetic oligonucleotide
ggcuaggccagaauccugg

SEQ ID NO: 505525 - RNA, 19 nt, Artificial Sequence
  Description of Artificial Sequence: Synthetic oligonucleotide
ucaguuuaugccgcucaaa

SEQ ID NO: 505526 - RNA, 19 nt, Artificial Sequence
  Description of Artificial Sequence: Synthetic oligonucleotide
cugugaacugcuggggaag

SEQ ID NO: 505527 - RNA, 19 nt, Artificial Sequence
  Description of Artificial Sequence: Synthetic oligonucleotide
agcuaggccaguugggaua

SEQ ID NO: 505528 - RNA, 19 nt, Artificial Sequence
  Description of Artificial Sequence: Synthetic oligonucleotide
gacaaagaugccgaccucu

SEQ ID NO: 505529 - RNA, 19 nt, Artificial Sequence
  Description of Artificial Sequence: Synthetic oligonucleotide
gaauuggaaaugggauaac

SEQ ID NO: 505530 - RNA, 19 nt, Artificial Sequence
  Description of Artificial Sequence: Synthetic oligonucleotide
guccuggucgccaggaagc

SEQ ID NO: 505531 - RNA, 19 nt, Artificial Sequence
  Description of Artificial Sequence: Synthetic oligonucleotide
gggguuguccaaaugaaga

SEQ ID NO: 505532 - RNA, 19 nt, Artificial Sequence
  Description of Artificial Sequence: Synthetic oligonucleotide
ucuuaguggaaggcaggaa

SEQ ID NO: 505533 - RNA, 19 nt, Artificial Sequence
  Description of Artificial Sequence: Synthetic oligonucleotide
cuucccucccucauuggca

SEQ ID NO: 505534 - RNA, 19 nt, Artificial Sequence
  Description of Artificial Sequence: Synthetic oligonucleotide
uggcagcgaauguaucugu

SEQ ID NO: 505535 - RNA, 19 nt, Artificial Sequence
  Description of Artificial Sequence: Synthetic oligonucleotide
uugcgugcuagagucugca

SEQ ID NO: 505536 - RNA, 19 nt, Artificial Sequence
  Description of Artificial Sequence: Synthetic oligonucleotide
ucggguccuccucuccugc

SEQ ID NO: 505537 - RNA, 19 nt, Artificial Sequence
  Description of Artificial Sequence: Synthetic oligonucleotide
ccuaucccagaacagcagc

SEQ ID NO: 505538 - RNA, 19 nt, Artificial Sequence
  Description of Artificial Sequence: Synthetic oligonucleotide
uguuccgccgagccucuuc

SEQ ID NO: 505539 - RNA, 19 nt, Artificial Sequence
  Description of Artificial Sequence: Synthetic oligonucleotide
uccuaagagccaggggccc

SEQ ID NO: 505540 - RNA, 19 nt, Artificial Sequence
  Description of Artificial Sequence: Synthetic oligonucleotide
cgugcuuagcccaccaggg

SEQ ID NO: 505541 - RNA, 19 nt, Artificial Sequence
  Description of Artificial Sequence: Synthetic oligonucleotide
agagccuccccuacagcuc

SEQ ID NO: 505542 - RNA, 19 nt, Artificial Sequence
  Description of Artificial Sequence: Synthetic oligonucleotide
gcgucuaugagcaguccgg

SEQ ID NO: 505543 - RNA, 19 nt, Artificial Sequence
  Description of Artificial Sequence: Synthetic oligonucleotide
caccgacuccucuaaagca

SEQ ID NO: 505544 - RNA, 19 nt, Artificial Sequence
  Description of Artificial Sequence: Synthetic oligonucleotide
gagaugagcgagggaggag

SEQ ID NO: 505545 - RNA, 19 nt, Artificial Sequence
  Description of Artificial Sequence: Synthetic oligonucleotide
uccaagcacuugcucacuu

SEQ ID NO: 505546 - RNA, 19 nt, Artificial Sequence
  Description of Artificial Sequence: Synthetic oligonucleotide
aggccgaucugcaucgaag

SEQ ID NO: 505547 - RNA, 19 nt, Artificial Sequence
  Description of Artificial Sequence: Synthetic oligonucleotide
caggguuagcugucugcag

SEQ ID NO: 505548 - RNA, 19 nt, Artificial Sequence
  Description of Artificial Sequence: Synthetic oligonucleotide
uuccuccgccauucgaaac

SEQ ID NO: 505549 - RNA, 19 nt, Artificial Sequence
  Description of Artificial Sequence: Synthetic oligonucleotide
ugcugacaaagaugccgac

SEQ ID NO: 505550 - RNA, 19 nt, Artificial Sequence
  Description of Artificial Sequence: Synthetic oligonucleotide
ucuuugcucucagggcacc

SEQ ID NO: 505551 - RNA, 19 nt, Artificial Sequence
  Description of Artificial Sequence: Synthetic oligonucleotide
ugcgggccagucucaacca

SEQ ID NO: 505552 - RNA, 19 nt, Artificial Sequence
  Description of Artificial Sequence: Synthetic oligonucleotide
gugcuuagcccaccagggc

SEQ ID NO: 505553 - RNA, 19 nt, Artificial Sequence
  Description of Artificial Sequence: Synthetic oligonucleotide
cgccauucgaaacugggcc

SEQ ID NO: 505554 - RNA, 19 nt, Artificial Sequence
  Description of Artificial Sequence: Synthetic oligonucleotide
gcgugcuagagucugcaug

SEQ ID NO: 505555 - RNA, 19 nt, Artificial Sequence
  Description of Artificial Sequence: Synthetic oligonucleotide
aucgaaguuaaagcgucua

SEQ ID NO: 505556 - RNA, 19 nt, Artificial Sequence
  Description of Artificial Sequence: Synthetic oligonucleotide
cuauagaaguccagaacau

SEQ ID NO: 505557 - RNA, 19 nt, Artificial Sequence
  Description of Artificial Sequence: Synthetic oligonucleotide
uacgcagugccauguccuc

SEQ ID NO: 505558 - RNA, 19 nt, Artificial Sequence
  Description of Artificial Sequence: Synthetic oligonucleotide
cacuaguagccagcuggcg

SEQ ID NO: 505559 - RNA, 19 nt, Artificial Sequence
  Description of Artificial Sequence: Synthetic oligonucleotide
agggcuaggccagaauccu

SEQ ID NO: 505560 - RNA, 19 nt, Artificial Sequence
  Description of Artificial Sequence: Synthetic oligonucleotide
caccccuaucccagaacag

SEQ ID NO: 505561 - RNA, 19 nt, Artificial Sequence
  Description of Artificial Sequence: Synthetic oligonucleotide
ccacccuguaucuugggug

SEQ ID NO: 505562 - RNA, 19 nt, Artificial Sequence
  Description of Artificial Sequence: Synthetic oligonucleotide
cugggguuguccaaaugaa

SEQ ID NO: 505563 - RNA, 19 nt, Artificial Sequence
  Description of Artificial Sequence: Synthetic oligonucleotide
ccaccgacuccucuaaagc

SEQ ID NO: 505564 - RNA, 19 nt, Artificial Sequence
  Description of Artificial Sequence: Synthetic oligonucleotide
caacuguccccuaguuuuc

SEQ ID NO: 505565 - RNA, 19 nt, Artificial Sequence
  Description of Artificial Sequence: Synthetic oligonucleotide
aggccagaauccuggaguu

SEQ ID NO: 505566 - RNA, 19 nt, Artificial Sequence
  Description of Artificial Sequence: Synthetic oligonucleotide
guaccggaucccaucccgg

SEQ ID NO: 505567 - RNA, 19 nt, Artificial Sequence
  Description of Artificial Sequence: Synthetic oligonucleotide
guaaucgaagcugagccau

SEQ ID NO: 505568 - RNA, 19 nt, Artificial Sequence
  Description of Artificial Sequence: Synthetic oligonucleotide
ucccuuccagcugcgagac

SEQ ID NO: 505569 - RNA, 19 nt, Artificial Sequence
  Description of Artificial Sequence: Synthetic oligonucleotide
cagagcacagugacuguga

SEQ ID NO: 505570 - RNA, 19 nt, Artificial Sequence
  Description of Artificial Sequence: Synthetic oligonucleotide
gcugacaaagaugccgacc

SEQ ID NO: 505571 - RNA, 19 nt, Artificial Sequence
  Description of Artificial Sequence: Synthetic oligonucleotide
aucgagcaacaaagugccc

SEQ ID NO: 505572 - RNA, 19 nt, Artificial Sequence
  Description of Artificial Sequence: Synthetic oligonucleotide
gugacuacagguggugguc

SEQ ID NO: 505573 - RNA, 19 nt, Artificial Sequence
  Description of Artificial Sequence: Synthetic oligonucleotide
cuguaucuugggugaggac

SEQ ID NO: 505574 - RNA, 19 nt, Artificial Sequence
  Description of Artificial Sequence: Synthetic oligonucleotide
gucuuaguggaaggcagga

SEQ ID NO: 505575 - RNA, 19 nt, Artificial Sequence
  Description of Artificial Sequence: Synthetic oligonucleotide
auucgaaacugggccugag

SEQ ID NO: 505576 - RNA, 19 nt, Artificial Sequence
  Description of Artificial Sequence: Synthetic oligonucleotide
caucccgggcuccuggcug

SEQ ID NO: 505577 - RNA, 19 nt, Artificial Sequence
  Description of Artificial Sequence: Synthetic oligonucleotide
gcccagacagugcacuggg

SEQ ID NO: 505578 - RNA, 19 nt, Artificial Sequence
  Description of Artificial Sequence: Synthetic oligonucleotide
ccgugcuuagcccaccagg

SEQ ID NO: 505579 - RNA, 19 nt, Artificial Sequence
  Description of Artificial Sequence: Synthetic oligonucleotide
cauuggcaccccuauccca

SEQ ID NO: 505580 - RNA, 19 nt, Artificial Sequence
  Description of Artificial Sequence: Synthetic oligonucleotide
ggagacccuggacuucagg

SEQ ID NO: 505581 - RNA, 19 nt, Artificial Sequence
  Description of Artificial Sequence: Synthetic oligonucleotide
gaccucgagcuguaaucga

SEQ ID NO: 505582 - RNA, 19 nt, Artificial Sequence
  Description of Artificial Sequence: Synthetic oligonucleotide
agguuacgcagugccaugu

SEQ ID NO: 505583 - RNA, 19 nt, Artificial Sequence
  Description of Artificial Sequence: Synthetic oligonucleotide
ccucuucaguuuaugccgc

SEQ ID NO: 505584 - RNA, 19 nt, Artificial Sequence
  Description of Artificial Sequence: Synthetic oligonucleotide
gacuccucuaaagcacuga

SEQ ID NO: 505585 - RNA, 19 nt, Artificial Sequence
  Description of Artificial Sequence: Synthetic oligonucleotide
caaagcucuuucccaccuc

SEQ ID NO: 505586 - RNA, 19 nt, Artificial Sequence
  Description of Artificial Sequence: Synthetic oligonucleotide
uccugggaacaggcaaaag

SEQ ID NO: 505587 - RNA, 19 nt, Artificial Sequence
  Description of Artificial Sequence: Synthetic oligonucleotide
cuccgccauucgaaacugg

SEQ ID NO: 505588 - RNA, 19 nt, Artificial Sequence
  Description of Artificial Sequence: Synthetic oligonucleotide
accccaacuguccccuagu

SEQ ID NO: 505589 - RNA, 19 nt, Artificial Sequence
  Description of Artificial Sequence: Synthetic oligonucleotide
ugccccuaucccuggggac

SEQ ID NO: 505590 - RNA, 19 nt, Artificial Sequence
  Description of Artificial Sequence: Synthetic oligonucleotide
agcuguaaucgaagcugag

SEQ ID NO: 505591 - RNA, 19 nt, Artificial Sequence
  Description of Artificial Sequence: Synthetic oligonucleotide
ucccucauuggcaccccua

SEQ ID NO: 505592 - RNA, 19 nt, Artificial Sequence
  Description of Artificial Sequence: Synthetic oligonucleotide
augagccuguuccgccgag

SEQ ID NO: 505593 - RNA, 19 nt, Artificial Sequence
  Description of Artificial Sequence: Synthetic oligonucleotide
agaugccgaccucuggauu

SEQ ID NO: 505594 - RNA, 19 nt, Artificial Sequence
  Description of Artificial Sequence: Synthetic oligonucleotide
agccccugcuucccuaaga

SEQ ID NO: 505595 - RNA, 19 nt, Artificial Sequence
  Description of Artificial Sequence: Synthetic oligonucleotide
caacaaagugcccgaagcu

SEQ ID NO: 505596 - RNA, 19 nt, Artificial Sequence
  Description of Artificial Sequence: Synthetic oligonucleotide
acccuggacuucaggacag

SEQ ID NO: 505597 - RNA, 19 nt, Artificial Sequence
  Description of Artificial Sequence: Synthetic oligonucleotide
ccucgagcuguaaucgaag

SEQ ID NO: 505598 - RNA, 19 nt, Artificial Sequence
  Description of Artificial Sequence: Synthetic oligonucleotide
cugcuucccuaagaggcac

SEQ ID NO: 505599 - RNA, 19 nt, Artificial Sequence
  Description of Artificial Sequence: Synthetic oligonucleotide
ccaagagcacagagcacag

SEQ ID NO: 505600 - RNA, 19 nt, Artificial Sequence
  Description of Artificial Sequence: Synthetic oligonucleotide
guagguuacgcagugccau

SEQ ID NO: 505601 - RNA, 19 nt, Artificial Sequence
  Description of Artificial Sequence: Synthetic oligonucleotide
ugcgagaccucgagcugua

SEQ ID NO: 505602 - RNA, 19 nt, Artificial Sequence
  Description of Artificial Sequence: Synthetic oligonucleotide
uccuuggaaugaugaugau

SEQ ID NO: 505603 - RNA, 19 nt, Artificial Sequence
  Description of Artificial Sequence: Synthetic oligonucleotide
caggaugcugccuuguaau

SEQ ID NO: 505604 - RNA, 19 nt, Artificial Sequence
  Description of Artificial Sequence: Synthetic oligonucleotide
cugagccaugucucucaug

SEQ ID NO: 505605 - RNA, 19 nt, Artificial Sequence
  Description of Artificial Sequence: Synthetic oligonucleotide
uaugccgcucaaagcucuu

SEQ ID NO: 505606 - RNA, 19 nt, Artificial Sequence
  Description of Artificial Sequence: Synthetic oligonucleotide
uaucuugggugaggacaga

SEQ ID NO: 505607 - RNA, 19 nt, Artificial Sequence
  Description of Artificial Sequence: Synthetic oligonucleotide
cuuccuccgccauucgaaa

SEQ ID NO: 505608 - RNA, 19 nt, Artificial Sequence
  Description of Artificial Sequence: Synthetic oligonucleotide
accucgagcuguaaucgaa

SEQ ID NO: 505609 - RNA, 19 nt, Artificial Sequence
  Description of Artificial Sequence: Synthetic oligonucleotide
cacugggguuguccaaaug

SEQ ID NO: 505610 - RNA, 19 nt, Artificial Sequence
  Description of Artificial Sequence: Synthetic oligonucleotide
uggcaccccuaucccagaa

SEQ ID NO: 505611 - RNA, 19 nt, Artificial Sequence
  Description of Artificial Sequence: Synthetic oligonucleotide
cccgaagcuacggauguag

SEQ ID NO: 505612 - RNA, 19 nt, Artificial Sequence
  Description of Artificial Sequence: Synthetic oligonucleotide
ggucuuuauuaagcuugag

SEQ ID NO: 505613 - RNA, 19 nt, Artificial Sequence
  Description of Artificial Sequence: Synthetic oligonucleotide
ccagcugcgagaccucgag

SEQ ID NO: 505614 - RNA, 19 nt, Artificial Sequence
  Description of Artificial Sequence: Synthetic oligonucleotide
gcccauaccccaugugggc

SEQ ID NO: 505615 - RNA, 19 nt, Artificial Sequence
  Description of Artificial Sequence: Synthetic oligonucleotide
ccgccauucgaaacugggc

SEQ ID NO: 505616 - RNA, 19 nt, Artificial Sequence
  Description of Artificial Sequence: Synthetic oligonucleotide
aucccgggcuccuggcugu

SEQ ID NO: 505617 - RNA, 19 nt, Artificial Sequence
  Description of Artificial Sequence: Synthetic oligonucleotide
cagaaagaaaguggggccu

SEQ ID NO: 505618 - RNA, 19 nt, Artificial Sequence
  Description of Artificial Sequence: Synthetic oligonucleotide
agccccacccacccuguau

SEQ ID NO: 505619 - RNA, 19 nt, Artificial Sequence
  Description of Artificial Sequence: Synthetic oligonucleotide
cccuaucccagaacagcag

SEQ ID NO: 505620 - RNA, 19 nt, Artificial Sequence
  Description of Artificial Sequence: Synthetic oligonucleotide
ccagguaccggaucccauc

SEQ ID NO: 505621 - RNA, 19 nt, Artificial Sequence
  Description of Artificial Sequence: Synthetic oligonucleotide
ggguuagguggaaggcugg

SEQ ID NO: 505622 - RNA, 19 nt, Artificial Sequence
  Description of Artificial Sequence: Synthetic oligonucleotide
agcccgugcuuagcccacc

SEQ ID NO: 505623 - RNA, 19 nt, Artificial Sequence
  Description of Artificial Sequence: Synthetic oligonucleotide
gacuacagguggugguccu

SEQ ID NO: 505624 - RNA, 19 nt, Artificial Sequence
  Description of Artificial Sequence: Synthetic oligonucleotide
agggguaaccauggccaga

SEQ ID NO: 505625 - RNA, 19 nt, Artificial Sequence
  Description of Artificial Sequence: Synthetic oligonucleotide
gaggccgaucugcaucgaa

SEQ ID NO: 505626 - RNA, 19 nt, Artificial Sequence
  Description of Artificial Sequence: Synthetic oligonucleotide
cucaaccaaucuccuucca

SEQ ID NO: 505627 - RNA, 19 nt, Artificial Sequence
  Description of Artificial Sequence: Synthetic oligonucleotide
ccaaaugaagaccugugau

SEQ ID NO: 505628 - RNA, 19 nt, Artificial Sequence
  Description of Artificial Sequence: Synthetic oligonucleotide
aucuggagucagccccacu

SEQ ID NO: 505629 - RNA, 19 nt, Artificial Sequence
  Description of Artificial Sequence: Synthetic oligonucleotide
ccgaagcuacggauguagc

SEQ ID NO: 505630 - RNA, 19 nt, Artificial Sequence
  Description of Artificial Sequence: Synthetic oligonucleotide
gcugcgagaccucgagcug

SEQ ID NO: 505631 - RNA, 19 nt, Artificial Sequence
  Description of Artificial Sequence: Synthetic oligonucleotide
cuccuugggccaggguuag

SEQ ID NO: 505632 - RNA, 19 nt, Artificial Sequence
  Description of Artificial Sequence: Synthetic oligonucleotide
caugagccuguuccgccga

SEQ ID NO: 505633 - RNA, 19 nt, Artificial Sequence
  Description of Artificial Sequence: Synthetic oligonucleotide
cugccuuguaaucgagcaa

SEQ ID NO: 505634 - RNA, 19 nt, Artificial Sequence
  Description of Artificial Sequence: Synthetic oligonucleotide
augcugccuuguaaucgag

SEQ ID NO: 505635 - RNA, 19 nt, Artificial Sequence
  Description of Artificial Sequence: Synthetic oligonucleotide
gguagguuacgcagugcca

SEQ ID NO: 505636 - RNA, 19 nt, Artificial Sequence
  Description of Artificial Sequence: Synthetic oligonucleotide
gguuacgcagugccauguc

SEQ ID NO: 505637 - RNA, 19 nt, Artificial Sequence
  Description of Artificial Sequence: Synthetic oligonucleotide
ccccgagcuauucaugauc

SEQ ID NO: 505638 - RNA, 19 nt, Artificial Sequence
  Description of Artificial Sequence: Synthetic oligonucleotide
caucgaaguuaaagcgucu

SEQ ID NO: 505639 - RNA, 19 nt, Artificial Sequence
  Description of Artificial Sequence: Synthetic oligonucleotide
ccauucgaaacugggccug

SEQ ID NO: 505640 - RNA, 19 nt, Artificial Sequence
  Description of Artificial Sequence: Synthetic oligonucleotide
gugcuagagucugcaugug

SEQ ID NO: 505641 - RNA, 19 nt, Artificial Sequence
  Description of Artificial Sequence: Synthetic oligonucleotide
gggucuuuauuaagcuuga

SEQ ID NO: 505642 - RNA, 19 nt, Artificial Sequence
  Description of Artificial Sequence: Synthetic oligonucleotide
gaacugcuggggaagggau

SEQ ID NO: 505643 - RNA, 19 nt, Artificial Sequence
  Description of Artificial Sequence: Synthetic oligonucleotide
agagggcccugcacaagca

SEQ ID NO: 505644 - RNA, 19 nt, Artificial Sequence
  Description of Artificial Sequence: Synthetic oligonucleotide
agcuacggauguagcagau

SEQ ID NO: 505645 - RNA, 19 nt, Artificial Sequence
  Description of Artificial Sequence: Synthetic oligonucleotide
cgaagcuacggauguagca

SEQ ID NO: 505646 - RNA, 19 nt, Artificial Sequence
  Description of Artificial Sequence: Synthetic oligonucleotide
cccauaccccaugugggcc

SEQ ID NO: 505647 - RNA, 19 nt, Artificial Sequence
  Description of Artificial Sequence: Synthetic oligonucleotide
acagagggcuaggccagaa

SEQ ID NO: 505648 - RNA, 19 nt, Artificial Sequence
  Description of Artificial Sequence: Synthetic oligonucleotide
cgaucugcaucgaaguuaa

SEQ ID NO: 505649 - RNA, 19 nt, Artificial Sequence
  Description of Artificial Sequence: Synthetic oligonucleotide
ccgaccucuggauugaacu

SEQ ID NO: 505650 - RNA, 19 nt, Artificial Sequence
  Description of Artificial Sequence: Synthetic oligonucleotide
ccauccucccagcuggcuc

SEQ ID NO: 505651 - RNA, 19 nt, Artificial Sequence
  Description of Artificial Sequence: Synthetic oligonucleotide
ggcaccccuaucccagaac

SEQ ID NO: 505652 - RNA, 19 nt, Artificial Sequence
  Description of Artificial Sequence: Synthetic oligonucleotide
cauucgaaacugggccuga

SEQ ID NO: 505653 - RNA, 19 nt, Artificial Sequence
  Description of Artificial Sequence: Synthetic oligonucleotide
ccuguaucuugggugagga

SEQ ID NO: 505654 - RNA, 19 nt, Artificial Sequence
  Description of Artificial Sequence: Synthetic oligonucleotide
ggccgaucugcaucgaagu

SEQ ID NO: 505655 - RNA, 19 nt, Artificial Sequence
  Description of Artificial Sequence: Synthetic oligonucleotide
gcgaauguaucuguuuccu

SEQ ID NO: 505656 - RNA, 19 nt, Artificial Sequence
  Description of Artificial Sequence: Synthetic oligonucleotide
gcuuagcccaccagggcuc

SEQ ID NO: 505657 - RNA, 19 nt, Artificial Sequence
  Description of Artificial Sequence: Synthetic oligonucleotide
agcgagggaggaggguccu

SEQ ID NO: 505658 - RNA, 19 nt, Artificial Sequence
  Description of Artificial Sequence: Synthetic oligonucleotide
uccagggaucuugccucuc

SEQ ID NO: 505659 - RNA, 19 nt, Artificial Sequence
  Description of Artificial Sequence: Synthetic oligonucleotide
cgugcuagagucugcaugu

SEQ ID NO: 505660 - RNA, 19 nt, Artificial Sequence
  Description of Artificial Sequence: Synthetic oligonucleotide
cccgagcuauucaugaucu

SEQ ID NO: 505661 - RNA, 19 nt, Artificial Sequence
  Description of Artificial Sequence: Synthetic oligonucleotide
guggaacagggguaaccau

SEQ ID NO: 505662 - RNA, 19 nt, Artificial Sequence
  Description of Artificial Sequence: Synthetic oligonucleotide
ccccuaguuuucccagacc

SEQ ID NO: 505663 - RNA, 19 nt, Artificial Sequence
  Description of Artificial Sequence: Synthetic oligonucleotide
gggcccagacagugcacug

SEQ ID NO: 505664 - RNA, 19 nt, Artificial Sequence
  Description of Artificial Sequence: Synthetic oligonucleotide
cagaugcgcaccaccgacu

SEQ ID NO: 505665 - RNA, 19 nt, Artificial Sequence
  Description of Artificial Sequence: Synthetic oligonucleotide
caaagccagcccgugcuua

SEQ ID NO: 505666 - RNA, 19 nt, Artificial Sequence
  Description of Artificial Sequence: Synthetic oligonucleotide
gcuaggccagaauccugga

SEQ ID NO: 505667 - RNA, 19 nt, Artificial Sequence
  Description of Artificial Sequence: Synthetic oligonucleotide
ccaggguuagcugucugca

SEQ ID NO: 505668 - RNA, 19 nt, Artificial Sequence
  Description of Artificial Sequence: Synthetic oligonucleotide
gcggccacuaguagccagc

SEQ ID NO: 505669 - RNA, 19 nt, Artificial Sequence
  Description of Artificial Sequence: Synthetic oligonucleotide
acagugcacugggguuguc

SEQ ID NO: 505670 - RNA, 19 nt, Artificial Sequence
  Description of Artificial Sequence: Synthetic oligonucleotide
cgagcaacaaagugcccga

SEQ ID NO: 505671 - RNA, 19 nt, Artificial Sequence
  Description of Artificial Sequence: Synthetic oligonucleotide
uccuugggccaggguuagc

SEQ ID NO: 505672 - RNA, 19 nt, Artificial Sequence
  Description of Artificial Sequence: Synthetic oligonucleotide
aggagacccuggacuucag

SEQ ID NO: 505673 - RNA, 19 nt, Artificial Sequence
  Description of Artificial Sequence: Synthetic oligonucleotide
gcuaggccaguugggauaa

SEQ ID NO: 505674 - RNA, 19 nt, Artificial Sequence
  Description of Artificial Sequence: Synthetic oligonucleotide
ccuuggaaugaugaugaua

SEQ ID NO: 505675 - RNA, 19 nt, Artificial Sequence
  Description of Artificial Sequence: Synthetic oligonucleotide
ggguaaccauggccagagc

SEQ ID NO: 505676 - RNA, 19 nt, Artificial Sequence
  Description of Artificial Sequence: Synthetic oligonucleotide
ccgaucugcaucgaaguua

SEQ ID NO: 505677 - RNA, 19 nt, Artificial Sequence
  Description of Artificial Sequence: Synthetic oligonucleotide
gcagcgaauguaucuguuu

SEQ ID NO: 505678 - RNA, 19 nt, Artificial Sequence
  Description of Artificial Sequence: Synthetic oligonucleotide
ccucauuggcaccccuauc

SEQ ID NO: 505679 - RNA, 19 nt, Artificial Sequence
  Description of Artificial Sequence: Synthetic oligonucleotide
ccuccgccauucgaaacug

SEQ ID NO: 505680 - RNA, 19 nt, Artificial Sequence
  Description of Artificial Sequence: Synthetic oligonucleotide
gcaccaccgacuccucuaa

SEQ ID NO: 505681 - RNA, 19 nt, Artificial Sequence
  Description of Artificial Sequence: Synthetic oligonucleotide
ccuguuugcgugcuagagu

SEQ ID NO: 505682 - RNA, 19 nt, Artificial Sequence
  Description of Artificial Sequence: Synthetic oligonucleotide
ccuaguuuucccagacccu

SEQ ID NO: 505683 - RNA, 19 nt, Artificial Sequence
  Description of Artificial Sequence: Synthetic oligonucleotide
gacacccaugccugccuuu

SEQ ID NO: 505684 - RNA, 19 nt, Artificial Sequence
  Description of Artificial Sequence: Synthetic oligonucleotide
cugcgagaccucgagcugu

SEQ ID NO: 505685 - RNA, 19 nt, Artificial Sequence
  Description of Artificial Sequence: Synthetic oligonucleotide
agaggccgaucugcaucga

SEQ ID NO: 505686 - RNA, 19 nt, Artificial Sequence
  Description of Artificial Sequence: Synthetic oligonucleotide
ccuuguaaucgagcaacaa

SEQ ID NO: 505687 - RNA, 19 nt, Artificial Sequence
  Description of Artificial Sequence: Synthetic oligonucleotide
gcccucccaagguggugag

SEQ ID NO: 505688 - RNA, 19 nt, Artificial Sequence
  Description of Artificial Sequence: Synthetic oligonucleotide
cagcuaggccaguugggau

SEQ ID NO: 505689 - RNA, 19 nt, Artificial Sequence
  Description of Artificial Sequence: Synthetic oligonucleotide
ccgagcuauucaugaucuc

SEQ ID NO: 505690 - RNA, 19 nt, Artificial Sequence
  Description of Artificial Sequence: Synthetic oligonucleotide
ggccagucucaaccaaucu

SEQ ID NO: 505691 - RNA, 19 nt, Artificial Sequence
  Description of Artificial Sequence: Synthetic oligonucleotide
ugccgaccucuggauugaa

SEQ ID NO: 505692 - RNA, 19 nt, Artificial Sequence
  Description of Artificial Sequence: Synthetic oligonucleotide
ccccuacagcucuuugcuc

SEQ ID NO: 505693 - RNA, 19 nt, Artificial Sequence
  Description of Artificial Sequence: Synthetic oligonucleotide
ugcagcuguccaggaucuu

SEQ ID NO: 505694 - RNA, 19 nt, Artificial Sequence
  Description of Artificial Sequence: Synthetic oligonucleotide
cccgugcuuagcccaccag

SEQ ID NO: 505695 - RNA, 19 nt, Artificial Sequence
  Description of Artificial Sequence: Synthetic oligonucleotide
gaucugcaucgaaguuaaa

SEQ ID NO: 505696 - RNA, 19 nt, Artificial Sequence
  Description of Artificial Sequence: Synthetic oligonucleotide
ggcggaugagagggaggug

SEQ ID NO: 505697 - RNA, 19 nt, Artificial Sequence
  Description of Artificial Sequence: Synthetic oligonucleotide
cuuguagggcagccugcau

SEQ ID NO: 505698 - RNA, 19 nt, Artificial Sequence
  Description of Artificial Sequence: Synthetic oligonucleotide
ccccuaucccuggggacag

SEQ ID NO: 505699 - RNA, 19 nt, Artificial Sequence
  Description of Artificial Sequence: Synthetic oligonucleotide
gccgaccucuggauugaac

SEQ ID NO: 505700 - RNA, 19 nt, Artificial Sequence
  Description of Artificial Sequence: Synthetic oligonucleotide
cugcaugggcccagacagu

SEQ ID NO: 505701 - RNA, 19 nt, Artificial Sequence
  Description of Artificial Sequence: Synthetic oligonucleotide
cuuagcccaccagggcucu

SEQ ID NO: 505702 - RNA, 19 nt, Artificial Sequence
  Description of Artificial Sequence: Synthetic oligonucleotide
ccgacuccucuaaagcacu

SEQ ID NO: 505703 - RNA, 19 nt, Artificial Sequence
  Description of Artificial Sequence: Synthetic oligonucleotide
caccaccgacuccucuaaa

SEQ ID NO: 505704 - RNA, 19 nt, Artificial Sequence
  Description of Artificial Sequence: Synthetic oligonucleotide
ccuggucgccaggaagcac

SEQ ID NO: 505705 - RNA, 19 nt, Artificial Sequence
  Description of Artificial Sequence: Synthetic oligonucleotide
ccaggaucuuauagagagu

SEQ ID NO: 505706 - RNA, 19 nt, Artificial Sequence
  Description of Artificial Sequence: Synthetic oligonucleotide
gcccgugcuuagcccacca

SEQ ID NO: 505707 - RNA, 19 nt, Artificial Sequence
  Description of Artificial Sequence: Synthetic oligonucleotide
cgucuaugagcaguccgga

SEQ ID NO: 505708 - RNA, 19 nt, Artificial Sequence
  Description of Artificial Sequence: Synthetic oligonucleotide
ccauaccccaugugggccu

SEQ ID NO: 505709 - RNA, 19 nt, Artificial Sequence
  Description of Artificial Sequence: Synthetic oligonucleotide
cagggccugcgggccaguc

SEQ ID NO: 505710 - RNA, 19 nt, Artificial Sequence
  Description of Artificial Sequence: Synthetic oligonucleotide
gcgggccagucucaaccaa

SEQ ID NO: 505711 - RNA, 19 nt, Artificial Sequence
  Description of Artificial Sequence: Synthetic oligonucleotide
gccgaucugcaucgaaguu

SEQ ID NO: 505712 - RNA, 19 nt, Artificial Sequence
  Description of Artificial Sequence: Synthetic oligonucleotide
cucccucauuggcaccccu

SEQ ID NO: 505713 - RNA, 19 nt, Artificial Sequence
  Description of Artificial Sequence: Synthetic oligonucleotide
ggcagcgaauguaucuguu

SEQ ID NO: 505714 - RNA, 19 nt, Artificial Sequence
  Description of Artificial Sequence: Synthetic oligonucleotide
cagccccacccacccugua

SEQ ID NO: 505715 - RNA, 19 nt, Artificial Sequence
  Description of Artificial Sequence: Synthetic oligonucleotide
ccuguuccgccgagccucu

SEQ ID NO: 505716 - RNA, 19 nt, Artificial Sequence
  Description of Artificial Sequence: Synthetic oligonucleotide
gccugcgggccagucucaa

SEQ ID NO: 505717 - RNA, 19 nt, Artificial Sequence
  Description of Artificial Sequence: Synthetic oligonucleotide
gcgagaccucgagcuguaa

SEQ ID NO: 505718 - RNA, 19 nt, Artificial Sequence
  Description of Artificial Sequence: Synthetic oligonucleotide
ccaggccaucaaucacugu

SEQ ID NO: 505719 - RNA, 19 nt, Artificial Sequence
  Description of Artificial Sequence: Synthetic oligonucleotide
gcccgaagcuacggaugua

SEQ ID NO: 505720 - RNA, 19 nt, Artificial Sequence
  Description of Artificial Sequence: Synthetic oligonucleotide
cgggccagucucaaccaau

SEQ ID NO: 505721 - RNA, 19 nt, Artificial Sequence
  Description of Artificial Sequence: Synthetic oligonucleotide
ccccaacuguccccuaguu

SEQ ID NO: 505722 - RNA, 19 nt, Artificial Sequence
  Description of Artificial Sequence: Synthetic oligonucleotide
cccucccaagguggugaga

SEQ ID NO: 505723 - RNA, 19 nt, Artificial Sequence
  Description of Artificial Sequence: Synthetic oligonucleotide
ccggagagggagguagguu

SEQ ID NO: 505724 - RNA, 19 nt, Artificial Sequence
  Description of Artificial Sequence: Synthetic oligonucleotide
cccuaucccuggggacaga

SEQ ID NO: 505725 - RNA, 19 nt, Artificial Sequence
  Description of Artificial Sequence: Synthetic oligonucleotide
ccccagcuaugcucugcuu

SEQ ID NO: 505726 - RNA, 19 nt, Artificial Sequence
  Description of Artificial Sequence: Synthetic oligonucleotide
cuguuccgccgagccucuu

SEQ ID NO: 505727 - RNA, 19 nt, Artificial Sequence
  Description of Artificial Sequence: Synthetic oligonucleotide
gcgagggaggaggguccuu

SEQ ID NO: 505728 - RNA, 19 nt, Artificial Sequence
  Description of Artificial Sequence: Synthetic oligonucleotide
gauacuauuauacagaaca

SEQ ID NO: 505729 - RNA, 19 nt, Artificial Sequence
  Description of Artificial Sequence: Synthetic oligonucleotide
uuuguacaaaguaacaggg

SEQ ID NO: 505730 - RNA, 19 nt, Artificial Sequence
  Description of Artificial Sequence: Synthetic oligonucleotide
aaguauaccuugcaggccc

SEQ ID NO: 505731 - RNA, 19 nt, Artificial Sequence
  Description of Artificial Sequence: Synthetic oligonucleotide
uuuauguuaaauagaaggc

SEQ ID NO: 505732 - RNA, 19 nt, Artificial Sequence
  Description of Artificial Sequence: Synthetic oligonucleotide
aaacaaauuucauacagcu

SEQ ID NO: 505733 - RNA, 19 nt, Artificial Sequence
  Description of Artificial Sequence: Synthetic oligonucleotide
aauucaagaaacaaauuuc

SEQ ID NO: 505734 - RNA, 19 nt, Artificial Sequence
  Description of Artificial Sequence: Synthetic oligonucleotide
uguaacaucccuacaacgg

SEQ ID NO: 505735 - RNA, 19 nt, Artificial Sequence
  Description of Artificial Sequence: Synthetic oligonucleotide
ucuacaagcaaacacaaaa

SEQ ID NO: 505736 - RNA, 19 nt, Artificial Sequence
  Description of Artificial Sequence: Synthetic oligonucleotide
uacucaaugaccauggugu

SEQ ID NO: 505737 - RNA, 19 nt, Artificial Sequence
  Description of Artificial Sequence: Synthetic oligonucleotide
acuuaguuaaacucagggc

SEQ ID NO: 505738 - RNA, 19 nt, Artificial Sequence
  Description of Artificial Sequence: Synthetic oligonucleotide
uauguuuacauaauucugu

SEQ ID NO: 505739 - RNA, 19 nt, Artificial Sequence
  Description of Artificial Sequence: Synthetic oligonucleotide
agcuauaaaaguuguaguc

SEQ ID NO: 505740 - RNA, 19 nt, Artificial Sequence
  Description of Artificial Sequence: Synthetic oligonucleotide
aacaacgaaaacccgguag

SEQ ID NO: 505741 - RNA, 19 nt, Artificial Sequence
  Description of Artificial Sequence: Synthetic oligonucleotide
aaguuauuaucccuuagcu

SEQ ID NO: 505742 - RNA, 19 nt, Artificial Sequence
  Description of Artificial Sequence: Synthetic oligonucleotide
aacccgguaggacaaauac

SEQ ID NO: 505743 - RNA, 19 nt, Artificial Sequence
  Description of Artificial Sequence: Synthetic oligonucleotide
aacauuaguuuaaaucacc

SEQ ID NO: 505744 - RNA, 19 nt, Artificial Sequence
  Description of Artificial Sequence: Synthetic oligonucleotide
ugccauauacauuacaagc

SEQ ID NO: 505745 - RNA, 19 nt, Artificial Sequence
  Description of Artificial Sequence: Synthetic oligonucleotide
uauuguaacaucccuacaa

SEQ ID NO: 505746 - RNA, 19 nt, Artificial Sequence
  Description of Artificial Sequence: Synthetic oligonucleotide
auuguaacaucccuacaac

SEQ ID NO: 505747 - RNA, 19 nt, Artificial Sequence
  Description of Artificial Sequence: Synthetic oligonucleotide
augcggaacauguacacgc

SEQ ID NO: 505748 - RNA, 19 nt, Artificial Sequence
  Description of Artificial Sequence: Synthetic oligonucleotide
cauacagcuauuuaucaag

SEQ ID NO: 505749 - RNA, 19 nt, Artificial Sequence
  Description of Artificial Sequence: Synthetic oligonucleotide
uguauuuagugcaaguuau

SEQ ID NO: 505750 - RNA, 19 nt, Artificial Sequence
  Description of Artificial Sequence: Synthetic oligonucleotide
uuagauuuccauucggucu

SEQ ID NO: 505751 - RNA, 19 nt, Artificial Sequence
  Description of Artificial Sequence: Synthetic oligonucleotide
uuagugcaaguuauuaucc

SEQ ID NO: 505752 - RNA, 19 nt, Artificial Sequence
  Description of Artificial Sequence: Synthetic oligonucleotide
ucaaaggucacuacuucag

SEQ ID NO: 505753 - RNA, 19 nt, Artificial Sequence
  Description of Artificial Sequence: Synthetic oligonucleotide
ugucuuguaaaauccaaug

SEQ ID NO: 505754 - RNA, 19 nt, Artificial Sequence
  Description of Artificial Sequence: Synthetic oligonucleotide
acagcuauaaaaguuguag

SEQ ID NO: 505755 - RNA, 19 nt, Artificial Sequence
  Description of Artificial Sequence: Synthetic oligonucleotide
aguaccagaauuuuaagua

SEQ ID NO: 505756 - RNA, 19 nt, Artificial Sequence
  Description of Artificial Sequence: Synthetic oligonucleotide
acaacgaaaacccgguagg

SEQ ID NO: 505757 - RNA, 19 nt, Artificial Sequence
  Description of Artificial Sequence: Synthetic oligonucleotide
uauacuuagccugugaagu

SEQ ID NO: 505758 - RNA, 19 nt, Artificial Sequence
  Description of Artificial Sequence: Synthetic oligonucleotide
aguuauuaucccuuagcuc

SEQ ID NO: 505759 - RNA, 19 nt, Artificial Sequence
  Description of Artificial Sequence: Synthetic oligonucleotide
ucaauugucucuagcagca

SEQ ID NO: 505760 - RNA, 19 nt, Artificial Sequence
  Description of Artificial Sequence: Synthetic oligonucleotide
auuauauuguaacaucccu

SEQ ID NO: 505761 - RNA, 19 nt, Artificial Sequence
  Description of Artificial Sequence: Synthetic oligonucleotide
cacuuaguuaaacucaggg

SEQ ID NO: 505762 - RNA, 19 nt, Artificial Sequence
  Description of Artificial Sequence: Synthetic oligonucleotide
uagggaugcaacaauauaa

SEQ ID NO: 505763 - RNA, 19 nt, Artificial Sequence
  Description of Artificial Sequence: Synthetic oligonucleotide
aauaaucguuccgauguac

SEQ ID NO: 505764 - RNA, 19 nt, Artificial Sequence
  Description of Artificial Sequence: Synthetic oligonucleotide
guuauuaucccuuagcucu

SEQ ID NO: 505765 - RNA, 19 nt, Artificial Sequence
  Description of Artificial Sequence: Synthetic oligonucleotide
uuuauacuuagccugugaa

SEQ ID NO: 505766 - RNA, 19 nt, Artificial Sequence
  Description of Artificial Sequence: Synthetic oligonucleotide
uuauacuuagccugugaag

SEQ ID NO: 505767 - RNA, 19 nt, Artificial Sequence
  Description of Artificial Sequence: Synthetic oligonucleotide
guuaaauagaaggcuaagg

SEQ ID NO: 505768 - RNA, 19 nt, Artificial Sequence
  Description of Artificial Sequence: Synthetic oligonucleotide
uuguaacaucccuacaacg

SEQ ID NO: 505769 - RNA, 19 nt, Artificial Sequence
  Description of Artificial Sequence: Synthetic oligonucleotide
ugcaacuucauuucgaaua

SEQ ID NO: 505770 - RNA, 19 nt, Artificial Sequence
  Description of Artificial Sequence: Synthetic oligonucleotide
uaggaugucagaauauugu

SEQ ID NO: 505771 - RNA, 19 nt, Artificial Sequence
  Description of Artificial Sequence: Synthetic oligonucleotide
gacaaauacugguaggaug

SEQ ID NO: 505772 - RNA, 19 nt, Artificial Sequence
  Description of Artificial Sequence: Synthetic oligonucleotide
agauacacauuagauuucc

SEQ ID NO: 505773 - RNA, 19 nt, Artificial Sequence
  Description of Artificial Sequence: Synthetic oligonucleotide
uuuaagccguuauucacag

SEQ ID NO: 505774 - RNA, 19 nt, Artificial Sequence
  Description of Artificial Sequence: Synthetic oligonucleotide
uuugguuauuacauaauua

SEQ ID NO: 505775 - RNA, 19 nt, Artificial Sequence
  Description of Artificial Sequence: Synthetic oligonucleotide
uacauucauaggaaggccc

SEQ ID NO: 505776 - RNA, 19 nt, Artificial Sequence
  Description of Artificial Sequence: Synthetic oligonucleotide
caaaugcugauuaaguuuc

SEQ ID NO: 505777 - RNA, 19 nt, Artificial Sequence
  Description of Artificial Sequence: Synthetic oligonucleotide
aaaguaacaggguuuguua

SEQ ID NO: 505778 - RNA, 19 nt, Artificial Sequence
  Description of Artificial Sequence: Synthetic oligonucleotide
uaagccguuauucacaguu

SEQ ID NO: 505779 - RNA, 19 nt, Artificial Sequence
  Description of Artificial Sequence: Synthetic oligonucleotide
uccgauguacucaaugacc

SEQ ID NO: 505780 - RNA, 19 nt, Artificial Sequence
  Description of Artificial Sequence: Synthetic oligonucleotide
guaauguaaacagucauac

SEQ ID NO: 505781 - RNA, 19 nt, Artificial Sequence
  Description of Artificial Sequence: Synthetic oligonucleotide
auaauggcauauuuaauaa

SEQ ID NO: 505782 - RNA, 19 nt, Artificial Sequence
  Description of Artificial Sequence: Synthetic oligonucleotide
caaguuauuaucccuuagc

SEQ ID NO: 505783 - RNA, 19 nt, Artificial Sequence
  Description of Artificial Sequence: Synthetic oligonucleotide
aaguucuaaucaaaacuac

SEQ ID NO: 505784 - RNA, 19 nt, Artificial Sequence
  Description of Artificial Sequence: Synthetic oligonucleotide
uaucccuuagcucuauccc

SEQ ID NO: 505785 - RNA, 19 nt, Artificial Sequence
  Description of Artificial Sequence: Synthetic oligonucleotide
uuaucccuuagcucuaucc

SEQ ID NO: 505786 - RNA, 19 nt, Artificial Sequence
  Description of Artificial Sequence: Synthetic oligonucleotide
aaaacuacuuuugcugaag

SEQ ID NO: 505787 - RNA, 19 nt, Artificial Sequence
  Description of Artificial Sequence: Synthetic oligonucleotide
uguaauguaaacagucaua

SEQ ID NO: 505788 - RNA, 19 nt, Artificial Sequence
  Description of Artificial Sequence: Synthetic oligonucleotide
aagaaguagggaugcaaca

SEQ ID NO: 505789 - RNA, 19 nt, Artificial Sequence
  Description of Artificial Sequence: Synthetic oligonucleotide
uuauauuguaacaucccua

SEQ ID NO: 505790 - RNA, 19 nt, Artificial Sequence
  Description of Artificial Sequence: Synthetic oligonucleotide
aaaacaacgaaaacccggu

SEQ ID NO: 505791 - RNA, 19 nt, Artificial Sequence
  Description of Artificial Sequence: Synthetic oligonucleotide
uguuuaagccguuauucac

SEQ ID NO: 505792 - RNA, 19 nt, Artificial Sequence
  Description of Artificial Sequence: Synthetic oligonucleotide
acaacgguuauaagcaccc

SEQ ID NO: 505793 - RNA, 19 nt, Artificial Sequence
  Description of Artificial Sequence: Synthetic oligonucleotide
guaggacaaauacugguag

SEQ ID NO: 505794 - RNA, 19 nt, Artificial Sequence
  Description of Artificial Sequence: Synthetic oligonucleotide
aacccuauugccggagucc

SEQ ID NO: 505795 - RNA, 19 nt, Artificial Sequence
  Description of Artificial Sequence: Synthetic oligonucleotide
uacaacgguuauaagcacc

SEQ ID NO: 505796 - RNA, 19 nt, Artificial Sequence
  Description of Artificial Sequence: Synthetic oligonucleotide
uuccauucggucuucauuc

SEQ ID NO: 505797 - RNA, 19 nt, Artificial Sequence
  Description of Artificial Sequence: Synthetic oligonucleotide
aacgaaaacccgguaggac

SEQ ID NO: 505798 - RNA, 19 nt, Artificial Sequence
  Description of Artificial Sequence: Synthetic oligonucleotide
acauuagauuuccauucgg

SEQ ID NO: 505799 - RNA, 19 nt, Artificial Sequence
  Description of Artificial Sequence: Synthetic oligonucleotide
agcucuaucccuaaggaag

SEQ ID NO: 505800 - RNA, 19 nt, Artificial Sequence
  Description of Artificial Sequence: Synthetic oligonucleotide
uuuuauacuuagccuguga

SEQ ID NO: 505801 - RNA, 19 nt, Artificial Sequence
  Description of Artificial Sequence: Synthetic oligonucleotide
aaacccuauugccggaguc

SEQ ID NO: 505802 - RNA, 19 nt, Artificial Sequence
  Description of Artificial Sequence: Synthetic oligonucleotide
gguuuguuaguucugcagg

SEQ ID NO: 505803 - RNA, 19 nt, Artificial Sequence
  Description of Artificial Sequence: Synthetic oligonucleotide
guuauaagcacccgagcug

SEQ ID NO: 505804 - RNA, 19 nt, Artificial Sequence
  Description of Artificial Sequence: Synthetic oligonucleotide
uuucgaauaaucguuccga

SEQ ID NO: 505805 - RNA, 19 nt, Artificial Sequence
  Description of Artificial Sequence: Synthetic oligonucleotide
aaguuguagucguagcaca

SEQ ID NO: 505806 - RNA, 19 nt, Artificial Sequence
  Description of Artificial Sequence: Synthetic oligonucleotide
aacgguuauaagcacccga

SEQ ID NO: 505807 - RNA, 19 nt, Artificial Sequence
  Description of Artificial Sequence: Synthetic oligonucleotide
auguuuacauaauucugug

SEQ ID NO: 505808 - RNA, 19 nt, Artificial Sequence
  Description of Artificial Sequence: Synthetic oligonucleotide
auuaaguuucuacaagcaa

SEQ ID NO: 505809 - RNA, 19 nt, Artificial Sequence
  Description of Artificial Sequence: Synthetic oligonucleotide
uggucauuguccaugcgga

SEQ ID NO: 505810 - RNA, 19 nt, Artificial Sequence
  Description of Artificial Sequence: Synthetic oligonucleotide
augccauauacauuacaag

SEQ ID NO: 505811 - RNA, 19 nt, Artificial Sequence
  Description of Artificial Sequence: Synthetic oligonucleotide
agucguagcacagcgcugc

SEQ ID NO: 505812 - RNA, 19 nt, Artificial Sequence
  Description of Artificial Sequence: Synthetic oligonucleotide
aguuggguuaggucccugc

SEQ ID NO: 505813 - RNA, 19 nt, Artificial Sequence
  Description of Artificial Sequence: Synthetic oligonucleotide
uuccuacucucaaagguca

SEQ ID NO: 505814 - RNA, 19 nt, Artificial Sequence
  Description of Artificial Sequence: Synthetic oligonucleotide
gaugacuuggaguggacga

SEQ ID NO: 505815 - RNA, 19 nt, Artificial Sequence
  Description of Artificial Sequence: Synthetic oligonucleotide
uaaaucaccaacagcuaua

SEQ ID NO: 505816 - RNA, 19 nt, Artificial Sequence
  Description of Artificial Sequence: Synthetic oligonucleotide
agugcaaguuauuaucccu

SEQ ID NO: 505817 - RNA, 19 nt, Artificial Sequence
  Description of Artificial Sequence: Synthetic oligonucleotide
auacacauuagauuuccau

SEQ ID NO: 505818 - RNA, 19 nt, Artificial Sequence
  Description of Artificial Sequence: Synthetic oligonucleotide
acgaaaacccgguaggaca

SEQ ID NO: 505819 - RNA, 19 nt, Artificial Sequence
  Description of Artificial Sequence: Synthetic oligonucleotide
uacagcuauuuaucaagag

SEQ ID NO: 505820 - RNA, 19 nt, Artificial Sequence
  Description of Artificial Sequence: Synthetic oligonucleotide
uuaaacucagggccugccc

SEQ ID NO: 505821 - RNA, 19 nt, Artificial Sequence
  Description of Artificial Sequence: Synthetic oligonucleotide
ucaguaccagaauuuuaag

SEQ ID NO: 505822 - RNA, 19 nt, Artificial Sequence
  Description of Artificial Sequence: Synthetic oligonucleotide
uuacauaauucuguguggu

SEQ ID NO: 505823 - RNA, 19 nt, Artificial Sequence
  Description of Artificial Sequence: Synthetic oligonucleotide
cagcuauuuaucaagagaa

SEQ ID NO: 505824 - RNA, 19 nt, Artificial Sequence
  Description of Artificial Sequence: Synthetic oligonucleotide
aaguagcuggaccauucug

SEQ ID NO: 505825 - RNA, 19 nt, Artificial Sequence
  Description of Artificial Sequence: Synthetic oligonucleotide
agucaucucaguacauucc

SEQ ID NO: 505826 - RNA, 19 nt, Artificial Sequence
  Description of Artificial Sequence: Synthetic oligonucleotide
acgaacugcuuacuguagg

SEQ ID NO: 505827 - RNA, 19 nt, Artificial Sequence
  Description of Artificial Sequence: Synthetic oligonucleotide
ucggucuucauucuccggu

SEQ ID NO: 505828 - RNA, 19 nt, Artificial Sequence
  Description of Artificial Sequence: Synthetic oligonucleotide
aaucguuccgauguacuca

SEQ ID NO: 505829 - RNA, 19 nt, Artificial Sequence
  Description of Artificial Sequence: Synthetic oligonucleotide
uucuccgguacugugauga

SEQ ID NO: 505830 - RNA, 19 nt, Artificial Sequence
  Description of Artificial Sequence: Synthetic oligonucleotide
augguuaaguauaccuugc

SEQ ID NO: 505831 - RNA, 19 nt, Artificial Sequence
  Description of Artificial Sequence: Synthetic oligonucleotide
gacucuauuauguuuacau

SEQ ID NO: 505832 - RNA, 19 nt, Artificial Sequence
  Description of Artificial Sequence: Synthetic oligonucleotide
ucgaauaaucguuccgaug

SEQ ID NO: 505833 - RNA, 19 nt, Artificial Sequence
  Description of Artificial Sequence: Synthetic oligonucleotide
cauuagauacuauuauaca

SEQ ID NO: 505834 - RNA, 19 nt, Artificial Sequence
  Description of Artificial Sequence: Synthetic oligonucleotide
uucagacaaaggccgagga

SEQ ID NO: 505835 - RNA, 19 nt, Artificial Sequence
  Description of Artificial Sequence: Synthetic oligonucleotide
aggucacuacuucagccac

SEQ ID NO: 505836 - RNA, 19 nt, Artificial Sequence
  Description of Artificial Sequence: Synthetic oligonucleotide
uagugcaaguuauuauccc

SEQ ID NO: 505837 - RNA, 19 nt, Artificial Sequence
  Description of Artificial Sequence: Synthetic oligonucleotide
acauauuuguacaaaguaa

SEQ ID NO: 505838 - RNA, 19 nt, Artificial Sequence
  Description of Artificial Sequence: Synthetic oligonucleotide
acuaauagacaguuuccaa

SEQ ID NO: 505839 - RNA, 19 nt, Artificial Sequence
  Description of Artificial Sequence: Synthetic oligonucleotide
uguguguuuaagccguuau

SEQ ID NO: 505840 - RNA, 19 nt, Artificial Sequence
  Description of Artificial Sequence: Synthetic oligonucleotide
uggugaucuucuaaaucug

SEQ ID NO: 505841 - RNA, 19 nt, Artificial Sequence
  Description of Artificial Sequence: Synthetic oligonucleotide
cuuccuacucucaaagguc

SEQ ID NO: 505842 - RNA, 19 nt, Artificial Sequence
  Description of Artificial Sequence: Synthetic oligonucleotide
ugacucauggaaucaagua

SEQ ID NO: 505843 - RNA, 19 nt, Artificial Sequence
  Description of Artificial Sequence: Synthetic oligonucleotide
ugguuaaguauaccuugca

SEQ ID NO: 505844 - RNA, 19 nt, Artificial Sequence
  Description of Artificial Sequence: Synthetic oligonucleotide
ucaugccauauacauuaca

SEQ ID NO: 505845 - RNA, 19 nt, Artificial Sequence
  Description of Artificial Sequence: Synthetic oligonucleotide
gaguguggcgucaaucacg

SEQ ID NO: 505846 - RNA, 19 nt, Artificial Sequence
  Description of Artificial Sequence: Synthetic oligonucleotide
aguuaggggcacaagaaug

SEQ ID NO: 505847 - RNA, 19 nt, Artificial Sequence
  Description of Artificial Sequence: Synthetic oligonucleotide
uuucuccuuaaugagacua

SEQ ID NO: 505848 - RNA, 19 nt, Artificial Sequence
  Description of Artificial Sequence: Synthetic oligonucleotide
cccuacaacgguuauaagc

SEQ ID NO: 505849 - RNA, 19 nt, Artificial Sequence
  Description of Artificial Sequence: Synthetic oligonucleotide
acguggucauuguccaugc

SEQ ID NO: 505850 - RNA, 19 nt, Artificial Sequence
  Description of Artificial Sequence: Synthetic oligonucleotide
uggacgaacugcuuacugu

SEQ ID NO: 505851 - RNA, 19 nt, Artificial Sequence
  Description of Artificial Sequence: Synthetic oligonucleotide
cagccacacaguuaggggc

SEQ ID NO: 505852 - RNA, 19 nt, Artificial Sequence
  Description of Artificial Sequence: Synthetic oligonucleotide
uccgguacugugaugacuu

SEQ ID NO: 505853 - RNA, 19 nt, Artificial Sequence
  Description of Artificial Sequence: Synthetic oligonucleotide
auacuuagccugugaagug

SEQ ID NO: 505854 - RNA, 19 nt, Artificial Sequence
  Description of Artificial Sequence: Synthetic oligonucleotide
aaaucuguguccacaaauu

SEQ ID NO: 505855 - RNA, 19 nt, Artificial Sequence
  Description of Artificial Sequence: Synthetic oligonucleotide
uauaaaaguuguagucgua

SEQ ID NO: 505856 - RNA, 19 nt, Artificial Sequence
  Description of Artificial Sequence: Synthetic oligonucleotide
aaaacccuauugccggagu

SEQ ID NO: 505857 - RNA, 19 nt, Artificial Sequence
  Description of Artificial Sequence: Synthetic oligonucleotide
uaaucguuccgauguacuc

SEQ ID NO: 505858 - RNA, 19 nt, Artificial Sequence
  Description of Artificial Sequence: Synthetic oligonucleotide
aguucuaaucaaaacuacu

SEQ ID NO: 505859 - RNA, 19 nt, Artificial Sequence
  Description of Artificial Sequence: Synthetic oligonucleotide
uaaguauaccuugcaggcc

SEQ ID NO: 505860 - RNA, 19 nt, Artificial Sequence
  Description of Artificial Sequence: Synthetic oligonucleotide
ccuacaacgguuauaagca

SEQ ID NO: 505861 - RNA, 19 nt, Artificial Sequence
  Description of Artificial Sequence: Synthetic oligonucleotide
ggaacauguacacgccucg

SEQ ID NO: 505862 - RNA, 19 nt, Artificial Sequence
  Description of Artificial Sequence: Synthetic oligonucleotide
aguguugagucgccucuuc

SEQ ID NO: 505863 - RNA, 19 nt, Artificial Sequence
  Description of Artificial Sequence: Synthetic oligonucleotide
acugcuuacuguaggugcg

SEQ ID NO: 505864 - RNA, 19 nt, Artificial Sequence
  Description of Artificial Sequence: Synthetic oligonucleotide
ucuaucccuaaggaaguca

SEQ ID NO: 505865 - RNA, 19 nt, Artificial Sequence
  Description of Artificial Sequence: Synthetic oligonucleotide
ugaguguggcgucaaucac

SEQ ID NO: 505866 - RNA, 19 nt, Artificial Sequence
  Description of Artificial Sequence: Synthetic oligonucleotide
agauacuauuauacagaac

SEQ ID NO: 505867 - RNA, 19 nt, Artificial Sequence
  Description of Artificial Sequence: Synthetic oligonucleotide
guaggaugucagaauauug

SEQ ID NO: 505868 - RNA, 19 nt, Artificial Sequence
  Description of Artificial Sequence: Synthetic oligonucleotide
aucccuacaacgguuauaa

SEQ ID NO: 505869 - RNA, 19 nt, Artificial Sequence
  Description of Artificial Sequence: Synthetic oligonucleotide
cucuuccuacucucaaagg

SEQ ID NO: 505870 - RNA, 19 nt, Artificial Sequence
  Description of Artificial Sequence: Synthetic oligonucleotide
cuauaaaaguuguagucgu

SEQ ID NO: 505871 - RNA, 19 nt, Artificial Sequence
  Description of Artificial Sequence: Synthetic oligonucleotide
aacccauaacacucuguau

SEQ ID NO: 505872 - RNA, 19 nt, Artificial Sequence
  Description of Artificial Sequence: Synthetic oligonucleotide
ugcggaacauguacacgcc

SEQ ID NO: 505873 - RNA, 19 nt, Artificial Sequence
  Description of Artificial Sequence: Synthetic oligonucleotide
cccgguaggacaaauacug

SEQ ID NO: 505874 - RNA, 19 nt, Artificial Sequence
  Description of Artificial Sequence: Synthetic oligonucleotide
uucgaauaaucguuccgau

SEQ ID NO: 505875 - RNA, 19 nt, Artificial Sequence
  Description of Artificial Sequence: Synthetic oligonucleotide
aggaugucagaauauugua

SEQ ID NO: 505876 - RNA, 19 nt, Artificial Sequence
  Description of Artificial Sequence: Synthetic oligonucleotide
aguuaaacucagggccugc

SEQ ID NO: 505877 - RNA, 19 nt, Artificial Sequence
  Description of Artificial Sequence: Synthetic oligonucleotide
auauuguaacaucccuaca

SEQ ID NO: 505878 - RNA, 19 nt, Artificial Sequence
  Description of Artificial Sequence: Synthetic oligonucleotide
uauugccggaguccugcag

SEQ ID NO: 505879 - RNA, 19 nt, Artificial Sequence
  Description of Artificial Sequence: Synthetic oligonucleotide
cauguacacgccucgguuc

SEQ ID NO: 505880 - RNA, 19 nt, Artificial Sequence
  Description of Artificial Sequence: Synthetic oligonucleotide
acucuauuauguuuacaua

SEQ ID NO: 505881 - RNA, 19 nt, Artificial Sequence
  Description of Artificial Sequence: Synthetic oligonucleotide
ucgcuggugauuucagucu

SEQ ID NO: 505882 - RNA, 19 nt, Artificial Sequence
  Description of Artificial Sequence: Synthetic oligonucleotide
gcuacaugacucuauuaug

SEQ ID NO: 505883 - RNA, 19 nt, Artificial Sequence
  Description of Artificial Sequence: Synthetic oligonucleotide
ugucaguaccagaauuuua

SEQ ID NO: 505884 - RNA, 19 nt, Artificial Sequence
  Description of Artificial Sequence: Synthetic oligonucleotide
auaaacugacucauggaau

SEQ ID NO: 505885 - RNA, 19 nt, Artificial Sequence
  Description of Artificial Sequence: Synthetic oligonucleotide
gaacauguacacgccucgg

SEQ ID NO: 505886 - RNA, 19 nt, Artificial Sequence
  Description of Artificial Sequence: Synthetic oligonucleotide
auuaucccuuagcucuauc

SEQ ID NO: 505887 - RNA, 19 nt, Artificial Sequence
  Description of Artificial Sequence: Synthetic oligonucleotide
uuauuaucccuuagcucua

SEQ ID NO: 505888 - RNA, 19 nt, Artificial Sequence
  Description of Artificial Sequence: Synthetic oligonucleotide
gaagucagguguagaaaac

SEQ ID NO: 505889 - RNA, 19 nt, Artificial Sequence
  Description of Artificial Sequence: Synthetic oligonucleotide
uacuuagccugugaagugu

SEQ ID NO: 505890 - RNA, 19 nt, Artificial Sequence
  Description of Artificial Sequence: Synthetic oligonucleotide
cuuacuguaggugcguuca

SEQ ID NO: 505891 - RNA, 19 nt, Artificial Sequence
  Description of Artificial Sequence: Synthetic oligonucleotide
cuucagacaaaggccgagg

SEQ ID NO: 505892 - RNA, 19 nt, Artificial Sequence
  Description of Artificial Sequence: Synthetic oligonucleotide
agcgccugguagcauuugg

SEQ ID NO: 505893 - RNA, 19 nt, Artificial Sequence
  Description of Artificial Sequence: Synthetic oligonucleotide
uuacuguaggugcguucag

SEQ ID NO: 505894 - RNA, 19 nt, Artificial Sequence
  Description of Artificial Sequence: Synthetic oligonucleotide
ugugcacacaaaacuucau

SEQ ID NO: 505895 - RNA, 19 nt, Artificial Sequence
  Description of Artificial Sequence: Synthetic oligonucleotide
ggugcguucagcucuccag

SEQ ID NO: 505896 - RNA, 19 nt, Artificial Sequence
  Description of Artificial Sequence: Synthetic oligonucleotide
ugcaaguuauuaucccuua

SEQ ID NO: 505897 - RNA, 19 nt, Artificial Sequence
  Description of Artificial Sequence: Synthetic oligonucleotide
agcuaaccugguucaaaug

SEQ ID NO: 505898 - RNA, 19 nt, Artificial Sequence
  Description of Artificial Sequence: Synthetic oligonucleotide
guacugugaugacuuggag

SEQ ID NO: 505899 - RNA, 19 nt, Artificial Sequence
  Description of Artificial Sequence: Synthetic oligonucleotide
aaacaacgaaaacccggua

SEQ ID NO: 505900 - RNA, 19 nt, Artificial Sequence
  Description of Artificial Sequence: Synthetic oligonucleotide
ccaauugugcacacaaaac

SEQ ID NO: 505901 - RNA, 19 nt, Artificial Sequence
  Description of Artificial Sequence: Synthetic oligonucleotide
ugugaguguggcgucaauc

SEQ ID NO: 505902 - RNA, 19 nt, Artificial Sequence
  Description of Artificial Sequence: Synthetic oligonucleotide
cuacaacgguuauaagcac

SEQ ID NO: 505903 - RNA, 19 nt, Artificial Sequence
  Description of Artificial Sequence: Synthetic oligonucleotide
ugguaggaugucagaauau

SEQ ID NO: 505904 - RNA, 19 nt, Artificial Sequence
  Description of Artificial Sequence: Synthetic oligonucleotide
guagucguagcacagcgcu

SEQ ID NO: 505905 - RNA, 19 nt, Artificial Sequence
  Description of Artificial Sequence: Synthetic oligonucleotide
acauguacacgccucgguu

SEQ ID NO: 505906 - RNA, 19 nt, Artificial Sequence
  Description of Artificial Sequence: Synthetic oligonucleotide
auuacaagcugagggcugu

SEQ ID NO: 505907 - RNA, 19 nt, Artificial Sequence
  Description of Artificial Sequence: Synthetic oligonucleotide
uaguuaaacucagggccug

SEQ ID NO: 505908 - RNA, 19 nt, Artificial Sequence
  Description of Artificial Sequence: Synthetic oligonucleotide
cagauacacauuagauuuc

SEQ ID NO: 505909 - RNA, 19 nt, Artificial Sequence
  Description of Artificial Sequence: Synthetic oligonucleotide
guuaggucccugcuacaug

SEQ ID NO: 505910 - RNA, 19 nt, Artificial Sequence
  Description of Artificial Sequence: Synthetic oligonucleotide
cuggauccgagaccgggcc

SEQ ID NO: 505911 - RNA, 19 nt, Artificial Sequence
  Description of Artificial Sequence: Synthetic oligonucleotide
agccguuauucacaguuau

SEQ ID NO: 505912 - RNA, 19 nt, Artificial Sequence
  Description of Artificial Sequence: Synthetic oligonucleotide
ugcguucagcucuccagug

SEQ ID NO: 505913 - RNA, 19 nt, Artificial Sequence
  Description of Artificial Sequence: Synthetic oligonucleotide
uacuguaggugcguucagc

SEQ ID NO: 505914 - RNA, 19 nt, Artificial Sequence
  Description of Artificial Sequence: Synthetic oligonucleotide
uagcucuaucccuaaggaa

SEQ ID NO: 505915 - RNA, 19 nt, Artificial Sequence
  Description of Artificial Sequence: Synthetic oligonucleotide
augagacuaacaaaacaaa

SEQ ID NO: 505916 - RNA, 19 nt, Artificial Sequence
  Description of Artificial Sequence: Synthetic oligonucleotide
uacauaauucugugugguu

SEQ ID NO: 505917 - RNA, 19 nt, Artificial Sequence
  Description of Artificial Sequence: Synthetic oligonucleotide
gaaguguugagucgccucu

SEQ ID NO: 505918 - RNA, 19 nt, Artificial Sequence
  Description of Artificial Sequence: Synthetic oligonucleotide
aucguuccgauguacucaa

SEQ ID NO: 505919 - RNA, 19 nt, Artificial Sequence
  Description of Artificial Sequence: Synthetic oligonucleotide
ugaguguaccacagcucac

SEQ ID NO: 505920 - RNA, 19 nt, Artificial Sequence
  Description of Artificial Sequence: Synthetic oligonucleotide
uugagucgccucuuccuac

SEQ ID NO: 505921 - RNA, 19 nt, Artificial Sequence
  Description of Artificial Sequence: Synthetic oligonucleotide
auacagcuauuuaucaaga

SEQ ID NO: 505922 - RNA, 19 nt, Artificial Sequence
  Description of Artificial Sequence: Synthetic oligonucleotide
gacgaacugcuuacuguag

SEQ ID NO: 505923 - RNA, 19 nt, Artificial Sequence
  Description of Artificial Sequence: Synthetic oligonucleotide
ugagucgccucuuccuacu

SEQ ID NO: 505924 - RNA, 19 nt, Artificial Sequence
  Description of Artificial Sequence: Synthetic oligonucleotide
guuaaacucagggccugcc

SEQ ID NO: 505925 - RNA, 19 nt, Artificial Sequence
  Description of Artificial Sequence: Synthetic oligonucleotide
gcuauuuaucaagagaaaa

SEQ ID NO: 505926 - RNA, 19 nt, Artificial Sequence
  Description of Artificial Sequence: Synthetic oligonucleotide
auguuaaauagaaggcuaa

SEQ ID NO: 505927 - RNA, 19 nt, Artificial Sequence
  Description of Artificial Sequence: Synthetic oligonucleotide
aaaggccgaggaaccagag

SEQ ID NO: 505928 - RNA, 19 nt, Artificial Sequence
  Description of Artificial Sequence: Synthetic oligonucleotide
uuuguuaguucugcaggua

SEQ ID NO: 505929 - RNA, 19 nt, Artificial Sequence
  Description of Artificial Sequence: Synthetic oligonucleotide
cuccuuaaugagacuaaca

SEQ ID NO: 505930 - RNA, 19 nt, Artificial Sequence
  Description of Artificial Sequence: Synthetic oligonucleotide
aaaacccgguaggacaaau

SEQ ID NO: 505931 - RNA, 19 nt, Artificial Sequence
  Description of Artificial Sequence: Synthetic oligonucleotide
cauuagauuuccauucggu

SEQ ID NO: 505932 - RNA, 19 nt, Artificial Sequence
  Description of Artificial Sequence: Synthetic oligonucleotide
aguguggcgucaaucacgu

SEQ ID NO: 505933 - RNA, 19 nt, Artificial Sequence
  Description of Artificial Sequence: Synthetic oligonucleotide
ggaugucagaauauuguac

SEQ ID NO: 505934 - RNA, 19 nt, Artificial Sequence
  Description of Artificial Sequence: Synthetic oligonucleotide
cacaagaaugguuaaguau

SEQ ID NO: 505935 - RNA, 19 nt, Artificial Sequence
  Description of Artificial Sequence: Synthetic oligonucleotide
gcaaguuauuaucccuuag

SEQ ID NO: 505936 - RNA, 19 nt, Artificial Sequence
  Description of Artificial Sequence: Synthetic oligonucleotide
guuuguuaguucugcaggu

SEQ ID NO: 505937 - RNA, 19 nt, Artificial Sequence
  Description of Artificial Sequence: Synthetic oligonucleotide
guagggaugcaacaauaua

SEQ ID NO: 505938 - RNA, 19 nt, Artificial Sequence
  Description of Artificial Sequence: Synthetic oligonucleotide
cccauaacacucuguauac

SEQ ID NO: 505939 - RNA, 19 nt, Artificial Sequence
  Description of Artificial Sequence: Synthetic oligonucleotide
uggaccauucugugacucu

SEQ ID NO: 505940 - RNA, 19 nt, Artificial Sequence
  Description of Artificial Sequence: Synthetic oligonucleotide
gagaccgggccagauacac

SEQ ID NO: 505941 - RNA, 19 nt, Artificial Sequence
  Description of Artificial Sequence: Synthetic oligonucleotide
guucuaaucaaaacuacuu

SEQ ID NO: 505942 - RNA, 19 nt, Artificial Sequence
  Description of Artificial Sequence: Synthetic oligonucleotide
caguuaucacaaauuguaa

SEQ ID NO: 505943 - RNA, 19 nt, Artificial Sequence
  Description of Artificial Sequence: Synthetic oligonucleotide
uuaggggcacaagaauggu

SEQ ID NO: 505944 - RNA, 19 nt, Artificial Sequence
  Description of Artificial Sequence: Synthetic oligonucleotide
aguagggaugcaacaauau

SEQ ID NO: 505945 - RNA, 19 nt, Artificial Sequence
  Description of Artificial Sequence: Synthetic oligonucleotide
uccuacucucaaaggucac

SEQ ID NO: 505946 - RNA, 19 nt, Artificial Sequence
  Description of Artificial Sequence: Synthetic oligonucleotide
uacacgccucgguucuggg

SEQ ID NO: 505947 - RNA, 19 nt, Artificial Sequence
  Description of Artificial Sequence: Synthetic oligonucleotide
aacaucccuacaacgguua

SEQ ID NO: 505948 - RNA, 19 nt, Artificial Sequence
  Description of Artificial Sequence: Synthetic oligonucleotide
gaauaaucguuccgaugua

SEQ ID NO: 505949 - RNA, 19 nt, Artificial Sequence
  Description of Artificial Sequence: Synthetic oligonucleotide
gucaucucaguacauuccu

SEQ ID NO: 505950 - RNA, 19 nt, Artificial Sequence
  Description of Artificial Sequence: Synthetic oligonucleotide
aucaugccauauacauuac

SEQ ID NO: 505951 - RNA, 19 nt, Artificial Sequence
  Description of Artificial Sequence: Synthetic oligonucleotide
auacaucaugccauauaca

SEQ ID NO: 505952 - RNA, 19 nt, Artificial Sequence
  Description of Artificial Sequence: Synthetic oligonucleotide
caguaccagaauuuuaagu

SEQ ID NO: 505953 - RNA, 19 nt, Artificial Sequence
  Description of Artificial Sequence: Synthetic oligonucleotide
guguaccacagcucacagc

SEQ ID NO: 505954 - RNA, 19 nt, Artificial Sequence
  Description of Artificial Sequence: Synthetic oligonucleotide
auaagcacccgagcugcug

SEQ ID NO: 505955 - RNA, 19 nt, Artificial Sequence
  Description of Artificial Sequence: Synthetic oligonucleotide
caaucacguggucauuguc

SEQ ID NO: 505956 - RNA, 19 nt, Artificial Sequence
  Description of Artificial Sequence: Synthetic oligonucleotide
caguuggcucucucugugc

SEQ ID NO: 505957 - RNA, 19 nt, Artificial Sequence
  Description of Artificial Sequence: Synthetic oligonucleotide
gggaugcaacaauauaaca

SEQ ID NO: 505958 - RNA, 19 nt, Artificial Sequence
  Description of Artificial Sequence: Synthetic oligonucleotide
ccguuauucacaguuauca

SEQ ID NO: 505959 - RNA, 19 nt, Artificial Sequence
  Description of Artificial Sequence: Synthetic oligonucleotide
ggaugcaacaauauaacau

SEQ ID NO: 505960 - RNA, 19 nt, Artificial Sequence
  Description of Artificial Sequence: Synthetic oligonucleotide
uuaagccguuauucacagu

SEQ ID NO: 505961 - RNA, 19 nt, Artificial Sequence
  Description of Artificial Sequence: Synthetic oligonucleotide
cagcuauaaaaguuguagu

SEQ ID NO: 505962 - RNA, 19 nt, Artificial Sequence
  Description of Artificial Sequence: Synthetic oligonucleotide
uggauccgagaccgggcca

SEQ ID NO: 505963 - RNA, 19 nt, Artificial Sequence
  Description of Artificial Sequence: Synthetic oligonucleotide
cacugaguguaccacagcu

SEQ ID NO: 505964 - RNA, 19 nt, Artificial Sequence
  Description of Artificial Sequence: Synthetic oligonucleotide
agcuauuuaucaagagaaa

SEQ ID NO: 505965 - RNA, 19 nt, Artificial Sequence
  Description of Artificial Sequence: Synthetic oligonucleotide
guguccacuuaguuaaacu

SEQ ID NO: 505966 - RNA, 19 nt, Artificial Sequence
  Description of Artificial Sequence: Synthetic oligonucleotide
ggacucauaaagcuucucu

SEQ ID NO: 505967 - RNA, 19 nt, Artificial Sequence
  Description of Artificial Sequence: Synthetic oligonucleotide
caacgguuauaagcacccg

SEQ ID NO: 505968 - RNA, 19 nt, Artificial Sequence
  Description of Artificial Sequence: Synthetic oligonucleotide
auuguccaugcggaacaug

SEQ ID NO: 505969 - RNA, 19 nt, Artificial Sequence
  Description of Artificial Sequence: Synthetic oligonucleotide
cgaauaaucguuccgaugu

SEQ ID NO: 505970 - RNA, 19 nt, Artificial Sequence
  Description of Artificial Sequence: Synthetic oligonucleotide
cuuagccugugaaguguca

SEQ ID NO: 505971 - RNA, 19 nt, Artificial Sequence
  Description of Artificial Sequence: Synthetic oligonucleotide
cugacucauggaaucaagu

SEQ ID NO: 505972 - RNA, 19 nt, Artificial Sequence
  Description of Artificial Sequence: Synthetic oligonucleotide
ggaccauucugugacucug

SEQ ID NO: 505973 - RNA, 19 nt, Artificial Sequence
  Description of Artificial Sequence: Synthetic oligonucleotide
acccuauugccggaguccu

SEQ ID NO: 505974 - RNA, 19 nt, Artificial Sequence
  Description of Artificial Sequence: Synthetic oligonucleotide
ggacgaacugcuuacugua

SEQ ID NO: 505975 - RNA, 19 nt, Artificial Sequence
  Description of Artificial Sequence: Synthetic oligonucleotide
agccacacaguuaggggca

SEQ ID NO: 505976 - RNA, 19 nt, Artificial Sequence
  Description of Artificial Sequence: Synthetic oligonucleotide
gacaaaggccgaggaacca

SEQ ID NO: 505977 - RNA, 19 nt, Artificial Sequence
  Description of Artificial Sequence: Synthetic oligonucleotide
ccgagaccgggccagauac

SEQ ID NO: 505978 - RNA, 19 nt, Artificial Sequence
  Description of Artificial Sequence: Synthetic oligonucleotide
cuaucccuaaggaagucau

SEQ ID NO: 505979 - RNA, 19 nt, Artificial Sequence
  Description of Artificial Sequence: Synthetic oligonucleotide
cuggaccauucugugacuc

SEQ ID NO: 505980 - RNA, 19 nt, Artificial Sequence
  Description of Artificial Sequence: Synthetic oligonucleotide
acaaaguaacaggguuugu

SEQ ID NO: 505981 - RNA, 19 nt, Artificial Sequence
  Description of Artificial Sequence: Synthetic oligonucleotide
ccacuuaguuaaacucagg

SEQ ID NO: 505982 - RNA, 19 nt, Artificial Sequence
  Description of Artificial Sequence: Synthetic oligonucleotide
aaacccgguaggacaaaua

SEQ ID NO: 505983 - RNA, 19 nt, Artificial Sequence
  Description of Artificial Sequence: Synthetic oligonucleotide
gaaggcuaaggaguugggu

SEQ ID NO: 505984 - RNA, 19 nt, Artificial Sequence
  Description of Artificial Sequence: Synthetic oligonucleotide
acaucccuacaacgguuau

SEQ ID NO: 505985 - RNA, 19 nt, Artificial Sequence
  Description of Artificial Sequence: Synthetic oligonucleotide
aguggacgaacugcuuacu

SEQ ID NO: 505986 - RNA, 19 nt, Artificial Sequence
  Description of Artificial Sequence: Synthetic oligonucleotide
aagccguuauucacaguua

SEQ ID NO: 505987 - RNA, 19 nt, Artificial Sequence
  Description of Artificial Sequence: Synthetic oligonucleotide
ccgguaggacaaauacugg

SEQ ID NO: 505988 - RNA, 19 nt, Artificial Sequence
  Description of Artificial Sequence: Synthetic oligonucleotide
uccugugaguguggcguca

SEQ ID NO: 505989 - RNA, 19 nt, Artificial Sequence
  Description of Artificial Sequence: Synthetic oligonucleotide
gccaacauuagauacuauu

SEQ ID NO: 505990 - RNA, 19 nt, Artificial Sequence
  Description of Artificial Sequence: Synthetic oligonucleotide
ugccaacauuagauacuau

SEQ ID NO: 505991 - RNA, 19 nt, Artificial Sequence
  Description of Artificial Sequence: Synthetic oligonucleotide
guuggguuaggucccugcu

SEQ ID NO: 505992 - RNA, 19 nt, Artificial Sequence
  Description of Artificial Sequence: Synthetic oligonucleotide
caacgaaaacccgguagga

SEQ ID NO: 505993 - RNA, 19 nt, Artificial Sequence
  Description of Artificial Sequence: Synthetic oligonucleotide
acccgguaggacaaauacu

SEQ ID NO: 505994 - RNA, 19 nt, Artificial Sequence
  Description of Artificial Sequence: Synthetic oligonucleotide
cccuaaggaagucaucuca

SEQ ID NO: 505995 - RNA, 19 nt, Artificial Sequence
  Description of Artificial Sequence: Synthetic oligonucleotide
ggauccgagaccgggccag

SEQ ID NO: 505996 - RNA, 19 nt, Artificial Sequence
  Description of Artificial Sequence: Synthetic oligonucleotide
agacacaccagggcagaau

SEQ ID NO: 505997 - RNA, 19 nt, Artificial Sequence
  Description of Artificial Sequence: Synthetic oligonucleotide
cucuaucccuaaggaaguc

SEQ ID NO: 505998 - RNA, 19 nt, Artificial Sequence
  Description of Artificial Sequence: Synthetic oligonucleotide
gggcacaagaaugguuaag

SEQ ID NO: 505999 - RNA, 19 nt, Artificial Sequence
  Description of Artificial Sequence: Synthetic oligonucleotide
gcuuacuguaggugcguuc

SEQ ID NO: 506000 - RNA, 19 nt, Artificial Sequence
  Description of Artificial Sequence: Synthetic oligonucleotide
gagucgccucuuccuacuc

SEQ ID NO: 506001 - RNA, 19 nt, Artificial Sequence
  Description of Artificial Sequence: Synthetic oligonucleotide
gcacaagaaugguuaagua

SEQ ID NO: 506002 - RNA, 19 nt, Artificial Sequence
  Description of Artificial Sequence: Synthetic oligonucleotide
ucacguggucauuguccau

SEQ ID NO: 506003 - RNA, 19 nt, Artificial Sequence
  Description of Artificial Sequence: Synthetic oligonucleotide
gugcguucagcucuccagu

SEQ ID NO: 506004 - RNA, 19 nt, Artificial Sequence
  Description of Artificial Sequence: Synthetic oligonucleotide
cauucuccgguacugugau

SEQ ID NO: 506005 - RNA, 19 nt, Artificial Sequence
  Description of Artificial Sequence: Synthetic oligonucleotide
gucccugcuacaugacucu

SEQ ID NO: 506006 - RNA, 19 nt, Artificial Sequence
  Description of Artificial Sequence: Synthetic oligonucleotide
ugcuuacuguaggugcguu

SEQ ID NO: 506007 - RNA, 19 nt, Artificial Sequence
  Description of Artificial Sequence: Synthetic oligonucleotide
cuauugccggaguccugca

SEQ ID NO: 506008 - RNA, 19 nt, Artificial Sequence
  Description of Artificial Sequence: Synthetic oligonucleotide
cuaaggaguuggguuaggu

SEQ ID NO: 506009 - RNA, 19 nt, Artificial Sequence
  Description of Artificial Sequence: Synthetic oligonucleotide
agcacccgagcugcugcag

SEQ ID NO: 506010 - RNA, 19 nt, Artificial Sequence
  Description of Artificial Sequence: Synthetic oligonucleotide
ucguagcacagcgcugcuc

SEQ ID NO: 506011 - RNA, 19 nt, Artificial Sequence
  Description of Artificial Sequence: Synthetic oligonucleotide
guggcgucaaucacguggu

SEQ ID NO: 506012 - RNA, 19 nt, Artificial Sequence
  Description of Artificial Sequence: Synthetic oligonucleotide
gcuaaggaguuggguuagg

SEQ ID NO: 506013 - RNA, 19 nt, Artificial Sequence
  Description of Artificial Sequence: Synthetic oligonucleotide
uggcgucaaucacgugguc

SEQ ID NO: 506014 - RNA, 19 nt, Artificial Sequence
  Description of Artificial Sequence: Synthetic oligonucleotide
gccccugucaguaaggcgu

SEQ ID NO: 506015 - RNA, 19 nt, Artificial Sequence
  Description of Artificial Sequence: Synthetic oligonucleotide
ucguuccgauguacucaau

SEQ ID NO: 506016 - RNA, 19 nt, Artificial Sequence
  Description of Artificial Sequence: Synthetic oligonucleotide
cgguacugugaugacuugg

SEQ ID NO: 506017 - RNA, 19 nt, Artificial Sequence
  Description of Artificial Sequence: Synthetic oligonucleotide
ggucauuguccaugcggaa

SEQ ID NO: 506018 - RNA, 19 nt, Artificial Sequence
  Description of Artificial Sequence: Synthetic oligonucleotide
ggccagauacacauuagau

SEQ ID NO: 506019 - RNA, 19 nt, Artificial Sequence
  Description of Artificial Sequence: Synthetic oligonucleotide
uaggugcguucagcucucc

SEQ ID NO: 506020 - RNA, 19 nt, Artificial Sequence
  Description of Artificial Sequence: Synthetic oligonucleotide
agaccgggccagauacaca

SEQ ID NO: 506021 - RNA, 19 nt, Artificial Sequence
  Description of Artificial Sequence: Synthetic oligonucleotide
gccgaggaaccagagcuuc

SEQ ID NO: 506022 - RNA, 19 nt, Artificial Sequence
  Description of Artificial Sequence: Synthetic oligonucleotide
gccguuauucacaguuauc

SEQ ID NO: 506023 - RNA, 19 nt, Artificial Sequence
  Description of Artificial Sequence: Synthetic oligonucleotide
caucccuacaacgguuaua

SEQ ID NO: 506024 - RNA, 19 nt, Artificial Sequence
  Description of Artificial Sequence: Synthetic oligonucleotide
cacuccaauugugcacaca

SEQ ID NO: 506025 - RNA, 19 nt, Artificial Sequence
  Description of Artificial Sequence: Synthetic oligonucleotide
cucgguucugggacucaua

SEQ ID NO: 506026 - RNA, 19 nt, Artificial Sequence
  Description of Artificial Sequence: Synthetic oligonucleotide
gauccgagaccgggccaga

SEQ ID NO: 506027 - RNA, 19 nt, Artificial Sequence
  Description of Artificial Sequence: Synthetic oligonucleotide
guguggcgucaaucacgug

SEQ ID NO: 506028 - RNA, 19 nt, Artificial Sequence
  Description of Artificial Sequence: Synthetic oligonucleotide
gcucuaucccuaaggaagu

SEQ ID NO: 506029 - RNA, 19 nt, Artificial Sequence
  Description of Artificial Sequence: Synthetic oligonucleotide
cagcgcugcucugucagaa

SEQ ID NO: 506030 - RNA, 19 nt, Artificial Sequence
  Description of Artificial Sequence: Synthetic oligonucleotide
gggacucauaaagcuucuc

SEQ ID NO: 506031 - RNA, 19 nt, Artificial Sequence
  Description of Artificial Sequence: Synthetic oligonucleotide
ggaguccugcagcuggagu

SEQ ID NO: 506032 - RNA, 19 nt, Artificial Sequence
  Description of Artificial Sequence: Synthetic oligonucleotide
ggguuaggucccugcuaca

SEQ ID NO: 506033 - RNA, 19 nt, Artificial Sequence
  Description of Artificial Sequence: Synthetic oligonucleotide
gcgcugcucugucagaagu

SEQ ID NO: 506034 - RNA, 19 nt, Artificial Sequence
  Description of Artificial Sequence: Synthetic oligonucleotide
gccucaguuggcucucucu

SEQ ID NO: 506035 - RNA, 19 nt, Artificial Sequence
  Description of Artificial Sequence: Synthetic oligonucleotide
cuccgguacugugaugacu

SEQ ID NO: 506036 - RNA, 19 nt, Artificial Sequence
  Description of Artificial Sequence: Synthetic oligonucleotide
ccgguacugugaugacuug

SEQ ID NO: 506037 - RNA, 19 nt, Artificial Sequence
  Description of Artificial Sequence: Synthetic oligonucleotide
gcggaacauguacacgccu

SEQ ID NO: 506038 - RNA, 19 nt, Artificial Sequence
  Description of Artificial Sequence: Synthetic oligonucleotide
cagcgccugguagcauuug

SEQ ID NO: 506039 - RNA, 19 nt, Artificial Sequence
  Description of Artificial Sequence: Synthetic oligonucleotide
cgaacugcuuacuguaggu

SEQ ID NO: 506040 - RNA, 19 nt, Artificial Sequence
  Description of Artificial Sequence: Synthetic oligonucleotide
cccuauugccggaguccug

SEQ ID NO: 506041 - RNA, 19 nt, Artificial Sequence
  Description of Artificial Sequence: Synthetic oligonucleotide
cugcuuacuguaggugcgu

SEQ ID NO: 506042 - RNA, 19 nt, Artificial Sequence
  Description of Artificial Sequence: Synthetic oligonucleotide
cccuucgcuggugauuuca

SEQ ID NO: 506043 - RNA, 19 nt, Artificial Sequence
  Description of Artificial Sequence: Synthetic oligonucleotide
ggaagucaucucaguacau

SEQ ID NO: 506044 - RNA, 19 nt, Artificial Sequence
  Description of Artificial Sequence: Synthetic oligonucleotide
gcguggccagcacucugga

SEQ ID NO: 506045 - RNA, 19 nt, Artificial Sequence
  Description of Artificial Sequence: Synthetic oligonucleotide
ccuacucucaaaggucacu

SEQ ID NO: 506046 - RNA, 19 nt, Artificial Sequence
  Description of Artificial Sequence: Synthetic oligonucleotide
caauugucucuagcagcau

SEQ ID NO: 506047 - RNA, 19 nt, Artificial Sequence
  Description of Artificial Sequence: Synthetic oligonucleotide
cccuuagcucuaucccuaa

SEQ ID NO: 506048 - RNA, 19 nt, Artificial Sequence
  Description of Artificial Sequence: Synthetic oligonucleotide
ccauaacacucuguauacu

SEQ ID NO: 506049 - RNA, 19 nt, Artificial Sequence
  Description of Artificial Sequence: Synthetic oligonucleotide
cugugaguguggcgucaau

SEQ ID NO: 506050 - RNA, 19 nt, Artificial Sequence
  Description of Artificial Sequence: Synthetic oligonucleotide
gggcagaauuuugguuauu

SEQ ID NO: 506051 - RNA, 19 nt, Artificial Sequence
  Description of Artificial Sequence: Synthetic oligonucleotide
ccgccggcucuuugcccca

SEQ ID NO: 506052 - RNA, 19 nt, Artificial Sequence
  Description of Artificial Sequence: Synthetic oligonucleotide
cgccggcucuuugccccag

SEQ ID NO: 506053 - RNA, 19 nt, Artificial Sequence
  Description of Artificial Sequence: Synthetic oligonucleotide
aaaugugaggaucacacag

SEQ ID NO: 506054 - RNA, 19 nt, Artificial Sequence
  Description of Artificial Sequence: Synthetic oligonucleotide
ucuagggacagacugauag

SEQ ID NO: 506055 - RNA, 19 nt, Artificial Sequence
  Description of Artificial Sequence: Synthetic oligonucleotide
caaauaugagguuaggugg

SEQ ID NO: 506056 - RNA, 19 nt, Artificial Sequence
  Description of Artificial Sequence: Synthetic oligonucleotide
auaaacauaggggauaggc

SEQ ID NO: 506057 - RNA, 19 nt, Artificial Sequence
  Description of Artificial Sequence: Synthetic oligonucleotide
aaacauaggggauaggcug

SEQ ID NO: 506058 - RNA, 19 nt, Artificial Sequence
  Description of Artificial Sequence: Synthetic oligonucleotide
ugcauaacaucccugauga

SEQ ID NO: 506059 - RNA, 19 nt, Artificial Sequence
  Description of Artificial Sequence: Synthetic oligonucleotide
ugaugauaaauauaugugu

SEQ ID NO: 506060 - RNA, 19 nt, Artificial Sequence
  Description of Artificial Sequence: Synthetic oligonucleotide
gaugguauaaguucccaag

SEQ ID NO: 506061 - RNA, 19 nt, Artificial Sequence
  Description of Artificial Sequence: Synthetic oligonucleotide
auuguuaggcaguaugugg

SEQ ID NO: 506062 - RNA, 19 nt, Artificial Sequence
  Description of Artificial Sequence: Synthetic oligonucleotide
uuaauugcaagguuggggu

SEQ ID NO: 506063 - RNA, 19 nt, Artificial Sequence
  Description of Artificial Sequence: Synthetic oligonucleotide
aaucauagcugcuacuucu

SEQ ID NO: 506064 - RNA, 19 nt, Artificial Sequence
  Description of Artificial Sequence: Synthetic oligonucleotide
aaaagcauuacagugaguu

SEQ ID NO: 506065 - RNA, 19 nt, Artificial Sequence
  Description of Artificial Sequence: Synthetic oligonucleotide
uccaauguggggcuaauag

SEQ ID NO: 506066 - RNA, 19 nt, Artificial Sequence
  Description of Artificial Sequence: Synthetic oligonucleotide
gucuuuaucccucugaggc

SEQ ID NO: 506067 - RNA, 19 nt, Artificial Sequence
  Description of Artificial Sequence: Synthetic oligonucleotide
gauuuaauugcaagguugg

SEQ ID NO: 506068 - RNA, 19 nt, Artificial Sequence
  Description of Artificial Sequence: Synthetic oligonucleotide
ucuuuaaaugugaggauca

SEQ ID NO: 506069 - RNA, 19 nt, Artificial Sequence
  Description of Artificial Sequence: Synthetic oligonucleotide
uauauguguaucagcuugg

SEQ ID NO: 506070 - RNA, 19 nt, Artificial Sequence
  Description of Artificial Sequence: Synthetic oligonucleotide
aaggguguccaaaaggggc

SEQ ID NO: 506071 - RNA, 19 nt, Artificial Sequence
  Description of Artificial Sequence: Synthetic oligonucleotide
guugccauaggucaagucc

SEQ ID NO: 506072 - RNA, 19 nt, Artificial Sequence
  Description of Artificial Sequence: Synthetic oligonucleotide
agugggauagaucuucuuc

SEQ ID NO: 506073 - RNA, 19 nt, Artificial Sequence
  Description of Artificial Sequence: Synthetic oligonucleotide
uccacuaugaugcgguucc

SEQ ID NO: 506074 - RNA, 19 nt, Artificial Sequence
  Description of Artificial Sequence: Synthetic oligonucleotide
uugucucgguuccagaugg

SEQ ID NO: 506075 - RNA, 19 nt, Artificial Sequence
  Description of Artificial Sequence: Synthetic oligonucleotide
uuugaccuucucaucacgg

SEQ ID NO: 506076 - RNA, 19 nt, Artificial Sequence
  Description of Artificial Sequence: Synthetic oligonucleotide
uugcccauagacacuaggg

SEQ ID NO: 506077 - RNA, 19 nt, Artificial Sequence
  Description of Artificial Sequence: Synthetic oligonucleotide
cuaauaguccaaauaugag

SEQ ID NO: 506078 - RNA, 19 nt, Artificial Sequence
  Description of Artificial Sequence: Synthetic oligonucleotide
auuacgcuugcacugcugg

SEQ ID NO: 506079 - RNA, 19 nt, Artificial Sequence
  Description of Artificial Sequence: Synthetic oligonucleotide
guagggaaaucauagcugc

SEQ ID NO: 506080 - RNA, 19 nt, Artificial Sequence
  Description of Artificial Sequence: Synthetic oligonucleotide
uaaacauaggggauaggcu

SEQ ID NO: 506081 - RNA, 19 nt, Artificial Sequence
  Description of Artificial Sequence: Synthetic oligonucleotide
uggcuaaagccuauggucc

SEQ ID NO: 506082 - RNA, 19 nt, Artificial Sequence
  Description of Artificial Sequence: Synthetic oligonucleotide
uuaggggacaucucuagug

SEQ ID NO: 506083 - RNA, 19 nt, Artificial Sequence
  Description of Artificial Sequence: Synthetic oligonucleotide
ugaugcagggcauucaugu

SEQ ID NO: 506084 - RNA, 19 nt, Artificial Sequence
  Description of Artificial Sequence: Synthetic oligonucleotide
auaggcaucagggagcuuc

SEQ ID NO: 506085 - RNA, 19 nt, Artificial Sequence
  Description of Artificial Sequence: Synthetic oligonucleotide
cacauacuggccaaggacc

SEQ ID NO: 506086 - RNA, 19 nt, Artificial Sequence
  Description of Artificial Sequence: Synthetic oligonucleotide
aguggugugaagauacgcc

SEQ ID NO: 506087 - RNA, 19 nt, Artificial Sequence
  Description of Artificial Sequence: Synthetic oligonucleotide
ugucuugaggagucuaggg

SEQ ID NO: 506088 - RNA, 19 nt, Artificial Sequence
  Description of Artificial Sequence: Synthetic oligonucleotide
aauugcaagguugggguag

SEQ ID NO: 506089 - RNA, 19 nt, Artificial Sequence
  Description of Artificial Sequence: Synthetic oligonucleotide
acggacaucaucugaaucu

SEQ ID NO: 506090 - RNA, 19 nt, Artificial Sequence
  Description of Artificial Sequence: Synthetic oligonucleotide
ggaggauuuaauugcaagg

SEQ ID NO: 506091 - RNA, 19 nt, Artificial Sequence
  Description of Artificial Sequence: Synthetic oligonucleotide
cagauggggccaaagaucc

SEQ ID NO: 506092 - RNA, 19 nt, Artificial Sequence
  Description of Artificial Sequence: Synthetic oligonucleotide
auagggucaaugguggccc

SEQ ID NO: 506093 - RNA, 19 nt, Artificial Sequence
  Description of Artificial Sequence: Synthetic oligonucleotide
uuguuaggcaguauguggu

SEQ ID NO: 506094 - RNA, 19 nt, Artificial Sequence
  Description of Artificial Sequence: Synthetic oligonucleotide
ucauccaaguacccauugg

SEQ ID NO: 506095 - RNA, 19 nt, Artificial Sequence
  Description of Artificial Sequence: Synthetic oligonucleotide
ugaucaaucuugugcagca

SEQ ID NO: 506096 - RNA, 19 nt, Artificial Sequence
  Description of Artificial Sequence: Synthetic oligonucleotide
agagaggagaugugguucg

SEQ ID NO: 506097 - RNA, 19 nt, Artificial Sequence
  Description of Artificial Sequence: Synthetic oligonucleotide
uggaguauggaguugguua

SEQ ID NO: 506098 - RNA, 19 nt, Artificial Sequence
  Description of Artificial Sequence: Synthetic oligonucleotide
caauguggggcuaauaguc

SEQ ID NO: 506099 - RNA, 19 nt, Artificial Sequence
  Description of Artificial Sequence: Synthetic oligonucleotide
auagagugguggcacgagc

SEQ ID NO: 506100 - RNA, 19 nt, Artificial Sequence
  Description of Artificial Sequence: Synthetic oligonucleotide
gaugaaggguaccccaucc

SEQ ID NO: 506101 - RNA, 19 nt, Artificial Sequence
  Description of Artificial Sequence: Synthetic oligonucleotide
ucauuugaauuuugaggag

SEQ ID NO: 506102 - RNA, 19 nt, Artificial Sequence
  Description of Artificial Sequence: Synthetic oligonucleotide
uuaggugguaagaaggaua

SEQ ID NO: 506103 - RNA, 19 nt, Artificial Sequence
  Description of Artificial Sequence: Synthetic oligonucleotide
ugcgguuccagccugucug

SEQ ID NO: 506104 - RNA, 19 nt, Artificial Sequence
  Description of Artificial Sequence: Synthetic oligonucleotide
uguagucucaccucagccu

SEQ ID NO: 506105 - RNA, 19 nt, Artificial Sequence
  Description of Artificial Sequence: Synthetic oligonucleotide
aauauauguguaucagcuu

SEQ ID NO: 506106 - RNA, 19 nt, Artificial Sequence
  Description of Artificial Sequence: Synthetic oligonucleotide
agcaguggugugaagauac

SEQ ID NO: 506107 - RNA, 19 nt, Artificial Sequence
  Description of Artificial Sequence: Synthetic oligonucleotide
cauuugaauuuugaggagc

SEQ ID NO: 506108 - RNA, 19 nt, Artificial Sequence
  Description of Artificial Sequence: Synthetic oligonucleotide
augauaaauauauguguau

SEQ ID NO: 506109 - RNA, 19 nt, Artificial Sequence
  Description of Artificial Sequence: Synthetic oligonucleotide
caaagucguuccaaugugg

SEQ ID NO: 506110 - RNA, 19 nt, Artificial Sequence
  Description of Artificial Sequence: Synthetic oligonucleotide
uagaauaggcgguuggccu

SEQ ID NO: 506111 - RNA, 19 nt, Artificial Sequence
  Description of Artificial Sequence: Synthetic oligonucleotide
ugaagauacgccaggcuuc

SEQ ID NO: 506112 - RNA, 19 nt, Artificial Sequence
  Description of Artificial Sequence: Synthetic oligonucleotide
uaggggacaucucuagugc

SEQ ID NO: 506113 - RNA, 19 nt, Artificial Sequence
  Description of Artificial Sequence: Synthetic oligonucleotide
gaugauaaauauaugugua

SEQ ID NO: 506114 - RNA, 19 nt, Artificial Sequence
  Description of Artificial Sequence: Synthetic oligonucleotide
uaugaugcgguuccagccu

SEQ ID NO: 506115 - RNA, 19 nt, Artificial Sequence
  Description of Artificial Sequence: Synthetic oligonucleotide
agguuaggugguaagaagg

SEQ ID NO: 506116 - RNA, 19 nt, Artificial Sequence
  Description of Artificial Sequence: Synthetic oligonucleotide
gauagugggauagaucuuc

SEQ ID NO: 506117 - RNA, 19 nt, Artificial Sequence
  Description of Artificial Sequence: Synthetic oligonucleotide
uaggguauagagugguggc

SEQ ID NO: 506118 - RNA, 19 nt, Artificial Sequence
  Description of Artificial Sequence: Synthetic oligonucleotide
ugcccauagacacuaggga

SEQ ID NO: 506119 - RNA, 19 nt, Artificial Sequence
  Description of Artificial Sequence: Synthetic oligonucleotide
uggccagccacauaggagu

SEQ ID NO: 506120 - RNA, 19 nt, Artificial Sequence
  Description of Artificial Sequence: Synthetic oligonucleotide
cagauagugggauagaucu

SEQ ID NO: 506121 - RNA, 19 nt, Artificial Sequence
  Description of Artificial Sequence: Synthetic oligonucleotide
aguauggaguugguuaggg

SEQ ID NO: 506122 - RNA, 19 nt, Artificial Sequence
  Description of Artificial Sequence: Synthetic oligonucleotide
cugcacacgaaucaccagc

SEQ ID NO: 506123 - RNA, 19 nt, Artificial Sequence
  Description of Artificial Sequence: Synthetic oligonucleotide
agccacauaggaguuacgg

SEQ ID NO: 506124 - RNA, 19 nt, Artificial Sequence
  Description of Artificial Sequence: Synthetic oligonucleotide
uugaggagcuugcccauag

SEQ ID NO: 506125 - RNA, 19 nt, Artificial Sequence
  Description of Artificial Sequence: Synthetic oligonucleotide
cucgguuccagauggggcc

SEQ ID NO: 506126 - RNA, 19 nt, Artificial Sequence
  Description of Artificial Sequence: Synthetic oligonucleotide
agguagaauaggcgguugg

SEQ ID NO: 506127 - RNA, 19 nt, Artificial Sequence
  Description of Artificial Sequence: Synthetic oligonucleotide
ggauuuaauugcaagguug

SEQ ID NO: 506128 - RNA, 19 nt, Artificial Sequence
  Description of Artificial Sequence: Synthetic oligonucleotide
ugaucccaaauucaucaaa

SEQ ID NO: 506129 - RNA, 19 nt, Artificial Sequence
  Description of Artificial Sequence: Synthetic oligonucleotide
ggagucuagggacagacug

SEQ ID NO: 506130 - RNA, 19 nt, Artificial Sequence
  Description of Artificial Sequence: Synthetic oligonucleotide
agcucauuacgcuugcacu

SEQ ID NO: 506131 - RNA, 19 nt, Artificial Sequence
  Description of Artificial Sequence: Synthetic oligonucleotide
ucucgguuccagauggggc

SEQ ID NO: 506132 - RNA, 19 nt, Artificial Sequence
  Description of Artificial Sequence: Synthetic oligonucleotide
cuagggacagacugauagg

SEQ ID NO: 506133 - RNA, 19 nt, Artificial Sequence
  Description of Artificial Sequence: Synthetic oligonucleotide
aggaguuacgggcaaagaa

SEQ ID NO: 506134 - RNA, 19 nt, Artificial Sequence
  Description of Artificial Sequence: Synthetic oligonucleotide
agauagggucaaugguggc

SEQ ID NO: 506135 - RNA, 19 nt, Artificial Sequence
  Description of Artificial Sequence: Synthetic oligonucleotide
agcugguguggccaugggc

SEQ ID NO: 506136 - RNA, 19 nt, Artificial Sequence
  Description of Artificial Sequence: Synthetic oligonucleotide
acccauugguagcuucucc

SEQ ID NO: 506137 - RNA, 19 nt, Artificial Sequence
  Description of Artificial Sequence: Synthetic oligonucleotide
ucuucccucaggaugccac

SEQ ID NO: 506138 - RNA, 19 nt, Artificial Sequence
  Description of Artificial Sequence: Synthetic oligonucleotide
ugucgccugccacaucucg

SEQ ID NO: 506139 - RNA, 19 nt, Artificial Sequence
  Description of Artificial Sequence: Synthetic oligonucleotide
agaauaggcgguuggccug

SEQ ID NO: 506140 - RNA, 19 nt, Artificial Sequence
  Description of Artificial Sequence: Synthetic oligonucleotide
gaugcacccaugaugauaa

SEQ ID NO: 506141 - RNA, 19 nt, Artificial Sequence
  Description of Artificial Sequence: Synthetic oligonucleotide
aguugguuaggggacaucu

SEQ ID NO: 506142 - RNA, 19 nt, Artificial Sequence
  Description of Artificial Sequence: Synthetic oligonucleotide
ggaguauggaguugguuag

SEQ ID NO: 506143 - RNA, 19 nt, Artificial Sequence
  Description of Artificial Sequence: Synthetic oligonucleotide
ucgacagcugguuggagcu

SEQ ID NO: 506144 - RNA, 19 nt, Artificial Sequence
  Description of Artificial Sequence: Synthetic oligonucleotide
cuguagucucaccucagcc

SEQ ID NO: 506145 - RNA, 19 nt, Artificial Sequence
  Description of Artificial Sequence: Synthetic oligonucleotide
cugcauaacaucccugaug

SEQ ID NO: 506146 - RNA, 19 nt, Artificial Sequence
  Description of Artificial Sequence: Synthetic oligonucleotide
gcucagauagggucaaugg

SEQ ID NO: 506147 - RNA, 19 nt, Artificial Sequence
  Description of Artificial Sequence: Synthetic oligonucleotide
guauggaguugguuagggg

SEQ ID NO: 506148 - RNA, 19 nt, Artificial Sequence
  Description of Artificial Sequence: Synthetic oligonucleotide
auauuguuaggcaguaugu

SEQ ID NO: 506149 - RNA, 19 nt, Artificial Sequence
  Description of Artificial Sequence: Synthetic oligonucleotide
ucuuuaucccucugaggcu

SEQ ID NO: 506150 - RNA, 19 nt, Artificial Sequence
  Description of Artificial Sequence: Synthetic oligonucleotide
agauccuguuggcaaaucu

SEQ ID NO: 506151 - RNA, 19 nt, Artificial Sequence
  Description of Artificial Sequence: Synthetic oligonucleotide
gcuaauaguccaaauauga

SEQ ID NO: 506152 - RNA, 19 nt, Artificial Sequence
  Description of Artificial Sequence: Synthetic oligonucleotide
uugaccuucucaucacgga

SEQ ID NO: 506153 - RNA, 19 nt, Artificial Sequence
  Description of Artificial Sequence: Synthetic oligonucleotide
guaggugcccucauacugg

SEQ ID NO: 506154 - RNA, 19 nt, Artificial Sequence
  Description of Artificial Sequence: Synthetic oligonucleotide
guagaauaggcgguuggcc

SEQ ID NO: 506155 - RNA, 19 nt, Artificial Sequence
  Description of Artificial Sequence: Synthetic oligonucleotide
acccgaugcacccaugaug

SEQ ID NO: 506156 - RNA, 19 nt, Artificial Sequence
  Description of Artificial Sequence: Synthetic oligonucleotide
uaguccaaauaugagguua

SEQ ID NO: 506157 - RNA, 19 nt, Artificial Sequence
  Description of Artificial Sequence: Synthetic oligonucleotide
gaagauacgccaggcuucc

SEQ ID NO: 506158 - RNA, 19 nt, Artificial Sequence
  Description of Artificial Sequence: Synthetic oligonucleotide
aucuggcucccacagaaga

SEQ ID NO: 506159 - RNA, 19 nt, Artificial Sequence
  Description of Artificial Sequence: Synthetic oligonucleotide
auagacacagaaagggugu

SEQ ID NO: 506160 - RNA, 19 nt, Artificial Sequence
  Description of Artificial Sequence: Synthetic oligonucleotide
ucuuguaucuguugccaua

SEQ ID NO: 506161 - RNA, 19 nt, Artificial Sequence
  Description of Artificial Sequence: Synthetic oligonucleotide
uauagagugguggcacgag

SEQ ID NO: 506162 - RNA, 19 nt, Artificial Sequence
  Description of Artificial Sequence: Synthetic oligonucleotide
aguaccaaagggcucuuua

SEQ ID NO: 506163 - RNA, 19 nt, Artificial Sequence
  Description of Artificial Sequence: Synthetic oligonucleotide
ugccauaaacauaggggau

SEQ ID NO: 506164 - RNA, 19 nt, Artificial Sequence
  Description of Artificial Sequence: Synthetic oligonucleotide
gaggauuuaauugcaaggu

SEQ ID NO: 506165 - RNA, 19 nt, Artificial Sequence
  Description of Artificial Sequence: Synthetic oligonucleotide
gaugucgccugccacaucu

SEQ ID NO: 506166 - RNA, 19 nt, Artificial Sequence
  Description of Artificial Sequence: Synthetic oligonucleotide
ucucuagugccacaauauu

SEQ ID NO: 506167 - RNA, 19 nt, Artificial Sequence
  Description of Artificial Sequence: Synthetic oligonucleotide
agauacgccaggcuucccu

SEQ ID NO: 506168 - RNA, 19 nt, Artificial Sequence
  Description of Artificial Sequence: Synthetic oligonucleotide
uuuggucuuuaucccucug

SEQ ID NO: 506169 - RNA, 19 nt, Artificial Sequence
  Description of Artificial Sequence: Synthetic oligonucleotide
gcggcugccauaaacauag

SEQ ID NO: 506170 - RNA, 19 nt, Artificial Sequence
  Description of Artificial Sequence: Synthetic oligonucleotide
ugugaggaucacacaggca

SEQ ID NO: 506171 - RNA, 19 nt, Artificial Sequence
  Description of Artificial Sequence: Synthetic oligonucleotide
uauggucccaaagucguuc

SEQ ID NO: 506172 - RNA, 19 nt, Artificial Sequence
  Description of Artificial Sequence: Synthetic oligonucleotide
aggauuuaauugcaagguu

SEQ ID NO: 506173 - RNA, 19 nt, Artificial Sequence
  Description of Artificial Sequence: Synthetic oligonucleotide
gaggagucuagggacagac

SEQ ID NO: 506174 - RNA, 19 nt, Artificial Sequence
  Description of Artificial Sequence: Synthetic oligonucleotide
uaccccaucccaccgcuca

SEQ ID NO: 506175 - RNA, 19 nt, Artificial Sequence
  Description of Artificial Sequence: Synthetic oligonucleotide
caaucuugugcagcagugg

SEQ ID NO: 506176 - RNA, 19 nt, Artificial Sequence
  Description of Artificial Sequence: Synthetic oligonucleotide
agaugguauaaguucccaa

SEQ ID NO: 506177 - RNA, 19 nt, Artificial Sequence
  Description of Artificial Sequence: Synthetic oligonucleotide
aacuccugucuugaggagu

SEQ ID NO: 506178 - RNA, 19 nt, Artificial Sequence
  Description of Artificial Sequence: Synthetic oligonucleotide
caaugguggcccugaaaag

SEQ ID NO: 506179 - RNA, 19 nt, Artificial Sequence
  Description of Artificial Sequence: Synthetic oligonucleotide
ggaguuacgggcaaagaac

SEQ ID NO: 506180 - RNA, 19 nt, Artificial Sequence
  Description of Artificial Sequence: Synthetic oligonucleotide
cuuuaucccucugaggcuc

SEQ ID NO: 506181 - RNA, 19 nt, Artificial Sequence
  Description of Artificial Sequence: Synthetic oligonucleotide
agucucaccucagccuugc

SEQ ID NO: 506182 - RNA, 19 nt, Artificial Sequence
  Description of Artificial Sequence: Synthetic oligonucleotide
aauguguggcuaaagccua

SEQ ID NO: 506183 - RNA, 19 nt, Artificial Sequence
  Description of Artificial Sequence: Synthetic oligonucleotide
cucauuacgcuugcacugc

SEQ ID NO: 506184 - RNA, 19 nt, Artificial Sequence
  Description of Artificial Sequence: Synthetic oligonucleotide
gguuaggggacaucucuag

SEQ ID NO: 506185 - RNA, 19 nt, Artificial Sequence
  Description of Artificial Sequence: Synthetic oligonucleotide
augaaggugucuucgggua

SEQ ID NO: 506186 - RNA, 19 nt, Artificial Sequence
  Description of Artificial Sequence: Synthetic oligonucleotide
cagcucauuacgcuugcac

SEQ ID NO: 506187 - RNA, 19 nt, Artificial Sequence
  Description of Artificial Sequence: Synthetic oligonucleotide
gcgggcauagcccacaaug

SEQ ID NO: 506188 - RNA, 19 nt, Artificial Sequence
  Description of Artificial Sequence: Synthetic oligonucleotide
gaguauggaguugguuagg

SEQ ID NO: 506189 - RNA, 19 nt, Artificial Sequence
  Description of Artificial Sequence: Synthetic oligonucleotide
gaggcguucauaggcauca

SEQ ID NO: 506190 - RNA, 19 nt, Artificial Sequence
  Description of Artificial Sequence: Synthetic oligonucleotide
caggucacccgaugcaccc

SEQ ID NO: 506191 - RNA, 19 nt, Artificial Sequence
  Description of Artificial Sequence: Synthetic oligonucleotide
gugucuucggguagaaggc

SEQ ID NO: 506192 - RNA, 19 nt, Artificial Sequence
  Description of Artificial Sequence: Synthetic oligonucleotide
ggaggcuggaucaucauac

SEQ ID NO: 506193 - RNA, 19 nt, Artificial Sequence
  Description of Artificial Sequence: Synthetic oligonucleotide
uaggcgguuggccugcauc

SEQ ID NO: 506194 - RNA, 19 nt, Artificial Sequence
  Description of Artificial Sequence: Synthetic oligonucleotide
uuuugaggagcuugcccau

SEQ ID NO: 506195 - RNA, 19 nt, Artificial Sequence
  Description of Artificial Sequence: Synthetic oligonucleotide
ucauuacgcuugcacugcu

SEQ ID NO: 506196 - RNA, 19 nt, Artificial Sequence
  Description of Artificial Sequence: Synthetic oligonucleotide
gaacagccaccagauagug

SEQ ID NO: 506197 - RNA, 19 nt, Artificial Sequence
  Description of Artificial Sequence: Synthetic oligonucleotide
cauaggguauagaguggug

SEQ ID NO: 506198 - RNA, 19 nt, Artificial Sequence
  Description of Artificial Sequence: Synthetic oligonucleotide
ugugagucgggagcgggca

SEQ ID NO: 506199 - RNA, 19 nt, Artificial Sequence
  Description of Artificial Sequence: Synthetic oligonucleotide
uggccaggucacccgaugc

SEQ ID NO: 506200 - RNA, 19 nt, Artificial Sequence
  Description of Artificial Sequence: Synthetic oligonucleotide
acugugagucgggagcggg

SEQ ID NO: 506201 - RNA, 19 nt, Artificial Sequence
  Description of Artificial Sequence: Synthetic oligonucleotide
uguggggcuaauaguccaa

SEQ ID NO: 506202 - RNA, 19 nt, Artificial Sequence
  Description of Artificial Sequence: Synthetic oligonucleotide
uuucaacacuuugaccuuc

SEQ ID NO: 506203 - RNA, 19 nt, Artificial Sequence
  Description of Artificial Sequence: Synthetic oligonucleotide
uaggcucuuguggagagau

SEQ ID NO: 506204 - RNA, 19 nt, Artificial Sequence
  Description of Artificial Sequence: Synthetic oligonucleotide
ggagaugugguucgacagc

SEQ ID NO: 506205 - RNA, 19 nt, Artificial Sequence
  Description of Artificial Sequence: Synthetic oligonucleotide
gggaaaucauagcugcuac

SEQ ID NO: 506206 - RNA, 19 nt, Artificial Sequence
  Description of Artificial Sequence: Synthetic oligonucleotide
acgacccucaguaccaaag

SEQ ID NO: 506207 - RNA, 19 nt, Artificial Sequence
  Description of Artificial Sequence: Synthetic oligonucleotide
aauaugagguuagguggua

SEQ ID NO: 506208 - RNA, 19 nt, Artificial Sequence
  Description of Artificial Sequence: Synthetic oligonucleotide
aagaugucgccugccacau

SEQ ID NO: 506209 - RNA, 19 nt, Artificial Sequence
  Description of Artificial Sequence: Synthetic oligonucleotide
augaugcgguuccagccug

SEQ ID NO: 506210 - RNA, 19 nt, Artificial Sequence
  Description of Artificial Sequence: Synthetic oligonucleotide
gaggcucaagguuccuccc

SEQ ID NO: 506211 - RNA, 19 nt, Artificial Sequence
  Description of Artificial Sequence: Synthetic oligonucleotide
uaauugcaagguuggggua

SEQ ID NO: 506212 - RNA, 19 nt, Artificial Sequence
  Description of Artificial Sequence: Synthetic oligonucleotide
ugacuccucaggguugaag

SEQ ID NO: 506213 - RNA, 19 nt, Artificial Sequence
  Description of Artificial Sequence: Synthetic oligonucleotide
ugugaggguucacccauuu

SEQ ID NO: 506214 - RNA, 19 nt, Artificial Sequence
  Description of Artificial Sequence: Synthetic oligonucleotide
acaauauuguuaggcagua

SEQ ID NO: 506215 - RNA, 19 nt, Artificial Sequence
  Description of Artificial Sequence: Synthetic oligonucleotide
gucucgguuccagaugggg

SEQ ID NO: 506216 - RNA, 19 nt, Artificial Sequence
  Description of Artificial Sequence: Synthetic oligonucleotide
aguuacgggcaaagaacuc

SEQ ID NO: 506217 - RNA, 19 nt, Artificial Sequence
  Description of Artificial Sequence: Synthetic oligonucleotide
uaacaucccugaugauccc

SEQ ID NO: 506218 - RNA, 19 nt, Artificial Sequence
  Description of Artificial Sequence: Synthetic oligonucleotide
agugaguuuugcagcagca

SEQ ID NO: 506219 - RNA, 19 nt, Artificial Sequence
  Description of Artificial Sequence: Synthetic oligonucleotide
aagauacgccaggcuuccc

SEQ ID NO: 506220 - RNA, 19 nt, Artificial Sequence
  Description of Artificial Sequence: Synthetic oligonucleotide
aucccugaugaucccaaau

SEQ ID NO: 506221 - RNA, 19 nt, Artificial Sequence
  Description of Artificial Sequence: Synthetic oligonucleotide
gauggguggcucagauagg

SEQ ID NO: 506222 - RNA, 19 nt, Artificial Sequence
  Description of Artificial Sequence: Synthetic oligonucleotide
ggcuaauaguccaaauaug

SEQ ID NO: 506223 - RNA, 19 nt, Artificial Sequence
  Description of Artificial Sequence: Synthetic oligonucleotide
auauguguaucagcuuggu

SEQ ID NO: 506224 - RNA, 19 nt, Artificial Sequence
  Description of Artificial Sequence: Synthetic oligonucleotide
auaguccaaauaugagguu

SEQ ID NO: 506225 - RNA, 19 nt, Artificial Sequence
  Description of Artificial Sequence: Synthetic oligonucleotide
uuacgcuugcacugcuggu

SEQ ID NO: 506226 - RNA, 19 nt, Artificial Sequence
  Description of Artificial Sequence: Synthetic oligonucleotide
cauuacgcuugcacugcug

SEQ ID NO: 506227 - RNA, 19 nt, Artificial Sequence
  Description of Artificial Sequence: Synthetic oligonucleotide
agacacuagggaguguggu

SEQ ID NO: 506228 - RNA, 19 nt, Artificial Sequence
  Description of Artificial Sequence: Synthetic oligonucleotide
ugcaagguugggguaggga

SEQ ID NO: 506229 - RNA, 19 nt, Artificial Sequence
  Description of Artificial Sequence: Synthetic oligonucleotide
gaguuacgggcaaagaacu

SEQ ID NO: 506230 - RNA, 19 nt, Artificial Sequence
  Description of Artificial Sequence: Synthetic oligonucleotide
ugaggagcuugcccauaga

SEQ ID NO: 506231 - RNA, 19 nt, Artificial Sequence
  Description of Artificial Sequence: Synthetic oligonucleotide
agucuagggacagacugau

SEQ ID NO: 506232 - RNA, 19 nt, Artificial Sequence
  Description of Artificial Sequence: Synthetic oligonucleotide
cacggacaucaucugaauc

SEQ ID NO: 506233 - RNA, 19 nt, Artificial Sequence
  Description of Artificial Sequence: Synthetic oligonucleotide
gggauagaucuucuucuug

SEQ ID NO: 506234 - RNA, 19 nt, Artificial Sequence
  Description of Artificial Sequence: Synthetic oligonucleotide
acauacuggccaaggacca

SEQ ID NO: 506235 - RNA, 19 nt, Artificial Sequence
  Description of Artificial Sequence: Synthetic oligonucleotide
uagucucaccucagccuug

SEQ ID NO: 506236 - RNA, 19 nt, Artificial Sequence
  Description of Artificial Sequence: Synthetic oligonucleotide
guggcacgagcccagggac

SEQ ID NO: 506237 - RNA, 19 nt, Artificial Sequence
  Description of Artificial Sequence: Synthetic oligonucleotide
auaggcuggggcuucucuu

SEQ ID NO: 506238 - RNA, 19 nt, Artificial Sequence
  Description of Artificial Sequence: Synthetic oligonucleotide
ggcguucauaggcaucagg

SEQ ID NO: 506239 - RNA, 19 nt, Artificial Sequence
  Description of Artificial Sequence: Synthetic oligonucleotide
gggucuuuccucuggggug

SEQ ID NO: 506240 - RNA, 19 nt, Artificial Sequence
  Description of Artificial Sequence: Synthetic oligonucleotide
ugcccucauacuggaagcc

SEQ ID NO: 506241 - RNA, 19 nt, Artificial Sequence
  Description of Artificial Sequence: Synthetic oligonucleotide
gugaagauacgccaggcuu

SEQ ID NO: 506242 - RNA, 19 nt, Artificial Sequence
  Description of Artificial Sequence: Synthetic oligonucleotide
accagauagugggauagau

SEQ ID NO: 506243 - RNA, 19 nt, Artificial Sequence
  Description of Artificial Sequence: Synthetic oligonucleotide
ggcuaaagccuaugguccc

SEQ ID NO: 506244 - RNA, 19 nt, Artificial Sequence
  Description of Artificial Sequence: Synthetic oligonucleotide
cugugagucgggagcgggc

SEQ ID NO: 506245 - RNA, 19 nt, Artificial Sequence
  Description of Artificial Sequence: Synthetic oligonucleotide
aggugcuuguaggaggcug

SEQ ID NO: 506246 - RNA, 19 nt, Artificial Sequence
  Description of Artificial Sequence: Synthetic oligonucleotide
cacuaugaugcgguuccag

SEQ ID NO: 506247 - RNA, 19 nt, Artificial Sequence
  Description of Artificial Sequence: Synthetic oligonucleotide
cugaugaucccaaauucau

SEQ ID NO: 506248 - RNA, 19 nt, Artificial Sequence
  Description of Artificial Sequence: Synthetic oligonucleotide
ggguagggaaaucauagcu

SEQ ID NO: 506249 - RNA, 19 nt, Artificial Sequence
  Description of Artificial Sequence: Synthetic oligonucleotide
caucucuagugccacaaua

SEQ ID NO: 506250 - RNA, 19 nt, Artificial Sequence
  Description of Artificial Sequence: Synthetic oligonucleotide
ccgcucauucuccacauag

SEQ ID NO: 506251 - RNA, 19 nt, Artificial Sequence
  Description of Artificial Sequence: Synthetic oligonucleotide
agagcuugugaggguucac

SEQ ID NO: 506252 - RNA, 19 nt, Artificial Sequence
  Description of Artificial Sequence: Synthetic oligonucleotide
cucagauagggucaauggu

SEQ ID NO: 506253 - RNA, 19 nt, Artificial Sequence
  Description of Artificial Sequence: Synthetic oligonucleotide
gacuggaauguguggcuaa

SEQ ID NO: 506254 - RNA, 19 nt, Artificial Sequence
  Description of Artificial Sequence: Synthetic oligonucleotide
uugcguucauucagggcuu

SEQ ID NO: 506255 - RNA, 19 nt, Artificial Sequence
  Description of Artificial Sequence: Synthetic oligonucleotide
uggggcuaauaguccaaau

SEQ ID NO: 506256 - RNA, 19 nt, Artificial Sequence
  Description of Artificial Sequence: Synthetic oligonucleotide
auagugggauagaucuucu

SEQ ID NO: 506257 - RNA, 19 nt, Artificial Sequence
  Description of Artificial Sequence: Synthetic oligonucleotide
cacccugguacaacucuuc

SEQ ID NO: 506258 - RNA, 19 nt, Artificial Sequence
  Description of Artificial Sequence: Synthetic oligonucleotide
cauuguuccuaacuccugu

SEQ ID NO: 506259 - RNA, 19 nt, Artificial Sequence
  Description of Artificial Sequence: Synthetic oligonucleotide
ggggcuaauaguccaaaua

SEQ ID NO: 506260 - RNA, 19 nt, Artificial Sequence
  Description of Artificial Sequence: Synthetic oligonucleotide
ccagauagugggauagauc

SEQ ID NO: 506261 - RNA, 19 nt, Artificial Sequence
  Description of Artificial Sequence: Synthetic oligonucleotide
gguuaggugguaagaagga

SEQ ID NO: 506262 - RNA, 19 nt, Artificial Sequence
  Description of Artificial Sequence: Synthetic oligonucleotide
cccugaugaucccaaauuc

SEQ ID NO: 506263 - RNA, 19 nt, Artificial Sequence
  Description of Artificial Sequence: Synthetic oligonucleotide
aggucucucccgaagggcu

SEQ ID NO: 506264 - RNA, 19 nt, Artificial Sequence
  Description of Artificial Sequence: Synthetic oligonucleotide
agguaguggucaaugcggu

SEQ ID NO: 506265 - RNA, 19 nt, Artificial Sequence
  Description of Artificial Sequence: Synthetic oligonucleotide
acaucucuagugccacaau

SEQ ID NO: 506266 - RNA, 19 nt, Artificial Sequence
  Description of Artificial Sequence: Synthetic oligonucleotide
gagucgggagcgggcauag

SEQ ID NO: 506267 - RNA, 19 nt, Artificial Sequence
  Description of Artificial Sequence: Synthetic oligonucleotide
gguagaaggccaucccgga

SEQ ID NO: 506268 - RNA, 19 nt, Artificial Sequence
  Description of Artificial Sequence: Synthetic oligonucleotide
uagugggauagaucuucuu

SEQ ID NO: 506269 - RNA, 19 nt, Artificial Sequence
  Description of Artificial Sequence: Synthetic oligonucleotide
cucaguaccaaagggcucu

SEQ ID NO: 506270 - RNA, 19 nt, Artificial Sequence
  Description of Artificial Sequence: Synthetic oligonucleotide
agaugucgccugccacauc

SEQ ID NO: 506271 - RNA, 19 nt, Artificial Sequence
  Description of Artificial Sequence: Synthetic oligonucleotide
cuugugaggguucacccau

SEQ ID NO: 506272 - RNA, 19 nt, Artificial Sequence
  Description of Artificial Sequence: Synthetic oligonucleotide
gguugggguagggaaauca

SEQ ID NO: 506273 - RNA, 19 nt, Artificial Sequence
  Description of Artificial Sequence: Synthetic oligonucleotide
gguggcacgagcccaggga

SEQ ID NO: 506274 - RNA, 19 nt, Artificial Sequence
  Description of Artificial Sequence: Synthetic oligonucleotide
ugcggacaaagugcaucug

SEQ ID NO: 506275 - RNA, 19 nt, Artificial Sequence
  Description of Artificial Sequence: Synthetic oligonucleotide
uacccauugguagcuucuc

SEQ ID NO: 506276 - RNA, 19 nt, Artificial Sequence
  Description of Artificial Sequence: Synthetic oligonucleotide
cuccacuaugaugcgguuc

SEQ ID NO: 506277 - RNA, 19 nt, Artificial Sequence
  Description of Artificial Sequence: Synthetic oligonucleotide
gaggguucacccauuugua

SEQ ID NO: 506278 - RNA, 19 nt, Artificial Sequence
  Description of Artificial Sequence: Synthetic oligonucleotide
cacccauuuguaggugccc

SEQ ID NO: 506279 - RNA, 19 nt, Artificial Sequence
  Description of Artificial Sequence: Synthetic oligonucleotide
guugguuaggggacaucuc

SEQ ID NO: 506280 - RNA, 19 nt, Artificial Sequence
  Description of Artificial Sequence: Synthetic oligonucleotide
ggucuucucacaugggugu

SEQ ID NO: 506281 - RNA, 19 nt, Artificial Sequence
  Description of Artificial Sequence: Synthetic oligonucleotide
guuaggggacaucucuagu

SEQ ID NO: 506282 - RNA, 19 nt, Artificial Sequence
  Description of Artificial Sequence: Synthetic oligonucleotide
cagccacauaggaguuacg

SEQ ID NO: 506283 - RNA, 19 nt, Artificial Sequence
  Description of Artificial Sequence: Synthetic oligonucleotide
ccuugcguucauucagggc

SEQ ID NO: 506284 - RNA, 19 nt, Artificial Sequence
  Description of Artificial Sequence: Synthetic oligonucleotide
gacacuagggagugugguu

SEQ ID NO: 506285 - RNA, 19 nt, Artificial Sequence
  Description of Artificial Sequence: Synthetic oligonucleotide
auggaguauggaguugguu

SEQ ID NO: 506286 - RNA, 19 nt, Artificial Sequence
  Description of Artificial Sequence: Synthetic oligonucleotide
ccauagacacuagggagug

SEQ ID NO: 506287 - RNA, 19 nt, Artificial Sequence
  Description of Artificial Sequence: Synthetic oligonucleotide
gcuuuaaagaagggcucac

SEQ ID NO: 506288 - RNA, 19 nt, Artificial Sequence
  Description of Artificial Sequence: Synthetic oligonucleotide
cggguagaaggccaucccg

SEQ ID NO: 506289 - RNA, 19 nt, Artificial Sequence
  Description of Artificial Sequence: Synthetic oligonucleotide
gucucaccucagccuugcg

SEQ ID NO: 506290 - RNA, 19 nt, Artificial Sequence
  Description of Artificial Sequence: Synthetic oligonucleotide
acggaacagagaggagaug

SEQ ID NO: 506291 - RNA, 19 nt, Artificial Sequence
  Description of Artificial Sequence: Synthetic oligonucleotide
gucguuccaauguggggcu

SEQ ID NO: 506292 - RNA, 19 nt, Artificial Sequence
  Description of Artificial Sequence: Synthetic oligonucleotide
ggcuucccugaguucauca

SEQ ID NO: 506293 - RNA, 19 nt, Artificial Sequence
  Description of Artificial Sequence: Synthetic oligonucleotide
uuccaauguggggcuaaua

SEQ ID NO: 506294 - RNA, 19 nt, Artificial Sequence
  Description of Artificial Sequence: Synthetic oligonucleotide
cgacccucaguaccaaagg

SEQ ID NO: 506295 - RNA, 19 nt, Artificial Sequence
  Description of Artificial Sequence: Synthetic oligonucleotide
ccuauggucccaaagucgu

SEQ ID NO: 506296 - RNA, 19 nt, Artificial Sequence
  Description of Artificial Sequence: Synthetic oligonucleotide
aauaggcgguuggccugca

SEQ ID NO: 506297 - RNA, 19 nt, Artificial Sequence
  Description of Artificial Sequence: Synthetic oligonucleotide
auaggcucuuguggagaga

SEQ ID NO: 506298 - RNA, 19 nt, Artificial Sequence
  Description of Artificial Sequence: Synthetic oligonucleotide
agauagugggauagaucuu

SEQ ID NO: 506299 - RNA, 19 nt, Artificial Sequence
  Description of Artificial Sequence: Synthetic oligonucleotide
gugguggacccacggggca

SEQ ID NO: 506300 - RNA, 19 nt, Artificial Sequence
  Description of Artificial Sequence: Synthetic oligonucleotide
agucgggagcgggcauagc

SEQ ID NO: 506301 - RNA, 19 nt, Artificial Sequence
  Description of Artificial Sequence: Synthetic oligonucleotide
aggagucuagggacagacu

SEQ ID NO: 506302 - RNA, 19 nt, Artificial Sequence
  Description of Artificial Sequence: Synthetic oligonucleotide
gaguugguuaggggacauc

SEQ ID NO: 506303 - RNA, 19 nt, Artificial Sequence
  Description of Artificial Sequence: Synthetic oligonucleotide
cuaaagccuauggucccaa

SEQ ID NO: 506304 - RNA, 19 nt, Artificial Sequence
  Description of Artificial Sequence: Synthetic oligonucleotide
guacccauugguagcuucu

SEQ ID NO: 506305 - RNA, 19 nt, Artificial Sequence
  Description of Artificial Sequence: Synthetic oligonucleotide
acgccaggcuucccugagu

SEQ ID NO: 506306 - RNA, 19 nt, Artificial Sequence
  Description of Artificial Sequence: Synthetic oligonucleotide
cuucggguagaaggccauc

SEQ ID NO: 506307 - RNA, 19 nt, Artificial Sequence
  Description of Artificial Sequence: Synthetic oligonucleotide
ggaacagccaccagauagu

SEQ ID NO: 506308 - RNA, 19 nt, Artificial Sequence
  Description of Artificial Sequence: Synthetic oligonucleotide
augucgccugccacaucuc

SEQ ID NO: 506309 - RNA, 19 nt, Artificial Sequence
  Description of Artificial Sequence: Synthetic oligonucleotide
cccauagacacuagggagu

SEQ ID NO: 506310 - RNA, 19 nt, Artificial Sequence
  Description of Artificial Sequence: Synthetic oligonucleotide
ucaguaccaaagggcucuu

SEQ ID NO: 506311 - RNA, 19 nt, Artificial Sequence
  Description of Artificial Sequence: Synthetic oligonucleotide
ggguaccccaucccaccgc

SEQ ID NO: 506312 - RNA, 19 nt, Artificial Sequence
  Description of Artificial Sequence: Synthetic oligonucleotide
ggccaggucacccgaugca

SEQ ID NO: 506313 - RNA, 19 nt, Artificial Sequence
  Description of Artificial Sequence: Synthetic oligonucleotide
cacggggcacugugggguc

SEQ ID NO: 506314 - RNA, 19 nt, Artificial Sequence
  Description of Artificial Sequence: Synthetic oligonucleotide
ccaauguggggcuaauagu

SEQ ID NO: 506315 - RNA, 19 nt, Artificial Sequence
  Description of Artificial Sequence: Synthetic oligonucleotide
guggggcuaauaguccaaa

SEQ ID NO: 506316 - RNA, 19 nt, Artificial Sequence
  Description of Artificial Sequence: Synthetic oligonucleotide
cccauuuguaggugcccuc

SEQ ID NO: 506317 - RNA, 19 nt, Artificial Sequence
  Description of Artificial Sequence: Synthetic oligonucleotide
agcgggcauagcccacaau

SEQ ID NO: 506318 - RNA, 19 nt, Artificial Sequence
  Description of Artificial Sequence: Synthetic oligonucleotide
cuagugccacaauauuguu

SEQ ID NO: 506319 - RNA, 19 nt, Artificial Sequence
  Description of Artificial Sequence: Synthetic oligonucleotide
guggcucagauagggucaa

SEQ ID NO: 506320 - RNA, 19 nt, Artificial Sequence
  Description of Artificial Sequence: Synthetic oligonucleotide
ugcguucauucagggcuuu

SEQ ID NO: 506321 - RNA, 19 nt, Artificial Sequence
  Description of Artificial Sequence: Synthetic oligonucleotide
uccccugaugcagggcauu

SEQ ID NO: 506322 - RNA, 19 nt, Artificial Sequence
  Description of Artificial Sequence: Synthetic oligonucleotide
aggcaucacccugguacaa

SEQ ID NO: 506323 - RNA, 19 nt, Artificial Sequence
  Description of Artificial Sequence: Synthetic oligonucleotide
ggacagacugauaggcucu

SEQ ID NO: 506324 - RNA, 19 nt, Artificial Sequence
  Description of Artificial Sequence: Synthetic oligonucleotide
gggagugugguuuggucuu

SEQ ID NO: 506325 - RNA, 19 nt, Artificial Sequence
  Description of Artificial Sequence: Synthetic oligonucleotide
uggacccacggggcacugu

SEQ ID NO: 506326 - RNA, 19 nt, Artificial Sequence
  Description of Artificial Sequence: Synthetic oligonucleotide
ccaccgcucauucuccaca

SEQ ID NO: 506327 - RNA, 19 nt, Artificial Sequence
  Description of Artificial Sequence: Synthetic oligonucleotide
cgggcauagcccacaauga

SEQ ID NO: 506328 - RNA, 19 nt, Artificial Sequence
  Description of Artificial Sequence: Synthetic oligonucleotide
cacgacccucaguaccaaa

SEQ ID NO: 506329 - RNA, 19 nt, Artificial Sequence
  Description of Artificial Sequence: Synthetic oligonucleotide
ucguuccaauguggggcua

SEQ ID NO: 506330 - RNA, 19 nt, Artificial Sequence
  Description of Artificial Sequence: Synthetic oligonucleotide
cuagggagugugguuuggu

SEQ ID NO: 506331 - RNA, 19 nt, Artificial Sequence
  Description of Artificial Sequence: Synthetic oligonucleotide
auccccugaugcagggcau

SEQ ID NO: 506332 - RNA, 19 nt, Artificial Sequence
  Description of Artificial Sequence: Synthetic oligonucleotide
cccaccgcucauucuccac

SEQ ID NO: 506333 - RNA, 19 nt, Artificial Sequence
  Description of Artificial Sequence: Synthetic oligonucleotide
cagcaguggugugaagaua

SEQ ID NO: 506334 - RNA, 19 nt, Artificial Sequence
  Description of Artificial Sequence: Synthetic oligonucleotide
acggggcacugugggguca

SEQ ID NO: 506335 - RNA, 19 nt, Artificial Sequence
  Description of Artificial Sequence: Synthetic oligonucleotide
cuauggucccaaagucguu

SEQ ID NO: 506336 - RNA, 19 nt, Artificial Sequence
  Description of Artificial Sequence: Synthetic oligonucleotide
gcguucauucagggcuuug

SEQ ID NO: 506337 - RNA, 19 nt, Artificial Sequence
  Description of Artificial Sequence: Synthetic oligonucleotide
guaccccaucccaccgcuc

SEQ ID NO: 506338 - RNA, 19 nt, Artificial Sequence
  Description of Artificial Sequence: Synthetic oligonucleotide
cauagacacuagggagugu

SEQ ID NO: 506339 - RNA, 19 nt, Artificial Sequence
  Description of Artificial Sequence: Synthetic oligonucleotide
gucuagggacagacugaua

SEQ ID NO: 506340 - RNA, 19 nt, Artificial Sequence
  Description of Artificial Sequence: Synthetic oligonucleotide
cacccgaugcacccaugau

SEQ ID NO: 506341 - RNA, 19 nt, Artificial Sequence
  Description of Artificial Sequence: Synthetic oligonucleotide
gugagucgggagcgggcau

SEQ ID NO: 506342 - RNA, 19 nt, Artificial Sequence
  Description of Artificial Sequence: Synthetic oligonucleotide
gcauaacaucccugaugau

SEQ ID NO: 506343 - RNA, 19 nt, Artificial Sequence
  Description of Artificial Sequence: Synthetic oligonucleotide
cacugcggacaaagugcau

SEQ ID NO: 506344 - RNA, 19 nt, Artificial Sequence
  Description of Artificial Sequence: Synthetic oligonucleotide
cacgaaucaccagcucauu

SEQ ID NO: 506345 - RNA, 19 nt, Artificial Sequence
  Description of Artificial Sequence: Synthetic oligonucleotide
gguggacccacggggcacu

SEQ ID NO: 506346 - RNA, 19 nt, Artificial Sequence
  Description of Artificial Sequence: Synthetic oligonucleotide
ccacggggcacuguggggu

SEQ ID NO: 506347 - RNA, 19 nt, Artificial Sequence
  Description of Artificial Sequence: Synthetic oligonucleotide
gguccggcucagggccacc

SEQ ID NO: 506348 - RNA, 19 nt, Artificial Sequence
  Description of Artificial Sequence: Synthetic oligonucleotide
cgcggcugccauaaacaua

SEQ ID NO: 506349 - RNA, 19 nt, Artificial Sequence
  Description of Artificial Sequence: Synthetic oligonucleotide
ccacuaugaugcgguucca

SEQ ID NO: 506350 - RNA, 19 nt, Artificial Sequence
  Description of Artificial Sequence: Synthetic oligonucleotide
gggauaggcuggggcuucu

SEQ ID NO: 506351 - RNA, 19 nt, Artificial Sequence
  Description of Artificial Sequence: Synthetic oligonucleotide
ccacgacccucaguaccaa

SEQ ID NO: 506352 - RNA, 19 nt, Artificial Sequence
  Description of Artificial Sequence: Synthetic oligonucleotide
ccgaugcacccaugaugau

SEQ ID NO: 506353 - RNA, 19 nt, Artificial Sequence
  Description of Artificial Sequence: Synthetic oligonucleotide
ccccaucccaccgcucauu

SEQ ID NO: 506354 - RNA, 19 nt, Artificial Sequence
  Description of Artificial Sequence: Synthetic oligonucleotide
aaacauaagguacaaggcc

SEQ ID NO: 506355 - RNA, 19 nt, Artificial Sequence
  Description of Artificial Sequence: Synthetic oligonucleotide
aaugcaaacggauagcaag

SEQ ID NO: 506356 - RNA, 19 nt, Artificial Sequence
  Description of Artificial Sequence: Synthetic oligonucleotide
aaaacggccaaguccaagc

SEQ ID NO: 506357 - RNA, 19 nt, Artificial Sequence
  Description of Artificial Sequence: Synthetic oligonucleotide
aguuagacaggucugaggg

SEQ ID NO: 506358 - RNA, 19 nt, Artificial Sequence
  Description of Artificial Sequence: Synthetic oligonucleotide
agaaaaugcaaacggauag

SEQ ID NO: 506359 - RNA, 19 nt, Artificial Sequence
  Description of Artificial Sequence: Synthetic oligonucleotide
uucaugucacaucagaugc

SEQ ID NO: 506360 - RNA, 19 nt, Artificial Sequence
  Description of Artificial Sequence: Synthetic oligonucleotide
auuguacacucuuuaaggc

SEQ ID NO: 506361 - RNA, 19 nt, Artificial Sequence
  Description of Artificial Sequence: Synthetic oligonucleotide
ucuucaucgaacacggccg

SEQ ID NO: 506362 - RNA, 19 nt, Artificial Sequence
  Description of Artificial Sequence: Synthetic oligonucleotide
aaagucuaaguuguaaguc

SEQ ID NO: 506363 - RNA, 19 nt, Artificial Sequence
  Description of Artificial Sequence: Synthetic oligonucleotide
auucacaagggcuucaguc

SEQ ID NO: 506364 - RNA, 19 nt, Artificial Sequence
  Description of Artificial Sequence: Synthetic oligonucleotide
uuguuuagagggaacacag

SEQ ID NO: 506365 - RNA, 19 nt, Artificial Sequence
  Description of Artificial Sequence: Synthetic oligonucleotide
aauuggaaggacaacagug

SEQ ID NO: 506366 - RNA, 19 nt, Artificial Sequence
  Description of Artificial Sequence: Synthetic oligonucleotide
cuugcuaugaauuauacua

SEQ ID NO: 506367 - RNA, 19 nt, Artificial Sequence
  Description of Artificial Sequence: Synthetic oligonucleotide
uuuagagggaacacaguag

SEQ ID NO: 506368 - RNA, 19 nt, Artificial Sequence
  Description of Artificial Sequence: Synthetic oligonucleotide
uauaaagugagaagagaac

SEQ ID NO: 506369 - RNA, 19 nt, Artificial Sequence
  Description of Artificial Sequence: Synthetic oligonucleotide
gacaacagugugcugacgg

SEQ ID NO: 506370 - RNA, 19 nt, Artificial Sequence
  Description of Artificial Sequence: Synthetic oligonucleotide
ucaaucuguggcaagggcc

SEQ ID NO: 506371 - RNA, 19 nt, Artificial Sequence
  Description of Artificial Sequence: Synthetic oligonucleotide
aaguuguaagucccacugc

SEQ ID NO: 506372 - RNA, 19 nt, Artificial Sequence
  Description of Artificial Sequence: Synthetic oligonucleotide
ggucguauugcacaaaacg

SEQ ID NO: 506373 - RNA, 19 nt, Artificial Sequence
  Description of Artificial Sequence: Synthetic oligonucleotide
uugcuaugaauuauacuag

SEQ ID NO: 506374 - RNA, 19 nt, Artificial Sequence
  Description of Artificial Sequence: Synthetic oligonucleotide
aaguuagacaggucugagg

SEQ ID NO: 506375 - RNA, 19 nt, Artificial Sequence
  Description of Artificial Sequence: Synthetic oligonucleotide
aaauguggaucaauuguac

SEQ ID NO: 506376 - RNA, 19 nt, Artificial Sequence
  Description of Artificial Sequence: Synthetic oligonucleotide
uagcaaggaauccugguag

SEQ ID NO: 506377 - RNA, 19 nt, Artificial Sequence
  Description of Artificial Sequence: Synthetic oligonucleotide
acugcauacggucaaacca

SEQ ID NO: 506378 - RNA, 19 nt, Artificial Sequence
  Description of Artificial Sequence: Synthetic oligonucleotide
aaacggauagcaaggaauc

SEQ ID NO: 506379 - RNA, 19 nt, Artificial Sequence
  Description of Artificial Sequence: Synthetic oligonucleotide
ugagacuucucuuuccuug

SEQ ID NO: 506380 - RNA, 19 nt, Artificial Sequence
  Description of Artificial Sequence: Synthetic oligonucleotide
aaaaugcaaacggauagca

SEQ ID NO: 506381 - RNA, 19 nt, Artificial Sequence
  Description of Artificial Sequence: Synthetic oligonucleotide
uaucggcuugucuucaucg

SEQ ID NO: 506382 - RNA, 19 nt, Artificial Sequence
  Description of Artificial Sequence: Synthetic oligonucleotide
uguacacucuuuaaggcaa

SEQ ID NO: 506383 - RNA, 19 nt, Artificial Sequence
  Description of Artificial Sequence: Synthetic oligonucleotide
aacucgacccugaacaugg

SEQ ID NO: 506384 - RNA, 19 nt, Artificial Sequence
  Description of Artificial Sequence: Synthetic oligonucleotide
caguagugcauauaaagug

SEQ ID NO: 506385 - RNA, 19 nt, Artificial Sequence
  Description of Artificial Sequence: Synthetic oligonucleotide
aauguggaucaauuguaca

SEQ ID NO: 506386 - RNA, 19 nt, Artificial Sequence
  Description of Artificial Sequence: Synthetic oligonucleotide
ucgaucaucugugcgaugg

SEQ ID NO: 506387 - RNA, 19 nt, Artificial Sequence
  Description of Artificial Sequence: Synthetic oligonucleotide
ucgaacacggccgaggagg

SEQ ID NO: 506388 - RNA, 19 nt, Artificial Sequence
  Description of Artificial Sequence: Synthetic oligonucleotide
gucguauugcacaaaacgg

SEQ ID NO: 506389 - RNA, 19 nt, Artificial Sequence
  Description of Artificial Sequence: Synthetic oligonucleotide
ugugcugacggucguauug

SEQ ID NO: 506390 - RNA, 19 nt, Artificial Sequence
  Description of Artificial Sequence: Synthetic oligonucleotide
uggaccacuguagagauug

SEQ ID NO: 506391 - RNA, 19 nt, Artificial Sequence
  Description of Artificial Sequence: Synthetic oligonucleotide
aauccugguaggugucggc

SEQ ID NO: 506392 - RNA, 19 nt, Artificial Sequence
  Description of Artificial Sequence: Synthetic oligonucleotide
gaauccgacauccggacug

SEQ ID NO: 506393 - RNA, 19 nt, Artificial Sequence
  Description of Artificial Sequence: Synthetic oligonucleotide
cagcguucuuucuagagcg

SEQ ID NO: 506394 - RNA, 19 nt, Artificial Sequence
  Description of Artificial Sequence: Synthetic oligonucleotide
aacggauagcaaggaaucc

SEQ ID NO: 506395 - RNA, 19 nt, Artificial Sequence
  Description of Artificial Sequence: Synthetic oligonucleotide
cuucacucgggauagguac

SEQ ID NO: 506396 - RNA, 19 nt, Artificial Sequence
  Description of Artificial Sequence: Synthetic oligonucleotide
cuucggagugucaucaucc

SEQ ID NO: 506397 - RNA, 19 nt, Artificial Sequence
  Description of Artificial Sequence: Synthetic oligonucleotide
gacaaucucccugauacag

SEQ ID NO: 506398 - RNA, 19 nt, Artificial Sequence
  Description of Artificial Sequence: Synthetic oligonucleotide
uacggucaaaccaaccuug

SEQ ID NO: 506399 - RNA, 19 nt, Artificial Sequence
  Description of Artificial Sequence: Synthetic oligonucleotide
uuguacacucuuuaaggca

SEQ ID NO: 506400 - RNA, 19 nt, Artificial Sequence
  Description of Artificial Sequence: Synthetic oligonucleotide
uucacaagggcuucagucu

SEQ ID NO: 506401 - RNA, 19 nt, Artificial Sequence
  Description of Artificial Sequence: Synthetic oligonucleotide
uuauagucggcagagcaug

SEQ ID NO: 506402 - RNA, 19 nt, Artificial Sequence
  Description of Artificial Sequence: Synthetic oligonucleotide
accacaaccggcucagaac

SEQ ID NO: 506403 - RNA, 19 nt, Artificial Sequence
  Description of Artificial Sequence: Synthetic oligonucleotide
uagagaaucugacaaucuc

SEQ ID NO: 506404 - RNA, 19 nt, Artificial Sequence
  Description of Artificial Sequence: Synthetic oligonucleotide
caccuuacacuccugaccc

SEQ ID NO: 506405 - RNA, 19 nt, Artificial Sequence
  Description of Artificial Sequence: Synthetic oligonucleotide
aagagaggcuccugauugg

SEQ ID NO: 506406 - RNA, 19 nt, Artificial Sequence
  Description of Artificial Sequence: Synthetic oligonucleotide
aacggccaaguccaagcac

SEQ ID NO: 506407 - RNA, 19 nt, Artificial Sequence
  Description of Artificial Sequence: Synthetic oligonucleotide
gagaaucugacaaucuccc

SEQ ID NO: 506408 - RNA, 19 nt, Artificial Sequence
  Description of Artificial Sequence: Synthetic oligonucleotide
caaucuguggcaagggccc

SEQ ID NO: 506409 - RNA, 19 nt, Artificial Sequence
  Description of Artificial Sequence: Synthetic oligonucleotide
ucuccugaaaaggucagcc

SEQ ID NO: 506410 - RNA, 19 nt, Artificial Sequence
  Description of Artificial Sequence: Synthetic oligonucleotide
aaaguuagacaggucugag

SEQ ID NO: 506411 - RNA, 19 nt, Artificial Sequence
  Description of Artificial Sequence: Synthetic oligonucleotide
ugcuaugaauuauacuaga

SEQ ID NO: 506412 - RNA, 19 nt, Artificial Sequence
  Description of Artificial Sequence: Synthetic oligonucleotide
gaaaaugcaaacggauagc

SEQ ID NO: 506413 - RNA, 19 nt, Artificial Sequence
  Description of Artificial Sequence: Synthetic oligonucleotide
aggaagcaccaucaaaguc

SEQ ID NO: 506414 - RNA, 19 nt, Artificial Sequence
  Description of Artificial Sequence: Synthetic oligonucleotide
acaguuuggugggagaccg

SEQ ID NO: 506415 - RNA, 19 nt, Artificial Sequence
  Description of Artificial Sequence: Synthetic oligonucleotide
uuucuagagcguccacucg

SEQ ID NO: 506416 - RNA, 19 nt, Artificial Sequence
  Description of Artificial Sequence: Synthetic oligonucleotide
uguucaugucacaucagau

SEQ ID NO: 506417 - RNA, 19 nt, Artificial Sequence
  Description of Artificial Sequence: Synthetic oligonucleotide
uauagucggcagagcaugg

SEQ ID NO: 506418 - RNA, 19 nt, Artificial Sequence
  Description of Artificial Sequence: Synthetic oligonucleotide
aaccaaccuuguuuagagg

SEQ ID NO: 506419 - RNA, 19 nt, Artificial Sequence
  Description of Artificial Sequence: Synthetic oligonucleotide
ugcagacugagcgagcggg

SEQ ID NO: 506420 - RNA, 19 nt, Artificial Sequence
  Description of Artificial Sequence: Synthetic oligonucleotide
uguaucaaucuguggcaag

SEQ ID NO: 506421 - RNA, 19 nt, Artificial Sequence
  Description of Artificial Sequence: Synthetic oligonucleotide
uucucguaucuccugaaaa

SEQ ID NO: 506422 - RNA, 19 nt, Artificial Sequence
  Description of Artificial Sequence: Synthetic oligonucleotide
auauuugucccuccauucu

SEQ ID NO: 506423 - RNA, 19 nt, Artificial Sequence
  Description of Artificial Sequence: Synthetic oligonucleotide
ugugcgauggucuucucau

SEQ ID NO: 506424 - RNA, 19 nt, Artificial Sequence
  Description of Artificial Sequence: Synthetic oligonucleotide
ugagaaggacggaaagggc

SEQ ID NO: 506425 - RNA, 19 nt, Artificial Sequence
  Description of Artificial Sequence: Synthetic oligonucleotide
uguggaucaauuguacacu

SEQ ID NO: 506426 - RNA, 19 nt, Artificial Sequence
  Description of Artificial Sequence: Synthetic oligonucleotide
cuaugaauuauacuagaaa

SEQ ID NO: 506427 - RNA, 19 nt, Artificial Sequence
  Description of Artificial Sequence: Synthetic oligonucleotide
cucguaucuccugaaaagg

SEQ ID NO: 506428 - RNA, 19 nt, Artificial Sequence
  Description of Artificial Sequence: Synthetic oligonucleotide
aguacaaggcaguuuugga

SEQ ID NO: 506429 - RNA, 19 nt, Artificial Sequence
  Description of Artificial Sequence: Synthetic oligonucleotide
aguagugcauauaaaguga

SEQ ID NO: 506430 - RNA, 19 nt, Artificial Sequence
  Description of Artificial Sequence: Synthetic oligonucleotide
ucguaucuccugaaaaggu

SEQ ID NO: 506431 - RNA, 19 nt, Artificial Sequence
  Description of Artificial Sequence: Synthetic oligonucleotide
aggcggaucggacagagga

SEQ ID NO: 506432 - RNA, 19 nt, Artificial Sequence
  Description of Artificial Sequence: Synthetic oligonucleotide
caucacaaaucuuggugag

SEQ ID NO: 506433 - RNA, 19 nt, Artificial Sequence
  Description of Artificial Sequence: Synthetic oligonucleotide
acucgguggauuuccuucg

SEQ ID NO: 506434 - RNA, 19 nt, Artificial Sequence
  Description of Artificial Sequence: Synthetic oligonucleotide
aaaacucgacccugaacau

SEQ ID NO: 506435 - RNA, 19 nt, Artificial Sequence
  Description of Artificial Sequence: Synthetic oligonucleotide
agagcguccacucgcagcu

SEQ ID NO: 506436 - RNA, 19 nt, Artificial Sequence
  Description of Artificial Sequence: Synthetic oligonucleotide
ugagaaggcggaucggaca

SEQ ID NO: 506437 - RNA, 19 nt, Artificial Sequence
  Description of Artificial Sequence: Synthetic oligonucleotide
ucaucgaacacggccgagg

SEQ ID NO: 506438 - RNA, 19 nt, Artificial Sequence
  Description of Artificial Sequence: Synthetic oligonucleotide
aguccacugucauacacgu

SEQ ID NO: 506439 - RNA, 19 nt, Artificial Sequence
  Description of Artificial Sequence: Synthetic oligonucleotide
acaaccggcucagaacugc

SEQ ID NO: 506440 - RNA, 19 nt, Artificial Sequence
  Description of Artificial Sequence: Synthetic oligonucleotide
uguaagucccacugcuggc

SEQ ID NO: 506441 - RNA, 19 nt, Artificial Sequence
  Description of Artificial Sequence: Synthetic oligonucleotide
acuugcuaugaauuauacu

SEQ ID NO: 506442 - RNA, 19 nt, Artificial Sequence
  Description of Artificial Sequence: Synthetic oligonucleotide
ucgggaaccacaaccggcu

SEQ ID NO: 506443 - RNA, 19 nt, Artificial Sequence
  Description of Artificial Sequence: Synthetic oligonucleotide
gacggaaagggcuuccuuc

SEQ ID NO: 506444 - RNA, 19 nt, Artificial Sequence
  Description of Artificial Sequence: Synthetic oligonucleotide
guagugcauauaaagugag

SEQ ID NO: 506445 - RNA, 19 nt, Artificial Sequence
  Description of Artificial Sequence: Synthetic oligonucleotide
acuagaaaaugcaaacgga

SEQ ID NO: 506446 - RNA, 19 nt, Artificial Sequence
  Description of Artificial Sequence: Synthetic oligonucleotide
cuugccucgaaccugggca

SEQ ID NO: 506447 - RNA, 19 nt, Artificial Sequence
  Description of Artificial Sequence: Synthetic oligonucleotide
cuugcagacugagcgagcg

SEQ ID NO: 506448 - RNA, 19 nt, Artificial Sequence
  Description of Artificial Sequence: Synthetic oligonucleotide
aaacggccaaguccaagca

SEQ ID NO: 506449 - RNA, 19 nt, Artificial Sequence
  Description of Artificial Sequence: Synthetic oligonucleotide
guuggggaauccgacaucc

SEQ ID NO: 506450 - RNA, 19 nt, Artificial Sequence
  Description of Artificial Sequence: Synthetic oligonucleotide
auagcaaggaauccuggua

SEQ ID NO: 506451 - RNA, 19 nt, Artificial Sequence
  Description of Artificial Sequence: Synthetic oligonucleotide
gauagguacuccugugcac

SEQ ID NO: 506452 - RNA, 19 nt, Artificial Sequence
  Description of Artificial Sequence: Synthetic oligonucleotide
agcgggaaaguguagacuu

SEQ ID NO: 506453 - RNA, 19 nt, Artificial Sequence
  Description of Artificial Sequence: Synthetic oligonucleotide
augcaaacggauagcaagg

SEQ ID NO: 506454 - RNA, 19 nt, Artificial Sequence
  Description of Artificial Sequence: Synthetic oligonucleotide
uguuuagagggaacacagu

SEQ ID NO: 506455 - RNA, 19 nt, Artificial Sequence
  Description of Artificial Sequence: Synthetic oligonucleotide
aaguguagacuuggagggg

SEQ ID NO: 506456 - RNA, 19 nt, Artificial Sequence
  Description of Artificial Sequence: Synthetic oligonucleotide
agauaaccucugcucuggc

SEQ ID NO: 506457 - RNA, 19 nt, Artificial Sequence
  Description of Artificial Sequence: Synthetic oligonucleotide
ucuagagcguccacucgca

SEQ ID NO: 506458 - RNA, 19 nt, Artificial Sequence
  Description of Artificial Sequence: Synthetic oligonucleotide
ugacccuuauagucggcag

SEQ ID NO: 506459 - RNA, 19 nt, Artificial Sequence
  Description of Artificial Sequence: Synthetic oligonucleotide
auuggaaggacaacagugu

SEQ ID NO: 506460 - RNA, 19 nt, Artificial Sequence
  Description of Artificial Sequence: Synthetic oligonucleotide
aaggacggaaagggcuucc

SEQ ID NO: 506461 - RNA, 19 nt, Artificial Sequence
  Description of Artificial Sequence: Synthetic oligonucleotide
gacggggcucuccugagag

SEQ ID NO: 506462 - RNA, 19 nt, Artificial Sequence
  Description of Artificial Sequence: Synthetic oligonucleotide
gaugcgggaguacaaggca

SEQ ID NO: 506463 - RNA, 19 nt, Artificial Sequence
  Description of Artificial Sequence: Synthetic oligonucleotide
ugucauacacguccacuuc

SEQ ID NO: 506464 - RNA, 19 nt, Artificial Sequence
  Description of Artificial Sequence: Synthetic oligonucleotide
accggcucagaacugcauc

SEQ ID NO: 506465 - RNA, 19 nt, Artificial Sequence
  Description of Artificial Sequence: Synthetic oligonucleotide
ucgggauagguacuccugu

SEQ ID NO: 506466 - RNA, 19 nt, Artificial Sequence
  Description of Artificial Sequence: Synthetic oligonucleotide
ucgugugcucaccuuacac

SEQ ID NO: 506467 - RNA, 19 nt, Artificial Sequence
  Description of Artificial Sequence: Synthetic oligonucleotide
uggaucaauuguacacucu

SEQ ID NO: 506468 - RNA, 19 nt, Artificial Sequence
  Description of Artificial Sequence: Synthetic oligonucleotide
caaauguggaucaauugua

SEQ ID NO: 506469 - RNA, 19 nt, Artificial Sequence
  Description of Artificial Sequence: Synthetic oligonucleotide
agagucccuaugcaggcug

SEQ ID NO: 506470 - RNA, 19 nt, Artificial Sequence
  Description of Artificial Sequence: Synthetic oligonucleotide
uuuaaggcaagagucccua

SEQ ID NO: 506471 - RNA, 19 nt, Artificial Sequence
  Description of Artificial Sequence: Synthetic oligonucleotide
gucgcuggcuugcagacug

SEQ ID NO: 506472 - RNA, 19 nt, Artificial Sequence
  Description of Artificial Sequence: Synthetic oligonucleotide
auagucggcagagcauggc

SEQ ID NO: 506473 - RNA, 19 nt, Artificial Sequence
  Description of Artificial Sequence: Synthetic oligonucleotide
caugucacaucagaugcug

SEQ ID NO: 506474 - RNA, 19 nt, Artificial Sequence
  Description of Artificial Sequence: Synthetic oligonucleotide
uagagcguccacucgcagc

SEQ ID NO: 506475 - RNA, 19 nt, Artificial Sequence
  Description of Artificial Sequence: Synthetic oligonucleotide
aaccuuguuuagagggaac

SEQ ID NO: 506476 - RNA, 19 nt, Artificial Sequence
  Description of Artificial Sequence: Synthetic oligonucleotide
gugucggcacugcauacgg

SEQ ID NO: 506477 - RNA, 19 nt, Artificial Sequence
  Description of Artificial Sequence: Synthetic oligonucleotide
acccugaauguaucaaucu

SEQ ID NO: 506478 - RNA, 19 nt, Artificial Sequence
  Description of Artificial Sequence: Synthetic oligonucleotide
aggucaacuugcuaugaau

SEQ ID NO: 506479 - RNA, 19 nt, Artificial Sequence
  Description of Artificial Sequence: Synthetic oligonucleotide
gcaagagucccuaugcagg

SEQ ID NO: 506480 - RNA, 19 nt, Artificial Sequence
  Description of Artificial Sequence: Synthetic oligonucleotide
cauacacguccacuucugg

SEQ ID NO: 506481 - RNA, 19 nt, Artificial Sequence
  Description of Artificial Sequence: Synthetic oligonucleotide
ugugggaaguccuguuugu

SEQ ID NO: 506482 - RNA, 19 nt, Artificial Sequence
  Description of Artificial Sequence: Synthetic oligonucleotide
aguuggggaauccgacauc

SEQ ID NO: 506483 - RNA, 19 nt, Artificial Sequence
  Description of Artificial Sequence: Synthetic oligonucleotide
gccaucgggaaccacaacc

SEQ ID NO: 506484 - RNA, 19 nt, Artificial Sequence
  Description of Artificial Sequence: Synthetic oligonucleotide
uguguauguucaugucaca

SEQ ID NO: 506485 - RNA, 19 nt, Artificial Sequence
  Description of Artificial Sequence: Synthetic oligonucleotide
gguggagcguuugacaggg

SEQ ID NO: 506486 - RNA, 19 nt, Artificial Sequence
  Description of Artificial Sequence: Synthetic oligonucleotide
guuagacaggucugagggc

SEQ ID NO: 506487 - RNA, 19 nt, Artificial Sequence
  Description of Artificial Sequence: Synthetic oligonucleotide
ggcaagagucccuaugcag

SEQ ID NO: 506488 - RNA, 19 nt, Artificial Sequence
  Description of Artificial Sequence: Synthetic oligonucleotide
auacggucaaaccaaccuu

SEQ ID NO: 506489 - RNA, 19 nt, Artificial Sequence
  Description of Artificial Sequence: Synthetic oligonucleotide
ugacagggguuguugacuc

SEQ ID NO: 506490 - RNA, 19 nt, Artificial Sequence
  Description of Artificial Sequence: Synthetic oligonucleotide
cuuguuuagagggaacaca

SEQ ID NO: 506491 - RNA, 19 nt, Artificial Sequence
  Description of Artificial Sequence: Synthetic oligonucleotide
acaaucucccugauacagg

SEQ ID NO: 506492 - RNA, 19 nt, Artificial Sequence
  Description of Artificial Sequence: Synthetic oligonucleotide
uucacucgggauagguacu

SEQ ID NO: 506493 - RNA, 19 nt, Artificial Sequence
  Description of Artificial Sequence: Synthetic oligonucleotide
cauggaguuggggaauccg

SEQ ID NO: 506494 - RNA, 19 nt, Artificial Sequence
  Description of Artificial Sequence: Synthetic oligonucleotide
ugcauacggucaaaccaac

SEQ ID NO: 506495 - RNA, 19 nt, Artificial Sequence
  Description of Artificial Sequence: Synthetic oligonucleotide
ugcgugcaccuucaaggcc

SEQ ID NO: 506496 - RNA, 19 nt, Artificial Sequence
  Description of Artificial Sequence: Synthetic oligonucleotide
acaacagugugcugacggu

SEQ ID NO: 506497 - RNA, 19 nt, Artificial Sequence
  Description of Artificial Sequence: Synthetic oligonucleotide
agaaucugacaaucucccu

SEQ ID NO: 506498 - RNA, 19 nt, Artificial Sequence
  Description of Artificial Sequence: Synthetic oligonucleotide
gauagcaaggaauccuggu

SEQ ID NO: 506499 - RNA, 19 nt, Artificial Sequence
  Description of Artificial Sequence: Synthetic oligonucleotide
cucaccuuacacuccugac

SEQ ID NO: 506500 - RNA, 19 nt, Artificial Sequence
  Description of Artificial Sequence: Synthetic oligonucleotide
aaaugcaaacggauagcaa

SEQ ID NO: 506501 - RNA, 19 nt, Artificial Sequence
  Description of Artificial Sequence: Synthetic oligonucleotide
cguauugcacaaaacggcc

SEQ ID NO: 506502 - RNA, 19 nt, Artificial Sequence
  Description of Artificial Sequence: Synthetic oligonucleotide
caucgggaaccacaaccgg

SEQ ID NO: 506503 - RNA, 19 nt, Artificial Sequence
  Description of Artificial Sequence: Synthetic oligonucleotide
ugcaaacggauagcaagga

SEQ ID NO: 506504 - RNA, 19 nt, Artificial Sequence
  Description of Artificial Sequence: Synthetic oligonucleotide
cuuccggcguggcagcugg

SEQ ID NO: 506505 - RNA, 19 nt, Artificial Sequence
  Description of Artificial Sequence: Synthetic oligonucleotide
caaagucuaaguuguaagu

SEQ ID NO: 506506 - RNA, 19 nt, Artificial Sequence
  Description of Artificial Sequence: Synthetic oligonucleotide
ugacaaucucccugauaca

SEQ ID NO: 506507 - RNA, 19 nt, Artificial Sequence
  Description of Artificial Sequence: Synthetic oligonucleotide
gacagggguuguugacucg

SEQ ID NO: 506508 - RNA, 19 nt, Artificial Sequence
  Description of Artificial Sequence: Synthetic oligonucleotide
cauacggucaaaccaaccu

SEQ ID NO: 506509 - RNA, 19 nt, Artificial Sequence
  Description of Artificial Sequence: Synthetic oligonucleotide
ucucauauucagccacgau

SEQ ID NO: 506510 - RNA, 19 nt, Artificial Sequence
  Description of Artificial Sequence: Synthetic oligonucleotide
accuuguuuagagggaaca

SEQ ID NO: 506511 - RNA, 19 nt, Artificial Sequence
  Description of Artificial Sequence: Synthetic oligonucleotide
ugcgggaguacaaggcagu

SEQ ID NO: 506512 - RNA, 19 nt, Artificial Sequence
  Description of Artificial Sequence: Synthetic oligonucleotide
uucucauauucagccacga

SEQ ID NO: 506513 - RNA, 19 nt, Artificial Sequence
  Description of Artificial Sequence: Synthetic oligonucleotide
gguggauuuccuucgugug

SEQ ID NO: 506514 - RNA, 19 nt, Artificial Sequence
  Description of Artificial Sequence: Synthetic oligonucleotide
gcaaauguggaucaauugu

SEQ ID NO: 506515 - RNA, 19 nt, Artificial Sequence
  Description of Artificial Sequence: Synthetic oligonucleotide
ccaucgggaaccacaaccg

SEQ ID NO: 506516 - RNA, 19 nt, Artificial Sequence
  Description of Artificial Sequence: Synthetic oligonucleotide
caaacggauagcaaggaau

SEQ ID NO: 506517 - RNA, 19 nt, Artificial Sequence
  Description of Artificial Sequence: Synthetic oligonucleotide
gaauuggaaggacaacagu

SEQ ID NO: 506518 - RNA, 19 nt, Artificial Sequence
  Description of Artificial Sequence: Synthetic oligonucleotide
uuggugacuucuucacccu

SEQ ID NO: 506519 - RNA, 19 nt, Artificial Sequence
  Description of Artificial Sequence: Synthetic oligonucleotide
cucgggauagguacuccug

SEQ ID NO: 506520 - RNA, 19 nt, Artificial Sequence
  Description of Artificial Sequence: Synthetic oligonucleotide
guuugacagggguuguuga

SEQ ID NO: 506521 - RNA, 19 nt, Artificial Sequence
  Description of Artificial Sequence: Synthetic oligonucleotide
acggucguauugcacaaaa

SEQ ID NO: 506522 - RNA, 19 nt, Artificial Sequence
  Description of Artificial Sequence: Synthetic oligonucleotide
cucagugggcccgaugcgg

SEQ ID NO: 506523 - RNA, 19 nt, Artificial Sequence
  Description of Artificial Sequence: Synthetic oligonucleotide
acucgggauagguacuccu

SEQ ID NO: 506524 - RNA, 19 nt, Artificial Sequence
  Description of Artificial Sequence: Synthetic oligonucleotide
cauaagguacaaggccugc

SEQ ID NO: 506525 - RNA, 19 nt, Artificial Sequence
  Description of Artificial Sequence: Synthetic oligonucleotide
gacccuuauagucggcaga

SEQ ID NO: 506526 - RNA, 19 nt, Artificial Sequence
  Description of Artificial Sequence: Synthetic oligonucleotide
acauaagguacaaggccug

SEQ ID NO: 506527 - RNA, 19 nt, Artificial Sequence
  Description of Artificial Sequence: Synthetic oligonucleotide
ucccuaugcaggcugugua

SEQ ID NO: 506528 - RNA, 19 nt, Artificial Sequence
  Description of Artificial Sequence: Synthetic oligonucleotide
cugcauacggucaaaccaa

SEQ ID NO: 506529 - RNA, 19 nt, Artificial Sequence
  Description of Artificial Sequence: Synthetic oligonucleotide
uuuccuucgugugcucacc

SEQ ID NO: 506530 - RNA, 19 nt, Artificial Sequence
  Description of Artificial Sequence: Synthetic oligonucleotide
gagaaggacggaaagggcu

SEQ ID NO: 506531 - RNA, 19 nt, Artificial Sequence
  Description of Artificial Sequence: Synthetic oligonucleotide
ucggacagaggagaccucu

SEQ ID NO: 506532 - RNA, 19 nt, Artificial Sequence
  Description of Artificial Sequence: Synthetic oligonucleotide
uggcaccugcaagagaggc

SEQ ID NO: 506533 - RNA, 19 nt, Artificial Sequence
  Description of Artificial Sequence: Synthetic oligonucleotide
gcuguguauguucauguca

SEQ ID NO: 506534 - RNA, 19 nt, Artificial Sequence
  Description of Artificial Sequence: Synthetic oligonucleotide
cagcuucccuucaauugcc

SEQ ID NO: 506535 - RNA, 19 nt, Artificial Sequence
  Description of Artificial Sequence: Synthetic oligonucleotide
uucgugugcucaccuuaca

SEQ ID NO: 506536 - RNA, 19 nt, Artificial Sequence
  Description of Artificial Sequence: Synthetic oligonucleotide
gggauagguacuccugugc

SEQ ID NO: 506537 - RNA, 19 nt, Artificial Sequence
  Description of Artificial Sequence: Synthetic oligonucleotide
gaucggacagaggagaccu

SEQ ID NO: 506538 - RNA, 19 nt, Artificial Sequence
  Description of Artificial Sequence: Synthetic oligonucleotide
auaagguacaaggccugcu

SEQ ID NO: 506539 - RNA, 19 nt, Artificial Sequence
  Description of Artificial Sequence: Synthetic oligonucleotide
aucggcuugucuucaucga

SEQ ID NO: 506540 - RNA, 19 nt, Artificial Sequence
  Description of Artificial Sequence: Synthetic oligonucleotide
gauaggcugcuuguuccug

SEQ ID NO: 506541 - RNA, 19 nt, Artificial Sequence
  Description of Artificial Sequence: Synthetic oligonucleotide
ggauagguacuccugugca

SEQ ID NO: 506542 - RNA, 19 nt, Artificial Sequence
  Description of Artificial Sequence: Synthetic oligonucleotide
ccgcaggcuagcuugauag

SEQ ID NO: 506543 - RNA, 19 nt, Artificial Sequence
  Description of Artificial Sequence: Synthetic oligonucleotide
ccaaaggucaaggccaagg

SEQ ID NO: 506544 - RNA, 19 nt, Artificial Sequence
  Description of Artificial Sequence: Synthetic oligonucleotide
cucgacccugaacauggag

SEQ ID NO: 506545 - RNA, 19 nt, Artificial Sequence
  Description of Artificial Sequence: Synthetic oligonucleotide
uuacacuccugacccuuau

SEQ ID NO: 506546 - RNA, 19 nt, Artificial Sequence
  Description of Artificial Sequence: Synthetic oligonucleotide
ugacggucguauugcacaa

SEQ ID NO: 506547 - RNA, 19 nt, Artificial Sequence
  Description of Artificial Sequence: Synthetic oligonucleotide
aucgaacacggccgaggag

SEQ ID NO: 506548 - RNA, 19 nt, Artificial Sequence
  Description of Artificial Sequence: Synthetic oligonucleotide
aucagaugcugcucgccaa

SEQ ID NO: 506549 - RNA, 19 nt, Artificial Sequence
  Description of Artificial Sequence: Synthetic oligonucleotide
ccuuccgcaggcuagcuug

SEQ ID NO: 506550 - RNA, 19 nt, Artificial Sequence
  Description of Artificial Sequence: Synthetic oligonucleotide
ugauuggagcccagcccac

SEQ ID NO: 506551 - RNA, 19 nt, Artificial Sequence
  Description of Artificial Sequence: Synthetic oligonucleotide
guaaggaggagccaagcuu

SEQ ID NO: 506552 - RNA, 19 nt, Artificial Sequence
  Description of Artificial Sequence: Synthetic oligonucleotide
cacaguuuggugggagacc

SEQ ID NO: 506553 - RNA, 19 nt, Artificial Sequence
  Description of Artificial Sequence: Synthetic oligonucleotide
ccagcguucuuucuagagc

SEQ ID NO: 506554 - RNA, 19 nt, Artificial Sequence
  Description of Artificial Sequence: Synthetic oligonucleotide
aguuuggugggagaccgau

SEQ ID NO: 506555 - RNA, 19 nt, Artificial Sequence
  Description of Artificial Sequence: Synthetic oligonucleotide
uucccgccugcuuucuuca

SEQ ID NO: 506556 - RNA, 19 nt, Artificial Sequence
  Description of Artificial Sequence: Synthetic oligonucleotide
uagguacuccugugcacac

SEQ ID NO: 506557 - RNA, 19 nt, Artificial Sequence
  Description of Artificial Sequence: Synthetic oligonucleotide
gagacgucuggugggugag

SEQ ID NO: 506558 - RNA, 19 nt, Artificial Sequence
  Description of Artificial Sequence: Synthetic oligonucleotide
uggcuaucggcuugucuuc

SEQ ID NO: 506559 - RNA, 19 nt, Artificial Sequence
  Description of Artificial Sequence: Synthetic oligonucleotide
guauugcacaaaacggcca

SEQ ID NO: 506560 - RNA, 19 nt, Artificial Sequence
  Description of Artificial Sequence: Synthetic oligonucleotide
guaccucuguuccucuuuc

SEQ ID NO: 506561 - RNA, 19 nt, Artificial Sequence
  Description of Artificial Sequence: Synthetic oligonucleotide
caucagaugcugcucgcca

SEQ ID NO: 506562 - RNA, 19 nt, Artificial Sequence
  Description of Artificial Sequence: Synthetic oligonucleotide
gcuccagcguucuuucuag

SEQ ID NO: 506563 - RNA, 19 nt, Artificial Sequence
  Description of Artificial Sequence: Synthetic oligonucleotide
cuaucggcuugucuucauc

SEQ ID NO: 506564 - RNA, 19 nt, Artificial Sequence
  Description of Artificial Sequence: Synthetic oligonucleotide
  modified_base (7)..(7): a, c, u, g, unknown or other
ggguggngcugguggagcg

SEQ ID NO: 506565 - RNA, 19 nt, Artificial Sequence
  Description of Artificial Sequence: Synthetic oligonucleotide
uugccucgaaccugggcaa

SEQ ID NO: 506566 - RNA, 19 nt, Artificial Sequence
  Description of Artificial Sequence: Synthetic oligonucleotide
augcgggaguacaaggcag

SEQ ID NO: 506567 - RNA, 19 nt, Artificial Sequence
  Description of Artificial Sequence: Synthetic oligonucleotide
uucaucgaacacggccgag

SEQ ID NO: 506568 - RNA, 19 nt, Artificial Sequence
  Description of Artificial Sequence: Synthetic oligonucleotide
cccacugcuggcuaucggc

SEQ ID NO: 506569 - RNA, 19 nt, Artificial Sequence
  Description of Artificial Sequence: Synthetic oligonucleotide
agaccucuuuggugacuuc

SEQ ID NO: 506570 - RNA, 19 nt, Artificial Sequence
  Description of Artificial Sequence: Synthetic oligonucleotide
gacauccggacuggaggag

SEQ ID NO: 506571 - RNA, 19 nt, Artificial Sequence
  Description of Artificial Sequence: Synthetic oligonucleotide
caacagugugcugacgguc

SEQ ID NO: 506572 - RNA, 19 nt, Artificial Sequence
  Description of Artificial Sequence: Synthetic oligonucleotide
cccacgugugacaggaugc

SEQ ID NO: 506573 - RNA, 19 nt, Artificial Sequence
  Description of Artificial Sequence: Synthetic oligonucleotide
ggugucggcacugcauacg

SEQ ID NO: 506574 - RNA, 19 nt, Artificial Sequence
  Description of Artificial Sequence: Synthetic oligonucleotide
gggaauccgacauccggac

SEQ ID NO: 506575 - RNA, 19 nt, Artificial Sequence
  Description of Artificial Sequence: Synthetic oligonucleotide
caucgaacacggccgagga

SEQ ID NO: 506576 - RNA, 19 nt, Artificial Sequence
  Description of Artificial Sequence: Synthetic oligonucleotide
uaccucuguuccucuuucu

SEQ ID NO: 506577 - RNA, 19 nt, Artificial Sequence
  Description of Artificial Sequence: Synthetic oligonucleotide
cuagagcguccacucgcag

SEQ ID NO: 506578 - RNA, 19 nt, Artificial Sequence
  Description of Artificial Sequence: Synthetic oligonucleotide
guuguugacucgagggguc

SEQ ID NO: 506579 - RNA, 19 nt, Artificial Sequence
  Description of Artificial Sequence: Synthetic oligonucleotide
cuaaguuguaagucccacu

SEQ ID NO: 506580 - RNA, 19 nt, Artificial Sequence
  Description of Artificial Sequence: Synthetic oligonucleotide
cuuauagucggcagagcau

SEQ ID NO: 506581 - RNA, 19 nt, Artificial Sequence
  Description of Artificial Sequence: Synthetic oligonucleotide
ugacggggcucuccugaga

SEQ ID NO: 506582 - RNA, 19 nt, Artificial Sequence
  Description of Artificial Sequence: Synthetic oligonucleotide
cugagcgagcgggaaagug

SEQ ID NO: 506583 - RNA, 19 nt, Artificial Sequence
  Description of Artificial Sequence: Synthetic oligonucleotide
agaaggacggaaagggcuu

SEQ ID NO: 506584 - RNA, 19 nt, Artificial Sequence
  Description of Artificial Sequence: Synthetic oligonucleotide
ugucggcacugcauacggu

SEQ ID NO: 506585 - RNA, 19 nt, Artificial Sequence
  Description of Artificial Sequence: Synthetic oligonucleotide
uccggacuggaggagacuu

SEQ ID NO: 506586 - RNA, 19 nt, Artificial Sequence
  Description of Artificial Sequence: Synthetic oligonucleotide
agacgucuggugggugagc

SEQ ID NO: 506587 - RNA, 19 nt, Artificial Sequence
  Description of Artificial Sequence: Synthetic oligonucleotide
caaaggucaaggccaaggu

SEQ ID NO: 506588 - RNA, 19 nt, Artificial Sequence
  Description of Artificial Sequence: Synthetic oligonucleotide
aaggcggaucggacagagg

SEQ ID NO: 506589 - RNA, 19 nt, Artificial Sequence
  Description of Artificial Sequence: Synthetic oligonucleotide
cugcaagagaggcuccuga

SEQ ID NO: 506590 - RNA, 19 nt, Artificial Sequence
  Description of Artificial Sequence: Synthetic oligonucleotide
ugcuggaguuuugcugcag

SEQ ID NO: 506591 - RNA, 19 nt, Artificial Sequence
  Description of Artificial Sequence: Synthetic oligonucleotide
uccggcguggcagcuggag

SEQ ID NO: 506592 - RNA, 19 nt, Artificial Sequence
  Description of Artificial Sequence: Synthetic oligonucleotide
ggaguuggggaauccgaca

SEQ ID NO: 506593 - RNA, 19 nt, Artificial Sequence
  Description of Artificial Sequence: Synthetic oligonucleotide
gacccugaacauggaguug

SEQ ID NO: 506594 - RNA, 19 nt, Artificial Sequence
  Description of Artificial Sequence: Synthetic oligonucleotide
gaaggacggaaagggcuuc

SEQ ID NO: 506595 - RNA, 19 nt, Artificial Sequence
  Description of Artificial Sequence: Synthetic oligonucleotide
cacaaccggcucagaacug

SEQ ID NO: 506596 - RNA, 19 nt, Artificial Sequence
  Description of Artificial Sequence: Synthetic oligonucleotide
gggaguacaaggcaguuuu

SEQ ID NO: 506597 - RNA, 19 nt, Artificial Sequence
  Description of Artificial Sequence: Synthetic oligonucleotide
acauccggacuggaggaga

SEQ ID NO: 506598 - RNA, 19 nt, Artificial Sequence
  Description of Artificial Sequence: Synthetic oligonucleotide
acgucuggugggugagcag

SEQ ID NO: 506599 - RNA, 19 nt, Artificial Sequence
  Description of Artificial Sequence: Synthetic oligonucleotide
ggaucaauuguacacucuu

SEQ ID NO: 506600 - RNA, 19 nt, Artificial Sequence
  Description of Artificial Sequence: Synthetic oligonucleotide
ugguaggugucggcacugc

SEQ ID NO: 506601 - RNA, 19 nt, Artificial Sequence
  Description of Artificial Sequence: Synthetic oligonucleotide
guugacucgaggggucuca

SEQ ID NO: 506602 - RNA, 19 nt, Artificial Sequence
  Description of Artificial Sequence: Synthetic oligonucleotide
cugacccuuauagucggca

SEQ ID NO: 506603 - RNA, 19 nt, Artificial Sequence
  Description of Artificial Sequence: Synthetic oligonucleotide
ggccuugccucgaaccugg

SEQ ID NO: 506604 - RNA, 19 nt, Artificial Sequence
  Description of Artificial Sequence: Synthetic oligonucleotide
accuuacacuccugacccu

SEQ ID NO: 506605 - RNA, 19 nt, Artificial Sequence
  Description of Artificial Sequence: Synthetic oligonucleotide
gaacacaguagugcauaua

SEQ ID NO: 506606 - RNA, 19 nt, Artificial Sequence
  Description of Artificial Sequence: Synthetic oligonucleotide
ggagacgucugguggguga

SEQ ID NO: 506607 - RNA, 19 nt, Artificial Sequence
  Description of Artificial Sequence: Synthetic oligonucleotide
gaucaauuguacacucuuu

SEQ ID NO: 506608 - RNA, 19 nt, Artificial Sequence
  Description of Artificial Sequence: Synthetic oligonucleotide
ccuuguuuagagggaacac

SEQ ID NO: 506609 - RNA, 19 nt, Artificial Sequence
  Description of Artificial Sequence: Synthetic oligonucleotide
acggucaaaccaaccuugu

SEQ ID NO: 506610 - RNA, 19 nt, Artificial Sequence
  Description of Artificial Sequence: Synthetic oligonucleotide
ggaucggacagaggagacc

SEQ ID NO: 506611 - RNA, 19 nt, Artificial Sequence
  Description of Artificial Sequence: Synthetic oligonucleotide
uguugacucgaggggucuc

SEQ ID NO: 506612 - RNA, 19 nt, Artificial Sequence
  Description of Artificial Sequence: Synthetic oligonucleotide
uccuucgugugcucaccuu

SEQ ID NO: 506613 - RNA, 19 nt, Artificial Sequence
  Description of Artificial Sequence: Synthetic oligonucleotide
  modified_base (2)..(2): a, c, u, g, unknown or other
gngcugguggagcguuuga

SEQ ID NO: 506614 - RNA, 19 nt, Artificial Sequence
  Description of Artificial Sequence: Synthetic oligonucleotide
gaccgauuucucucucugu

SEQ ID NO: 506615 - RNA, 19 nt, Artificial Sequence
  Description of Artificial Sequence: Synthetic oligonucleotide
cucgaucaucugugcgaug

SEQ ID NO: 506616 - RNA, 19 nt, Artificial Sequence
  Description of Artificial Sequence: Synthetic oligonucleotide
gugggagaccgauuucucu

SEQ ID NO: 506617 - RNA, 19 nt, Artificial Sequence
  Description of Artificial Sequence: Synthetic oligonucleotide
uggagacgucuggugggug

SEQ ID NO: 506618 - RNA, 19 nt, Artificial Sequence
  Description of Artificial Sequence: Synthetic oligonucleotide
gaacacggccgaggaggag

SEQ ID NO: 506619 - RNA, 19 nt, Artificial Sequence
  Description of Artificial Sequence: Synthetic oligonucleotide
cuuacacuccugacccuua

SEQ ID NO: 506620 - RNA, 19 nt, Artificial Sequence
  Description of Artificial Sequence: Synthetic oligonucleotide
gcaaacggauagcaaggaa

SEQ ID NO: 506621 - RNA, 19 nt, Artificial Sequence
  Description of Artificial Sequence: Synthetic oligonucleotide
agucccuaugcaggcugug

SEQ ID NO: 506622 - RNA, 19 nt, Artificial Sequence
  Description of Artificial Sequence: Synthetic oligonucleotide
caaccggcucagaacugca

SEQ ID NO: 506623 - RNA, 19 nt, Artificial Sequence
  Description of Artificial Sequence: Synthetic oligonucleotide
aaccggcucagaacugcau

SEQ ID NO: 506624 - RNA, 19 nt, Artificial Sequence
  Description of Artificial Sequence: Synthetic oligonucleotide
aggacggaaagggcuuccu

SEQ ID NO: 506625 - RNA, 19 nt, Artificial Sequence
  Description of Artificial Sequence: Synthetic oligonucleotide
  modified_base (3)..(3): a, c, u, g, unknown or other
ggngcugguggagcguuug

SEQ ID NO: 506626 - RNA, 19 nt, Artificial Sequence
  Description of Artificial Sequence: Synthetic oligonucleotide
ccuaugcaggcuguguaug

SEQ ID NO: 506627 - RNA, 19 nt, Artificial Sequence
  Description of Artificial Sequence: Synthetic oligonucleotide
cugcucgccaaaggucaag

SEQ ID NO: 506628 - RNA, 19 nt, Artificial Sequence
  Description of Artificial Sequence: Synthetic oligonucleotide
aucggacagaggagaccuc

SEQ ID NO: 506629 - RNA, 19 nt, Artificial Sequence
  Description of Artificial Sequence: Synthetic oligonucleotide
  modified_base (4)..(4): a, c, u, g, unknown or other
uggngcugguggagcguuu

SEQ ID NO: 506630 - RNA, 19 nt, Artificial Sequence
  Description of Artificial Sequence: Synthetic oligonucleotide
ggaguacaaggcaguuuug

SEQ ID NO: 506631 - RNA, 19 nt, Artificial Sequence
  Description of Artificial Sequence: Synthetic oligonucleotide
gagcgggaaaguguagacu

SEQ ID NO: 506632 - RNA, 19 nt, Artificial Sequence
  Description of Artificial Sequence: Synthetic oligonucleotide
agguacuccugugcacacu

SEQ ID NO: 506633 - RNA, 19 nt, Artificial Sequence
  Description of Artificial Sequence: Synthetic oligonucleotide
cuuccgcaggcuagcuuga

SEQ ID NO: 506634 - RNA, 19 nt, Artificial Sequence
  Description of Artificial Sequence: Synthetic oligonucleotide
uccaccucagugggcccga

SEQ ID NO: 506635 - RNA, 19 nt, Artificial Sequence
  Description of Artificial Sequence: Synthetic oligonucleotide
acacggccgaggaggagug

SEQ ID NO: 506636 - RNA, 19 nt, Artificial Sequence
  Description of Artificial Sequence: Synthetic oligonucleotide
ggacaacagugugcugacg

SEQ ID NO: 506637 - RNA, 19 nt, Artificial Sequence
  Description of Artificial Sequence: Synthetic oligonucleotide
ggcuagcuugauaggcugc

SEQ ID NO: 506638 - RNA, 19 nt, Artificial Sequence
  Description of Artificial Sequence: Synthetic oligonucleotide
agcguucuuucuagagcgu

SEQ ID NO: 506639 - RNA, 19 nt, Artificial Sequence
  Description of Artificial Sequence: Synthetic oligonucleotide
agaaggcggaucggacaga

SEQ ID NO: 506640 - RNA, 19 nt, Artificial Sequence
  Description of Artificial Sequence: Synthetic oligonucleotide
agcgagcgggaaaguguag

SEQ ID NO: 506641 - RNA, 19 nt, Artificial Sequence
  Description of Artificial Sequence: Synthetic oligonucleotide
guaggugucggcacugcau

SEQ ID NO: 506642 - RNA, 19 nt, Artificial Sequence
  Description of Artificial Sequence: Synthetic oligonucleotide
gguacuccugugcacacuu

SEQ ID NO: 506643 - RNA, 19 nt, Artificial Sequence
  Description of Artificial Sequence: Synthetic oligonucleotide
ggagaccgauuucucucuc

SEQ ID NO: 506644 - RNA, 19 nt, Artificial Sequence
  Description of Artificial Sequence: Synthetic oligonucleotide
ccacaaccggcucagaacu

SEQ ID NO: 506645 - RNA, 19 nt, Artificial Sequence
  Description of Artificial Sequence: Synthetic oligonucleotide
gcguucuuucuagagcguc

SEQ ID NO: 506646 - RNA, 19 nt, Artificial Sequence
  Description of Artificial Sequence: Synthetic oligonucleotide
gcugacggucguauugcac

SEQ ID NO: 506647 - RNA, 19 nt, Artificial Sequence
  Description of Artificial Sequence: Synthetic oligonucleotide
cuccagcguucuuucuaga

SEQ ID NO: 506648 - RNA, 19 nt, Artificial Sequence
  Description of Artificial Sequence: Synthetic oligonucleotide
  modified_base (8)..(8): a, c, u, g, unknown or other
gggguggngcugguggagc

SEQ ID NO: 506649 - RNA, 19 nt, Artificial Sequence
  Description of Artificial Sequence: Synthetic oligonucleotide
gggagaccgauuucucucu

SEQ ID NO: 506650 - RNA, 19 nt, Artificial Sequence
  Description of Artificial Sequence: Synthetic oligonucleotide
cucuggcaccugcaagaga

SEQ ID NO: 506651 - RNA, 19 nt, Artificial Sequence
  Description of Artificial Sequence: Synthetic oligonucleotide
ccugagaggugucaaacau

SEQ ID NO: 506652 - RNA, 19 nt, Artificial Sequence
  Description of Artificial Sequence: Synthetic oligonucleotide
cccgaugcgggaguacaag

SEQ ID NO: 506653 - RNA, 19 nt, Artificial Sequence
  Description of Artificial Sequence: Synthetic oligonucleotide
gcgggaaaguguagacuug

SEQ ID NO: 506654 - RNA, 19 nt, Artificial Sequence
  Description of Artificial Sequence: Synthetic oligonucleotide
gcgagcgggaaaguguaga

SEQ ID NO: 506655 - RNA, 19 nt, Artificial Sequence
  Description of Artificial Sequence: Synthetic oligonucleotide
cgcaggcuagcuugauagg

SEQ ID NO: 506656 - RNA, 19 nt, Artificial Sequence
  Description of Artificial Sequence: Synthetic oligonucleotide
gacggucguauugcacaaa

SEQ ID NO: 506657 - RNA, 19 nt, Artificial Sequence
  Description of Artificial Sequence: Synthetic oligonucleotide
cacggacucgguggauuuc

SEQ ID NO: 506658 - RNA, 19 nt, Artificial Sequence
  Description of Artificial Sequence: Synthetic oligonucleotide
caguuuggugggagaccga

SEQ ID NO: 506659 - RNA, 19 nt, Artificial Sequence
  Description of Artificial Sequence: Synthetic oligonucleotide
ggaacacaguagugcauau

SEQ ID NO: 506660 - RNA, 19 nt, Artificial Sequence
  Description of Artificial Sequence: Synthetic oligonucleotide
ugccucgaaccugggcaau

SEQ ID NO: 506661 - RNA, 19 nt, Artificial Sequence
  Description of Artificial Sequence: Synthetic oligonucleotide
ugcuuccggcguggcagcu

SEQ ID NO: 506662 - RNA, 19 nt, Artificial Sequence
  Description of Artificial Sequence: Synthetic oligonucleotide
ucccgccugcuuucuucau

SEQ ID NO: 506663 - RNA, 19 nt, Artificial Sequence
  Description of Artificial Sequence: Synthetic oligonucleotide
ccugacccuuauagucggc

SEQ ID NO: 506664 - RNA, 19 nt, Artificial Sequence
  Description of Artificial Sequence: Synthetic oligonucleotide
cggucguauugcacaaaac

SEQ ID NO: 506665 - RNA, 19 nt, Artificial Sequence
  Description of Artificial Sequence: Synthetic oligonucleotide
uuccggcguggcagcugga

SEQ ID NO: 506666 - RNA, 19 nt, Artificial Sequence
  Description of Artificial Sequence: Synthetic oligonucleotide
gcuugcagacugagcgagc

SEQ ID NO: 506667 - RNA, 19 nt, Artificial Sequence
  Description of Artificial Sequence: Synthetic oligonucleotide
gcgugcaccuucaaggccu

SEQ ID NO: 506668 - RNA, 19 nt, Artificial Sequence
  Description of Artificial Sequence: Synthetic oligonucleotide
ggaccacuguagagauugc

SEQ ID NO: 506669 - RNA, 19 nt, Artificial Sequence
  Description of Artificial Sequence: Synthetic oligonucleotide
ggaauccgacauccggacu

SEQ ID NO: 506670 - RNA, 19 nt, Artificial Sequence
  Description of Artificial Sequence: Synthetic oligonucleotide
ggcuaucggcuugucuuca

SEQ ID NO: 506671 - RNA, 19 nt, Artificial Sequence
  Description of Artificial Sequence: Synthetic oligonucleotide
acucgacccugaacaugga

SEQ ID NO: 506672 - RNA, 19 nt, Artificial Sequence
  Description of Artificial Sequence: Synthetic oligonucleotide
cucgguggauuuccuucgu

SEQ ID NO: 506673 - RNA, 19 nt, Artificial Sequence
  Description of Artificial Sequence: Synthetic oligonucleotide
ggccaucgggaaccacaac

SEQ ID NO: 506674 - RNA, 19 nt, Artificial Sequence
  Description of Artificial Sequence: Synthetic oligonucleotide
ccaucaaagucgcuggcuu

SEQ ID NO: 506675 - RNA, 19 nt, Artificial Sequence
  Description of Artificial Sequence: Synthetic oligonucleotide
gcagacugagcgagcggga

SEQ ID NO: 506676 - RNA, 19 nt, Artificial Sequence
  Description of Artificial Sequence: Synthetic oligonucleotide
cuucugcgugcaccuucaa

SEQ ID NO: 506677 - RNA, 19 nt, Artificial Sequence
  Description of Artificial Sequence: Synthetic oligonucleotide
ggagcguuugacagggguu

SEQ ID NO: 506678 - RNA, 19 nt, Artificial Sequence
  Description of Artificial Sequence: Synthetic oligonucleotide
  modified_base (5)..(5): a, c, u, g, unknown or other
guggngcugguggagcguu

SEQ ID NO: 506679 - RNA, 19 nt, Artificial Sequence
  Description of Artificial Sequence: Synthetic oligonucleotide
cgaacacggccgaggagga

SEQ ID NO: 506680 - RNA, 19 nt, Artificial Sequence
  Description of Artificial Sequence: Synthetic oligonucleotide
ggacggaaagggcuuccuu

SEQ ID NO: 506681 - RNA, 19 nt, Artificial Sequence
  Description of Artificial Sequence: Synthetic oligonucleotide
ccgccugcuuucuucauau

SEQ ID NO: 506682 - RNA, 19 nt, Artificial Sequence
  Description of Artificial Sequence: Synthetic oligonucleotide
gcuaucggcuugucuucau

SEQ ID NO: 506683 - RNA, 19 nt, Artificial Sequence
  Description of Artificial Sequence: Synthetic oligonucleotide
cccuaugcaggcuguguau

SEQ ID NO: 506684 - RNA, 19 nt, Artificial Sequence
  Description of Artificial Sequence: Synthetic oligonucleotide
  modified_base (6)..(6): a, c, u, g, unknown or other
gguggngcugguggagcgu

SEQ ID NO: 506685 - RNA, 19 nt, Artificial Sequence
  Description of Artificial Sequence: Synthetic oligonucleotide
cauuggcccuguccaguuu

SEQ ID NO: 506686 - RNA, 19 nt, Artificial Sequence
  Description of Artificial Sequence: Synthetic oligonucleotide
  modified_base (9)..(9): a, c, u, g, unknown or other
cgggguggngcugguggag

SEQ ID NO: 506687 - RNA, 19 nt, Artificial Sequence
  Description of Artificial Sequence: Synthetic oligonucleotide
gcugcucgccaaaggucaa

SEQ ID NO: 506688 - RNA, 19 nt, Artificial Sequence
  Description of Artificial Sequence: Synthetic oligonucleotide
cccgccugcuuucuucaua

SEQ ID NO: 506689 - RNA, 19 nt, Artificial Sequence
  Description of Artificial Sequence: Synthetic oligonucleotide
ccucgaucaucugugcgau

SEQ ID NO: 506690 - RNA, 19 nt, Artificial Sequence
  Description of Artificial Sequence: Synthetic oligonucleotide
ccacgugugacaggaugcu

SEQ ID NO: 506691 - RNA, 19 nt, Artificial Sequence
  Description of Artificial Sequence: Synthetic oligonucleotide
cacggccgaggaggaguga

SEQ ID NO: 506692 - RNA, 19 nt, Artificial Sequence
  Description of Artificial Sequence: Synthetic oligonucleotide
gcccgaugcgggaguacaa

SEQ ID NO: 506693 - RNA, 19 nt, Artificial Sequence
  Description of Artificial Sequence: Synthetic oligonucleotide
gggcccgaugcgggaguac

SEQ ID NO: 506694 - RNA, 19 nt, Artificial Sequence
  Description of Artificial Sequence: Synthetic oligonucleotide
cggcacugcauacggucaa

SEQ ID NO: 506695 - RNA, 19 nt, Artificial Sequence
  Description of Artificial Sequence: Synthetic oligonucleotide
cgaucaucugugcgauggu

SEQ ID NO: 506696 - RNA, 19 nt, Artificial Sequence
  Description of Artificial Sequence: Synthetic oligonucleotide
gcguuugacagggguuguu

SEQ ID NO: 506697 - RNA, 19 nt, Artificial Sequence
  Description of Artificial Sequence: Synthetic oligonucleotide
ccaucacuucccgccugcu

SEQ ID NO: 506698 - RNA, 19 nt, Artificial Sequence
  Description of Artificial Sequence: Synthetic oligonucleotide
gauuuggcgacauugaagc

SEQ ID NO: 506699 - RNA, 19 nt, Artificial Sequence
  Description of Artificial Sequence: Synthetic oligonucleotide
auugagacgaagcuggacg

SEQ ID NO: 506700 - RNA, 19 nt, Artificial Sequence
  Description of Artificial Sequence: Synthetic oligonucleotide
ugaucaaccagccaggcca

SEQ ID NO: 506701 - RNA, 19 nt, Artificial Sequence
  Description of Artificial Sequence: Synthetic oligonucleotide
aauauucacgcacgccucc

SEQ ID NO: 506702 - RNA, 19 nt, Artificial Sequence
  Description of Artificial Sequence: Synthetic oligonucleotide
ugugagauggcccguaagg

SEQ ID NO: 506703 - RNA, 19 nt, Artificial Sequence
  Description of Artificial Sequence: Synthetic oligonucleotide
uaugggagguacauggugg

SEQ ID NO: 506704 - RNA, 19 nt, Artificial Sequence
  Description of Artificial Sequence: Synthetic oligonucleotide
gauacuauugagacgaagc

SEQ ID NO: 506705 - RNA, 19 nt, Artificial Sequence
  Description of Artificial Sequence: Synthetic oligonucleotide
acuauugagacgaagcugg

SEQ ID NO: 506706 - RNA, 19 nt, Artificial Sequence
  Description of Artificial Sequence: Synthetic oligonucleotide
augauaguggcaugggccc

SEQ ID NO: 506707 - RNA, 19 nt, Artificial Sequence
  Description of Artificial Sequence: Synthetic oligonucleotide
gacacgaguuccuugaugc

SEQ ID NO: 506708 - RNA, 19 nt, Artificial Sequence
  Description of Artificial Sequence: Synthetic oligonucleotide
ugaggguucccuauuacag

SEQ ID NO: 506709 - RNA, 19 nt, Artificial Sequence
  Description of Artificial Sequence: Synthetic oligonucleotide
aguacugucgaaguucugc

SEQ ID NO: 506710 - RNA, 19 nt, Artificial Sequence
  Description of Artificial Sequence: Synthetic oligonucleotide
acagauaagucucuccagg

SEQ ID NO: 506711 - RNA, 19 nt, Artificial Sequence
  Description of Artificial Sequence: Synthetic oligonucleotide
gauucuaccgccuugucuc

SEQ ID NO: 506712 - RNA, 19 nt, Artificial Sequence
  Description of Artificial Sequence: Synthetic oligonucleotide
aggugaaccagucuccacc

SEQ ID NO: 506713 - RNA, 19 nt, Artificial Sequence
  Description of Artificial Sequence: Synthetic oligonucleotide
ucacagaacucuuugaccu

SEQ ID NO: 506714 - RNA, 19 nt, Artificial Sequence
  Description of Artificial Sequence: Synthetic oligonucleotide
gauagcguagacaugauca

SEQ ID NO: 506715 - RNA, 19 nt, Artificial Sequence
  Description of Artificial Sequence: Synthetic oligonucleotide
cuugauacuauugagacga

SEQ ID NO: 506716 - RNA, 19 nt, Artificial Sequence
  Description of Artificial Sequence: Synthetic oligonucleotide
ugacuugacaugcugguug

SEQ ID NO: 506717 - RNA, 19 nt, Artificial Sequence
  Description of Artificial Sequence: Synthetic oligonucleotide
aaccccaagggccaaggcg

SEQ ID NO: 506718 - RNA, 19 nt, Artificial Sequence
  Description of Artificial Sequence: Synthetic oligonucleotide
agucauucggugcagguag

SEQ ID NO: 506719 - RNA, 19 nt, Artificial Sequence
  Description of Artificial Sequence: Synthetic oligonucleotide
guucguucaaccccaaggg

SEQ ID NO: 506720 - RNA, 19 nt, Artificial Sequence
  Description of Artificial Sequence: Synthetic oligonucleotide
uugaugcagggcaagaucu

SEQ ID NO: 506721 - RNA, 19 nt, Artificial Sequence
  Description of Artificial Sequence: Synthetic oligonucleotide
ucguucaaccccaagggcc

SEQ ID NO: 506722 - RNA, 19 nt, Artificial Sequence
  Description of Artificial Sequence: Synthetic oligonucleotide
ucuugauacuauugagacg

SEQ ID NO: 506723 - RNA, 19 nt, Artificial Sequence
  Description of Artificial Sequence: Synthetic oligonucleotide
uuagcugagccaagaagag

SEQ ID NO: 506724 - RNA, 19 nt, Artificial Sequence
  Description of Artificial Sequence: Synthetic oligonucleotide
agcguagacaugaucaacc

SEQ ID NO: 506725 - RNA, 19 nt, Artificial Sequence
  Description of Artificial Sequence: Synthetic oligonucleotide
uuagagaacauggggauga

SEQ ID NO: 506726 - RNA, 19 nt, Artificial Sequence
  Description of Artificial Sequence: Synthetic oligonucleotide
ugauauccugcccacagac

SEQ ID NO: 506727 - RNA, 19 nt, Artificial Sequence
  Description of Artificial Sequence: Synthetic oligonucleotide
uucugguucguucaacccc

SEQ ID NO: 506728 - RNA, 19 nt, Artificial Sequence
  Description of Artificial Sequence: Synthetic oligonucleotide
uggagaguggacaccagag

SEQ ID NO: 506729 - RNA, 19 nt, Artificial Sequence
  Description of Artificial Sequence: Synthetic oligonucleotide
auacuauugagacgaagcu

SEQ ID NO: 506730 - RNA, 19 nt, Artificial Sequence
  Description of Artificial Sequence: Synthetic oligonucleotide
cagguuagagaacaugggg

SEQ ID NO: 506731 - RNA, 19 nt, Artificial Sequence
  Description of Artificial Sequence: Synthetic oligonucleotide
ucugacacgaguuccuuga

SEQ ID NO: 506732 - RNA, 19 nt, Artificial Sequence
  Description of Artificial Sequence: Synthetic oligonucleotide
ugugugaagaguagggaaa

SEQ ID NO: 506733 - RNA, 19 nt, Artificial Sequence
  Description of Artificial Sequence: Synthetic oligonucleotide
uuaucucaggcccuacugc

SEQ ID NO: 506734 - RNA, 19 nt, Artificial Sequence
  Description of Artificial Sequence: Synthetic oligonucleotide
cauacgaagaaccgugggc

SEQ ID NO: 506735 - RNA, 19 nt, Artificial Sequence
  Description of Artificial Sequence: Synthetic oligonucleotide
gacauuggcgacugggucc

SEQ ID NO: 506736 - RNA, 19 nt, Artificial Sequence
  Description of Artificial Sequence: Synthetic oligonucleotide
ucugguucguucaacccca

SEQ ID NO: 506737 - RNA, 19 nt, Artificial Sequence
  Description of Artificial Sequence: Synthetic oligonucleotide
ucgucuaugagcaccgcga

SEQ ID NO: 506738 - RNA, 19 nt, Artificial Sequence
  Description of Artificial Sequence: Synthetic oligonucleotide
guaguuagggucuccagac

SEQ ID NO: 506739 - RNA, 19 nt, Artificial Sequence
  Description of Artificial Sequence: Synthetic oligonucleotide
gagugcucgugugagaugg

SEQ ID NO: 506740 - RNA, 19 nt, Artificial Sequence
  Description of Artificial Sequence: Synthetic oligonucleotide
guggagagcuucuugauac

SEQ ID NO: 506741 - RNA, 19 nt, Artificial Sequence
  Description of Artificial Sequence: Synthetic oligonucleotide
aaccaaaguggugaagguc

SEQ ID NO: 506742 - RNA, 19 nt, Artificial Sequence
  Description of Artificial Sequence: Synthetic oligonucleotide
caucacuaaagccuccagg

SEQ ID NO: 506743 - RNA, 19 nt, Artificial Sequence
  Description of Artificial Sequence: Synthetic oligonucleotide
uguucagccguaccucagg

SEQ ID NO: 506744 - RNA, 19 nt, Artificial Sequence
  Description of Artificial Sequence: Synthetic oligonucleotide
cagggagugacagucaugg

SEQ ID NO: 506745 - RNA, 19 nt, Artificial Sequence
  Description of Artificial Sequence: Synthetic oligonucleotide
gacagauaagucucuccag

SEQ ID NO: 506746 - RNA, 19 nt, Artificial Sequence
  Description of Artificial Sequence: Synthetic oligonucleotide
uugggagguggacagauaa

SEQ ID NO: 506747 - RNA, 19 nt, Artificial Sequence
  Description of Artificial Sequence: Synthetic oligonucleotide
guucacgcaguccagguug

SEQ ID NO: 506748 - RNA, 19 nt, Artificial Sequence
  Description of Artificial Sequence: Synthetic oligonucleotide
caaugguucuucuuccagc

SEQ ID NO: 506749 - RNA, 19 nt, Artificial Sequence
  Description of Artificial Sequence: Synthetic oligonucleotide
aagaguguagucauucggu

SEQ ID NO: 506750 - RNA, 19 nt, Artificial Sequence
  Description of Artificial Sequence: Synthetic oligonucleotide
agaguguagucauucggug

SEQ ID NO: 506751 - RNA, 19 nt, Artificial Sequence
  Description of Artificial Sequence: Synthetic oligonucleotide
uacuauugagacgaagcug

SEQ ID NO: 506752 - RNA, 19 nt, Artificial Sequence
  Description of Artificial Sequence: Synthetic oligonucleotide
cuucacuagaggcacgaag

SEQ ID NO: 506753 - RNA, 19 nt, Artificial Sequence
  Description of Artificial Sequence: Synthetic oligonucleotide
cuguugucaagaauggguc

SEQ ID NO: 506754 - RNA, 19 nt, Artificial Sequence
  Description of Artificial Sequence: Synthetic oligonucleotide
gaugauguucagccguacc

SEQ ID NO: 506755 - RNA, 19 nt, Artificial Sequence
  Description of Artificial Sequence: Synthetic oligonucleotide
uguauucaaugauggccag

SEQ ID NO: 506756 - RNA, 19 nt, Artificial Sequence
  Description of Artificial Sequence: Synthetic oligonucleotide
aguuguucggccaaggcca

SEQ ID NO: 506757 - RNA, 19 nt, Artificial Sequence
  Description of Artificial Sequence: Synthetic oligonucleotide
uuugcccagaaugggagag

SEQ ID NO: 506758 - RNA, 19 nt, Artificial Sequence
  Description of Artificial Sequence: Synthetic oligonucleotide
uucguucaaccccaagggc

SEQ ID NO: 506759 - RNA, 19 nt, Artificial Sequence
  Description of Artificial Sequence: Synthetic oligonucleotide
agggcaagagcucacuucu

SEQ ID NO: 506760 - RNA, 19 nt, Artificial Sequence
  Description of Artificial Sequence: Synthetic oligonucleotide
auacgaagaaccgugggca

SEQ ID NO: 506761 - RNA, 19 nt, Artificial Sequence
  Description of Artificial Sequence: Synthetic oligonucleotide
gaugggguagagcgagucg

SEQ ID NO: 506762 - RNA, 19 nt, Artificial Sequence
  Description of Artificial Sequence: Synthetic oligonucleotide
agauaagucucuccaggcu

SEQ ID NO: 506763 - RNA, 19 nt, Artificial Sequence
  Description of Artificial Sequence: Synthetic oligonucleotide
ugauacuauugagacgaag

SEQ ID NO: 506764 - RNA, 19 nt, Artificial Sequence
  Description of Artificial Sequence: Synthetic oligonucleotide
uucggccaaggccaagagg

SEQ ID NO: 506765 - RNA, 19 nt, Artificial Sequence
  Description of Artificial Sequence: Synthetic oligonucleotide
cauguagcggacucgccag

SEQ ID NO: 506766 - RNA, 19 nt, Artificial Sequence
  Description of Artificial Sequence: Synthetic oligonucleotide
acauuggcgacuggguccc

SEQ ID NO: 506767 - RNA, 19 nt, Artificial Sequence
  Description of Artificial Sequence: Synthetic oligonucleotide
augggcuugacuucacucu

SEQ ID NO: 506768 - RNA, 19 nt, Artificial Sequence
  Description of Artificial Sequence: Synthetic oligonucleotide
uggacguccucauugcgga

SEQ ID NO: 506769 - RNA, 19 nt, Artificial Sequence
  Description of Artificial Sequence: Synthetic oligonucleotide
ggugauauccugcccacag

SEQ ID NO: 506770 - RNA, 19 nt, Artificial Sequence
  Description of Artificial Sequence: Synthetic oligonucleotide
cuugaugcagggcaagauc

SEQ ID NO: 506771 - RNA, 19 nt, Artificial Sequence
  Description of Artificial Sequence: Synthetic oligonucleotide
ugacacgaguuccuugaug

SEQ ID NO: 506772 - RNA, 19 nt, Artificial Sequence
  Description of Artificial Sequence: Synthetic oligonucleotide
ugaccuaggaugcuccguc

SEQ ID NO: 506773 - RNA, 19 nt, Artificial Sequence
  Description of Artificial Sequence: Synthetic oligonucleotide
uggguccccagccauacga

SEQ ID NO: 506774 - RNA, 19 nt, Artificial Sequence
  Description of Artificial Sequence: Synthetic oligonucleotide
aagaguagggaaaggaaua

SEQ ID NO: 506775 - RNA, 19 nt, Artificial Sequence
  Description of Artificial Sequence: Synthetic oligonucleotide
uugagacgaagcuggacgu

SEQ ID NO: 506776 - RNA, 19 nt, Artificial Sequence
  Description of Artificial Sequence: Synthetic oligonucleotide
guagcagacugagaagagg

SEQ ID NO: 506777 - RNA, 19 nt, Artificial Sequence
  Description of Artificial Sequence: Synthetic oligonucleotide
cccuaugggagguacaugg

SEQ ID NO: 506778 - RNA, 19 nt, Artificial Sequence
  Description of Artificial Sequence: Synthetic oligonucleotide
acgaagugagccucuaggu

SEQ ID NO: 506779 - RNA, 19 nt, Artificial Sequence
  Description of Artificial Sequence: Synthetic oligonucleotide
ugguguaaguagaggguga

SEQ ID NO: 506780 - RNA, 19 nt, Artificial Sequence
  Description of Artificial Sequence: Synthetic oligonucleotide
cagacugagaagaggccgc

SEQ ID NO: 506781 - RNA, 19 nt, Artificial Sequence
  Description of Artificial Sequence: Synthetic oligonucleotide
uagaggcacgaagugagcc

SEQ ID NO: 506782 - RNA, 19 nt, Artificial Sequence
  Description of Artificial Sequence: Synthetic oligonucleotide
ugcucgugugagauggccc

SEQ ID NO: 506783 - RNA, 19 nt, Artificial Sequence
  Description of Artificial Sequence: Synthetic oligonucleotide
uucccgaacuucuccacca

SEQ ID NO: 506784 - RNA, 19 nt, Artificial Sequence
  Description of Artificial Sequence: Synthetic oligonucleotide
guucagccguaccucaggg

SEQ ID NO: 506785 - RNA, 19 nt, Artificial Sequence
  Description of Artificial Sequence: Synthetic oligonucleotide
gccagguuagagaacaugg

SEQ ID NO: 506786 - RNA, 19 nt, Artificial Sequence
  Description of Artificial Sequence: Synthetic oligonucleotide
uugucucgcaccacugucu

SEQ ID NO: 506787 - RNA, 19 nt, Artificial Sequence
  Description of Artificial Sequence: Synthetic oligonucleotide
agugaccuaggaugcuccg

SEQ ID NO: 506788 - RNA, 19 nt, Artificial Sequence
  Description of Artificial Sequence: Synthetic oligonucleotide
uucacgcacgccuccacug

SEQ ID NO: 506789 - RNA, 19 nt, Artificial Sequence
  Description of Artificial Sequence: Synthetic oligonucleotide
ucacuaaagccuccagguc

SEQ ID NO: 506790 - RNA, 19 nt, Artificial Sequence
  Description of Artificial Sequence: Synthetic oligonucleotide
auagcguagacaugaucaa

SEQ ID NO: 506791 - RNA, 19 nt, Artificial Sequence
  Description of Artificial Sequence: Synthetic oligonucleotide
cagcacuggauacucgggg

SEQ ID NO: 506792 - RNA, 19 nt, Artificial Sequence
  Description of Artificial Sequence: Synthetic oligonucleotide
ugggagguggacagauaag

SEQ ID NO: 506793 - RNA, 19 nt, Artificial Sequence
  Description of Artificial Sequence: Synthetic oligonucleotide
augcagaagaguguaguca

SEQ ID NO: 506794 - RNA, 19 nt, Artificial Sequence
  Description of Artificial Sequence: Synthetic oligonucleotide
cucgucuaugagcaccgcg

SEQ ID NO: 506795 - RNA, 19 nt, Artificial Sequence
  Description of Artificial Sequence: Synthetic oligonucleotide
gaauggguccuaucuucug

SEQ ID NO: 506796 - RNA, 19 nt, Artificial Sequence
  Description of Artificial Sequence: Synthetic oligonucleotide
aggcccuacugcuuucugg

SEQ ID NO: 506797 - RNA, 19 nt, Artificial Sequence
  Description of Artificial Sequence: Synthetic oligonucleotide
uggugaagguccccaguug

SEQ ID NO: 506798 - RNA, 19 nt, Artificial Sequence
  Description of Artificial Sequence: Synthetic oligonucleotide
auucuaccgccuugucucg

SEQ ID NO: 506799 - RNA, 19 nt, Artificial Sequence
  Description of Artificial Sequence: Synthetic oligonucleotide
uccgucucucccagugugg

SEQ ID NO: 506800 - RNA, 19 nt, Artificial Sequence
  Description of Artificial Sequence: Synthetic oligonucleotide
cugucuugguuaucucagg

SEQ ID NO: 506801 - RNA, 19 nt, Artificial Sequence
  Description of Artificial Sequence: Synthetic oligonucleotide
agccauacgaagaaccgug

SEQ ID NO: 506802 - RNA, 19 nt, Artificial Sequence
  Description of Artificial Sequence: Synthetic oligonucleotide
gcccguaaggauucuaccg

SEQ ID NO: 506803 - RNA, 19 nt, Artificial Sequence
  Description of Artificial Sequence: Synthetic oligonucleotide
agaggcacgaagugagccu

SEQ ID NO: 506804 - RNA, 19 nt, Artificial Sequence
  Description of Artificial Sequence: Synthetic oligonucleotide
cgaaguucugccuucacag

SEQ ID NO: 506805 - RNA, 19 nt, Artificial Sequence
  Description of Artificial Sequence: Synthetic oligonucleotide
gugugaagaguagggaaag

SEQ ID NO: 506806 - RNA, 19 nt, Artificial Sequence
  Description of Artificial Sequence: Synthetic oligonucleotide
accuaggaugcuccgucuc

SEQ ID NO: 506807 - RNA, 19 nt, Artificial Sequence
  Description of Artificial Sequence: Synthetic oligonucleotide
cagccgcuucacuagaggc

SEQ ID NO: 506808 - RNA, 19 nt, Artificial Sequence
  Description of Artificial Sequence: Synthetic oligonucleotide
uggcccguaaggauucuac

SEQ ID NO: 506809 - RNA, 19 nt, Artificial Sequence
  Description of Artificial Sequence: Synthetic oligonucleotide
accaugcacagggagugac

SEQ ID NO: 506810 - RNA, 19 nt, Artificial Sequence
  Description of Artificial Sequence: Synthetic oligonucleotide
uccuaucuucuguagggau

SEQ ID NO: 506811 - RNA, 19 nt, Artificial Sequence
  Description of Artificial Sequence: Synthetic oligonucleotide
cuugucucgcaccacuguc

SEQ ID NO: 506812 - RNA, 19 nt, Artificial Sequence
  Description of Artificial Sequence: Synthetic oligonucleotide
cuaggucggacggugagug

SEQ ID NO: 506813 - RNA, 19 nt, Artificial Sequence
  Description of Artificial Sequence: Synthetic oligonucleotide
ugcggagcucgucuaugag

SEQ ID NO: 506814 - RNA, 19 nt, Artificial Sequence
  Description of Artificial Sequence: Synthetic oligonucleotide
uauugagacgaagcuggac

SEQ ID NO: 506815 - RNA, 19 nt, Artificial Sequence
  Description of Artificial Sequence: Synthetic oligonucleotide
gacggugagugcucgugug

SEQ ID NO: 506816 - RNA, 19 nt, Artificial Sequence
  Description of Artificial Sequence: Synthetic oligonucleotide
agguaguuagggucuccag

SEQ ID NO: 506817 - RNA, 19 nt, Artificial Sequence
  Description of Artificial Sequence: Synthetic oligonucleotide
gacucgccaggacuugucc

SEQ ID NO: 506818 - RNA, 19 nt, Artificial Sequence
  Description of Artificial Sequence: Synthetic oligonucleotide
gcucgugugagauggcccg

SEQ ID NO: 506819 - RNA, 19 nt, Artificial Sequence
  Description of Artificial Sequence: Synthetic oligonucleotide
gguaguuagggucuccaga

SEQ ID NO: 506820 - RNA, 19 nt, Artificial Sequence
  Description of Artificial Sequence: Synthetic oligonucleotide
uacugucgaaguucugccu

SEQ ID NO: 506821 - RNA, 19 nt, Artificial Sequence
  Description of Artificial Sequence: Synthetic oligonucleotide
agaugauguucagccguac

SEQ ID NO: 506822 - RNA, 19 nt, Artificial Sequence
  Description of Artificial Sequence: Synthetic oligonucleotide
cugagagauuuucacagaa

SEQ ID NO: 506823 - RNA, 19 nt, Artificial Sequence
  Description of Artificial Sequence: Synthetic oligonucleotide
gcaauauucacgcacgccu

SEQ ID NO: 506824 - RNA, 19 nt, Artificial Sequence
  Description of Artificial Sequence: Synthetic oligonucleotide
uauucacgcacgccuccac

SEQ ID NO: 506825 - RNA, 19 nt, Artificial Sequence
  Description of Artificial Sequence: Synthetic oligonucleotide
accgaguccugcucgucag

SEQ ID NO: 506826 - RNA, 19 nt, Artificial Sequence
  Description of Artificial Sequence: Synthetic oligonucleotide
gacguccucauugcggagc

SEQ ID NO: 506827 - RNA, 19 nt, Artificial Sequence
  Description of Artificial Sequence: Synthetic oligonucleotide
ucuaccgccuugucucgca

SEQ ID NO: 506828 - RNA, 19 nt, Artificial Sequence
  Description of Artificial Sequence: Synthetic oligonucleotide
augggguagagcgagucgu

SEQ ID NO: 506829 - RNA, 19 nt, Artificial Sequence
  Description of Artificial Sequence: Synthetic oligonucleotide
uccucagcggccuggcgca

SEQ ID NO: 506830 - RNA, 19 nt, Artificial Sequence
  Description of Artificial Sequence: Synthetic oligonucleotide
ggaugauaguggcaugggc

SEQ ID NO: 506831 - RNA, 19 nt, Artificial Sequence
  Description of Artificial Sequence: Synthetic oligonucleotide
gggagagaggcccaugaug

SEQ ID NO: 506832 - RNA, 19 nt, Artificial Sequence
  Description of Artificial Sequence: Synthetic oligonucleotide
cucuaggucggacggugag

SEQ ID NO: 506833 - RNA, 19 nt, Artificial Sequence
  Description of Artificial Sequence: Synthetic oligonucleotide
gugaggguucccuauuaca

SEQ ID NO: 506834 - RNA, 19 nt, Artificial Sequence
  Description of Artificial Sequence: Synthetic oligonucleotide
gguucccuauuacagcagc

SEQ ID NO: 506835 - RNA, 19 nt, Artificial Sequence
  Description of Artificial Sequence: Synthetic oligonucleotide
agauggcccguaaggauuc

SEQ ID NO: 506836 - RNA, 19 nt, Artificial Sequence
  Description of Artificial Sequence: Synthetic oligonucleotide
uggcaucugacacgaguuc

SEQ ID NO: 506837 - RNA, 19 nt, Artificial Sequence
  Description of Artificial Sequence: Synthetic oligonucleotide
uugcggagcucgucuauga

SEQ ID NO: 506838 - RNA, 19 nt, Artificial Sequence
  Description of Artificial Sequence: Synthetic oligonucleotide
gguagagcgagucgucgcc

SEQ ID NO: 506839 - RNA, 19 nt, Artificial Sequence
  Description of Artificial Sequence: Synthetic oligonucleotide
gagucgucgccgucggcag

SEQ ID NO: 506840 - RNA, 19 nt, Artificial Sequence
  Description of Artificial Sequence: Synthetic oligonucleotide
cccagccauacgaagaacc

SEQ ID NO: 506841 - RNA, 19 nt, Artificial Sequence
  Description of Artificial Sequence: Synthetic oligonucleotide
guuccggaaguacugucga

SEQ ID NO: 506842 - RNA, 19 nt, Artificial Sequence
  Description of Artificial Sequence: Synthetic oligonucleotide
aucugggucaugaucacau

SEQ ID NO: 506843 - RNA, 19 nt, Artificial Sequence
  Description of Artificial Sequence: Synthetic oligonucleotide
ggguccuaucuucuguagg

SEQ ID NO: 506844 - RNA, 19 nt, Artificial Sequence
  Description of Artificial Sequence: Synthetic oligonucleotide
ugguucguucaaccccaag

SEQ ID NO: 506845 - RNA, 19 nt, Artificial Sequence
  Description of Artificial Sequence: Synthetic oligonucleotide
gagcgagucgucgccgucg

SEQ ID NO: 506846 - RNA, 19 nt, Artificial Sequence
  Description of Artificial Sequence: Synthetic oligonucleotide
uacgaagaaccgugggcaa

SEQ ID NO: 506847 - RNA, 19 nt, Artificial Sequence
  Description of Artificial Sequence: Synthetic oligonucleotide
ugagugcucgugugagaug

SEQ ID NO: 506848 - RNA, 19 nt, Artificial Sequence
  Description of Artificial Sequence: Synthetic oligonucleotide
agcgagucgucgccgucgg

SEQ ID NO: 506849 - RNA, 19 nt, Artificial Sequence
  Description of Artificial Sequence: Synthetic oligonucleotide
ccggaugccgaucaccucg

SEQ ID NO: 506850 - RNA, 19 nt, Artificial Sequence
  Description of Artificial Sequence: Synthetic oligonucleotide
ugucgucugagcacagguu

SEQ ID NO: 506851 - RNA, 19 nt, Artificial Sequence
  Description of Artificial Sequence: Synthetic oligonucleotide
cucgccaggacuuguccuc

SEQ ID NO: 506852 - RNA, 19 nt, Artificial Sequence
  Description of Artificial Sequence: Synthetic oligonucleotide
cccguaaggauucuaccgc

SEQ ID NO: 506853 - RNA, 19 nt, Artificial Sequence
  Description of Artificial Sequence: Synthetic oligonucleotide
acucgccaggacuuguccu

SEQ ID NO: 506854 - RNA, 19 nt, Artificial Sequence
  Description of Artificial Sequence: Synthetic oligonucleotide
gguguaaguagagggugag

SEQ ID NO: 506855 - RNA, 19 nt, Artificial Sequence
  Description of Artificial Sequence: Synthetic oligonucleotide
ucucgcaccacugucucuu

SEQ ID NO: 506856 - RNA, 19 nt, Artificial Sequence
  Description of Artificial Sequence: Synthetic oligonucleotide
guagagcgagucgucgccg

SEQ ID NO: 506857 - RNA, 19 nt, Artificial Sequence
  Description of Artificial Sequence: Synthetic oligonucleotide
uggcuaagaccuuggggau

SEQ ID NO: 506858 - RNA, 19 nt, Artificial Sequence
  Description of Artificial Sequence: Synthetic oligonucleotide
accucccuaugggagguac

SEQ ID NO: 506859 - RNA, 19 nt, Artificial Sequence
  Description of Artificial Sequence: Synthetic oligonucleotide
aggugcucaaugguguugu

SEQ ID NO: 506860 - RNA, 19 nt, Artificial Sequence
  Description of Artificial Sequence: Synthetic oligonucleotide
uguagcggacucgccagga

SEQ ID NO: 506861 - RNA, 19 nt, Artificial Sequence
  Description of Artificial Sequence: Synthetic oligonucleotide
accccaagggccaaggcga

SEQ ID NO: 506862 - RNA, 19 nt, Artificial Sequence
  Description of Artificial Sequence: Synthetic oligonucleotide
gagugacagucauggcccc

SEQ ID NO: 506863 - RNA, 19 nt, Artificial Sequence
  Description of Artificial Sequence: Synthetic oligonucleotide
cucgucagaggccagguua

SEQ ID NO: 506864 - RNA, 19 nt, Artificial Sequence
  Description of Artificial Sequence: Synthetic oligonucleotide
agucgucgccgucggcagc

SEQ ID NO: 506865 - RNA, 19 nt, Artificial Sequence
  Description of Artificial Sequence: Synthetic oligonucleotide
gugaaccagucuccacccg

SEQ ID NO: 506866 - RNA, 19 nt, Artificial Sequence
  Description of Artificial Sequence: Synthetic oligonucleotide
ugcgggaggugaaccaguc

SEQ ID NO: 506867 - RNA, 19 nt, Artificial Sequence
  Description of Artificial Sequence: Synthetic oligonucleotide
ucuaggucggacggugagu

SEQ ID NO: 506868 - RNA, 19 nt, Artificial Sequence
  Description of Artificial Sequence: Synthetic oligonucleotide
uauccugcccacagaccuc

SEQ ID NO: 506869 - RNA, 19 nt, Artificial Sequence
  Description of Artificial Sequence: Synthetic oligonucleotide
agagcgagucgucgccguc

SEQ ID NO: 506870 - RNA, 19 nt, Artificial Sequence
  Description of Artificial Sequence: Synthetic oligonucleotide
uugauacuauugagacgaa

SEQ ID NO: 506871 - RNA, 19 nt, Artificial Sequence
  Description of Artificial Sequence: Synthetic oligonucleotide
auugcggagcucgucuaug

SEQ ID NO: 506872 - RNA, 19 nt, Artificial Sequence
  Description of Artificial Sequence: Synthetic oligonucleotide
agcggcccucaccucggcc

SEQ ID NO: 506873 - RNA, 19 nt, Artificial Sequence
  Description of Artificial Sequence: Synthetic oligonucleotide
acguccucauugcggagcu

SEQ ID NO: 506874 - RNA, 19 nt, Artificial Sequence
  Description of Artificial Sequence: Synthetic oligonucleotide
acacgaguuccuugaugca

SEQ ID NO: 506875 - RNA, 19 nt, Artificial Sequence
  Description of Artificial Sequence: Synthetic oligonucleotide
guucggccaaggccaagag

SEQ ID NO: 506876 - RNA, 19 nt, Artificial Sequence
  Description of Artificial Sequence: Synthetic oligonucleotide
uagucauucggugcaggua

SEQ ID NO: 506877 - RNA, 19 nt, Artificial Sequence
  Description of Artificial Sequence: Synthetic oligonucleotide
ccauacgaagaaccguggg

SEQ ID NO: 506878 - RNA, 19 nt, Artificial Sequence
  Description of Artificial Sequence: Synthetic oligonucleotide
agggauuuggcgacauuga

SEQ ID NO: 506879 - RNA, 19 nt, Artificial Sequence
  Description of Artificial Sequence: Synthetic oligonucleotide
aggucggacggugagugcu

SEQ ID NO: 506880 - RNA, 19 nt, Artificial Sequence
  Description of Artificial Sequence: Synthetic oligonucleotide
gugagauggcccguaagga

SEQ ID NO: 506881 - RNA, 19 nt, Artificial Sequence
  Description of Artificial Sequence: Synthetic oligonucleotide
ucauugcggagcucgucua

SEQ ID NO: 506882 - RNA, 19 nt, Artificial Sequence
  Description of Artificial Sequence: Synthetic oligonucleotide
agcugccggaugccgauca

SEQ ID NO: 506883 - RNA, 19 nt, Artificial Sequence
  Description of Artificial Sequence: Synthetic oligonucleotide
acggugagugcucguguga

SEQ ID NO: 506884 - RNA, 19 nt, Artificial Sequence
  Description of Artificial Sequence: Synthetic oligonucleotide
uagagcgagucgucgccgu

SEQ ID NO: 506885 - RNA, 19 nt, Artificial Sequence
  Description of Artificial Sequence: Synthetic oligonucleotide
uguagggauuuggcgacau

SEQ ID NO: 506886 - RNA, 19 nt, Artificial Sequence
  Description of Artificial Sequence: Synthetic oligonucleotide
caaaguggugaaggucccc

SEQ ID NO: 506887 - RNA, 19 nt, Artificial Sequence
  Description of Artificial Sequence: Synthetic oligonucleotide
ggcaauauucacgcacgcc

SEQ ID NO: 506888 - RNA, 19 nt, Artificial Sequence
  Description of Artificial Sequence: Synthetic oligonucleotide
gaaccgugggcaacaugug

SEQ ID NO: 506889 - RNA, 19 nt, Artificial Sequence
  Description of Artificial Sequence: Synthetic oligonucleotide
auauucacgcacgccucca

SEQ ID NO: 506890 - RNA, 19 nt, Artificial Sequence
  Description of Artificial Sequence: Synthetic oligonucleotide
gguagcagacugagaagag

SEQ ID NO: 506891 - RNA, 19 nt, Artificial Sequence
  Description of Artificial Sequence: Synthetic oligonucleotide
uccucauugcggagcucgu

SEQ ID NO: 506892 - RNA, 19 nt, Artificial Sequence
  Description of Artificial Sequence: Synthetic oligonucleotide
uugguuaucucaggcccua

SEQ ID NO: 506893 - RNA, 19 nt, Artificial Sequence
  Description of Artificial Sequence: Synthetic oligonucleotide
ccguaaggauucuaccgcc

SEQ ID NO: 506894 - RNA, 19 nt, Artificial Sequence
  Description of Artificial Sequence: Synthetic oligonucleotide
gacugagaagaggccgcag

SEQ ID NO: 506895 - RNA, 19 nt, Artificial Sequence
  Description of Artificial Sequence: Synthetic oligonucleotide
cacgcaguccagguuggag

SEQ ID NO: 506896 - RNA, 19 nt, Artificial Sequence
  Description of Artificial Sequence: Synthetic oligonucleotide
ugucaagaauggguccuau

SEQ ID NO: 506897 - RNA, 19 nt, Artificial Sequence
  Description of Artificial Sequence: Synthetic oligonucleotide
ugagacgaagcuggacguc

SEQ ID NO: 506898 - RNA, 19 nt, Artificial Sequence
  Description of Artificial Sequence: Synthetic oligonucleotide
ucggccucacaguccuuca

SEQ ID NO: 506899 - RNA, 19 nt, Artificial Sequence
  Description of Artificial Sequence: Synthetic oligonucleotide
gcaagagacagaacaguca

SEQ ID NO: 506900 - RNA, 19 nt, Artificial Sequence
  Description of Artificial Sequence: Synthetic oligonucleotide
cuauugagacgaagcugga

SEQ ID NO: 506901 - RNA, 19 nt, Artificial Sequence
  Description of Artificial Sequence: Synthetic oligonucleotide
ggcccguaaggauucuacc

SEQ ID NO: 506902 - RNA, 19 nt, Artificial Sequence
  Description of Artificial Sequence: Synthetic oligonucleotide
uuccggaaguacugucgaa

SEQ ID NO: 506903 - RNA, 19 nt, Artificial Sequence
  Description of Artificial Sequence: Synthetic oligonucleotide
aggccggcaaugguucuuc

SEQ ID NO: 506904 - RNA, 19 nt, Artificial Sequence
  Description of Artificial Sequence: Synthetic oligonucleotide
ggugaggguucccuauuac

SEQ ID NO: 506905 - RNA, 19 nt, Artificial Sequence
  Description of Artificial Sequence: Synthetic oligonucleotide
guagucauucggugcaggu

SEQ ID NO: 506906 - RNA, 19 nt, Artificial Sequence
  Description of Artificial Sequence: Synthetic oligonucleotide
ggauagcguagacaugauc

SEQ ID NO: 506907 - RNA, 19 nt, Artificial Sequence
  Description of Artificial Sequence: Synthetic oligonucleotide
acgaagcuggacguccuca

SEQ ID NO: 506908 - RNA, 19 nt, Artificial Sequence
  Description of Artificial Sequence: Synthetic oligonucleotide
agugcucgugugagauggc

SEQ ID NO: 506909 - RNA, 19 nt, Artificial Sequence
  Description of Artificial Sequence: Synthetic oligonucleotide
gcuggacguccucauugcg

SEQ ID NO: 506910 - RNA, 19 nt, Artificial Sequence
  Description of Artificial Sequence: Synthetic oligonucleotide
gugcucgugugagauggcc

SEQ ID NO: 506911 - RNA, 19 nt, Artificial Sequence
  Description of Artificial Sequence: Synthetic oligonucleotide
ucccuaugggagguacaug

SEQ ID NO: 506912 - RNA, 19 nt, Artificial Sequence
  Description of Artificial Sequence: Synthetic oligonucleotide
ggguagagcgagucgucgc

SEQ ID NO: 506913 - RNA, 19 nt, Artificial Sequence
  Description of Artificial Sequence: Synthetic oligonucleotide
cucauugcggagcucgucu

SEQ ID NO: 506914 - RNA, 19 nt, Artificial Sequence
  Description of Artificial Sequence: Synthetic oligonucleotide
gugucgucugagcacaggu

SEQ ID NO: 506915 - RNA, 19 nt, Artificial Sequence
  Description of Artificial Sequence: Synthetic oligonucleotide
guucccuauuacagcagca

SEQ ID NO: 506916 - RNA, 19 nt, Artificial Sequence
  Description of Artificial Sequence: Synthetic oligonucleotide
gggguagagcgagucgucg

SEQ ID NO: 506917 - RNA, 19 nt, Artificial Sequence
  Description of Artificial Sequence: Synthetic oligonucleotide
uucuaccgccuugucucgc

SEQ ID NO: 506918 - RNA, 19 nt, Artificial Sequence
  Description of Artificial Sequence: Synthetic oligonucleotide
gucggacggugagugcucg

SEQ ID NO: 506919 - RNA, 19 nt, Artificial Sequence
  Description of Artificial Sequence: Synthetic oligonucleotide
agacugagaagaggccgca

SEQ ID NO: 506920 - RNA, 19 nt, Artificial Sequence
  Description of Artificial Sequence: Synthetic oligonucleotide
gcguagacaugaucaacca

SEQ ID NO: 506921 - RNA, 19 nt, Artificial Sequence
  Description of Artificial Sequence: Synthetic oligonucleotide
gagaugauguucagccgua

SEQ ID NO: 506922 - RNA, 19 nt, Artificial Sequence
  Description of Artificial Sequence: Synthetic oligonucleotide
gccauacgaagaaccgugg

SEQ ID NO: 506923 - RNA, 19 nt, Artificial Sequence
  Description of Artificial Sequence: Synthetic oligonucleotide
ggugaagguccccaguugu

SEQ ID NO: 506924 - RNA, 19 nt, Artificial Sequence
  Description of Artificial Sequence: Synthetic oligonucleotide
uggugauauccugcccaca

SEQ ID NO: 506925 - RNA, 19 nt, Artificial Sequence
  Description of Artificial Sequence: Synthetic oligonucleotide
guccccagccauacgaaga

SEQ ID NO: 506926 - RNA, 19 nt, Artificial Sequence
  Description of Artificial Sequence: Synthetic oligonucleotide
cucggccucacaguccuuc

SEQ ID NO: 506927 - RNA, 19 nt, Artificial Sequence
  Description of Artificial Sequence: Synthetic oligonucleotide
ccucaccucggccucacag

SEQ ID NO: 506928 - RNA, 19 nt, Artificial Sequence
  Description of Artificial Sequence: Synthetic oligonucleotide
ggugcgggaggugaaccag

SEQ ID NO: 506929 - RNA, 19 nt, Artificial Sequence
  Description of Artificial Sequence: Synthetic oligonucleotide
ucauucggugcagguaguu

SEQ ID NO: 506930 - RNA, 19 nt, Artificial Sequence
  Description of Artificial Sequence: Synthetic oligonucleotide
cuugguuaucucaggcccu

SEQ ID NO: 506931 - RNA, 19 nt, Artificial Sequence
  Description of Artificial Sequence: Synthetic oligonucleotide
gaagcggacauuggcgacu

SEQ ID NO: 506932 - RNA, 19 nt, Artificial Sequence
  Description of Artificial Sequence: Synthetic oligonucleotide
guggacagauaagucucuc

SEQ ID NO: 506933 - RNA, 19 nt, Artificial Sequence
  Description of Artificial Sequence: Synthetic oligonucleotide
gccagugcugacuugacau

SEQ ID NO: 506934 - RNA, 19 nt, Artificial Sequence
  Description of Artificial Sequence: Synthetic oligonucleotide
agggugaggguucccuauu

SEQ ID NO: 506935 - RNA, 19 nt, Artificial Sequence
  Description of Artificial Sequence: Synthetic oligonucleotide
ggauucuaccgccuugucu

SEQ ID NO: 506936 - RNA, 19 nt, Artificial Sequence
  Description of Artificial Sequence: Synthetic oligonucleotide
ggugucgucugagcacagg

SEQ ID NO: 506937 - RNA, 19 nt, Artificial Sequence
  Description of Artificial Sequence: Synthetic oligonucleotide
guccccaguuguucggcca

SEQ ID NO: 506938 - RNA, 19 nt, Artificial Sequence
  Description of Artificial Sequence: Synthetic oligonucleotide
cagccucucggauagcgua

SEQ ID NO: 506939 - RNA, 19 nt, Artificial Sequence
  Description of Artificial Sequence: Synthetic oligonucleotide
guaaggauucuaccgccuu

SEQ ID NO: 506940 - RNA, 19 nt, Artificial Sequence
  Description of Artificial Sequence: Synthetic oligonucleotide
gccgcuucacuagaggcac

SEQ ID NO: 506941 - RNA, 19 nt, Artificial Sequence
  Description of Artificial Sequence: Synthetic oligonucleotide
cuaccgccuugucucgcac

SEQ ID NO: 506942 - RNA, 19 nt, Artificial Sequence
  Description of Artificial Sequence: Synthetic oligonucleotide
agcaccgcgaugggguaga

SEQ ID NO: 506943 - RNA, 19 nt, Artificial Sequence
  Description of Artificial Sequence: Synthetic oligonucleotide
cggagcucgucuaugagca

SEQ ID NO: 506944 - RNA, 19 nt, Artificial Sequence
  Description of Artificial Sequence: Synthetic oligonucleotide
ugguuaucucaggcccuac

SEQ ID NO: 506945 - RNA, 19 nt, Artificial Sequence
  Description of Artificial Sequence: Synthetic oligonucleotide
cugcagugugcuguuguca

SEQ ID NO: 506946 - RNA, 19 nt, Artificial Sequence
  Description of Artificial Sequence: Synthetic oligonucleotide
agccguaccucagggcacu

SEQ ID NO: 506947 - RNA, 19 nt, Artificial Sequence
  Description of Artificial Sequence: Synthetic oligonucleotide
ggugguguaaguagagggu

SEQ ID NO: 506948 - RNA, 19 nt, Artificial Sequence
  Description of Artificial Sequence: Synthetic oligonucleotide
gaccuaggaugcuccgucu

SEQ ID NO: 506949 - RNA, 19 nt, Artificial Sequence
  Description of Artificial Sequence: Synthetic oligonucleotide
ggcuaagaccuuggggaug

SEQ ID NO: 506950 - RNA, 19 nt, Artificial Sequence
  Description of Artificial Sequence: Synthetic oligonucleotide
gcacccgccacuuggcauc

SEQ ID NO: 506951 - RNA, 19 nt, Artificial Sequence
  Description of Artificial Sequence: Synthetic oligonucleotide
cucaccucggccucacagu

SEQ ID NO: 506952 - RNA, 19 nt, Artificial Sequence
  Description of Artificial Sequence: Synthetic oligonucleotide
agcggacucgccaggacuu

SEQ ID NO: 506953 - RNA, 19 nt, Artificial Sequence
  Description of Artificial Sequence: Synthetic oligonucleotide
ucggacggugagugcucgu

SEQ ID NO: 506954 - RNA, 19 nt, Artificial Sequence
  Description of Artificial Sequence: Synthetic oligonucleotide
gccaaggcgaugguggaga

SEQ ID NO: 506955 - RNA, 19 nt, Artificial Sequence
  Description of Artificial Sequence: Synthetic oligonucleotide
cgaguuccuugaugcaggg

SEQ ID NO: 506956 - RNA, 19 nt, Artificial Sequence
  Description of Artificial Sequence: Synthetic oligonucleotide
ggaggugaaccagucucca

SEQ ID NO: 506957 - RNA, 19 nt, Artificial Sequence
  Description of Artificial Sequence: Synthetic oligonucleotide
uggcaugggcccacuccuu

SEQ ID NO: 506958 - RNA, 19 nt, Artificial Sequence
  Description of Artificial Sequence: Synthetic oligonucleotide
gccucuaggucggacggug

SEQ ID NO: 506959 - RNA, 19 nt, Artificial Sequence
  Description of Artificial Sequence: Synthetic oligonucleotide
ccuucccgaacuucuccac

SEQ ID NO: 506960 - RNA, 19 nt, Artificial Sequence
  Description of Artificial Sequence: Synthetic oligonucleotide
guccgccaccauguagcgg

SEQ ID NO: 506961 - RNA, 19 nt, Artificial Sequence
  Description of Artificial Sequence: Synthetic oligonucleotide
gguuaucucaggcccuacu

SEQ ID NO: 506962 - RNA, 19 nt, Artificial Sequence
  Description of Artificial Sequence: Synthetic oligonucleotide
cucagcggccuggcgcagg

SEQ ID NO: 506963 - RNA, 19 nt, Artificial Sequence
  Description of Artificial Sequence: Synthetic oligonucleotide
gccagugauuccaggggug

SEQ ID NO: 506964 - RNA, 19 nt, Artificial Sequence
  Description of Artificial Sequence: Synthetic oligonucleotide
uccacccgccagccgcuuc

SEQ ID NO: 506965 - RNA, 19 nt, Artificial Sequence
  Description of Artificial Sequence: Synthetic oligonucleotide
auaguggcaugggcccacu

SEQ ID NO: 506966 - RNA, 19 nt, Artificial Sequence
  Description of Artificial Sequence: Synthetic oligonucleotide
ggguucccuauuacagcag

SEQ ID NO: 506967 - RNA, 19 nt, Artificial Sequence
  Description of Artificial Sequence: Synthetic oligonucleotide
ccgucucucccaguguggg

SEQ ID NO: 506968 - RNA, 19 nt, Artificial Sequence
  Description of Artificial Sequence: Synthetic oligonucleotide
ccaaggcgaugguggagag

SEQ ID NO: 506969 - RNA, 19 nt, Artificial Sequence
  Description of Artificial Sequence: Synthetic oligonucleotide
cguucaaccccaagggcca

SEQ ID NO: 506970 - RNA, 19 nt, Artificial Sequence
  Description of Artificial Sequence: Synthetic oligonucleotide
gcggggagcagggacugag

SEQ ID NO: 506971 - RNA, 19 nt, Artificial Sequence
  Description of Artificial Sequence: Synthetic oligonucleotide
ccaccauguagcggacucg

SEQ ID NO: 506972 - RNA, 19 nt, Artificial Sequence
  Description of Artificial Sequence: Synthetic oligonucleotide
cacagggagugacagucau

SEQ ID NO: 506973 - RNA, 19 nt, Artificial Sequence
  Description of Artificial Sequence: Synthetic oligonucleotide
ggccagugauuccaggggu

SEQ ID NO: 506974 - RNA, 19 nt, Artificial Sequence
  Description of Artificial Sequence: Synthetic oligonucleotide
gaucaaccagccaggccau

SEQ ID NO: 506975 - RNA, 19 nt, Artificial Sequence
  Description of Artificial Sequence: Synthetic oligonucleotide
guuguucggccaaggccaa

SEQ ID NO: 506976 - RNA, 19 nt, Artificial Sequence
  Description of Artificial Sequence: Synthetic oligonucleotide
gcagguaguuagggucucc

SEQ ID NO: 506977 - RNA, 19 nt, Artificial Sequence
  Description of Artificial Sequence: Synthetic oligonucleotide
ggccaaggcgaugguggag

SEQ ID NO: 506978 - RNA, 19 nt, Artificial Sequence
  Description of Artificial Sequence: Synthetic oligonucleotide
cucccuaugggagguacau

SEQ ID NO: 506979 - RNA, 19 nt, Artificial Sequence
  Description of Artificial Sequence: Synthetic oligonucleotide
cagccauacgaagaaccgu

SEQ ID NO: 506980 - RNA, 19 nt, Artificial Sequence
  Description of Artificial Sequence: Synthetic oligonucleotide
gccuugucucgcaccacug

SEQ ID NO: 506981 - RNA, 19 nt, Artificial Sequence
  Description of Artificial Sequence: Synthetic oligonucleotide
cgaguccugcucgucagag

SEQ ID NO: 506982 - RNA, 19 nt, Artificial Sequence
  Description of Artificial Sequence: Synthetic oligonucleotide
gugaccuaggaugcuccgu

SEQ ID NO: 506983 - RNA, 19 nt, Artificial Sequence
  Description of Artificial Sequence: Synthetic oligonucleotide
gcgacuggguccccagcca

SEQ ID NO: 506984 - RNA, 19 nt, Artificial Sequence
  Description of Artificial Sequence: Synthetic oligonucleotide
acgcacgccuccacugcca

SEQ ID NO: 506985 - RNA, 19 nt, Artificial Sequence
  Description of Artificial Sequence: Synthetic oligonucleotide
ccaugcacagggagugaca

SEQ ID NO: 506986 - RNA, 19 nt, Artificial Sequence
  Description of Artificial Sequence: Synthetic oligonucleotide
gaagaaccgugggcaacau

SEQ ID NO: 506987 - RNA, 19 nt, Artificial Sequence
  Description of Artificial Sequence: Synthetic oligonucleotide
auggcccguaaggauucua

SEQ ID NO: 506988 - RNA, 19 nt, Artificial Sequence
  Description of Artificial Sequence: Synthetic oligonucleotide
cugccccaacuugcacugc

SEQ ID NO: 506989 - RNA, 19 nt, Artificial Sequence
  Description of Artificial Sequence: Synthetic oligonucleotide
cauugcggagcucgucuau

SEQ ID NO: 506990 - RNA, 19 nt, Artificial Sequence
  Description of Artificial Sequence: Synthetic oligonucleotide
ccggaaguacugucgaagu

SEQ ID NO: 506991 - RNA, 19 nt, Artificial Sequence
  Description of Artificial Sequence: Synthetic oligonucleotide
gguggacagauaagucucu

SEQ ID NO: 506992 - RNA, 19 nt, Artificial Sequence
  Description of Artificial Sequence: Synthetic oligonucleotide
ccgcuucacuagaggcacg

SEQ ID NO: 506993 - RNA, 19 nt, Artificial Sequence
  Description of Artificial Sequence: Synthetic oligonucleotide
ggacggugagugcucgugu

SEQ ID NO: 506994 - RNA, 19 nt, Artificial Sequence
  Description of Artificial Sequence: Synthetic oligonucleotide
ggacucgccaggacuuguc

SEQ ID NO: 506995 - RNA, 19 nt, Artificial Sequence
  Description of Artificial Sequence: Synthetic oligonucleotide
ggcccacuccuucccgaac

SEQ ID NO: 506996 - RNA, 19 nt, Artificial Sequence
  Description of Artificial Sequence: Synthetic oligonucleotide
gcccacuccuucccgaacu

SEQ ID NO: 506997 - RNA, 19 nt, Artificial Sequence
  Description of Artificial Sequence: Synthetic oligonucleotide
cugguucguucaaccccaa

SEQ ID NO: 506998 - RNA, 19 nt, Artificial Sequence
  Description of Artificial Sequence: Synthetic oligonucleotide
guucaaccccaagggccaa

SEQ ID NO: 506999 - RNA, 19 nt, Artificial Sequence
  Description of Artificial Sequence: Synthetic oligonucleotide
cgucucucccagugugggc

SEQ ID NO: 507000 - RNA, 19 nt, Artificial Sequence
  Description of Artificial Sequence: Synthetic oligonucleotide
cagcggcccucaccucggc

SEQ ID NO: 507001 - RNA, 19 nt, Artificial Sequence
  Description of Artificial Sequence: Synthetic oligonucleotide
gucauucggugcagguagu

SEQ ID NO: 507002 - RNA, 19 nt, Artificial Sequence
  Description of Artificial Sequence: Synthetic oligonucleotide
ggucggacggugagugcuc

SEQ ID NO: 507003 - RNA, 19 nt, Artificial Sequence
  Description of Artificial Sequence: Synthetic oligonucleotide
guagggauuuggcgacauu

SEQ ID NO: 507004 - RNA, 19 nt, Artificial Sequence
  Description of Artificial Sequence: Synthetic oligonucleotide
ccucauugcggagcucguc

SEQ ID NO: 507005 - RNA, 19 nt, Artificial Sequence
  Description of Artificial Sequence: Synthetic oligonucleotide
cugacacgaguuccuugau

SEQ ID NO: 507006 - RNA, 19 nt, Artificial Sequence
  Description of Artificial Sequence: Synthetic oligonucleotide
gauggcccguaaggauucu

SEQ ID NO: 507007 - RNA, 19 nt, Artificial Sequence
  Description of Artificial Sequence: Synthetic oligonucleotide
gagcucacuucugguucgu

SEQ ID NO: 507008 - RNA, 19 nt, Artificial Sequence
  Description of Artificial Sequence: Synthetic oligonucleotide
ccuaugggagguacauggu

SEQ ID NO: 507009 - RNA, 19 nt, Artificial Sequence
  Description of Artificial Sequence: Synthetic oligonucleotide
cgugggcaacaugugcuug

SEQ ID NO: 507010 - RNA, 19 nt, Artificial Sequence
  Description of Artificial Sequence: Synthetic oligonucleotide
cggacggugagugcucgug

SEQ ID NO: 507011 - RNA, 19 nt, Artificial Sequence
  Description of Artificial Sequence: Synthetic oligonucleotide
ccucccuaugggagguaca

SEQ ID NO: 507012 - RNA, 19 nt, Artificial Sequence
  Description of Artificial Sequence: Synthetic oligonucleotide
ccucuaggucggacgguga

SEQ ID NO: 507013 - RNA, 19 nt, Artificial Sequence
  Description of Artificial Sequence: Synthetic oligonucleotide
gcggacucgccaggacuug

SEQ ID NO: 507014 - RNA, 19 nt, Artificial Sequence
  Description of Artificial Sequence: Synthetic oligonucleotide
cguaaggauucuaccgccu

SEQ ID NO: 507015 - RNA, 19 nt, Artificial Sequence
  Description of Artificial Sequence: Synthetic oligonucleotide
ccuugucucgcaccacugu

SEQ ID NO: 507016 - RNA, 19 nt, Artificial Sequence
  Description of Artificial Sequence: Synthetic oligonucleotide
gcuucacuagaggcacgaa

SEQ ID NO: 507017 - RNA, 19 nt, Artificial Sequence
  Description of Artificial Sequence: Synthetic oligonucleotide
cucgugugagauggcccgu

SEQ ID NO: 507018 - RNA, 19 nt, Artificial Sequence
  Description of Artificial Sequence: Synthetic oligonucleotide
cgaggugcgggaggugaac

SEQ ID NO: 507019 - RNA, 19 nt, Artificial Sequence
  Description of Artificial Sequence: Synthetic oligonucleotide
gcgagucgucgccgucggc

SEQ ID NO: 507020 - RNA, 19 nt, Artificial Sequence
  Description of Artificial Sequence: Synthetic oligonucleotide
gcgggaggugaaccagucu

SEQ ID NO: 507021 - RNA, 19 nt, Artificial Sequence
  Description of Artificial Sequence: Synthetic oligonucleotide
ccuugaugcagggcaagau

SEQ ID NO: 507022 - RNA, 19 nt, Artificial Sequence
  Description of Artificial Sequence: Synthetic oligonucleotide
ccgccaccauguagcggac

SEQ ID NO: 507023 - RNA, 19 nt, Artificial Sequence
  Description of Artificial Sequence: Synthetic oligonucleotide
ccgcgaugggguagagcga

SEQ ID NO: 507024 - RNA, 19 nt, Artificial Sequence
  Description of Artificial Sequence: Synthetic oligonucleotide
cgugugagauggcccguaa

SEQ ID NO: 507025 - RNA, 19 nt, Artificial Sequence
  Description of Artificial Sequence: Synthetic oligonucleotide
ccgaguccugcucgucaga

SEQ ID NO: 507026 - RNA, 19 nt, Artificial Sequence
  Description of Artificial Sequence: Synthetic oligonucleotide
ggccggcaaugguucuucu

SEQ ID NO: 507027 - RNA, 19 nt, Artificial Sequence
  Description of Artificial Sequence: Synthetic oligonucleotide
cgucuaugagcaccgcgau

SEQ ID NO: 507028 - RNA, 19 nt, Artificial Sequence
  Description of Artificial Sequence: Synthetic oligonucleotide
gcucgucagaggccagguu

SEQ ID NO: 507029 - RNA, 19 nt, Artificial Sequence
  Description of Artificial Sequence: Synthetic oligonucleotide
cgccuugucucgcaccacu

SEQ ID NO: 507030 - RNA, 19 nt, Artificial Sequence
  Description of Artificial Sequence: Synthetic oligonucleotide
ccgccuugucucgcaccac

SEQ ID NO: 507031 - RNA, 19 nt, Artificial Sequence
  Description of Artificial Sequence: Synthetic oligonucleotide
ccgugggcaacaugugcuu

SEQ ID NO: 507032 - RNA, 19 nt, Artificial Sequence
  Description of Artificial Sequence: Synthetic oligonucleotide
gccguaccucagggcacuc

SEQ ID NO: 507033 - RNA, 19 nt, Artificial Sequence
  Description of Artificial Sequence: Synthetic oligonucleotide
caccucccuaugggaggua

SEQ ID NO: 507034 - RNA, 19 nt, Artificial Sequence
  Description of Artificial Sequence: Synthetic oligonucleotide
cgccagccgcuucacuaga

SEQ ID NO: 507035 - RNA, 19 nt, Artificial Sequence
  Description of Artificial Sequence: Synthetic oligonucleotide
cggaugccgaucaccucgu

SEQ ID NO: 507036 - RNA, 19 nt, Artificial Sequence
  Description of Artificial Sequence: Synthetic oligonucleotide
cggauagcguagacaugau

SEQ ID NO: 507037 - RNA, 19 nt, Artificial Sequence
  Description of Artificial Sequence: Synthetic oligonucleotide
cggacucgccaggacuugu

SEQ ID NO: 507038 - RNA, 19 nt, Artificial Sequence
  Description of Artificial Sequence: Synthetic oligonucleotide
cugcggcccgccgcaccau

SEQ ID NO: 507039 - RNA, 19 nt, Artificial Sequence
  Description of Artificial Sequence: Synthetic oligonucleotide
cgucggcagcugccaucuu

SEQ ID NO: 507040 - RNA, 19 nt, Artificial Sequence
  Description of Artificial Sequence: Synthetic oligonucleotide
aaacgagccacauucauuc

SEQ ID NO: 507041 - RNA, 19 nt, Artificial Sequence
  Description of Artificial Sequence: Synthetic oligonucleotide
gaugccacgguacagaugg

SEQ ID NO: 507042 - RNA, 19 nt, Artificial Sequence
  Description of Artificial Sequence: Synthetic oligonucleotide
ucaaauaacugcaaguggu

SEQ ID NO: 507043 - RNA, 19 nt, Artificial Sequence
  Description of Artificial Sequence: Synthetic oligonucleotide
aguacaaugaccacauccc

SEQ ID NO: 507044 - RNA, 19 nt, Artificial Sequence
  Description of Artificial Sequence: Synthetic oligonucleotide
gguaauaggugccagacgg

SEQ ID NO: 507045 - RNA, 19 nt, Artificial Sequence
  Description of Artificial Sequence: Synthetic oligonucleotide
gaugcaaagcuuucugugg

SEQ ID NO: 507046 - RNA, 19 nt, Artificial Sequence
  Description of Artificial Sequence: Synthetic oligonucleotide
aaaugagcccgucauccac

SEQ ID NO: 507047 - RNA, 19 nt, Artificial Sequence
  Description of Artificial Sequence: Synthetic oligonucleotide
aagccaguaaauuuuccug

SEQ ID NO: 507048 - RNA, 19 nt, Artificial Sequence
  Description of Artificial Sequence: Synthetic oligonucleotide
acgauaauggccccacugc

SEQ ID NO: 507049 - RNA, 19 nt, Artificial Sequence
  Description of Artificial Sequence: Synthetic oligonucleotide
uuauugacauucagguggg

SEQ ID NO: 507050 - RNA, 19 nt, Artificial Sequence
  Description of Artificial Sequence: Synthetic oligonucleotide
guucgcacauucuugauag

SEQ ID NO: 507051 - RNA, 19 nt, Artificial Sequence
  Description of Artificial Sequence: Synthetic oligonucleotide
ugcccuuuugugauaaagg

SEQ ID NO: 507052 - RNA, 19 nt, Artificial Sequence
  Description of Artificial Sequence: Synthetic oligonucleotide
ucuaggacugcauuggcca

SEQ ID NO: 507053 - RNA, 19 nt, Artificial Sequence
  Description of Artificial Sequence: Synthetic oligonucleotide
uucucgauuuugcugauga

SEQ ID NO: 507054 - RNA, 19 nt, Artificial Sequence
  Description of Artificial Sequence: Synthetic oligonucleotide
ucuacaggagcaaaacaca

SEQ ID NO: 507055 - RNA, 19 nt, Artificial Sequence
  Description of Artificial Sequence: Synthetic oligonucleotide
gaugaaagaggcaaacacc

SEQ ID NO: 507056 - RNA, 19 nt, Artificial Sequence
  Description of Artificial Sequence: Synthetic oligonucleotide
cacacggaggucuacaucc

SEQ ID NO: 507057 - RNA, 19 nt, Artificial Sequence
  Description of Artificial Sequence: Synthetic oligonucleotide
agguaucagccauagcugc

SEQ ID NO: 507058 - RNA, 19 nt, Artificial Sequence
  Description of Artificial Sequence: Synthetic oligonucleotide
agccaguaaauuuuccugg

SEQ ID NO: 507059 - RNA, 19 nt, Artificial Sequence
  Description of Artificial Sequence: Synthetic oligonucleotide
acaggcacgacacgcaugg

SEQ ID NO: 507060 - RNA, 19 nt, Artificial Sequence
  Description of Artificial Sequence: Synthetic oligonucleotide
ugugguuucggcaugguuu

SEQ ID NO: 507061 - RNA, 19 nt, Artificial Sequence
  Description of Artificial Sequence: Synthetic oligonucleotide
uguucuuauaguccagcca

SEQ ID NO: 507062 - RNA, 19 nt, Artificial Sequence
  Description of Artificial Sequence: Synthetic oligonucleotide
agagugagcacuacaagcg

SEQ ID NO: 507063 - RNA, 19 nt, Artificial Sequence
  Description of Artificial Sequence: Synthetic oligonucleotide
agcguugcuggccuaaugg

SEQ ID NO: 507064 - RNA, 19 nt, Artificial Sequence
  Description of Artificial Sequence: Synthetic oligonucleotide
ugugauaaaggcagagggu

SEQ ID NO: 507065 - RNA, 19 nt, Artificial Sequence
  Description of Artificial Sequence: Synthetic oligonucleotide
ugggcaacuuucuacagga

SEQ ID NO: 507066 - RNA, 19 nt, Artificial Sequence
  Description of Artificial Sequence: Synthetic oligonucleotide
acuacaagcguugcuggcc

SEQ ID NO: 507067 - RNA, 19 nt, Artificial Sequence
  Description of Artificial Sequence: Synthetic oligonucleotide
agugaaaugagcccgucau

SEQ ID NO: 507068 - RNA, 19 nt, Artificial Sequence
  Description of Artificial Sequence: Synthetic oligonucleotide
aacgagccacauucauucc

SEQ ID NO: 507069 - RNA, 19 nt, Artificial Sequence
  Description of Artificial Sequence: Synthetic oligonucleotide
gcugccgucgaacagaagg

SEQ ID NO: 507070 - RNA, 19 nt, Artificial Sequence
  Description of Artificial Sequence: Synthetic oligonucleotide
auguccuaagccccuacac

SEQ ID NO: 507071 - RNA, 19 nt, Artificial Sequence
  Description of Artificial Sequence: Synthetic oligonucleotide
cacauauguuccaggaagg

SEQ ID NO: 507072 - RNA, 19 nt, Artificial Sequence
  Description of Artificial Sequence: Synthetic oligonucleotide
ugcgugauacucaugaguu

SEQ ID NO: 507073 - RNA, 19 nt, Artificial Sequence
  Description of Artificial Sequence: Synthetic oligonucleotide
accaugaucccaucacugg

SEQ ID NO: 507074 - RNA, 19 nt, Artificial Sequence
  Description of Artificial Sequence: Synthetic oligonucleotide
uccaucuaggacugcauug

SEQ ID NO: 507075 - RNA, 19 nt, Artificial Sequence
  Description of Artificial Sequence: Synthetic oligonucleotide
cugaguggagugcacaagg

SEQ ID NO: 507076 - RNA, 19 nt, Artificial Sequence
  Description of Artificial Sequence: Synthetic oligonucleotide
gacgauaauggccccacug

SEQ ID NO: 507077 - RNA, 19 nt, Artificial Sequence
  Description of Artificial Sequence: Synthetic oligonucleotide
uuccaugagagaaauucaa

SEQ ID NO: 507078 - RNA, 19 nt, Artificial Sequence
  Description of Artificial Sequence: Synthetic oligonucleotide
ugguaauaggugccagacg

SEQ ID NO: 507079 - RNA, 19 nt, Artificial Sequence
  Description of Artificial Sequence: Synthetic oligonucleotide
uguaccgcauccuuacaca

SEQ ID NO: 507080 - RNA, 19 nt, Artificial Sequence
  Description of Artificial Sequence: Synthetic oligonucleotide
aagguaucagccauagcug

SEQ ID NO: 507081 - RNA, 19 nt, Artificial Sequence
  Description of Artificial Sequence: Synthetic oligonucleotide
uguccuaagccccuacacu

SEQ ID NO: 507082 - RNA, 19 nt, Artificial Sequence
  Description of Artificial Sequence: Synthetic oligonucleotide
auauguuccaggaagguau

SEQ ID NO: 507083 - RNA, 19 nt, Artificial Sequence
  Description of Artificial Sequence: Synthetic oligonucleotide
gggauuucgagucacagca

SEQ ID NO: 507084 - RNA, 19 nt, Artificial Sequence
  Description of Artificial Sequence: Synthetic oligonucleotide
gauacucaugaguuccaug

SEQ ID NO: 507085 - RNA, 19 nt, Artificial Sequence
  Description of Artificial Sequence: Synthetic oligonucleotide
gacgccuucaugguucucg

SEQ ID NO: 507086 - RNA, 19 nt, Artificial Sequence
  Description of Artificial Sequence: Synthetic oligonucleotide
cacuauagcaacaggccug

SEQ ID NO: 507087 - RNA, 19 nt, Artificial Sequence
  Description of Artificial Sequence: Synthetic oligonucleotide
agcacuacaagcguugcug

SEQ ID NO: 507088 - RNA, 19 nt, Artificial Sequence
  Description of Artificial Sequence: Synthetic oligonucleotide
cuacaggagcaaaacacac

SEQ ID NO: 507089 - RNA, 19 nt, Artificial Sequence
  Description of Artificial Sequence: Synthetic oligonucleotide
gucaccacgagccaccaug

SEQ ID NO: 507090 - RNA, 19 nt, Artificial Sequence
  Description of Artificial Sequence: Synthetic oligonucleotide
ucgaacagaagguggcgag

SEQ ID NO: 507091 - RNA, 19 nt, Artificial Sequence
  Description of Artificial Sequence: Synthetic oligonucleotide
ucaauguccaggcggcaca

SEQ ID NO: 507092 - RNA, 19 nt, Artificial Sequence
  Description of Artificial Sequence: Synthetic oligonucleotide
ugggcucuaguccauauuu

SEQ ID NO: 507093 - RNA, 19 nt, Artificial Sequence
  Description of Artificial Sequence: Synthetic oligonucleotide
ucaaggcacaggcacgaca

SEQ ID NO: 507094 - RNA, 19 nt, Artificial Sequence
  Description of Artificial Sequence: Synthetic oligonucleotide
cuuccuaaccucaugcaca

SEQ ID NO: 507095 - RNA, 19 nt, Artificial Sequence
  Description of Artificial Sequence: Synthetic oligonucleotide
gaucccaucacuggccucc

SEQ ID NO: 507096 - RNA, 19 nt, Artificial Sequence
  Description of Artificial Sequence: Synthetic oligonucleotide
aucuaggacugcauuggcc

SEQ ID NO: 507097 - RNA, 19 nt, Artificial Sequence
  Description of Artificial Sequence: Synthetic oligonucleotide
gaggguuuacaauucugca

SEQ ID NO: 507098 - RNA, 19 nt, Artificial Sequence
  Description of Artificial Sequence: Synthetic oligonucleotide
aggguuuacaauucugcau

SEQ ID NO: 507099 - RNA, 19 nt, Artificial Sequence
  Description of Artificial Sequence: Synthetic oligonucleotide
auaacugcaagugguagau

SEQ ID NO: 507100 - RNA, 19 nt, Artificial Sequence
  Description of Artificial Sequence: Synthetic oligonucleotide
ggucguugguaauaggugc

SEQ ID NO: 507101 - RNA, 19 nt, Artificial Sequence
  Description of Artificial Sequence: Synthetic oligonucleotide
uacagaugggccugacgag

SEQ ID NO: 507102 - RNA, 19 nt, Artificial Sequence
  Description of Artificial Sequence: Synthetic oligonucleotide
uguucgcacauucuugaua

SEQ ID NO: 507103 - RNA, 19 nt, Artificial Sequence
  Description of Artificial Sequence: Synthetic oligonucleotide
cucugcgugauacucauga

SEQ ID NO: 507104 - RNA, 19 nt, Artificial Sequence
  Description of Artificial Sequence: Synthetic oligonucleotide
cugcaagugguagauggcg

SEQ ID NO: 507105 - RNA, 19 nt, Artificial Sequence
  Description of Artificial Sequence: Synthetic oligonucleotide
agccccuacacucuugcug

SEQ ID NO: 507106 - RNA, 19 nt, Artificial Sequence
  Description of Artificial Sequence: Synthetic oligonucleotide
cugggcaacuuucuacagg

SEQ ID NO: 507107 - RNA, 19 nt, Artificial Sequence
  Description of Artificial Sequence: Synthetic oligonucleotide
ucguccaaucaucaucuuc

SEQ ID NO: 507108 - RNA, 19 nt, Artificial Sequence
  Description of Artificial Sequence: Synthetic oligonucleotide
gaugggugcggagucaaug

SEQ ID NO: 507109 - RNA, 19 nt, Artificial Sequence
  Description of Artificial Sequence: Synthetic oligonucleotide
cagaccgggaggcaggacc

SEQ ID NO: 507110 - RNA, 19 nt, Artificial Sequence
  Description of Artificial Sequence: Synthetic oligonucleotide
uucugacacagcagggaga

SEQ ID NO: 507111 - RNA, 19 nt, Artificial Sequence
  Description of Artificial Sequence: Synthetic oligonucleotide
acugcaagugguagauggc

SEQ ID NO: 507112 - RNA, 19 nt, Artificial Sequence
  Description of Artificial Sequence: Synthetic oligonucleotide
gcagcgaugccuaagucgg

SEQ ID NO: 507113 - RNA, 19 nt, Artificial Sequence
  Description of Artificial Sequence: Synthetic oligonucleotide
cuccauguaggcguugucc

SEQ ID NO: 507114 - RNA, 19 nt, Artificial Sequence
  Description of Artificial Sequence: Synthetic oligonucleotide
guaccgcauccuuacacag

SEQ ID NO: 507115 - RNA, 19 nt, Artificial Sequence
  Description of Artificial Sequence: Synthetic oligonucleotide
uggccuaauggaugggaug

SEQ ID NO: 507116 - RNA, 19 nt, Artificial Sequence
  Description of Artificial Sequence: Synthetic oligonucleotide
ucuguggggucguugguaa

SEQ ID NO: 507117 - RNA, 19 nt, Artificial Sequence
  Description of Artificial Sequence: Synthetic oligonucleotide
uacggcggcagcuucugug

SEQ ID NO: 507118 - RNA, 19 nt, Artificial Sequence
  Description of Artificial Sequence: Synthetic oligonucleotide
agaagccucgggccuugcc

SEQ ID NO: 507119 - RNA, 19 nt, Artificial Sequence
  Description of Artificial Sequence: Synthetic oligonucleotide
uccauauuucaaagccagu

SEQ ID NO: 507120 - RNA, 19 nt, Artificial Sequence
  Description of Artificial Sequence: Synthetic oligonucleotide
aggacgauaauggccccac

SEQ ID NO: 507121 - RNA, 19 nt, Artificial Sequence
  Description of Artificial Sequence: Synthetic oligonucleotide
agcgaugccuaagucggac

SEQ ID NO: 507122 - RNA, 19 nt, Artificial Sequence
  Description of Artificial Sequence: Synthetic oligonucleotide
uuccuaaccucaugcacau

SEQ ID NO: 507123 - RNA, 19 nt, Artificial Sequence
  Description of Artificial Sequence: Synthetic oligonucleotide
aggcacgacacgcauggug

SEQ ID NO: 507124 - RNA, 19 nt, Artificial Sequence
  Description of Artificial Sequence: Synthetic oligonucleotide
augggugcggagucaaugu

SEQ ID NO: 507125 - RNA, 19 nt, Artificial Sequence
  Description of Artificial Sequence: Synthetic oligonucleotide
ucgcacauucuugauaguc

SEQ ID NO: 507126 - RNA, 19 nt, Artificial Sequence
  Description of Artificial Sequence: Synthetic oligonucleotide
uaccgcauccuuacacagc

SEQ ID NO: 507127 - RNA, 19 nt, Artificial Sequence
  Description of Artificial Sequence: Synthetic oligonucleotide
agguccucgggcguacucc

SEQ ID NO: 507128 - RNA, 19 nt, Artificial Sequence
  Description of Artificial Sequence: Synthetic oligonucleotide
ucgggcguacuccggaucu

SEQ ID NO: 507129 - RNA, 19 nt, Artificial Sequence
  Description of Artificial Sequence: Synthetic oligonucleotide
acgagccacauucauucca

SEQ ID NO: 507130 - RNA, 19 nt, Artificial Sequence
  Description of Artificial Sequence: Synthetic oligonucleotide
aagcguugcuggccuaaug

SEQ ID NO: 507131 - RNA, 19 nt, Artificial Sequence
  Description of Artificial Sequence: Synthetic oligonucleotide
gugcacaaggaggaguggg

SEQ ID NO: 507132 - RNA, 19 nt, Artificial Sequence
  Description of Artificial Sequence: Synthetic oligonucleotide
gaaaugagcccgucaucca

SEQ ID NO: 507133 - RNA, 19 nt, Artificial Sequence
  Description of Artificial Sequence: Synthetic oligonucleotide
caugcggacagcuuccaga

SEQ ID NO: 507134 - RNA, 19 nt, Artificial Sequence
  Description of Artificial Sequence: Synthetic oligonucleotide
uagauggcggccucugccu

SEQ ID NO: 507135 - RNA, 19 nt, Artificial Sequence
  Description of Artificial Sequence: Synthetic oligonucleotide
cugcaacacuugaaagagg

SEQ ID NO: 507136 - RNA, 19 nt, Artificial Sequence
  Description of Artificial Sequence: Synthetic oligonucleotide
gcuuccagaggguaguccc

SEQ ID NO: 507137 - RNA, 19 nt, Artificial Sequence
  Description of Artificial Sequence: Synthetic oligonucleotide
ucuugcagcgaugccuaag

SEQ ID NO: 507138 - RNA, 19 nt, Artificial Sequence
  Description of Artificial Sequence: Synthetic oligonucleotide
cuuucuguggcuguucgca

SEQ ID NO: 507139 - RNA, 19 nt, Artificial Sequence
  Description of Artificial Sequence: Synthetic oligonucleotide
uucgagucacagcaaugau

SEQ ID NO: 507140 - RNA, 19 nt, Artificial Sequence
  Description of Artificial Sequence: Synthetic oligonucleotide
acgacacgcaugguguugg

SEQ ID NO: 507141 - RNA, 19 nt, Artificial Sequence
  Description of Artificial Sequence: Synthetic oligonucleotide
guguugcgggccgugaugg

SEQ ID NO: 507142 - RNA, 19 nt, Artificial Sequence
  Description of Artificial Sequence: Synthetic oligonucleotide
cacuacaagcguugcuggc

SEQ ID NO: 507143 - RNA, 19 nt, Artificial Sequence
  Description of Artificial Sequence: Synthetic oligonucleotide
acgugggcgguaccuggcc

SEQ ID NO: 507144 - RNA, 19 nt, Artificial Sequence
  Description of Artificial Sequence: Synthetic oligonucleotide
uugauagucucugcgugau

SEQ ID NO: 507145 - RNA, 19 nt, Artificial Sequence
  Description of Artificial Sequence: Synthetic oligonucleotide
acggcgaagcuccucaaau

SEQ ID NO: 507146 - RNA, 19 nt, Artificial Sequence
  Description of Artificial Sequence: Synthetic oligonucleotide
caagaagaccuucucugca

SEQ ID NO: 507147 - RNA, 19 nt, Artificial Sequence
  Description of Artificial Sequence: Synthetic oligonucleotide
uugcgggccgugaugggug

SEQ ID NO: 507148 - RNA, 19 nt, Artificial Sequence
  Description of Artificial Sequence: Synthetic oligonucleotide
aacuuucuacaggagcaaa

SEQ ID NO: 507149 - RNA, 19 nt, Artificial Sequence
  Description of Artificial Sequence: Synthetic oligonucleotide
aauaggugccagacggcga

SEQ ID NO: 507150 - RNA, 19 nt, Artificial Sequence
  Description of Artificial Sequence: Synthetic oligonucleotide
gauuucgagucacagcaau

SEQ ID NO: 507151 - RNA, 19 nt, Artificial Sequence
  Description of Artificial Sequence: Synthetic oligonucleotide
uucacacggaggucuacau

SEQ ID NO: 507152 - RNA, 19 nt, Artificial Sequence
  Description of Artificial Sequence: Synthetic oligonucleotide
caaauaacugcaaguggua

SEQ ID NO: 507153 - RNA, 19 nt, Artificial Sequence
  Description of Artificial Sequence: Synthetic oligonucleotide
ugcggaugaaagaggcaaa

SEQ ID NO: 507154 - RNA, 19 nt, Artificial Sequence
  Description of Artificial Sequence: Synthetic oligonucleotide
gugagcacuacaagcguug

SEQ ID NO: 507155 - RNA, 19 nt, Artificial Sequence
  Description of Artificial Sequence: Synthetic oligonucleotide
ugacauucaggugggcacu

SEQ ID NO: 507156 - RNA, 19 nt, Artificial Sequence
  Description of Artificial Sequence: Synthetic oligonucleotide
gguacagaugggccugacg

SEQ ID NO: 507157 - RNA, 19 nt, Artificial Sequence
  Description of Artificial Sequence: Synthetic oligonucleotide
caucguccaaucaucaucu

SEQ ID NO: 507158 - RNA, 19 nt, Artificial Sequence
  Description of Artificial Sequence: Synthetic oligonucleotide
ugagcacuacaagcguugc

SEQ ID NO: 507159 - RNA, 19 nt, Artificial Sequence
  Description of Artificial Sequence: Synthetic oligonucleotide
gcaucguccaaucaucauc

SEQ ID NO: 507160 - RNA, 19 nt, Artificial Sequence
  Description of Artificial Sequence: Synthetic oligonucleotide
ucgguugcaucguccaauc

SEQ ID NO: 507161 - RNA, 19 nt, Artificial Sequence
  Description of Artificial Sequence: Synthetic oligonucleotide
gcacuacaagcguugcugg

SEQ ID NO: 507162 - RNA, 19 nt, Artificial Sequence
  Description of Artificial Sequence: Synthetic oligonucleotide
guauggcccagagugagca

SEQ ID NO: 507163 - RNA, 19 nt, Artificial Sequence
  Description of Artificial Sequence: Synthetic oligonucleotide
caaauucacacggaggucu

SEQ ID NO: 507164 - RNA, 19 nt, Artificial Sequence
  Description of Artificial Sequence: Synthetic oligonucleotide
guggagugcacaaggagga

SEQ ID NO: 507165 - RNA, 19 nt, Artificial Sequence
  Description of Artificial Sequence: Synthetic oligonucleotide
cuaggacugcauuggccac

SEQ ID NO: 507166 - RNA, 19 nt, Artificial Sequence
  Description of Artificial Sequence: Synthetic oligonucleotide
guaauaggugccagacggc

SEQ ID NO: 507167 - RNA, 19 nt, Artificial Sequence
  Description of Artificial Sequence: Synthetic oligonucleotide
ucguugguaauaggugcca

SEQ ID NO: 507168 - RNA, 19 nt, Artificial Sequence
  Description of Artificial Sequence: Synthetic oligonucleotide
gaaucucaaugcccagguc

SEQ ID NO: 507169 - RNA, 19 nt, Artificial Sequence
  Description of Artificial Sequence: Synthetic oligonucleotide
uccucgggcguacuccgga

SEQ ID NO: 507170 - RNA, 19 nt, Artificial Sequence
  Description of Artificial Sequence: Synthetic oligonucleotide
uguugcgggccgugauggg

SEQ ID NO: 507171 - RNA, 19 nt, Artificial Sequence
  Description of Artificial Sequence: Synthetic oligonucleotide
guugguguagccagagcca

SEQ ID NO: 507172 - RNA, 19 nt, Artificial Sequence
  Description of Artificial Sequence: Synthetic oligonucleotide
ugggugcggagucaauguc

SEQ ID NO: 507173 - RNA, 19 nt, Artificial Sequence
  Description of Artificial Sequence: Synthetic oligonucleotide
acuuucuacaggagcaaaa

SEQ ID NO: 507174 - RNA, 19 nt, Artificial Sequence
  Description of Artificial Sequence: Synthetic oligonucleotide
ggccaaauucacacggagg

SEQ ID NO: 507175 - RNA, 19 nt, Artificial Sequence
  Description of Artificial Sequence: Synthetic oligonucleotide
ugauacucaugaguuccau

SEQ ID NO: 507176 - RNA, 19 nt, Artificial Sequence
  Description of Artificial Sequence: Synthetic oligonucleotide
gguggggcgagguuucuug

SEQ ID NO: 507177 - RNA, 19 nt, Artificial Sequence
  Description of Artificial Sequence: Synthetic oligonucleotide
gugaaaugagcccgucauc

SEQ ID NO: 507178 - RNA, 19 nt, Artificial Sequence
  Description of Artificial Sequence: Synthetic oligonucleotide
ugagacagcugggcucuag

SEQ ID NO: 507179 - RNA, 19 nt, Artificial Sequence
  Description of Artificial Sequence: Synthetic oligonucleotide
ugccgucgaacagaaggug

SEQ ID NO: 507180 - RNA, 19 nt, Artificial Sequence
  Description of Artificial Sequence: Synthetic oligonucleotide
ggccugacgagcugucugg

SEQ ID NO: 507181 - RNA, 19 nt, Artificial Sequence
  Description of Artificial Sequence: Synthetic oligonucleotide
ugacgagcugucuggggau

SEQ ID NO: 507182 - RNA, 19 nt, Artificial Sequence
  Description of Artificial Sequence: Synthetic oligonucleotide
cuaagccccuacacucuug

SEQ ID NO: 507183 - RNA, 19 nt, Artificial Sequence
  Description of Artificial Sequence: Synthetic oligonucleotide
gcggagucaauguccaggc

SEQ ID NO: 507184 - RNA, 19 nt, Artificial Sequence
  Description of Artificial Sequence: Synthetic oligonucleotide
gcuguucgcacauucuuga

SEQ ID NO: 507185 - RNA, 19 nt, Artificial Sequence
  Description of Artificial Sequence: Synthetic oligonucleotide
gaucuugcagcgaugccua

SEQ ID NO: 507186 - RNA, 19 nt, Artificial Sequence
  Description of Artificial Sequence: Synthetic oligonucleotide
ccaggcggcacauauguuc

SEQ ID NO: 507187 - RNA, 19 nt, Artificial Sequence
  Description of Artificial Sequence: Synthetic oligonucleotide
caucaaaccugcggacgcc

SEQ ID NO: 507188 - RNA, 19 nt, Artificial Sequence
  Description of Artificial Sequence: Synthetic oligonucleotide
gaguccaguccugaucuca

SEQ ID NO: 507189 - RNA, 19 nt, Artificial Sequence
  Description of Artificial Sequence: Synthetic oligonucleotide
uggagugcacaaggaggag

SEQ ID NO: 507190 - RNA, 19 nt, Artificial Sequence
  Description of Artificial Sequence: Synthetic oligonucleotide
gugauaaaggcagaggguu

SEQ ID NO: 507191 - RNA, 19 nt, Artificial Sequence
  Description of Artificial Sequence: Synthetic oligonucleotide
ccuuccuaaccucaugcac

SEQ ID NO: 507192 - RNA, 19 nt, Artificial Sequence
  Description of Artificial Sequence: Synthetic oligonucleotide
ggucaaggguuaucuacac

SEQ ID NO: 507193 - RNA, 19 nt, Artificial Sequence
  Description of Artificial Sequence: Synthetic oligonucleotide
aagccccuacacucuugcu

SEQ ID NO: 507194 - RNA, 19 nt, Artificial Sequence
  Description of Artificial Sequence: Synthetic oligonucleotide
cuacauccucagcccaggc

SEQ ID NO: 507195 - RNA, 19 nt, Artificial Sequence
  Description of Artificial Sequence: Synthetic oligonucleotide
aaauucacacggaggucua

SEQ ID NO: 507196 - RNA, 19 nt, Artificial Sequence
  Description of Artificial Sequence: Synthetic oligonucleotide
augagcccgucauccacgu

SEQ ID NO: 507197 - RNA, 19 nt, Artificial Sequence
  Description of Artificial Sequence: Synthetic oligonucleotide
gacacgcaugguguuggug

SEQ ID NO: 507198 - RNA, 19 nt, Artificial Sequence
  Description of Artificial Sequence: Synthetic oligonucleotide
ccuaauggaugggaugggg

SEQ ID NO: 507199 - RNA, 19 nt, Artificial Sequence
  Description of Artificial Sequence: Synthetic oligonucleotide
ccgucuugaagaagccucg

SEQ ID NO: 507200 - RNA, 19 nt, Artificial Sequence
  Description of Artificial Sequence: Synthetic oligonucleotide
cacgguacagaugggccug

SEQ ID NO: 507201 - RNA, 19 nt, Artificial Sequence
  Description of Artificial Sequence: Synthetic oligonucleotide
cagcucgguugcaucgucc

SEQ ID NO: 507202 - RNA, 19 nt, Artificial Sequence
  Description of Artificial Sequence: Synthetic oligonucleotide
uauugacauucaggugggc

SEQ ID NO: 507203 - RNA, 19 nt, Artificial Sequence
  Description of Artificial Sequence: Synthetic oligonucleotide
ugccagauuuggugaggac

SEQ ID NO: 507204 - RNA, 19 nt, Artificial Sequence
  Description of Artificial Sequence: Synthetic oligonucleotide
agcaaugaugggagcacgu

SEQ ID NO: 507205 - RNA, 19 nt, Artificial Sequence
  Description of Artificial Sequence: Synthetic oligonucleotide
caccuuucuccuucaccug

SEQ ID NO: 507206 - RNA, 19 nt, Artificial Sequence
  Description of Artificial Sequence: Synthetic oligonucleotide
aucaaaccugcggacgccu

SEQ ID NO: 507207 - RNA, 19 nt, Artificial Sequence
  Description of Artificial Sequence: Synthetic oligonucleotide
gggucguugguaauaggug

SEQ ID NO: 507208 - RNA, 19 nt, Artificial Sequence
  Description of Artificial Sequence: Synthetic oligonucleotide
uggcgaguggagugugugu

SEQ ID NO: 507209 - RNA, 19 nt, Artificial Sequence
  Description of Artificial Sequence: Synthetic oligonucleotide
aucaaggcacaggcacgac

SEQ ID NO: 507210 - RNA, 19 nt, Artificial Sequence
  Description of Artificial Sequence: Synthetic oligonucleotide
uucgcacauucuugauagu

SEQ ID NO: 507211 - RNA, 19 nt, Artificial Sequence
  Description of Artificial Sequence: Synthetic oligonucleotide
cauguccuaagccccuaca

SEQ ID NO: 507212 - RNA, 19 nt, Artificial Sequence
  Description of Artificial Sequence: Synthetic oligonucleotide
cacgugggcgguaccuggc

SEQ ID NO: 507213 - RNA, 19 nt, Artificial Sequence
  Description of Artificial Sequence: Synthetic oligonucleotide
uauggcccagagugagcac

SEQ ID NO: 507214 - RNA, 19 nt, Artificial Sequence
  Description of Artificial Sequence: Synthetic oligonucleotide
guggcgaguggagugugug

SEQ ID NO: 507215 - RNA, 19 nt, Artificial Sequence
  Description of Artificial Sequence: Synthetic oligonucleotide
ccaugagacagcugggcuc

SEQ ID NO: 507216 - RNA, 19 nt, Artificial Sequence
  Description of Artificial Sequence: Synthetic oligonucleotide
gguugcaucguccaaucau

SEQ ID NO: 507217 - RNA, 19 nt, Artificial Sequence
  Description of Artificial Sequence: Synthetic oligonucleotide
gggcgagguuucuugauca

SEQ ID NO: 507218 - RNA, 19 nt, Artificial Sequence
  Description of Artificial Sequence: Synthetic oligonucleotide
cugcgugauacucaugagu

SEQ ID NO: 507219 - RNA, 19 nt, Artificial Sequence
  Description of Artificial Sequence: Synthetic oligonucleotide
agccucgggccuugccaac

SEQ ID NO: 507220 - RNA, 19 nt, Artificial Sequence
  Description of Artificial Sequence: Synthetic oligonucleotide
gggugcggagucaaugucc

SEQ ID NO: 507221 - RNA, 19 nt, Artificial Sequence
  Description of Artificial Sequence: Synthetic oligonucleotide
acaggccgguagaggaugg

SEQ ID NO: 507222 - RNA, 19 nt, Artificial Sequence
  Description of Artificial Sequence: Synthetic oligonucleotide
ugcggacgccuucaugguu

SEQ ID NO: 507223 - RNA, 19 nt, Artificial Sequence
  Description of Artificial Sequence: Synthetic oligonucleotide
cacgacacgcaugguguug

SEQ ID NO: 507224 - RNA, 19 nt, Artificial Sequence
  Description of Artificial Sequence: Synthetic oligonucleotide
gcacgugggcgguaccugg

SEQ ID NO: 507225 - RNA, 19 nt, Artificial Sequence
  Description of Artificial Sequence: Synthetic oligonucleotide
accugcggacgccuucaug

SEQ ID NO: 507226 - RNA, 19 nt, Artificial Sequence
  Description of Artificial Sequence: Synthetic oligonucleotide
cccuagcuuggguagggcc

SEQ ID NO: 507227 - RNA, 19 nt, Artificial Sequence
  Description of Artificial Sequence: Synthetic oligonucleotide
gguuucggcaugguuucug

SEQ ID NO: 507228 - RNA, 19 nt, Artificial Sequence
  Description of Artificial Sequence: Synthetic oligonucleotide
agagguguugcugcccuuu

SEQ ID NO: 507229 - RNA, 19 nt, Artificial Sequence
  Description of Artificial Sequence: Synthetic oligonucleotide
ccacguagaucuugcugcc

SEQ ID NO: 507230 - RNA, 19 nt, Artificial Sequence
  Description of Artificial Sequence: Synthetic oligonucleotide
ugcgggccgugaugggugc

SEQ ID NO: 507231 - RNA, 19 nt, Artificial Sequence
  Description of Artificial Sequence: Synthetic oligonucleotide
gccacgguacagaugggcc

SEQ ID NO: 507232 - RNA, 19 nt, Artificial Sequence
  Description of Artificial Sequence: Synthetic oligonucleotide
agcacgugggcgguaccug

SEQ ID NO: 507233 - RNA, 19 nt, Artificial Sequence
  Description of Artificial Sequence: Synthetic oligonucleotide
ccuagcuuggguagggcca

SEQ ID NO: 507234 - RNA, 19 nt, Artificial Sequence
  Description of Artificial Sequence: Synthetic oligonucleotide
guucucgauuuugcugaug

SEQ ID NO: 507235 - RNA, 19 nt, Artificial Sequence
  Description of Artificial Sequence: Synthetic oligonucleotide
cuccggggagguucacccc

SEQ ID NO: 507236 - RNA, 19 nt, Artificial Sequence
  Description of Artificial Sequence: Synthetic oligonucleotide
ggcacauauguuccaggaa

SEQ ID NO: 507237 - RNA, 19 nt, Artificial Sequence
  Description of Artificial Sequence: Synthetic oligonucleotide
gcgguaccuggccaccugg

SEQ ID NO: 507238 - RNA, 19 nt, Artificial Sequence
  Description of Artificial Sequence: Synthetic oligonucleotide
gcugaguggagugcacaag

SEQ ID NO: 507239 - RNA, 19 nt, Artificial Sequence
  Description of Artificial Sequence: Synthetic oligonucleotide
gcacuauagcaacaggccu

SEQ ID NO: 507240 - RNA, 19 nt, Artificial Sequence
  Description of Artificial Sequence: Synthetic oligonucleotide
gccuuugaugaguccaguc

SEQ ID NO: 507241 - RNA, 19 nt, Artificial Sequence
  Description of Artificial Sequence: Synthetic oligonucleotide
agaugccacgguacagaug

SEQ ID NO: 507242 - RNA, 19 nt, Artificial Sequence
  Description of Artificial Sequence: Synthetic oligonucleotide
cuauagcaacaggccuggg

SEQ ID NO: 507243 - RNA, 19 nt, Artificial Sequence
  Description of Artificial Sequence: Synthetic oligonucleotide
agcacuccugccagauuug

SEQ ID NO: 507244 - RNA, 19 nt, Artificial Sequence
  Description of Artificial Sequence: Synthetic oligonucleotide
agcuuggguagggccauga

SEQ ID NO: 507245 - RNA, 19 nt, Artificial Sequence
  Description of Artificial Sequence: Synthetic oligonucleotide
ucccuagcuuggguagggc

SEQ ID NO: 507246 - RNA, 19 nt, Artificial Sequence
  Description of Artificial Sequence: Synthetic oligonucleotide
cuacaagcguugcuggccu

SEQ ID NO: 507247 - RNA, 19 nt, Artificial Sequence
  Description of Artificial Sequence: Synthetic oligonucleotide
ccuacacucuugcugucuc

SEQ ID NO: 507248 - RNA, 19 nt, Artificial Sequence
  Description of Artificial Sequence: Synthetic oligonucleotide
ggcgaguggaguguguguc

SEQ ID NO: 507249 - RNA, 19 nt, Artificial Sequence
  Description of Artificial Sequence: Synthetic oligonucleotide
ugcugccgucgaacagaag

SEQ ID NO: 507250 - RNA, 19 nt, Artificial Sequence
  Description of Artificial Sequence: Synthetic oligonucleotide
ggggcgagguuucuugauc

SEQ ID NO: 507251 - RNA, 19 nt, Artificial Sequence
  Description of Artificial Sequence: Synthetic oligonucleotide
ugggcgguaccuggccacc

SEQ ID NO: 507252 - RNA, 19 nt, Artificial Sequence
  Description of Artificial Sequence: Synthetic oligonucleotide
ccggaucuugcagcgaugc

SEQ ID NO: 507253 - RNA, 19 nt, Artificial Sequence
  Description of Artificial Sequence: Synthetic oligonucleotide
cucgggcguacuccggauc

SEQ ID NO: 507254 - RNA, 19 nt, Artificial Sequence
  Description of Artificial Sequence: Synthetic oligonucleotide
gaugggccugacgagcugu

SEQ ID NO: 507255 - RNA, 19 nt, Artificial Sequence
  Description of Artificial Sequence: Synthetic oligonucleotide
gagcacuacaagcguugcu

SEQ ID NO: 507256 - RNA, 19 nt, Artificial Sequence
  Description of Artificial Sequence: Synthetic oligonucleotide
cugccgucgaacagaaggu

SEQ ID NO: 507257 - RNA, 19 nt, Artificial Sequence
  Description of Artificial Sequence: Synthetic oligonucleotide
gccuaauggaugggauggg

SEQ ID NO: 507258 - RNA, 19 nt, Artificial Sequence
  Description of Artificial Sequence: Synthetic oligonucleotide
gcuguuggggaagcaaauc

SEQ ID NO: 507259 - RNA, 19 nt, Artificial Sequence
  Description of Artificial Sequence: Synthetic oligonucleotide
cucagcacggguggggcga

SEQ ID NO: 507260 - RNA, 19 nt, Artificial Sequence
  Description of Artificial Sequence: Synthetic oligonucleotide
uacaagcguugcuggccua

SEQ ID NO: 507261 - RNA, 19 nt, Artificial Sequence
  Description of Artificial Sequence: Synthetic oligonucleotide
gcgugauacucaugaguuc

SEQ ID NO: 507262 - RNA, 19 nt, Artificial Sequence
  Description of Artificial Sequence: Synthetic oligonucleotide
acggcaccuacggcggcag

SEQ ID NO: 507263 - RNA, 19 nt, Artificial Sequence
  Description of Artificial Sequence: Synthetic oligonucleotide
ggggucguugguaauaggu

SEQ ID NO: 507264 - RNA, 19 nt, Artificial Sequence
  Description of Artificial Sequence: Synthetic oligonucleotide
aucguccaaucaucaucuu

SEQ ID NO: 507265 - RNA, 19 nt, Artificial Sequence
  Description of Artificial Sequence: Synthetic oligonucleotide
ggcgccacccagucaguac

SEQ ID NO: 507266 - RNA, 19 nt, Artificial Sequence
  Description of Artificial Sequence: Synthetic oligonucleotide
gacauucaggugggcacua

SEQ ID NO: 507267 - RNA, 19 nt, Artificial Sequence
  Description of Artificial Sequence: Synthetic oligonucleotide
cacgcaugguguuggugua

SEQ ID NO: 507268 - RNA, 19 nt, Artificial Sequence
  Description of Artificial Sequence: Synthetic oligonucleotide
agcccgucauccacguaga

SEQ ID NO: 507269 - RNA, 19 nt, Artificial Sequence
  Description of Artificial Sequence: Synthetic oligonucleotide
cuggccuaauggaugggau

SEQ ID NO: 507270 - RNA, 19 nt, Artificial Sequence
  Description of Artificial Sequence: Synthetic oligonucleotide
ccgggaggcaggaccaaug

SEQ ID NO: 507271 - RNA, 19 nt, Artificial Sequence
  Description of Artificial Sequence: Synthetic oligonucleotide
gcuggccuaauggauggga

SEQ ID NO: 507272 - RNA, 19 nt, Artificial Sequence
  Description of Artificial Sequence: Synthetic oligonucleotide
ugagcccgucauccacgua

SEQ ID NO: 507273 - RNA, 19 nt, Artificial Sequence
  Description of Artificial Sequence: Synthetic oligonucleotide
cuaaccucaugcacaucuu

SEQ ID NO: 507274 - RNA, 19 nt, Artificial Sequence
  Description of Artificial Sequence: Synthetic oligonucleotide
gcguacuccggaucuugca

SEQ ID NO: 507275 - RNA, 19 nt, Artificial Sequence
  Description of Artificial Sequence: Synthetic oligonucleotide
guagggccaugagacagcu

SEQ ID NO: 507276 - RNA, 19 nt, Artificial Sequence
  Description of Artificial Sequence: Synthetic oligonucleotide
accuacggcggcagcuucu

SEQ ID NO: 507277 - RNA, 19 nt, Artificial Sequence
  Description of Artificial Sequence: Synthetic oligonucleotide
ggcguacuccggaucuugc

SEQ ID NO: 507278 - RNA, 19 nt, Artificial Sequence
  Description of Artificial Sequence: Synthetic oligonucleotide
ggcgguaccuggccaccug

SEQ ID NO: 507279 - RNA, 19 nt, Artificial Sequence
  Description of Artificial Sequence: Synthetic oligonucleotide
gggcucuaguccauauuuc

SEQ ID NO: 507280 - RNA, 19 nt, Artificial Sequence
  Description of Artificial Sequence: Synthetic oligonucleotide
ugagguccucgggcguacu

SEQ ID NO: 507281 - RNA, 19 nt, Artificial Sequence
  Description of Artificial Sequence: Synthetic oligonucleotide
gggcaacuuucuacaggag

SEQ ID NO: 507282 - RNA, 19 nt, Artificial Sequence
  Description of Artificial Sequence: Synthetic oligonucleotide
cccgucauccacguagauc

SEQ ID NO: 507283 - RNA, 19 nt, Artificial Sequence
  Description of Artificial Sequence: Synthetic oligonucleotide
gccaugagacagcugggcu

SEQ ID NO: 507284 - RNA, 19 nt, Artificial Sequence
  Description of Artificial Sequence: Synthetic oligonucleotide
augccacgguacagauggg

SEQ ID NO: 507285 - RNA, 19 nt, Artificial Sequence
  Description of Artificial Sequence: Synthetic oligonucleotide
gagcacgugggcgguaccu

SEQ ID NO: 507286 - RNA, 19 nt, Artificial Sequence
  Description of Artificial Sequence: Synthetic oligonucleotide
acgguacagaugggccuga

SEQ ID NO: 507287 - RNA, 19 nt, Artificial Sequence
  Description of Artificial Sequence: Synthetic oligonucleotide
ggccgugaugggugcggag

SEQ ID NO: 507288 - RNA, 19 nt, Artificial Sequence
  Description of Artificial Sequence: Synthetic oligonucleotide
cuccaucuaggacugcauu

SEQ ID NO: 507289 - RNA, 19 nt, Artificial Sequence
  Description of Artificial Sequence: Synthetic oligonucleotide
cguugguaauaggugccag

SEQ ID NO: 507290 - RNA, 19 nt, Artificial Sequence
  Description of Artificial Sequence: Synthetic oligonucleotide
acgagcugucuggggauuu

SEQ ID NO: 507291 - RNA, 19 nt, Artificial Sequence
  Description of Artificial Sequence: Synthetic oligonucleotide
guggcuguucgcacauucu

SEQ ID NO: 507292 - RNA, 19 nt, Artificial Sequence
  Description of Artificial Sequence: Synthetic oligonucleotide
gggcuagaagaggggcucc

SEQ ID NO: 507293 - RNA, 19 nt, Artificial Sequence
  Description of Artificial Sequence: Synthetic oligonucleotide
ccgugaugggugcggaguc

SEQ ID NO: 507294 - RNA, 19 nt, Artificial Sequence
  Description of Artificial Sequence: Synthetic oligonucleotide
accgggaggcaggaccaau

SEQ ID NO: 507295 - RNA, 19 nt, Artificial Sequence
  Description of Artificial Sequence: Synthetic oligonucleotide
cgcaugguguugguguagc

SEQ ID NO: 507296 - RNA, 19 nt, Artificial Sequence
  Description of Artificial Sequence: Synthetic oligonucleotide
cagcgaugccuaagucgga

SEQ ID NO: 507297 - RNA, 19 nt, Artificial Sequence
  Description of Artificial Sequence: Synthetic oligonucleotide
gggagcacgugggcgguac

SEQ ID NO: 507298 - RNA, 19 nt, Artificial Sequence
  Description of Artificial Sequence: Synthetic oligonucleotide
cuguucgcacauucuugau

SEQ ID NO: 507299 - RNA, 19 nt, Artificial Sequence
  Description of Artificial Sequence: Synthetic oligonucleotide
cacggcaccuacggcggca

SEQ ID NO: 507300 - RNA, 19 nt, Artificial Sequence
  Description of Artificial Sequence: Synthetic oligonucleotide
cugcggacgccuucauggu

SEQ ID NO: 507301 - RNA, 19 nt, Artificial Sequence
  Description of Artificial Sequence: Synthetic oligonucleotide
ccagcucgguugcaucguc

SEQ ID NO: 507302 - RNA, 19 nt, Artificial Sequence
  Description of Artificial Sequence: Synthetic oligonucleotide
gcgaguggagugugugucu

SEQ ID NO: 507303 - RNA, 19 nt, Artificial Sequence
  Description of Artificial Sequence: Synthetic oligonucleotide
gcccaaggagccaccguuc

SEQ ID NO: 507304 - RNA, 19 nt, Artificial Sequence
  Description of Artificial Sequence: Synthetic oligonucleotide
cacggguggggcgagguuu

SEQ ID NO: 507305 - RNA, 19 nt, Artificial Sequence
  Description of Artificial Sequence: Synthetic oligonucleotide
cagcacggguggggcgagg

SEQ ID NO: 507306 - RNA, 19 nt, Artificial Sequence
  Description of Artificial Sequence: Synthetic oligonucleotide
gguucucgauuuugcugau

SEQ ID NO: 507307 - RNA, 19 nt, Artificial Sequence
  Description of Artificial Sequence: Synthetic oligonucleotide
gcagcuccggggagguuca

SEQ ID NO: 507308 - RNA, 19 nt, Artificial Sequence
  Description of Artificial Sequence: Synthetic oligonucleotide
gacgagcugucuggggauu

SEQ ID NO: 507309 - RNA, 19 nt, Artificial Sequence
  Description of Artificial Sequence: Synthetic oligonucleotide
ugggagcacgugggcggua

SEQ ID NO: 507310 - RNA, 19 nt, Artificial Sequence
  Description of Artificial Sequence: Synthetic oligonucleotide
ccuguaccgcauccuuaca

SEQ ID NO: 507311 - RNA, 19 nt, Artificial Sequence
  Description of Artificial Sequence: Synthetic oligonucleotide
gaccgggaggcaggaccaa

SEQ ID NO: 507312 - RNA, 19 nt, Artificial Sequence
  Description of Artificial Sequence: Synthetic oligonucleotide
gaguuccaugagagaaauu

SEQ ID NO: 507313 - RNA, 19 nt, Artificial Sequence
  Description of Artificial Sequence: Synthetic oligonucleotide
ggcgagguuucuugaucau

SEQ ID NO: 507314 - RNA, 19 nt, Artificial Sequence
  Description of Artificial Sequence: Synthetic oligonucleotide
ggacgauaauggccccacu

SEQ ID NO: 507315 - RNA, 19 nt, Artificial Sequence
  Description of Artificial Sequence: Synthetic oligonucleotide
cuguggggucguugguaau

SEQ ID NO: 507316 - RNA, 19 nt, Artificial Sequence
  Description of Artificial Sequence: Synthetic oligonucleotide
caagcguugcuggccuaau

SEQ ID NO: 507317 - RNA, 19 nt, Artificial Sequence
  Description of Artificial Sequence: Synthetic oligonucleotide
gcgggccgugaugggugcg

SEQ ID NO: 507318 - RNA, 19 nt, Artificial Sequence
  Description of Artificial Sequence: Synthetic oligonucleotide
ccaguguugcgggccguga

SEQ ID NO: 507319 - RNA, 19 nt, Artificial Sequence
  Description of Artificial Sequence: Synthetic oligonucleotide
cuacggcggcagcuucugu

SEQ ID NO: 507320 - RNA, 19 nt, Artificial Sequence
  Description of Artificial Sequence: Synthetic oligonucleotide
gggccgugaugggugcgga

SEQ ID NO: 507321 - RNA, 19 nt, Artificial Sequence
  Description of Artificial Sequence: Synthetic oligonucleotide
cgugggcgguaccuggcca

SEQ ID NO: 507322 - RNA, 19 nt, Artificial Sequence
  Description of Artificial Sequence: Synthetic oligonucleotide
gcacgacacgcaugguguu

SEQ ID NO: 507323 - RNA, 19 nt, Artificial Sequence
  Description of Artificial Sequence: Synthetic oligonucleotide
ccuaagccccuacacucuu

SEQ ID NO: 507324 - RNA, 19 nt, Artificial Sequence
  Description of Artificial Sequence: Synthetic oligonucleotide
cgguugcaucguccaauca

SEQ ID NO: 507325 - RNA, 19 nt, Artificial Sequence
  Description of Artificial Sequence: Synthetic oligonucleotide
cucgggccuugccaacauu

SEQ ID NO: 507326 - RNA, 19 nt, Artificial Sequence
  Description of Artificial Sequence: Synthetic oligonucleotide
gcgccacaguauggcccag

SEQ ID NO: 507327 - RNA, 19 nt, Artificial Sequence
  Description of Artificial Sequence: Synthetic oligonucleotide
gggcgccacccagucagua

SEQ ID NO: 507328 - RNA, 19 nt, Artificial Sequence
  Description of Artificial Sequence: Synthetic oligonucleotide
cgguacagaugggccugac

SEQ ID NO: 507329 - RNA, 19 nt, Artificial Sequence
  Description of Artificial Sequence: Synthetic oligonucleotide
ccccgucuugaagaagccu

SEQ ID NO: 507330 - RNA, 19 nt, Artificial Sequence
  Description of Artificial Sequence: Synthetic oligonucleotide
cccauguccuaagccccua

SEQ ID NO: 507331 - RNA, 19 nt, Artificial Sequence
  Description of Artificial Sequence: Synthetic oligonucleotide
gcccgucauccacguagau

SEQ ID NO: 507332 - RNA, 19 nt, Artificial Sequence
  Description of Artificial Sequence: Synthetic oligonucleotide
gggcgguaccuggccaccu

SEQ ID NO: 507333 - RNA, 19 nt, Artificial Sequence
  Description of Artificial Sequence: Synthetic oligonucleotide
ccucgggcguacuccggau

SEQ ID NO: 507334 - RNA, 19 nt, Artificial Sequence
  Description of Artificial Sequence: Synthetic oligonucleotide
ggguggggcgagguuucuu

SEQ ID NO: 507335 - RNA, 19 nt, Artificial Sequence
  Description of Artificial Sequence: Synthetic oligonucleotide
cgggcguacuccggaucuu

SEQ ID NO: 507336 - RNA, 19 nt, Artificial Sequence
  Description of Artificial Sequence: Synthetic oligonucleotide
ugauauagggaucugaugg

SEQ ID NO: 507337 - RNA, 19 nt, Artificial Sequence
  Description of Artificial Sequence: Synthetic oligonucleotide
uuuacaaugaagaaaacaa

SEQ ID NO: 507338 - RNA, 19 nt, Artificial Sequence
  Description of Artificial Sequence: Synthetic oligonucleotide
ugauugacuacucugaucc

SEQ ID NO: 507339 - RNA, 19 nt, Artificial Sequence
  Description of Artificial Sequence: Synthetic oligonucleotide
uguucuauaauucuucucu

SEQ ID NO: 507340 - RNA, 19 nt, Artificial Sequence
  Description of Artificial Sequence: Synthetic oligonucleotide
ugugaaaugauauagggau

SEQ ID NO: 507341 - RNA, 19 nt, Artificial Sequence
  Description of Artificial Sequence: Synthetic oligonucleotide
ugauuuagcuguaagauac

SEQ ID NO: 507342 - RNA, 19 nt, Artificial Sequence
  Description of Artificial Sequence: Synthetic oligonucleotide
aaagaauggaacguggugg

SEQ ID NO: 507343 - RNA, 19 nt, Artificial Sequence
  Description of Artificial Sequence: Synthetic oligonucleotide
ucagguaccauuuauuucc

SEQ ID NO: 507344 - RNA, 19 nt, Artificial Sequence
  Description of Artificial Sequence: Synthetic oligonucleotide
uccacuaugacuaaccaug

SEQ ID NO: 507345 - RNA, 19 nt, Artificial Sequence
  Description of Artificial Sequence: Synthetic oligonucleotide
aaagaagugauuuucccca

SEQ ID NO: 507346 - RNA, 19 nt, Artificial Sequence
  Description of Artificial Sequence: Synthetic oligonucleotide
auagccauagcgcucaccc

SEQ ID NO: 507347 - RNA, 19 nt, Artificial Sequence
  Description of Artificial Sequence: Synthetic oligonucleotide
ucaugcuuuaaaucuaucg

SEQ ID NO: 507348 - RNA, 19 nt, Artificial Sequence
  Description of Artificial Sequence: Synthetic oligonucleotide
uuuacaugcuccuacauac

SEQ ID NO: 507349 - RNA, 19 nt, Artificial Sequence
  Description of Artificial Sequence: Synthetic oligonucleotide
acauacauuaaucaggcug

SEQ ID NO: 507350 - RNA, 19 nt, Artificial Sequence
  Description of Artificial Sequence: Synthetic oligonucleotide
cauacauuaaucaggcugg

SEQ ID NO: 507351 - RNA, 19 nt, Artificial Sequence
  Description of Artificial Sequence: Synthetic oligonucleotide
guaauucgcacauaaaucc

SEQ ID NO: 507352 - RNA, 19 nt, Artificial Sequence
  Description of Artificial Sequence: Synthetic oligonucleotide
aaacaucuauuccaugugg

SEQ ID NO: 507353 - RNA, 19 nt, Artificial Sequence
  Description of Artificial Sequence: Synthetic oligonucleotide
uauacguuacagaaaagug

SEQ ID NO: 507354 - RNA, 19 nt, Artificial Sequence
  Description of Artificial Sequence: Synthetic oligonucleotide
uuugucauggcuacgauuc

SEQ ID NO: 507355 - RNA, 19 nt, Artificial Sequence
  Description of Artificial Sequence: Synthetic oligonucleotide
ugaccuaccagguaauucg

SEQ ID NO: 507356 - RNA, 19 nt, Artificial Sequence
  Description of Artificial Sequence: Synthetic oligonucleotide
uacguuacagaaaagugug

SEQ ID NO: 507357 - RNA, 19 nt, Artificial Sequence
  Description of Artificial Sequence: Synthetic oligonucleotide
gaagucgggauauuuaaag

SEQ ID NO: 507358 - RNA, 19 nt, Artificial Sequence
  Description of Artificial Sequence: Synthetic oligonucleotide
uaauggugaaugaucgugg

SEQ ID NO: 507359 - RNA, 19 nt, Artificial Sequence
  Description of Artificial Sequence: Synthetic oligonucleotide
uacccuauuuccacgaagg

SEQ ID NO: 507360 - RNA, 19 nt, Artificial Sequence
  Description of Artificial Sequence: Synthetic oligonucleotide
ugugacauagcuguagccg

SEQ ID NO: 507361 - RNA, 19 nt, Artificial Sequence
  Description of Artificial Sequence: Synthetic oligonucleotide
ugcuauacguuacagaaaa

SEQ ID NO: 507362 - RNA, 19 nt, Artificial Sequence
  Description of Artificial Sequence: Synthetic oligonucleotide
uaaugugucaucauccacu

SEQ ID NO: 507363 - RNA, 19 nt, Artificial Sequence
  Description of Artificial Sequence: Synthetic oligonucleotide
acgguaaucacuguguuac

SEQ ID NO: 507364 - RNA, 19 nt, Artificial Sequence
  Description of Artificial Sequence: Synthetic oligonucleotide
cuuuggguaaucuacuggc

SEQ ID NO: 507365 - RNA, 19 nt, Artificial Sequence
  Description of Artificial Sequence: Synthetic oligonucleotide
acauuaaucaggcuggagu

SEQ ID NO: 507366 - RNA, 19 nt, Artificial Sequence
  Description of Artificial Sequence: Synthetic oligonucleotide
gugagauacaccuucacug

SEQ ID NO: 507367 - RNA, 19 nt, Artificial Sequence
  Description of Artificial Sequence: Synthetic oligonucleotide
uauucgauaaggcuugccu

SEQ ID NO: 507368 - RNA, 19 nt, Artificial Sequence
  Description of Artificial Sequence: Synthetic oligonucleotide
agaaacaccgcaucacugg

SEQ ID NO: 507369 - RNA, 19 nt, Artificial Sequence
  Description of Artificial Sequence: Synthetic oligonucleotide
gaaggcauaauggugaaug

SEQ ID NO: 507370 - RNA, 19 nt, Artificial Sequence
  Description of Artificial Sequence: Synthetic oligonucleotide
gucaccaugaaauuucuug

SEQ ID NO: 507371 - RNA, 19 nt, Artificial Sequence
  Description of Artificial Sequence: Synthetic oligonucleotide
gaucguggauuccucaucg

SEQ ID NO: 507372 - RNA, 19 nt, Artificial Sequence
  Description of Artificial Sequence: Synthetic oligonucleotide
uauaauucuucucuuggau

SEQ ID NO: 507373 - RNA, 19 nt, Artificial Sequence
  Description of Artificial Sequence: Synthetic oligonucleotide
guagagggcaaucucaugc

SEQ ID NO: 507374 - RNA, 19 nt, Artificial Sequence
  Description of Artificial Sequence: Synthetic oligonucleotide
  modified_base (7)..(7): a, c, u, g, unknown or other
uuuguunuguguuuucuuu

SEQ ID NO: 507375 - RNA, 19 nt, Artificial Sequence
  Description of Artificial Sequence: Synthetic oligonucleotide
  modified_base (3)..(3): a, c, u, g, unknown or other
uunuguguuuucuuuacaa

SEQ ID NO: 507376 - RNA, 19 nt, Artificial Sequence
  Description of Artificial Sequence: Synthetic oligonucleotide
uaguauucgauaaggcuug

SEQ ID NO: 507377 - RNA, 19 nt, Artificial Sequence
  Description of Artificial Sequence: Synthetic oligonucleotide
ugaaauuucuugcauguuu

SEQ ID NO: 507378 - RNA, 19 nt, Artificial Sequence
  Description of Artificial Sequence: Synthetic oligonucleotide
ucugauuuagcuguaagau

SEQ ID NO: 507379 - RNA, 19 nt, Artificial Sequence
  Description of Artificial Sequence: Synthetic oligonucleotide
cuaugacuaaccaugcuac

SEQ ID NO: 507380 - RNA, 19 nt, Artificial Sequence
  Description of Artificial Sequence: Synthetic oligonucleotide
caucauuacuguagcaucg

SEQ ID NO: 507381 - RNA, 19 nt, Artificial Sequence
  Description of Artificial Sequence: Synthetic oligonucleotide
ucacugguguuccacaaag

SEQ ID NO: 507382 - RNA, 19 nt, Artificial Sequence
  Description of Artificial Sequence: Synthetic oligonucleotide
cauuaaucaggcuggagug

SEQ ID NO: 507383 - RNA, 19 nt, Artificial Sequence
  Description of Artificial Sequence: Synthetic oligonucleotide
uugugaaaugauauaggga

SEQ ID NO: 507384 - RNA, 19 nt, Artificial Sequence
  Description of Artificial Sequence: Synthetic oligonucleotide
gaaacaucuauuccaugug

SEQ ID NO: 507385 - RNA, 19 nt, Artificial Sequence
  Description of Artificial Sequence: Synthetic oligonucleotide
agaagauccacgcugaauu

SEQ ID NO: 507386 - RNA, 19 nt, Artificial Sequence
  Description of Artificial Sequence: Synthetic oligonucleotide
aaaugucggagccuggaga

SEQ ID NO: 507387 - RNA, 19 nt, Artificial Sequence
  Description of Artificial Sequence: Synthetic oligonucleotide
auaauggugaaugaucgug

SEQ ID NO: 507388 - RNA, 19 nt, Artificial Sequence
  Description of Artificial Sequence: Synthetic oligonucleotide
aaugcuugaccuuuucuuu

SEQ ID NO: 507389 - RNA, 19 nt, Artificial Sequence
  Description of Artificial Sequence: Synthetic oligonucleotide
cuuagaggggucaaaucgc

SEQ ID NO: 507390 - RNA, 19 nt, Artificial Sequence
  Description of Artificial Sequence: Synthetic oligonucleotide
aaugauauagggaucugau

SEQ ID NO: 507391 - RNA, 19 nt, Artificial Sequence
  Description of Artificial Sequence: Synthetic oligonucleotide
guuucuaggagucugcgga

SEQ ID NO: 507392 - RNA, 19 nt, Artificial Sequence
  Description of Artificial Sequence: Synthetic oligonucleotide
uuugccaauugauggagga

SEQ ID NO: 507393 - RNA, 19 nt, Artificial Sequence
  Description of Artificial Sequence: Synthetic oligonucleotide
uggagugcaauuuuauuuc

SEQ ID NO: 507394 - RNA, 19 nt, Artificial Sequence
  Description of Artificial Sequence: Synthetic oligonucleotide
ucgucuguacaaaacucag

SEQ ID NO: 507395 - RNA, 19 nt, Artificial Sequence
  Description of Artificial Sequence: Synthetic oligonucleotide
acaacuuagcgguugggug

SEQ ID NO: 507396 - RNA, 19 nt, Artificial Sequence
  Description of Artificial Sequence: Synthetic oligonucleotide
cacgucuucuuuacaaugg

SEQ ID NO: 507397 - RNA, 19 nt, Artificial Sequence
  Description of Artificial Sequence: Synthetic oligonucleotide
aaauccuuacuuaaaugga

SEQ ID NO: 507398 - RNA, 19 nt, Artificial Sequence
  Description of Artificial Sequence: Synthetic oligonucleotide
uuagaggggucaaaucgcc

SEQ ID NO: 507399 - RNA, 19 nt, Artificial Sequence
  Description of Artificial Sequence: Synthetic oligonucleotide
acuaugacuaaccaugcua

SEQ ID NO: 507400 - RNA, 19 nt, Artificial Sequence
  Description of Artificial Sequence: Synthetic oligonucleotide
auucgauaaggcuugccug

SEQ ID NO: 507401 - RNA, 19 nt, Artificial Sequence
  Description of Artificial Sequence: Synthetic oligonucleotide
auuaaucaggcuggagugc

SEQ ID NO: 507402 - RNA, 19 nt, Artificial Sequence
  Description of Artificial Sequence: Synthetic oligonucleotide
ucagauucgaagccugcug

SEQ ID NO: 507403 - RNA, 19 nt, Artificial Sequence
  Description of Artificial Sequence: Synthetic oligonucleotide
uacacagucgggcaaugug

SEQ ID NO: 507404 - RNA, 19 nt, Artificial Sequence
  Description of Artificial Sequence: Synthetic oligonucleotide
uuuggguaaucuacuggcc

SEQ ID NO: 507405 - RNA, 19 nt, Artificial Sequence
  Description of Artificial Sequence: Synthetic oligonucleotide
aacaccgcaucacuggagu

SEQ ID NO: 507406 - RNA, 19 nt, Artificial Sequence
  Description of Artificial Sequence: Synthetic oligonucleotide
ucuaucgugaagucagacu

SEQ ID NO: 507407 - RNA, 19 nt, Artificial Sequence
  Description of Artificial Sequence: Synthetic oligonucleotide
uaauucgcacauaaauccu

SEQ ID NO: 507408 - RNA, 19 nt, Artificial Sequence
  Description of Artificial Sequence: Synthetic oligonucleotide
cuuuacaauggguauucug

SEQ ID NO: 507409 - RNA, 19 nt, Artificial Sequence
  Description of Artificial Sequence: Synthetic oligonucleotide
uaaccaugcuacuuuguca

SEQ ID NO: 507410 - RNA, 19 nt, Artificial Sequence
  Description of Artificial Sequence: Synthetic oligonucleotide
caacuuagcgguugggugc

SEQ ID NO: 507411 - RNA, 19 nt, Artificial Sequence
  Description of Artificial Sequence: Synthetic oligonucleotide
ucgggauauuuaaaggcug

SEQ ID NO: 507412 - RNA, 19 nt, Artificial Sequence
  Description of Artificial Sequence: Synthetic oligonucleotide
ugugucacgggaaucccca

SEQ ID NO: 507413 - RNA, 19 nt, Artificial Sequence
  Description of Artificial Sequence: Synthetic oligonucleotide
ccuuagaggggucaaaucg

SEQ ID NO: 507414 - RNA, 19 nt, Artificial Sequence
  Description of Artificial Sequence: Synthetic oligonucleotide
aaaccauuccuuagagggg

SEQ ID NO: 507415 - RNA, 19 nt, Artificial Sequence
  Description of Artificial Sequence: Synthetic oligonucleotide
aaugugccaguguuuguga

SEQ ID NO: 507416 - RNA, 19 nt, Artificial Sequence
  Description of Artificial Sequence: Synthetic oligonucleotide
uuaaaucuaucgugaaguc

SEQ ID NO: 507417 - RNA, 19 nt, Artificial Sequence
  Description of Artificial Sequence: Synthetic oligonucleotide
uguagcaucggcaguugcu

SEQ ID NO: 507418 - RNA, 19 nt, Artificial Sequence
  Description of Artificial Sequence: Synthetic oligonucleotide
  modified_base (2)..(2): a, c, u, g, unknown or other
unuguguuuucuuuacaau

SEQ ID NO: 507419 - RNA, 19 nt, Artificial Sequence
  Description of Artificial Sequence: Synthetic oligonucleotide
ugcuaaauccuuaggcuaa

SEQ ID NO: 507420 - RNA, 19 nt, Artificial Sequence
  Description of Artificial Sequence: Synthetic oligonucleotide
auacguuacagaaaagugu

SEQ ID NO: 507421 - RNA, 19 nt, Artificial Sequence
  Description of Artificial Sequence: Synthetic oligonucleotide
aaggcauaauggugaauga

SEQ ID NO: 507422 - RNA, 19 nt, Artificial Sequence
  Description of Artificial Sequence: Synthetic oligonucleotide
aauggaacgugguggcaca

SEQ ID NO: 507423 - RNA, 19 nt, Artificial Sequence
  Description of Artificial Sequence: Synthetic oligonucleotide
ugcgaggucaugagaaaug

SEQ ID NO: 507424 - RNA, 19 nt, Artificial Sequence
  Description of Artificial Sequence: Synthetic oligonucleotide
acgucuucuuuacaauggg

SEQ ID NO: 507425 - RNA, 19 nt, Artificial Sequence
  Description of Artificial Sequence: Synthetic oligonucleotide
augauauagggaucugaug

SEQ ID NO: 507426 - RNA, 19 nt, Artificial Sequence
  Description of Artificial Sequence: Synthetic oligonucleotide
gaauucuugcuauacguua

SEQ ID NO: 507427 - RNA, 19 nt, Artificial Sequence
  Description of Artificial Sequence: Synthetic oligonucleotide
uucgcacauaaauccuugg

SEQ ID NO: 507428 - RNA, 19 nt, Artificial Sequence
  Description of Artificial Sequence: Synthetic oligonucleotide
cuguaguauucgauaaggc

SEQ ID NO: 507429 - RNA, 19 nt, Artificial Sequence
  Description of Artificial Sequence: Synthetic oligonucleotide
aauccuuacuuaaauggaa

SEQ ID NO: 507430 - RNA, 19 nt, Artificial Sequence
  Description of Artificial Sequence: Synthetic oligonucleotide
caaauccugggaaugcuug

SEQ ID NO: 507431 - RNA, 19 nt, Artificial Sequence
  Description of Artificial Sequence: Synthetic oligonucleotide
aaggcuugccugugccgcc

SEQ ID NO: 507432 - RNA, 19 nt, Artificial Sequence
  Description of Artificial Sequence: Synthetic oligonucleotide
acccuauuuccacgaaggc

SEQ ID NO: 507433 - RNA, 19 nt, Artificial Sequence
  Description of Artificial Sequence: Synthetic oligonucleotide
aaccauuccuuagaggggu

SEQ ID NO: 507434 - RNA, 19 nt, Artificial Sequence
  Description of Artificial Sequence: Synthetic oligonucleotide
uuuguauucucgucucuuc

SEQ ID NO: 507435 - RNA, 19 nt, Artificial Sequence
  Description of Artificial Sequence: Synthetic oligonucleotide
caucgugcaaugcuuuucc

SEQ ID NO: 507436 - RNA, 19 nt, Artificial Sequence
  Description of Artificial Sequence: Synthetic oligonucleotide
cuggaccacaacuuagcgg

SEQ ID NO: 507437 - RNA, 19 nt, Artificial Sequence
  Description of Artificial Sequence: Synthetic oligonucleotide
ugcuacuuugucauggcua

SEQ ID NO: 507438 - RNA, 19 nt, Artificial Sequence
  Description of Artificial Sequence: Synthetic oligonucleotide
aggaagaaugguccaagca

SEQ ID NO: 507439 - RNA, 19 nt, Artificial Sequence
  Description of Artificial Sequence: Synthetic oligonucleotide
uuccucaucgugcaaugcu

SEQ ID NO: 507440 - RNA, 19 nt, Artificial Sequence
  Description of Artificial Sequence: Synthetic oligonucleotide
auacccuauuuccacgaag

SEQ ID NO: 507441 - RNA, 19 nt, Artificial Sequence
  Description of Artificial Sequence: Synthetic oligonucleotide
ucguggauuccucaucgug

SEQ ID NO: 507442 - RNA, 19 nt, Artificial Sequence
  Description of Artificial Sequence: Synthetic oligonucleotide
ugugucuucugcguggcgc

SEQ ID NO: 507443 - RNA, 19 nt, Artificial Sequence
  Description of Artificial Sequence: Synthetic oligonucleotide
agucugcggauuuguauuc

SEQ ID NO: 507444 - RNA, 19 nt, Artificial Sequence
  Description of Artificial Sequence: Synthetic oligonucleotide
ucgcacauaaauccuuggu

SEQ ID NO: 507445 - RNA, 19 nt, Artificial Sequence
  Description of Artificial Sequence: Synthetic oligonucleotide
caucucuuuaucugcuccc

SEQ ID NO: 507446 - RNA, 19 nt, Artificial Sequence
  Description of Artificial Sequence: Synthetic oligonucleotide
agucgagcugcgcggacgc

SEQ ID NO: 507447 - RNA, 19 nt, Artificial Sequence
  Description of Artificial Sequence: Synthetic oligonucleotide
uacaugcuccuacauacau

SEQ ID NO: 507448 - RNA, 19 nt, Artificial Sequence
  Description of Artificial Sequence: Synthetic oligonucleotide
cauugaagaggaugguaug

SEQ ID NO: 507449 - RNA, 19 nt, Artificial Sequence
  Description of Artificial Sequence: Synthetic oligonucleotide
uggguaaucuacuggccga

SEQ ID NO: 507450 - RNA, 19 nt, Artificial Sequence
  Description of Artificial Sequence: Synthetic oligonucleotide
uccccaauccacugaagca

SEQ ID NO: 507451 - RNA, 19 nt, Artificial Sequence
  Description of Artificial Sequence: Synthetic oligonucleotide
  modified_base (6)..(6): a, c, u, g, unknown or other
uuguunuguguuuucuuua

SEQ ID NO: 507452 - RNA, 19 nt, Artificial Sequence
  Description of Artificial Sequence: Synthetic oligonucleotide
cuuugccaauugauggagg

SEQ ID NO: 507453 - RNA, 19 nt, Artificial Sequence
  Description of Artificial Sequence: Synthetic oligonucleotide
caucgucuguacaaaacuc

SEQ ID NO: 507454 - RNA, 19 nt, Artificial Sequence
  Description of Artificial Sequence: Synthetic oligonucleotide
accacaacuuagcgguugg

SEQ ID NO: 507455 - RNA, 19 nt, Artificial Sequence
  Description of Artificial Sequence: Synthetic oligonucleotide
augaccuaccagguaauuc

SEQ ID NO: 507456 - RNA, 19 nt, Artificial Sequence
  Description of Artificial Sequence: Synthetic oligonucleotide
ucacgggaauccccaaucc

SEQ ID NO: 507457 - RNA, 19 nt, Artificial Sequence
  Description of Artificial Sequence: Synthetic oligonucleotide
cacggagcagcucagcagc

SEQ ID NO: 507458 - RNA, 19 nt, Artificial Sequence
  Description of Artificial Sequence: Synthetic oligonucleotide
uaaggcuugccugugccgc

SEQ ID NO: 507459 - RNA, 19 nt, Artificial Sequence
  Description of Artificial Sequence: Synthetic oligonucleotide
caugcuccuacauacauua

SEQ ID NO: 507460 - RNA, 19 nt, Artificial Sequence
  Description of Artificial Sequence: Synthetic oligonucleotide
uugacuacucugauccaaa

SEQ ID NO: 507461 - RNA, 19 nt, Artificial Sequence
  Description of Artificial Sequence: Synthetic oligonucleotide
ugcggauuuguauucucgu

SEQ ID NO: 507462 - RNA, 19 nt, Artificial Sequence
  Description of Artificial Sequence: Synthetic oligonucleotide
caucaaucaaaagaaguga

SEQ ID NO: 507463 - RNA, 19 nt, Artificial Sequence
  Description of Artificial Sequence: Synthetic oligonucleotide
agcaucgucuguacaaaac

SEQ ID NO: 507464 - RNA, 19 nt, Artificial Sequence
  Description of Artificial Sequence: Synthetic oligonucleotide
uuacaugcuccuacauaca

SEQ ID NO: 507465 - RNA, 19 nt, Artificial Sequence
  Description of Artificial Sequence: Synthetic oligonucleotide
agucacaaagcuguugugu

SEQ ID NO: 507466 - RNA, 19 nt, Artificial Sequence
  Description of Artificial Sequence: Synthetic oligonucleotide
uuagcgguugggugcaucu

SEQ ID NO: 507467 - RNA, 19 nt, Artificial Sequence
  Description of Artificial Sequence: Synthetic oligonucleotide
gacacuaagggcccagcca

SEQ ID NO: 507468 - RNA, 19 nt, Artificial Sequence
  Description of Artificial Sequence: Synthetic oligonucleotide
aucuaucgugaagucagac

SEQ ID NO: 507469 - RNA, 19 nt, Artificial Sequence
  Description of Artificial Sequence: Synthetic oligonucleotide
agcuggaccacaacuuagc

SEQ ID NO: 507470 - RNA, 19 nt, Artificial Sequence
  Description of Artificial Sequence: Synthetic oligonucleotide
acauugaagaggaugguau

SEQ ID NO: 507471 - RNA, 19 nt, Artificial Sequence
  Description of Artificial Sequence: Synthetic oligonucleotide
cucuuuaaccucuuggcaa

SEQ ID NO: 507472 - RNA, 19 nt, Artificial Sequence
  Description of Artificial Sequence: Synthetic oligonucleotide
agcaucauuacuguagcau

SEQ ID NO: 507473 - RNA, 19 nt, Artificial Sequence
  Description of Artificial Sequence: Synthetic oligonucleotide
gguaauucgcacauaaauc

SEQ ID NO: 507474 - RNA, 19 nt, Artificial Sequence
  Description of Artificial Sequence: Synthetic oligonucleotide
ugugucagauucgaagccu

SEQ ID NO: 507475 - RNA, 19 nt, Artificial Sequence
  Description of Artificial Sequence: Synthetic oligonucleotide
aauacccuauuuccacgaa

SEQ ID NO: 507476 - RNA, 19 nt, Artificial Sequence
  Description of Artificial Sequence: Synthetic oligonucleotide
aucgccugaguguuucuag

SEQ ID NO: 507477 - RNA, 19 nt, Artificial Sequence
  Description of Artificial Sequence: Synthetic oligonucleotide
cugugucagauucgaagcc

SEQ ID NO: 507478 - RNA, 19 nt, Artificial Sequence
  Description of Artificial Sequence: Synthetic oligonucleotide
gaauggaacgugguggcac

SEQ ID NO: 507479 - RNA, 19 nt, Artificial Sequence
  Description of Artificial Sequence: Synthetic oligonucleotide
aggauucucagagaaggca

SEQ ID NO: 507480 - RNA, 19 nt, Artificial Sequence
  Description of Artificial Sequence: Synthetic oligonucleotide
cuccuacauacauuaauca

SEQ ID NO: 507481 - RNA, 19 nt, Artificial Sequence
  Description of Artificial Sequence: Synthetic oligonucleotide
  modified_base (4)..(4): a, c, u, g, unknown or other
guunuguguuuucuuuaca

SEQ ID NO: 507482 - RNA, 19 nt, Artificial Sequence
  Description of Artificial Sequence: Synthetic oligonucleotide
ugaucguggauuccucauc

SEQ ID NO: 507483 - RNA, 19 nt, Artificial Sequence
  Description of Artificial Sequence: Synthetic oligonucleotide
uugcuauacguuacagaaa

SEQ ID NO: 507484 - RNA, 19 nt, Artificial Sequence
  Description of Artificial Sequence: Synthetic oligonucleotide
gaaacaccgcaucacugga

SEQ ID NO: 507485 - RNA, 19 nt, Artificial Sequence
  Description of Artificial Sequence: Synthetic oligonucleotide
acaaugaccucuguccgug

SEQ ID NO: 507486 - RNA, 19 nt, Artificial Sequence
  Description of Artificial Sequence: Synthetic oligonucleotide
uguagagggcaaucucaug

SEQ ID NO: 507487 - RNA, 19 nt, Artificial Sequence
  Description of Artificial Sequence: Synthetic oligonucleotide
gcagcuaagcaaaugucgg

SEQ ID NO: 507488 - RNA, 19 nt, Artificial Sequence
  Description of Artificial Sequence: Synthetic oligonucleotide
uacauuaaucaggcuggag

SEQ ID NO: 507489 - RNA, 19 nt, Artificial Sequence
  Description of Artificial Sequence: Synthetic oligonucleotide
ugcgaagucgggauauuua

SEQ ID NO: 507490 - RNA, 19 nt, Artificial Sequence
  Description of Artificial Sequence: Synthetic oligonucleotide
acagaaaagugugguaaca

SEQ ID NO: 507491 - RNA, 19 nt, Artificial Sequence
  Description of Artificial Sequence: Synthetic oligonucleotide
gaaaaggauugcuuugacu

SEQ ID NO: 507492 - RNA, 19 nt, Artificial Sequence
  Description of Artificial Sequence: Synthetic oligonucleotide
uucaagucuaugucguguu

SEQ ID NO: 507493 - RNA, 19 nt, Artificial Sequence
  Description of Artificial Sequence: Synthetic oligonucleotide
aauucgcacauaaauccuu

SEQ ID NO: 507494 - RNA, 19 nt, Artificial Sequence
  Description of Artificial Sequence: Synthetic oligonucleotide
gcuacuuugucauggcuac

SEQ ID NO: 507495 - RNA, 19 nt, Artificial Sequence
  Description of Artificial Sequence: Synthetic oligonucleotide
gggucaaaucgccugagug

SEQ ID NO: 507496 - RNA, 19 nt, Artificial Sequence
  Description of Artificial Sequence: Synthetic oligonucleotide
acgcagagaacacuggcau

SEQ ID NO: 507497 - RNA, 19 nt, Artificial Sequence
  Description of Artificial Sequence: Synthetic oligonucleotide
aagaagauccacgcugaau

SEQ ID NO: 507498 - RNA, 19 nt, Artificial Sequence
  Description of Artificial Sequence: Synthetic oligonucleotide
uaugucguguuuccuugau

SEQ ID NO: 507499 - RNA, 19 nt, Artificial Sequence
  Description of Artificial Sequence: Synthetic oligonucleotide
caaaugucggagccuggag

SEQ ID NO: 507500 - RNA, 19 nt, Artificial Sequence
  Description of Artificial Sequence: Synthetic oligonucleotide
aguauucgauaaggcuugc

SEQ ID NO: 507501 - RNA, 19 nt, Artificial Sequence
  Description of Artificial Sequence: Synthetic oligonucleotide
uucaaucaaucaggacacg

SEQ ID NO: 507502 - RNA, 19 nt, Artificial Sequence
  Description of Artificial Sequence: Synthetic oligonucleotide
cuguucuauaauucuucuc

SEQ ID NO: 507503 - RNA, 19 nt, Artificial Sequence
  Description of Artificial Sequence: Synthetic oligonucleotide
guagcaucggcaguugcug

SEQ ID NO: 507504 - RNA, 19 nt, Artificial Sequence
  Description of Artificial Sequence: Synthetic oligonucleotide
aucgucuguacaaaacuca

SEQ ID NO: 507505 - RNA, 19 nt, Artificial Sequence
  Description of Artificial Sequence: Synthetic oligonucleotide
cuauacguuacagaaaagu

SEQ ID NO: 507506 - RNA, 19 nt, Artificial Sequence
  Description of Artificial Sequence: Synthetic oligonucleotide
aaugaccucuguccguguu

SEQ ID NO: 507507 - RNA, 19 nt, Artificial Sequence
  Description of Artificial Sequence: Synthetic oligonucleotide
agucgggcaaugugcgagg

SEQ ID NO: 507508 - RNA, 19 nt, Artificial Sequence
  Description of Artificial Sequence: Synthetic oligonucleotide
aguaaggggagguccucca

SEQ ID NO: 507509 - RNA, 19 nt, Artificial Sequence
  Description of Artificial Sequence: Synthetic oligonucleotide
auauagggaucugauggga

SEQ ID NO: 507510 - RNA, 19 nt, Artificial Sequence
  Description of Artificial Sequence: Synthetic oligonucleotide
auauccacuggcaaagaaa

SEQ ID NO: 507511 - RNA, 19 nt, Artificial Sequence
  Description of Artificial Sequence: Synthetic oligonucleotide
uccucaucgugcaaugcuu

SEQ ID NO: 507512 - RNA, 19 nt, Artificial Sequence
  Description of Artificial Sequence: Synthetic oligonucleotide
gacacgcagagaacacugg

SEQ ID NO: 507513 - RNA, 19 nt, Artificial Sequence
  Description of Artificial Sequence: Synthetic oligonucleotide
agaagugauuuuccccagu

SEQ ID NO: 507514 - RNA, 19 nt, Artificial Sequence
  Description of Artificial Sequence: Synthetic oligonucleotide
ggagugcaauuuuauuucc

SEQ ID NO: 507515 - RNA, 19 nt, Artificial Sequence
  Description of Artificial Sequence: Synthetic oligonucleotide
aacuuagcgguugggugca

SEQ ID NO: 507516 - RNA, 19 nt, Artificial Sequence
  Description of Artificial Sequence: Synthetic oligonucleotide
caagucuaugucguguuuc

SEQ ID NO: 507517 - RNA, 19 nt, Artificial Sequence
  Description of Artificial Sequence: Synthetic oligonucleotide
cauagcagcuaagcaaaug

SEQ ID NO: 507518 - RNA, 19 nt, Artificial Sequence
  Description of Artificial Sequence: Synthetic oligonucleotide
acccuugucccagauguag

SEQ ID NO: 507519 - RNA, 19 nt, Artificial Sequence
  Description of Artificial Sequence: Synthetic oligonucleotide
guaguauucgauaaggcuu

SEQ ID NO: 507520 - RNA, 19 nt, Artificial Sequence
  Description of Artificial Sequence: Synthetic oligonucleotide
auccacuaugacuaaccau

SEQ ID NO: 507521 - RNA, 19 nt, Artificial Sequence
  Description of Artificial Sequence: Synthetic oligonucleotide
gaacgugguggcacagugg

SEQ ID NO: 507522 - RNA, 19 nt, Artificial Sequence
  Description of Artificial Sequence: Synthetic oligonucleotide
augcugauuaaugugucau

SEQ ID NO: 507523 - RNA, 19 nt, Artificial Sequence
  Description of Artificial Sequence: Synthetic oligonucleotide
agcgguugggugcaucucu

SEQ ID NO: 507524 - RNA, 19 nt, Artificial Sequence
  Description of Artificial Sequence: Synthetic oligonucleotide
cuaucgugaagucagacuu

SEQ ID NO: 507525 - RNA, 19 nt, Artificial Sequence
  Description of Artificial Sequence: Synthetic oligonucleotide
auucgcacauaaauccuug

SEQ ID NO: 507526 - RNA, 19 nt, Artificial Sequence
  Description of Artificial Sequence: Synthetic oligonucleotide
ucgugcaaugcuuuuccua

SEQ ID NO: 507527 - RNA, 19 nt, Artificial Sequence
  Description of Artificial Sequence: Synthetic oligonucleotide
augaucguggauuccucau

SEQ ID NO: 507528 - RNA, 19 nt, Artificial Sequence
  Description of Artificial Sequence: Synthetic oligonucleotide
ggugaaugaucguggauuc

SEQ ID NO: 507529 - RNA, 19 nt, Artificial Sequence
  Description of Artificial Sequence: Synthetic oligonucleotide
guggauuccucaucgugca

SEQ ID NO: 507530 - RNA, 19 nt, Artificial Sequence
  Description of Artificial Sequence: Synthetic oligonucleotide
aggcacacgguaaucacug

SEQ ID NO: 507531 - RNA, 19 nt, Artificial Sequence
  Description of Artificial Sequence: Synthetic oligonucleotide
ucugcggauuuguauucuc

SEQ ID NO: 507532 - RNA, 19 nt, Artificial Sequence
  Description of Artificial Sequence: Synthetic oligonucleotide
gugcuaaauccuuaggcua

SEQ ID NO: 507533 - RNA, 19 nt, Artificial Sequence
  Description of Artificial Sequence: Synthetic oligonucleotide
gucacgggaauccccaauc

SEQ ID NO: 507534 - RNA, 19 nt, Artificial Sequence
  Description of Artificial Sequence: Synthetic oligonucleotide
gcugauuaaugugucauca

SEQ ID NO: 507535 - RNA, 19 nt, Artificial Sequence
  Description of Artificial Sequence: Synthetic oligonucleotide
ugugcgaggucaugagaaa

SEQ ID NO: 507536 - RNA, 19 nt, Artificial Sequence
  Description of Artificial Sequence: Synthetic oligonucleotide
caaucaaaagaagugauuu

SEQ ID NO: 507537 - RNA, 19 nt, Artificial Sequence
  Description of Artificial Sequence: Synthetic oligonucleotide
ucaagucuaugucguguuu

SEQ ID NO: 507538 - RNA, 19 nt, Artificial Sequence
  Description of Artificial Sequence: Synthetic oligonucleotide
ggaacgugguggcacagug

SEQ ID NO: 507539 - RNA, 19 nt, Artificial Sequence
  Description of Artificial Sequence: Synthetic oligonucleotide
uuccuuagaggggucaaau

SEQ ID NO: 507540 - RNA, 19 nt, Artificial Sequence
  Description of Artificial Sequence: Synthetic oligonucleotide
ucaucgugcaaugcuuuuc

SEQ ID NO: 507541 - RNA, 19 nt, Artificial Sequence
  Description of Artificial Sequence: Synthetic oligonucleotide
gaggaugguaugugcccug

SEQ ID NO: 507542 - RNA, 19 nt, Artificial Sequence
  Description of Artificial Sequence: Synthetic oligonucleotide
uguugggaauccccagguc

SEQ ID NO: 507543 - RNA, 19 nt, Artificial Sequence
  Description of Artificial Sequence: Synthetic oligonucleotide
agucugcgcgcccuucccg

SEQ ID NO: 507544 - RNA, 19 nt, Artificial Sequence
  Description of Artificial Sequence: Synthetic oligonucleotide
aagaggggacuguguguca

SEQ ID NO: 507545 - RNA, 19 nt, Artificial Sequence
  Description of Artificial Sequence: Synthetic oligonucleotide
aaaugaccuaccagguaau

SEQ ID NO: 507546 - RNA, 19 nt, Artificial Sequence
  Description of Artificial Sequence: Synthetic oligonucleotide
acguuacagaaaagugugg

SEQ ID NO: 507547 - RNA, 19 nt, Artificial Sequence
  Description of Artificial Sequence: Synthetic oligonucleotide
uagcgcucacccagaaaca

SEQ ID NO: 507548 - RNA, 19 nt, Artificial Sequence
  Description of Artificial Sequence: Synthetic oligonucleotide
gucuucaaucaaucaggac

SEQ ID NO: 507549 - RNA, 19 nt, Artificial Sequence
  Description of Artificial Sequence: Synthetic oligonucleotide
gagucgagcugcgcggacg

SEQ ID NO: 507550 - RNA, 19 nt, Artificial Sequence
  Description of Artificial Sequence: Synthetic oligonucleotide
gguaccauuuauuuccugu

SEQ ID NO: 507551 - RNA, 19 nt, Artificial Sequence
  Description of Artificial Sequence: Synthetic oligonucleotide
augugcgaggucaugagaa

SEQ ID NO: 507552 - RNA, 19 nt, Artificial Sequence
  Description of Artificial Sequence: Synthetic oligonucleotide
acaccgcaucacuggaguc

SEQ ID NO: 507553 - RNA, 19 nt, Artificial Sequence
  Description of Artificial Sequence: Synthetic oligonucleotide
cuggagugcaauuuuauuu

SEQ ID NO: 507554 - RNA, 19 nt, Artificial Sequence
  Description of Artificial Sequence: Synthetic oligonucleotide
gauugacuacucugaucca

SEQ ID NO: 507555 - RNA, 19 nt, Artificial Sequence
  Description of Artificial Sequence: Synthetic oligonucleotide
gaguaaggggagguccucc

SEQ ID NO: 507556 - RNA, 19 nt, Artificial Sequence
  Description of Artificial Sequence: Synthetic oligonucleotide
cuguugugucacaucccag

SEQ ID NO: 507557 - RNA, 19 nt, Artificial Sequence
  Description of Artificial Sequence: Synthetic oligonucleotide
ugucauggcuacgauucaa

SEQ ID NO: 507558 - RNA, 19 nt, Artificial Sequence
  Description of Artificial Sequence: Synthetic oligonucleotide
ugucacgggaauccccaau

SEQ ID NO: 507559 - RNA, 19 nt, Artificial Sequence
  Description of Artificial Sequence: Synthetic oligonucleotide
ucgugaagucagacuucag

SEQ ID NO: 507560 - RNA, 19 nt, Artificial Sequence
  Description of Artificial Sequence: Synthetic oligonucleotide
cagucgggcaaugugcgag

SEQ ID NO: 507561 - RNA, 19 nt, Artificial Sequence
  Description of Artificial Sequence: Synthetic oligonucleotide
auccuuacuuaaauggaaa

SEQ ID NO: 507562 - RNA, 19 nt, Artificial Sequence
  Description of Artificial Sequence: Synthetic oligonucleotide
aaucuaucgugaagucaga

SEQ ID NO: 507563 - RNA, 19 nt, Artificial Sequence
  Description of Artificial Sequence: Synthetic oligonucleotide
ucauagcagcuaagcaaau

SEQ ID NO: 507564 - RNA, 19 nt, Artificial Sequence
  Description of Artificial Sequence: Synthetic oligonucleotide
gaccuaccagguaauucgc

SEQ ID NO: 507565 - RNA, 19 nt, Artificial Sequence
  Description of Artificial Sequence: Synthetic oligonucleotide
gagugcaauuuuauuucca

SEQ ID NO: 507566 - RNA, 19 nt, Artificial Sequence
  Description of Artificial Sequence: Synthetic oligonucleotide
cacgcagagaacacuggca

SEQ ID NO: 507567 - RNA, 19 nt, Artificial Sequence
  Description of Artificial Sequence: Synthetic oligonucleotide
guguuugugaaaugauaua

SEQ ID NO: 507568 - RNA, 19 nt, Artificial Sequence
  Description of Artificial Sequence: Synthetic oligonucleotide
cauccacuaugacuaacca

SEQ ID NO: 507569 - RNA, 19 nt, Artificial Sequence
  Description of Artificial Sequence: Synthetic oligonucleotide
cguggauuccucaucgugc

SEQ ID NO: 507570 - RNA, 19 nt, Artificial Sequence
  Description of Artificial Sequence: Synthetic oligonucleotide
gaggggucaaaucgccuga

SEQ ID NO: 507571 - RNA, 19 nt, Artificial Sequence
  Description of Artificial Sequence: Synthetic oligonucleotide
gcuccuacauacauuaauc

SEQ ID NO: 507572 - RNA, 19 nt, Artificial Sequence
  Description of Artificial Sequence: Synthetic oligonucleotide
aaugaccuaccagguaauu

SEQ ID NO: 507573 - RNA, 19 nt, Artificial Sequence
  Description of Artificial Sequence: Synthetic oligonucleotide
gagucugcggauuuguauu

SEQ ID NO: 507574 - RNA, 19 nt, Artificial Sequence
  Description of Artificial Sequence: Synthetic oligonucleotide
ucuuuacaauggguauucu

SEQ ID NO: 507575 - RNA, 19 nt, Artificial Sequence
  Description of Artificial Sequence: Synthetic oligonucleotide
guaaucacuguguuacaau

SEQ ID NO: 507576 - RNA, 19 nt, Artificial Sequence
  Description of Artificial Sequence: Synthetic oligonucleotide
acacgguaaucacuguguu

SEQ ID NO: 507577 - RNA, 19 nt, Artificial Sequence
  Description of Artificial Sequence: Synthetic oligonucleotide
guauucgauaaggcuugcc

SEQ ID NO: 507578 - RNA, 19 nt, Artificial Sequence
  Description of Artificial Sequence: Synthetic oligonucleotide
ucgagcugcgcggacgccc

SEQ ID NO: 507579 - RNA, 19 nt, Artificial Sequence
  Description of Artificial Sequence: Synthetic oligonucleotide
ccugugacauagcuguagc

SEQ ID NO: 507580 - RNA, 19 nt, Artificial Sequence
  Description of Artificial Sequence: Synthetic oligonucleotide
aucgugcaaugcuuuuccu

SEQ ID NO: 507581 - RNA, 19 nt, Artificial Sequence
  Description of Artificial Sequence: Synthetic oligonucleotide
gagucugcgcgcccuuccc

SEQ ID NO: 507582 - RNA, 19 nt, Artificial Sequence
  Description of Artificial Sequence: Synthetic oligonucleotide
aaucgccugaguguuucua

SEQ ID NO: 507583 - RNA, 19 nt, Artificial Sequence
  Description of Artificial Sequence: Synthetic oligonucleotide
aggauugcuuugacucugg

SEQ ID NO: 507584 - RNA, 19 nt, Artificial Sequence
  Description of Artificial Sequence: Synthetic oligonucleotide
caugccgccuccuccugug

SEQ ID NO: 507585 - RNA, 19 nt, Artificial Sequence
  Description of Artificial Sequence: Synthetic oligonucleotide
ccacuaugacuaaccaugc

SEQ ID NO: 507586 - RNA, 19 nt, Artificial Sequence
  Description of Artificial Sequence: Synthetic oligonucleotide
auacauuaaucaggcugga

SEQ ID NO: 507587 - RNA, 19 nt, Artificial Sequence
  Description of Artificial Sequence: Synthetic oligonucleotide
cacacgguaaucacugugu

SEQ ID NO: 507588 - RNA, 19 nt, Artificial Sequence
  Description of Artificial Sequence: Synthetic oligonucleotide
gauccacgcugaauucuug

SEQ ID NO: 507589 - RNA, 19 nt, Artificial Sequence
  Description of Artificial Sequence: Synthetic oligonucleotide
ugucaccaugaaauuucuu

SEQ ID NO: 507590 - RNA, 19 nt, Artificial Sequence
  Description of Artificial Sequence: Synthetic oligonucleotide
ggucaugagaaauggcuua

SEQ ID NO: 507591 - RNA, 19 nt, Artificial Sequence
  Description of Artificial Sequence: Synthetic oligonucleotide
ggucaaaucgccugagugu

SEQ ID NO: 507592 - RNA, 19 nt, Artificial Sequence
  Description of Artificial Sequence: Synthetic oligonucleotide
ggacacuaagggcccagcc

SEQ ID NO: 507593 - RNA, 19 nt, Artificial Sequence
  Description of Artificial Sequence: Synthetic oligonucleotide
cacauaaauccuuggugcu

SEQ ID NO: 507594 - RNA, 19 nt, Artificial Sequence
  Description of Artificial Sequence: Synthetic oligonucleotide
acgcccugcgcgccugacc

SEQ ID NO: 507595 - RNA, 19 nt, Artificial Sequence
  Description of Artificial Sequence: Synthetic oligonucleotide
gugaaugaucguggauucc

SEQ ID NO: 507596 - RNA, 19 nt, Artificial Sequence
  Description of Artificial Sequence: Synthetic oligonucleotide
guaaggggagguccuccac

SEQ ID NO: 507597 - RNA, 19 nt, Artificial Sequence
  Description of Artificial Sequence: Synthetic oligonucleotide
cacuaagggcccagccagc

SEQ ID NO: 507598 - RNA, 19 nt, Artificial Sequence
  Description of Artificial Sequence: Synthetic oligonucleotide
ccacgucuucuuuacaaug

SEQ ID NO: 507599 - RNA, 19 nt, Artificial Sequence
  Description of Artificial Sequence: Synthetic oligonucleotide
acuaaccaugcuacuuugu

SEQ ID NO: 507600 - RNA, 19 nt, Artificial Sequence
  Description of Artificial Sequence: Synthetic oligonucleotide
ugcaucccgacagcggagu

SEQ ID NO: 507601 - RNA, 19 nt, Artificial Sequence
  Description of Artificial Sequence: Synthetic oligonucleotide
aucguggauuccucaucgu

SEQ ID NO: 507602 - RNA, 19 nt, Artificial Sequence
  Description of Artificial Sequence: Synthetic oligonucleotide
augugccaguguuugugaa

SEQ ID NO: 507603 - RNA, 19 nt, Artificial Sequence
  Description of Artificial Sequence: Synthetic oligonucleotide
ccacgugagauacaccuuc

SEQ ID NO: 507604 - RNA, 19 nt, Artificial Sequence
  Description of Artificial Sequence: Synthetic oligonucleotide
caggggcucgcucuuuaac

SEQ ID NO: 507605 - RNA, 19 nt, Artificial Sequence
  Description of Artificial Sequence: Synthetic oligonucleotide
gguaaucacuguguuacaa

SEQ ID NO: 507606 - RNA, 19 nt, Artificial Sequence
  Description of Artificial Sequence: Synthetic oligonucleotide
gcugcaucccgacagcgga

SEQ ID NO: 507607 - RNA, 19 nt, Artificial Sequence
  Description of Artificial Sequence: Synthetic oligonucleotide
cgucuguacaaaacucagg

SEQ ID NO: 507608 - RNA, 19 nt, Artificial Sequence
  Description of Artificial Sequence: Synthetic oligonucleotide
cugcaucccgacagcggag

SEQ ID NO: 507609 - RNA, 19 nt, Artificial Sequence
  Description of Artificial Sequence: Synthetic oligonucleotide
augucguguuuccuugauu

SEQ ID NO: 507610 - RNA, 19 nt, Artificial Sequence
  Description of Artificial Sequence: Synthetic oligonucleotide
cuaugucguguuuccuuga

SEQ ID NO: 507611 - RNA, 19 nt, Artificial Sequence
  Description of Artificial Sequence: Synthetic oligonucleotide
acagucgggcaaugugcga

SEQ ID NO: 507612 - RNA, 19 nt, Artificial Sequence
  Description of Artificial Sequence: Synthetic oligonucleotide
gcaucgucuguacaaaacu

SEQ ID NO: 507613 - RNA, 19 nt, Artificial Sequence
  Description of Artificial Sequence: Synthetic oligonucleotide
cacgugagauacaccuuca

SEQ ID NO: 507614 - RNA, 19 nt, Artificial Sequence
  Description of Artificial Sequence: Synthetic oligonucleotide
uguccguguugggaauccc

SEQ ID NO: 507615 - RNA, 19 nt, Artificial Sequence
  Description of Artificial Sequence: Synthetic oligonucleotide
agcaaaugucggagccugg

SEQ ID NO: 507616 - RNA, 19 nt, Artificial Sequence
  Description of Artificial Sequence: Synthetic oligonucleotide
ucugcguggcgcugccuuc

SEQ ID NO: 507617 - RNA, 19 nt, Artificial Sequence
  Description of Artificial Sequence: Synthetic oligonucleotide
cuacucugauccaaauccu

SEQ ID NO: 507618 - RNA, 19 nt, Artificial Sequence
  Description of Artificial Sequence: Synthetic oligonucleotide
agccgccugugcccaggcc

SEQ ID NO: 507619 - RNA, 19 nt, Artificial Sequence
  Description of Artificial Sequence: Synthetic oligonucleotide
agcugcgaagucgggauau

SEQ ID NO: 507620 - RNA, 19 nt, Artificial Sequence
  Description of Artificial Sequence: Synthetic oligonucleotide
cguguugggaauccccagg

SEQ ID NO: 507621 - RNA, 19 nt, Artificial Sequence
  Description of Artificial Sequence: Synthetic oligonucleotide
gcaaugugcgaggucauga

SEQ ID NO: 507622 - RNA, 19 nt, Artificial Sequence
  Description of Artificial Sequence: Synthetic oligonucleotide
agauccacgcugaauucuu

SEQ ID NO: 507623 - RNA, 19 nt, Artificial Sequence
  Description of Artificial Sequence: Synthetic oligonucleotide
gucauggcuacgauucaaa

SEQ ID NO: 507624 - RNA, 19 nt, Artificial Sequence
  Description of Artificial Sequence: Synthetic oligonucleotide
ggguaaucuacuggccgag

SEQ ID NO: 507625 - RNA, 19 nt, Artificial Sequence
  Description of Artificial Sequence: Synthetic oligonucleotide
gucuaugucguguuuccuu

SEQ ID NO: 507626 - RNA, 19 nt, Artificial Sequence
  Description of Artificial Sequence: Synthetic oligonucleotide
ucuacuggccgagccugau

SEQ ID NO: 507627 - RNA, 19 nt, Artificial Sequence
  Description of Artificial Sequence: Synthetic oligonucleotide
gcuauacguuacagaaaag

SEQ ID NO: 507628 - RNA, 19 nt, Artificial Sequence
  Description of Artificial Sequence: Synthetic oligonucleotide
accauuccuuagagggguc

SEQ ID NO: 507629 - RNA, 19 nt, Artificial Sequence
  Description of Artificial Sequence: Synthetic oligonucleotide
gucaaaucgccugaguguu

SEQ ID NO: 507630 - RNA, 19 nt, Artificial Sequence
  Description of Artificial Sequence: Synthetic oligonucleotide
uggcauuuacaugcuccua

SEQ ID NO: 507631 - RNA, 19 nt, Artificial Sequence
  Description of Artificial Sequence: Synthetic oligonucleotide
cacgguaaucacuguguua

SEQ ID NO: 507632 - RNA, 19 nt, Artificial Sequence
  Description of Artificial Sequence: Synthetic oligonucleotide
gcuguaaaaugcuccuucu

SEQ ID NO: 507633 - RNA, 19 nt, Artificial Sequence
  Description of Artificial Sequence: Synthetic oligonucleotide
acaugcuccuacauacauu

SEQ ID NO: 507634 - RNA, 19 nt, Artificial Sequence
  Description of Artificial Sequence: Synthetic oligonucleotide
cugauuaaugugucaucau

SEQ ID NO: 507635 - RNA, 19 nt, Artificial Sequence
  Description of Artificial Sequence: Synthetic oligonucleotide
gguaaucuacuggccgagc

SEQ ID NO: 507636 - RNA, 19 nt, Artificial Sequence
  Description of Artificial Sequence: Synthetic oligonucleotide
cgugcaaugcuuuuccuaa

SEQ ID NO: 507637 - RNA, 19 nt, Artificial Sequence
  Description of Artificial Sequence: Synthetic oligonucleotide
ugcgcgcccuucccggagu

SEQ ID NO: 507638 - RNA, 19 nt, Artificial Sequence
  Description of Artificial Sequence: Synthetic oligonucleotide
cuuagcgguugggugcauc

SEQ ID NO: 507639 - RNA, 19 nt, Artificial Sequence
  Description of Artificial Sequence: Synthetic oligonucleotide
gcacauacccaggaccaug

SEQ ID NO: 507640 - RNA, 19 nt, Artificial Sequence
  Description of Artificial Sequence: Synthetic oligonucleotide
ccauaugaguccacccauc

SEQ ID NO: 507641 - RNA, 19 nt, Artificial Sequence
  Description of Artificial Sequence: Synthetic oligonucleotide
cacuggcauuuacaugcuc

SEQ ID NO: 507642 - RNA, 19 nt, Artificial Sequence
  Description of Artificial Sequence: Synthetic oligonucleotide
gcuguaggauucucagaga

SEQ ID NO: 507643 - RNA, 19 nt, Artificial Sequence
  Description of Artificial Sequence: Synthetic oligonucleotide
gcccacgucuucuuuacaa

SEQ ID NO: 507644 - RNA, 19 nt, Artificial Sequence
  Description of Artificial Sequence: Synthetic oligonucleotide
cacaacuuagcgguugggu

SEQ ID NO: 507645 - RNA, 19 nt, Artificial Sequence
  Description of Artificial Sequence: Synthetic oligonucleotide
cugcguggcgcugccuucc

SEQ ID NO: 507646 - RNA, 19 nt, Artificial Sequence
  Description of Artificial Sequence: Synthetic oligonucleotide
cagauguagagggcaaucu

SEQ ID NO: 507647 - RNA, 19 nt, Artificial Sequence
  Description of Artificial Sequence: Synthetic oligonucleotide
ggagucugcggauuuguau

SEQ ID NO: 507648 - RNA, 19 nt, Artificial Sequence
  Description of Artificial Sequence: Synthetic oligonucleotide
ccagauguagagggcaauc

SEQ ID NO: 507649 - RNA, 19 nt, Artificial Sequence
  Description of Artificial Sequence: Synthetic oligonucleotide
agcggagucugcgcgcccu

SEQ ID NO: 507650 - RNA, 19 nt, Artificial Sequence
  Description of Artificial Sequence: Synthetic oligonucleotide
cagcaucgucuguacaaaa

SEQ ID NO: 507651 - RNA, 19 nt, Artificial Sequence
  Description of Artificial Sequence: Synthetic oligonucleotide
ccgacagcggagucugcgc

SEQ ID NO: 507652 - RNA, 19 nt, Artificial Sequence
  Description of Artificial Sequence: Synthetic oligonucleotide
ggauugcuuugacucugga

SEQ ID NO: 507653 - RNA, 19 nt, Artificial Sequence
  Description of Artificial Sequence: Synthetic oligonucleotide
uagcgguugggugcaucuc

SEQ ID NO: 507654 - RNA, 19 nt, Artificial Sequence
  Description of Artificial Sequence: Synthetic oligonucleotide
cacuaugacuaaccaugcu

SEQ ID NO: 507655 - RNA, 19 nt, Artificial Sequence
  Description of Artificial Sequence: Synthetic oligonucleotide
cccgacagcggagucugcg

SEQ ID NO: 507656 - RNA, 19 nt, Artificial Sequence
  Description of Artificial Sequence: Synthetic oligonucleotide
ggcaaugugcgaggucaug

SEQ ID NO: 507657 - RNA, 19 nt, Artificial Sequence
  Description of Artificial Sequence: Synthetic oligonucleotide
ccguguugggaauccccag

SEQ ID NO: 507658 - RNA, 19 nt, Artificial Sequence
  Description of Artificial Sequence: Synthetic oligonucleotide
cugcgcgcccuucccggag

SEQ ID NO: 507659 - RNA, 19 nt, Artificial Sequence
  Description of Artificial Sequence: Synthetic oligonucleotide
ggccgagccugauggaaga

SEQ ID NO: 507660 - RNA, 19 nt, Artificial Sequence
  Description of Artificial Sequence: Synthetic oligonucleotide
ggggcucgcucuuuaaccu

SEQ ID NO: 507661 - RNA, 19 nt, Artificial Sequence
  Description of Artificial Sequence: Synthetic oligonucleotide
ugcgcgccugacccuucuc

SEQ ID NO: 507662 - RNA, 19 nt, Artificial Sequence
  Description of Artificial Sequence: Synthetic oligonucleotide
ccuccuuauucacuggugu

SEQ ID NO: 507663 - RNA, 19 nt, Artificial Sequence
  Description of Artificial Sequence: Synthetic oligonucleotide
cacgaaggcugagaaacau

SEQ ID NO: 507664 - RNA, 19 nt, Artificial Sequence
  Description of Artificial Sequence: Synthetic oligonucleotide
gggacacuaagggcccagc

SEQ ID NO: 507665 - RNA, 19 nt, Artificial Sequence
  Description of Artificial Sequence: Synthetic oligonucleotide
cggauuuguauucucgucu

SEQ ID NO: 507666 - RNA, 19 nt, Artificial Sequence
  Description of Artificial Sequence: Synthetic oligonucleotide
ccacaacuuagcgguuggg

SEQ ID NO: 507667 - RNA, 19 nt, Artificial Sequence
  Description of Artificial Sequence: Synthetic oligonucleotide
ugccgcccacgucuucuuu

SEQ ID NO: 507668 - RNA, 19 nt, Artificial Sequence
  Description of Artificial Sequence: Synthetic oligonucleotide
ccgcccacgucuucuuuac

SEQ ID NO: 507669 - RNA, 19 nt, Artificial Sequence
  Description of Artificial Sequence: Synthetic oligonucleotide
gugucacgggaauccccaa

SEQ ID NO: 507670 - RNA, 19 nt, Artificial Sequence
  Description of Artificial Sequence: Synthetic oligonucleotide
gugcgaggucaugagaaau

SEQ ID NO: 507671 - RNA, 19 nt, Artificial Sequence
  Description of Artificial Sequence: Synthetic oligonucleotide
ucccggagucgagcugcgc

SEQ ID NO: 507672 - RNA, 19 nt, Artificial Sequence
  Description of Artificial Sequence: Synthetic oligonucleotide
cagagaacacuggcauuua

SEQ ID NO: 507673 - RNA, 19 nt, Artificial Sequence
  Description of Artificial Sequence: Synthetic oligonucleotide
cccuauuuccacgaaggcu

SEQ ID NO: 507674 - RNA, 19 nt, Artificial Sequence
  Description of Artificial Sequence: Synthetic oligonucleotide
ccacgcugaauucuugcua

SEQ ID NO: 507675 - RNA, 19 nt, Artificial Sequence
  Description of Artificial Sequence: Synthetic oligonucleotide
gccagcugcgaagucggga

SEQ ID NO: 507676 - RNA, 19 nt, Artificial Sequence
  Description of Artificial Sequence: Synthetic oligonucleotide
caucccgacagcggagucu

SEQ ID NO: 507677 - RNA, 19 nt, Artificial Sequence
  Description of Artificial Sequence: Synthetic oligonucleotide
cgaagucgggauauuuaaa

SEQ ID NO: 507678 - RNA, 19 nt, Artificial Sequence
  Description of Artificial Sequence: Synthetic oligonucleotide
gacgcccugcgcgccugac

SEQ ID NO: 507679 - RNA, 19 nt, Artificial Sequence
  Description of Artificial Sequence: Synthetic oligonucleotide
ccagcugcgaagucgggau

SEQ ID NO: 507680 - RNA, 19 nt, Artificial Sequence
  Description of Artificial Sequence: Synthetic oligonucleotide
cuacacagucgggcaaugu

SEQ ID NO: 507681 - RNA, 19 nt, Artificial Sequence
  Description of Artificial Sequence: Synthetic oligonucleotide
ccauuccuuagagggguca

SEQ ID NO: 507682 - RNA, 19 nt, Artificial Sequence
  Description of Artificial Sequence: Synthetic oligonucleotide
ccagcaucgucuguacaaa

SEQ ID NO: 507683 - RNA, 19 nt, Artificial Sequence
  Description of Artificial Sequence: Synthetic oligonucleotide
cucuguccguguugggaau

SEQ ID NO: 507684 - RNA, 19 nt, Artificial Sequence
  Description of Artificial Sequence: Synthetic oligonucleotide
gcaucccgacagcggaguc

SEQ ID NO: 507685 - RNA, 19 nt, Artificial Sequence
  Description of Artificial Sequence: Synthetic oligonucleotide
gugggacacuaagggccca

SEQ ID NO: 507686 - RNA, 19 nt, Artificial Sequence
  Description of Artificial Sequence: Synthetic oligonucleotide
cccauaugaguccacccau

SEQ ID NO: 507687 - RNA, 19 nt, Artificial Sequence
  Description of Artificial Sequence: Synthetic oligonucleotide
gggaauccccagguccaca

SEQ ID NO: 507688 - RNA, 19 nt, Artificial Sequence
  Description of Artificial Sequence: Synthetic oligonucleotide
cgggauauuuaaaggcugu

SEQ ID NO: 507689 - RNA, 19 nt, Artificial Sequence
  Description of Artificial Sequence: Synthetic oligonucleotide
ggaucugaugggagaggua

SEQ ID NO: 507690 - RNA, 19 nt, Artificial Sequence
  Description of Artificial Sequence: Synthetic oligonucleotide
gccgcccacgucuucuuua

SEQ ID NO: 507691 - RNA, 19 nt, Artificial Sequence
  Description of Artificial Sequence: Synthetic oligonucleotide
gucgggcaaugugcgaggu

SEQ ID NO: 507692 - RNA, 19 nt, Artificial Sequence
  Description of Artificial Sequence: Synthetic oligonucleotide
cagcugcgaagucgggaua

SEQ ID NO: 507693 - RNA, 19 nt, Artificial Sequence
  Description of Artificial Sequence: Synthetic oligonucleotide
acuuagcgguugggugcau

SEQ ID NO: 507694 - RNA, 19 nt, Artificial Sequence
  Description of Artificial Sequence: Synthetic oligonucleotide
cugcgaagucgggauauuu

SEQ ID NO: 507695 - RNA, 19 nt, Artificial Sequence
  Description of Artificial Sequence: Synthetic oligonucleotide
gcgcaggcggcugcauccc

SEQ ID NO: 507696 - RNA, 19 nt, Artificial Sequence
  Description of Artificial Sequence: Synthetic oligonucleotide
ccauagcgcucacccagaa

SEQ ID NO: 507697 - RNA, 19 nt, Artificial Sequence
  Description of Artificial Sequence: Synthetic oligonucleotide
cgguaaucacuguguuaca

SEQ ID NO: 507698 - RNA, 19 nt, Artificial Sequence
  Description of Artificial Sequence: Synthetic oligonucleotide
ccucaucgugcaaugcuuu

SEQ ID NO: 507699 - RNA, 19 nt, Artificial Sequence
  Description of Artificial Sequence: Synthetic oligonucleotide
cugcgcgccugacccuucu

SEQ ID NO: 507700 - RNA, 19 nt, Artificial Sequence
  Description of Artificial Sequence: Synthetic oligonucleotide
gcgcgcccuucccggaguc

SEQ ID NO: 507701 - RNA, 19 nt, Artificial Sequence
  Description of Artificial Sequence: Synthetic oligonucleotide
gugccgcccacgucuucuu

SEQ ID NO: 507702 - RNA, 19 nt, Artificial Sequence
  Description of Artificial Sequence: Synthetic oligonucleotide
gccagccacgugagauaca

SEQ ID NO: 507703 - RNA, 19 nt, Artificial Sequence
  Description of Artificial Sequence: Synthetic oligonucleotide
ggacgcccugcgcgccuga

SEQ ID NO: 507704 - RNA, 19 nt, Artificial Sequence
  Description of Artificial Sequence: Synthetic oligonucleotide
cuucugcguggcgcugccu

SEQ ID NO: 507705 - RNA, 19 nt, Artificial Sequence
  Description of Artificial Sequence: Synthetic oligonucleotide
gcgguugggugcaucucuu

SEQ ID NO: 507706 - RNA, 19 nt, Artificial Sequence
  Description of Artificial Sequence: Synthetic oligonucleotide
cgcccacgucuucuuuaca

SEQ ID NO: 507707 - RNA, 19 nt, Artificial Sequence
  Description of Artificial Sequence: Synthetic oligonucleotide
gcggacgcccugcgcgccu

SEQ ID NO: 507708 - RNA, 19 nt, Artificial Sequence
  Description of Artificial Sequence: Synthetic oligonucleotide
gcccugcgcgccugacccu

SEQ ID NO: 507709 - RNA, 19 nt, Artificial Sequence
  Description of Artificial Sequence: Synthetic oligonucleotide
gcggagucugcgcgcccuu

SEQ ID NO: 507710 - RNA, 19 nt, Artificial Sequence
  Description of Artificial Sequence: Synthetic oligonucleotide
aaguaaauaggccagcugc

SEQ ID NO: 507711 - RNA, 19 nt, Artificial Sequence
  Description of Artificial Sequence: Synthetic oligonucleotide
uuauauuggcacaugaugg

SEQ ID NO: 507712 - RNA, 19 nt, Artificial Sequence
  Description of Artificial Sequence: Synthetic oligonucleotide
aaggaaguuauauuggcac

SEQ ID NO: 507713 - RNA, 19 nt, Artificial Sequence
  Description of Artificial Sequence: Synthetic oligonucleotide
acaucugugcgcuauauac

SEQ ID NO: 507714 - RNA, 19 nt, Artificial Sequence
  Description of Artificial Sequence: Synthetic oligonucleotide
aaggcuuuaaggcaaagca

SEQ ID NO: 507715 - RNA, 19 nt, Artificial Sequence
  Description of Artificial Sequence: Synthetic oligonucleotide
ugcgcuauauacaaggucc

SEQ ID NO: 507716 - RNA, 19 nt, Artificial Sequence
  Description of Artificial Sequence: Synthetic oligonucleotide
aaauacguuguccagggug

SEQ ID NO: 507717 - RNA, 19 nt, Artificial Sequence
  Description of Artificial Sequence: Synthetic oligonucleotide
agcccuuugguccugaacc

SEQ ID NO: 507718 - RNA, 19 nt, Artificial Sequence
  Description of Artificial Sequence: Synthetic oligonucleotide
auauacaaggucccgcucc

SEQ ID NO: 507719 - RNA, 19 nt, Artificial Sequence
  Description of Artificial Sequence: Synthetic oligonucleotide
aagcaaaguaaauaggcca

SEQ ID NO: 507720 - RNA, 19 nt, Artificial Sequence
  Description of Artificial Sequence: Synthetic oligonucleotide
ucaaauggggacuucaucu

SEQ ID NO: 507721 - RNA, 19 nt, Artificial Sequence
  Description of Artificial Sequence: Synthetic oligonucleotide
guuauauuggcacaugaug

SEQ ID NO: 507722 - RNA, 19 nt, Artificial Sequence
  Description of Artificial Sequence: Synthetic oligonucleotide
aguguguccguguugaagg

SEQ ID NO: 507723 - RNA, 19 nt, Artificial Sequence
  Description of Artificial Sequence: Synthetic oligonucleotide
ugcauacuuagucaguucc

SEQ ID NO: 507724 - RNA, 19 nt, Artificial Sequence
  Description of Artificial Sequence: Synthetic oligonucleotide
guuucguagacacaggcag

SEQ ID NO: 507725 - RNA, 19 nt, Artificial Sequence
  Description of Artificial Sequence: Synthetic oligonucleotide
aauacguuguccagggugg

SEQ ID NO: 507726 - RNA, 19 nt, Artificial Sequence
  Description of Artificial Sequence: Synthetic oligonucleotide
uugacguacucauuguagg

SEQ ID NO: 507727 - RNA, 19 nt, Artificial Sequence
  Description of Artificial Sequence: Synthetic oligonucleotide
aaagacaccugugcaagac

SEQ ID NO: 507728 - RNA, 19 nt, Artificial Sequence
  Description of Artificial Sequence: Synthetic oligonucleotide
agguucucaaucuugacca

SEQ ID NO: 507729 - RNA, 19 nt, Artificial Sequence
  Description of Artificial Sequence: Synthetic oligonucleotide
uacuuagucaguuccagcu

SEQ ID NO: 507730 - RNA, 19 nt, Artificial Sequence
  Description of Artificial Sequence: Synthetic oligonucleotide
uauaccuuggucagguucu

SEQ ID NO: 507731 - RNA, 19 nt, Artificial Sequence
  Description of Artificial Sequence: Synthetic oligonucleotide
agguuucguagacacaggc

SEQ ID NO: 507732 - RNA, 19 nt, Artificial Sequence
  Description of Artificial Sequence: Synthetic oligonucleotide
uaggauacggccaaucuuc

SEQ ID NO: 507733 - RNA, 19 nt, Artificial Sequence
  Description of Artificial Sequence: Synthetic oligonucleotide
gacuuguauaccuugguca

SEQ ID NO: 507734 - RNA, 19 nt, Artificial Sequence
  Description of Artificial Sequence: Synthetic oligonucleotide
cugugcgcuauauacaagg

SEQ ID NO: 507735 - RNA, 19 nt, Artificial Sequence
  Description of Artificial Sequence: Synthetic oligonucleotide
cuagguuucguagacacag

SEQ ID NO: 507736 - RNA, 19 nt, Artificial Sequence
  Description of Artificial Sequence: Synthetic oligonucleotide
caaagcacucuccagggcg

SEQ ID NO: 507737 - RNA, 19 nt, Artificial Sequence
  Description of Artificial Sequence: Synthetic oligonucleotide
ugucgugcucucaucaccg

SEQ ID NO: 507738 - RNA, 19 nt, Artificial Sequence
  Description of Artificial Sequence: Synthetic oligonucleotide
ucuuccgagacuuguauac

SEQ ID NO: 507739 - RNA, 19 nt, Artificial Sequence
  Description of Artificial Sequence: Synthetic oligonucleotide
ucaucaccggucaacaucu

SEQ ID NO: 507740 - RNA, 19 nt, Artificial Sequence
  Description of Artificial Sequence: Synthetic oligonucleotide
aaacaaacaucugugcgcu

SEQ ID NO: 507741 - RNA, 19 nt, Artificial Sequence
  Description of Artificial Sequence: Synthetic oligonucleotide
acgucagcacgacugaucg

SEQ ID NO: 507742 - RNA, 19 nt, Artificial Sequence
  Description of Artificial Sequence: Synthetic oligonucleotide
agaugaaggcaggauaccc

SEQ ID NO: 507743 - RNA, 19 nt, Artificial Sequence
  Description of Artificial Sequence: Synthetic oligonucleotide
auaguacucguugacguac

SEQ ID NO: 507744 - RNA, 19 nt, Artificial Sequence
  Description of Artificial Sequence: Synthetic oligonucleotide
aguaaauaggccagcugcc

SEQ ID NO: 507745 - RNA, 19 nt, Artificial Sequence
  Description of Artificial Sequence: Synthetic oligonucleotide
ugucugcauacuuagucag

SEQ ID NO: 507746 - RNA, 19 nt, Artificial Sequence
  Description of Artificial Sequence: Synthetic oligonucleotide
uaacuguugacaaccuuca

SEQ ID NO: 507747 - RNA, 19 nt, Artificial Sequence
  Description of Artificial Sequence: Synthetic oligonucleotide
agacuuguauaccuugguc

SEQ ID NO: 507748 - RNA, 19 nt, Artificial Sequence
  Description of Artificial Sequence: Synthetic oligonucleotide
aguugcaucccugacgugg

SEQ ID NO: 507749 - RNA, 19 nt, Artificial Sequence
  Description of Artificial Sequence: Synthetic oligonucleotide
uuucguagacacaggcagg

SEQ ID NO: 507750 - RNA, 19 nt, Artificial Sequence
  Description of Artificial Sequence: Synthetic oligonucleotide
acaguugcaucccugacgu

SEQ ID NO: 507751 - RNA, 19 nt, Artificial Sequence
  Description of Artificial Sequence: Synthetic oligonucleotide
uccacgugugacaaugucc

SEQ ID NO: 507752 - RNA, 19 nt, Artificial Sequence
  Description of Artificial Sequence: Synthetic oligonucleotide
ugugacuggggcuacggcc

SEQ ID NO: 507753 - RNA, 19 nt, Artificial Sequence
  Description of Artificial Sequence: Synthetic oligonucleotide
caagguugaggguucagcc

SEQ ID NO: 507754 - RNA, 19 nt, Artificial Sequence
  Description of Artificial Sequence: Synthetic oligonucleotide
ugugaugccguuccuugag

SEQ ID NO: 507755 - RNA, 19 nt, Artificial Sequence
  Description of Artificial Sequence: Synthetic oligonucleotide
agcgcagucguccauucac

SEQ ID NO: 507756 - RNA, 19 nt, Artificial Sequence
  Description of Artificial Sequence: Synthetic oligonucleotide
ucaccggucaacaucuuga

SEQ ID NO: 507757 - RNA, 19 nt, Artificial Sequence
  Description of Artificial Sequence: Synthetic oligonucleotide
caaacugcgggcaguagcc

SEQ ID NO: 507758 - RNA, 19 nt, Artificial Sequence
  Description of Artificial Sequence: Synthetic oligonucleotide
gaggaagaaucccacgaag

SEQ ID NO: 507759 - RNA, 19 nt, Artificial Sequence
  Description of Artificial Sequence: Synthetic oligonucleotide
ccggucaacaucuugaagg

SEQ ID NO: 507760 - RNA, 19 nt, Artificial Sequence
  Description of Artificial Sequence: Synthetic oligonucleotide
uauacaaggucccgcuccc

SEQ ID NO: 507761 - RNA, 19 nt, Artificial Sequence
  Description of Artificial Sequence: Synthetic oligonucleotide
uggaugggagagcaaaggc

SEQ ID NO: 507762 - RNA, 19 nt, Artificial Sequence
  Description of Artificial Sequence: Synthetic oligonucleotide
cucguugacguacucauug

SEQ ID NO: 507763 - RNA, 19 nt, Artificial Sequence
  Description of Artificial Sequence: Synthetic oligonucleotide
ugauggugaggaagaaucc

SEQ ID NO: 507764 - RNA, 19 nt, Artificial Sequence
  Description of Artificial Sequence: Synthetic oligonucleotide
uuaaggcaaagcaggguga

SEQ ID NO: 507765 - RNA, 19 nt, Artificial Sequence
  Description of Artificial Sequence: Synthetic oligonucleotide
acggccaccgccuaacuuc

SEQ ID NO: 507766 - RNA, 19 nt, Artificial Sequence
  Description of Artificial Sequence: Synthetic oligonucleotide
gaucgucccgucuugauga

SEQ ID NO: 507767 - RNA, 19 nt, Artificial Sequence
  Description of Artificial Sequence: Synthetic oligonucleotide
ugaaggaaagcugggcccg

SEQ ID NO: 507768 - RNA, 19 nt, Artificial Sequence
  Description of Artificial Sequence: Synthetic oligonucleotide
uaaauaggccagcugccca

SEQ ID NO: 507769 - RNA, 19 nt, Artificial Sequence
  Description of Artificial Sequence: Synthetic oligonucleotide
uuuugguccuuacagugau

SEQ ID NO: 507770 - RNA, 19 nt, Artificial Sequence
  Description of Artificial Sequence: Synthetic oligonucleotide
agcuugaggggacagggag

SEQ ID NO: 507771 - RNA, 19 nt, Artificial Sequence
  Description of Artificial Sequence: Synthetic oligonucleotide
auugacaccaaggagccca

SEQ ID NO: 507772 - RNA, 19 nt, Artificial Sequence
  Description of Artificial Sequence: Synthetic oligonucleotide
ugucauggccaccagucca

SEQ ID NO: 507773 - RNA, 19 nt, Artificial Sequence
  Description of Artificial Sequence: Synthetic oligonucleotide
acugucauggccaccaguc

SEQ ID NO: 507774 - RNA, 19 nt, Artificial Sequence
  Description of Artificial Sequence: Synthetic oligonucleotide
ucguccauucaccaugaug

SEQ ID NO: 507775 - RNA, 19 nt, Artificial Sequence
  Description of Artificial Sequence: Synthetic oligonucleotide
ugagccagagagaugugcu

SEQ ID NO: 507776 - RNA, 19 nt, Artificial Sequence
  Description of Artificial Sequence: Synthetic oligonucleotide
uuacagugaucauguagcc

SEQ ID NO: 507777 - RNA, 19 nt, Artificial Sequence
  Description of Artificial Sequence: Synthetic oligonucleotide
cacuagguuucguagacac

SEQ ID NO: 507778 - RNA, 19 nt, Artificial Sequence
  Description of Artificial Sequence: Synthetic oligonucleotide
ugacguacucauuguaggc

SEQ ID NO: 507779 - RNA, 19 nt, Artificial Sequence
  Description of Artificial Sequence: Synthetic oligonucleotide
uccacuagguuucguagac

SEQ ID NO: 507780 - RNA, 19 nt, Artificial Sequence
  Description of Artificial Sequence: Synthetic oligonucleotide
cacuguagguuccagcggg

SEQ ID NO: 507781 - RNA, 19 nt, Artificial Sequence
  Description of Artificial Sequence: Synthetic oligonucleotide
aagguugaggguucagccu

SEQ ID NO: 507782 - RNA, 19 nt, Artificial Sequence
  Description of Artificial Sequence: Synthetic oligonucleotide
cacaguugcaucccugacg

SEQ ID NO: 507783 - RNA, 19 nt, Artificial Sequence
  Description of Artificial Sequence: Synthetic oligonucleotide
uccguguugaaggaaagcu

SEQ ID NO: 507784 - RNA, 19 nt, Artificial Sequence
  Description of Artificial Sequence: Synthetic oligonucleotide
acggccaaucuuccgagac

SEQ ID NO: 507785 - RNA, 19 nt, Artificial Sequence
  Description of Artificial Sequence: Synthetic oligonucleotide
aaaggcgauccaccgcuag

SEQ ID NO: 507786 - RNA, 19 nt, Artificial Sequence
  Description of Artificial Sequence: Synthetic oligonucleotide
ucguaaagcaaaguaaaua

SEQ ID NO: 507787 - RNA, 19 nt, Artificial Sequence
  Description of Artificial Sequence: Synthetic oligonucleotide
guugacguacucauuguag

SEQ ID NO: 507788 - RNA, 19 nt, Artificial Sequence
  Description of Artificial Sequence: Synthetic oligonucleotide
cuucgugugaugccguucc

SEQ ID NO: 507789 - RNA, 19 nt, Artificial Sequence
  Description of Artificial Sequence: Synthetic oligonucleotide
uccugcuauuccaccaggg

SEQ ID NO: 507790 - RNA, 19 nt, Artificial Sequence
  Description of Artificial Sequence: Synthetic oligonucleotide
ugaucgucccgucuugaug

SEQ ID NO: 507791 - RNA, 19 nt, Artificial Sequence
  Description of Artificial Sequence: Synthetic oligonucleotide
auccuugucaugcucaaaa

SEQ ID NO: 507792 - RNA, 19 nt, Artificial Sequence
  Description of Artificial Sequence: Synthetic oligonucleotide
uacucguugacguacucau

SEQ ID NO: 507793 - RNA, 19 nt, Artificial Sequence
  Description of Artificial Sequence: Synthetic oligonucleotide
uguguacagcuguaggugu

SEQ ID NO: 507794 - RNA, 19 nt, Artificial Sequence
  Description of Artificial Sequence: Synthetic oligonucleotide
aaaagacaccugugcaaga

SEQ ID NO: 507795 - RNA, 19 nt, Artificial Sequence
  Description of Artificial Sequence: Synthetic oligonucleotide
ugaggaagaaucccacgaa

SEQ ID NO: 507796 - RNA, 19 nt, Artificial Sequence
  Description of Artificial Sequence: Synthetic oligonucleotide
uuguauaccuuggucaggu

SEQ ID NO: 507797 - RNA, 19 nt, Artificial Sequence
  Description of Artificial Sequence: Synthetic oligonucleotide
ugaggguaugugcagccca

SEQ ID NO: 507798 - RNA, 19 nt, Artificial Sequence
  Description of Artificial Sequence: Synthetic oligonucleotide
uucacauucuggcugcuuu

SEQ ID NO: 507799 - RNA, 19 nt, Artificial Sequence
  Description of Artificial Sequence: Synthetic oligonucleotide
cuuagucaguuccagcuuc

SEQ ID NO: 507800 - RNA, 19 nt, Artificial Sequence
  Description of Artificial Sequence: Synthetic oligonucleotide
uuccaugacuucccauggg

SEQ ID NO: 507801 - RNA, 19 nt, Artificial Sequence
  Description of Artificial Sequence: Synthetic oligonucleotide
gacguacucauuguaggcc

SEQ ID NO: 507802 - RNA, 19 nt, Artificial Sequence
  Description of Artificial Sequence: Synthetic oligonucleotide
uucguagacacaggcaggc

SEQ ID NO: 507803 - RNA, 19 nt, Artificial Sequence
  Description of Artificial Sequence: Synthetic oligonucleotide
aucugugcgcuauauacaa

SEQ ID NO: 507804 - RNA, 19 nt, Artificial Sequence
  Description of Artificial Sequence: Synthetic oligonucleotide
caggauacccaaugagugc

SEQ ID NO: 507805 - RNA, 19 nt, Artificial Sequence
  Description of Artificial Sequence: Synthetic oligonucleotide
aggaaguuauauuggcaca

SEQ ID NO: 507806 - RNA, 19 nt, Artificial Sequence
  Description of Artificial Sequence: Synthetic oligonucleotide
augacuucccauggguagc

SEQ ID NO: 507807 - RNA, 19 nt, Artificial Sequence
  Description of Artificial Sequence: Synthetic oligonucleotide
uaguccucgaugcccagca

SEQ ID NO: 507808 - RNA, 19 nt, Artificial Sequence
  Description of Artificial Sequence: Synthetic oligonucleotide
agagcggggccucaauagg

SEQ ID NO: 507809 - RNA, 19 nt, Artificial Sequence
  Description of Artificial Sequence: Synthetic oligonucleotide
agcacucucugccucucac

SEQ ID NO: 507810 - RNA, 19 nt, Artificial Sequence
  Description of Artificial Sequence: Synthetic oligonucleotide
aggcaaaggcgauccaccg

SEQ ID NO: 507811 - RNA, 19 nt, Artificial Sequence
  Description of Artificial Sequence: Synthetic oligonucleotide
ugugcgcuauauacaaggu

SEQ ID NO: 507812 - RNA, 19 nt, Artificial Sequence
  Description of Artificial Sequence: Synthetic oligonucleotide
uuccugcuauuccaccagg

SEQ ID NO: 507813 - RNA, 19 nt, Artificial Sequence
  Description of Artificial Sequence: Synthetic oligonucleotide
ugccguuccuugagcaugg

SEQ ID NO: 507814 - RNA, 19 nt, Artificial Sequence
  Description of Artificial Sequence: Synthetic oligonucleotide
uccugaaccugccuuucca

SEQ ID NO: 507815 - RNA, 19 nt, Artificial Sequence
  Description of Artificial Sequence: Synthetic oligonucleotide
uauauacaaggucccgcuc

SEQ ID NO: 507816 - RNA, 19 nt, Artificial Sequence
  Description of Artificial Sequence: Synthetic oligonucleotide
ugaugccguuccuugagca

SEQ ID NO: 507817 - RNA, 19 nt, Artificial Sequence
  Description of Artificial Sequence: Synthetic oligonucleotide
cuggccuuaggguccaugc

SEQ ID NO: 507818 - RNA, 19 nt, Artificial Sequence
  Description of Artificial Sequence: Synthetic oligonucleotide
gguaguugggaggagggcg

SEQ ID NO: 507819 - RNA, 19 nt, Artificial Sequence
  Description of Artificial Sequence: Synthetic oligonucleotide
gaggcccucaucuucugug

SEQ ID NO: 507820 - RNA, 19 nt, Artificial Sequence
  Description of Artificial Sequence: Synthetic oligonucleotide
ugugugacuggggcuacgg

SEQ ID NO: 507821 - RNA, 19 nt, Artificial Sequence
  Description of Artificial Sequence: Synthetic oligonucleotide
guuccagcgggcuugucug

SEQ ID NO: 507822 - RNA, 19 nt, Artificial Sequence
  Description of Artificial Sequence: Synthetic oligonucleotide
acguacucauuguaggcca

SEQ ID NO: 507823 - RNA, 19 nt, Artificial Sequence
  Description of Artificial Sequence: Synthetic oligonucleotide
ugaggaguccaagugggga

SEQ ID NO: 507824 - RNA, 19 nt, Artificial Sequence
  Description of Artificial Sequence: Synthetic oligonucleotide
ucugugcgcuauauacaag

SEQ ID NO: 507825 - RNA, 19 nt, Artificial Sequence
  Description of Artificial Sequence: Synthetic oligonucleotide
gacccaaggcuuuaaggca

SEQ ID NO: 507826 - RNA, 19 nt, Artificial Sequence
  Description of Artificial Sequence: Synthetic oligonucleotide
ugccggguaggguaagggg

SEQ ID NO: 507827 - RNA, 19 nt, Artificial Sequence
  Description of Artificial Sequence: Synthetic oligonucleotide
cguguugaaggaaagcugg

SEQ ID NO: 507828 - RNA, 19 nt, Artificial Sequence
  Description of Artificial Sequence: Synthetic oligonucleotide
agcacgacugaucgucccg

SEQ ID NO: 507829 - RNA, 19 nt, Artificial Sequence
  Description of Artificial Sequence: Synthetic oligonucleotide
uccaccgcuaggauacggc

SEQ ID NO: 507830 - RNA, 19 nt, Artificial Sequence
  Description of Artificial Sequence: Synthetic oligonucleotide
augagugcaauggcugugg

SEQ ID NO: 507831 - RNA, 19 nt, Artificial Sequence
  Description of Artificial Sequence: Synthetic oligonucleotide
uggcauaguacucguugac

SEQ ID NO: 507832 - RNA, 19 nt, Artificial Sequence
  Description of Artificial Sequence: Synthetic oligonucleotide
gaaguuccgguugaagaac

SEQ ID NO: 507833 - RNA, 19 nt, Artificial Sequence
  Description of Artificial Sequence: Synthetic oligonucleotide
guaaauaggccagcugccc

SEQ ID NO: 507834 - RNA, 19 nt, Artificial Sequence
  Description of Artificial Sequence: Synthetic oligonucleotide
cuggaugggagagcaaagg

SEQ ID NO: 507835 - RNA, 19 nt, Artificial Sequence
  Description of Artificial Sequence: Synthetic oligonucleotide
ccacgugugacaauguccc

SEQ ID NO: 507836 - RNA, 19 nt, Artificial Sequence
  Description of Artificial Sequence: Synthetic oligonucleotide
ucugcauacuuagucaguu

SEQ ID NO: 507837 - RNA, 19 nt, Artificial Sequence
  Description of Artificial Sequence: Synthetic oligonucleotide
caaggcuuuaaggcaaagc

SEQ ID NO: 507838 - RNA, 19 nt, Artificial Sequence
  Description of Artificial Sequence: Synthetic oligonucleotide
caccauugacaccaaggag

SEQ ID NO: 507839 - RNA, 19 nt, Artificial Sequence
  Description of Artificial Sequence: Synthetic oligonucleotide
uggggcuacggccaccgcc

SEQ ID NO: 507840 - RNA, 19 nt, Artificial Sequence
  Description of Artificial Sequence: Synthetic oligonucleotide
guguguacagcuguaggug

SEQ ID NO: 507841 - RNA, 19 nt, Artificial Sequence
  Description of Artificial Sequence: Synthetic oligonucleotide
gagggaggcucguaaagca

SEQ ID NO: 507842 - RNA, 19 nt, Artificial Sequence
  Description of Artificial Sequence: Synthetic oligonucleotide
gaugaaggcaggauaccca

SEQ ID NO: 507843 - RNA, 19 nt, Artificial Sequence
  Description of Artificial Sequence: Synthetic oligonucleotide
guaguugggaggagggcgg

SEQ ID NO: 507844 - RNA, 19 nt, Artificial Sequence
  Description of Artificial Sequence: Synthetic oligonucleotide
cucaaauggggacuucauc

SEQ ID NO: 507845 - RNA, 19 nt, Artificial Sequence
  Description of Artificial Sequence: Synthetic oligonucleotide
agcgggcuugucugcauac

SEQ ID NO: 507846 - RNA, 19 nt, Artificial Sequence
  Description of Artificial Sequence: Synthetic oligonucleotide
aggcucguaaagcaaagua

SEQ ID NO: 507847 - RNA, 19 nt, Artificial Sequence
  Description of Artificial Sequence: Synthetic oligonucleotide
cugucgugcucucaucacc

SEQ ID NO: 507848 - RNA, 19 nt, Artificial Sequence
  Description of Artificial Sequence: Synthetic oligonucleotide
gaugccacgcagccgugug

SEQ ID NO: 507849 - RNA, 19 nt, Artificial Sequence
  Description of Artificial Sequence: Synthetic oligonucleotide
uguagguguucacgagcug

SEQ ID NO: 507850 - RNA, 19 nt, Artificial Sequence
  Description of Artificial Sequence: Synthetic oligonucleotide
uacucauuguaggccaucu

SEQ ID NO: 507851 - RNA, 19 nt, Artificial Sequence
  Description of Artificial Sequence: Synthetic oligonucleotide
gugguaguugggaggaggg

SEQ ID NO: 507852 - RNA, 19 nt, Artificial Sequence
  Description of Artificial Sequence: Synthetic oligonucleotide
acgagcugugagcucauca

SEQ ID NO: 507853 - RNA, 19 nt, Artificial Sequence
  Description of Artificial Sequence: Synthetic oligonucleotide
uggggacuucaucuuguca

SEQ ID NO: 507854 - RNA, 19 nt, Artificial Sequence
  Description of Artificial Sequence: Synthetic oligonucleotide
uggccuuaggguccaugcc

SEQ ID NO: 507855 - RNA, 19 nt, Artificial Sequence
  Description of Artificial Sequence: Synthetic oligonucleotide
aagcgccuggccuuagggu

SEQ ID NO: 507856 - RNA, 19 nt, Artificial Sequence
  Description of Artificial Sequence: Synthetic oligonucleotide
aaacaucugugcgcuauau

SEQ ID NO: 507857 - RNA, 19 nt, Artificial Sequence
  Description of Artificial Sequence: Synthetic oligonucleotide
aggauacggccaaucuucc

SEQ ID NO: 507858 - RNA, 19 nt, Artificial Sequence
  Description of Artificial Sequence: Synthetic oligonucleotide
gcaggauacccaaugagug

SEQ ID NO: 507859 - RNA, 19 nt, Artificial Sequence
  Description of Artificial Sequence: Synthetic oligonucleotide
guagccuaacuucuucaca

SEQ ID NO: 507860 - RNA, 19 nt, Artificial Sequence
  Description of Artificial Sequence: Synthetic oligonucleotide
ggcauaguacucguugacg

SEQ ID NO: 507861 - RNA, 19 nt, Artificial Sequence
  Description of Artificial Sequence: Synthetic oligonucleotide
cacacccacuaccugcucc

SEQ ID NO: 507862 - RNA, 19 nt, Artificial Sequence
  Description of Artificial Sequence: Synthetic oligonucleotide
uaguacucguugacguacu

SEQ ID NO: 507863 - RNA, 19 nt, Artificial Sequence
  Description of Artificial Sequence: Synthetic oligonucleotide
gagggcgggagcccuuugg

SEQ ID NO: 507864 - RNA, 19 nt, Artificial Sequence
  Description of Artificial Sequence: Synthetic oligonucleotide
caguccacgugugacaaug

SEQ ID NO: 507865 - RNA, 19 nt, Artificial Sequence
  Description of Artificial Sequence: Synthetic oligonucleotide
cacgaagcccucaacuguc

SEQ ID NO: 507866 - RNA, 19 nt, Artificial Sequence
  Description of Artificial Sequence: Synthetic oligonucleotide
accggucaacaucuugaag

SEQ ID NO: 507867 - RNA, 19 nt, Artificial Sequence
  Description of Artificial Sequence: Synthetic oligonucleotide
ccagaaugagguuccacag

SEQ ID NO: 507868 - RNA, 19 nt, Artificial Sequence
  Description of Artificial Sequence: Synthetic oligonucleotide
cuauauacaaggucccgcu

SEQ ID NO: 507869 - RNA, 19 nt, Artificial Sequence
  Description of Artificial Sequence: Synthetic oligonucleotide
cugagccagagagaugugc

SEQ ID NO: 507870 - RNA, 19 nt, Artificial Sequence
  Description of Artificial Sequence: Synthetic oligonucleotide
aacugcgggcaguagccaa

SEQ ID NO: 507871 - RNA, 19 nt, Artificial Sequence
  Description of Artificial Sequence: Synthetic oligonucleotide
ugagugcaauggcugugga

SEQ ID NO: 507872 - RNA, 19 nt, Artificial Sequence
  Description of Artificial Sequence: Synthetic oligonucleotide
cugaggaguccaagugggg

SEQ ID NO: 507873 - RNA, 19 nt, Artificial Sequence
  Description of Artificial Sequence: Synthetic oligonucleotide
uccuccacuagguuucgua

SEQ ID NO: 507874 - RNA, 19 nt, Artificial Sequence
  Description of Artificial Sequence: Synthetic oligonucleotide
gagcccaaagcacucucca

SEQ ID NO: 507875 - RNA, 19 nt, Artificial Sequence
  Description of Artificial Sequence: Synthetic oligonucleotide
aagcugcagaagaaaggug

SEQ ID NO: 507876 - RNA, 19 nt, Artificial Sequence
  Description of Artificial Sequence: Synthetic oligonucleotide
cuuccgagacuuguauacc

SEQ ID NO: 507877 - RNA, 19 nt, Artificial Sequence
  Description of Artificial Sequence: Synthetic oligonucleotide
gaagcagguccuugagcac

SEQ ID NO: 507878 - RNA, 19 nt, Artificial Sequence
  Description of Artificial Sequence: Synthetic oligonucleotide
cuauucuugaggugcugga

SEQ ID NO: 507879 - RNA, 19 nt, Artificial Sequence
  Description of Artificial Sequence: Synthetic oligonucleotide
cacgcagccguguguacag

SEQ ID NO: 507880 - RNA, 19 nt, Artificial Sequence
  Description of Artificial Sequence: Synthetic oligonucleotide
gacugaucgucccgucuug

SEQ ID NO: 507881 - RNA, 19 nt, Artificial Sequence
  Description of Artificial Sequence: Synthetic oligonucleotide
aacaccugagccagagaga

SEQ ID NO: 507882 - RNA, 19 nt, Artificial Sequence
  Description of Artificial Sequence: Synthetic oligonucleotide
cgaaggaaguuauauuggc

SEQ ID NO: 507883 - RNA, 19 nt, Artificial Sequence
  Description of Artificial Sequence: Synthetic oligonucleotide
ggcgggagcccuuuggucc

SEQ ID NO: 507884 - RNA, 19 nt, Artificial Sequence
  Description of Artificial Sequence: Synthetic oligonucleotide
gagaugugcucugacuuga

SEQ ID NO: 507885 - RNA, 19 nt, Artificial Sequence
  Description of Artificial Sequence: Synthetic oligonucleotide
aaagcagggugaggguaug

SEQ ID NO: 507886 - RNA, 19 nt, Artificial Sequence
  Description of Artificial Sequence: Synthetic oligonucleotide
ggugguaguugggaggagg

SEQ ID NO: 507887 - RNA, 19 nt, Artificial Sequence
  Description of Artificial Sequence: Synthetic oligonucleotide
cagggugaggguaugugca

SEQ ID NO: 507888 - RNA, 19 nt, Artificial Sequence
  Description of Artificial Sequence: Synthetic oligonucleotide
accgcuaggauacggccaa

SEQ ID NO: 507889 - RNA, 19 nt, Artificial Sequence
  Description of Artificial Sequence: Synthetic oligonucleotide
ggaagguggauggugccgg

SEQ ID NO: 507890 - RNA, 19 nt, Artificial Sequence
  Description of Artificial Sequence: Synthetic oligonucleotide
ucgugcucucaucaccggu

SEQ ID NO: 507891 - RNA, 19 nt, Artificial Sequence
  Description of Artificial Sequence: Synthetic oligonucleotide
auaggcugaggaguccaag

SEQ ID NO: 507892 - RNA, 19 nt, Artificial Sequence
  Description of Artificial Sequence: Synthetic oligonucleotide
ggugaggguaugugcagcc

SEQ ID NO: 507893 - RNA, 19 nt, Artificial Sequence
  Description of Artificial Sequence: Synthetic oligonucleotide
gguagccuaacuucuucac

SEQ ID NO: 507894 - RNA, 19 nt, Artificial Sequence
  Description of Artificial Sequence: Synthetic oligonucleotide
gaggugguaguugggagga

SEQ ID NO: 507895 - RNA, 19 nt, Artificial Sequence
  Description of Artificial Sequence: Synthetic oligonucleotide
cuugagcacacugugucca

SEQ ID NO: 507896 - RNA, 19 nt, Artificial Sequence
  Description of Artificial Sequence: Synthetic oligonucleotide
ucguagacacaggcaggcg

SEQ ID NO: 507897 - RNA, 19 nt, Artificial Sequence
  Description of Artificial Sequence: Synthetic oligonucleotide
agccaagacucugcuguac

SEQ ID NO: 507898 - RNA, 19 nt, Artificial Sequence
  Description of Artificial Sequence: Synthetic oligonucleotide
uccgagacuuguauaccuu

SEQ ID NO: 507899 - RNA, 19 nt, Artificial Sequence
  Description of Artificial Sequence: Synthetic oligonucleotide
ugacgggaagggccaagcu

SEQ ID NO: 507900 - RNA, 19 nt, Artificial Sequence
  Description of Artificial Sequence: Synthetic oligonucleotide
ucccugacgugguucuuga

SEQ ID NO: 507901 - RNA, 19 nt, Artificial Sequence
  Description of Artificial Sequence: Synthetic oligonucleotide
cgauccaccgcuaggauac

SEQ ID NO: 507902 - RNA, 19 nt, Artificial Sequence
  Description of Artificial Sequence: Synthetic oligonucleotide
acgacugaucgucccgucu

SEQ ID NO: 507903 - RNA, 19 nt, Artificial Sequence
  Description of Artificial Sequence: Synthetic oligonucleotide
cagagagaugugcucugac

SEQ ID NO: 507904 - RNA, 19 nt, Artificial Sequence
  Description of Artificial Sequence: Synthetic oligonucleotide
uuggggccgcugcagagaa

SEQ ID NO: 507905 - RNA, 19 nt, Artificial Sequence
  Description of Artificial Sequence: Synthetic oligonucleotide
gagcggggccucaauaggc

SEQ ID NO: 507906 - RNA, 19 nt, Artificial Sequence
  Description of Artificial Sequence: Synthetic oligonucleotide
ccauggguagccuaacuuc

SEQ ID NO: 507907 - RNA, 19 nt, Artificial Sequence
  Description of Artificial Sequence: Synthetic oligonucleotide
ucccaggugggugacggga

SEQ ID NO: 507908 - RNA, 19 nt, Artificial Sequence
  Description of Artificial Sequence: Synthetic oligonucleotide
ugugugacgucagcacgac

SEQ ID NO: 507909 - RNA, 19 nt, Artificial Sequence
  Description of Artificial Sequence: Synthetic oligonucleotide
ggauacggccaaucuuccg

SEQ ID NO: 507910 - RNA, 19 nt, Artificial Sequence
  Description of Artificial Sequence: Synthetic oligonucleotide
guacuggucuuuccugcac

SEQ ID NO: 507911 - RNA, 19 nt, Artificial Sequence
  Description of Artificial Sequence: Synthetic oligonucleotide
cuggccaaucuuggcauag

SEQ ID NO: 507912 - RNA, 19 nt, Artificial Sequence
  Description of Artificial Sequence: Synthetic oligonucleotide
gacgugguucuugaugguc

SEQ ID NO: 507913 - RNA, 19 nt, Artificial Sequence
  Description of Artificial Sequence: Synthetic oligonucleotide
cgggcaguagccaagacuc

SEQ ID NO: 507914 - RNA, 19 nt, Artificial Sequence
  Description of Artificial Sequence: Synthetic oligonucleotide
cauggguagccuaacuucu

SEQ ID NO: 507915 - RNA, 19 nt, Artificial Sequence
  Description of Artificial Sequence: Synthetic oligonucleotide
agcacacuguguccauuga

SEQ ID NO: 507916 - RNA, 19 nt, Artificial Sequence
  Description of Artificial Sequence: Synthetic oligonucleotide
gacgucagcacgacugauc

SEQ ID NO: 507917 - RNA, 19 nt, Artificial Sequence
  Description of Artificial Sequence: Synthetic oligonucleotide
ccuauucuugaggugcugg

SEQ ID NO: 507918 - RNA, 19 nt, Artificial Sequence
  Description of Artificial Sequence: Synthetic oligonucleotide
gucgugcucucaucaccgg

SEQ ID NO: 507919 - RNA, 19 nt, Artificial Sequence
  Description of Artificial Sequence: Synthetic oligonucleotide
ccuccacuagguuucguag

SEQ ID NO: 507920 - RNA, 19 nt, Artificial Sequence
  Description of Artificial Sequence: Synthetic oligonucleotide
aaacugcgggcaguagcca

SEQ ID NO: 507921 - RNA, 19 nt, Artificial Sequence
  Description of Artificial Sequence: Synthetic oligonucleotide
cuccacuagguuucguaga

SEQ ID NO: 507922 - RNA, 19 nt, Artificial Sequence
  Description of Artificial Sequence: Synthetic oligonucleotide
cagcacgacugaucguccc

SEQ ID NO: 507923 - RNA, 19 nt, Artificial Sequence
  Description of Artificial Sequence: Synthetic oligonucleotide
gcucguaaagcaaaguaaa

SEQ ID NO: 507924 - RNA, 19 nt, Artificial Sequence
  Description of Artificial Sequence: Synthetic oligonucleotide
agcagcuuuucagguaacu

SEQ ID NO: 507925 - RNA, 19 nt, Artificial Sequence
  Description of Artificial Sequence: Synthetic oligonucleotide
cgagacuuguauaccuugg

SEQ ID NO: 507926 - RNA, 19 nt, Artificial Sequence
  Description of Artificial Sequence: Synthetic oligonucleotide
aggcaaccacuuccaugac

SEQ ID NO: 507927 - RNA, 19 nt, Artificial Sequence
  Description of Artificial Sequence: Synthetic oligonucleotide
aggcgauccaccgcuagga

SEQ ID NO: 507928 - RNA, 19 nt, Artificial Sequence
  Description of Artificial Sequence: Synthetic oligonucleotide
aaggucccgcucccaggug

SEQ ID NO: 507929 - RNA, 19 nt, Artificial Sequence
  Description of Artificial Sequence: Synthetic oligonucleotide
uucgugugaugccguuccu

SEQ ID NO: 507930 - RNA, 19 nt, Artificial Sequence
  Description of Artificial Sequence: Synthetic oligonucleotide
ugacgugguucuugauggu

SEQ ID NO: 507931 - RNA, 19 nt, Artificial Sequence
  Description of Artificial Sequence: Synthetic oligonucleotide
accauggcccagguuguag

SEQ ID NO: 507932 - RNA, 19 nt, Artificial Sequence
  Description of Artificial Sequence: Synthetic oligonucleotide
gcauaguacucguugacgu

SEQ ID NO: 507933 - RNA, 19 nt, Artificial Sequence
  Description of Artificial Sequence: Synthetic oligonucleotide
cugcuauuccaccagggcu

SEQ ID NO: 507934 - RNA, 19 nt, Artificial Sequence
  Description of Artificial Sequence: Synthetic oligonucleotide
ggccuuaggguccaugcca

SEQ ID NO: 507935 - RNA, 19 nt, Artificial Sequence
  Description of Artificial Sequence: Synthetic oligonucleotide
cauaguacucguugacgua

SEQ ID NO: 507936 - RNA, 19 nt, Artificial Sequence
  Description of Artificial Sequence: Synthetic oligonucleotide
guccacgugugacaauguc

SEQ ID NO: 507937 - RNA, 19 nt, Artificial Sequence
  Description of Artificial Sequence: Synthetic oligonucleotide
agggcgggagcccuuuggu

SEQ ID NO: 507938 - RNA, 19 nt, Artificial Sequence
  Description of Artificial Sequence: Synthetic oligonucleotide
guacucguugacguacuca

SEQ ID NO: 507939 - RNA, 19 nt, Artificial Sequence
  Description of Artificial Sequence: Synthetic oligonucleotide
aucgucccgucuugaugag

SEQ ID NO: 507940 - RNA, 19 nt, Artificial Sequence
  Description of Artificial Sequence: Synthetic oligonucleotide
guagguguucacgagcugu

SEQ ID NO: 507941 - RNA, 19 nt, Artificial Sequence
  Description of Artificial Sequence: Synthetic oligonucleotide
ccguguugaaggaaagcug

SEQ ID NO: 507942 - RNA, 19 nt, Artificial Sequence
  Description of Artificial Sequence: Synthetic oligonucleotide
ccagacagcgcagucgucc

SEQ ID NO: 507943 - RNA, 19 nt, Artificial Sequence
  Description of Artificial Sequence: Synthetic oligonucleotide
ggcucguaaagcaaaguaa

SEQ ID NO: 507944 - RNA, 19 nt, Artificial Sequence
  Description of Artificial Sequence: Synthetic oligonucleotide
gccuaacuucuucacaaca

SEQ ID NO: 507945 - RNA, 19 nt, Artificial Sequence
  Description of Artificial Sequence: Synthetic oligonucleotide
auccaccgcuaggauacgg

SEQ ID NO: 507946 - RNA, 19 nt, Artificial Sequence
  Description of Artificial Sequence: Synthetic oligonucleotide
aucaaacugcgggcaguag

SEQ ID NO: 507947 - RNA, 19 nt, Artificial Sequence
  Description of Artificial Sequence: Synthetic oligonucleotide
ucgucccgucuugaugagg

SEQ ID NO: 507948 - RNA, 19 nt, Artificial Sequence
  Description of Artificial Sequence: Synthetic oligonucleotide
ggcaaaggcgauccaccgc

SEQ ID NO: 507949 - RNA, 19 nt, Artificial Sequence
  Description of Artificial Sequence: Synthetic oligonucleotide
cugugggugcagagcgggg

SEQ ID NO: 507950 - RNA, 19 nt, Artificial Sequence
  Description of Artificial Sequence: Synthetic oligonucleotide
ccuugagcacacugugucc

SEQ ID NO: 507951 - RNA, 19 nt, Artificial Sequence
  Description of Artificial Sequence: Synthetic oligonucleotide
augagaccauggcccaggu

SEQ ID NO: 507952 - RNA, 19 nt, Artificial Sequence
  Description of Artificial Sequence: Synthetic oligonucleotide
guugccaccacuguagguu

SEQ ID NO: 507953 - RNA, 19 nt, Artificial Sequence
  Description of Artificial Sequence: Synthetic oligonucleotide
ggcaguagccaagacucug

SEQ ID NO: 507954 - RNA, 19 nt, Artificial Sequence
  Description of Artificial Sequence: Synthetic oligonucleotide
gcaaaggcgauccaccgcu

SEQ ID NO: 507955 - RNA, 19 nt, Artificial Sequence
  Description of Artificial Sequence: Synthetic oligonucleotide
ccguguguacagcuguagg

SEQ ID NO: 507956 - RNA, 19 nt, Artificial Sequence
  Description of Artificial Sequence: Synthetic oligonucleotide
ggaguccaaguggggaugg

SEQ ID NO: 507957 - RNA, 19 nt, Artificial Sequence
  Description of Artificial Sequence: Synthetic oligonucleotide
uacggccaccgccuaacuu

SEQ ID NO: 507958 - RNA, 19 nt, Artificial Sequence
  Description of Artificial Sequence: Synthetic oligonucleotide
gguacuggucuuuccugca

SEQ ID NO: 507959 - RNA, 19 nt, Artificial Sequence
  Description of Artificial Sequence: Synthetic oligonucleotide
ggaggcucguaaagcaaag

SEQ ID NO: 507960 - RNA, 19 nt, Artificial Sequence
  Description of Artificial Sequence: Synthetic oligonucleotide
uuccugcaccauugacacc

SEQ ID NO: 507961 - RNA, 19 nt, Artificial Sequence
  Description of Artificial Sequence: Synthetic oligonucleotide
cccucaacugucauggcca

SEQ ID NO: 507962 - RNA, 19 nt, Artificial Sequence
  Description of Artificial Sequence: Synthetic oligonucleotide
ccgagacuuguauaccuug

SEQ ID NO: 507963 - RNA, 19 nt, Artificial Sequence
  Description of Artificial Sequence: Synthetic oligonucleotide
gcaguagccaagacucugc

SEQ ID NO: 507964 - RNA, 19 nt, Artificial Sequence
  Description of Artificial Sequence: Synthetic oligonucleotide
cucguaaagcaaaguaaau

SEQ ID NO: 507965 - RNA, 19 nt, Artificial Sequence
  Description of Artificial Sequence: Synthetic oligonucleotide
gauccaccgcuaggauacg

SEQ ID NO: 507966 - RNA, 19 nt, Artificial Sequence
  Description of Artificial Sequence: Synthetic oligonucleotide
gugaggguaugugcagccc

SEQ ID NO: 507967 - RNA, 19 nt, Artificial Sequence
  Description of Artificial Sequence: Synthetic oligonucleotide
gugugaugccguuccuuga

SEQ ID NO: 507968 - RNA, 19 nt, Artificial Sequence
  Description of Artificial Sequence: Synthetic oligonucleotide
cugacugaguaguccucga

SEQ ID NO: 507969 - RNA, 19 nt, Artificial Sequence
  Description of Artificial Sequence: Synthetic oligonucleotide
ccaccgcuaggauacggcc

SEQ ID NO: 507970 - RNA, 19 nt, Artificial Sequence
  Description of Artificial Sequence: Synthetic oligonucleotide
cgugugaugccguuccuug

SEQ ID NO: 507971 - RNA, 19 nt, Artificial Sequence
  Description of Artificial Sequence: Synthetic oligonucleotide
acugaucgucccgucuuga

SEQ ID NO: 507972 - RNA, 19 nt, Artificial Sequence
  Description of Artificial Sequence: Synthetic oligonucleotide
gcacacuguguccauugac

SEQ ID NO: 507973 - RNA, 19 nt, Artificial Sequence
  Description of Artificial Sequence: Synthetic oligonucleotide
ugguccuuacagugaucau

SEQ ID NO: 507974 - RNA, 19 nt, Artificial Sequence
  Description of Artificial Sequence: Synthetic oligonucleotide
ccaaaccuauucuugaggu

SEQ ID NO: 507975 - RNA, 19 nt, Artificial Sequence
  Description of Artificial Sequence: Synthetic oligonucleotide
caccgcuaggauacggcca

SEQ ID NO: 507976 - RNA, 19 nt, Artificial Sequence
  Description of Artificial Sequence: Synthetic oligonucleotide
ggcguuguggcugccgaag

SEQ ID NO: 507977 - RNA, 19 nt, Artificial Sequence
  Description of Artificial Sequence: Synthetic oligonucleotide
cucaacugucauggccacc

SEQ ID NO: 507978 - RNA, 19 nt, Artificial Sequence
  Description of Artificial Sequence: Synthetic oligonucleotide
gaaugagguuccacaggaa

SEQ ID NO: 507979 - RNA, 19 nt, Artificial Sequence
  Description of Artificial Sequence: Synthetic oligonucleotide
agguaacuguugacaaccu

SEQ ID NO: 507980 - RNA, 19 nt, Artificial Sequence
  Description of Artificial Sequence: Synthetic oligonucleotide
ccccaaaccuauucuugag

SEQ ID NO: 507981 - RNA, 19 nt, Artificial Sequence
  Description of Artificial Sequence: Synthetic oligonucleotide
cauccuccacuagguuucg

SEQ ID NO: 507982 - RNA, 19 nt, Artificial Sequence
  Description of Artificial Sequence: Synthetic oligonucleotide
augugugacuggggcuacg

SEQ ID NO: 507983 - RNA, 19 nt, Artificial Sequence
  Description of Artificial Sequence: Synthetic oligonucleotide
accuauucuugaggugcug

SEQ ID NO: 507984 - RNA, 19 nt, Artificial Sequence
  Description of Artificial Sequence: Synthetic oligonucleotide
gugugacaaugucccacuc

SEQ ID NO: 507985 - RNA, 19 nt, Artificial Sequence
  Description of Artificial Sequence: Synthetic oligonucleotide
cuaggauacggccaaucuu

SEQ ID NO: 507986 - RNA, 19 nt, Artificial Sequence
  Description of Artificial Sequence: Synthetic oligonucleotide
gaugccguuccuugagcau

SEQ ID NO: 507987 - RNA, 19 nt, Artificial Sequence
  Description of Artificial Sequence: Synthetic oligonucleotide
ugccacgcagccgugugua

SEQ ID NO: 507988 - RNA, 19 nt, Artificial Sequence
  Description of Artificial Sequence: Synthetic oligonucleotide
ugcgggcaguagccaagac

SEQ ID NO: 507989 - RNA, 19 nt, Artificial Sequence
  Description of Artificial Sequence: Synthetic oligonucleotide
augccacgcagccgugugu

SEQ ID NO: 507990 - RNA, 19 nt, Artificial Sequence
  Description of Artificial Sequence: Synthetic oligonucleotide
uggccaaucuuggcauagu

SEQ ID NO: 507991 - RNA, 19 nt, Artificial Sequence
  Description of Artificial Sequence: Synthetic oligonucleotide
ucgugugaugccguuccuu

SEQ ID NO: 507992 - RNA, 19 nt, Artificial Sequence
  Description of Artificial Sequence: Synthetic oligonucleotide
uccuuacagugaucaugua

SEQ ID NO: 507993 - RNA, 19 nt, Artificial Sequence
  Description of Artificial Sequence: Synthetic oligonucleotide
gcuaggauacggccaaucu

SEQ ID NO: 507994 - RNA, 19 nt, Artificial Sequence
  Description of Artificial Sequence: Synthetic oligonucleotide
ggggaugccacgcagccgu

SEQ ID NO: 507995 - RNA, 19 nt, Artificial Sequence
  Description of Artificial Sequence: Synthetic oligonucleotide
augucacccugggaaggug

SEQ ID NO: 507996 - RNA, 19 nt, Artificial Sequence
  Description of Artificial Sequence: Synthetic oligonucleotide
ggaaguuauauuggcacau

SEQ ID NO: 507997 - RNA, 19 nt, Artificial Sequence
  Description of Artificial Sequence: Synthetic oligonucleotide
gcccacuucaccaccuuug

SEQ ID NO: 507998 - RNA, 19 nt, Artificial Sequence
  Description of Artificial Sequence: Synthetic oligonucleotide
gcgcuauauacaagguccc

SEQ ID NO: 507999 - RNA, 19 nt, Artificial Sequence
  Description of Artificial Sequence: Synthetic oligonucleotide
auacguuguccaggguggu

SEQ ID NO: 508000 - RNA, 19 nt, Artificial Sequence
  Description of Artificial Sequence: Synthetic oligonucleotide
ucacgagcugugagcucau

SEQ ID NO: 508001 - RNA, 19 nt, Artificial Sequence
  Description of Artificial Sequence: Synthetic oligonucleotide
acgcagccguguguacagc

SEQ ID NO: 508002 - RNA, 19 nt, Artificial Sequence
  Description of Artificial Sequence: Synthetic oligonucleotide
cacgacugaucgucccguc

SEQ ID NO: 508003 - RNA, 19 nt, Artificial Sequence
  Description of Artificial Sequence: Synthetic oligonucleotide
caccggucaacaucuugaa

SEQ ID NO: 508004 - RNA, 19 nt, Artificial Sequence
  Description of Artificial Sequence: Synthetic oligonucleotide
agcccacuucaccaccuuu

SEQ ID NO: 508005 - RNA, 19 nt, Artificial Sequence
  Description of Artificial Sequence: Synthetic oligonucleotide
cccggcaugugugacuggg

SEQ ID NO: 508006 - RNA, 19 nt, Artificial Sequence
  Description of Artificial Sequence: Synthetic oligonucleotide
gcccagguuguaguugggg

SEQ ID NO: 508007 - RNA, 19 nt, Artificial Sequence
  Description of Artificial Sequence: Synthetic oligonucleotide
acagggcaucaaacugcgg

SEQ ID NO: 508008 - RNA, 19 nt, Artificial Sequence
  Description of Artificial Sequence: Synthetic oligonucleotide
gauacccaaugagugcaau

SEQ ID NO: 508009 - RNA, 19 nt, Artificial Sequence
  Description of Artificial Sequence: Synthetic oligonucleotide
caaacaucugugcgcuaua

SEQ ID NO: 508010 - RNA, 19 nt, Artificial Sequence
  Description of Artificial Sequence: Synthetic oligonucleotide
ccugucgugcucucaucac

SEQ ID NO: 508011 - RNA, 19 nt, Artificial Sequence
  Description of Artificial Sequence: Synthetic oligonucleotide
agggaggcucguaaagcaa

SEQ ID NO: 508012 - RNA, 19 nt, Artificial Sequence
  Description of Artificial Sequence: Synthetic oligonucleotide
aguccacgugugacaaugu

SEQ ID NO: 508013 - RNA, 19 nt, Artificial Sequence
  Description of Artificial Sequence: Synthetic oligonucleotide
ccucaccuggccagcaaac

SEQ ID NO: 508014 - RNA, 19 nt, Artificial Sequence
  Description of Artificial Sequence: Synthetic oligonucleotide
cggcaugugugacuggggc

SEQ ID NO: 508015 - RNA, 19 nt, Artificial Sequence
  Description of Artificial Sequence: Synthetic oligonucleotide
uggcaagguugaggguuca

SEQ ID NO: 508016 - RNA, 19 nt, Artificial Sequence
  Description of Artificial Sequence: Synthetic oligonucleotide
auacaaggucccgcuccca

SEQ ID NO: 508017 - RNA, 19 nt, Artificial Sequence
  Description of Artificial Sequence: Synthetic oligonucleotide
cugccuuuccagggcccgg

SEQ ID NO: 508018 - RNA, 19 nt, Artificial Sequence
  Description of Artificial Sequence: Synthetic oligonucleotide
gagcacucucugccucuca

SEQ ID NO: 508019 - RNA, 19 nt, Artificial Sequence
  Description of Artificial Sequence: Synthetic oligonucleotide
caucaaacugcgggcagua

SEQ ID NO: 508020 - RNA, 19 nt, Artificial Sequence
  Description of Artificial Sequence: Synthetic oligonucleotide
uugcaucccugacgugguu

SEQ ID NO: 508021 - RNA, 19 nt, Artificial Sequence
  Description of Artificial Sequence: Synthetic oligonucleotide
ggcccggcaugugugacug

SEQ ID NO: 508022 - RNA, 19 nt, Artificial Sequence
  Description of Artificial Sequence: Synthetic oligonucleotide
ggccaaucuuggcauagua

SEQ ID NO: 508023 - RNA, 19 nt, Artificial Sequence
  Description of Artificial Sequence: Synthetic oligonucleotide
gccguguguacagcuguag

SEQ ID NO: 508024 - RNA, 19 nt, Artificial Sequence
  Description of Artificial Sequence: Synthetic oligonucleotide
cacgugugacaauguccca

SEQ ID NO: 508025 - RNA, 19 nt, Artificial Sequence
  Description of Artificial Sequence: Synthetic oligonucleotide
cugccgaaggaaguuauau

SEQ ID NO: 508026 - RNA, 19 nt, Artificial Sequence
  Description of Artificial Sequence: Synthetic oligonucleotide
cgcuauauacaaggucccg

SEQ ID NO: 508027 - RNA, 19 nt, Artificial Sequence
  Description of Artificial Sequence: Synthetic oligonucleotide
caguugcaucccugacgug

SEQ ID NO: 508028 - RNA, 19 nt, Artificial Sequence
  Description of Artificial Sequence: Synthetic oligonucleotide
ccggcaugugugacugggg

SEQ ID NO: 508029 - RNA, 19 nt, Artificial Sequence
  Description of Artificial Sequence: Synthetic oligonucleotide
guagacacaggcaggcguu

SEQ ID NO: 508030 - RNA, 19 nt, Artificial Sequence
  Description of Artificial Sequence: Synthetic oligonucleotide
aggcguuguggcugccgaa

SEQ ID NO: 508031 - RNA, 19 nt, Artificial Sequence
  Description of Artificial Sequence: Synthetic oligonucleotide
gccgcgugcacagagccuc

SEQ ID NO: 508032 - RNA, 19 nt, Artificial Sequence
  Description of Artificial Sequence: Synthetic oligonucleotide
gggaggcucguaaagcaaa

SEQ ID NO: 508033 - RNA, 19 nt, Artificial Sequence
  Description of Artificial Sequence: Synthetic oligonucleotide
ggcaaccacuuccaugacu

SEQ ID NO: 508034 - RNA, 19 nt, Artificial Sequence
  Description of Artificial Sequence: Synthetic oligonucleotide
gcagccguguguacagcug

SEQ ID NO: 508035 - RNA, 19 nt, Artificial Sequence
  Description of Artificial Sequence: Synthetic oligonucleotide
ggucccgcucccagguggg

SEQ ID NO: 508036 - RNA, 19 nt, Artificial Sequence
  Description of Artificial Sequence: Synthetic oligonucleotide
cuauuccaccagggcugag

SEQ ID NO: 508037 - RNA, 19 nt, Artificial Sequence
  Description of Artificial Sequence: Synthetic oligonucleotide
caggcucaucagccaccag

SEQ ID NO: 508038 - RNA, 19 nt, Artificial Sequence
  Description of Artificial Sequence: Synthetic oligonucleotide
cgguugaagaaccgcacca

SEQ ID NO: 508039 - RNA, 19 nt, Artificial Sequence
  Description of Artificial Sequence: Synthetic oligonucleotide
gcgcagucguccauucacc

SEQ ID NO: 508040 - RNA, 19 nt, Artificial Sequence
  Description of Artificial Sequence: Synthetic oligonucleotide
gcgcacacccaggcaaagg

SEQ ID NO: 508041 - RNA, 19 nt, Artificial Sequence
  Description of Artificial Sequence: Synthetic oligonucleotide
gcaggcguuguggcugccg

SEQ ID NO: 508042 - RNA, 19 nt, Artificial Sequence
  Description of Artificial Sequence: Synthetic oligonucleotide
gcgggcaguagccaagacu

SEQ ID NO: 508043 - RNA, 19 nt, Artificial Sequence
  Description of Artificial Sequence: Synthetic oligonucleotide
auggugccggguaggguaa

SEQ ID NO: 508044 - RNA, 19 nt, Artificial Sequence
  Description of Artificial Sequence: Synthetic oligonucleotide
gcgauccaccgcuaggaua

SEQ ID NO: 508045 - RNA, 19 nt, Artificial Sequence
  Description of Artificial Sequence: Synthetic oligonucleotide
cccugucgugcucucauca

SEQ ID NO: 508046 - RNA, 19 nt, Artificial Sequence
  Description of Artificial Sequence: Synthetic oligonucleotide
gcaucccugacgugguucu

SEQ ID NO: 508047 - RNA, 19 nt, Artificial Sequence
  Description of Artificial Sequence: Synthetic oligonucleotide
caaaggcgauccaccgcua

SEQ ID NO: 508048 - RNA, 19 nt, Artificial Sequence
  Description of Artificial Sequence: Synthetic oligonucleotide
gcuauuccaccagggcuga

SEQ ID NO: 508049 - RNA, 19 nt, Artificial Sequence
  Description of Artificial Sequence: Synthetic oligonucleotide
gggcgggagcccuuugguc

SEQ ID NO: 508050 - RNA, 19 nt, Artificial Sequence
  Description of Artificial Sequence: Synthetic oligonucleotide
gacagcgcagucguccauu

SEQ ID NO: 508051 - RNA, 19 nt, Artificial Sequence
  Description of Artificial Sequence: Synthetic oligonucleotide
gcagagcggggccucaaua

SEQ ID NO: 508052 - RNA, 19 nt, Artificial Sequence
  Description of Artificial Sequence: Synthetic oligonucleotide
cugaucgucccgucuugau

SEQ ID NO: 508053 - RNA, 19 nt, Artificial Sequence
  Description of Artificial Sequence: Synthetic oligonucleotide
cuggggcuacggccaccgc

SEQ ID NO: 508054 - RNA, 19 nt, Artificial Sequence
  Description of Artificial Sequence: Synthetic oligonucleotide
cugcgggcaguagccaaga

SEQ ID NO: 508055 - RNA, 19 nt, Artificial Sequence
  Description of Artificial Sequence: Synthetic oligonucleotide
cagcgcagucguccauuca

SEQ ID NO: 508056 - RNA, 19 nt, Artificial Sequence
  Description of Artificial Sequence: Synthetic oligonucleotide
ccuucgugugaugccguuc

SEQ ID NO: 508057 - RNA, 19 nt, Artificial Sequence
  Description of Artificial Sequence: Synthetic oligonucleotide
ggucaacaucuugaaggua

SEQ ID NO: 508058 - RNA, 19 nt, Artificial Sequence
  Description of Artificial Sequence: Synthetic oligonucleotide
cacuuccaugacuucccau

SEQ ID NO: 508059 - RNA, 19 nt, Artificial Sequence
  Description of Artificial Sequence: Synthetic oligonucleotide
gcccuuugguccugaaccu

SEQ ID NO: 508060 - RNA, 19 nt, Artificial Sequence
  Description of Artificial Sequence: Synthetic oligonucleotide
gcgugcacagagccucaca

SEQ ID NO: 508061 - RNA, 19 nt, Artificial Sequence
  Description of Artificial Sequence: Synthetic oligonucleotide
cgcaccacauccuucacau

SEQ ID NO: 508062 - RNA, 19 nt, Artificial Sequence
  Description of Artificial Sequence: Synthetic oligonucleotide
agccguguguacagcugua

SEQ ID NO: 508063 - RNA, 19 nt, Artificial Sequence
  Description of Artificial Sequence: Synthetic oligonucleotide
uccugcagucagggauguc

SEQ ID NO: 508064 - RNA, 19 nt, Artificial Sequence
  Description of Artificial Sequence: Synthetic oligonucleotide
cacgagcugugagcucauc

SEQ ID NO: 508065 - RNA, 19 nt, Artificial Sequence
  Description of Artificial Sequence: Synthetic oligonucleotide
gugugacgucagcacgacu

SEQ ID NO: 508066 - RNA, 19 nt, Artificial Sequence
  Description of Artificial Sequence: Synthetic oligonucleotide
ggggcuacggccaccgccu

SEQ ID NO: 508067 - RNA, 19 nt, Artificial Sequence
  Description of Artificial Sequence: Synthetic oligonucleotide
guguacagcuguagguguu

SEQ ID NO: 508068 - RNA, 19 nt, Artificial Sequence
  Description of Artificial Sequence: Synthetic oligonucleotide
ggagggcgggagcccuuug

SEQ ID NO: 508069 - RNA, 19 nt, Artificial Sequence
  Description of Artificial Sequence: Synthetic oligonucleotide
caccuucgugugaugccgu

SEQ ID NO: 508070 - RNA, 19 nt, Artificial Sequence
  Description of Artificial Sequence: Synthetic oligonucleotide
gaccauggcccagguugua

SEQ ID NO: 508071 - RNA, 19 nt, Artificial Sequence
  Description of Artificial Sequence: Synthetic oligonucleotide
cgcagucguccauucacca

SEQ ID NO: 508072 - RNA, 19 nt, Artificial Sequence
  Description of Artificial Sequence: Synthetic oligonucleotide
ggauggcaagguugagggu

SEQ ID NO: 508073 - RNA, 19 nt, Artificial Sequence
  Description of Artificial Sequence: Synthetic oligonucleotide
cgucccgucuugaugaggu

SEQ ID NO: 508074 - RNA, 19 nt, Artificial Sequence
  Description of Artificial Sequence: Synthetic oligonucleotide
gcuaaacaccugagccaga

SEQ ID NO: 508075 - RNA, 19 nt, Artificial Sequence
  Description of Artificial Sequence: Synthetic oligonucleotide
gggccucaauaggcugagg

SEQ ID NO: 508076 - RNA, 19 nt, Artificial Sequence
  Description of Artificial Sequence: Synthetic oligonucleotide
cccgcucccagguggguga

SEQ ID NO: 508077 - RNA, 19 nt, Artificial Sequence
  Description of Artificial Sequence: Synthetic oligonucleotide
gggccaagacccaaggcuu

SEQ ID NO: 508078 - RNA, 19 nt, Artificial Sequence
  Description of Artificial Sequence: Synthetic oligonucleotide
ccggguaggguaaggggcu

SEQ ID NO: 508079 - RNA, 19 nt, Artificial Sequence
  Description of Artificial Sequence: Synthetic oligonucleotide
ccauggcccagguuguagu

SEQ ID NO: 508080 - RNA, 19 nt, Artificial Sequence
  Description of Artificial Sequence: Synthetic oligonucleotide
gcccggcaugugugacugg

SEQ ID NO: 508081 - RNA, 19 nt, Artificial Sequence
  Description of Artificial Sequence: Synthetic oligonucleotide
ccacuagguuucguagaca

SEQ ID NO: 508082 - RNA, 19 nt, Artificial Sequence
  Description of Artificial Sequence: Synthetic oligonucleotide
ggcuacggccaccgccuaa

SEQ ID NO: 508083 - RNA, 19 nt, Artificial Sequence
  Description of Artificial Sequence: Synthetic oligonucleotide
cuacggccaccgccuaacu

SEQ ID NO: 508084 - RNA, 19 nt, Artificial Sequence
  Description of Artificial Sequence: Synthetic oligonucleotide
ccccugucgugcucucauc

SEQ ID NO: 508085 - RNA, 19 nt, Artificial Sequence
  Description of Artificial Sequence: Synthetic oligonucleotide
gccaagacccaaggcuuua

SEQ ID NO: 508086 - RNA, 19 nt, Artificial Sequence
  Description of Artificial Sequence: Synthetic oligonucleotide
gcugccgaaggaaguuaua

SEQ ID NO: 508087 - RNA, 19 nt, Artificial Sequence
  Description of Artificial Sequence: Synthetic oligonucleotide
ggcgauccaccgcuaggau

SEQ ID NO: 508088 - RNA, 19 nt, Artificial Sequence
  Description of Artificial Sequence: Synthetic oligonucleotide
gggaugccacgcagccgug

SEQ ID NO: 508089 - RNA, 19 nt, Artificial Sequence
  Description of Artificial Sequence: Synthetic oligonucleotide
ggaggagggcgggagcccu

SEQ ID NO: 508090 - RNA, 19 nt, Artificial Sequence
  Description of Artificial Sequence: Synthetic oligonucleotide
gucguccauucaccaugau

SEQ ID NO: 508091 - RNA, 19 nt, Artificial Sequence
  Description of Artificial Sequence: Synthetic oligonucleotide
gggcccguucuuccucaaa

SEQ ID NO: 508092 - RNA, 19 nt, Artificial Sequence
  Description of Artificial Sequence: Synthetic oligonucleotide
cauugucacucugcuucuu

SEQ ID NO: 508093 - RNA, 19 nt, Artificial Sequence
  Description of Artificial Sequence: Synthetic oligonucleotide
ggaugccacgcagccgugu

SEQ ID NO: 508094 - RNA, 19 nt, Artificial Sequence
  Description of Artificial Sequence: Synthetic oligonucleotide
caucaccggucaacaucuu

SEQ ID NO: 508095 - RNA, 19 nt, Artificial Sequence
  Description of Artificial Sequence: Synthetic oligonucleotide
ggccaccgccuaacuucug

SEQ ID NO: 508096 - RNA, 19 nt, Artificial Sequence
  Description of Artificial Sequence: Synthetic oligonucleotide
cgacugaucgucccgucuu

SEQ ID NO: 508097 - RNA, 19 nt, Artificial Sequence
  Description of Artificial Sequence: Synthetic oligonucleotide
ccgcgugcacagagccuca

SEQ ID NO: 508098 - RNA, 19 nt, Artificial Sequence
  Description of Artificial Sequence: Synthetic oligonucleotide
gggcuacggccaccgccua

SEQ ID NO: 508099 - RNA, 19 nt, Artificial Sequence
  Description of Artificial Sequence: Synthetic oligonucleotide
cgcucccaggugggugacg

SEQ ID NO: 508100 - RNA, 19 nt, Artificial Sequence
  Description of Artificial Sequence: Synthetic oligonucleotide
caucccugacgugguucuu

SEQ ID NO: 508101 - RNA, 19 nt, Artificial Sequence
  Description of Artificial Sequence: Synthetic oligonucleotide
ccgcucccaggugggugac

SEQ ID NO: 508102 - RNA, 19 nt, Artificial Sequence
  Description of Artificial Sequence: Synthetic oligonucleotide
cggccaccgccuaacuucu

SEQ ID NO: 508103 - RNA, 19 nt, Artificial Sequence
  Description of Artificial Sequence: Synthetic oligonucleotide
cgucagcacgacugaucgu

SEQ ID NO: 508104 - RNA, 19 nt, Artificial Sequence
  Description of Artificial Sequence: Synthetic oligonucleotide
cccugacgugguucuugau

SEQ ID NO: 508105 - RNA, 19 nt, Artificial Sequence
  Description of Artificial Sequence: Synthetic oligonucleotide
ccgcuaggauacggccaau

SEQ ID NO: 508106 - RNA, 19 nt, Artificial Sequence
  Description of Artificial Sequence: Synthetic oligonucleotide
uuauuuaaugcuaagaaca

SEQ ID NO: 508107 - RNA, 19 nt, Artificial Sequence
  Description of Artificial Sequence: Synthetic oligonucleotide
aguauuuuaucucucaagc

SEQ ID NO: 508108 - RNA, 19 nt, Artificial Sequence
  Description of Artificial Sequence: Synthetic oligonucleotide
uguuuaaacgaacaggugg

SEQ ID NO: 508109 - RNA, 19 nt, Artificial Sequence
  Description of Artificial Sequence: Synthetic oligonucleotide
uuuaaugcuaagaacacag

SEQ ID NO: 508110 - RNA, 19 nt, Artificial Sequence
  Description of Artificial Sequence: Synthetic oligonucleotide
acuaagacaagacacacac

SEQ ID NO: 508111 - RNA, 19 nt, Artificial Sequence
  Description of Artificial Sequence: Synthetic oligonucleotide
aggaugaacuuucagaucc

SEQ ID NO: 508112 - RNA, 19 nt, Artificial Sequence
  Description of Artificial Sequence: Synthetic oligonucleotide
aaugccgucaaucagugug

SEQ ID NO: 508113 - RNA, 19 nt, Artificial Sequence
  Description of Artificial Sequence: Synthetic oligonucleotide
cuuuugguuagccagaugg

SEQ ID NO: 508114 - RNA, 19 nt, Artificial Sequence
  Description of Artificial Sequence: Synthetic oligonucleotide
gaugguagaagccucagag

SEQ ID NO: 508115 - RNA, 19 nt, Artificial Sequence
  Description of Artificial Sequence: Synthetic oligonucleotide
agacaagacacacacacac

SEQ ID NO: 508116 - RNA, 19 nt, Artificial Sequence
  Description of Artificial Sequence: Synthetic oligonucleotide
acaagacacacacacacac

SEQ ID NO: 508117 - RNA, 19 nt, Artificial Sequence
  Description of Artificial Sequence: Synthetic oligonucleotide
ucaaaggugacucaguguc

SEQ ID NO: 508118 - RNA, 19 nt, Artificial Sequence
  Description of Artificial Sequence: Synthetic oligonucleotide
aaacuugccacugaucugg

SEQ ID NO: 508119 - RNA, 19 nt, Artificial Sequence
  Description of Artificial Sequence: Synthetic oligonucleotide
aagaucucgacacugacau

SEQ ID NO: 508120 - RNA, 19 nt, Artificial Sequence
  Description of Artificial Sequence: Synthetic oligonucleotide
cagaucaaaauguucaacc

SEQ ID NO: 508121 - RNA, 19 nt, Artificial Sequence
  Description of Artificial Sequence: Synthetic oligonucleotide
aaaacguccauuaccacag

SEQ ID NO: 508122 - RNA, 19 nt, Artificial Sequence
  Description of Artificial Sequence: Synthetic oligonucleotide
ucuauacuuauuuaaugcu

SEQ ID NO: 508123 - RNA, 19 nt, Artificial Sequence
  Description of Artificial Sequence: Synthetic oligonucleotide
uauacuuauuuaaugcuaa

SEQ ID NO: 508124 - RNA, 19 nt, Artificial Sequence
  Description of Artificial Sequence: Synthetic oligonucleotide
auauucaagauaaagucag

SEQ ID NO: 508125 - RNA, 19 nt, Artificial Sequence
  Description of Artificial Sequence: Synthetic oligonucleotide
uguuguuuggaucccaaca

SEQ ID NO: 508126 - RNA, 19 nt, Artificial Sequence
  Description of Artificial Sequence: Synthetic oligonucleotide
gacacacacacacacauac

SEQ ID NO: 508127 - RNA, 19 nt, Artificial Sequence
  Description of Artificial Sequence: Synthetic oligonucleotide
aagacacacacacacacau

SEQ ID NO: 508128 - RNA, 19 nt, Artificial Sequence
  Description of Artificial Sequence: Synthetic oligonucleotide
uucauagaggcucuaguga

SEQ ID NO: 508129 - RNA, 19 nt, Artificial Sequence
  Description of Artificial Sequence: Synthetic oligonucleotide
cacacacacacauacacag

SEQ ID NO: 508130 - RNA, 19 nt, Artificial Sequence
  Description of Artificial Sequence: Synthetic oligonucleotide
agauacuugggguauccgg

SEQ ID NO: 508131 - RNA, 19 nt, Artificial Sequence
  Description of Artificial Sequence: Synthetic oligonucleotide
aucugguuaagccgggacc

SEQ ID NO: 508132 - RNA, 19 nt, Artificial Sequence
  Description of Artificial Sequence: Synthetic oligonucleotide
uguuagggaaacaugggaa

SEQ ID NO: 508133 - RNA, 19 nt, Artificial Sequence
  Description of Artificial Sequence: Synthetic oligonucleotide
uggaaaugcgccucgacgc

SEQ ID NO: 508134 - RNA, 19 nt, Artificial Sequence
  Description of Artificial Sequence: Synthetic oligonucleotide
gauagggaggauaaagugc

SEQ ID NO: 508135 - RNA, 19 nt, Artificial Sequence
  Description of Artificial Sequence: Synthetic oligonucleotide
acugguuuguguucccacc

SEQ ID NO: 508136 - RNA, 19 nt, Artificial Sequence
  Description of Artificial Sequence: Synthetic oligonucleotide
uguaggucucggaagaugu

SEQ ID NO: 508137 - RNA, 19 nt, Artificial Sequence
  Description of Artificial Sequence: Synthetic oligonucleotide
gaucccaacacaugccacg

SEQ ID NO: 508138 - RNA, 19 nt, Artificial Sequence
  Description of Artificial Sequence: Synthetic oligonucleotide
acuuuuauggugcauuuau

SEQ ID NO: 508139 - RNA, 19 nt, Artificial Sequence
  Description of Artificial Sequence: Synthetic oligonucleotide
ucagagaaaacguccauua

SEQ ID NO: 508140 - RNA, 19 nt, Artificial Sequence
  Description of Artificial Sequence: Synthetic oligonucleotide
ucagacuagaagaucucga

SEQ ID NO: 508141 - RNA, 19 nt, Artificial Sequence
  Description of Artificial Sequence: Synthetic oligonucleotide
gauguaagagggcggcugg

SEQ ID NO: 508142 - RNA, 19 nt, Artificial Sequence
  Description of Artificial Sequence: Synthetic oligonucleotide
ugaaugagucccuuaggca

SEQ ID NO: 508143 - RNA, 19 nt, Artificial Sequence
  Description of Artificial Sequence: Synthetic oligonucleotide
ucuagugaagcuuccggga

SEQ ID NO: 508144 - RNA, 19 nt, Artificial Sequence
  Description of Artificial Sequence: Synthetic oligonucleotide
acccauaguguuuaaacga

SEQ ID NO: 508145 - RNA, 19 nt, Artificial Sequence
  Description of Artificial Sequence: Synthetic oligonucleotide
ugcucgggaaaguaggugc

SEQ ID NO: 508146 - RNA, 19 nt, Artificial Sequence
  Description of Artificial Sequence: Synthetic oligonucleotide
uuacugcuauuuaauuugc

SEQ ID NO: 508147 - RNA, 19 nt, Artificial Sequence
  Description of Artificial Sequence: Synthetic oligonucleotide
uaagcgccccgguagaagg

SEQ ID NO: 508148 - RNA, 19 nt, Artificial Sequence
  Description of Artificial Sequence: Synthetic oligonucleotide
uguuccugaccuugcauag

SEQ ID NO: 508149 - RNA, 19 nt, Artificial Sequence
  Description of Artificial Sequence: Synthetic oligonucleotide
aaccgcgcgcaccucaucg

SEQ ID NO: 508150 - RNA, 19 nt, Artificial Sequence
  Description of Artificial Sequence: Synthetic oligonucleotide
cacacacacacacauacac

SEQ ID NO: 508151 - RNA, 19 nt, Artificial Sequence
  Description of Artificial Sequence: Synthetic oligonucleotide
cuggaaaugcgccucgacg

SEQ ID NO: 508152 - RNA, 19 nt, Artificial Sequence
  Description of Artificial Sequence: Synthetic oligonucleotide
ugcuauuuaauuugccauc

SEQ ID NO: 508153 - RNA, 19 nt, Artificial Sequence
  Description of Artificial Sequence: Synthetic oligonucleotide
uccuguaauaguccgcacu

SEQ ID NO: 508154 - RNA, 19 nt, Artificial Sequence
  Description of Artificial Sequence: Synthetic oligonucleotide
cuuaaaacaccuauguagu

SEQ ID NO: 508155 - RNA, 19 nt, Artificial Sequence
  Description of Artificial Sequence: Synthetic oligonucleotide
acgaacaggugguuucuac

SEQ ID NO: 508156 - RNA, 19 nt, Artificial Sequence
  Description of Artificial Sequence: Synthetic oligonucleotide
agcaaucaccucucgggcg

SEQ ID NO: 508157 - RNA, 19 nt, Artificial Sequence
  Description of Artificial Sequence: Synthetic oligonucleotide
gaugccagugaaguggacc

SEQ ID NO: 508158 - RNA, 19 nt, Artificial Sequence
  Description of Artificial Sequence: Synthetic oligonucleotide
aauaugauucugauccuaa

SEQ ID NO: 508159 - RNA, 19 nt, Artificial Sequence
  Description of Artificial Sequence: Synthetic oligonucleotide
ucgugagaggagccaaacg

SEQ ID NO: 508160 - RNA, 19 nt, Artificial Sequence
  Description of Artificial Sequence: Synthetic oligonucleotide
gacugcucgggaaaguagg

SEQ ID NO: 508161 - RNA, 19 nt, Artificial Sequence
  Description of Artificial Sequence: Synthetic oligonucleotide
cuauuuaauuugccauccg

SEQ ID NO: 508162 - RNA, 19 nt, Artificial Sequence
  Description of Artificial Sequence: Synthetic oligonucleotide
uuuaucucucaagccaacc

SEQ ID NO: 508163 - RNA, 19 nt, Artificial Sequence
  Description of Artificial Sequence: Synthetic oligonucleotide
uuuagacugggcacccuga

SEQ ID NO: 508164 - RNA, 19 nt, Artificial Sequence
  Description of Artificial Sequence: Synthetic oligonucleotide
ugucuagacucaaauucaa

SEQ ID NO: 508165 - RNA, 19 nt, Artificial Sequence
  Description of Artificial Sequence: Synthetic oligonucleotide
ugaccuugcauaguagaug

SEQ ID NO: 508166 - RNA, 19 nt, Artificial Sequence
  Description of Artificial Sequence: Synthetic oligonucleotide
guauccgggaguguggagg

SEQ ID NO: 508167 - RNA, 19 nt, Artificial Sequence
  Description of Artificial Sequence: Synthetic oligonucleotide
uaucucucaagccaaccuu

SEQ ID NO: 508168 - RNA, 19 nt, Artificial Sequence
  Description of Artificial Sequence: Synthetic oligonucleotide
uuggccagacagaauuacc

SEQ ID NO: 508169 - RNA, 19 nt, Artificial Sequence
  Description of Artificial Sequence: Synthetic oligonucleotide
aaaguacccauaguguuua

SEQ ID NO: 508170 - RNA, 19 nt, Artificial Sequence
  Description of Artificial Sequence: Synthetic oligonucleotide
agaagaguguucuccuuga

SEQ ID NO: 508171 - RNA, 19 nt, Artificial Sequence
  Description of Artificial Sequence: Synthetic oligonucleotide
caugggguugacuggacac

SEQ ID NO: 508172 - RNA, 19 nt, Artificial Sequence
  Description of Artificial Sequence: Synthetic oligonucleotide
gaauuaccaaguuacugcu

SEQ ID NO: 508173 - RNA, 19 nt, Artificial Sequence
  Description of Artificial Sequence: Synthetic oligonucleotide
ggugcccagacccagauac

SEQ ID NO: 508174 - RNA, 19 nt, Artificial Sequence
  Description of Artificial Sequence: Synthetic oligonucleotide
ucccaacaaccuuuguucc

SEQ ID NO: 508175 - RNA, 19 nt, Artificial Sequence
  Description of Artificial Sequence: Synthetic oligonucleotide
aaaaguacccauaguguuu

SEQ ID NO: 508176 - RNA, 19 nt, Artificial Sequence
  Description of Artificial Sequence: Synthetic oligonucleotide
aagugcugauugaaagcac

SEQ ID NO: 508177 - RNA, 19 nt, Artificial Sequence
  Description of Artificial Sequence: Synthetic oligonucleotide
auuuaaugcuaagaacaca

SEQ ID NO: 508178 - RNA, 19 nt, Artificial Sequence
  Description of Artificial Sequence: Synthetic oligonucleotide
ucaucggcguugaggaagc

SEQ ID NO: 508179 - RNA, 19 nt, Artificial Sequence
  Description of Artificial Sequence: Synthetic oligonucleotide
aucccaacacaugccacgc

SEQ ID NO: 508180 - RNA, 19 nt, Artificial Sequence
  Description of Artificial Sequence: Synthetic oligonucleotide
auaguccgcacugucauca

SEQ ID NO: 508181 - RNA, 19 nt, Artificial Sequence
  Description of Artificial Sequence: Synthetic oligonucleotide
gcuauuuaauuugccaucc

SEQ ID NO: 508182 - RNA, 19 nt, Artificial Sequence
  Description of Artificial Sequence: Synthetic oligonucleotide
gaccuugcauaguagaugu

SEQ ID NO: 508183 - RNA, 19 nt, Artificial Sequence
  Description of Artificial Sequence: Synthetic oligonucleotide
cagauccaugcacaugucc

SEQ ID NO: 508184 - RNA, 19 nt, Artificial Sequence
  Description of Artificial Sequence: Synthetic oligonucleotide
ucgggaaaguaggugcccg

SEQ ID NO: 508185 - RNA, 19 nt, Artificial Sequence
  Description of Artificial Sequence: Synthetic oligonucleotide
uccuuguggcuauuaaaau

SEQ ID NO: 508186 - RNA, 19 nt, Artificial Sequence
  Description of Artificial Sequence: Synthetic oligonucleotide
aacaccuauguagucuuaa

SEQ ID NO: 508187 - RNA, 19 nt, Artificial Sequence
  Description of Artificial Sequence: Synthetic oligonucleotide
guggcuauuaaaauagucu

SEQ ID NO: 508188 - RNA, 19 nt, Artificial Sequence
  Description of Artificial Sequence: Synthetic oligonucleotide
acacacacacauacacagc

SEQ ID NO: 508189 - RNA, 19 nt, Artificial Sequence
  Description of Artificial Sequence: Synthetic oligonucleotide
ugggguauccgggagugug

SEQ ID NO: 508190 - RNA, 19 nt, Artificial Sequence
  Description of Artificial Sequence: Synthetic oligonucleotide
ucuccuugacagcacgguc

SEQ ID NO: 508191 - RNA, 19 nt, Artificial Sequence
  Description of Artificial Sequence: Synthetic oligonucleotide
cuguuagggaaacauggga

SEQ ID NO: 508192 - RNA, 19 nt, Artificial Sequence
  Description of Artificial Sequence: Synthetic oligonucleotide
ugguuagccagauggucaa

SEQ ID NO: 508193 - RNA, 19 nt, Artificial Sequence
  Description of Artificial Sequence: Synthetic oligonucleotide
caugccacgcuggaacugg

SEQ ID NO: 508194 - RNA, 19 nt, Artificial Sequence
  Description of Artificial Sequence: Synthetic oligonucleotide
agauugcccaaugugggcu

SEQ ID NO: 508195 - RNA, 19 nt, Artificial Sequence
  Description of Artificial Sequence: Synthetic oligonucleotide
ggcuauuaaaauagucucc

SEQ ID NO: 508196 - RNA, 19 nt, Artificial Sequence
  Description of Artificial Sequence: Synthetic oligonucleotide
caugggaacugacagagcu

SEQ ID NO: 508197 - RNA, 19 nt, Artificial Sequence
  Description of Artificial Sequence: Synthetic oligonucleotide
ugggguugacuggacacag

SEQ ID NO: 508198 - RNA, 19 nt, Artificial Sequence
  Description of Artificial Sequence: Synthetic oligonucleotide
gacugcggcuuuugguuag

SEQ ID NO: 508199 - RNA, 19 nt, Artificial Sequence
  Description of Artificial Sequence: Synthetic oligonucleotide
guuuaaacgaacagguggu

SEQ ID NO: 508200 - RNA, 19 nt, Artificial Sequence
  Description of Artificial Sequence: Synthetic oligonucleotide
caccuauguagucuuaaga

SEQ ID NO: 508201 - RNA, 19 nt, Artificial Sequence
  Description of Artificial Sequence: Synthetic oligonucleotide
cuuggccagacagaauuac

SEQ ID NO: 508202 - RNA, 19 nt, Artificial Sequence
  Description of Artificial Sequence: Synthetic oligonucleotide
uccguccauguaaaacugu

SEQ ID NO: 508203 - RNA, 19 nt, Artificial Sequence
  Description of Artificial Sequence: Synthetic oligonucleotide
augucagagaaaacgucca

SEQ ID NO: 508204 - RNA, 19 nt, Artificial Sequence
  Description of Artificial Sequence: Synthetic oligonucleotide
gacucagugucagauguaa

SEQ ID NO: 508205 - RNA, 19 nt, Artificial Sequence
  Description of Artificial Sequence: Synthetic oligonucleotide
agccguacgggccgcccgc

SEQ ID NO: 508206 - RNA, 19 nt, Artificial Sequence
  Description of Artificial Sequence: Synthetic oligonucleotide
uggcaccgcgguaagcgcc

SEQ ID NO: 508207 - RNA, 19 nt, Artificial Sequence
  Description of Artificial Sequence: Synthetic oligonucleotide
guguuuaaacgaacaggug

SEQ ID NO: 508208 - RNA, 19 nt, Artificial Sequence
  Description of Artificial Sequence: Synthetic oligonucleotide
cuugggguauccgggagug

SEQ ID NO: 508209 - RNA, 19 nt, Artificial Sequence
  Description of Artificial Sequence: Synthetic oligonucleotide
ugcggcuuuugguuagcca

SEQ ID NO: 508210 - RNA, 19 nt, Artificial Sequence
  Description of Artificial Sequence: Synthetic oligonucleotide
agaucucgacacugacauc

SEQ ID NO: 508211 - RNA, 19 nt, Artificial Sequence
  Description of Artificial Sequence: Synthetic oligonucleotide
ugacaacuguuguuuggau

SEQ ID NO: 508212 - RNA, 19 nt, Artificial Sequence
  Description of Artificial Sequence: Synthetic oligonucleotide
cuugcugcccuugugacaa

SEQ ID NO: 508213 - RNA, 19 nt, Artificial Sequence
  Description of Artificial Sequence: Synthetic oligonucleotide
aucggcguugaggaagcgg

SEQ ID NO: 508214 - RNA, 19 nt, Artificial Sequence
  Description of Artificial Sequence: Synthetic oligonucleotide
gauugcccaaugugggcuc

SEQ ID NO: 508215 - RNA, 19 nt, Artificial Sequence
  Description of Artificial Sequence: Synthetic oligonucleotide
augggcuucgacugggcau

SEQ ID NO: 508216 - RNA, 19 nt, Artificial Sequence
  Description of Artificial Sequence: Synthetic oligonucleotide
caaacgaguccucggccac

SEQ ID NO: 508217 - RNA, 19 nt, Artificial Sequence
  Description of Artificial Sequence: Synthetic oligonucleotide
uuuaaacgaacaggugguu

SEQ ID NO: 508218 - RNA, 19 nt, Artificial Sequence
  Description of Artificial Sequence: Synthetic oligonucleotide
uccgggaguguggagguca

SEQ ID NO: 508219 - RNA, 19 nt, Artificial Sequence
  Description of Artificial Sequence: Synthetic oligonucleotide
gauccgacugcucgggaaa

SEQ ID NO: 508220 - RNA, 19 nt, Artificial Sequence
  Description of Artificial Sequence: Synthetic oligonucleotide
gaaaugcgccucgacgcgc

SEQ ID NO: 508221 - RNA, 19 nt, Artificial Sequence
  Description of Artificial Sequence: Synthetic oligonucleotide
gaugggcuucgacugggca

SEQ ID NO: 508222 - RNA, 19 nt, Artificial Sequence
  Description of Artificial Sequence: Synthetic oligonucleotide
guccuugcagccguacggg

SEQ ID NO: 508223 - RNA, 19 nt, Artificial Sequence
  Description of Artificial Sequence: Synthetic oligonucleotide
gacaagacacacacacaca

SEQ ID NO: 508224 - RNA, 19 nt, Artificial Sequence
  Description of Artificial Sequence: Synthetic oligonucleotide
caagacacacacacacaca

SEQ ID NO: 508225 - RNA, 19 nt, Artificial Sequence
  Description of Artificial Sequence: Synthetic oligonucleotide
gggaggauaaagugcuaug

SEQ ID NO: 508226 - RNA, 19 nt, Artificial Sequence
  Description of Artificial Sequence: Synthetic oligonucleotide
ugaugggcuucgacugggc

SEQ ID NO: 508227 - RNA, 19 nt, Artificial Sequence
  Description of Artificial Sequence: Synthetic oligonucleotide
cacuaagacaagacacaca

SEQ ID NO: 508228 - RNA, 19 nt, Artificial Sequence
  Description of Artificial Sequence: Synthetic oligonucleotide
cugcuauuuaauuugccau

SEQ ID NO: 508229 - RNA, 19 nt, Artificial Sequence
  Description of Artificial Sequence: Synthetic oligonucleotide
aauuaccaaguuacugcua

SEQ ID NO: 508230 - RNA, 19 nt, Artificial Sequence
  Description of Artificial Sequence: Synthetic oligonucleotide
uccuugcagccguacgggc

SEQ ID NO: 508231 - RNA, 19 nt, Artificial Sequence
  Description of Artificial Sequence: Synthetic oligonucleotide
acacacacacacauacaca

SEQ ID NO: 508232 - RNA, 19 nt, Artificial Sequence
  Description of Artificial Sequence: Synthetic oligonucleotide
aacacaugccacgcuggaa

SEQ ID NO: 508233 - RNA, 19 nt, Artificial Sequence
  Description of Artificial Sequence: Synthetic oligonucleotide
agcgcguccuugcagccgu

SEQ ID NO: 508234 - RNA, 19 nt, Artificial Sequence
  Description of Artificial Sequence: Synthetic oligonucleotide
uggaccugccgcucuuuac

SEQ ID NO: 508235 - RNA, 19 nt, Artificial Sequence
  Description of Artificial Sequence: Synthetic oligonucleotide
gcgguaagcgccccgguag

SEQ ID NO: 508236 - RNA, 19 nt, Artificial Sequence
  Description of Artificial Sequence: Synthetic oligonucleotide
auccguccauguaaaacug

SEQ ID NO: 508237 - RNA, 19 nt, Artificial Sequence
  Description of Artificial Sequence: Synthetic oligonucleotide
gguugggcggcccgcacgg

SEQ ID NO: 508238 - RNA, 19 nt, Artificial Sequence
  Description of Artificial Sequence: Synthetic oligonucleotide
aguugguccuuguggcuau

SEQ ID NO: 508239 - RNA, 19 nt, Artificial Sequence
  Description of Artificial Sequence: Synthetic oligonucleotide
guaagcgccccgguagaag

SEQ ID NO: 508240 - RNA, 19 nt, Artificial Sequence
  Description of Artificial Sequence: Synthetic oligonucleotide
accgcgcgcaccucaucgg

SEQ ID NO: 508241 - RNA, 19 nt, Artificial Sequence
  Description of Artificial Sequence: Synthetic oligonucleotide
aguacccauaguguuuaaa

SEQ ID NO: 508242 - RNA, 19 nt, Artificial Sequence
  Description of Artificial Sequence: Synthetic oligonucleotide
uuccuguaauaguccgcac

SEQ ID NO: 508243 - RNA, 19 nt, Artificial Sequence
  Description of Artificial Sequence: Synthetic oligonucleotide
ugggcuucgacugggcaua

SEQ ID NO: 508244 - RNA, 19 nt, Artificial Sequence
  Description of Artificial Sequence: Synthetic oligonucleotide
cacccgaaugccgucaauc

SEQ ID NO: 508245 - RNA, 19 nt, Artificial Sequence
  Description of Artificial Sequence: Synthetic oligonucleotide
cuguaagagccuguggcca

SEQ ID NO: 508246 - RNA, 19 nt, Artificial Sequence
  Description of Artificial Sequence: Synthetic oligonucleotide
guagcagauugcccaaugu

SEQ ID NO: 508247 - RNA, 19 nt, Artificial Sequence
  Description of Artificial Sequence: Synthetic oligonucleotide
ucccaacacaugccacgcu

SEQ ID NO: 508248 - RNA, 19 nt, Artificial Sequence
  Description of Artificial Sequence: Synthetic oligonucleotide
augagucccuuaggcacag

SEQ ID NO: 508249 - RNA, 19 nt, Artificial Sequence
  Description of Artificial Sequence: Synthetic oligonucleotide
guaggugcccgaagagcag

SEQ ID NO: 508250 - RNA, 19 nt, Artificial Sequence
  Description of Artificial Sequence: Synthetic oligonucleotide
guacgggccgcccgcgccg

SEQ ID NO: 508251 - RNA, 19 nt, Artificial Sequence
  Description of Artificial Sequence: Synthetic oligonucleotide
accgcgguaagcgccccgg

SEQ ID NO: 508252 - RNA, 19 nt, Artificial Sequence
  Description of Artificial Sequence: Synthetic oligonucleotide
ugcccagacccagauacuu

SEQ ID NO: 508253 - RNA, 19 nt, Artificial Sequence
  Description of Artificial Sequence: Synthetic oligonucleotide
agccaaccuuaaaacaccu

SEQ ID NO: 508254 - RNA, 19 nt, Artificial Sequence
  Description of Artificial Sequence: Synthetic oligonucleotide
gccaaacgaguccucggcc

SEQ ID NO: 508255 - RNA, 19 nt, Artificial Sequence
  Description of Artificial Sequence: Synthetic oligonucleotide
augccgucaaucaguguga

SEQ ID NO: 508256 - RNA, 19 nt, Artificial Sequence
  Description of Artificial Sequence: Synthetic oligonucleotide
acacacacacacacauaca

SEQ ID NO: 508257 - RNA, 19 nt, Artificial Sequence
  Description of Artificial Sequence: Synthetic oligonucleotide
guggcaccgcgguaagcgc

SEQ ID NO: 508258 - RNA, 19 nt, Artificial Sequence
  Description of Artificial Sequence: Synthetic oligonucleotide
uagggaggauaaagugcua

SEQ ID NO: 508259 - RNA, 19 nt, Artificial Sequence
  Description of Artificial Sequence: Synthetic oligonucleotide
ccauccguccauguaaaac

SEQ ID NO: 508260 - RNA, 19 nt, Artificial Sequence
  Description of Artificial Sequence: Synthetic oligonucleotide
cucgacgcgcguggcaccg

SEQ ID NO: 508261 - RNA, 19 nt, Artificial Sequence
  Description of Artificial Sequence: Synthetic oligonucleotide
aacgaacaggugguuucua

SEQ ID NO: 508262 - RNA, 19 nt, Artificial Sequence
  Description of Artificial Sequence: Synthetic oligonucleotide
cacagauauucaagauaaa

SEQ ID NO: 508263 - RNA, 19 nt, Artificial Sequence
  Description of Artificial Sequence: Synthetic oligonucleotide
cccauaguguuuaaacgaa

SEQ ID NO: 508264 - RNA, 19 nt, Artificial Sequence
  Description of Artificial Sequence: Synthetic oligonucleotide
cgaaugccgucaaucagug

SEQ ID NO: 508265 - RNA, 19 nt, Artificial Sequence
  Description of Artificial Sequence: Synthetic oligonucleotide
gcguccuugcagccguacg

SEQ ID NO: 508266 - RNA, 19 nt, Artificial Sequence
  Description of Artificial Sequence: Synthetic oligonucleotide
ggugcccgaagagcagucg

SEQ ID NO: 508267 - RNA, 19 nt, Artificial Sequence
  Description of Artificial Sequence: Synthetic oligonucleotide
uccgacugcucgggaaagu

SEQ ID NO: 508268 - RNA, 19 nt, Artificial Sequence
  Description of Artificial Sequence: Synthetic oligonucleotide
ccguuuccuacagaucucc

SEQ ID NO: 508269 - RNA, 19 nt, Artificial Sequence
  Description of Artificial Sequence: Synthetic oligonucleotide
ugccgucaaucagugugaa

SEQ ID NO: 508270 - RNA, 19 nt, Artificial Sequence
  Description of Artificial Sequence: Synthetic oligonucleotide
cuaguugguccuuguggcu

SEQ ID NO: 508271 - RNA, 19 nt, Artificial Sequence
  Description of Artificial Sequence: Synthetic oligonucleotide
acgcgcguggcaccgcggu

SEQ ID NO: 508272 - RNA, 19 nt, Artificial Sequence
  Description of Artificial Sequence: Synthetic oligonucleotide
cugguuaagccgggaccug

SEQ ID NO: 508273 - RNA, 19 nt, Artificial Sequence
  Description of Artificial Sequence: Synthetic oligonucleotide
ggaccugccgcucuuuacu

SEQ ID NO: 508274 - RNA, 19 nt, Artificial Sequence
  Description of Artificial Sequence: Synthetic oligonucleotide
ugccacgcuggaacugguu

SEQ ID NO: 508275 - RNA, 19 nt, Artificial Sequence
  Description of Artificial Sequence: Synthetic oligonucleotide
gugcugauugaaagcacua

SEQ ID NO: 508276 - RNA, 19 nt, Artificial Sequence
  Description of Artificial Sequence: Synthetic oligonucleotide
cucucgggcggagcgcagc

SEQ ID NO: 508277 - RNA, 19 nt, Artificial Sequence
  Description of Artificial Sequence: Synthetic oligonucleotide
agacacacacacacacaua

SEQ ID NO: 508278 - RNA, 19 nt, Artificial Sequence
  Description of Artificial Sequence: Synthetic oligonucleotide
cagagucauggcgccuggc

SEQ ID NO: 508279 - RNA, 19 nt, Artificial Sequence
  Description of Artificial Sequence: Synthetic oligonucleotide
gacgcgcguggcaccgcgg

SEQ ID NO: 508280 - RNA, 19 nt, Artificial Sequence
  Description of Artificial Sequence: Synthetic oligonucleotide
gaaccgcgcgcaccucauc

SEQ ID NO: 508281 - RNA, 19 nt, Artificial Sequence
  Description of Artificial Sequence: Synthetic oligonucleotide
agucgugagaggagccaaa

SEQ ID NO: 508282 - RNA, 19 nt, Artificial Sequence
  Description of Artificial Sequence: Synthetic oligonucleotide
gaaugccgucaaucagugu

SEQ ID NO: 508283 - RNA, 19 nt, Artificial Sequence
  Description of Artificial Sequence: Synthetic oligonucleotide
ccgaaugccgucaaucagu

SEQ ID NO: 508284 - RNA, 19 nt, Artificial Sequence
  Description of Artificial Sequence: Synthetic oligonucleotide
caucggcguugaggaagcg

SEQ ID NO: 508285 - RNA, 19 nt, Artificial Sequence
  Description of Artificial Sequence: Synthetic oligonucleotide
caccgcgguaagcgccccg

SEQ ID NO: 508286 - RNA, 19 nt, Artificial Sequence
  Description of Artificial Sequence: Synthetic oligonucleotide
ggcaccgcgguaagcgccc

SEQ ID NO: 508287 - RNA, 19 nt, Artificial Sequence
  Description of Artificial Sequence: Synthetic oligonucleotide
aucucgacacugacaucuu

SEQ ID NO: 508288 - RNA, 19 nt, Artificial Sequence
  Description of Artificial Sequence: Synthetic oligonucleotide
guccucgaccggccgcuca

SEQ ID NO: 508289 - RNA, 19 nt, Artificial Sequence
  Description of Artificial Sequence: Synthetic oligonucleotide
cagauccgacugcucggga

SEQ ID NO: 508290 - RNA, 19 nt, Artificial Sequence
  Description of Artificial Sequence: Synthetic oligonucleotide
ccgcacggcgacaggcagg

SEQ ID NO: 508291 - RNA, 19 nt, Artificial Sequence
  Description of Artificial Sequence: Synthetic oligonucleotide
cccgcacggcgacaggcag

SEQ ID NO: 508292 - RNA, 19 nt, Artificial Sequence
  Description of Artificial Sequence: Synthetic oligonucleotide
ccgggaguguggaggucag

SEQ ID NO: 508293 - RNA, 19 nt, Artificial Sequence
  Description of Artificial Sequence: Synthetic oligonucleotide
ucgacgcgcguggcaccgc

SEQ ID NO: 508294 - RNA, 19 nt, Artificial Sequence
  Description of Artificial Sequence: Synthetic oligonucleotide
augccacgcuggaacuggu

SEQ ID NO: 508295 - RNA, 19 nt, Artificial Sequence
  Description of Artificial Sequence: Synthetic oligonucleotide
ccgcgcgcaccucaucggc

SEQ ID NO: 508296 - RNA, 19 nt, Artificial Sequence
  Description of Artificial Sequence: Synthetic oligonucleotide
cucgggcggagcgcagcug

SEQ ID NO: 508297 - RNA, 19 nt, Artificial Sequence
  Description of Artificial Sequence: Synthetic oligonucleotide
ccgcggggcuggaaaugcg

SEQ ID NO: 508298 - RNA, 19 nt, Artificial Sequence
  Description of Artificial Sequence: Synthetic oligonucleotide
ccucgacgcgcguggcacc

SEQ ID NO: 508299 - RNA, 19 nt, Artificial Sequence
  Description of Artificial Sequence: Synthetic oligonucleotide
gguaagcgccccgguagaa

SEQ ID NO: 508300 - RNA, 19 nt, Artificial Sequence
  Description of Artificial Sequence: Synthetic oligonucleotide
ccgguagaaggcgggccag

SEQ ID NO: 508301 - RNA, 19 nt, Artificial Sequence
  Description of Artificial Sequence: Synthetic oligonucleotide
cggcuuuugguuagccaga

SEQ ID NO: 508302 - RNA, 19 nt, Artificial Sequence
  Description of Artificial Sequence: Synthetic oligonucleotide
gcaguggacuuagcccaca

SEQ ID NO: 508303 - RNA, 19 nt, Artificial Sequence
  Description of Artificial Sequence: Synthetic oligonucleotide
gccauccguccauguaaaa

SEQ ID NO: 508304 - RNA, 19 nt, Artificial Sequence
  Description of Artificial Sequence: Synthetic oligonucleotide
cgacgcgcguggcaccgcg

SEQ ID NO: 508305 - RNA, 19 nt, Artificial Sequence
  Description of Artificial Sequence: Synthetic oligonucleotide
gcgcguggcaccgcgguaa

SEQ ID NO: 508306 - RNA, 19 nt, Artificial Sequence
  Description of Artificial Sequence: Synthetic oligonucleotide
caggccgcgggaagcucgu

SEQ ID NO: 508307 - RNA, 19 nt, Artificial Sequence
  Description of Artificial Sequence: Synthetic oligonucleotide
ccgacugcucgggaaagua

SEQ ID NO: 508308 - RNA, 19 nt, Artificial Sequence
  Description of Artificial Sequence: Synthetic oligonucleotide
ccgggacuguagcugaggu

SEQ ID NO: 508309 - RNA, 19 nt, Artificial Sequence
  Description of Artificial Sequence: Synthetic oligonucleotide
cgccgcgccucgcugaaca

SEQ ID NO: 508310 - RNA, 19 nt, Artificial Sequence
  Description of Artificial Sequence: Synthetic oligonucleotide
ggcaggccgcgggaagcuc

SEQ ID NO: 508311 - RNA, 19 nt, Artificial Sequence
  Description of Artificial Sequence: Synthetic oligonucleotide
cgggacuguagcugaggua

SEQ ID NO: 508312 - RNA, 19 nt, Artificial Sequence
  Description of Artificial Sequence: Synthetic oligonucleotide
cgcgguaagcgccccggua

SEQ ID NO: 508313 - RNA, 19 nt, Artificial Sequence
  Description of Artificial Sequence: Synthetic oligonucleotide
cgcccagaaccgcgcgcac

SEQ ID NO: 508314 - RNA, 19 nt, Artificial Sequence
  Description of Artificial Sequence: Synthetic oligonucleotide
gcgccgcgccucgcugaac

SEQ ID NO: 508315 - RNA, 19 nt, Artificial Sequence
  Description of Artificial Sequence: Synthetic oligonucleotide
ccgcgguaagcgccccggu

SEQ ID NO: 508316 - RNA, 19 nt, Artificial Sequence
  Description of Artificial Sequence: Synthetic oligonucleotide
cgcgcguggcaccgcggua

SEQ ID NO: 508317 - RNA, 19 nt, Artificial Sequence
  Description of Artificial Sequence: Synthetic oligonucleotide
ugauuguucauacagcucg

SEQ ID NO: 508318 - RNA, 19 nt, Artificial Sequence
  Description of Artificial Sequence: Synthetic oligonucleotide
aauccgauacaugacaggc

SEQ ID NO: 508319 - RNA, 19 nt, Artificial Sequence
  Description of Artificial Sequence: Synthetic oligonucleotide
ucaucauauacuuugguug

SEQ ID NO: 508320 - RNA, 19 nt, Artificial Sequence
  Description of Artificial Sequence: Synthetic oligonucleotide
guauuuauugaucauccgg

SEQ ID NO: 508321 - RNA, 19 nt, Artificial Sequence
  Description of Artificial Sequence: Synthetic oligonucleotide
uuauugaucauccgggaca

SEQ ID NO: 508322 - RNA, 19 nt, Artificial Sequence
  Description of Artificial Sequence: Synthetic oligonucleotide
aaaguagacguggauauag

SEQ ID NO: 508323 - RNA, 19 nt, Artificial Sequence
  Description of Artificial Sequence: Synthetic oligonucleotide
uccacucauaccaaacucg

SEQ ID NO: 508324 - RNA, 19 nt, Artificial Sequence
  Description of Artificial Sequence: Synthetic oligonucleotide
ucaccuaagaaguuccagg

SEQ ID NO: 508325 - RNA, 19 nt, Artificial Sequence
  Description of Artificial Sequence: Synthetic oligonucleotide
acucauaccaaacucguug

SEQ ID NO: 508326 - RNA, 19 nt, Artificial Sequence
  Description of Artificial Sequence: Synthetic oligonucleotide
ucgauaaggaccccaauga

SEQ ID NO: 508327 - RNA, 19 nt, Artificial Sequence
  Description of Artificial Sequence: Synthetic oligonucleotide
uugagcuuauaguugauga

SEQ ID NO: 508328 - RNA, 19 nt, Artificial Sequence
  Description of Artificial Sequence: Synthetic oligonucleotide
uugguuuucugaaaucgcc

SEQ ID NO: 508329 - RNA, 19 nt, Artificial Sequence
  Description of Artificial Sequence: Synthetic oligonucleotide
aaccauccgaguucucucc

SEQ ID NO: 508330 - RNA, 19 nt, Artificial Sequence
  Description of Artificial Sequence: Synthetic oligonucleotide
uagacaagacgacugacga

SEQ ID NO: 508331 - RNA, 19 nt, Artificial Sequence
  Description of Artificial Sequence: Synthetic oligonucleotide
uucguagcaaccauccgag

SEQ ID NO: 508332 - RNA, 19 nt, Artificial Sequence
  Description of Artificial Sequence: Synthetic oligonucleotide
acugcgucaaacuuuacgu

SEQ ID NO: 508333 - RNA, 19 nt, Artificial Sequence
  Description of Artificial Sequence: Synthetic oligonucleotide
uaauagucgccacucacug

SEQ ID NO: 508334 - RNA, 19 nt, Artificial Sequence
  Description of Artificial Sequence: Synthetic oligonucleotide
uacguacugguccaguggg

SEQ ID NO: 508335 - RNA, 19 nt, Artificial Sequence
  Description of Artificial Sequence: Synthetic oligonucleotide
agggccguaguccucagcc

SEQ ID NO: 508336 - RNA, 19 nt, Artificial Sequence
  Description of Artificial Sequence: Synthetic oligonucleotide
uauuaaauccagacugugu

SEQ ID NO: 508337 - RNA, 19 nt, Artificial Sequence
  Description of Artificial Sequence: Synthetic oligonucleotide
auuagcgugucuuugggga

SEQ ID NO: 508338 - RNA, 19 nt, Artificial Sequence
  Description of Artificial Sequence: Synthetic oligonucleotide
uuacguacugguccagugg

SEQ ID NO: 508339 - RNA, 19 nt, Artificial Sequence
  Description of Artificial Sequence: Synthetic oligonucleotide
ucauuagcgugucuuuggg

SEQ ID NO: 508340 - RNA, 19 nt, Artificial Sequence
  Description of Artificial Sequence: Synthetic oligonucleotide
uuuucugaaaucgccuacg

SEQ ID NO: 508341 - RNA, 19 nt, Artificial Sequence
  Description of Artificial Sequence: Synthetic oligonucleotide
ugagauguacacgugcagg

SEQ ID NO: 508342 - RNA, 19 nt, Artificial Sequence
  Description of Artificial Sequence: Synthetic oligonucleotide
uuuauugaucauccgggac

SEQ ID NO: 508343 - RNA, 19 nt, Artificial Sequence
  Description of Artificial Sequence: Synthetic oligonucleotide
gauaaggaccccaaugaag

SEQ ID NO: 508344 - RNA, 19 nt, Artificial Sequence
  Description of Artificial Sequence: Synthetic oligonucleotide
gacaagacgacugacgaug

SEQ ID NO: 508345 - RNA, 19 nt, Artificial Sequence
  Description of Artificial Sequence: Synthetic oligonucleotide
ugccaaugcugaaacaucc

SEQ ID NO: 508346 - RNA, 19 nt, Artificial Sequence
  Description of Artificial Sequence: Synthetic oligonucleotide
acccauaugaauuuauuaa

SEQ ID NO: 508347 - RNA, 19 nt, Artificial Sequence
  Description of Artificial Sequence: Synthetic oligonucleotide
acgccauaucaucauauac

SEQ ID NO: 508348 - RNA, 19 nt, Artificial Sequence
  Description of Artificial Sequence: Synthetic oligonucleotide
aacuuuacguacuggucca

SEQ ID NO: 508349 - RNA, 19 nt, Artificial Sequence
  Description of Artificial Sequence: Synthetic oligonucleotide
caccuaagaaguuccaggg

SEQ ID NO: 508350 - RNA, 19 nt, Artificial Sequence
  Description of Artificial Sequence: Synthetic oligonucleotide
gagcuuaaguuaaacaccc

SEQ ID NO: 508351 - RNA, 19 nt, Artificial Sequence
  Description of Artificial Sequence: Synthetic oligonucleotide
augaauuuauuaaauccag

SEQ ID NO: 508352 - RNA, 19 nt, Artificial Sequence
  Description of Artificial Sequence: Synthetic oligonucleotide
aacgccaaagaagacggag

SEQ ID NO: 508353 - RNA, 19 nt, Artificial Sequence
  Description of Artificial Sequence: Synthetic oligonucleotide
uguaggugagcauucgcca

SEQ ID NO: 508354 - RNA, 19 nt, Artificial Sequence
  Description of Artificial Sequence: Synthetic oligonucleotide
uuuacguacugguccagug

SEQ ID NO: 508355 - RNA, 19 nt, Artificial Sequence
  Description of Artificial Sequence: Synthetic oligonucleotide
ugcgucaaacuuuacguac

SEQ ID NO: 508356 - RNA, 19 nt, Artificial Sequence
  Description of Artificial Sequence: Synthetic oligonucleotide
cagaggucgauaaggaccc

SEQ ID NO: 508357 - RNA, 19 nt, Artificial Sequence
  Description of Artificial Sequence: Synthetic oligonucleotide
ugguuugagcuuaaguuaa

SEQ ID NO: 508358 - RNA, 19 nt, Artificial Sequence
  Description of Artificial Sequence: Synthetic oligonucleotide
uuucugaaaucgccuacgc

SEQ ID NO: 508359 - RNA, 19 nt, Artificial Sequence
  Description of Artificial Sequence: Synthetic oligonucleotide
auagacaagacgacugacg

SEQ ID NO: 508360 - RNA, 19 nt, Artificial Sequence
  Description of Artificial Sequence: Synthetic oligonucleotide
gaugacgaaggcaaacaag

SEQ ID NO: 508361 - RNA, 19 nt, Artificial Sequence
  Description of Artificial Sequence: Synthetic oligonucleotide
ugggaugucaagcuccgca

SEQ ID NO: 508362 - RNA, 19 nt, Artificial Sequence
  Description of Artificial Sequence: Synthetic oligonucleotide
uguuaaagggugguggucu

SEQ ID NO: 508363 - RNA, 19 nt, Artificial Sequence
  Description of Artificial Sequence: Synthetic oligonucleotide
uacgcuuguauuuauugau

SEQ ID NO: 508364 - RNA, 19 nt, Artificial Sequence
  Description of Artificial Sequence: Synthetic oligonucleotide
cagacggauagacaagacg

SEQ ID NO: 508365 - RNA, 19 nt, Artificial Sequence
  Description of Artificial Sequence: Synthetic oligonucleotide
agacggauagacaagacga

SEQ ID NO: 508366 - RNA, 19 nt, Artificial Sequence
  Description of Artificial Sequence: Synthetic oligonucleotide
gucgauaaggaccccaaug

SEQ ID NO: 508367 - RNA, 19 nt, Artificial Sequence
  Description of Artificial Sequence: Synthetic oligonucleotide
acuugguacuuugugcagc

SEQ ID NO: 508368 - RNA, 19 nt, Artificial Sequence
  Description of Artificial Sequence: Synthetic oligonucleotide
uggaugccaaugcugaaac

SEQ ID NO: 508369 - RNA, 19 nt, Artificial Sequence
  Description of Artificial Sequence: Synthetic oligonucleotide
cuguguuaaaggguggugg

SEQ ID NO: 508370 - RNA, 19 nt, Artificial Sequence
  Description of Artificial Sequence: Synthetic oligonucleotide
uguguuaaagggugguggu

SEQ ID NO: 508371 - RNA, 19 nt, Artificial Sequence
  Description of Artificial Sequence: Synthetic oligonucleotide
ucauauacuuugguugaag

SEQ ID NO: 508372 - RNA, 19 nt, Artificial Sequence
  Description of Artificial Sequence: Synthetic oligonucleotide
augacgaaggcaaacaagu

SEQ ID NO: 508373 - RNA, 19 nt, Artificial Sequence
  Description of Artificial Sequence: Synthetic oligonucleotide
cacugcgucaaacuuuacg

SEQ ID NO: 508374 - RNA, 19 nt, Artificial Sequence
  Description of Artificial Sequence: Synthetic oligonucleotide
guagauccaccguugguag

SEQ ID NO: 508375 - RNA, 19 nt, Artificial Sequence
  Description of Artificial Sequence: Synthetic oligonucleotide
aaccguggcaagccggcgg

SEQ ID NO: 508376 - RNA, 19 nt, Artificial Sequence
  Description of Artificial Sequence: Synthetic oligonucleotide
caggcagccaauccgauac

SEQ ID NO: 508377 - RNA, 19 nt, Artificial Sequence
  Description of Artificial Sequence: Synthetic oligonucleotide
aaaggacuggaaaacgcca

SEQ ID NO: 508378 - RNA, 19 nt, Artificial Sequence
  Description of Artificial Sequence: Synthetic oligonucleotide
acagguugcggcuggcgac

SEQ ID NO: 508379 - RNA, 19 nt, Artificial Sequence
  Description of Artificial Sequence: Synthetic oligonucleotide
ugagcuuauaguugaugaa

SEQ ID NO: 508380 - RNA, 19 nt, Artificial Sequence
  Description of Artificial Sequence: Synthetic oligonucleotide
ugaugacgaaggcaaacaa

SEQ ID NO: 508381 - RNA, 19 nt, Artificial Sequence
  Description of Artificial Sequence: Synthetic oligonucleotide
cuucaccgaauccuguucc

SEQ ID NO: 508382 - RNA, 19 nt, Artificial Sequence
  Description of Artificial Sequence: Synthetic oligonucleotide
caauccgauacaugacagg

SEQ ID NO: 508383 - RNA, 19 nt, Artificial Sequence
  Description of Artificial Sequence: Synthetic oligonucleotide
guagcaaccauccgaguuc

SEQ ID NO: 508384 - RNA, 19 nt, Artificial Sequence
  Description of Artificial Sequence: Synthetic oligonucleotide
aguagacguggauauagau

SEQ ID NO: 508385 - RNA, 19 nt, Artificial Sequence
  Description of Artificial Sequence: Synthetic oligonucleotide
cauauacuuugguugaaga

SEQ ID NO: 508386 - RNA, 19 nt, Artificial Sequence
  Description of Artificial Sequence: Synthetic oligonucleotide
acgaguaccagcccuugug

SEQ ID NO: 508387 - RNA, 19 nt, Artificial Sequence
  Description of Artificial Sequence: Synthetic oligonucleotide
agcagcgggaagaggaucc

SEQ ID NO: 508388 - RNA, 19 nt, Artificial Sequence
  Description of Artificial Sequence: Synthetic oligonucleotide
aaaucgccuacgcuuguau

SEQ ID NO: 508389 - RNA, 19 nt, Artificial Sequence
  Description of Artificial Sequence: Synthetic oligonucleotide
uacagcucgucaccuaaga

SEQ ID NO: 508390 - RNA, 19 nt, Artificial Sequence
  Description of Artificial Sequence: Synthetic oligonucleotide
cauuagcgugucuuugggg

SEQ ID NO: 508391 - RNA, 19 nt, Artificial Sequence
  Description of Artificial Sequence: Synthetic oligonucleotide
ugauucccgauggugcugg

SEQ ID NO: 508392 - RNA, 19 nt, Artificial Sequence
  Description of Artificial Sequence: Synthetic oligonucleotide
agaguugccagcgccacag

SEQ ID NO: 508393 - RNA, 19 nt, Artificial Sequence
  Description of Artificial Sequence: Synthetic oligonucleotide
ucaccguacacaagguccu

SEQ ID NO: 508394 - RNA, 19 nt, Artificial Sequence
  Description of Artificial Sequence: Synthetic oligonucleotide
uucugaaaucgccuacgcu

SEQ ID NO: 508395 - RNA, 19 nt, Artificial Sequence
  Description of Artificial Sequence: Synthetic oligonucleotide
uucggugacagcugugcug

SEQ ID NO: 508396 - RNA, 19 nt, Artificial Sequence
  Description of Artificial Sequence: Synthetic oligonucleotide
gagcauucgccauggcagg

SEQ ID NO: 508397 - RNA, 19 nt, Artificial Sequence
  Description of Artificial Sequence: Synthetic oligonucleotide
uugaucaucuccgggucag

SEQ ID NO: 508398 - RNA, 19 nt, Artificial Sequence
  Description of Artificial Sequence: Synthetic oligonucleotide
guaaaguagacguggauau

SEQ ID NO: 508399 - RNA, 19 nt, Artificial Sequence
  Description of Artificial Sequence: Synthetic oligonucleotide
ugagcacccacgaguacca

SEQ ID NO: 508400 - RNA, 19 nt, Artificial Sequence
  Description of Artificial Sequence: Synthetic oligonucleotide
uggcguugaagucugugaa

SEQ ID NO: 508401 - RNA, 19 nt, Artificial Sequence
  Description of Artificial Sequence: Synthetic oligonucleotide
accguucugcugcacacuc

SEQ ID NO: 508402 - RNA, 19 nt, Artificial Sequence
  Description of Artificial Sequence: Synthetic oligonucleotide
gaagagggcgacagggagg

SEQ ID NO: 508403 - RNA, 19 nt, Artificial Sequence
  Description of Artificial Sequence: Synthetic oligonucleotide
agacggagcgcacggacag

SEQ ID NO: 508404 - RNA, 19 nt, Artificial Sequence
  Description of Artificial Sequence: Synthetic oligonucleotide
cucgucugauuguucauac

SEQ ID NO: 508405 - RNA, 19 nt, Artificial Sequence
  Description of Artificial Sequence: Synthetic oligonucleotide
acgccaaagaagacggagc

SEQ ID NO: 508406 - RNA, 19 nt, Artificial Sequence
  Description of Artificial Sequence: Synthetic oligonucleotide
caucucacacacugggccc

SEQ ID NO: 508407 - RNA, 19 nt, Artificial Sequence
  Description of Artificial Sequence: Synthetic oligonucleotide
acguggauauagauggaac

SEQ ID NO: 508408 - RNA, 19 nt, Artificial Sequence
  Description of Artificial Sequence: Synthetic oligonucleotide
gaagacggagcgcacggac

SEQ ID NO: 508409 - RNA, 19 nt, Artificial Sequence
  Description of Artificial Sequence: Synthetic oligonucleotide
aacgccauaucaucauaua

SEQ ID NO: 508410 - RNA, 19 nt, Artificial Sequence
  Description of Artificial Sequence: Synthetic oligonucleotide
gguugaagacucaauguag

SEQ ID NO: 508411 - RNA, 19 nt, Artificial Sequence
  Description of Artificial Sequence: Synthetic oligonucleotide
gacuugguacuuugugcag

SEQ ID NO: 508412 - RNA, 19 nt, Artificial Sequence
  Description of Artificial Sequence: Synthetic oligonucleotide
ggauccaagacagguaccg

SEQ ID NO: 508413 - RNA, 19 nt, Artificial Sequence
  Description of Artificial Sequence: Synthetic oligonucleotide
ccuaagaaguuccagggug

SEQ ID NO: 508414 - RNA, 19 nt, Artificial Sequence
  Description of Artificial Sequence: Synthetic oligonucleotide
gaucauccgggacauguga

SEQ ID NO: 508415 - RNA, 19 nt, Artificial Sequence
  Description of Artificial Sequence: Synthetic oligonucleotide
cacaucgucccgcaggcag

SEQ ID NO: 508416 - RNA, 19 nt, Artificial Sequence
  Description of Artificial Sequence: Synthetic oligonucleotide
ucauaccaaacucguugac

SEQ ID NO: 508417 - RNA, 19 nt, Artificial Sequence
  Description of Artificial Sequence: Synthetic oligonucleotide
cuugaugacgaaggcaaac

SEQ ID NO: 508418 - RNA, 19 nt, Artificial Sequence
  Description of Artificial Sequence: Synthetic oligonucleotide
ugguacuuugugcagcaua

SEQ ID NO: 508419 - RNA, 19 nt, Artificial Sequence
  Description of Artificial Sequence: Synthetic oligonucleotide
gauguagaggagaaccaca

SEQ ID NO: 508420 - RNA, 19 nt, Artificial Sequence
  Description of Artificial Sequence: Synthetic oligonucleotide
acacgugcagguucauuag

SEQ ID NO: 508421 - RNA, 19 nt, Artificial Sequence
  Description of Artificial Sequence: Synthetic oligonucleotide
gaaccguucugcugcacac

SEQ ID NO: 508422 - RNA, 19 nt, Artificial Sequence
  Description of Artificial Sequence: Synthetic oligonucleotide
acaagacgacugacgaugc

SEQ ID NO: 508423 - RNA, 19 nt, Artificial Sequence
  Description of Artificial Sequence: Synthetic oligonucleotide
ggugacuugguacuuugug

SEQ ID NO: 508424 - RNA, 19 nt, Artificial Sequence
  Description of Artificial Sequence: Synthetic oligonucleotide
ugacgaaggcaaacaaguc

SEQ ID NO: 508425 - RNA, 19 nt, Artificial Sequence
  Description of Artificial Sequence: Synthetic oligonucleotide
cuccgcaaaguguucguag

SEQ ID NO: 508426 - RNA, 19 nt, Artificial Sequence
  Description of Artificial Sequence: Synthetic oligonucleotide
cuaagaaguuccaggguga

SEQ ID NO: 508427 - RNA, 19 nt, Artificial Sequence
  Description of Artificial Sequence: Synthetic oligonucleotide
agcucgucaccuaagaagu

SEQ ID NO: 508428 - RNA, 19 nt, Artificial Sequence
  Description of Artificial Sequence: Synthetic oligonucleotide
acgugcagguucauuagcg

SEQ ID NO: 508429 - RNA, 19 nt, Artificial Sequence
  Description of Artificial Sequence: Synthetic oligonucleotide
cuggacgcaggugugagag

SEQ ID NO: 508430 - RNA, 19 nt, Artificial Sequence
  Description of Artificial Sequence: Synthetic oligonucleotide
guguucguagcaaccaucc

SEQ ID NO: 508431 - RNA, 19 nt, Artificial Sequence
  Description of Artificial Sequence: Synthetic oligonucleotide
aguguucguagcaaccauc

SEQ ID NO: 508432 - RNA, 19 nt, Artificial Sequence
  Description of Artificial Sequence: Synthetic oligonucleotide
cccguuaguagauucuugg

SEQ ID NO: 508433 - RNA, 19 nt, Artificial Sequence
  Description of Artificial Sequence: Synthetic oligonucleotide
gguaauagucgccacucac

SEQ ID NO: 508434 - RNA, 19 nt, Artificial Sequence
  Description of Artificial Sequence: Synthetic oligonucleotide
gggucgacgcgguagaucc

SEQ ID NO: 508435 - RNA, 19 nt, Artificial Sequence
  Description of Artificial Sequence: Synthetic oligonucleotide
uauugaucauccgggacau

SEQ ID NO: 508436 - RNA, 19 nt, Artificial Sequence
  Description of Artificial Sequence: Synthetic oligonucleotide
ucauccgggacaugugaac

SEQ ID NO: 508437 - RNA, 19 nt, Artificial Sequence
  Description of Artificial Sequence: Synthetic oligonucleotide
guacagggccuucugccgg

SEQ ID NO: 508438 - RNA, 19 nt, Artificial Sequence
  Description of Artificial Sequence: Synthetic oligonucleotide
uccacagggccguaguccu

SEQ ID NO: 508439 - RNA, 19 nt, Artificial Sequence
  Description of Artificial Sequence: Synthetic oligonucleotide
ugcggcuggcgacucgugg

SEQ ID NO: 508440 - RNA, 19 nt, Artificial Sequence
  Description of Artificial Sequence: Synthetic oligonucleotide
cucggguccugacuggucc

SEQ ID NO: 508441 - RNA, 19 nt, Artificial Sequence
  Description of Artificial Sequence: Synthetic oligonucleotide
gucaaacuuuacguacugg

SEQ ID NO: 508442 - RNA, 19 nt, Artificial Sequence
  Description of Artificial Sequence: Synthetic oligonucleotide
ucgugcucugagauguaca

SEQ ID NO: 508443 - RNA, 19 nt, Artificial Sequence
  Description of Artificial Sequence: Synthetic oligonucleotide
uuagcgugucuuuggggac

SEQ ID NO: 508444 - RNA, 19 nt, Artificial Sequence
  Description of Artificial Sequence: Synthetic oligonucleotide
gacaugugaaccguggcaa

SEQ ID NO: 508445 - RNA, 19 nt, Artificial Sequence
  Description of Artificial Sequence: Synthetic oligonucleotide
guaccggaacgccauauca

SEQ ID NO: 508446 - RNA, 19 nt, Artificial Sequence
  Description of Artificial Sequence: Synthetic oligonucleotide
gacagacggauagacaaga

SEQ ID NO: 508447 - RNA, 19 nt, Artificial Sequence
  Description of Artificial Sequence: Synthetic oligonucleotide
gguacagggccuucugccg

SEQ ID NO: 508448 - RNA, 19 nt, Artificial Sequence
  Description of Artificial Sequence: Synthetic oligonucleotide
accguacacaagguccugc

SEQ ID NO: 508449 - RNA, 19 nt, Artificial Sequence
  Description of Artificial Sequence: Synthetic oligonucleotide
cuacgcuuguauuuauuga

SEQ ID NO: 508450 - RNA, 19 nt, Artificial Sequence
  Description of Artificial Sequence: Synthetic oligonucleotide
caugugaaccguggcaagc

SEQ ID NO: 508451 - RNA, 19 nt, Artificial Sequence
  Description of Artificial Sequence: Synthetic oligonucleotide
acgggguguggucauccac

SEQ ID NO: 508452 - RNA, 19 nt, Artificial Sequence
  Description of Artificial Sequence: Synthetic oligonucleotide
aaucgccuacgcuuguauu

SEQ ID NO: 508453 - RNA, 19 nt, Artificial Sequence
  Description of Artificial Sequence: Synthetic oligonucleotide
gucaccuaagaaguuccag

SEQ ID NO: 508454 - RNA, 19 nt, Artificial Sequence
  Description of Artificial Sequence: Synthetic oligonucleotide
ccuacgcuuguauuuauug

SEQ ID NO: 508455 - RNA, 19 nt, Artificial Sequence
  Description of Artificial Sequence: Synthetic oligonucleotide
uggaagccgcucuugguaa

SEQ ID NO: 508456 - RNA, 19 nt, Artificial Sequence
  Description of Artificial Sequence: Synthetic oligonucleotide
guagagcaugcugagcacc

SEQ ID NO: 508457 - RNA, 19 nt, Artificial Sequence
  Description of Artificial Sequence: Synthetic oligonucleotide
cgucugauuguucauacag

SEQ ID NO: 508458 - RNA, 19 nt, Artificial Sequence
  Description of Artificial Sequence: Synthetic oligonucleotide
gguacaggaggcuguagac

SEQ ID NO: 508459 - RNA, 19 nt, Artificial Sequence
  Description of Artificial Sequence: Synthetic oligonucleotide
gaugggguaguaguccuuc

SEQ ID NO: 508460 - RNA, 19 nt, Artificial Sequence
  Description of Artificial Sequence: Synthetic oligonucleotide
gggguaguaguccuucugc

SEQ ID NO: 508461 - RNA, 19 nt, Artificial Sequence
  Description of Artificial Sequence: Synthetic oligonucleotide
aaguagacguggauauaga

SEQ ID NO: 508462 - RNA, 19 nt, Artificial Sequence
  Description of Artificial Sequence: Synthetic oligonucleotide
agacgacugacgaugccuc

SEQ ID NO: 508463 - RNA, 19 nt, Artificial Sequence
  Description of Artificial Sequence: Synthetic oligonucleotide
gauacgggcuggucuccag

SEQ ID NO: 508464 - RNA, 19 nt, Artificial Sequence
  Description of Artificial Sequence: Synthetic oligonucleotide
acuguggacgauggagacg

SEQ ID NO: 508465 - RNA, 19 nt, Artificial Sequence
  Description of Artificial Sequence: Synthetic oligonucleotide
auccgaguucucuccacug

SEQ ID NO: 508466 - RNA, 19 nt, Artificial Sequence
  Description of Artificial Sequence: Synthetic oligonucleotide
caaccauccgaguucucuc

SEQ ID NO: 508467 - RNA, 19 nt, Artificial Sequence
  Description of Artificial Sequence: Synthetic oligonucleotide
agggcgagaugucugcaca

SEQ ID NO: 508468 - RNA, 19 nt, Artificial Sequence
  Description of Artificial Sequence: Synthetic oligonucleotide
ugaaaucgccuacgcuugu

SEQ ID NO: 508469 - RNA, 19 nt, Artificial Sequence
  Description of Artificial Sequence: Synthetic oligonucleotide
acggauagacaagacgacu

SEQ ID NO: 508470 - RNA, 19 nt, Artificial Sequence
  Description of Artificial Sequence: Synthetic oligonucleotide
agccaauccgauacaugac

SEQ ID NO: 508471 - RNA, 19 nt, Artificial Sequence
  Description of Artificial Sequence: Synthetic oligonucleotide
acagacggauagacaagac

SEQ ID NO: 508472 - RNA, 19 nt, Artificial Sequence
  Description of Artificial Sequence: Synthetic oligonucleotide
gacggauagacaagacgac

SEQ ID NO: 508473 - RNA, 19 nt, Artificial Sequence
  Description of Artificial Sequence: Synthetic oligonucleotide
aggauccaagacagguacc

SEQ ID NO: 508474 - RNA, 19 nt, Artificial Sequence
  Description of Artificial Sequence: Synthetic oligonucleotide
aaggacuggaaaacgccaa

SEQ ID NO: 508475 - RNA, 19 nt, Artificial Sequence
  Description of Artificial Sequence: Synthetic oligonucleotide
ucgucugauuguucauaca

SEQ ID NO: 508476 - RNA, 19 nt, Artificial Sequence
  Description of Artificial Sequence: Synthetic oligonucleotide
gaccccaaugaagacgcug

SEQ ID NO: 508477 - RNA, 19 nt, Artificial Sequence
  Description of Artificial Sequence: Synthetic oligonucleotide
cacgugcagguucauuagc

SEQ ID NO: 508478 - RNA, 19 nt, Artificial Sequence
  Description of Artificial Sequence: Synthetic oligonucleotide
guggcguugaagucuguga

SEQ ID NO: 508479 - RNA, 19 nt, Artificial Sequence
  Description of Artificial Sequence: Synthetic oligonucleotide
caagccggcgguacagggc

SEQ ID NO: 508480 - RNA, 19 nt, Artificial Sequence
  Description of Artificial Sequence: Synthetic oligonucleotide
gacgacugacgaugccucc

SEQ ID NO: 508481 - RNA, 19 nt, Artificial Sequence
  Description of Artificial Sequence: Synthetic oligonucleotide
cucguugacacgggugggg

SEQ ID NO: 508482 - RNA, 19 nt, Artificial Sequence
  Description of Artificial Sequence: Synthetic oligonucleotide
cucacugcgucaaacuuua

SEQ ID NO: 508483 - RNA, 19 nt, Artificial Sequence
  Description of Artificial Sequence: Synthetic oligonucleotide
agguucauuagcgugucuu

SEQ ID NO: 508484 - RNA, 19 nt, Artificial Sequence
  Description of Artificial Sequence: Synthetic oligonucleotide
gagcaugcugagcacccac

SEQ ID NO: 508485 - RNA, 19 nt, Artificial Sequence
  Description of Artificial Sequence: Synthetic oligonucleotide
gugaaccguggcaagccgg

SEQ ID NO: 508486 - RNA, 19 nt, Artificial Sequence
  Description of Artificial Sequence: Synthetic oligonucleotide
agacaagacgacugacgau

SEQ ID NO: 508487 - RNA, 19 nt, Artificial Sequence
  Description of Artificial Sequence: Synthetic oligonucleotide
uguuccucgucugauuguu

SEQ ID NO: 508488 - RNA, 19 nt, Artificial Sequence
  Description of Artificial Sequence: Synthetic oligonucleotide
agcgggaagaggauccaag

SEQ ID NO: 508489 - RNA, 19 nt, Artificial Sequence
  Description of Artificial Sequence: Synthetic oligonucleotide
caagacgacugacgaugcc

SEQ ID NO: 508490 - RNA, 19 nt, Artificial Sequence
  Description of Artificial Sequence: Synthetic oligonucleotide
uggccgccaucucacacac

SEQ ID NO: 508491 - RNA, 19 nt, Artificial Sequence
  Description of Artificial Sequence: Synthetic oligonucleotide
gacguggauauagauggaa

SEQ ID NO: 508492 - RNA, 19 nt, Artificial Sequence
  Description of Artificial Sequence: Synthetic oligonucleotide
ggcguugaagucugugaag

SEQ ID NO: 508493 - RNA, 19 nt, Artificial Sequence
  Description of Artificial Sequence: Synthetic oligonucleotide
accgaauccuguuccucgu

SEQ ID NO: 508494 - RNA, 19 nt, Artificial Sequence
  Description of Artificial Sequence: Synthetic oligonucleotide
ggauagacaagacgacuga

SEQ ID NO: 508495 - RNA, 19 nt, Artificial Sequence
  Description of Artificial Sequence: Synthetic oligonucleotide
ggacccgcguggcuaaucg

SEQ ID NO: 508496 - RNA, 19 nt, Artificial Sequence
  Description of Artificial Sequence: Synthetic oligonucleotide
accccaaugaagacgcuga

SEQ ID NO: 508497 - RNA, 19 nt, Artificial Sequence
  Description of Artificial Sequence: Synthetic oligonucleotide
gacucaauguagguggacu

SEQ ID NO: 508498 - RNA, 19 nt, Artificial Sequence
  Description of Artificial Sequence: Synthetic oligonucleotide
ggacgcaggugugagagcc

SEQ ID NO: 508499 - RNA, 19 nt, Artificial Sequence
  Description of Artificial Sequence: Synthetic oligonucleotide
uaaaguagacguggauaua

SEQ ID NO: 508500 - RNA, 19 nt, Artificial Sequence
  Description of Artificial Sequence: Synthetic oligonucleotide
gugcucugagauguacacg

SEQ ID NO: 508501 - RNA, 19 nt, Artificial Sequence
  Description of Artificial Sequence: Synthetic oligonucleotide
gauccaccguugguagagg

SEQ ID NO: 508502 - RNA, 19 nt, Artificial Sequence
  Description of Artificial Sequence: Synthetic oligonucleotide
guugagggccuuguaggug

SEQ ID NO: 508503 - RNA, 19 nt, Artificial Sequence
  Description of Artificial Sequence: Synthetic oligonucleotide
uagaguugccagcgccaca

SEQ ID NO: 508504 - RNA, 19 nt, Artificial Sequence
  Description of Artificial Sequence: Synthetic oligonucleotide
gacgcgcaggggcaggcug

SEQ ID NO: 508505 - RNA, 19 nt, Artificial Sequence
  Description of Artificial Sequence: Synthetic oligonucleotide
auccaccguugguagaggu

SEQ ID NO: 508506 - RNA, 19 nt, Artificial Sequence
  Description of Artificial Sequence: Synthetic oligonucleotide
cccauaugaauuuauuaaa

SEQ ID NO: 508507 - RNA, 19 nt, Artificial Sequence
  Description of Artificial Sequence: Synthetic oligonucleotide
ggacuggaaaacgccaaag

SEQ ID NO: 508508 - RNA, 19 nt, Artificial Sequence
  Description of Artificial Sequence: Synthetic oligonucleotide
guaauagucgccacucacu

SEQ ID NO: 508509 - RNA, 19 nt, Artificial Sequence
  Description of Artificial Sequence: Synthetic oligonucleotide
acucguugacacggguggg

SEQ ID NO: 508510 - RNA, 19 nt, Artificial Sequence
  Description of Artificial Sequence: Synthetic oligonucleotide
gauucccgauggugcuggg

SEQ ID NO: 508511 - RNA, 19 nt, Artificial Sequence
  Description of Artificial Sequence: Synthetic oligonucleotide
uggcaagccggcgguacag

SEQ ID NO: 508512 - RNA, 19 nt, Artificial Sequence
  Description of Artificial Sequence: Synthetic oligonucleotide
uagcgugucuuuggggaca

SEQ ID NO: 508513 - RNA, 19 nt, Artificial Sequence
  Description of Artificial Sequence: Synthetic oligonucleotide
ccuguuccucgucugauug

SEQ ID NO: 508514 - RNA, 19 nt, Artificial Sequence
  Description of Artificial Sequence: Synthetic oligonucleotide
acugccggcugcuccagaa

SEQ ID NO: 508515 - RNA, 19 nt, Artificial Sequence
  Description of Artificial Sequence: Synthetic oligonucleotide
gcccgaucuguccaggaag

SEQ ID NO: 508516 - RNA, 19 nt, Artificial Sequence
  Description of Artificial Sequence: Synthetic oligonucleotide
auguacacgugcagguuca

SEQ ID NO: 508517 - RNA, 19 nt, Artificial Sequence
  Description of Artificial Sequence: Synthetic oligonucleotide
ucguugacacggguggggu

SEQ ID NO: 508518 - RNA, 19 nt, Artificial Sequence
  Description of Artificial Sequence: Synthetic oligonucleotide
cggauagacaagacgacug

SEQ ID NO: 508519 - RNA, 19 nt, Artificial Sequence
  Description of Artificial Sequence: Synthetic oligonucleotide
gguagauccaccguuggua

SEQ ID NO: 508520 - RNA, 19 nt, Artificial Sequence
  Description of Artificial Sequence: Synthetic oligonucleotide
gacgaugccuccacauaca

SEQ ID NO: 508521 - RNA, 19 nt, Artificial Sequence
  Description of Artificial Sequence: Synthetic oligonucleotide
ccaccguugguagagguag

SEQ ID NO: 508522 - RNA, 19 nt, Artificial Sequence
  Description of Artificial Sequence: Synthetic oligonucleotide
gggacaugugaaccguggc

SEQ ID NO: 508523 - RNA, 19 nt, Artificial Sequence
  Description of Artificial Sequence: Synthetic oligonucleotide
cugugaagugcucgugcuc

SEQ ID NO: 508524 - RNA, 19 nt, Artificial Sequence
  Description of Artificial Sequence: Synthetic oligonucleotide
cagggcgagaugucugcac

SEQ ID NO: 508525 - RNA, 19 nt, Artificial Sequence
  Description of Artificial Sequence: Synthetic oligonucleotide
ucgacgcgguagauccacc

SEQ ID NO: 508526 - RNA, 19 nt, Artificial Sequence
  Description of Artificial Sequence: Synthetic oligonucleotide
aucauauacuuugguugaa

SEQ ID NO: 508527 - RNA, 19 nt, Artificial Sequence
  Description of Artificial Sequence: Synthetic oligonucleotide
ucgucccgcaggcagccaa

SEQ ID NO: 508528 - RNA, 19 nt, Artificial Sequence
  Description of Artificial Sequence: Synthetic oligonucleotide
gcagaagagaggacccgcg

SEQ ID NO: 508529 - RNA, 19 nt, Artificial Sequence
  Description of Artificial Sequence: Synthetic oligonucleotide
auacagcucgucaccuaag

SEQ ID NO: 508530 - RNA, 19 nt, Artificial Sequence
  Description of Artificial Sequence: Synthetic oligonucleotide
gcuuaaguuaaacacccau

SEQ ID NO: 508531 - RNA, 19 nt, Artificial Sequence
  Description of Artificial Sequence: Synthetic oligonucleotide
acgcgguagauccaccguu

SEQ ID NO: 508532 - RNA, 19 nt, Artificial Sequence
  Description of Artificial Sequence: Synthetic oligonucleotide
caugauucccgauggugcu

SEQ ID NO: 508533 - RNA, 19 nt, Artificial Sequence
  Description of Artificial Sequence: Synthetic oligonucleotide
ugaugggguaguaguccuu

SEQ ID NO: 508534 - RNA, 19 nt, Artificial Sequence
  Description of Artificial Sequence: Synthetic oligonucleotide
gguccagucaccguacaca

SEQ ID NO: 508535 - RNA, 19 nt, Artificial Sequence
  Description of Artificial Sequence: Synthetic oligonucleotide
ucgccuacgcuuguauuua

SEQ ID NO: 508536 - RNA, 19 nt, Artificial Sequence
  Description of Artificial Sequence: Synthetic oligonucleotide
auccgauacaugacaggca

SEQ ID NO: 508537 - RNA, 19 nt, Artificial Sequence
  Description of Artificial Sequence: Synthetic oligonucleotide
uggacgcaggugugagagc

SEQ ID NO: 508538 - RNA, 19 nt, Artificial Sequence
  Description of Artificial Sequence: Synthetic oligonucleotide
augauucccgauggugcug

SEQ ID NO: 508539 - RNA, 19 nt, Artificial Sequence
  Description of Artificial Sequence: Synthetic oligonucleotide
ccaaacucguugacacggg

SEQ ID NO: 508540 - RNA, 19 nt, Artificial Sequence
  Description of Artificial Sequence: Synthetic oligonucleotide
cauucgccauggcagguga

SEQ ID NO: 508541 - RNA, 19 nt, Artificial Sequence
  Description of Artificial Sequence: Synthetic oligonucleotide
ggaaccguucugcugcaca

SEQ ID NO: 508542 - RNA, 19 nt, Artificial Sequence
  Description of Artificial Sequence: Synthetic oligonucleotide
guguuaaaggguggugguc

SEQ ID NO: 508543 - RNA, 19 nt, Artificial Sequence
  Description of Artificial Sequence: Synthetic oligonucleotide
gggguaauagucgccacuc

SEQ ID NO: 508544 - RNA, 19 nt, Artificial Sequence
  Description of Artificial Sequence: Synthetic oligonucleotide
aaacgccaaagaagacgga

SEQ ID NO: 508545 - RNA, 19 nt, Artificial Sequence
  Description of Artificial Sequence: Synthetic oligonucleotide
ugaucaucuccgggucagc

SEQ ID NO: 508546 - RNA, 19 nt, Artificial Sequence
  Description of Artificial Sequence: Synthetic oligonucleotide
acguacugguccagugggg

SEQ ID NO: 508547 - RNA, 19 nt, Artificial Sequence
  Description of Artificial Sequence: Synthetic oligonucleotide
gcgguagauccaccguugg

SEQ ID NO: 508548 - RNA, 19 nt, Artificial Sequence
  Description of Artificial Sequence: Synthetic oligonucleotide
gucgacgcgguagauccac

SEQ ID NO: 508549 - RNA, 19 nt, Artificial Sequence
  Description of Artificial Sequence: Synthetic oligonucleotide
ggacagacggauagacaag

SEQ ID NO: 508550 - RNA, 19 nt, Artificial Sequence
  Description of Artificial Sequence: Synthetic oligonucleotide
gaacgccauaucaucauau

SEQ ID NO: 508551 - RNA, 19 nt, Artificial Sequence
  Description of Artificial Sequence: Synthetic oligonucleotide
ucggguccugacugguccu

SEQ ID NO: 508552 - RNA, 19 nt, Artificial Sequence
  Description of Artificial Sequence: Synthetic oligonucleotide
agaggacccgcguggcuaa

SEQ ID NO: 508553 - RNA, 19 nt, Artificial Sequence
  Description of Artificial Sequence: Synthetic oligonucleotide
ggacuguggaagcauccuc

SEQ ID NO: 508554 - RNA, 19 nt, Artificial Sequence
  Description of Artificial Sequence: Synthetic oligonucleotide
ggcgacagggaggggaggg

SEQ ID NO: 508555 - RNA, 19 nt, Artificial Sequence
  Description of Artificial Sequence: Synthetic oligonucleotide
gugcucgugcucugagaug

SEQ ID NO: 508556 - RNA, 19 nt, Artificial Sequence
  Description of Artificial Sequence: Synthetic oligonucleotide
agcuuaaguuaaacaccca

SEQ ID NO: 508557 - RNA, 19 nt, Artificial Sequence
  Description of Artificial Sequence: Synthetic oligonucleotide
cugcgucaaacuuuacgua

SEQ ID NO: 508558 - RNA, 19 nt, Artificial Sequence
  Description of Artificial Sequence: Synthetic oligonucleotide
gcgagaugucugcacacac

SEQ ID NO: 508559 - RNA, 19 nt, Artificial Sequence
  Description of Artificial Sequence: Synthetic oligonucleotide
cacggguggggucgacgcg

SEQ ID NO: 508560 - RNA, 19 nt, Artificial Sequence
  Description of Artificial Sequence: Synthetic oligonucleotide
aucauccgggacaugugaa

SEQ ID NO: 508561 - RNA, 19 nt, Artificial Sequence
  Description of Artificial Sequence: Synthetic oligonucleotide
cuggaugccaaugcugaaa

SEQ ID NO: 508562 - RNA, 19 nt, Artificial Sequence
  Description of Artificial Sequence: Synthetic oligonucleotide
cgcuuguauuuauugauca

SEQ ID NO: 508563 - RNA, 19 nt, Artificial Sequence
  Description of Artificial Sequence: Synthetic oligonucleotide
aacauccucuccacucaua

SEQ ID NO: 508564 - RNA, 19 nt, Artificial Sequence
  Description of Artificial Sequence: Synthetic oligonucleotide
gguaccggaacgccauauc

SEQ ID NO: 508565 - RNA, 19 nt, Artificial Sequence
  Description of Artificial Sequence: Synthetic oligonucleotide
ucgccacucacugcgucaa

SEQ ID NO: 508566 - RNA, 19 nt, Artificial Sequence
  Description of Artificial Sequence: Synthetic oligonucleotide
cccaaugaagacgcugacc

SEQ ID NO: 508567 - RNA, 19 nt, Artificial Sequence
  Description of Artificial Sequence: Synthetic oligonucleotide
gguggcguugaagucugug

SEQ ID NO: 508568 - RNA, 19 nt, Artificial Sequence
  Description of Artificial Sequence: Synthetic oligonucleotide
guaggugagcauucgccau

SEQ ID NO: 508569 - RNA, 19 nt, Artificial Sequence
  Description of Artificial Sequence: Synthetic oligonucleotide
agaagacggagcgcacgga

SEQ ID NO: 508570 - RNA, 19 nt, Artificial Sequence
  Description of Artificial Sequence: Synthetic oligonucleotide
ucacugcgucaaacuuuac

SEQ ID NO: 508571 - RNA, 19 nt, Artificial Sequence
  Description of Artificial Sequence: Synthetic oligonucleotide
uggucaccgggagcagaag

SEQ ID NO: 508572 - RNA, 19 nt, Artificial Sequence
  Description of Artificial Sequence: Synthetic oligonucleotide
cgggacaugugaaccgugg

SEQ ID NO: 508573 - RNA, 19 nt, Artificial Sequence
  Description of Artificial Sequence: Synthetic oligonucleotide
gaaaucgccuacgcuugua

SEQ ID NO: 508574 - RNA, 19 nt, Artificial Sequence
  Description of Artificial Sequence: Synthetic oligonucleotide
auggucaccgggagcagaa

SEQ ID NO: 508575 - RNA, 19 nt, Artificial Sequence
  Description of Artificial Sequence: Synthetic oligonucleotide
agcauucgccauggcaggu

SEQ ID NO: 508576 - RNA, 19 nt, Artificial Sequence
  Description of Artificial Sequence: Synthetic oligonucleotide
uguggucauccacgauguu

SEQ ID NO: 508577 - RNA, 19 nt, Artificial Sequence
  Description of Artificial Sequence: Synthetic oligonucleotide
gacgcgguagauccaccgu

SEQ ID NO: 508578 - RNA, 19 nt, Artificial Sequence
  Description of Artificial Sequence: Synthetic oligonucleotide
ccuucaccgaauccuguuc

SEQ ID NO: 508579 - RNA, 19 nt, Artificial Sequence
  Description of Artificial Sequence: Synthetic oligonucleotide
agauacgggcuggucucca

SEQ ID NO: 508580 - RNA, 19 nt, Artificial Sequence
  Description of Artificial Sequence: Synthetic oligonucleotide
agguaccggaacgccauau

SEQ ID NO: 508581 - RNA, 19 nt, Artificial Sequence
  Description of Artificial Sequence: Synthetic oligonucleotide
acgcgcaggggcaggcugg

SEQ ID NO: 508582 - RNA, 19 nt, Artificial Sequence
  Description of Artificial Sequence: Synthetic oligonucleotide
cacccacgaguaccagccc

SEQ ID NO: 508583 - RNA, 19 nt, Artificial Sequence
  Description of Artificial Sequence: Synthetic oligonucleotide
cgucaaacuuuacguacug

SEQ ID NO: 508584 - RNA, 19 nt, Artificial Sequence
  Description of Artificial Sequence: Synthetic oligonucleotide
caaacucguugacacgggu

SEQ ID NO: 508585 - RNA, 19 nt, Artificial Sequence
  Description of Artificial Sequence: Synthetic oligonucleotide
uguacacgugcagguucau

SEQ ID NO: 508586 - RNA, 19 nt, Artificial Sequence
  Description of Artificial Sequence: Synthetic oligonucleotide
agacguggauauagaugga

SEQ ID NO: 508587 - RNA, 19 nt, Artificial Sequence
  Description of Artificial Sequence: Synthetic oligonucleotide
acuugagcuuauaguugau

SEQ ID NO: 508588 - RNA, 19 nt, Artificial Sequence
  Description of Artificial Sequence: Synthetic oligonucleotide
ggguaauagucgccacuca

SEQ ID NO: 508589 - RNA, 19 nt, Artificial Sequence
  Description of Artificial Sequence: Synthetic oligonucleotide
guggcaagccggcgguaca

SEQ ID NO: 508590 - RNA, 19 nt, Artificial Sequence
  Description of Artificial Sequence: Synthetic oligonucleotide
gacggagcgcacggacagc

SEQ ID NO: 508591 - RNA, 19 nt, Artificial Sequence
  Description of Artificial Sequence: Synthetic oligonucleotide
cgacgcgguagauccaccg

SEQ ID NO: 508592 - RNA, 19 nt, Artificial Sequence
  Description of Artificial Sequence: Synthetic oligonucleotide
uugguacuuugugcagcau

SEQ ID NO: 508593 - RNA, 19 nt, Artificial Sequence
  Description of Artificial Sequence: Synthetic oligonucleotide
gggguguggucauccacga

SEQ ID NO: 508594 - RNA, 19 nt, Artificial Sequence
  Description of Artificial Sequence: Synthetic oligonucleotide
ggaacgccauaucaucaua

SEQ ID NO: 508595 - RNA, 19 nt, Artificial Sequence
  Description of Artificial Sequence: Synthetic oligonucleotide
gguugcggcuggcgacucg

SEQ ID NO: 508596 - RNA, 19 nt, Artificial Sequence
  Description of Artificial Sequence: Synthetic oligonucleotide
uguggacgauggagacgau

SEQ ID NO: 508597 - RNA, 19 nt, Artificial Sequence
  Description of Artificial Sequence: Synthetic oligonucleotide
cauccgaguucucuccacu

SEQ ID NO: 508598 - RNA, 19 nt, Artificial Sequence
  Description of Artificial Sequence: Synthetic oligonucleotide
acccgcguggcuaaucguu

SEQ ID NO: 508599 - RNA, 19 nt, Artificial Sequence
  Description of Artificial Sequence: Synthetic oligonucleotide
cagaagagaggacccgcgu

SEQ ID NO: 508600 - RNA, 19 nt, Artificial Sequence
  Description of Artificial Sequence: Synthetic oligonucleotide
gcauucgccauggcaggug

SEQ ID NO: 508601 - RNA, 19 nt, Artificial Sequence
  Description of Artificial Sequence: Synthetic oligonucleotide
caccguacacaagguccug

SEQ ID NO: 508602 - RNA, 19 nt, Artificial Sequence
  Description of Artificial Sequence: Synthetic oligonucleotide
acgcugaccugcaccacaa

SEQ ID NO: 508603 - RNA, 19 nt, Artificial Sequence
  Description of Artificial Sequence: Synthetic oligonucleotide
ucucucccguuaguagauu

SEQ ID NO: 508604 - RNA, 19 nt, Artificial Sequence
  Description of Artificial Sequence: Synthetic oligonucleotide
gguggcacgcugcccuuca

SEQ ID NO: 508605 - RNA, 19 nt, Artificial Sequence
  Description of Artificial Sequence: Synthetic oligonucleotide
ggcgagaugucugcacaca

SEQ ID NO: 508606 - RNA, 19 nt, Artificial Sequence
  Description of Artificial Sequence: Synthetic oligonucleotide
ccgccaucucacacacugg

SEQ ID NO: 508607 - RNA, 19 nt, Artificial Sequence
  Description of Artificial Sequence: Synthetic oligonucleotide
caccguugguagagguaga

SEQ ID NO: 508608 - RNA, 19 nt, Artificial Sequence
  Description of Artificial Sequence: Synthetic oligonucleotide
agcaaccauccgaguucuc

SEQ ID NO: 508609 - RNA, 19 nt, Artificial Sequence
  Description of Artificial Sequence: Synthetic oligonucleotide
cgcgguagauccaccguug

SEQ ID NO: 508610 - RNA, 19 nt, Artificial Sequence
  Description of Artificial Sequence: Synthetic oligonucleotide
ccacucauaccaaacucgu

SEQ ID NO: 508611 - RNA, 19 nt, Artificial Sequence
  Description of Artificial Sequence: Synthetic oligonucleotide
gugggaugucaagcuccgc

SEQ ID NO: 508612 - RNA, 19 nt, Artificial Sequence
  Description of Artificial Sequence: Synthetic oligonucleotide
cuucggugacagcugugcu

SEQ ID NO: 508613 - RNA, 19 nt, Artificial Sequence
  Description of Artificial Sequence: Synthetic oligonucleotide
gugccagcagauacgggcu

SEQ ID NO: 508614 - RNA, 19 nt, Artificial Sequence
  Description of Artificial Sequence: Synthetic oligonucleotide
gguccugacugguccugga

SEQ ID NO: 508615 - RNA, 19 nt, Artificial Sequence
  Description of Artificial Sequence: Synthetic oligonucleotide
acccacgggguguggucau

SEQ ID NO: 508616 - RNA, 19 nt, Artificial Sequence
  Description of Artificial Sequence: Synthetic oligonucleotide
ggccguaguccucagcccu

SEQ ID NO: 508617 - RNA, 19 nt, Artificial Sequence
  Description of Artificial Sequence: Synthetic oligonucleotide
gcgggcagaaggagacgcg

SEQ ID NO: 508618 - RNA, 19 nt, Artificial Sequence
  Description of Artificial Sequence: Synthetic oligonucleotide
ggauauagauggaaccguu

SEQ ID NO: 508619 - RNA, 19 nt, Artificial Sequence
  Description of Artificial Sequence: Synthetic oligonucleotide
cuguuccucgucugauugu

SEQ ID NO: 508620 - RNA, 19 nt, Artificial Sequence
  Description of Artificial Sequence: Synthetic oligonucleotide
ccccaaugaagacgcugac

SEQ ID NO: 508621 - RNA, 19 nt, Artificial Sequence
  Description of Artificial Sequence: Synthetic oligonucleotide
cacgggguguggucaucca

SEQ ID NO: 508622 - RNA, 19 nt, Artificial Sequence
  Description of Artificial Sequence: Synthetic oligonucleotide
cacccacggggugugguca

SEQ ID NO: 508623 - RNA, 19 nt, Artificial Sequence
  Description of Artificial Sequence: Synthetic oligonucleotide
ccgauacaugacaggcauc

SEQ ID NO: 508624 - RNA, 19 nt, Artificial Sequence
  Description of Artificial Sequence: Synthetic oligonucleotide
ggugccagugugagaucac

SEQ ID NO: 508625 - RNA, 19 nt, Artificial Sequence
  Description of Artificial Sequence: Synthetic oligonucleotide
ggaagccgcucuugguaaa

SEQ ID NO: 508626 - RNA, 19 nt, Artificial Sequence
  Description of Artificial Sequence: Synthetic oligonucleotide
gucucucccguuaguagau

SEQ ID NO: 508627 - RNA, 19 nt, Artificial Sequence
  Description of Artificial Sequence: Synthetic oligonucleotide
gacugccggcugcuccaga

SEQ ID NO: 508628 - RNA, 19 nt, Artificial Sequence
  Description of Artificial Sequence: Synthetic oligonucleotide
gacccgcguggcuaaucgu

SEQ ID NO: 508629 - RNA, 19 nt, Artificial Sequence
  Description of Artificial Sequence: Synthetic oligonucleotide
gugcuggacgcagguguga

SEQ ID NO: 508630 - RNA, 19 nt, Artificial Sequence
  Description of Artificial Sequence: Synthetic oligonucleotide
gcgucaaacuuuacguacu

SEQ ID NO: 508631 - RNA, 19 nt, Artificial Sequence
  Description of Artificial Sequence: Synthetic oligonucleotide
agacgcgcaggggcaggcu

SEQ ID NO: 508632 - RNA, 19 nt, Artificial Sequence
  Description of Artificial Sequence: Synthetic oligonucleotide
cacucauaccaaacucguu

SEQ ID NO: 508633 - RNA, 19 nt, Artificial Sequence
  Description of Artificial Sequence: Synthetic oligonucleotide
cgauaaggaccccaaugaa

SEQ ID NO: 508634 - RNA, 19 nt, Artificial Sequence
  Description of Artificial Sequence: Synthetic oligonucleotide
cguuaguagauucuugguu

SEQ ID NO: 508635 - RNA, 19 nt, Artificial Sequence
  Description of Artificial Sequence: Synthetic oligonucleotide
acgcugcccuucacccacg

SEQ ID NO: 508636 - RNA, 19 nt, Artificial Sequence
  Description of Artificial Sequence: Synthetic oligonucleotide
ccgggacaugugaaccgug

SEQ ID NO: 508637 - RNA, 19 nt, Artificial Sequence
  Description of Artificial Sequence: Synthetic oligonucleotide
ccgguccagccggacaucc

SEQ ID NO: 508638 - RNA, 19 nt, Artificial Sequence
  Description of Artificial Sequence: Synthetic oligonucleotide
ggggucgacgcgguagauc

SEQ ID NO: 508639 - RNA, 19 nt, Artificial Sequence
  Description of Artificial Sequence: Synthetic oligonucleotide
ccguuaguagauucuuggu

SEQ ID NO: 508640 - RNA, 19 nt, Artificial Sequence
  Description of Artificial Sequence: Synthetic oligonucleotide
cucguggggccccucgggu

SEQ ID NO: 508641 - RNA, 19 nt, Artificial Sequence
  Description of Artificial Sequence: Synthetic oligonucleotide
cacgaguaccagcccuugu

SEQ ID NO: 508642 - RNA, 19 nt, Artificial Sequence
  Description of Artificial Sequence: Synthetic oligonucleotide
ggcuggcgacucguggggc

SEQ ID NO: 508643 - RNA, 19 nt, Artificial Sequence
  Description of Artificial Sequence: Synthetic oligonucleotide
cgccgugcuggcuucacca

SEQ ID NO: 508644 - RNA, 19 nt, Artificial Sequence
  Description of Artificial Sequence: Synthetic oligonucleotide
ggggaagauuccugccacu

SEQ ID NO: 508645 - RNA, 19 nt, Artificial Sequence
  Description of Artificial Sequence: Synthetic oligonucleotide
gccaaugcugaaacauccu

SEQ ID NO: 508646 - RNA, 19 nt, Artificial Sequence
  Description of Artificial Sequence: Synthetic oligonucleotide
caccaugauucccgauggu

SEQ ID NO: 508647 - RNA, 19 nt, Artificial Sequence
  Description of Artificial Sequence: Synthetic oligonucleotide
ccacgaguaccagcccuug

SEQ ID NO: 508648 - RNA, 19 nt, Artificial Sequence
  Description of Artificial Sequence: Synthetic oligonucleotide
cguagcaaccauccgaguu

SEQ ID NO: 508649 - RNA, 19 nt, Artificial Sequence
  Description of Artificial Sequence: Synthetic oligonucleotide
cagguugcggcuggcgacu

SEQ ID NO: 508650 - RNA, 19 nt, Artificial Sequence
  Description of Artificial Sequence: Synthetic oligonucleotide
gccccgcccgaucugucca

SEQ ID NO: 508651 - RNA, 19 nt, Artificial Sequence
  Description of Artificial Sequence: Synthetic oligonucleotide
ccucggguccugacugguc

SEQ ID NO: 508652 - RNA, 19 nt, Artificial Sequence
  Description of Artificial Sequence: Synthetic oligonucleotide
cguggcaagccggcgguac

SEQ ID NO: 508653 - RNA, 19 nt, Artificial Sequence
  Description of Artificial Sequence: Synthetic oligonucleotide
cgaugccuccacauacaca

SEQ ID NO: 508654 - RNA, 19 nt, Artificial Sequence
  Description of Artificial Sequence: Synthetic oligonucleotide
ccccaggaguggccuuugg

SEQ ID NO: 508655 - RNA, 19 nt, Artificial Sequence
  Description of Artificial Sequence: Synthetic oligonucleotide
ccguacacaagguccugcu

SEQ ID NO: 508656 - RNA, 19 nt, Artificial Sequence
  Description of Artificial Sequence: Synthetic oligonucleotide
cgucaccuaagaaguucca

SEQ ID NO: 508657 - RNA, 19 nt, Artificial Sequence
  Description of Artificial Sequence: Synthetic oligonucleotide
cagguucauuagcgugucu

SEQ ID NO: 508658 - RNA, 19 nt, Artificial Sequence
  Description of Artificial Sequence: Synthetic oligonucleotide
cgugucuuuggggacaggu

SEQ ID NO: 508659 - RNA, 19 nt, Artificial Sequence
  Description of Artificial Sequence: Synthetic oligonucleotide
gccacucugugcucccggu

SEQ ID NO: 508660 - RNA, 19 nt, Artificial Sequence
  Description of Artificial Sequence: Synthetic oligonucleotide
gcuccgcaaaguguucgua

SEQ ID NO: 508661 - RNA, 19 nt, Artificial Sequence
  Description of Artificial Sequence: Synthetic oligonucleotide
cugccgccccgcccgaucu

SEQ ID NO: 508662 - RNA, 19 nt, Artificial Sequence
  Description of Artificial Sequence: Synthetic oligonucleotide
gcgacagggaggggaggga

SEQ ID NO: 508663 - RNA, 19 nt, Artificial Sequence
  Description of Artificial Sequence: Synthetic oligonucleotide
ccucuucggugacagcugu

SEQ ID NO: 508664 - RNA, 19 nt, Artificial Sequence
  Description of Artificial Sequence: Synthetic oligonucleotide
cgccccgcccgaucugucc

SEQ ID NO: 508665 - RNA, 19 nt, Artificial Sequence
  Description of Artificial Sequence: Synthetic oligonucleotide
gcgcacggacagccccucc

SEQ ID NO: 508666 - RNA, 19 nt, Artificial Sequence
  Description of Artificial Sequence: Synthetic oligonucleotide
cccgcccgaucuguccagg

SEQ ID NO: 508667 - RNA, 19 nt, Artificial Sequence
  Description of Artificial Sequence: Synthetic oligonucleotide
cgcugcccuucacccacgg

SEQ ID NO: 508668 - RNA, 19 nt, Artificial Sequence
  Description of Artificial Sequence: Synthetic oligonucleotide
ggucgacgcgguagaucca

SEQ ID NO: 508669 - RNA, 19 nt, Artificial Sequence
  Description of Artificial Sequence: Synthetic oligonucleotide
gcgugucuuuggggacagg

SEQ ID NO: 508670 - RNA, 19 nt, Artificial Sequence
  Description of Artificial Sequence: Synthetic oligonucleotide
agguggcguugaagucugu

SEQ ID NO: 508671 - RNA, 19 nt, Artificial Sequence
  Description of Artificial Sequence: Synthetic oligonucleotide
gggugacuugguacuuugu

SEQ ID NO: 508672 - RNA, 19 nt, Artificial Sequence
  Description of Artificial Sequence: Synthetic oligonucleotide
cggaacgccauaucaucau

SEQ ID NO: 508673 - RNA, 19 nt, Artificial Sequence
  Description of Artificial Sequence: Synthetic oligonucleotide
gccgugcuggcuucaccau

SEQ ID NO: 508674 - RNA, 19 nt, Artificial Sequence
  Description of Artificial Sequence: Synthetic oligonucleotide
ccgcccgaucuguccagga

SEQ ID NO: 508675 - RNA, 19 nt, Artificial Sequence
  Description of Artificial Sequence: Synthetic oligonucleotide
cccacgaguaccagcccuu

SEQ ID NO: 508676 - RNA, 19 nt, Artificial Sequence
  Description of Artificial Sequence: Synthetic oligonucleotide
gccuacgcuuguauuuauu

SEQ ID NO: 508677 - RNA, 19 nt, Artificial Sequence
  Description of Artificial Sequence: Synthetic oligonucleotide
cgguagauccaccguuggu

SEQ ID NO: 508678 - RNA, 19 nt, Artificial Sequence
  Description of Artificial Sequence: Synthetic oligonucleotide
cccgcguggcuaaucguuu

SEQ ID NO: 508679 - RNA, 19 nt, Artificial Sequence
  Description of Artificial Sequence: Synthetic oligonucleotide
ccacgauguugauggugau

SEQ ID NO: 508680 - RNA, 19 nt, Artificial Sequence
  Description of Artificial Sequence: Synthetic oligonucleotide
ccacccucggcgccgugcu

SEQ ID NO: 508681 - RNA, 19 nt, Artificial Sequence
  Description of Artificial Sequence: Synthetic oligonucleotide
ccgcguggcuaaucguuuu

SEQ ID NO: 508682 - RNA, 19 nt, Artificial Sequence
  Description of Artificial Sequence: Synthetic oligonucleotide
gcgacucguggggccccuc

SEQ ID NO: 508683 - RNA, 19 nt, Artificial Sequence
  Description of Artificial Sequence: Synthetic oligonucleotide
ggcgacucguggggccccu

SEQ ID NO: 508684 - RNA, 19 nt, Artificial Sequence
  Description of Artificial Sequence: Synthetic oligonucleotide
cgccuacgcuuguauuuau

SEQ ID NO: 508685 - RNA, 19 nt, Artificial Sequence
  Description of Artificial Sequence: Synthetic oligonucleotide
ccguggcaagccggcggua

SEQ ID NO: 508686 - RNA, 19 nt, Artificial Sequence
  Description of Artificial Sequence: Synthetic oligonucleotide
cggcgccgugcuggcuuca

SEQ ID NO: 508687 - RNA, 19 nt, Artificial Sequence
  Description of Artificial Sequence: Synthetic oligonucleotide
ucuuacaccaucaauaucc

SEQ ID NO: 508688 - RNA, 19 nt, Artificial Sequence
  Description of Artificial Sequence: Synthetic oligonucleotide
auuaccuguacucugggcc

SEQ ID NO: 508689 - RNA, 19 nt, Artificial Sequence
  Description of Artificial Sequence: Synthetic oligonucleotide
uaagauuuaucccacuacg

SEQ ID NO: 508690 - RNA, 19 nt, Artificial Sequence
  Description of Artificial Sequence: Synthetic oligonucleotide
ucauuugaaauauaguuca

SEQ ID NO: 508691 - RNA, 19 nt, Artificial Sequence
  Description of Artificial Sequence: Synthetic oligonucleotide
ugauauaaucagaauagag

SEQ ID NO: 508692 - RNA, 19 nt, Artificial Sequence
  Description of Artificial Sequence: Synthetic oligonucleotide
ugauuaagagcauaaguag

SEQ ID NO: 508693 - RNA, 19 nt, Artificial Sequence
  Description of Artificial Sequence: Synthetic oligonucleotide
uugauuaagagcauaagua

SEQ ID NO: 508694 - RNA, 19 nt, Artificial Sequence
  Description of Artificial Sequence: Synthetic oligonucleotide
auacuaagaagggaaaucc

SEQ ID NO: 508695 - RNA, 19 nt, Artificial Sequence
  Description of Artificial Sequence: Synthetic oligonucleotide
aagguauuuaaauucauuu

SEQ ID NO: 508696 - RNA, 19 nt, Artificial Sequence
  Description of Artificial Sequence: Synthetic oligonucleotide
aaauucgcacuucaaguuc

SEQ ID NO: 508697 - RNA, 19 nt, Artificial Sequence
  Description of Artificial Sequence: Synthetic oligonucleotide
uguaacauauacaucuuga

SEQ ID NO: 508698 - RNA, 19 nt, Artificial Sequence
  Description of Artificial Sequence: Synthetic oligonucleotide
uaagauuuauucuuaggug

SEQ ID NO: 508699 - RNA, 19 nt, Artificial Sequence
  Description of Artificial Sequence: Synthetic oligonucleotide
uuggacaagaucuuuaaga

SEQ ID NO: 508700 - RNA, 19 nt, Artificial Sequence
  Description of Artificial Sequence: Synthetic oligonucleotide
auauaaucagaauagaguu

SEQ ID NO: 508701 - RNA, 19 nt, Artificial Sequence
  Description of Artificial Sequence: Synthetic oligonucleotide
aaugucauggccgauaggu

SEQ ID NO: 508702 - RNA, 19 nt, Artificial Sequence
  Description of Artificial Sequence: Synthetic oligonucleotide
ugaagcauacuaagaaggg

SEQ ID NO: 508703 - RNA, 19 nt, Artificial Sequence
  Description of Artificial Sequence: Synthetic oligonucleotide
cauugaguaagucaucugg

SEQ ID NO: 508704 - RNA, 19 nt, Artificial Sequence
  Description of Artificial Sequence: Synthetic oligonucleotide
uaugaagcauacuaagaag

SEQ ID NO: 508705 - RNA, 19 nt, Artificial Sequence
  Description of Artificial Sequence: Synthetic oligonucleotide
ugaauuguugcuagaagug

SEQ ID NO: 508706 - RNA, 19 nt, Artificial Sequence
  Description of Artificial Sequence: Synthetic oligonucleotide
uugacuauacagaucaacu

SEQ ID NO: 508707 - RNA, 19 nt, Artificial Sequence
  Description of Artificial Sequence: Synthetic oligonucleotide
uaaauaagcagacagccuu

SEQ ID NO: 508708 - RNA, 19 nt, Artificial Sequence
  Description of Artificial Sequence: Synthetic oligonucleotide
gaucuuuaagauuuauccc

SEQ ID NO: 508709 - RNA, 19 nt, Artificial Sequence
  Description of Artificial Sequence: Synthetic oligonucleotide
ugucauggccgauaggucg

SEQ ID NO: 508710 - RNA, 19 nt, Artificial Sequence
  Description of Artificial Sequence: Synthetic oligonucleotide
aucagcacggcugauaccc

SEQ ID NO: 508711 - RNA, 19 nt, Artificial Sequence
  Description of Artificial Sequence: Synthetic oligonucleotide
uccaguuuuacaucacacg

SEQ ID NO: 508712 - RNA, 19 nt, Artificial Sequence
  Description of Artificial Sequence: Synthetic oligonucleotide
gauuuagcagcucauuccc

SEQ ID NO: 508713 - RNA, 19 nt, Artificial Sequence
  Description of Artificial Sequence: Synthetic oligonucleotide
uucgguaucuuccacuugc

SEQ ID NO: 508714 - RNA, 19 nt, Artificial Sequence
  Description of Artificial Sequence: Synthetic oligonucleotide
uuaaugucauggccgauag

SEQ ID NO: 508715 - RNA, 19 nt, Artificial Sequence
  Description of Artificial Sequence: Synthetic oligonucleotide
uugcuagaaguguugaccg

SEQ ID NO: 508716 - RNA, 19 nt, Artificial Sequence
  Description of Artificial Sequence: Synthetic oligonucleotide
ucauucaaggcauugagua

SEQ ID NO: 508717 - RNA, 19 nt, Artificial Sequence
  Description of Artificial Sequence: Synthetic oligonucleotide
uauccaaaguugcaaaugu

SEQ ID NO: 508718 - RNA, 19 nt, Artificial Sequence
  Description of Artificial Sequence: Synthetic oligonucleotide
aucagaauagaguugucug

SEQ ID NO: 508719 - RNA, 19 nt, Artificial Sequence
  Description of Artificial Sequence: Synthetic oligonucleotide
ugauauguggacaugcauc

SEQ ID NO: 508720 - RNA, 19 nt, Artificial Sequence
  Description of Artificial Sequence: Synthetic oligonucleotide
ucagaccuagcauugaaca

SEQ ID NO: 508721 - RNA, 19 nt, Artificial Sequence
  Description of Artificial Sequence: Synthetic oligonucleotide
aaaauucgcacuucaaguu

SEQ ID NO: 508722 - RNA, 19 nt, Artificial Sequence
  Description of Artificial Sequence: Synthetic oligonucleotide
caucaauaauccauuggcg

SEQ ID NO: 508723 - RNA, 19 nt, Artificial Sequence
  Description of Artificial Sequence: Synthetic oligonucleotide
uguuaugguacagaguuug

SEQ ID NO: 508724 - RNA, 19 nt, Artificial Sequence
  Description of Artificial Sequence: Synthetic oligonucleotide
agaccaaucucugaagggc

SEQ ID NO: 508725 - RNA, 19 nt, Artificial Sequence
  Description of Artificial Sequence: Synthetic oligonucleotide
gauuaguucgguaucuucc

SEQ ID NO: 508726 - RNA, 19 nt, Artificial Sequence
  Description of Artificial Sequence: Synthetic oligonucleotide
aauccauuggcgcugcgca

SEQ ID NO: 508727 - RNA, 19 nt, Artificial Sequence
  Description of Artificial Sequence: Synthetic oligonucleotide
aagauuuaucccacuacgg

SEQ ID NO: 508728 - RNA, 19 nt, Artificial Sequence
  Description of Artificial Sequence: Synthetic oligonucleotide
aaagaaggaucuuggacaa

SEQ ID NO: 508729 - RNA, 19 nt, Artificial Sequence
  Description of Artificial Sequence: Synthetic oligonucleotide
cuuggugaugccaagucag

SEQ ID NO: 508730 - RNA, 19 nt, Artificial Sequence
  Description of Artificial Sequence: Synthetic oligonucleotide
uuugaugauaguuggccga

SEQ ID NO: 508731 - RNA, 19 nt, Artificial Sequence
  Description of Artificial Sequence: Synthetic oligonucleotide
aagcuaucgcuaucagacc

SEQ ID NO: 508732 - RNA, 19 nt, Artificial Sequence
  Description of Artificial Sequence: Synthetic oligonucleotide
gauauaaucagaauagagu

SEQ ID NO: 508733 - RNA, 19 nt, Artificial Sequence
  Description of Artificial Sequence: Synthetic oligonucleotide
gauacccucauucaaggca

SEQ ID NO: 508734 - RNA, 19 nt, Artificial Sequence
  Description of Artificial Sequence: Synthetic oligonucleotide
aagauguugacuauacaga

SEQ ID NO: 508735 - RNA, 19 nt, Artificial Sequence
  Description of Artificial Sequence: Synthetic oligonucleotide
aaucagaauagaguugucu

SEQ ID NO: 508736 - RNA, 19 nt, Artificial Sequence
  Description of Artificial Sequence: Synthetic oligonucleotide
aacccugccaaaauggauc

SEQ ID NO: 508737 - RNA, 19 nt, Artificial Sequence
  Description of Artificial Sequence: Synthetic oligonucleotide
gaaaaggagacaugcgaug

SEQ ID NO: 508738 - RNA, 19 nt, Artificial Sequence
  Description of Artificial Sequence: Synthetic oligonucleotide
cuuguaugcugauauaguc

SEQ ID NO: 508739 - RNA, 19 nt, Artificial Sequence
  Description of Artificial Sequence: Synthetic oligonucleotide
ugccaagucaguauacacc

SEQ ID NO: 508740 - RNA, 19 nt, Artificial Sequence
  Description of Artificial Sequence: Synthetic oligonucleotide
gauuuaucccacuacgguc

SEQ ID NO: 508741 - RNA, 19 nt, Artificial Sequence
  Description of Artificial Sequence: Synthetic oligonucleotide
aucuacagcacugugacug

SEQ ID NO: 508742 - RNA, 19 nt, Artificial Sequence
  Description of Artificial Sequence: Synthetic oligonucleotide
uauagucccacccaacaaa

SEQ ID NO: 508743 - RNA, 19 nt, Artificial Sequence
  Description of Artificial Sequence: Synthetic oligonucleotide
gguuccuuuggccaaaacg

SEQ ID NO: 508744 - RNA, 19 nt, Artificial Sequence
  Description of Artificial Sequence: Synthetic oligonucleotide
agauuuaucccacuacggu

SEQ ID NO: 508745 - RNA, 19 nt, Artificial Sequence
  Description of Artificial Sequence: Synthetic oligonucleotide
ucugauuaccuguacucug

SEQ ID NO: 508746 - RNA, 19 nt, Artificial Sequence
  Description of Artificial Sequence: Synthetic oligonucleotide
uggacaagaucuuuaagau

SEQ ID NO: 508747 - RNA, 19 nt, Artificial Sequence
  Description of Artificial Sequence: Synthetic oligonucleotide
uugagauaguccuuuuccc

SEQ ID NO: 508748 - RNA, 19 nt, Artificial Sequence
  Description of Artificial Sequence: Synthetic oligonucleotide
aaggcauugaguaagucau

SEQ ID NO: 508749 - RNA, 19 nt, Artificial Sequence
  Description of Artificial Sequence: Synthetic oligonucleotide
aaacacgagauacaugaua

SEQ ID NO: 508750 - RNA, 19 nt, Artificial Sequence
  Description of Artificial Sequence: Synthetic oligonucleotide
gauauagucccacccaaca

SEQ ID NO: 508751 - RNA, 19 nt, Artificial Sequence
  Description of Artificial Sequence: Synthetic oligonucleotide
ugcugauauagucccaccc

SEQ ID NO: 508752 - RNA, 19 nt, Artificial Sequence
  Description of Artificial Sequence: Synthetic oligonucleotide
ucuuguaugcugauauagu

SEQ ID NO: 508753 - RNA, 19 nt, Artificial Sequence
  Description of Artificial Sequence: Synthetic oligonucleotide
ugugcacauaaacacgaga

SEQ ID NO: 508754 - RNA, 19 nt, Artificial Sequence
  Description of Artificial Sequence: Synthetic oligonucleotide
acuaaaagcuaucgcuauc

SEQ ID NO: 508755 - RNA, 19 nt, Artificial Sequence
  Description of Artificial Sequence: Synthetic oligonucleotide
uuauuaacuucaaccucug

SEQ ID NO: 508756 - RNA, 19 nt, Artificial Sequence
  Description of Artificial Sequence: Synthetic oligonucleotide
ugugccguugcauauuaca

SEQ ID NO: 508757 - RNA, 19 nt, Artificial Sequence
  Description of Artificial Sequence: Synthetic oligonucleotide
uaagagcauaaguaguugu

SEQ ID NO: 508758 - RNA, 19 nt, Artificial Sequence
  Description of Artificial Sequence: Synthetic oligonucleotide
aggucggauaucuugaccu

SEQ ID NO: 508759 - RNA, 19 nt, Artificial Sequence
  Description of Artificial Sequence: Synthetic oligonucleotide
augccaagucaguauacac

SEQ ID NO: 508760 - RNA, 19 nt, Artificial Sequence
  Description of Artificial Sequence: Synthetic oligonucleotide
ugauugugggguaaccaug

SEQ ID NO: 508761 - RNA, 19 nt, Artificial Sequence
  Description of Artificial Sequence: Synthetic oligonucleotide
aaaacuagcugugccguug

SEQ ID NO: 508762 - RNA, 19 nt, Artificial Sequence
  Description of Artificial Sequence: Synthetic oligonucleotide
aucgauaccccuccugagg

SEQ ID NO: 508763 - RNA, 19 nt, Artificial Sequence
  Description of Artificial Sequence: Synthetic oligonucleotide
guaguuguauuuaaagaug

SEQ ID NO: 508764 - RNA, 19 nt, Artificial Sequence
  Description of Artificial Sequence: Synthetic oligonucleotide
uccaucucgguaauugaug

SEQ ID NO: 508765 - RNA, 19 nt, Artificial Sequence
  Description of Artificial Sequence: Synthetic oligonucleotide
uacaccggugguauucugg

SEQ ID NO: 508766 - RNA, 19 nt, Artificial Sequence
  Description of Artificial Sequence: Synthetic oligonucleotide
guaacacuaauaucuguac

SEQ ID NO: 508767 - RNA, 19 nt, Artificial Sequence
  Description of Artificial Sequence: Synthetic oligonucleotide
caauuugcaagaaaggaaa

SEQ ID NO: 508768 - RNA, 19 nt, Artificial Sequence
  Description of Artificial Sequence: Synthetic oligonucleotide
aaauguuguuggcaagccu

SEQ ID NO: 508769 - RNA, 19 nt, Artificial Sequence
  Description of Artificial Sequence: Synthetic oligonucleotide
cuacacuaguauaaauaag

SEQ ID NO: 508770 - RNA, 19 nt, Artificial Sequence
  Description of Artificial Sequence: Synthetic oligonucleotide
gagguagcaucaauaaucc

SEQ ID NO: 508771 - RNA, 19 nt, Artificial Sequence
  Description of Artificial Sequence: Synthetic oligonucleotide
agcauugaacacacaaagc

SEQ ID NO: 508772 - RNA, 19 nt, Artificial Sequence
  Description of Artificial Sequence: Synthetic oligonucleotide
auuaguucgguaucuucca

SEQ ID NO: 508773 - RNA, 19 nt, Artificial Sequence
  Description of Artificial Sequence: Synthetic oligonucleotide
cacgagauacaugauaaag

SEQ ID NO: 508774 - RNA, 19 nt, Artificial Sequence
  Description of Artificial Sequence: Synthetic oligonucleotide
uacuaagaagggaaaucca

SEQ ID NO: 508775 - RNA, 19 nt, Artificial Sequence
  Description of Artificial Sequence: Synthetic oligonucleotide
caucugauuaccuguacuc

SEQ ID NO: 508776 - RNA, 19 nt, Artificial Sequence
  Description of Artificial Sequence: Synthetic oligonucleotide
guugacaugacagcgacca

SEQ ID NO: 508777 - RNA, 19 nt, Artificial Sequence
  Description of Artificial Sequence: Synthetic oligonucleotide
aagcauacuaagaagggaa

SEQ ID NO: 508778 - RNA, 19 nt, Artificial Sequence
  Description of Artificial Sequence: Synthetic oligonucleotide
gauaguuggccgaggaucc

SEQ ID NO: 508779 - RNA, 19 nt, Artificial Sequence
  Description of Artificial Sequence: Synthetic oligonucleotide
ugauaguuggccgaggauc

SEQ ID NO: 508780 - RNA, 19 nt, Artificial Sequence
  Description of Artificial Sequence: Synthetic oligonucleotide
uuaagagcauaaguaguug

SEQ ID NO: 508781 - RNA, 19 nt, Artificial Sequence
  Description of Artificial Sequence: Synthetic oligonucleotide
gcauugaacacacaaagca

SEQ ID NO: 508782 - RNA, 19 nt, Artificial Sequence
  Description of Artificial Sequence: Synthetic oligonucleotide
caaugauauguggacaugc

SEQ ID NO: 508783 - RNA, 19 nt, Artificial Sequence
  Description of Artificial Sequence: Synthetic oligonucleotide
auauggguuccuuuggcca

SEQ ID NO: 508784 - RNA, 19 nt, Artificial Sequence
  Description of Artificial Sequence: Synthetic oligonucleotide
uuaccuguacucugggccc

SEQ ID NO: 508785 - RNA, 19 nt, Artificial Sequence
  Description of Artificial Sequence: Synthetic oligonucleotide
uugcacuacugcaucagca

SEQ ID NO: 508786 - RNA, 19 nt, Artificial Sequence
  Description of Artificial Sequence: Synthetic oligonucleotide
augcugguaacacuaauau

SEQ ID NO: 508787 - RNA, 19 nt, Artificial Sequence
  Description of Artificial Sequence: Synthetic oligonucleotide
ucgguaauugaugauuucu

SEQ ID NO: 508788 - RNA, 19 nt, Artificial Sequence
  Description of Artificial Sequence: Synthetic oligonucleotide
auaggucggauaucuugac

SEQ ID NO: 508789 - RNA, 19 nt, Artificial Sequence
  Description of Artificial Sequence: Synthetic oligonucleotide
agcauaaguaguuguauuu

SEQ ID NO: 508790 - RNA, 19 nt, Artificial Sequence
  Description of Artificial Sequence: Synthetic oligonucleotide
ggauuuagcagcucauucc

SEQ ID NO: 508791 - RNA, 19 nt, Artificial Sequence
  Description of Artificial Sequence: Synthetic oligonucleotide
ucauagccguccaaugacc

SEQ ID NO: 508792 - RNA, 19 nt, Artificial Sequence
  Description of Artificial Sequence: Synthetic oligonucleotide
aaugauauguggacaugca

SEQ ID NO: 508793 - RNA, 19 nt, Artificial Sequence
  Description of Artificial Sequence: Synthetic oligonucleotide
ucuacagcacugugacugg

SEQ ID NO: 508794 - RNA, 19 nt, Artificial Sequence
  Description of Artificial Sequence: Synthetic oligonucleotide
acaccggugguauucuggg

SEQ ID NO: 508795 - RNA, 19 nt, Artificial Sequence
  Description of Artificial Sequence: Synthetic oligonucleotide
aaggacucgccccauucca

SEQ ID NO: 508796 - RNA, 19 nt, Artificial Sequence
  Description of Artificial Sequence: Synthetic oligonucleotide
agcuaucgcuaucagaccu

SEQ ID NO: 508797 - RNA, 19 nt, Artificial Sequence
  Description of Artificial Sequence: Synthetic oligonucleotide
ugacuauacagaucaacuu

SEQ ID NO: 508798 - RNA, 19 nt, Artificial Sequence
  Description of Artificial Sequence: Synthetic oligonucleotide
uugauugugggguaaccau

SEQ ID NO: 508799 - RNA, 19 nt, Artificial Sequence
  Description of Artificial Sequence: Synthetic oligonucleotide
aucauuacagaaaauguua

SEQ ID NO: 508800 - RNA, 19 nt, Artificial Sequence
  Description of Artificial Sequence: Synthetic oligonucleotide
gaugauaguuggccgagga

SEQ ID NO: 508801 - RNA, 19 nt, Artificial Sequence
  Description of Artificial Sequence: Synthetic oligonucleotide
aaauaagcagacagccuug

SEQ ID NO: 508802 - RNA, 19 nt, Artificial Sequence
  Description of Artificial Sequence: Synthetic oligonucleotide
aagcagcuaucacucacug

SEQ ID NO: 508803 - RNA, 19 nt, Artificial Sequence
  Description of Artificial Sequence: Synthetic oligonucleotide
auuuaucccacuacggucu

SEQ ID NO: 508804 - RNA, 19 nt, Artificial Sequence
  Description of Artificial Sequence: Synthetic oligonucleotide
ugcacuacugcaucagcac

SEQ ID NO: 508805 - RNA, 19 nt, Artificial Sequence
  Description of Artificial Sequence: Synthetic oligonucleotide
aauucgcacuucaaguucu

SEQ ID NO: 508806 - RNA, 19 nt, Artificial Sequence
  Description of Artificial Sequence: Synthetic oligonucleotide
uuccacuugcacuacugca

SEQ ID NO: 508807 - RNA, 19 nt, Artificial Sequence
  Description of Artificial Sequence: Synthetic oligonucleotide
cuaucacucacugugagga

SEQ ID NO: 508808 - RNA, 19 nt, Artificial Sequence
  Description of Artificial Sequence: Synthetic oligonucleotide
uacuaaaagcuaucgcuau

SEQ ID NO: 508809 - RNA, 19 nt, Artificial Sequence
  Description of Artificial Sequence: Synthetic oligonucleotide
ggagguagcaucaauaauc

SEQ ID NO: 508810 - RNA, 19 nt, Artificial Sequence
  Description of Artificial Sequence: Synthetic oligonucleotide
uaugcugauauagucccac

SEQ ID NO: 508811 - RNA, 19 nt, Artificial Sequence
  Description of Artificial Sequence: Synthetic oligonucleotide
acacuaauaucuguacaag

SEQ ID NO: 508812 - RNA, 19 nt, Artificial Sequence
  Description of Artificial Sequence: Synthetic oligonucleotide
caguuuuacaucacacgac

SEQ ID NO: 508813 - RNA, 19 nt, Artificial Sequence
  Description of Artificial Sequence: Synthetic oligonucleotide
ucgauaccccuccugaggu

SEQ ID NO: 508814 - RNA, 19 nt, Artificial Sequence
  Description of Artificial Sequence: Synthetic oligonucleotide
uguggacaugcaucaaagc

SEQ ID NO: 508815 - RNA, 19 nt, Artificial Sequence
  Description of Artificial Sequence: Synthetic oligonucleotide
ucggauaucuugaccuggc

SEQ ID NO: 508816 - RNA, 19 nt, Artificial Sequence
  Description of Artificial Sequence: Synthetic oligonucleotide
uucuuggugaugccaaguc

SEQ ID NO: 508817 - RNA, 19 nt, Artificial Sequence
  Description of Artificial Sequence: Synthetic oligonucleotide
acuacggucuucugcaaga

SEQ ID NO: 508818 - RNA, 19 nt, Artificial Sequence
  Description of Artificial Sequence: Synthetic oligonucleotide
uuuaaugucauggccgaua

SEQ ID NO: 508819 - RNA, 19 nt, Artificial Sequence
  Description of Artificial Sequence: Synthetic oligonucleotide
ugcaaauguuguuggcaag

SEQ ID NO: 508820 - RNA, 19 nt, Artificial Sequence
  Description of Artificial Sequence: Synthetic oligonucleotide
ugauauagucccacccaac

SEQ ID NO: 508821 - RNA, 19 nt, Artificial Sequence
  Description of Artificial Sequence: Synthetic oligonucleotide
ugauuaguucgguaucuuc

SEQ ID NO: 508822 - RNA, 19 nt, Artificial Sequence
  Description of Artificial Sequence: Synthetic oligonucleotide
gaauagaguugucuguuaa

SEQ ID NO: 508823 - RNA, 19 nt, Artificial Sequence
  Description of Artificial Sequence: Synthetic oligonucleotide
gauaggucggauaucuuga

SEQ ID NO: 508824 - RNA, 19 nt, Artificial Sequence
  Description of Artificial Sequence: Synthetic oligonucleotide
caaaauucgcacuucaagu

SEQ ID NO: 508825 - RNA, 19 nt, Artificial Sequence
  Description of Artificial Sequence: Synthetic oligonucleotide
uggaguuccacguacuguu

SEQ ID NO: 508826 - RNA, 19 nt, Artificial Sequence
  Description of Artificial Sequence: Synthetic oligonucleotide
auugaacacacaaagcaau

SEQ ID NO: 508827 - RNA, 19 nt, Artificial Sequence
  Description of Artificial Sequence: Synthetic oligonucleotide
ugcacauaaacacgagaua

SEQ ID NO: 508828 - RNA, 19 nt, Artificial Sequence
  Description of Artificial Sequence: Synthetic oligonucleotide
caaguguugccuacacuag

SEQ ID NO: 508829 - RNA, 19 nt, Artificial Sequence
  Description of Artificial Sequence: Synthetic oligonucleotide
cuugauuaagagcauaagu

SEQ ID NO: 508830 - RNA, 19 nt, Artificial Sequence
  Description of Artificial Sequence: Synthetic oligonucleotide
guugacuauacagaucaac

SEQ ID NO: 508831 - RNA, 19 nt, Artificial Sequence
  Description of Artificial Sequence: Synthetic oligonucleotide
gauuaccuguacucugggc

SEQ ID NO: 508832 - RNA, 19 nt, Artificial Sequence
  Description of Artificial Sequence: Synthetic oligonucleotide
agcuaucacucacugugag

SEQ ID NO: 508833 - RNA, 19 nt, Artificial Sequence
  Description of Artificial Sequence: Synthetic oligonucleotide
uugaugauaguuggccgag

SEQ ID NO: 508834 - RNA, 19 nt, Artificial Sequence
  Description of Artificial Sequence: Synthetic oligonucleotide
auuaagagcauaaguaguu

SEQ ID NO: 508835 - RNA, 19 nt, Artificial Sequence
  Description of Artificial Sequence: Synthetic oligonucleotide
ucucgguaauugaugauuu

SEQ ID NO: 508836 - RNA, 19 nt, Artificial Sequence
  Description of Artificial Sequence: Synthetic oligonucleotide
acgagauacaugauaaaga

SEQ ID NO: 508837 - RNA, 19 nt, Artificial Sequence
  Description of Artificial Sequence: Synthetic oligonucleotide
ugugacacccacaguugca

SEQ ID NO: 508838 - RNA, 19 nt, Artificial Sequence
  Description of Artificial Sequence: Synthetic oligonucleotide
uugugggguaaccauguuc

SEQ ID NO: 508839 - RNA, 19 nt, Artificial Sequence
  Description of Artificial Sequence: Synthetic oligonucleotide
ucccugauuaguucgguau

SEQ ID NO: 508840 - RNA, 19 nt, Artificial Sequence
  Description of Artificial Sequence: Synthetic oligonucleotide
ucccacuacggucuucugc

SEQ ID NO: 508841 - RNA, 19 nt, Artificial Sequence
  Description of Artificial Sequence: Synthetic oligonucleotide
aaaagguauuuaaauucau

SEQ ID NO: 508842 - RNA, 19 nt, Artificial Sequence
  Description of Artificial Sequence: Synthetic oligonucleotide
ucgaaucuuuccugguaag

SEQ ID NO: 508843 - RNA, 19 nt, Artificial Sequence
  Description of Artificial Sequence: Synthetic oligonucleotide
guugcauauuacaggauac

SEQ ID NO: 508844 - RNA, 19 nt, Artificial Sequence
  Description of Artificial Sequence: Synthetic oligonucleotide
acuccccucuuuuaauguc

SEQ ID NO: 508845 - RNA, 19 nt, Artificial Sequence
  Description of Artificial Sequence: Synthetic oligonucleotide
gcaguuaugaagcauacua

SEQ ID NO: 508846 - RNA, 19 nt, Artificial Sequence
  Description of Artificial Sequence: Synthetic oligonucleotide
gaagcauacuaagaaggga

SEQ ID NO: 508847 - RNA, 19 nt, Artificial Sequence
  Description of Artificial Sequence: Synthetic oligonucleotide
cauugaacacacaaagcaa

SEQ ID NO: 508848 - RNA, 19 nt, Artificial Sequence
  Description of Artificial Sequence: Synthetic oligonucleotide
augauauguggacaugcau

SEQ ID NO: 508849 - RNA, 19 nt, Artificial Sequence
  Description of Artificial Sequence: Synthetic oligonucleotide
uuaguucgguaucuuccac

SEQ ID NO: 508850 - RNA, 19 nt, Artificial Sequence
  Description of Artificial Sequence: Synthetic oligonucleotide
auggucgugguucgugagg

SEQ ID NO: 508851 - RNA, 19 nt, Artificial Sequence
  Description of Artificial Sequence: Synthetic oligonucleotide
uugaccgauugcugucucg

SEQ ID NO: 508852 - RNA, 19 nt, Artificial Sequence
  Description of Artificial Sequence: Synthetic oligonucleotide
uggccgauaggucggauau

SEQ ID NO: 508853 - RNA, 19 nt, Artificial Sequence
  Description of Artificial Sequence: Synthetic oligonucleotide
uugcauauuacaggauaca

SEQ ID NO: 508854 - RNA, 19 nt, Artificial Sequence
  Description of Artificial Sequence: Synthetic oligonucleotide
guugcaaggagaccaaucu

SEQ ID NO: 508855 - RNA, 19 nt, Artificial Sequence
  Description of Artificial Sequence: Synthetic oligonucleotide
gauuaagagcauaaguagu

SEQ ID NO: 508856 - RNA, 19 nt, Artificial Sequence
  Description of Artificial Sequence: Synthetic oligonucleotide
cugaauuguugcuagaagu

SEQ ID NO: 508857 - RNA, 19 nt, Artificial Sequence
  Description of Artificial Sequence: Synthetic oligonucleotide
ugauacccucauucaaggc

SEQ ID NO: 508858 - RNA, 19 nt, Artificial Sequence
  Description of Artificial Sequence: Synthetic oligonucleotide
ugaugccaagucaguauac

SEQ ID NO: 508859 - RNA, 19 nt, Artificial Sequence
  Description of Artificial Sequence: Synthetic oligonucleotide
acuaagaagggaaauccaa

SEQ ID NO: 508860 - RNA, 19 nt, Artificial Sequence
  Description of Artificial Sequence: Synthetic oligonucleotide
uguugcuagaaguguugac

SEQ ID NO: 508861 - RNA, 19 nt, Artificial Sequence
  Description of Artificial Sequence: Synthetic oligonucleotide
ucaaugauauguggacaug

SEQ ID NO: 508862 - RNA, 19 nt, Artificial Sequence
  Description of Artificial Sequence: Synthetic oligonucleotide
aguuacugccugcgaguac

SEQ ID NO: 508863 - RNA, 19 nt, Artificial Sequence
  Description of Artificial Sequence: Synthetic oligonucleotide
auauagucccacccaacaa

SEQ ID NO: 508864 - RNA, 19 nt, Artificial Sequence
  Description of Artificial Sequence: Synthetic oligonucleotide
gauggucgugguucgugag

SEQ ID NO: 508865 - RNA, 19 nt, Artificial Sequence
  Description of Artificial Sequence: Synthetic oligonucleotide
aauuugcaagaaaggaaaa

SEQ ID NO: 508866 - RNA, 19 nt, Artificial Sequence
  Description of Artificial Sequence: Synthetic oligonucleotide
ugcugucucgaaucuuucc

SEQ ID NO: 508867 - RNA, 19 nt, Artificial Sequence
  Description of Artificial Sequence: Synthetic oligonucleotide
augucagaggaaaaggaga

SEQ ID NO: 508868 - RNA, 19 nt, Artificial Sequence
  Description of Artificial Sequence: Synthetic oligonucleotide
auagucccacccaacaaag

SEQ ID NO: 508869 - RNA, 19 nt, Artificial Sequence
  Description of Artificial Sequence: Synthetic oligonucleotide
ucucgaaucuuuccuggua

SEQ ID NO: 508870 - RNA, 19 nt, Artificial Sequence
  Description of Artificial Sequence: Synthetic oligonucleotide
cuacuaaaagcuaucgcua

SEQ ID NO: 508871 - RNA, 19 nt, Artificial Sequence
  Description of Artificial Sequence: Synthetic oligonucleotide
uggacccuugauuucuucu

SEQ ID NO: 508872 - RNA, 19 nt, Artificial Sequence
  Description of Artificial Sequence: Synthetic oligonucleotide
cugccugcgaguacugugc

SEQ ID NO: 508873 - RNA, 19 nt, Artificial Sequence
  Description of Artificial Sequence: Synthetic oligonucleotide
guaucauuacagaaaaugu

SEQ ID NO: 508874 - RNA, 19 nt, Artificial Sequence
  Description of Artificial Sequence: Synthetic oligonucleotide
cugucuacuaaaagcuauc

SEQ ID NO: 508875 - RNA, 19 nt, Artificial Sequence
  Description of Artificial Sequence: Synthetic oligonucleotide
uaaagcaguuaugaagcau

SEQ ID NO: 508876 - RNA, 19 nt, Artificial Sequence
  Description of Artificial Sequence: Synthetic oligonucleotide
guugccuacacuaguauaa

SEQ ID NO: 508877 - RNA, 19 nt, Artificial Sequence
  Description of Artificial Sequence: Synthetic oligonucleotide
uguugccuacacuaguaua

SEQ ID NO: 508878 - RNA, 19 nt, Artificial Sequence
  Description of Artificial Sequence: Synthetic oligonucleotide
uaucccacuacggucuucu

SEQ ID NO: 508879 - RNA, 19 nt, Artificial Sequence
  Description of Artificial Sequence: Synthetic oligonucleotide
augaaugcugguaacacua

SEQ ID NO: 508880 - RNA, 19 nt, Artificial Sequence
  Description of Artificial Sequence: Synthetic oligonucleotide
uguugacaugacagcgacc

SEQ ID NO: 508881 - RNA, 19 nt, Artificial Sequence
  Description of Artificial Sequence: Synthetic oligonucleotide
uggagguagcaucaauaau

SEQ ID NO: 508882 - RNA, 19 nt, Artificial Sequence
  Description of Artificial Sequence: Synthetic oligonucleotide
aagagcauaaguaguugua

SEQ ID NO: 508883 - RNA, 19 nt, Artificial Sequence
  Description of Artificial Sequence: Synthetic oligonucleotide
acagcgaccacaggaaacu

SEQ ID NO: 508884 - RNA, 19 nt, Artificial Sequence
  Description of Artificial Sequence: Synthetic oligonucleotide
agagcauaaguaguuguau

SEQ ID NO: 508885 - RNA, 19 nt, Artificial Sequence
  Description of Artificial Sequence: Synthetic oligonucleotide
ugggcgaggguccaguuuu

SEQ ID NO: 508886 - RNA, 19 nt, Artificial Sequence
  Description of Artificial Sequence: Synthetic oligonucleotide
aaacgcacuccccucuuuu

SEQ ID NO: 508887 - RNA, 19 nt, Artificial Sequence
  Description of Artificial Sequence: Synthetic oligonucleotide
uaaacacgagauacaugau

SEQ ID NO: 508888 - RNA, 19 nt, Artificial Sequence
  Description of Artificial Sequence: Synthetic oligonucleotide
ugcugguaacacuaauauc

SEQ ID NO: 508889 - RNA, 19 nt, Artificial Sequence
  Description of Artificial Sequence: Synthetic oligonucleotide
gugguauucugggcgaggg

SEQ ID NO: 508890 - RNA, 19 nt, Artificial Sequence
  Description of Artificial Sequence: Synthetic oligonucleotide
aucugguacuaucuuguau

SEQ ID NO: 508891 - RNA, 19 nt, Artificial Sequence
  Description of Artificial Sequence: Synthetic oligonucleotide
acuugcacuacugcaucag

SEQ ID NO: 508892 - RNA, 19 nt, Artificial Sequence
  Description of Artificial Sequence: Synthetic oligonucleotide
gacaugcgaugucuucuag

SEQ ID NO: 508893 - RNA, 19 nt, Artificial Sequence
  Description of Artificial Sequence: Synthetic oligonucleotide
aucugauuaccuguacucu

SEQ ID NO: 508894 - RNA, 19 nt, Artificial Sequence
  Description of Artificial Sequence: Synthetic oligonucleotide
cugauucccugauuaguuc

SEQ ID NO: 508895 - RNA, 19 nt, Artificial Sequence
  Description of Artificial Sequence: Synthetic oligonucleotide
gguugucuccuacaauucc

SEQ ID NO: 508896 - RNA, 19 nt, Artificial Sequence
  Description of Artificial Sequence: Synthetic oligonucleotide
agaucaacuuuuauccaga

SEQ ID NO: 508897 - RNA, 19 nt, Artificial Sequence
  Description of Artificial Sequence: Synthetic oligonucleotide
gucggauaucuugaccugg

SEQ ID NO: 508898 - RNA, 19 nt, Artificial Sequence
  Description of Artificial Sequence: Synthetic oligonucleotide
uagccguccaaugaccaug

SEQ ID NO: 508899 - RNA, 19 nt, Artificial Sequence
  Description of Artificial Sequence: Synthetic oligonucleotide
ugaugauaguuggccgagg

SEQ ID NO: 508900 - RNA, 19 nt, Artificial Sequence
  Description of Artificial Sequence: Synthetic oligonucleotide
uccaaguguugccuacacu

SEQ ID NO: 508901 - RNA, 19 nt, Artificial Sequence
  Description of Artificial Sequence: Synthetic oligonucleotide
caucauagccguccaauga

SEQ ID NO: 508902 - RNA, 19 nt, Artificial Sequence
  Description of Artificial Sequence: Synthetic oligonucleotide
guauacaccggugguauuc

SEQ ID NO: 508903 - RNA, 19 nt, Artificial Sequence
  Description of Artificial Sequence: Synthetic oligonucleotide
gauuggagcaccuguugua

SEQ ID NO: 508904 - RNA, 19 nt, Artificial Sequence
  Description of Artificial Sequence: Synthetic oligonucleotide
uccugguaagaggucaucu

SEQ ID NO: 508905 - RNA, 19 nt, Artificial Sequence
  Description of Artificial Sequence: Synthetic oligonucleotide
uauacaccggugguauucu

SEQ ID NO: 508906 - RNA, 19 nt, Artificial Sequence
  Description of Artificial Sequence: Synthetic oligonucleotide
uaaucagaauagaguuguc

SEQ ID NO: 508907 - RNA, 19 nt, Artificial Sequence
  Description of Artificial Sequence: Synthetic oligonucleotide
caguuaugaagcauacuaa

SEQ ID NO: 508908 - RNA, 19 nt, Artificial Sequence
  Description of Artificial Sequence: Synthetic oligonucleotide
gcuaucacucacugugagg

SEQ ID NO: 508909 - RNA, 19 nt, Artificial Sequence
  Description of Artificial Sequence: Synthetic oligonucleotide
guaaagcaguuaugaagca

SEQ ID NO: 508910 - RNA, 19 nt, Artificial Sequence
  Description of Artificial Sequence: Synthetic oligonucleotide
agaauagaguugucuguua

SEQ ID NO: 508911 - RNA, 19 nt, Artificial Sequence
  Description of Artificial Sequence: Synthetic oligonucleotide
caucgauaccccuccugag

SEQ ID NO: 508912 - RNA, 19 nt, Artificial Sequence
  Description of Artificial Sequence: Synthetic oligonucleotide
ucgguaucuuccacuugca

SEQ ID NO: 508913 - RNA, 19 nt, Artificial Sequence
  Description of Artificial Sequence: Synthetic oligonucleotide
uggucgugguucgugagga

SEQ ID NO: 508914 - RNA, 19 nt, Artificial Sequence
  Description of Artificial Sequence: Synthetic oligonucleotide
ugcuagaaguguugaccga

SEQ ID NO: 508915 - RNA, 19 nt, Artificial Sequence
  Description of Artificial Sequence: Synthetic oligonucleotide
aucucgguaauugaugauu

SEQ ID NO: 508916 - RNA, 19 nt, Artificial Sequence
  Description of Artificial Sequence: Synthetic oligonucleotide
ugacacccacaguugcaag

SEQ ID NO: 508917 - RNA, 19 nt, Artificial Sequence
  Description of Artificial Sequence: Synthetic oligonucleotide
uaucuuguaugcugauaua

SEQ ID NO: 508918 - RNA, 19 nt, Artificial Sequence
  Description of Artificial Sequence: Synthetic oligonucleotide
ugaugacaucagcacggcu

SEQ ID NO: 508919 - RNA, 19 nt, Artificial Sequence
  Description of Artificial Sequence: Synthetic oligonucleotide
acccugccaaaauggaucu

SEQ ID NO: 508920 - RNA, 19 nt, Artificial Sequence
  Description of Artificial Sequence: Synthetic oligonucleotide
gucauggccgauaggucgg

SEQ ID NO: 508921 - RNA, 19 nt, Artificial Sequence
  Description of Artificial Sequence: Synthetic oligonucleotide
ucuccuguuggugaccauc

SEQ ID NO: 508922 - RNA, 19 nt, Artificial Sequence
  Description of Artificial Sequence: Synthetic oligonucleotide
aaaacgcacuccccucuuu

SEQ ID NO: 508923 - RNA, 19 nt, Artificial Sequence
  Description of Artificial Sequence: Synthetic oligonucleotide
cuuuccugguaagagguca

SEQ ID NO: 508924 - RNA, 19 nt, Artificial Sequence
  Description of Artificial Sequence: Synthetic oligonucleotide
gucccacccaacaaagaag

SEQ ID NO: 508925 - RNA, 19 nt, Artificial Sequence
  Description of Artificial Sequence: Synthetic oligonucleotide
gacagcgaccacaggaaac

SEQ ID NO: 508926 - RNA, 19 nt, Artificial Sequence
  Description of Artificial Sequence: Synthetic oligonucleotide
aucagacggcugcucaucu

SEQ ID NO: 508927 - RNA, 19 nt, Artificial Sequence
  Description of Artificial Sequence: Synthetic oligonucleotide
ugacagcgaccacaggaaa

SEQ ID NO: 508928 - RNA, 19 nt, Artificial Sequence
  Description of Artificial Sequence: Synthetic oligonucleotide
accgauugcugucucgaau

SEQ ID NO: 508929 - RNA, 19 nt, Artificial Sequence
  Description of Artificial Sequence: Synthetic oligonucleotide
gccguugcauauuacagga

SEQ ID NO: 508930 - RNA, 19 nt, Artificial Sequence
  Description of Artificial Sequence: Synthetic oligonucleotide
cauagccguccaaugacca

SEQ ID NO: 508931 - RNA, 19 nt, Artificial Sequence
  Description of Artificial Sequence: Synthetic oligonucleotide
gcugauauagucccaccca

SEQ ID NO: 508932 - RNA, 19 nt, Artificial Sequence
  Description of Artificial Sequence: Synthetic oligonucleotide
guauucugggcgagggucc

SEQ ID NO: 508933 - RNA, 19 nt, Artificial Sequence
  Description of Artificial Sequence: Synthetic oligonucleotide
auuggagcaccuguuguaa

SEQ ID NO: 508934 - RNA, 19 nt, Artificial Sequence
  Description of Artificial Sequence: Synthetic oligonucleotide
agguugauugugggguaac

SEQ ID NO: 508935 - RNA, 19 nt, Artificial Sequence
  Description of Artificial Sequence: Synthetic oligonucleotide
cucgaaucuuuccugguaa

SEQ ID NO: 508936 - RNA, 19 nt, Artificial Sequence
  Description of Artificial Sequence: Synthetic oligonucleotide
ccugaauuguugcuagaag

SEQ ID NO: 508937 - RNA, 19 nt, Artificial Sequence
  Description of Artificial Sequence: Synthetic oligonucleotide
uguugacuauacagaucaa

SEQ ID NO: 508938 - RNA, 19 nt, Artificial Sequence
  Description of Artificial Sequence: Synthetic oligonucleotide
uuacaccaucaauauccaa

SEQ ID NO: 508939 - RNA, 19 nt, Artificial Sequence
  Description of Artificial Sequence: Synthetic oligonucleotide
guucuugcggcagggcagg

SEQ ID NO: 508940 - RNA, 19 nt, Artificial Sequence
  Description of Artificial Sequence: Synthetic oligonucleotide
cauucaaggcauugaguaa

SEQ ID NO: 508941 - RNA, 19 nt, Artificial Sequence
  Description of Artificial Sequence: Synthetic oligonucleotide
cacuacggucuucugcaag

SEQ ID NO: 508942 - RNA, 19 nt, Artificial Sequence
  Description of Artificial Sequence: Synthetic oligonucleotide
cugauauagucccacccaa

SEQ ID NO: 508943 - RNA, 19 nt, Artificial Sequence
  Description of Artificial Sequence: Synthetic oligonucleotide
cucgguaauugaugauuuc

SEQ ID NO: 508944 - RNA, 19 nt, Artificial Sequence
  Description of Artificial Sequence: Synthetic oligonucleotide
aacgcacuccccucuuuua

SEQ ID NO: 508945 - RNA, 19 nt, Artificial Sequence
  Description of Artificial Sequence: Synthetic oligonucleotide
acacgggauuugauggucg

SEQ ID NO: 508946 - RNA, 19 nt, Artificial Sequence
  Description of Artificial Sequence: Synthetic oligonucleotide
acgacaaccuggcuuugau

SEQ ID NO: 508947 - RNA, 19 nt, Artificial Sequence
  Description of Artificial Sequence: Synthetic oligonucleotide
uuacugccugcgaguacug

SEQ ID NO: 508948 - RNA, 19 nt, Artificial Sequence
  Description of Artificial Sequence: Synthetic oligonucleotide
augucauggccgauagguc

SEQ ID NO: 508949 - RNA, 19 nt, Artificial Sequence
  Description of Artificial Sequence: Synthetic oligonucleotide
auaauccauuggcgcugcg

SEQ ID NO: 508950 - RNA, 19 nt, Artificial Sequence
  Description of Artificial Sequence: Synthetic oligonucleotide
ugccugcgaguacugugcc

SEQ ID NO: 508951 - RNA, 19 nt, Artificial Sequence
  Description of Artificial Sequence: Synthetic oligonucleotide
gauugugggguaaccaugu

SEQ ID NO: 508952 - RNA, 19 nt, Artificial Sequence
  Description of Artificial Sequence: Synthetic oligonucleotide
cuagcugugccguugcaua

SEQ ID NO: 508953 - RNA, 19 nt, Artificial Sequence
  Description of Artificial Sequence: Synthetic oligonucleotide
gguagcaucaauaauccau

SEQ ID NO: 508954 - RNA, 19 nt, Artificial Sequence
  Description of Artificial Sequence: Synthetic oligonucleotide
agacaugcgaugucuucua

SEQ ID NO: 508955 - RNA, 19 nt, Artificial Sequence
  Description of Artificial Sequence: Synthetic oligonucleotide
ccaaguguugccuacacua

SEQ ID NO: 508956 - RNA, 19 nt, Artificial Sequence
  Description of Artificial Sequence: Synthetic oligonucleotide
gugaugccaagucaguaua

SEQ ID NO: 508957 - RNA, 19 nt, Artificial Sequence
  Description of Artificial Sequence: Synthetic oligonucleotide
acacgagauacaugauaaa

SEQ ID NO: 508958 - RNA, 19 nt, Artificial Sequence
  Description of Artificial Sequence: Synthetic oligonucleotide
agcagcuaucacucacugu

SEQ ID NO: 508959 - RNA, 19 nt, Artificial Sequence
  Description of Artificial Sequence: Synthetic oligonucleotide
guacugugccacgaggcug

SEQ ID NO: 508960 - RNA, 19 nt, Artificial Sequence
  Description of Artificial Sequence: Synthetic oligonucleotide
cuccccucuuuuaauguca

SEQ ID NO: 508961 - RNA, 19 nt, Artificial Sequence
  Description of Artificial Sequence: Synthetic oligonucleotide
guuacugccugcgaguacu

SEQ ID NO: 508962 - RNA, 19 nt, Artificial Sequence
  Description of Artificial Sequence: Synthetic oligonucleotide
ccgaggauccaagauaccc

SEQ ID NO: 508963 - RNA, 19 nt, Artificial Sequence
  Description of Artificial Sequence: Synthetic oligonucleotide
uccccucuuuuaaugucau

SEQ ID NO: 508964 - RNA, 19 nt, Artificial Sequence
  Description of Artificial Sequence: Synthetic oligonucleotide
gugcacauaaacacgagau

SEQ ID NO: 508965 - RNA, 19 nt, Artificial Sequence
  Description of Artificial Sequence: Synthetic oligonucleotide
ccugcaccaaaauucgcac

SEQ ID NO: 508966 - RNA, 19 nt, Artificial Sequence
  Description of Artificial Sequence: Synthetic oligonucleotide
auagccguccaaugaccau

SEQ ID NO: 508967 - RNA, 19 nt, Artificial Sequence
  Description of Artificial Sequence: Synthetic oligonucleotide
agcauacuaagaagggaaa

SEQ ID NO: 508968 - RNA, 19 nt, Artificial Sequence
  Description of Artificial Sequence: Synthetic oligonucleotide
agggaugguucuugcggca

SEQ ID NO: 508969 - RNA, 19 nt, Artificial Sequence
  Description of Artificial Sequence: Synthetic oligonucleotide
uucccugauuaguucggua

SEQ ID NO: 508970 - RNA, 19 nt, Artificial Sequence
  Description of Artificial Sequence: Synthetic oligonucleotide
caucagcacggcugauacc

SEQ ID NO: 508971 - RNA, 19 nt, Artificial Sequence
  Description of Artificial Sequence: Synthetic oligonucleotide
ccuugguaauaucuacagc

SEQ ID NO: 508972 - RNA, 19 nt, Artificial Sequence
  Description of Artificial Sequence: Synthetic oligonucleotide
cccuguugacaugacagcg

SEQ ID NO: 508973 - RNA, 19 nt, Artificial Sequence
  Description of Artificial Sequence: Synthetic oligonucleotide
ccgauugcugucucgaauc

SEQ ID NO: 508974 - RNA, 19 nt, Artificial Sequence
  Description of Artificial Sequence: Synthetic oligonucleotide
auacaccggugguauucug

SEQ ID NO: 508975 - RNA, 19 nt, Artificial Sequence
  Description of Artificial Sequence: Synthetic oligonucleotide
gagcauaaguaguuguauu

SEQ ID NO: 508976 - RNA, 19 nt, Artificial Sequence
  Description of Artificial Sequence: Synthetic oligonucleotide
ccuacaauucccagguuga

SEQ ID NO: 508977 - RNA, 19 nt, Artificial Sequence
  Description of Artificial Sequence: Synthetic oligonucleotide
caugaaugcugguaacacu

SEQ ID NO: 508978 - RNA, 19 nt, Artificial Sequence
  Description of Artificial Sequence: Synthetic oligonucleotide
gcauugaguaagucaucug

SEQ ID NO: 508979 - RNA, 19 nt, Artificial Sequence
  Description of Artificial Sequence: Synthetic oligonucleotide
caccggagucaucuccagg

SEQ ID NO: 508980 - RNA, 19 nt, Artificial Sequence
  Description of Artificial Sequence: Synthetic oligonucleotide
ggucggauaucuugaccug

SEQ ID NO: 508981 - RNA, 19 nt, Artificial Sequence
  Description of Artificial Sequence: Synthetic oligonucleotide
gguccaguuuuacaucaca

SEQ ID NO: 508982 - RNA, 19 nt, Artificial Sequence
  Description of Artificial Sequence: Synthetic oligonucleotide
uccgcgcagucacuccucu

SEQ ID NO: 508983 - RNA, 19 nt, Artificial Sequence
  Description of Artificial Sequence: Synthetic oligonucleotide
cacaggggauuggagcacc

SEQ ID NO: 508984 - RNA, 19 nt, Artificial Sequence
  Description of Artificial Sequence: Synthetic oligonucleotide
ggccgaggauccaagauac

SEQ ID NO: 508985 - RNA, 19 nt, Artificial Sequence
  Description of Artificial Sequence: Synthetic oligonucleotide
aggcauugaguaagucauc

SEQ ID NO: 508986 - RNA, 19 nt, Artificial Sequence
  Description of Artificial Sequence: Synthetic oligonucleotide
cugcgaguacugugccacg

SEQ ID NO: 508987 - RNA, 19 nt, Artificial Sequence
  Description of Artificial Sequence: Synthetic oligonucleotide
cccacuacggucuucugca

SEQ ID NO: 508988 - RNA, 19 nt, Artificial Sequence
  Description of Artificial Sequence: Synthetic oligonucleotide
guacaagaucagucuuuga

SEQ ID NO: 508989 - RNA, 19 nt, Artificial Sequence
  Description of Artificial Sequence: Synthetic oligonucleotide
cgggauuugauggucgugg

SEQ ID NO: 508990 - RNA, 19 nt, Artificial Sequence
  Description of Artificial Sequence: Synthetic oligonucleotide
gguugauugugggguaacc

SEQ ID NO: 508991 - RNA, 19 nt, Artificial Sequence
  Description of Artificial Sequence: Synthetic oligonucleotide
auccaguuacugccugcga

SEQ ID NO: 508992 - RNA, 19 nt, Artificial Sequence
  Description of Artificial Sequence: Synthetic oligonucleotide
ccaucucgguaauugauga

SEQ ID NO: 508993 - RNA, 19 nt, Artificial Sequence
  Description of Artificial Sequence: Synthetic oligonucleotide
auggccgauaggucggaua

SEQ ID NO: 508994 - RNA, 19 nt, Artificial Sequence
  Description of Artificial Sequence: Synthetic oligonucleotide
guucaagauguugacuaua

SEQ ID NO: 508995 - RNA, 19 nt, Artificial Sequence
  Description of Artificial Sequence: Synthetic oligonucleotide
caucagacggcugcucauc

SEQ ID NO: 508996 - RNA, 19 nt, Artificial Sequence
  Description of Artificial Sequence: Synthetic oligonucleotide
ccggacacgggauuugaug

SEQ ID NO: 508997 - RNA, 19 nt, Artificial Sequence
  Description of Artificial Sequence: Synthetic oligonucleotide
ggugguauucugggcgagg

SEQ ID NO: 508998 - RNA, 19 nt, Artificial Sequence
  Description of Artificial Sequence: Synthetic oligonucleotide
guugaccgauugcugucuc

SEQ ID NO: 508999 - RNA, 19 nt, Artificial Sequence
  Description of Artificial Sequence: Synthetic oligonucleotide
caagauacccugcaucuuu

SEQ ID NO: 509000 - RNA, 19 nt, Artificial Sequence
  Description of Artificial Sequence: Synthetic oligonucleotide
ccugcgaguacugugccac

SEQ ID NO: 509001 - RNA, 19 nt, Artificial Sequence
  Description of Artificial Sequence: Synthetic oligonucleotide
cagcuaucacucacuguga

SEQ ID NO: 509002 - RNA, 19 nt, Artificial Sequence
  Description of Artificial Sequence: Synthetic oligonucleotide
gugacacccacaguugcaa

SEQ ID NO: 509003 - RNA, 19 nt, Artificial Sequence
  Description of Artificial Sequence: Synthetic oligonucleotide
caagcaccggagucaucuc

SEQ ID NO: 509004 - RNA, 19 nt, Artificial Sequence
  Description of Artificial Sequence: Synthetic oligonucleotide
ggcauugaguaagucaucu

SEQ ID NO: 509005 - RNA, 19 nt, Artificial Sequence
  Description of Artificial Sequence: Synthetic oligonucleotide
accccuccugaggugauga

SEQ ID NO: 509006 - RNA, 19 nt, Artificial Sequence
  Description of Artificial Sequence: Synthetic oligonucleotide
cuaucagaccuagcauuga

SEQ ID NO: 509007 - RNA, 19 nt, Artificial Sequence
  Description of Artificial Sequence: Synthetic oligonucleotide
gcucauucccuguugacau

SEQ ID NO: 509008 - RNA, 19 nt, Artificial Sequence
  Description of Artificial Sequence: Synthetic oligonucleotide
gacucgccccauuccaucu

SEQ ID NO: 509009 - RNA, 19 nt, Artificial Sequence
  Description of Artificial Sequence: Synthetic oligonucleotide
auauguggacaugcaucaa

SEQ ID NO: 509010 - RNA, 19 nt, Artificial Sequence
  Description of Artificial Sequence: Synthetic oligonucleotide
cagcacuuaaggaagcauu

SEQ ID NO: 509011 - RNA, 19 nt, Artificial Sequence
  Description of Artificial Sequence: Synthetic oligonucleotide
gccaaaacgcacuccccuc

SEQ ID NO: 509012 - RNA, 19 nt, Artificial Sequence
  Description of Artificial Sequence: Synthetic oligonucleotide
cugugccguugcauauuac

SEQ ID NO: 509013 - RNA, 19 nt, Artificial Sequence
  Description of Artificial Sequence: Synthetic oligonucleotide
ccuguugacaugacagcga

SEQ ID NO: 509014 - RNA, 19 nt, Artificial Sequence
  Description of Artificial Sequence: Synthetic oligonucleotide
gccugcaccaaaauucgca

SEQ ID NO: 509015 - RNA, 19 nt, Artificial Sequence
  Description of Artificial Sequence: Synthetic oligonucleotide
cuagggugagaacuucccu

SEQ ID NO: 509016 - RNA, 19 nt, Artificial Sequence
  Description of Artificial Sequence: Synthetic oligonucleotide
agccguccaaugaccauga

SEQ ID NO: 509017 - RNA, 19 nt, Artificial Sequence
  Description of Artificial Sequence: Synthetic oligonucleotide
accuaccgcugucuacuaa

SEQ ID NO: 509018 - RNA, 19 nt, Artificial Sequence
  Description of Artificial Sequence: Synthetic oligonucleotide
gugccacgaggcugcuagg

SEQ ID NO: 509019 - RNA, 19 nt, Artificial Sequence
  Description of Artificial Sequence: Synthetic oligonucleotide
aucccacuacggucuucug

SEQ ID NO: 509020 - RNA, 19 nt, Artificial Sequence
  Description of Artificial Sequence: Synthetic oligonucleotide
uuaucccacuacggucuuc

SEQ ID NO: 509021 - RNA, 19 nt, Artificial Sequence
  Description of Artificial Sequence: Synthetic oligonucleotide
gggaugguucuugcggcag

SEQ ID NO: 509022 - RNA, 19 nt, Artificial Sequence
  Description of Artificial Sequence: Synthetic oligonucleotide
ggcaccuaccgcugucuac

SEQ ID NO: 509023 - RNA, 19 nt, Artificial Sequence
  Description of Artificial Sequence: Synthetic oligonucleotide
cccugauuaguucgguauc

SEQ ID NO: 509024 - RNA, 19 nt, Artificial Sequence
  Description of Artificial Sequence: Synthetic oligonucleotide
auguuaugguacagaguuu

SEQ ID NO: 509025 - RNA, 19 nt, Artificial Sequence
  Description of Artificial Sequence: Synthetic oligonucleotide
cugcuagggugagaacuuc

SEQ ID NO: 509026 - RNA, 19 nt, Artificial Sequence
  Description of Artificial Sequence: Synthetic oligonucleotide
cagaauagaguugucuguu

SEQ ID NO: 509027 - RNA, 19 nt, Artificial Sequence
  Description of Artificial Sequence: Synthetic oligonucleotide
agcgaccacaggaaacuua

SEQ ID NO: 509028 - RNA, 19 nt, Artificial Sequence
  Description of Artificial Sequence: Synthetic oligonucleotide
ggacucgccccauuccauc

SEQ ID NO: 509029 - RNA, 19 nt, Artificial Sequence
  Description of Artificial Sequence: Synthetic oligonucleotide
caggggauuggagcaccug

SEQ ID NO: 509030 - RNA, 19 nt, Artificial Sequence
  Description of Artificial Sequence: Synthetic oligonucleotide
aguugucuguuaagauuua

SEQ ID NO: 509031 - RNA, 19 nt, Artificial Sequence
  Description of Artificial Sequence: Synthetic oligonucleotide
ggacaagaucuuuaagauu

SEQ ID NO: 509032 - RNA, 19 nt, Artificial Sequence
  Description of Artificial Sequence: Synthetic oligonucleotide
gccgauaggucggauaucu

SEQ ID NO: 509033 - RNA, 19 nt, Artificial Sequence
  Description of Artificial Sequence: Synthetic oligonucleotide
ggacaugcaucaaagcuuu

SEQ ID NO: 509034 - RNA, 19 nt, Artificial Sequence
  Description of Artificial Sequence: Synthetic oligonucleotide
aggcaccuaccgcugucua

SEQ ID NO: 509035 - RNA, 19 nt, Artificial Sequence
  Description of Artificial Sequence: Synthetic oligonucleotide
aggacucgccccauuccau

SEQ ID NO: 509036 - RNA, 19 nt, Artificial Sequence
  Description of Artificial Sequence: Synthetic oligonucleotide
caauucccagguugauugu

SEQ ID NO: 509037 - RNA, 19 nt, Artificial Sequence
  Description of Artificial Sequence: Synthetic oligonucleotide
caguuacugccugcgagua

SEQ ID NO: 509038 - RNA, 19 nt, Artificial Sequence
  Description of Artificial Sequence: Synthetic oligonucleotide
gcugugccguugcauauua

SEQ ID NO: 509039 - RNA, 19 nt, Artificial Sequence
  Description of Artificial Sequence: Synthetic oligonucleotide
cacgggauuugauggucgu

SEQ ID NO: 509040 - RNA, 19 nt, Artificial Sequence
  Description of Artificial Sequence: Synthetic oligonucleotide
cggauaucuugaccuggcc

SEQ ID NO: 509041 - RNA, 19 nt, Artificial Sequence
  Description of Artificial Sequence: Synthetic oligonucleotide
cagguugauugugggguaa

SEQ ID NO: 509042 - RNA, 19 nt, Artificial Sequence
  Description of Artificial Sequence: Synthetic oligonucleotide
cacgacaaccuggcuuuga

SEQ ID NO: 509043 - RNA, 19 nt, Artificial Sequence
  Description of Artificial Sequence: Synthetic oligonucleotide
caucucgguaauugaugau

SEQ ID NO: 509044 - RNA, 19 nt, Artificial Sequence
  Description of Artificial Sequence: Synthetic oligonucleotide
gggauuugauggucguggu

SEQ ID NO: 509045 - RNA, 19 nt, Artificial Sequence
  Description of Artificial Sequence: Synthetic oligonucleotide
gcaccuaccgcugucuacu

SEQ ID NO: 509046 - RNA, 19 nt, Artificial Sequence
  Description of Artificial Sequence: Synthetic oligonucleotide
ccggagucaucuccaggac

SEQ ID NO: 509047 - RNA, 19 nt, Artificial Sequence
  Description of Artificial Sequence: Synthetic oligonucleotide
ggacacgggauuugauggu

SEQ ID NO: 509048 - RNA, 19 nt, Artificial Sequence
  Description of Artificial Sequence: Synthetic oligonucleotide
gcaggcaccuaccgcuguc

SEQ ID NO: 509049 - RNA, 19 nt, Artificial Sequence
  Description of Artificial Sequence: Synthetic oligonucleotide
ccaguuacugccugcgagu

SEQ ID NO: 509050 - RNA, 19 nt, Artificial Sequence
  Description of Artificial Sequence: Synthetic oligonucleotide
acuggacccuugauuucuu

SEQ ID NO: 509051 - RNA, 19 nt, Artificial Sequence
  Description of Artificial Sequence: Synthetic oligonucleotide
guaagucaucuggguuguc

SEQ ID NO: 509052 - RNA, 19 nt, Artificial Sequence
  Description of Artificial Sequence: Synthetic oligonucleotide
ccugauuaguucgguaucu

SEQ ID NO: 509053 - RNA, 19 nt, Artificial Sequence
  Description of Artificial Sequence: Synthetic oligonucleotide
gcuaucgcuaucagaccua

SEQ ID NO: 509054 - RNA, 19 nt, Artificial Sequence
  Description of Artificial Sequence: Synthetic oligonucleotide
ggcgaggguccaguuuuac

SEQ ID NO: 509055 - RNA, 19 nt, Artificial Sequence
  Description of Artificial Sequence: Synthetic oligonucleotide
caaaacgcacuccccucuu

SEQ ID NO: 509056 - RNA, 19 nt, Artificial Sequence
  Description of Artificial Sequence: Synthetic oligonucleotide
ccggugguauucugggcga

SEQ ID NO: 509057 - RNA, 19 nt, Artificial Sequence
  Description of Artificial Sequence: Synthetic oligonucleotide
cugauuaguucgguaucuu

SEQ ID NO: 509058 - RNA, 19 nt, Artificial Sequence
  Description of Artificial Sequence: Synthetic oligonucleotide
gccugcgaguacugugcca

SEQ ID NO: 509059 - RNA, 19 nt, Artificial Sequence
  Description of Artificial Sequence: Synthetic oligonucleotide
gccgaggauccaagauacc

SEQ ID NO: 509060 - RNA, 19 nt, Artificial Sequence
  Description of Artificial Sequence: Synthetic oligonucleotide
caccuaccgcugucuacua

SEQ ID NO: 509061 - RNA, 19 nt, Artificial Sequence
  Description of Artificial Sequence: Synthetic oligonucleotide
cggcugauacccucauuca

SEQ ID NO: 509062 - RNA, 19 nt, Artificial Sequence
  Description of Artificial Sequence: Synthetic oligonucleotide
ccuggccgagccugcacca

SEQ ID NO: 509063 - RNA, 19 nt, Artificial Sequence
  Description of Artificial Sequence: Synthetic oligonucleotide
ggccgauaggucggauauc

SEQ ID NO: 509064 - RNA, 19 nt, Artificial Sequence
  Description of Artificial Sequence: Synthetic oligonucleotide
ggcccauauggguuccuuu

SEQ ID NO: 509065 - RNA, 19 nt, Artificial Sequence
  Description of Artificial Sequence: Synthetic oligonucleotide
ggccuccgcgcagucacuc

SEQ ID NO: 509066 - RNA, 19 nt, Artificial Sequence
  Description of Artificial Sequence: Synthetic oligonucleotide
ggccgagccugcaccaaaa

SEQ ID NO: 509067 - RNA, 19 nt, Artificial Sequence
  Description of Artificial Sequence: Synthetic oligonucleotide
cugggcgaggguccaguuu

SEQ ID NO: 509068 - RNA, 19 nt, Artificial Sequence
  Description of Artificial Sequence: Synthetic oligonucleotide
cuggccgagccugcaccaa

SEQ ID NO: 509069 - RNA, 19 nt, Artificial Sequence
  Description of Artificial Sequence: Synthetic oligonucleotide
ccacuacggucuucugcaa

SEQ ID NO: 509070 - RNA, 19 nt, Artificial Sequence
  Description of Artificial Sequence: Synthetic oligonucleotide
cggugguauucugggcgag

SEQ ID NO: 509071 - RNA, 19 nt, Artificial Sequence
  Description of Artificial Sequence: Synthetic oligonucleotide
gcgcagucacuccucuuuu

SEQ ID NO: 509072 - RNA, 19 nt, Artificial Sequence
  Description of Artificial Sequence: Synthetic oligonucleotide
ccgagccugcaccaaaauu

SEQ ID NO: 509073 - RNA, 19 nt, Artificial Sequence
  Description of Artificial Sequence: Synthetic oligonucleotide
gccgagccugcaccaaaau

SEQ ID NO: 509074 - RNA, 19 nt, Artificial Sequence
  Description of Artificial Sequence: Synthetic oligonucleotide
ccguugcauauuacaggau

SEQ ID NO: 509075 - RNA, 19 nt, Artificial Sequence
  Description of Artificial Sequence: Synthetic oligonucleotide
cauggccgauaggucggau

SEQ ID NO: 509076 - RNA, 19 nt, Artificial Sequence
  Description of Artificial Sequence: Synthetic oligonucleotide
ccccggacacgggauuuga

SEQ ID NO: 509077 - RNA, 19 nt, Artificial Sequence
  Description of Artificial Sequence: Synthetic oligonucleotide
cccauuccaucucgguaau

SEQ ID NO: 509078 - RNA, 19 nt, Artificial Sequence
  Description of Artificial Sequence: Synthetic oligonucleotide
ccuggacuggacccuugau

SEQ ID NO: 509079 - RNA, 19 nt, Artificial Sequence
  Description of Artificial Sequence: Synthetic oligonucleotide
gggcgaggguccaguuuua

SEQ ID NO: 509080 - RNA, 19 nt, Artificial Sequence
  Description of Artificial Sequence: Synthetic oligonucleotide
gggcccauauggguuccuu

SEQ ID NO: 509081 - RNA, 19 nt, Artificial Sequence
  Description of Artificial Sequence: Synthetic oligonucleotide
ccgauaggucggauaucuu

SEQ ID NO: 509082 - RNA, 19 nt, Artificial Sequence
  Description of Artificial Sequence: Synthetic oligonucleotide
cgccccauuccaucucggu

SEQ ID NO: 509083 - RNA, 19 nt, Artificial Sequence
  Description of Artificial Sequence: Synthetic oligonucleotide
ccccaucgauaccccuccu

SEQ ID NO: 509084 - RNA, 19 nt, Artificial Sequence
  Description of Artificial Sequence: Synthetic oligonucleotide
ccauuccaucucgguaauu

SEQ ID NO: 509085 - RNA, 19 nt, Artificial Sequence
  Description of Artificial Sequence: Synthetic oligonucleotide
ccgcgcagucacuccucuu

SEQ ID NO: 509086 - RNA, 19 nt, Artificial Sequence
  Description of Artificial Sequence: Synthetic oligonucleotide
aacuccagagcgcugaagc

SEQ ID NO: 509087 - RNA, 19 nt, Artificial Sequence
  Description of Artificial Sequence: Synthetic oligonucleotide
uugguugaugcuaaggugg

SEQ ID NO: 509088 - RNA, 19 nt, Artificial Sequence
  Description of Artificial Sequence: Synthetic oligonucleotide
aauggugugccacuguacg

SEQ ID NO: 509089 - RNA, 19 nt, Artificial Sequence
  Description of Artificial Sequence: Synthetic oligonucleotide
gaaaacauccaucaccucc

SEQ ID NO: 509090 - RNA, 19 nt, Artificial Sequence
  Description of Artificial Sequence: Synthetic oligonucleotide
cacuguacgguuaacagcg

SEQ ID NO: 509091 - RNA, 19 nt, Artificial Sequence
  Description of Artificial Sequence: Synthetic oligonucleotide
acgguuaacagcgacagcc

SEQ ID NO: 509092 - RNA, 19 nt, Artificial Sequence
  Description of Artificial Sequence: Synthetic oligonucleotide
auacuguugucccuggugc

SEQ ID NO: 509093 - RNA, 19 nt, Artificial Sequence
  Description of Artificial Sequence: Synthetic oligonucleotide
uucuauuucguuguaagcc

SEQ ID NO: 509094 - RNA, 19 nt, Artificial Sequence
  Description of Artificial Sequence: Synthetic oligonucleotide
auaugugucauccugcaug

SEQ ID NO: 509095 - RNA, 19 nt, Artificial Sequence
  Description of Artificial Sequence: Synthetic oligonucleotide
ucuauuucguuguaagccc

SEQ ID NO: 509096 - RNA, 19 nt, Artificial Sequence
  Description of Artificial Sequence: Synthetic oligonucleotide
uuaacagcgacagccaggg

SEQ ID NO: 509097 - RNA, 19 nt, Artificial Sequence
  Description of Artificial Sequence: Synthetic oligonucleotide
aauacagugacaagcccuc

SEQ ID NO: 509098 - RNA, 19 nt, Artificial Sequence
  Description of Artificial Sequence: Synthetic oligonucleotide
ugaguuacagcuuccagaa

SEQ ID NO: 509099 - RNA, 19 nt, Artificial Sequence
  Description of Artificial Sequence: Synthetic oligonucleotide
ugcaugaugaagaaccagu

SEQ ID NO: 509100 - RNA, 19 nt, Artificial Sequence
  Description of Artificial Sequence: Synthetic oligonucleotide
caaugcauguucucgaggc

SEQ ID NO: 509101 - RNA, 19 nt, Artificial Sequence
  Description of Artificial Sequence: Synthetic oligonucleotide
ugugaaguagaguauucga

SEQ ID NO: 509102 - RNA, 19 nt, Artificial Sequence
  Description of Artificial Sequence: Synthetic oligonucleotide
aagcuaagugcuguuggcc

SEQ ID NO: 509103 - RNA, 19 nt, Artificial Sequence
  Description of Artificial Sequence: Synthetic oligonucleotide
gagaguguggagugaaagg

SEQ ID NO: 509104 - RNA, 19 nt, Artificial Sequence
  Description of Artificial Sequence: Synthetic oligonucleotide
gauauaucggguccugagc

SEQ ID NO: 509105 - RNA, 19 nt, Artificial Sequence
  Description of Artificial Sequence: Synthetic oligonucleotide
auauaucggguccugagca

SEQ ID NO: 509106 - RNA, 19 nt, Artificial Sequence
  Description of Artificial Sequence: Synthetic oligonucleotide
ucuguacaagcgaaggugu

SEQ ID NO: 509107 - RNA, 19 nt, Artificial Sequence
  Description of Artificial Sequence: Synthetic oligonucleotide
guacauaugugucauccug

SEQ ID NO: 509108 - RNA, 19 nt, Artificial Sequence
  Description of Artificial Sequence: Synthetic oligonucleotide
auagcgccgauugagcugc

SEQ ID NO: 509109 - RNA, 19 nt, Artificial Sequence
  Description of Artificial Sequence: Synthetic oligonucleotide
uguacgguuaacagcgaca

SEQ ID NO: 509110 - RNA, 19 nt, Artificial Sequence
  Description of Artificial Sequence: Synthetic oligonucleotide
ugcccugugaaguagagua

SEQ ID NO: 509111 - RNA, 19 nt, Artificial Sequence
  Description of Artificial Sequence: Synthetic oligonucleotide
ccauauaccaacagcaggg

SEQ ID NO: 509112 - RNA, 19 nt, Artificial Sequence
  Description of Artificial Sequence: Synthetic oligonucleotide
uucugcacggcccaaguac

SEQ ID NO: 509113 - RNA, 19 nt, Artificial Sequence
  Description of Artificial Sequence: Synthetic oligonucleotide
gaaccggaggaaaacaucc

SEQ ID NO: 509114 - RNA, 19 nt, Artificial Sequence
  Description of Artificial Sequence: Synthetic oligonucleotide
uaugugucauccugcauga

SEQ ID NO: 509115 - RNA, 19 nt, Artificial Sequence
  Description of Artificial Sequence: Synthetic oligonucleotide
acaagcgaaggugugcugc

SEQ ID NO: 509116 - RNA, 19 nt, Artificial Sequence
  Description of Artificial Sequence: Synthetic oligonucleotide
aaacgcaacaggagacucc

SEQ ID NO: 509117 - RNA, 19 nt, Artificial Sequence
  Description of Artificial Sequence: Synthetic oligonucleotide
uguaagcccgcucuaacuc

SEQ ID NO: 509118 - RNA, 19 nt, Artificial Sequence
  Description of Artificial Sequence: Synthetic oligonucleotide
aggagcgauacuguugucc

SEQ ID NO: 509119 - RNA, 19 nt, Artificial Sequence
  Description of Artificial Sequence: Synthetic oligonucleotide
gaagcgagaguguggagug

SEQ ID NO: 509120 - RNA, 19 nt, Artificial Sequence
  Description of Artificial Sequence: Synthetic oligonucleotide
cuugguugaugcuaaggug

SEQ ID NO: 509121 - RNA, 19 nt, Artificial Sequence
  Description of Artificial Sequence: Synthetic oligonucleotide
cuauuucguuguaagcccg

SEQ ID NO: 509122 - RNA, 19 nt, Artificial Sequence
  Description of Artificial Sequence: Synthetic oligonucleotide
aaguagaguauucgaggga

SEQ ID NO: 509123 - RNA, 19 nt, Artificial Sequence
  Description of Artificial Sequence: Synthetic oligonucleotide
aucuguacaagcgaaggug

SEQ ID NO: 509124 - RNA, 19 nt, Artificial Sequence
  Description of Artificial Sequence: Synthetic oligonucleotide
gaagcguuuguggagccgg

SEQ ID NO: 509125 - RNA, 19 nt, Artificial Sequence
  Description of Artificial Sequence: Synthetic oligonucleotide
gagacuccgugacagcagg

SEQ ID NO: 509126 - RNA, 19 nt, Artificial Sequence
  Description of Artificial Sequence: Synthetic oligonucleotide
guucgaaggagcgauacug

SEQ ID NO: 509127 - RNA, 19 nt, Artificial Sequence
  Description of Artificial Sequence: Synthetic oligonucleotide
ucuaacuccagagcgcuga

SEQ ID NO: 509128 - RNA, 19 nt, Artificial Sequence
  Description of Artificial Sequence: Synthetic oligonucleotide
ugccggucaaaucugcccc

SEQ ID NO: 509129 - RNA, 19 nt, Artificial Sequence
  Description of Artificial Sequence: Synthetic oligonucleotide
ucuaacucagcugcugcag

SEQ ID NO: 509130 - RNA, 19 nt, Artificial Sequence
  Description of Artificial Sequence: Synthetic oligonucleotide
uucaccccaagaaacgggu

SEQ ID NO: 509131 - RNA, 19 nt, Artificial Sequence
  Description of Artificial Sequence: Synthetic oligonucleotide
uguacaagcgaaggugugc

SEQ ID NO: 509132 - RNA, 19 nt, Artificial Sequence
  Description of Artificial Sequence: Synthetic oligonucleotide
auaucggguccugagcacc

SEQ ID NO: 509133 - RNA, 19 nt, Artificial Sequence
  Description of Artificial Sequence: Synthetic oligonucleotide
uagaguauucgagggaaug

SEQ ID NO: 509134 - RNA, 19 nt, Artificial Sequence
  Description of Artificial Sequence: Synthetic oligonucleotide
aggacuuccgacccagguc

SEQ ID NO: 509135 - RNA, 19 nt, Artificial Sequence
  Description of Artificial Sequence: Synthetic oligonucleotide
auucauacggcagcgguug

SEQ ID NO: 509136 - RNA, 19 nt, Artificial Sequence
  Description of Artificial Sequence: Synthetic oligonucleotide
agaaaagccagggcggcgg

SEQ ID NO: 509137 - RNA, 19 nt, Artificial Sequence
  Description of Artificial Sequence: Synthetic oligonucleotide
uauuucguuguaagcccgc

SEQ ID NO: 509138 - RNA, 19 nt, Artificial Sequence
  Description of Artificial Sequence: Synthetic oligonucleotide
uggcucuacggcucgaaag

SEQ ID NO: 509139 - RNA, 19 nt, Artificial Sequence
  Description of Artificial Sequence: Synthetic oligonucleotide
guacgguuaacagcgacag

SEQ ID NO: 509140 - RNA, 19 nt, Artificial Sequence
  Description of Artificial Sequence: Synthetic oligonucleotide
gauagcgccgauugagcug

SEQ ID NO: 509141 - RNA, 19 nt, Artificial Sequence
  Description of Artificial Sequence: Synthetic oligonucleotide
uguacauaugugucauccu

SEQ ID NO: 509142 - RNA, 19 nt, Artificial Sequence
  Description of Artificial Sequence: Synthetic oligonucleotide
ugacaagcccuccaucugu

SEQ ID NO: 509143 - RNA, 19 nt, Artificial Sequence
  Description of Artificial Sequence: Synthetic oligonucleotide
acauaugugucauccugca

SEQ ID NO: 509144 - RNA, 19 nt, Artificial Sequence
  Description of Artificial Sequence: Synthetic oligonucleotide
cuuaguggccgcagcaggc

SEQ ID NO: 509145 - RNA, 19 nt, Artificial Sequence
  Description of Artificial Sequence: Synthetic oligonucleotide
aguagaguauucgagggaa

SEQ ID NO: 509146 - RNA, 19 nt, Artificial Sequence
  Description of Artificial Sequence: Synthetic oligonucleotide
ugauagcgccgauugagcu

SEQ ID NO: 509147 - RNA, 19 nt, Artificial Sequence
  Description of Artificial Sequence: Synthetic oligonucleotide
ugguugaugcuaagguggc

SEQ ID NO: 509148 - RNA, 19 nt, Artificial Sequence
  Description of Artificial Sequence: Synthetic oligonucleotide
agcaaugcauguucucgag

SEQ ID NO: 509149 - RNA, 19 nt, Artificial Sequence
  Description of Artificial Sequence: Synthetic oligonucleotide
augagucgcaccugggaag

SEQ ID NO: 509150 - RNA, 19 nt, Artificial Sequence
  Description of Artificial Sequence: Synthetic oligonucleotide
auauaccaacagcagggug

SEQ ID NO: 509151 - RNA, 19 nt, Artificial Sequence
  Description of Artificial Sequence: Synthetic oligonucleotide
cuucccggggcccauauac

SEQ ID NO: 509152 - RNA, 19 nt, Artificial Sequence
  Description of Artificial Sequence: Synthetic oligonucleotide
uucgaaggagcgauacugu

SEQ ID NO: 509153 - RNA, 19 nt, Artificial Sequence
  Description of Artificial Sequence: Synthetic oligonucleotide
ugagucgcaccugggaagg

SEQ ID NO: 509154 - RNA, 19 nt, Artificial Sequence
  Description of Artificial Sequence: Synthetic oligonucleotide
uacccucggagacagggug

SEQ ID NO: 509155 - RNA, 19 nt, Artificial Sequence
  Description of Artificial Sequence: Synthetic oligonucleotide
ccuauucuuggccaguucg

SEQ ID NO: 509156 - RNA, 19 nt, Artificial Sequence
  Description of Artificial Sequence: Synthetic oligonucleotide
ucugcacggcccaaguaca

SEQ ID NO: 509157 - RNA, 19 nt, Artificial Sequence
  Description of Artificial Sequence: Synthetic oligonucleotide
uuguaagcccgcucuaacu

SEQ ID NO: 509158 - RNA, 19 nt, Artificial Sequence
  Description of Artificial Sequence: Synthetic oligonucleotide
gaacggugaaggcacucag

SEQ ID NO: 509159 - RNA, 19 nt, Artificial Sequence
  Description of Artificial Sequence: Synthetic oligonucleotide
ggauauaucggguccugag

SEQ ID NO: 509160 - RNA, 19 nt, Artificial Sequence
  Description of Artificial Sequence: Synthetic oligonucleotide
ucugcuuaguggccgcagc

SEQ ID NO: 509161 - RNA, 19 nt, Artificial Sequence
  Description of Artificial Sequence: Synthetic oligonucleotide
gguaccgucguucuaacuc

SEQ ID NO: 509162 - RNA, 19 nt, Artificial Sequence
  Description of Artificial Sequence: Synthetic oligonucleotide
uucuaacucagcugcugca

SEQ ID NO: 509163 - RNA, 19 nt, Artificial Sequence
  Description of Artificial Sequence: Synthetic oligonucleotide
aaguagucccagcccagca

SEQ ID NO: 509164 - RNA, 19 nt, Artificial Sequence
  Description of Artificial Sequence: Synthetic oligonucleotide
ucgaggguguacuccauac

SEQ ID NO: 509165 - RNA, 19 nt, Artificial Sequence
  Description of Artificial Sequence: Synthetic oligonucleotide
cugauagcgccgauugagc

SEQ ID NO: 509166 - RNA, 19 nt, Artificial Sequence
  Description of Artificial Sequence: Synthetic oligonucleotide
acggugguaaggaagaaga

SEQ ID NO: 509167 - RNA, 19 nt, Artificial Sequence
  Description of Artificial Sequence: Synthetic oligonucleotide
ugucuggauauaucggguc

SEQ ID NO: 509168 - RNA, 19 nt, Artificial Sequence
  Description of Artificial Sequence: Synthetic oligonucleotide
auagucagccccaaagugu

SEQ ID NO: 509169 - RNA, 19 nt, Artificial Sequence
  Description of Artificial Sequence: Synthetic oligonucleotide
guagucccagcccagcacc

SEQ ID NO: 509170 - RNA, 19 nt, Artificial Sequence
  Description of Artificial Sequence: Synthetic oligonucleotide
gcggccaagccauucaucg

SEQ ID NO: 509171 - RNA, 19 nt, Artificial Sequence
  Description of Artificial Sequence: Synthetic oligonucleotide
aacggugaaggcacucagg

SEQ ID NO: 509172 - RNA, 19 nt, Artificial Sequence
  Description of Artificial Sequence: Synthetic oligonucleotide
cuaacucagcugcugcagc

SEQ ID NO: 509173 - RNA, 19 nt, Artificial Sequence
  Description of Artificial Sequence: Synthetic oligonucleotide
agaaccggaggaaaacauc

SEQ ID NO: 509174 - RNA, 19 nt, Artificial Sequence
  Description of Artificial Sequence: Synthetic oligonucleotide
guacaugaggguacccucg

SEQ ID NO: 509175 - RNA, 19 nt, Artificial Sequence
  Description of Artificial Sequence: Synthetic oligonucleotide
guaagcccgcucuaacucc

SEQ ID NO: 509176 - RNA, 19 nt, Artificial Sequence
  Description of Artificial Sequence: Synthetic oligonucleotide
cucgcugaguuacagcuuc

SEQ ID NO: 509177 - RNA, 19 nt, Artificial Sequence
  Description of Artificial Sequence: Synthetic oligonucleotide
uucgagggaauggugugcc

SEQ ID NO: 509178 - RNA, 19 nt, Artificial Sequence
  Description of Artificial Sequence: Synthetic oligonucleotide
aggguguacuccauacccc

SEQ ID NO: 509179 - RNA, 19 nt, Artificial Sequence
  Description of Artificial Sequence: Synthetic oligonucleotide
uauaucggguccugagcac

SEQ ID NO: 509180 - RNA, 19 nt, Artificial Sequence
  Description of Artificial Sequence: Synthetic oligonucleotide
gcucgaaagagguggagcc

SEQ ID NO: 509181 - RNA, 19 nt, Artificial Sequence
  Description of Artificial Sequence: Synthetic oligonucleotide
cauacggcagcgguugagg

SEQ ID NO: 509182 - RNA, 19 nt, Artificial Sequence
  Description of Artificial Sequence: Synthetic oligonucleotide
guuguaagcccgcucuaac

SEQ ID NO: 509183 - RNA, 19 nt, Artificial Sequence
  Description of Artificial Sequence: Synthetic oligonucleotide
ugaacggugaaggcacuca

SEQ ID NO: 509184 - RNA, 19 nt, Artificial Sequence
  Description of Artificial Sequence: Synthetic oligonucleotide
agguuacugaggcgacagc

SEQ ID NO: 509185 - RNA, 19 nt, Artificial Sequence
  Description of Artificial Sequence: Synthetic oligonucleotide
cagcaagcgcucucgagag

SEQ ID NO: 509186 - RNA, 19 nt, Artificial Sequence
  Description of Artificial Sequence: Synthetic oligonucleotide
uuggcagaagauacuuuua

SEQ ID NO: 509187 - RNA, 19 nt, Artificial Sequence
  Description of Artificial Sequence: Synthetic oligonucleotide
acgucugcccugcuggcuc

SEQ ID NO: 509188 - RNA, 19 nt, Artificial Sequence
  Description of Artificial Sequence: Synthetic oligonucleotide
cccauauaccaacagcagg

SEQ ID NO: 509189 - RNA, 19 nt, Artificial Sequence
  Description of Artificial Sequence: Synthetic oligonucleotide
gccacuguacgguuaacag

SEQ ID NO: 509190 - RNA, 19 nt, Artificial Sequence
  Description of Artificial Sequence: Synthetic oligonucleotide
cuccgugacagcagguagc

SEQ ID NO: 509191 - RNA, 19 nt, Artificial Sequence
  Description of Artificial Sequence: Synthetic oligonucleotide
agaaacgggucagggcccc

SEQ ID NO: 509192 - RNA, 19 nt, Artificial Sequence
  Description of Artificial Sequence: Synthetic oligonucleotide
gcugauagcgccgauugag

SEQ ID NO: 509193 - RNA, 19 nt, Artificial Sequence
  Description of Artificial Sequence: Synthetic oligonucleotide
ugaagcguuuguggagccg

SEQ ID NO: 509194 - RNA, 19 nt, Artificial Sequence
  Description of Artificial Sequence: Synthetic oligonucleotide
gguacggccucccagcccc

SEQ ID NO: 509195 - RNA, 19 nt, Artificial Sequence
  Description of Artificial Sequence: Synthetic oligonucleotide
agcgauacuguugucccug

SEQ ID NO: 509196 - RNA, 19 nt, Artificial Sequence
  Description of Artificial Sequence: Synthetic oligonucleotide
aguaccgggccugcucucc

SEQ ID NO: 509197 - RNA, 19 nt, Artificial Sequence
  Description of Artificial Sequence: Synthetic oligonucleotide
gaaggcacucaggaaagca

SEQ ID NO: 509198 - RNA, 19 nt, Artificial Sequence
  Description of Artificial Sequence: Synthetic oligonucleotide
guaccgucguucuaacuca

SEQ ID NO: 509199 - RNA, 19 nt, Artificial Sequence
  Description of Artificial Sequence: Synthetic oligonucleotide
cacuggguguuucuuggag

SEQ ID NO: 509200 - RNA, 19 nt, Artificial Sequence
  Description of Artificial Sequence: Synthetic oligonucleotide
aguauucgagggaauggug

SEQ ID NO: 509201 - RNA, 19 nt, Artificial Sequence
  Description of Artificial Sequence: Synthetic oligonucleotide
cugaggauguccccucggc

SEQ ID NO: 509202 - RNA, 19 nt, Artificial Sequence
  Description of Artificial Sequence: Synthetic oligonucleotide
cugugagacacagccgacg

SEQ ID NO: 509203 - RNA, 19 nt, Artificial Sequence
  Description of Artificial Sequence: Synthetic oligonucleotide
cugccaguucaccagccag

SEQ ID NO: 509204 - RNA, 19 nt, Artificial Sequence
  Description of Artificial Sequence: Synthetic oligonucleotide
agcaagucgaggguguacu

SEQ ID NO: 509205 - RNA, 19 nt, Artificial Sequence
  Description of Artificial Sequence: Synthetic oligonucleotide
aguucgaaggagcgauacu

SEQ ID NO: 509206 - RNA, 19 nt, Artificial Sequence
  Description of Artificial Sequence: Synthetic oligonucleotide
gauguggccgcaaacgcaa

SEQ ID NO: 509207 - RNA, 19 nt, Artificial Sequence
  Description of Artificial Sequence: Synthetic oligonucleotide
agcaagcgcucucgagagc

SEQ ID NO: 509208 - RNA, 19 nt, Artificial Sequence
  Description of Artificial Sequence: Synthetic oligonucleotide
acggcccaaguacaggucu

SEQ ID NO: 509209 - RNA, 19 nt, Artificial Sequence
  Description of Artificial Sequence: Synthetic oligonucleotide
agcgaaggugugcugcucu

SEQ ID NO: 509210 - RNA, 19 nt, Artificial Sequence
  Description of Artificial Sequence: Synthetic oligonucleotide
gcaagagcugccaaucggg

SEQ ID NO: 509211 - RNA, 19 nt, Artificial Sequence
  Description of Artificial Sequence: Synthetic oligonucleotide
uaccgucguucuaacucag

SEQ ID NO: 509212 - RNA, 19 nt, Artificial Sequence
  Description of Artificial Sequence: Synthetic oligonucleotide
aggguaccgucguucuaac

SEQ ID NO: 509213 - RNA, 19 nt, Artificial Sequence
  Description of Artificial Sequence: Synthetic oligonucleotide
cagcaagagcugccaaucg

SEQ ID NO: 509214 - RNA, 19 nt, Artificial Sequence
  Description of Artificial Sequence: Synthetic oligonucleotide
ugaggacuuccgacccagg

SEQ ID NO: 509215 - RNA, 19 nt, Artificial Sequence
  Description of Artificial Sequence: Synthetic oligonucleotide
ucauacggcagcgguugag

SEQ ID NO: 509216 - RNA, 19 nt, Artificial Sequence
  Description of Artificial Sequence: Synthetic oligonucleotide
uacgguuaacagcgacagc

SEQ ID NO: 509217 - RNA, 19 nt, Artificial Sequence
  Description of Artificial Sequence: Synthetic oligonucleotide
uaucggguccugagcaccu

SEQ ID NO: 509218 - RNA, 19 nt, Artificial Sequence
  Description of Artificial Sequence: Synthetic oligonucleotide
cuaagguggccagcaagag

SEQ ID NO: 509219 - RNA, 19 nt, Artificial Sequence
  Description of Artificial Sequence: Synthetic oligonucleotide
gagggcauuugggagcgcc

SEQ ID NO: 509220 - RNA, 19 nt, Artificial Sequence
  Description of Artificial Sequence: Synthetic oligonucleotide
gcaaugcauguucucgagg

SEQ ID NO: 509221 - RNA, 19 nt, Artificial Sequence
  Description of Artificial Sequence: Synthetic oligonucleotide
cuguacgguuaacagcgac

SEQ ID NO: 509222 - RNA, 19 nt, Artificial Sequence
  Description of Artificial Sequence: Synthetic oligonucleotide
cauucaucgggccgcgcac

SEQ ID NO: 509223 - RNA, 19 nt, Artificial Sequence
  Description of Artificial Sequence: Synthetic oligonucleotide
gguacaugaggguacccuc

SEQ ID NO: 509224 - RNA, 19 nt, Artificial Sequence
  Description of Artificial Sequence: Synthetic oligonucleotide
agucgcaccugggaagggg

SEQ ID NO: 509225 - RNA, 19 nt, Artificial Sequence
  Description of Artificial Sequence: Synthetic oligonucleotide
ccgcucaucuccaugagac

SEQ ID NO: 509226 - RNA, 19 nt, Artificial Sequence
  Description of Artificial Sequence: Synthetic oligonucleotide
uacggcagcgguugaggac

SEQ ID NO: 509227 - RNA, 19 nt, Artificial Sequence
  Description of Artificial Sequence: Synthetic oligonucleotide
ucgaaggagcgauacuguu

SEQ ID NO: 509228 - RNA, 19 nt, Artificial Sequence
  Description of Artificial Sequence: Synthetic oligonucleotide
aagcgaaggugugcugcuc

SEQ ID NO: 509229 - RNA, 19 nt, Artificial Sequence
  Description of Artificial Sequence: Synthetic oligonucleotide
ccgcucuaacuccagagcg

SEQ ID NO: 509230 - RNA, 19 nt, Artificial Sequence
  Description of Artificial Sequence: Synthetic oligonucleotide
caaacgcaacaggagacuc

SEQ ID NO: 509231 - RNA, 19 nt, Artificial Sequence
  Description of Artificial Sequence: Synthetic oligonucleotide
guggacaguguggugcggg

SEQ ID NO: 509232 - RNA, 19 nt, Artificial Sequence
  Description of Artificial Sequence: Synthetic oligonucleotide
auacggcagcgguugagga

SEQ ID NO: 509233 - RNA, 19 nt, Artificial Sequence
  Description of Artificial Sequence: Synthetic oligonucleotide
caguucgaaggagcgauac

SEQ ID NO: 509234 - RNA, 19 nt, Artificial Sequence
  Description of Artificial Sequence: Synthetic oligonucleotide
cugaagcguuuguggagcc

SEQ ID NO: 509235 - RNA, 19 nt, Artificial Sequence
  Description of Artificial Sequence: Synthetic oligonucleotide
ccacuguacgguuaacagc

SEQ ID NO: 509236 - RNA, 19 nt, Artificial Sequence
  Description of Artificial Sequence: Synthetic oligonucleotide
ggcacgggcugccagguag

SEQ ID NO: 509237 - RNA, 19 nt, Artificial Sequence
  Description of Artificial Sequence: Synthetic oligonucleotide
ucguucuaacucagcugcu

SEQ ID NO: 509238 - RNA, 19 nt, Artificial Sequence
  Description of Artificial Sequence: Synthetic oligonucleotide
agccgguacaugaggguac

SEQ ID NO: 509239 - RNA, 19 nt, Artificial Sequence
  Description of Artificial Sequence: Synthetic oligonucleotide
aaccggaggaaaacaucca

SEQ ID NO: 509240 - RNA, 19 nt, Artificial Sequence
  Description of Artificial Sequence: Synthetic oligonucleotide
agaacaggguugaacuccu

SEQ ID NO: 509241 - RNA, 19 nt, Artificial Sequence
  Description of Artificial Sequence: Synthetic oligonucleotide
ggguguuucuuggagauga

SEQ ID NO: 509242 - RNA, 19 nt, Artificial Sequence
  Description of Artificial Sequence: Synthetic oligonucleotide
uggauauaucggguccuga

SEQ ID NO: 509243 - RNA, 19 nt, Artificial Sequence
  Description of Artificial Sequence: Synthetic oligonucleotide
cacucaggaaagcauagcu

SEQ ID NO: 509244 - RNA, 19 nt, Artificial Sequence
  Description of Artificial Sequence: Synthetic oligonucleotide
uacagucccgcagggagaa

SEQ ID NO: 509245 - RNA, 19 nt, Artificial Sequence
  Description of Artificial Sequence: Synthetic oligonucleotide
ugaugcuaagguggccagc

SEQ ID NO: 509246 - RNA, 19 nt, Artificial Sequence
  Description of Artificial Sequence: Synthetic oligonucleotide
agggcauaggcaggauuuc

SEQ ID NO: 509247 - RNA, 19 nt, Artificial Sequence
  Description of Artificial Sequence: Synthetic oligonucleotide
ggcucuacggcucgaaaga

SEQ ID NO: 509248 - RNA, 19 nt, Artificial Sequence
  Description of Artificial Sequence: Synthetic oligonucleotide
uucauacggcagcgguuga

SEQ ID NO: 509249 - RNA, 19 nt, Artificial Sequence
  Description of Artificial Sequence: Synthetic oligonucleotide
gaguauucgagggaauggu

SEQ ID NO: 509250 - RNA, 19 nt, Artificial Sequence
  Description of Artificial Sequence: Synthetic oligonucleotide
gcugaagcguuuguggagc

SEQ ID NO: 509251 - RNA, 19 nt, Artificial Sequence
  Description of Artificial Sequence: Synthetic oligonucleotide
cucgaagcgagagugugga

SEQ ID NO: 509252 - RNA, 19 nt, Artificial Sequence
  Description of Artificial Sequence: Synthetic oligonucleotide
gagcgccaucuguacaagc

SEQ ID NO: 509253 - RNA, 19 nt, Artificial Sequence
  Description of Artificial Sequence: Synthetic oligonucleotide
gcaagcgcucucgagagcc

SEQ ID NO: 509254 - RNA, 19 nt, Artificial Sequence
  Description of Artificial Sequence: Synthetic oligonucleotide
caucgggccgcgcacugag

SEQ ID NO: 509255 - RNA, 19 nt, Artificial Sequence
  Description of Artificial Sequence: Synthetic oligonucleotide
guauucgagggaauggugu

SEQ ID NO: 509256 - RNA, 19 nt, Artificial Sequence
  Description of Artificial Sequence: Synthetic oligonucleotide
gugagcaaugcauguucuc

SEQ ID NO: 509257 - RNA, 19 nt, Artificial Sequence
  Description of Artificial Sequence: Synthetic oligonucleotide
gggugagcaaugcauguuc

SEQ ID NO: 509258 - RNA, 19 nt, Artificial Sequence
  Description of Artificial Sequence: Synthetic oligonucleotide
agagcgcugaagcguuugu

SEQ ID NO: 509259 - RNA, 19 nt, Artificial Sequence
  Description of Artificial Sequence: Synthetic oligonucleotide
gacgcccagagugucgaug

SEQ ID NO: 509260 - RNA, 19 nt, Artificial Sequence
  Description of Artificial Sequence: Synthetic oligonucleotide
ucgaagcgagaguguggag

SEQ ID NO: 509261 - RNA, 19 nt, Artificial Sequence
  Description of Artificial Sequence: Synthetic oligonucleotide
cccacgucugcccugcugg

SEQ ID NO: 509262 - RNA, 19 nt, Artificial Sequence
  Description of Artificial Sequence: Synthetic oligonucleotide
uccacacggugguaaggaa

SEQ ID NO: 509263 - RNA, 19 nt, Artificial Sequence
  Description of Artificial Sequence: Synthetic oligonucleotide
cacucugcuuaguggccgc

SEQ ID NO: 509264 - RNA, 19 nt, Artificial Sequence
  Description of Artificial Sequence: Synthetic oligonucleotide
uggcgcagggucucugaca

SEQ ID NO: 509265 - RNA, 19 nt, Artificial Sequence
  Description of Artificial Sequence: Synthetic oligonucleotide
aguucaccagccagccggg

SEQ ID NO: 509266 - RNA, 19 nt, Artificial Sequence
  Description of Artificial Sequence: Synthetic oligonucleotide
acccgcguagccucaguga

SEQ ID NO: 509267 - RNA, 19 nt, Artificial Sequence
  Description of Artificial Sequence: Synthetic oligonucleotide
gagcgcugaagcguuugug

SEQ ID NO: 509268 - RNA, 19 nt, Artificial Sequence
  Description of Artificial Sequence: Synthetic oligonucleotide
agggaauggugugccacug

SEQ ID NO: 509269 - RNA, 19 nt, Artificial Sequence
  Description of Artificial Sequence: Synthetic oligonucleotide
ggcggcggaagcuucggcc

SEQ ID NO: 509270 - RNA, 19 nt, Artificial Sequence
  Description of Artificial Sequence: Synthetic oligonucleotide
cugcacggcccaaguacag

SEQ ID NO: 509271 - RNA, 19 nt, Artificial Sequence
  Description of Artificial Sequence: Synthetic oligonucleotide
ggugcccucgcugaguuac

SEQ ID NO: 509272 - RNA, 19 nt, Artificial Sequence
  Description of Artificial Sequence: Synthetic oligonucleotide
gagugucgaugaggcagcg

SEQ ID NO: 509273 - RNA, 19 nt, Artificial Sequence
  Description of Artificial Sequence: Synthetic oligonucleotide
ggacuuccgacccaggucu

SEQ ID NO: 509274 - RNA, 19 nt, Artificial Sequence
  Description of Artificial Sequence: Synthetic oligonucleotide
ucguuguaagcccgcucua

SEQ ID NO: 509275 - RNA, 19 nt, Artificial Sequence
  Description of Artificial Sequence: Synthetic oligonucleotide
cuggauauaucggguccug

SEQ ID NO: 509276 - RNA, 19 nt, Artificial Sequence
  Description of Artificial Sequence: Synthetic oligonucleotide
ggcucgaaagagguggagc

SEQ ID NO: 509277 - RNA, 19 nt, Artificial Sequence
  Description of Artificial Sequence: Synthetic oligonucleotide
gaggacuuccgacccaggu

SEQ ID NO: 509278 - RNA, 19 nt, Artificial Sequence
  Description of Artificial Sequence: Synthetic oligonucleotide
ugcccucgcugaguuacag

SEQ ID NO: 509279 - RNA, 19 nt, Artificial Sequence
  Description of Artificial Sequence: Synthetic oligonucleotide
caagcgcucucgagagccc

SEQ ID NO: 509280 - RNA, 19 nt, Artificial Sequence
  Description of Artificial Sequence: Synthetic oligonucleotide
cauaccccuggcaggguca

SEQ ID NO: 509281 - RNA, 19 nt, Artificial Sequence
  Description of Artificial Sequence: Synthetic oligonucleotide
ucggguccugagcaccuuc

SEQ ID NO: 509282 - RNA, 19 nt, Artificial Sequence
  Description of Artificial Sequence: Synthetic oligonucleotide
ucgagggaauggugugcca

SEQ ID NO: 509283 - RNA, 19 nt, Artificial Sequence
  Description of Artificial Sequence: Synthetic oligonucleotide
cucggcagccauccagaug

SEQ ID NO: 509284 - RNA, 19 nt, Artificial Sequence
  Description of Artificial Sequence: Synthetic oligonucleotide
gucgcaccugggaaggggc

SEQ ID NO: 509285 - RNA, 19 nt, Artificial Sequence
  Description of Artificial Sequence: Synthetic oligonucleotide
guacaagcgaaggugugcu

SEQ ID NO: 509286 - RNA, 19 nt, Artificial Sequence
  Description of Artificial Sequence: Synthetic oligonucleotide
cagugacaagcccuccauc

SEQ ID NO: 509287 - RNA, 19 nt, Artificial Sequence
  Description of Artificial Sequence: Synthetic oligonucleotide
cugcuuaguggccgcagca

SEQ ID NO: 509288 - RNA, 19 nt, Artificial Sequence
  Description of Artificial Sequence: Synthetic oligonucleotide
aggucuugguugaugcuaa

SEQ ID NO: 509289 - RNA, 19 nt, Artificial Sequence
  Description of Artificial Sequence: Synthetic oligonucleotide
gcgccgauugagcugcucc

SEQ ID NO: 509290 - RNA, 19 nt, Artificial Sequence
  Description of Artificial Sequence: Synthetic oligonucleotide
cgaaggagcgauacuguug

SEQ ID NO: 509291 - RNA, 19 nt, Artificial Sequence
  Description of Artificial Sequence: Synthetic oligonucleotide
gcccauauaccaacagcag

SEQ ID NO: 509292 - RNA, 19 nt, Artificial Sequence
  Description of Artificial Sequence: Synthetic oligonucleotide
gcgcaggcggggcugauag

SEQ ID NO: 509293 - RNA, 19 nt, Artificial Sequence
  Description of Artificial Sequence: Synthetic oligonucleotide
gcguuuguggagccgguac

SEQ ID NO: 509294 - RNA, 19 nt, Artificial Sequence
  Description of Artificial Sequence: Synthetic oligonucleotide
cacccgcguagccucagug

SEQ ID NO: 509295 - RNA, 19 nt, Artificial Sequence
  Description of Artificial Sequence: Synthetic oligonucleotide
cgcaaacgcaacaggagac

SEQ ID NO: 509296 - RNA, 19 nt, Artificial Sequence
  Description of Artificial Sequence: Synthetic oligonucleotide
caucuguacaagcgaaggu

SEQ ID NO: 509297 - RNA, 19 nt, Artificial Sequence
  Description of Artificial Sequence: Synthetic oligonucleotide
ccggaggaaaacauccauc

SEQ ID NO: 509298 - RNA, 19 nt, Artificial Sequence
  Description of Artificial Sequence: Synthetic oligonucleotide
gcgauacuguugucccugg

SEQ ID NO: 509299 - RNA, 19 nt, Artificial Sequence
  Description of Artificial Sequence: Synthetic oligonucleotide
guuccucacugagccgggg

SEQ ID NO: 509300 - RNA, 19 nt, Artificial Sequence
  Description of Artificial Sequence: Synthetic oligonucleotide
caggguaccgucguucuaa

SEQ ID NO: 509301 - RNA, 19 nt, Artificial Sequence
  Description of Artificial Sequence: Synthetic oligonucleotide
ccagcaagcgcucucgaga

SEQ ID NO: 509302 - RNA, 19 nt, Artificial Sequence
  Description of Artificial Sequence: Synthetic oligonucleotide
cacggcccaaguacagguc

SEQ ID NO: 509303 - RNA, 19 nt, Artificial Sequence
  Description of Artificial Sequence: Synthetic oligonucleotide
agccauucaucgggccgcg

SEQ ID NO: 509304 - RNA, 19 nt, Artificial Sequence
  Description of Artificial Sequence: Synthetic oligonucleotide
gagccgguacaugagggua

SEQ ID NO: 509305 - RNA, 19 nt, Artificial Sequence
  Description of Artificial Sequence: Synthetic oligonucleotide
gggguucggggccagcccc

SEQ ID NO: 509306 - RNA, 19 nt, Artificial Sequence
  Description of Artificial Sequence: Synthetic oligonucleotide
aggcacucaggaaagcaua

SEQ ID NO: 509307 - RNA, 19 nt, Artificial Sequence
  Description of Artificial Sequence: Synthetic oligonucleotide
aucgcccacgucugcccug

SEQ ID NO: 509308 - RNA, 19 nt, Artificial Sequence
  Description of Artificial Sequence: Synthetic oligonucleotide
cagagcgcugaagcguuug

SEQ ID NO: 509309 - RNA, 19 nt, Artificial Sequence
  Description of Artificial Sequence: Synthetic oligonucleotide
cgagaguguggagugaaag

SEQ ID NO: 509310 - RNA, 19 nt, Artificial Sequence
  Description of Artificial Sequence: Synthetic oligonucleotide
cuggaagcgcaggcggggc

SEQ ID NO: 509311 - RNA, 19 nt, Artificial Sequence
  Description of Artificial Sequence: Synthetic oligonucleotide
ggcauaggcaggauuucca

SEQ ID NO: 509312 - RNA, 19 nt, Artificial Sequence
  Description of Artificial Sequence: Synthetic oligonucleotide
ggaaaacauccaucaccuc

SEQ ID NO: 509313 - RNA, 19 nt, Artificial Sequence
  Description of Artificial Sequence: Synthetic oligonucleotide
aagcguuuguggagccggu

SEQ ID NO: 509314 - RNA, 19 nt, Artificial Sequence
  Description of Artificial Sequence: Synthetic oligonucleotide
gcauucauacggcagcggu

SEQ ID NO: 509315 - RNA, 19 nt, Artificial Sequence
  Description of Artificial Sequence: Synthetic oligonucleotide
ucccuauucuuggccaguu

SEQ ID NO: 509316 - RNA, 19 nt, Artificial Sequence
  Description of Artificial Sequence: Synthetic oligonucleotide
uaccgggccugcucuccug

SEQ ID NO: 509317 - RNA, 19 nt, Artificial Sequence
  Description of Artificial Sequence: Synthetic oligonucleotide
gcuaccagcaagcgcucuc

SEQ ID NO: 509318 - RNA, 19 nt, Artificial Sequence
  Description of Artificial Sequence: Synthetic oligonucleotide
cgucguucuaacucagcug

SEQ ID NO: 509319 - RNA, 19 nt, Artificial Sequence
  Description of Artificial Sequence: Synthetic oligonucleotide
agggugagcaaugcauguu

SEQ ID NO: 509320 - RNA, 19 nt, Artificial Sequence
  Description of Artificial Sequence: Synthetic oligonucleotide
ggcagccauccagaugugg

SEQ ID NO: 509321 - RNA, 19 nt, Artificial Sequence
  Description of Artificial Sequence: Synthetic oligonucleotide
cccgcguagccucagugac

SEQ ID NO: 509322 - RNA, 19 nt, Artificial Sequence
  Description of Artificial Sequence: Synthetic oligonucleotide
gcucuacggcucgaaagag

SEQ ID NO: 509323 - RNA, 19 nt, Artificial Sequence
  Description of Artificial Sequence: Synthetic oligonucleotide
agccgacgcccagaguguc

SEQ ID NO: 509324 - RNA, 19 nt, Artificial Sequence
  Description of Artificial Sequence: Synthetic oligonucleotide
ccugccggucaaaucugcc

SEQ ID NO: 509325 - RNA, 19 nt, Artificial Sequence
  Description of Artificial Sequence: Synthetic oligonucleotide
cgcucuaacuccagagcgc

SEQ ID NO: 509326 - RNA, 19 nt, Artificial Sequence
  Description of Artificial Sequence: Synthetic oligonucleotide
auguggccgcaaacgcaac

SEQ ID NO: 509327 - RNA, 19 nt, Artificial Sequence
  Description of Artificial Sequence: Synthetic oligonucleotide
ucaucgggccgcgcacuga

SEQ ID NO: 509328 - RNA, 19 nt, Artificial Sequence
  Description of Artificial Sequence: Synthetic oligonucleotide
gcaucgcccacgucugccc

SEQ ID NO: 509329 - RNA, 19 nt, Artificial Sequence
  Description of Artificial Sequence: Synthetic oligonucleotide
ggccgcaaacgcaacagga

SEQ ID NO: 509330 - RNA, 19 nt, Artificial Sequence
  Description of Artificial Sequence: Synthetic oligonucleotide
gugaacggugaaggcacuc

SEQ ID NO: 509331 - RNA, 19 nt, Artificial Sequence
  Description of Artificial Sequence: Synthetic oligonucleotide
gaagcaagucgagggugua

SEQ ID NO: 509332 - RNA, 19 nt, Artificial Sequence
  Description of Artificial Sequence: Synthetic oligonucleotide
gcccaaguacaggucuugg

SEQ ID NO: 509333 - RNA, 19 nt, Artificial Sequence
  Description of Artificial Sequence: Synthetic oligonucleotide
gggucaacaccaggggaug

SEQ ID NO: 509334 - RNA, 19 nt, Artificial Sequence
  Description of Artificial Sequence: Synthetic oligonucleotide
cgcgcacugaggauguccc

SEQ ID NO: 509335 - RNA, 19 nt, Artificial Sequence
  Description of Artificial Sequence: Synthetic oligonucleotide
ggaaggggccucugcucgc

SEQ ID NO: 509336 - RNA, 19 nt, Artificial Sequence
  Description of Artificial Sequence: Synthetic oligonucleotide
cauucauacggcagcgguu

SEQ ID NO: 509337 - RNA, 19 nt, Artificial Sequence
  Description of Artificial Sequence: Synthetic oligonucleotide
gguguacuccauaccccug

SEQ ID NO: 509338 - RNA, 19 nt, Artificial Sequence
  Description of Artificial Sequence: Synthetic oligonucleotide
caagcgaaggugugcugcu

SEQ ID NO: 509339 - RNA, 19 nt, Artificial Sequence
  Description of Artificial Sequence: Synthetic oligonucleotide
acuguacgguuaacagcga

SEQ ID NO: 509340 - RNA, 19 nt, Artificial Sequence
  Description of Artificial Sequence: Synthetic oligonucleotide
agcgccgauugagcugcuc

SEQ ID NO: 509341 - RNA, 19 nt, Artificial Sequence
  Description of Artificial Sequence: Synthetic oligonucleotide
gagcgauacuguugucccu

SEQ ID NO: 509342 - RNA, 19 nt, Artificial Sequence
  Description of Artificial Sequence: Synthetic oligonucleotide
caucccugcaggagcccga

SEQ ID NO: 509343 - RNA, 19 nt, Artificial Sequence
  Description of Artificial Sequence: Synthetic oligonucleotide
gucgaggguguacuccaua

SEQ ID NO: 509344 - RNA, 19 nt, Artificial Sequence
  Description of Artificial Sequence: Synthetic oligonucleotide
gcaagucgaggguguacuc

SEQ ID NO: 509345 - RNA, 19 nt, Artificial Sequence
  Description of Artificial Sequence: Synthetic oligonucleotide
gcgccgguagccauugagc

SEQ ID NO: 509346 - RNA, 19 nt, Artificial Sequence
  Description of Artificial Sequence: Synthetic oligonucleotide
agcgcucucgagagcccag

SEQ ID NO: 509347 - RNA, 19 nt, Artificial Sequence
  Description of Artificial Sequence: Synthetic oligonucleotide
cugccgaugccugccgguc

SEQ ID NO: 509348 - RNA, 19 nt, Artificial Sequence
  Description of Artificial Sequence: Synthetic oligonucleotide
gccaagccauucaucgggc

SEQ ID NO: 509349 - RNA, 19 nt, Artificial Sequence
  Description of Artificial Sequence: Synthetic oligonucleotide
acccucggagacaggguga

SEQ ID NO: 509350 - RNA, 19 nt, Artificial Sequence
  Description of Artificial Sequence: Synthetic oligonucleotide
cuucugcacggcccaagua

SEQ ID NO: 509351 - RNA, 19 nt, Artificial Sequence
  Description of Artificial Sequence: Synthetic oligonucleotide
ccaugagucgcaccuggga

SEQ ID NO: 509352 - RNA, 19 nt, Artificial Sequence
  Description of Artificial Sequence: Synthetic oligonucleotide
gggagcgccggugcccucg

SEQ ID NO: 509353 - RNA, 19 nt, Artificial Sequence
  Description of Artificial Sequence: Synthetic oligonucleotide
acggcucgaaagaggugga

SEQ ID NO: 509354 - RNA, 19 nt, Artificial Sequence
  Description of Artificial Sequence: Synthetic oligonucleotide
cauaugugucauccugcau

SEQ ID NO: 509355 - RNA, 19 nt, Artificial Sequence
  Description of Artificial Sequence: Synthetic oligonucleotide
acacggugguaaggaagaa

SEQ ID NO: 509356 - RNA, 19 nt, Artificial Sequence
  Description of Artificial Sequence: Synthetic oligonucleotide
gccgguacaugaggguacc

SEQ ID NO: 509357 - RNA, 19 nt, Artificial Sequence
  Description of Artificial Sequence: Synthetic oligonucleotide
caguaccgggccugcucuc

SEQ ID NO: 509358 - RNA, 19 nt, Artificial Sequence
  Description of Artificial Sequence: Synthetic oligonucleotide
agacuccgugacagcaggu

SEQ ID NO: 509359 - RNA, 19 nt, Artificial Sequence
  Description of Artificial Sequence: Synthetic oligonucleotide
gggccgcgcacugaggaug

SEQ ID NO: 509360 - RNA, 19 nt, Artificial Sequence
  Description of Artificial Sequence: Synthetic oligonucleotide
cuggcucuacggcucgaaa

SEQ ID NO: 509361 - RNA, 19 nt, Artificial Sequence
  Description of Artificial Sequence: Synthetic oligonucleotide
gcccucgcugaguuacagc

SEQ ID NO: 509362 - RNA, 19 nt, Artificial Sequence
  Description of Artificial Sequence: Synthetic oligonucleotide
ggugagcaaugcauguucu

SEQ ID NO: 509363 - RNA, 19 nt, Artificial Sequence
  Description of Artificial Sequence: Synthetic oligonucleotide
gcgguguccacagcaucgc

SEQ ID NO: 509364 - RNA, 19 nt, Artificial Sequence
  Description of Artificial Sequence: Synthetic oligonucleotide
agcguuuguggagccggua

SEQ ID NO: 509365 - RNA, 19 nt, Artificial Sequence
  Description of Artificial Sequence: Synthetic oligonucleotide
gcugacucugcgggccagg

SEQ ID NO: 509366 - RNA, 19 nt, Artificial Sequence
  Description of Artificial Sequence: Synthetic oligonucleotide
ggcugauagcgccgauuga

SEQ ID NO: 509367 - RNA, 19 nt, Artificial Sequence
  Description of Artificial Sequence: Synthetic oligonucleotide
cuucggccaccaggagcgg

SEQ ID NO: 509368 - RNA, 19 nt, Artificial Sequence
  Description of Artificial Sequence: Synthetic oligonucleotide
ccauaccccuggcaggguc

SEQ ID NO: 509369 - RNA, 19 nt, Artificial Sequence
  Description of Artificial Sequence: Synthetic oligonucleotide
gcacggcccaaguacaggu

SEQ ID NO: 509370 - RNA, 19 nt, Artificial Sequence
  Description of Artificial Sequence: Synthetic oligonucleotide
guagaguauucgagggaau

SEQ ID NO: 509371 - RNA, 19 nt, Artificial Sequence
  Description of Artificial Sequence: Synthetic oligonucleotide
gccaguucgaaggagcgau

SEQ ID NO: 509372 - RNA, 19 nt, Artificial Sequence
  Description of Artificial Sequence: Synthetic oligonucleotide
gcaaacgcaacaggagacu

SEQ ID NO: 509373 - RNA, 19 nt, Artificial Sequence
  Description of Artificial Sequence: Synthetic oligonucleotide
ccucugccgaugccugccg

SEQ ID NO: 509374 - RNA, 19 nt, Artificial Sequence
  Description of Artificial Sequence: Synthetic oligonucleotide
agucgaggguguacuccau

SEQ ID NO: 509375 - RNA, 19 nt, Artificial Sequence
  Description of Artificial Sequence: Synthetic oligonucleotide
agggagcgccggugcccuc

SEQ ID NO: 509376 - RNA, 19 nt, Artificial Sequence
  Description of Artificial Sequence: Synthetic oligonucleotide
gcgcacugaggaugucccc

SEQ ID NO: 509377 - RNA, 19 nt, Artificial Sequence
  Description of Artificial Sequence: Synthetic oligonucleotide
ccgucguucuaacucagcu

SEQ ID NO: 509378 - RNA, 19 nt, Artificial Sequence
  Description of Artificial Sequence: Synthetic oligonucleotide
ccgcgcacugaggaugucc

SEQ ID NO: 509379 - RNA, 19 nt, Artificial Sequence
  Description of Artificial Sequence: Synthetic oligonucleotide
gccgacgcccagagugucg

SEQ ID NO: 509380 - RNA, 19 nt, Artificial Sequence
  Description of Artificial Sequence: Synthetic oligonucleotide
cccuauucuuggccaguuc

SEQ ID NO: 509381 - RNA, 19 nt, Artificial Sequence
  Description of Artificial Sequence: Synthetic oligonucleotide
ccacgucugcccugcuggc

SEQ ID NO: 509382 - RNA, 19 nt, Artificial Sequence
  Description of Artificial Sequence: Synthetic oligonucleotide
ccaaagugugugugaaggu

SEQ ID NO: 509383 - RNA, 19 nt, Artificial Sequence
  Description of Artificial Sequence: Synthetic oligonucleotide
cacgggcugccagguaguc

SEQ ID NO: 509384 - RNA, 19 nt, Artificial Sequence
  Description of Artificial Sequence: Synthetic oligonucleotide
ccgauugagcugcuccaga

SEQ ID NO: 509385 - RNA, 19 nt, Artificial Sequence
  Description of Artificial Sequence: Synthetic oligonucleotide
uagcgccgauugagcugcu

SEQ ID NO: 509386 - RNA, 19 nt, Artificial Sequence
  Description of Artificial Sequence: Synthetic oligonucleotide
guacccucggagacagggu

SEQ ID NO: 509387 - RNA, 19 nt, Artificial Sequence
  Description of Artificial Sequence: Synthetic oligonucleotide
guaccgggccugcucuccu

SEQ ID NO: 509388 - RNA, 19 nt, Artificial Sequence
  Description of Artificial Sequence: Synthetic oligonucleotide
cagccgacgcccagagugu

SEQ ID NO: 509389 - RNA, 19 nt, Artificial Sequence
  Description of Artificial Sequence: Synthetic oligonucleotide
gugccacuguacgguuaac

SEQ ID NO: 509390 - RNA, 19 nt, Artificial Sequence
  Description of Artificial Sequence: Synthetic oligonucleotide
caccucgaagcgagagugu

SEQ ID NO: 509391 - RNA, 19 nt, Artificial Sequence
  Description of Artificial Sequence: Synthetic oligonucleotide
ggagcgccggugcccucgc

SEQ ID NO: 509392 - RNA, 19 nt, Artificial Sequence
  Description of Artificial Sequence: Synthetic oligonucleotide
ggccaguucgaaggagcga

SEQ ID NO: 509393 - RNA, 19 nt, Artificial Sequence
  Description of Artificial Sequence: Synthetic oligonucleotide
gccgaugccugccggucaa

SEQ ID NO: 509394 - RNA, 19 nt, Artificial Sequence
  Description of Artificial Sequence: Synthetic oligonucleotide
acgcaacaggagacuccgu

SEQ ID NO: 509395 - RNA, 19 nt, Artificial Sequence
  Description of Artificial Sequence: Synthetic oligonucleotide
caucgcccacgucugcccu

SEQ ID NO: 509396 - RNA, 19 nt, Artificial Sequence
  Description of Artificial Sequence: Synthetic oligonucleotide
ccagggcggcggaagcuuc

SEQ ID NO: 509397 - RNA, 19 nt, Artificial Sequence
  Description of Artificial Sequence: Synthetic oligonucleotide
cgccaucuguacaagcgaa

SEQ ID NO: 509398 - RNA, 19 nt, Artificial Sequence
  Description of Artificial Sequence: Synthetic oligonucleotide
cgaagcgagaguguggagu

SEQ ID NO: 509399 - RNA, 19 nt, Artificial Sequence
  Description of Artificial Sequence: Synthetic oligonucleotide
cucgagagcccagcucugu

SEQ ID NO: 509400 - RNA, 19 nt, Artificial Sequence
  Description of Artificial Sequence: Synthetic oligonucleotide
gcgcucucgagagcccagc

SEQ ID NO: 509401 - RNA, 19 nt, Artificial Sequence
  Description of Artificial Sequence: Synthetic oligonucleotide
agcgcaggcggggcugaua

SEQ ID NO: 509402 - RNA, 19 nt, Artificial Sequence
  Description of Artificial Sequence: Synthetic oligonucleotide
ccgguacaugaggguaccc

SEQ ID NO: 509403 - RNA, 19 nt, Artificial Sequence
  Description of Artificial Sequence: Synthetic oligonucleotide
gugcccucgcugaguuaca

SEQ ID NO: 509404 - RNA, 19 nt, Artificial Sequence
  Description of Artificial Sequence: Synthetic oligonucleotide
ggguaccgucguucuaacu

SEQ ID NO: 509405 - RNA, 19 nt, Artificial Sequence
  Description of Artificial Sequence: Synthetic oligonucleotide
cacgucugcccugcuggcu

SEQ ID NO: 509406 - RNA, 19 nt, Artificial Sequence
  Description of Artificial Sequence: Synthetic oligonucleotide
cccaggguaccgucguucu

SEQ ID NO: 509407 - RNA, 19 nt, Artificial Sequence
  Description of Artificial Sequence: Synthetic oligonucleotide
ccucgcugcccugugaagu

SEQ ID NO: 509408 - RNA, 19 nt, Artificial Sequence
  Description of Artificial Sequence: Synthetic oligonucleotide
ccaguucgaaggagcgaua

SEQ ID NO: 509409 - RNA, 19 nt, Artificial Sequence
  Description of Artificial Sequence: Synthetic oligonucleotide
ggguucggggccagcccca

SEQ ID NO: 509410 - RNA, 19 nt, Artificial Sequence
  Description of Artificial Sequence: Synthetic oligonucleotide
ccccucgcugcccugugaa

SEQ ID NO: 509411 - RNA, 19 nt, Artificial Sequence
  Description of Artificial Sequence: Synthetic oligonucleotide
gcggggcugauagcgccga

SEQ ID NO: 509412 - RNA, 19 nt, Artificial Sequence
  Description of Artificial Sequence: Synthetic oligonucleotide
gacuuccgacccaggucuu

SEQ ID NO: 509413 - RNA, 19 nt, Artificial Sequence
  Description of Artificial Sequence: Synthetic oligonucleotide
ccucggagacagggugaac

SEQ ID NO: 509414 - RNA, 19 nt, Artificial Sequence
  Description of Artificial Sequence: Synthetic oligonucleotide
cccucggagacagggugaa

SEQ ID NO: 509415 - RNA, 19 nt, Artificial Sequence
  Description of Artificial Sequence: Synthetic oligonucleotide
cgguacaugaggguacccu

SEQ ID NO: 509416 - RNA, 19 nt, Artificial Sequence
  Description of Artificial Sequence: Synthetic oligonucleotide
ggggcugauagcgccgauu

SEQ ID NO: 509417 - RNA, 19 nt, Artificial Sequence
  Description of Artificial Sequence: Synthetic oligonucleotide
cucgaggcuccaggacacu

SEQ ID NO: 509418 - RNA, 19 nt, Artificial Sequence
  Description of Artificial Sequence: Synthetic oligonucleotide
ccaggguaccgucguucua

SEQ ID NO: 509419 - RNA, 19 nt, Artificial Sequence
  Description of Artificial Sequence: Synthetic oligonucleotide
ccucgcugaguuacagcuu

SEQ ID NO: 509420 - RNA, 19 nt, Artificial Sequence
  Description of Artificial Sequence: Synthetic oligonucleotide
guacggccucccagccccu

SEQ ID NO: 509421 - RNA, 19 nt, Artificial Sequence
  Description of Artificial Sequence: Synthetic oligonucleotide
ccuucccggggcccauaua

SEQ ID NO: 509422 - RNA, 19 nt, Artificial Sequence
  Description of Artificial Sequence: Synthetic oligonucleotide
ccagagcgcugaagcguuu

SEQ ID NO: 509423 - RNA, 19 nt, Artificial Sequence
  Description of Artificial Sequence: Synthetic oligonucleotide
ccgaugccugccggucaaa

SEQ ID NO: 509424 - RNA, 19 nt, Artificial Sequence
  Description of Artificial Sequence: Synthetic oligonucleotide
cgggccgcgcacugaggau

SEQ ID NO: 509425 - RNA, 19 nt, Artificial Sequence
  Description of Artificial Sequence: Synthetic oligonucleotide
gauacaauccauuccaaag

SEQ ID NO: 509426 - RNA, 19 nt, Artificial Sequence
  Description of Artificial Sequence: Synthetic oligonucleotide
auacaauccauuccaaagc

SEQ ID NO: 509427 - RNA, 19 nt, Artificial Sequence
  Description of Artificial Sequence: Synthetic oligonucleotide
aguucgugaauucaucucc

SEQ ID NO: 509428 - RNA, 19 nt, Artificial Sequence
  Description of Artificial Sequence: Synthetic oligonucleotide
auuggauacaauccauucc

SEQ ID NO: 509429 - RNA, 19 nt, Artificial Sequence
  Description of Artificial Sequence: Synthetic oligonucleotide
ugaucaacaggccaugggg

SEQ ID NO: 509430 - RNA, 19 nt, Artificial Sequence
  Description of Artificial Sequence: Synthetic oligonucleotide
ugggaguucacaaaggccc

SEQ ID NO: 509431 - RNA, 19 nt, Artificial Sequence
  Description of Artificial Sequence: Synthetic oligonucleotide
ucucaugccgcucacacag

SEQ ID NO: 509432 - RNA, 19 nt, Artificial Sequence
  Description of Artificial Sequence: Synthetic oligonucleotide
agcacauugaccuccugcc

SEQ ID NO: 509433 - RNA, 19 nt, Artificial Sequence
  Description of Artificial Sequence: Synthetic oligonucleotide
aguaaauccaagaagaggu

SEQ ID NO: 509434 - RNA, 19 nt, Artificial Sequence
  Description of Artificial Sequence: Synthetic oligonucleotide
ggugguauggcauauaggc

SEQ ID NO: 509435 - RNA, 19 nt, Artificial Sequence
  Description of Artificial Sequence: Synthetic oligonucleotide
uacacggaggacuugaagc

SEQ ID NO: 509436 - RNA, 19 nt, Artificial Sequence
  Description of Artificial Sequence: Synthetic oligonucleotide
ucugcauucgcccaggguc

SEQ ID NO: 509437 - RNA, 19 nt, Artificial Sequence
  Description of Artificial Sequence: Synthetic oligonucleotide
aauccauuccaaagcaccc

SEQ ID NO: 509438 - RNA, 19 nt, Artificial Sequence
  Description of Artificial Sequence: Synthetic oligonucleotide
ucgaugaacucccugucgg

SEQ ID NO: 509439 - RNA, 19 nt, Artificial Sequence
  Description of Artificial Sequence: Synthetic oligonucleotide
ucugucucgaagcuuguag

SEQ ID NO: 509440 - RNA, 19 nt, Artificial Sequence
  Description of Artificial Sequence: Synthetic oligonucleotide
ugcaaagagguuuuaguga

SEQ ID NO: 509441 - RNA, 19 nt, Artificial Sequence
  Description of Artificial Sequence: Synthetic oligonucleotide
uagacauuucgaaucagcu

SEQ ID NO: 509442 - RNA, 19 nt, Artificial Sequence
  Description of Artificial Sequence: Synthetic oligonucleotide
auguucgugggucugucgc

SEQ ID NO: 509443 - RNA, 19 nt, Artificial Sequence
  Description of Artificial Sequence: Synthetic oligonucleotide
acggauaggcccuugagug

SEQ ID NO: 509444 - RNA, 19 nt, Artificial Sequence
  Description of Artificial Sequence: Synthetic oligonucleotide
ugaccugggauguucgugg

SEQ ID NO: 509445 - RNA, 19 nt, Artificial Sequence
  Description of Artificial Sequence: Synthetic oligonucleotide
uuuagugaggccacaggga

SEQ ID NO: 509446 - RNA, 19 nt, Artificial Sequence
  Description of Artificial Sequence: Synthetic oligonucleotide
auucccgcaguccauaaag

SEQ ID NO: 509447 - RNA, 19 nt, Artificial Sequence
  Description of Artificial Sequence: Synthetic oligonucleotide
aagauuggagucaggcacc

SEQ ID NO: 509448 - RNA, 19 nt, Artificial Sequence
  Description of Artificial Sequence: Synthetic oligonucleotide
guaggacuggaguaaaucc

SEQ ID NO: 509449 - RNA, 19 nt, Artificial Sequence
  Description of Artificial Sequence: Synthetic oligonucleotide
aagaucagcagcguuguca

SEQ ID NO: 509450 - RNA, 19 nt, Artificial Sequence
  Description of Artificial Sequence: Synthetic oligonucleotide
agagguuuuagugaggcca

SEQ ID NO: 509451 - RNA, 19 nt, Artificial Sequence
  Description of Artificial Sequence: Synthetic oligonucleotide
uggaaccucaagauuggag

SEQ ID NO: 509452 - RNA, 19 nt, Artificial Sequence
  Description of Artificial Sequence: Synthetic oligonucleotide
uuucggagcuccauggucu

SEQ ID NO: 509453 - RNA, 19 nt, Artificial Sequence
  Description of Artificial Sequence: Synthetic oligonucleotide
acacuuccaguuuauuggg

SEQ ID NO: 509454 - RNA, 19 nt, Artificial Sequence
  Description of Artificial Sequence: Synthetic oligonucleotide
aagcacccuaauuucccac

SEQ ID NO: 509455 - RNA, 19 nt, Artificial Sequence
  Description of Artificial Sequence: Synthetic oligonucleotide
gauaugcgaggugagaggc

SEQ ID NO: 509456 - RNA, 19 nt, Artificial Sequence
  Description of Artificial Sequence: Synthetic oligonucleotide
uguaucugggaguucacaa

SEQ ID NO: 509457 - RNA, 19 nt, Artificial Sequence
  Description of Artificial Sequence: Synthetic oligonucleotide
uacagggagaaguaguuuc

SEQ ID NO: 509458 - RNA, 19 nt, Artificial Sequence
  Description of Artificial Sequence: Synthetic oligonucleotide
cauuguagcgucuguacac

SEQ ID NO: 509459 - RNA, 19 nt, Artificial Sequence
  Description of Artificial Sequence: Synthetic oligonucleotide
ucauuguagcgucuguaca

SEQ ID NO: 509460 - RNA, 19 nt, Artificial Sequence
  Description of Artificial Sequence: Synthetic oligonucleotide
ucaguccguacuuaugcag

SEQ ID NO: 509461 - RNA, 19 nt, Artificial Sequence
  Description of Artificial Sequence: Synthetic oligonucleotide
uagacguggacaagcugcg

SEQ ID NO: 509462 - RNA, 19 nt, Artificial Sequence
  Description of Artificial Sequence: Synthetic oligonucleotide
guagacguggacaagcugc

SEQ ID NO: 509463 - RNA, 19 nt, Artificial Sequence
  Description of Artificial Sequence: Synthetic oligonucleotide
aaggcccuaagcauugugg

SEQ ID NO: 509464 - RNA, 19 nt, Artificial Sequence
  Description of Artificial Sequence: Synthetic oligonucleotide
cauuggauacaauccauuc

SEQ ID NO: 509465 - RNA, 19 nt, Artificial Sequence
  Description of Artificial Sequence: Synthetic oligonucleotide
uguuguagacauuucgaau

SEQ ID NO: 509466 - RNA, 19 nt, Artificial Sequence
  Description of Artificial Sequence: Synthetic oligonucleotide
gagaagaucagcagcguug

SEQ ID NO: 509467 - RNA, 19 nt, Artificial Sequence
  Description of Artificial Sequence: Synthetic oligonucleotide
ugguauggcauauaggcuu

SEQ ID NO: 509468 - RNA, 19 nt, Artificial Sequence
  Description of Artificial Sequence: Synthetic oligonucleotide
augugcagcgcucaucauc

SEQ ID NO: 509469 - RNA, 19 nt, Artificial Sequence
  Description of Artificial Sequence: Synthetic oligonucleotide
ugcgguacgggaauuugug

SEQ ID NO: 509470 - RNA, 19 nt, Artificial Sequence
  Description of Artificial Sequence: Synthetic oligonucleotide
gaaucagccagggacacac

SEQ ID NO: 509471 - RNA, 19 nt, Artificial Sequence
  Description of Artificial Sequence: Synthetic oligonucleotide
aggcccuaagcauuguggg

SEQ ID NO: 509472 - RNA, 19 nt, Artificial Sequence
  Description of Artificial Sequence: Synthetic oligonucleotide
uauuggguguggcaguaac

SEQ ID NO: 509473 - RNA, 19 nt, Artificial Sequence
  Description of Artificial Sequence: Synthetic oligonucleotide
aaaggcccuaagcauugug

SEQ ID NO: 509474 - RNA, 19 nt, Artificial Sequence
  Description of Artificial Sequence: Synthetic oligonucleotide
aggauaugcgaggugagag

SEQ ID NO: 509475 - RNA, 19 nt, Artificial Sequence
  Description of Artificial Sequence: Synthetic oligonucleotide
uuccugaccccucagccca

SEQ ID NO: 509476 - RNA, 19 nt, Artificial Sequence
  Description of Artificial Sequence: Synthetic oligonucleotide
uucgaaucagcucccggcu

SEQ ID NO: 509477 - RNA, 19 nt, Artificial Sequence
  Description of Artificial Sequence: Synthetic oligonucleotide
guagcgucuguacacggag

SEQ ID NO: 509478 - RNA, 19 nt, Artificial Sequence
  Description of Artificial Sequence: Synthetic oligonucleotide
gugacuaugugagaaaaga

SEQ ID NO: 509479 - RNA, 19 nt, Artificial Sequence
  Description of Artificial Sequence: Synthetic oligonucleotide
gugggcauuggauacaauc

SEQ ID NO: 509480 - RNA, 19 nt, Artificial Sequence
  Description of Artificial Sequence: Synthetic oligonucleotide
uguaggacuggaguaaauc

SEQ ID NO: 509481 - RNA, 19 nt, Artificial Sequence
  Description of Artificial Sequence: Synthetic oligonucleotide
cacuaguggggacacacgc

SEQ ID NO: 509482 - RNA, 19 nt, Artificial Sequence
  Description of Artificial Sequence: Synthetic oligonucleotide
agcuuagggcaauggcugc

SEQ ID NO: 509483 - RNA, 19 nt, Artificial Sequence
  Description of Artificial Sequence: Synthetic oligonucleotide
agugcuugcuucagggagc

SEQ ID NO: 509484 - RNA, 19 nt, Artificial Sequence
  Description of Artificial Sequence: Synthetic oligonucleotide
cuuagagcacuaccugagg

SEQ ID NO: 509485 - RNA, 19 nt, Artificial Sequence
  Description of Artificial Sequence: Synthetic oligonucleotide
caaaaggcccuaagcauug

SEQ ID NO: 509486 - RNA, 19 nt, Artificial Sequence
  Description of Artificial Sequence: Synthetic oligonucleotide
ucaacacgcugugaggucc

SEQ ID NO: 509487 - RNA, 19 nt, Artificial Sequence
  Description of Artificial Sequence: Synthetic oligonucleotide
cuaauuucccacugccgac

SEQ ID NO: 509488 - RNA, 19 nt, Artificial Sequence
  Description of Artificial Sequence: Synthetic oligonucleotide
guagacauuucgaaucagc

SEQ ID NO: 509489 - RNA, 19 nt, Artificial Sequence
  Description of Artificial Sequence: Synthetic oligonucleotide
cagcuuagggcaauggcug

SEQ ID NO: 509490 - RNA, 19 nt, Artificial Sequence
  Description of Artificial Sequence: Synthetic oligonucleotide
ucgugaauucaucucccac

SEQ ID NO: 509491 - RNA, 19 nt, Artificial Sequence
  Description of Artificial Sequence: Synthetic oligonucleotide
aacauggugguauggcaua

SEQ ID NO: 509492 - RNA, 19 nt, Artificial Sequence
  Description of Artificial Sequence: Synthetic oligonucleotide
ugggccgccuccuugagcu

SEQ ID NO: 509493 - RNA, 19 nt, Artificial Sequence
  Description of Artificial Sequence: Synthetic oligonucleotide
uggcggauccgccuccucg

SEQ ID NO: 509494 - RNA, 19 nt, Artificial Sequence
  Description of Artificial Sequence: Synthetic oligonucleotide
cucggcucugucucgaagc

SEQ ID NO: 509495 - RNA, 19 nt, Artificial Sequence
  Description of Artificial Sequence: Synthetic oligonucleotide
uuguagcgucuguacacgg

SEQ ID NO: 509496 - RNA, 19 nt, Artificial Sequence
  Description of Artificial Sequence: Synthetic oligonucleotide
uguagcgucuguacacgga

SEQ ID NO: 509497 - RNA, 19 nt, Artificial Sequence
  Description of Artificial Sequence: Synthetic oligonucleotide
acuaguggggacacacgcc

SEQ ID NO: 509498 - RNA, 19 nt, Artificial Sequence
  Description of Artificial Sequence: Synthetic oligonucleotide
cuugugcccuuguaucugg

SEQ ID NO: 509499 - RNA, 19 nt, Artificial Sequence
  Description of Artificial Sequence: Synthetic oligonucleotide
aaacauggugguauggcau

SEQ ID NO: 509500 - RNA, 19 nt, Artificial Sequence
  Description of Artificial Sequence: Synthetic oligonucleotide
agauuggagucaggcaccc

SEQ ID NO: 509501 - RNA, 19 nt, Artificial Sequence
  Description of Artificial Sequence: Synthetic oligonucleotide
cuggaaaccucauacucca

SEQ ID NO: 509502 - RNA, 19 nt, Artificial Sequence
  Description of Artificial Sequence: Synthetic oligonucleotide
acuaugcgugacucgagcu

SEQ ID NO: 509503 - RNA, 19 nt, Artificial Sequence
  Description of Artificial Sequence: Synthetic oligonucleotide
uucaucaguccguacuuau

SEQ ID NO: 509504 - RNA, 19 nt, Artificial Sequence
  Description of Artificial Sequence: Synthetic oligonucleotide
ggauaugcgaggugagagg

SEQ ID NO: 509505 - RNA, 19 nt, Artificial Sequence
  Description of Artificial Sequence: Synthetic oligonucleotide
acaauccauuccaaagcac

SEQ ID NO: 509506 - RNA, 19 nt, Artificial Sequence
  Description of Artificial Sequence: Synthetic oligonucleotide
acggacucgggcucucggc

SEQ ID NO: 509507 - RNA, 19 nt, Artificial Sequence
  Description of Artificial Sequence: Synthetic oligonucleotide
cuaugcgugacucgagcug

SEQ ID NO: 509508 - RNA, 19 nt, Artificial Sequence
  Description of Artificial Sequence: Synthetic oligonucleotide
cacucucuuggguggaagg

SEQ ID NO: 509509 - RNA, 19 nt, Artificial Sequence
  Description of Artificial Sequence: Synthetic oligonucleotide
gguacgggaauuugugaag

SEQ ID NO: 509510 - RNA, 19 nt, Artificial Sequence
  Description of Artificial Sequence: Synthetic oligonucleotide
ggcgucaacacgcugugag

SEQ ID NO: 509511 - RNA, 19 nt, Artificial Sequence
  Description of Artificial Sequence: Synthetic oligonucleotide
guaacugauucccgcaguc

SEQ ID NO: 509512 - RNA, 19 nt, Artificial Sequence
  Description of Artificial Sequence: Synthetic oligonucleotide
cugcauucgcccagggucc

SEQ ID NO: 509513 - RNA, 19 nt, Artificial Sequence
  Description of Artificial Sequence: Synthetic oligonucleotide
cacuaugcgugacucgagc

SEQ ID NO: 509514 - RNA, 19 nt, Artificial Sequence
  Description of Artificial Sequence: Synthetic oligonucleotide
aggagugacuaugugagaa

SEQ ID NO: 509515 - RNA, 19 nt, Artificial Sequence
  Description of Artificial Sequence: Synthetic oligonucleotide
uucgugaauucaucuccca

SEQ ID NO: 509516 - RNA, 19 nt, Artificial Sequence
  Description of Artificial Sequence: Synthetic oligonucleotide
cagguagacguggacaagc

SEQ ID NO: 509517 - RNA, 19 nt, Artificial Sequence
  Description of Artificial Sequence: Synthetic oligonucleotide
guacgggaauuugugaagc

SEQ ID NO: 509518 - RNA, 19 nt, Artificial Sequence
  Description of Artificial Sequence: Synthetic oligonucleotide
ugccgaccugaucaacagg

SEQ ID NO: 509519 - RNA, 19 nt, Artificial Sequence
  Description of Artificial Sequence: Synthetic oligonucleotide
agcguugucaauggcccgg

SEQ ID NO: 509520 - RNA, 19 nt, Artificial Sequence
  Description of Artificial Sequence: Synthetic oligonucleotide
acgggaauuugugaagcag

SEQ ID NO: 509521 - RNA, 19 nt, Artificial Sequence
  Description of Artificial Sequence: Synthetic oligonucleotide
ccgaauaugagaagaucag

SEQ ID NO: 509522 - RNA, 19 nt, Artificial Sequence
  Description of Artificial Sequence: Synthetic oligonucleotide
caguaacugauucccgcag

SEQ ID NO: 509523 - RNA, 19 nt, Artificial Sequence
  Description of Artificial Sequence: Synthetic oligonucleotide
ggcaguaacugauucccgc

SEQ ID NO: 509524 - RNA, 19 nt, Artificial Sequence
  Description of Artificial Sequence: Synthetic oligonucleotide
cuuacaguucgugaauuca

SEQ ID NO: 509525 - RNA, 19 nt, Artificial Sequence
  Description of Artificial Sequence: Synthetic oligonucleotide
aucaguccguacuuaugca

SEQ ID NO: 509526 - RNA, 19 nt, Artificial Sequence
  Description of Artificial Sequence: Synthetic oligonucleotide
cugucgugggucuugccac

SEQ ID NO: 509527 - RNA, 19 nt, Artificial Sequence
  Description of Artificial Sequence: Synthetic oligonucleotide
uacgggaauuugugaagca

SEQ ID NO: 509528 - RNA, 19 nt, Artificial Sequence
  Description of Artificial Sequence: Synthetic oligonucleotide
ugcccuuguaucugggagu

SEQ ID NO: 509529 - RNA, 19 nt, Artificial Sequence
  Description of Artificial Sequence: Synthetic oligonucleotide
agugacuaugugagaaaag

SEQ ID NO: 509530 - RNA, 19 nt, Artificial Sequence
  Description of Artificial Sequence: Synthetic oligonucleotide
cuaguggggacacacgcca

SEQ ID NO: 509531 - RNA, 19 nt, Artificial Sequence
  Description of Artificial Sequence: Synthetic oligonucleotide
aauggcccgggacgcgauc

SEQ ID NO: 509532 - RNA, 19 nt, Artificial Sequence
  Description of Artificial Sequence: Synthetic oligonucleotide
uggauacaauccauuccaa

SEQ ID NO: 509533 - RNA, 19 nt, Artificial Sequence
  Description of Artificial Sequence: Synthetic oligonucleotide
ugucaauggcccgggacgc

SEQ ID NO: 509534 - RNA, 19 nt, Artificial Sequence
  Description of Artificial Sequence: Synthetic oligonucleotide
gagaaguaguuucggagcu

SEQ ID NO: 509535 - RNA, 19 nt, Artificial Sequence
  Description of Artificial Sequence: Synthetic oligonucleotide
caguucgugaauucaucuc

SEQ ID NO: 509536 - RNA, 19 nt, Artificial Sequence
  Description of Artificial Sequence: Synthetic oligonucleotide
acguggacaagcugcgucu

SEQ ID NO: 509537 - RNA, 19 nt, Artificial Sequence
  Description of Artificial Sequence: Synthetic oligonucleotide
agcacccuaauuucccacu

SEQ ID NO: 509538 - RNA, 19 nt, Artificial Sequence
  Description of Artificial Sequence: Synthetic oligonucleotide
aacuccacggauaggcccu

SEQ ID NO: 509539 - RNA, 19 nt, Artificial Sequence
  Description of Artificial Sequence: Synthetic oligonucleotide
agagcacuaccugaggccu

SEQ ID NO: 509540 - RNA, 19 nt, Artificial Sequence
  Description of Artificial Sequence: Synthetic oligonucleotide
cuguuguagacauuucgaa

SEQ ID NO: 509541 - RNA, 19 nt, Artificial Sequence
  Description of Artificial Sequence: Synthetic oligonucleotide
guuucggagcuccaugguc

SEQ ID NO: 509542 - RNA, 19 nt, Artificial Sequence
  Description of Artificial Sequence: Synthetic oligonucleotide
gccuagagcacugagcucc

SEQ ID NO: 509543 - RNA, 19 nt, Artificial Sequence
  Description of Artificial Sequence: Synthetic oligonucleotide
ggaaccucaagauuggagu

SEQ ID NO: 509544 - RNA, 19 nt, Artificial Sequence
  Description of Artificial Sequence: Synthetic oligonucleotide
gacaccacuugcugacuac

SEQ ID NO: 509545 - RNA, 19 nt, Artificial Sequence
  Description of Artificial Sequence: Synthetic oligonucleotide
guucgugaauucaucuccc

SEQ ID NO: 509546 - RNA, 19 nt, Artificial Sequence
  Description of Artificial Sequence: Synthetic oligonucleotide
agcaacggauuccccuggg

SEQ ID NO: 509547 - RNA, 19 nt, Artificial Sequence
  Description of Artificial Sequence: Synthetic oligonucleotide
gacgcgauccgcucggcuc

SEQ ID NO: 509548 - RNA, 19 nt, Artificial Sequence
  Description of Artificial Sequence: Synthetic oligonucleotide
cacgcugugagguccagca

SEQ ID NO: 509549 - RNA, 19 nt, Artificial Sequence
  Description of Artificial Sequence: Synthetic oligonucleotide
agaguuugaggagcacauc

SEQ ID NO: 509550 - RNA, 19 nt, Artificial Sequence
  Description of Artificial Sequence: Synthetic oligonucleotide
ucgcgguggcgucaacacg

SEQ ID NO: 509551 - RNA, 19 nt, Artificial Sequence
  Description of Artificial Sequence: Synthetic oligonucleotide
uguucgugggucugucgcu

SEQ ID NO: 509552 - RNA, 19 nt, Artificial Sequence
  Description of Artificial Sequence: Synthetic oligonucleotide
uuaugcagcgcccgcugau

SEQ ID NO: 509553 - RNA, 19 nt, Artificial Sequence
  Description of Artificial Sequence: Synthetic oligonucleotide
gccccaaucccacaggacc

SEQ ID NO: 509554 - RNA, 19 nt, Artificial Sequence
  Description of Artificial Sequence: Synthetic oligonucleotide
ucggcuaugugcagcgcuc

SEQ ID NO: 509555 - RNA, 19 nt, Artificial Sequence
  Description of Artificial Sequence: Synthetic oligonucleotide
cugccgaccugaucaacag

SEQ ID NO: 509556 - RNA, 19 nt, Artificial Sequence
  Description of Artificial Sequence: Synthetic oligonucleotide
uucgugggucugucgcugg

SEQ ID NO: 509557 - RNA, 19 nt, Artificial Sequence
  Description of Artificial Sequence: Synthetic oligonucleotide
aguuucggagcuccauggu

SEQ ID NO: 509558 - RNA, 19 nt, Artificial Sequence
  Description of Artificial Sequence: Synthetic oligonucleotide
ggacuugaagcgcuggcug

SEQ ID NO: 509559 - RNA, 19 nt, Artificial Sequence
  Description of Artificial Sequence: Synthetic oligonucleotide
caagcugcgucuccuggug

SEQ ID NO: 509560 - RNA, 19 nt, Artificial Sequence
  Description of Artificial Sequence: Synthetic oligonucleotide
gagugacuaugugagaaaa

SEQ ID NO: 509561 - RNA, 19 nt, Artificial Sequence
  Description of Artificial Sequence: Synthetic oligonucleotide
ugagcuccuucccgaauau

SEQ ID NO: 509562 - RNA, 19 nt, Artificial Sequence
  Description of Artificial Sequence: Synthetic oligonucleotide
auggcccgggacgcgaucc

SEQ ID NO: 509563 - RNA, 19 nt, Artificial Sequence
  Description of Artificial Sequence: Synthetic oligonucleotide
cccgaauaugagaagauca

SEQ ID NO: 509564 - RNA, 19 nt, Artificial Sequence
  Description of Artificial Sequence: Synthetic oligonucleotide
ucccgaauaugagaagauc

SEQ ID NO: 509565 - RNA, 19 nt, Artificial Sequence
  Description of Artificial Sequence: Synthetic oligonucleotide
auaggcuugggcagcagga

SEQ ID NO: 509566 - RNA, 19 nt, Artificial Sequence
  Description of Artificial Sequence: Synthetic oligonucleotide
ucauucccacccuccaaaa

SEQ ID NO: 509567 - RNA, 19 nt, Artificial Sequence
  Description of Artificial Sequence: Synthetic oligonucleotide
guacagggacucuuggcuc

SEQ ID NO: 509568 - RNA, 19 nt, Artificial Sequence
  Description of Artificial Sequence: Synthetic oligonucleotide
ggucacgccgcucagugac

SEQ ID NO: 509569 - RNA, 19 nt, Artificial Sequence
  Description of Artificial Sequence: Synthetic oligonucleotide
cagggagaaguaguuucgg

SEQ ID NO: 509570 - RNA, 19 nt, Artificial Sequence
  Description of Artificial Sequence: Synthetic oligonucleotide
accacuugcugacuacaaa

SEQ ID NO: 509571 - RNA, 19 nt, Artificial Sequence
  Description of Artificial Sequence: Synthetic oligonucleotide
cauaaagugcuucauucau

SEQ ID NO: 509572 - RNA, 19 nt, Artificial Sequence
  Description of Artificial Sequence: Synthetic oligonucleotide
ugcgaggugagaggcaggu

SEQ ID NO: 509573 - RNA, 19 nt, Artificial Sequence
  Description of Artificial Sequence: Synthetic oligonucleotide
cacccuaauuucccacugc

SEQ ID NO: 509574 - RNA, 19 nt, Artificial Sequence
  Description of Artificial Sequence: Synthetic oligonucleotide
ccuaauuucccacugccga

SEQ ID NO: 509575 - RNA, 19 nt, Artificial Sequence
  Description of Artificial Sequence: Synthetic oligonucleotide
cacgugcugaggugcagag

SEQ ID NO: 509576 - RNA, 19 nt, Artificial Sequence
  Description of Artificial Sequence: Synthetic oligonucleotide
cauuucgaaucagcucccg

SEQ ID NO: 509577 - RNA, 19 nt, Artificial Sequence
  Description of Artificial Sequence: Synthetic oligonucleotide
cuuuguaggacuggaguaa

SEQ ID NO: 509578 - RNA, 19 nt, Artificial Sequence
  Description of Artificial Sequence: Synthetic oligonucleotide
aguaguuucggagcuccau

SEQ ID NO: 509579 - RNA, 19 nt, Artificial Sequence
  Description of Artificial Sequence: Synthetic oligonucleotide
cuggagugaaacauguccu

SEQ ID NO: 509580 - RNA, 19 nt, Artificial Sequence
  Description of Artificial Sequence: Synthetic oligonucleotide
gguuuuagugaggccacag

SEQ ID NO: 509581 - RNA, 19 nt, Artificial Sequence
  Description of Artificial Sequence: Synthetic oligonucleotide
gccgaccugaucaacaggc

SEQ ID NO: 509582 - RNA, 19 nt, Artificial Sequence
  Description of Artificial Sequence: Synthetic oligonucleotide
augaagcgcuucagggccc

SEQ ID NO: 509583 - RNA, 19 nt, Artificial Sequence
  Description of Artificial Sequence: Synthetic oligonucleotide
ucaauggcccgggacgcga

SEQ ID NO: 509584 - RNA, 19 nt, Artificial Sequence
  Description of Artificial Sequence: Synthetic oligonucleotide
gcagcaacggauuccccug

SEQ ID NO: 509585 - RNA, 19 nt, Artificial Sequence
  Description of Artificial Sequence: Synthetic oligonucleotide
guggcgucaacacgcugug

SEQ ID NO: 509586 - RNA, 19 nt, Artificial Sequence
  Description of Artificial Sequence: Synthetic oligonucleotide
ucugucgcuggcggauccg

SEQ ID NO: 509587 - RNA, 19 nt, Artificial Sequence
  Description of Artificial Sequence: Synthetic oligonucleotide
agugaccugggauguucgu

SEQ ID NO: 509588 - RNA, 19 nt, Artificial Sequence
  Description of Artificial Sequence: Synthetic oligonucleotide
gguguaggacagcagcaac

SEQ ID NO: 509589 - RNA, 19 nt, Artificial Sequence
  Description of Artificial Sequence: Synthetic oligonucleotide
cucgagcugcuccacggac

SEQ ID NO: 509590 - RNA, 19 nt, Artificial Sequence
  Description of Artificial Sequence: Synthetic oligonucleotide
caugcgguacgggaauuug

SEQ ID NO: 509591 - RNA, 19 nt, Artificial Sequence
  Description of Artificial Sequence: Synthetic oligonucleotide
aaaccccuccucauuccca

SEQ ID NO: 509592 - RNA, 19 nt, Artificial Sequence
  Description of Artificial Sequence: Synthetic oligonucleotide
aaaaggcccuaagcauugu

SEQ ID NO: 509593 - RNA, 19 nt, Artificial Sequence
  Description of Artificial Sequence: Synthetic oligonucleotide
ugucgugggucuugccacu

SEQ ID NO: 509594 - RNA, 19 nt, Artificial Sequence
  Description of Artificial Sequence: Synthetic oligonucleotide
agucauuguagcgucugua

SEQ ID NO: 509595 - RNA, 19 nt, Artificial Sequence
  Description of Artificial Sequence: Synthetic oligonucleotide
cagcaacggauuccccugg

SEQ ID NO: 509596 - RNA, 19 nt, Artificial Sequence
  Description of Artificial Sequence: Synthetic oligonucleotide
agcgacugccggcgagggc

SEQ ID NO: 509597 - RNA, 19 nt, Artificial Sequence
  Description of Artificial Sequence: Synthetic oligonucleotide
gugaccugggauguucgug

SEQ ID NO: 509598 - RNA, 19 nt, Artificial Sequence
  Description of Artificial Sequence: Synthetic oligonucleotide
gguagacguggacaagcug

SEQ ID NO: 509599 - RNA, 19 nt, Artificial Sequence
  Description of Artificial Sequence: Synthetic oligonucleotide
cagcguugucaauggcccg

SEQ ID NO: 509600 - RNA, 19 nt, Artificial Sequence
  Description of Artificial Sequence: Synthetic oligonucleotide
gguauggcauauaggcuug

SEQ ID NO: 509601 - RNA, 19 nt, Artificial Sequence
  Description of Artificial Sequence: Synthetic oligonucleotide
cacggaggacuugaagcgc

SEQ ID NO: 509602 - RNA, 19 nt, Artificial Sequence
  Description of Artificial Sequence: Synthetic oligonucleotide
augccagaagggguacagg

SEQ ID NO: 509603 - RNA, 19 nt, Artificial Sequence
  Description of Artificial Sequence: Synthetic oligonucleotide
ugggauguucgugggucug

SEQ ID NO: 509604 - RNA, 19 nt, Artificial Sequence
  Description of Artificial Sequence: Synthetic oligonucleotide
acgcgauccgcucggcucu

SEQ ID NO: 509605 - RNA, 19 nt, Artificial Sequence
  Description of Artificial Sequence: Synthetic oligonucleotide
gcaguaacugauucccgca

SEQ ID NO: 509606 - RNA, 19 nt, Artificial Sequence
  Description of Artificial Sequence: Synthetic oligonucleotide
acacgcugugagguccagc

SEQ ID NO: 509607 - RNA, 19 nt, Artificial Sequence
  Description of Artificial Sequence: Synthetic oligonucleotide
gcaacggauuccccugggg

SEQ ID NO: 509608 - RNA, 19 nt, Artificial Sequence
  Description of Artificial Sequence: Synthetic oligonucleotide
gcgucaacacgcugugagg

SEQ ID NO: 509609 - RNA, 19 nt, Artificial Sequence
  Description of Artificial Sequence: Synthetic oligonucleotide
ggcaaggagugacuaugug

SEQ ID NO: 509610 - RNA, 19 nt, Artificial Sequence
  Description of Artificial Sequence: Synthetic oligonucleotide
ggcagguagacguggacaa

SEQ ID NO: 509611 - RNA, 19 nt, Artificial Sequence
  Description of Artificial Sequence: Synthetic oligonucleotide
accugaucaacaggccaug

SEQ ID NO: 509612 - RNA, 19 nt, Artificial Sequence
  Description of Artificial Sequence: Synthetic oligonucleotide
cgaauaugagaagaucagc

SEQ ID NO: 509613 - RNA, 19 nt, Artificial Sequence
  Description of Artificial Sequence: Synthetic oligonucleotide
uuggcccuagcagccagcu

SEQ ID NO: 509614 - RNA, 19 nt, Artificial Sequence
  Description of Artificial Sequence: Synthetic oligonucleotide
augucagccgggaggaagu

SEQ ID NO: 509615 - RNA, 19 nt, Artificial Sequence
  Description of Artificial Sequence: Synthetic oligonucleotide
cacuggagugaaacauguc

SEQ ID NO: 509616 - RNA, 19 nt, Artificial Sequence
  Description of Artificial Sequence: Synthetic oligonucleotide
gaucgcgguggcgucaaca

SEQ ID NO: 509617 - RNA, 19 nt, Artificial Sequence
  Description of Artificial Sequence: Synthetic oligonucleotide
gcuuacaguucgugaauuc

SEQ ID NO: 509618 - RNA, 19 nt, Artificial Sequence
  Description of Artificial Sequence: Synthetic oligonucleotide
agcuuacaguucgugaauu

SEQ ID NO: 509619 - RNA, 19 nt, Artificial Sequence
  Description of Artificial Sequence: Synthetic oligonucleotide
gucugucgcuggcggaucc

SEQ ID NO: 509620 - RNA, 19 nt, Artificial Sequence
  Description of Artificial Sequence: Synthetic oligonucleotide
ucgggcucucggcuaugug

SEQ ID NO: 509621 - RNA, 19 nt, Artificial Sequence
  Description of Artificial Sequence: Synthetic oligonucleotide
ccagcuuacaguucgugaa

SEQ ID NO: 509622 - RNA, 19 nt, Artificial Sequence
  Description of Artificial Sequence: Synthetic oligonucleotide
acugagcuccuucccgaau

SEQ ID NO: 509623 - RNA, 19 nt, Artificial Sequence
  Description of Artificial Sequence: Synthetic oligonucleotide
agguagacguggacaagcu

SEQ ID NO: 509624 - RNA, 19 nt, Artificial Sequence
  Description of Artificial Sequence: Synthetic oligonucleotide
auucgcccaggguccaggu

SEQ ID NO: 509625 - RNA, 19 nt, Artificial Sequence
  Description of Artificial Sequence: Synthetic oligonucleotide
acggaggacuugaagcgcu

SEQ ID NO: 509626 - RNA, 19 nt, Artificial Sequence
  Description of Artificial Sequence: Synthetic oligonucleotide
caaagagacagcucagcuu

SEQ ID NO: 509627 - RNA, 19 nt, Artificial Sequence
  Description of Artificial Sequence: Synthetic oligonucleotide
gcacccuaauuucccacug

SEQ ID NO: 509628 - RNA, 19 nt, Artificial Sequence
  Description of Artificial Sequence: Synthetic oligonucleotide
cgcgguggcgucaacacgc

SEQ ID NO: 509629 - RNA, 19 nt, Artificial Sequence
  Description of Artificial Sequence: Synthetic oligonucleotide
cacccuccaaaacccaaca

SEQ ID NO: 509630 - RNA, 19 nt, Artificial Sequence
  Description of Artificial Sequence: Synthetic oligonucleotide
uaugugcagcgcucaucau

SEQ ID NO: 509631 - RNA, 19 nt, Artificial Sequence
  Description of Artificial Sequence: Synthetic oligonucleotide
auauaggcuugggcagcag

SEQ ID NO: 509632 - RNA, 19 nt, Artificial Sequence
  Description of Artificial Sequence: Synthetic oligonucleotide
ucgucagccuccgccucag

SEQ ID NO: 509633 - RNA, 19 nt, Artificial Sequence
  Description of Artificial Sequence: Synthetic oligonucleotide
ccuuguaucugggaguuca

SEQ ID NO: 509634 - RNA, 19 nt, Artificial Sequence
  Description of Artificial Sequence: Synthetic oligonucleotide
ccggcucauggcaaacugg

SEQ ID NO: 509635 - RNA, 19 nt, Artificial Sequence
  Description of Artificial Sequence: Synthetic oligonucleotide
ggagugacuaugugagaaa

SEQ ID NO: 509636 - RNA, 19 nt, Artificial Sequence
  Description of Artificial Sequence: Synthetic oligonucleotide
uaguggggacacacgccau

SEQ ID NO: 509637 - RNA, 19 nt, Artificial Sequence
  Description of Artificial Sequence: Synthetic oligonucleotide
cauauaggcuugggcagca

SEQ ID NO: 509638 - RNA, 19 nt, Artificial Sequence
  Description of Artificial Sequence: Synthetic oligonucleotide
cuuaugcagcgcccgcuga

SEQ ID NO: 509639 - RNA, 19 nt, Artificial Sequence
  Description of Artificial Sequence: Synthetic oligonucleotide
gccagcuuacaguucguga

SEQ ID NO: 509640 - RNA, 19 nt, Artificial Sequence
  Description of Artificial Sequence: Synthetic oligonucleotide
ccuccugcggggaucgcgg

SEQ ID NO: 509641 - RNA, 19 nt, Artificial Sequence
  Description of Artificial Sequence: Synthetic oligonucleotide
acauggugguauggcauau

SEQ ID NO: 509642 - RNA, 19 nt, Artificial Sequence
  Description of Artificial Sequence: Synthetic oligonucleotide
augcgguacgggaauuugu

SEQ ID NO: 509643 - RNA, 19 nt, Artificial Sequence
  Description of Artificial Sequence: Synthetic oligonucleotide
cugggagcacauugaccuc

SEQ ID NO: 509644 - RNA, 19 nt, Artificial Sequence
  Description of Artificial Sequence: Synthetic oligonucleotide
gaccugaucaacaggccau

SEQ ID NO: 509645 - RNA, 19 nt, Artificial Sequence
  Description of Artificial Sequence: Synthetic oligonucleotide
ccacuaguggggacacacg

SEQ ID NO: 509646 - RNA, 19 nt, Artificial Sequence
  Description of Artificial Sequence: Synthetic oligonucleotide
cauuccauaccuugcucau

SEQ ID NO: 509647 - RNA, 19 nt, Artificial Sequence
  Description of Artificial Sequence: Synthetic oligonucleotide
cugacuacaaaaggcccua

SEQ ID NO: 509648 - RNA, 19 nt, Artificial Sequence
  Description of Artificial Sequence: Synthetic oligonucleotide
ccugggauguucguggguc

SEQ ID NO: 509649 - RNA, 19 nt, Artificial Sequence
  Description of Artificial Sequence: Synthetic oligonucleotide
cugucgcuggcggauccgc

SEQ ID NO: 509650 - RNA, 19 nt, Artificial Sequence
  Description of Artificial Sequence: Synthetic oligonucleotide
cuggcaccaugcgguacgg

SEQ ID NO: 509651 - RNA, 19 nt, Artificial Sequence
  Description of Artificial Sequence: Synthetic oligonucleotide
ugcauucgcccagggucca

SEQ ID NO: 509652 - RNA, 19 nt, Artificial Sequence
  Description of Artificial Sequence: Synthetic oligonucleotide
caggauaugcgaggugaga

SEQ ID NO: 509653 - RNA, 19 nt, Artificial Sequence
  Description of Artificial Sequence: Synthetic oligonucleotide
uggcaccaugcgguacggg

SEQ ID NO: 509654 - RNA, 19 nt, Artificial Sequence
  Description of Artificial Sequence: Synthetic oligonucleotide
aggucacgccgcucaguga

SEQ ID NO: 509655 - RNA, 19 nt, Artificial Sequence
  Description of Artificial Sequence: Synthetic oligonucleotide
gggacacacuguuugcaaa

SEQ ID NO: 509656 - RNA, 19 nt, Artificial Sequence
  Description of Artificial Sequence: Synthetic oligonucleotide
acggauuccccuggggcau

SEQ ID NO: 509657 - RNA, 19 nt, Artificial Sequence
  Description of Artificial Sequence: Synthetic oligonucleotide
ggacaagcugcgucuccug

SEQ ID NO: 509658 - RNA, 19 nt, Artificial Sequence
  Description of Artificial Sequence: Synthetic oligonucleotide
ccguacuuaugcagcgccc

SEQ ID NO: 509659 - RNA, 19 nt, Artificial Sequence
  Description of Artificial Sequence: Synthetic oligonucleotide
agcacccaacagggaugcc

SEQ ID NO: 509660 - RNA, 19 nt, Artificial Sequence
  Description of Artificial Sequence: Synthetic oligonucleotide
gguccagcaaagagacagc

SEQ ID NO: 509661 - RNA, 19 nt, Artificial Sequence
  Description of Artificial Sequence: Synthetic oligonucleotide
cuucggcuucaggucauuc

SEQ ID NO: 509662 - RNA, 19 nt, Artificial Sequence
  Description of Artificial Sequence: Synthetic oligonucleotide
ucucggcuaugugcagcgc

SEQ ID NO: 509663 - RNA, 19 nt, Artificial Sequence
  Description of Artificial Sequence: Synthetic oligonucleotide
uucauucauccagccccaa

SEQ ID NO: 509664 - RNA, 19 nt, Artificial Sequence
  Description of Artificial Sequence: Synthetic oligonucleotide
ccgaccugaucaacaggcc

SEQ ID NO: 509665 - RNA, 19 nt, Artificial Sequence
  Description of Artificial Sequence: Synthetic oligonucleotide
ccugaucaacaggccaugg

SEQ ID NO: 509666 - RNA, 19 nt, Artificial Sequence
  Description of Artificial Sequence: Synthetic oligonucleotide
gcgacugccggcgagggca

SEQ ID NO: 509667 - RNA, 19 nt, Artificial Sequence
  Description of Artificial Sequence: Synthetic oligonucleotide
caucucccacgcccugggc

SEQ ID NO: 509668 - RNA, 19 nt, Artificial Sequence
  Description of Artificial Sequence: Synthetic oligonucleotide
gucuggaugucagccggga

SEQ ID NO: 509669 - RNA, 19 nt, Artificial Sequence
  Description of Artificial Sequence: Synthetic oligonucleotide
cugaagggccuuggaccag

SEQ ID NO: 509670 - RNA, 19 nt, Artificial Sequence
  Description of Artificial Sequence: Synthetic oligonucleotide
cagggagccccacgugcug

SEQ ID NO: 509671 - RNA, 19 nt, Artificial Sequence
  Description of Artificial Sequence: Synthetic oligonucleotide
augcgaggugagaggcagg

SEQ ID NO: 509672 - RNA, 19 nt, Artificial Sequence
  Description of Artificial Sequence: Synthetic oligonucleotide
gguggcgucaacacgcugu

SEQ ID NO: 509673 - RNA, 19 nt, Artificial Sequence
  Description of Artificial Sequence: Synthetic oligonucleotide
gauuggagucaggcaccca

SEQ ID NO: 509674 - RNA, 19 nt, Artificial Sequence
  Description of Artificial Sequence: Synthetic oligonucleotide
gggaaucagccagggacac

SEQ ID NO: 509675 - RNA, 19 nt, Artificial Sequence
  Description of Artificial Sequence: Synthetic oligonucleotide
acgcugugagguccagcaa

SEQ ID NO: 509676 - RNA, 19 nt, Artificial Sequence
  Description of Artificial Sequence: Synthetic oligonucleotide
cucggcuaugugcagcgcu

SEQ ID NO: 509677 - RNA, 19 nt, Artificial Sequence
  Description of Artificial Sequence: Synthetic oligonucleotide
ccacuaugcgugacucgag

SEQ ID NO: 509678 - RNA, 19 nt, Artificial Sequence
  Description of Artificial Sequence: Synthetic oligonucleotide
gcgguacgggaauuuguga

SEQ ID NO: 509679 - RNA, 19 nt, Artificial Sequence
  Description of Artificial Sequence: Synthetic oligonucleotide
gcuaugugcagcgcucauc

SEQ ID NO: 509680 - RNA, 19 nt, Artificial Sequence
  Description of Artificial Sequence: Synthetic oligonucleotide
uccggcggcccucgaugaa

SEQ ID NO: 509681 - RNA, 19 nt, Artificial Sequence
  Description of Artificial Sequence: Synthetic oligonucleotide
gucuugccacuagugggga

SEQ ID NO: 509682 - RNA, 19 nt, Artificial Sequence
  Description of Artificial Sequence: Synthetic oligonucleotide
ccuugugcccuuguaucug

SEQ ID NO: 509683 - RNA, 19 nt, Artificial Sequence
  Description of Artificial Sequence: Synthetic oligonucleotide
gcugacuacaaaaggcccu

SEQ ID NO: 509684 - RNA, 19 nt, Artificial Sequence
  Description of Artificial Sequence: Synthetic oligonucleotide
ccucaagauuggagucagg

SEQ ID NO: 509685 - RNA, 19 nt, Artificial Sequence
  Description of Artificial Sequence: Synthetic oligonucleotide
gcagguagacguggacaag

SEQ ID NO: 509686 - RNA, 19 nt, Artificial Sequence
  Description of Artificial Sequence: Synthetic oligonucleotide
gaacucccugucggcuccc

SEQ ID NO: 509687 - RNA, 19 nt, Artificial Sequence
  Description of Artificial Sequence: Synthetic oligonucleotide
gcguugucaauggcccggg

SEQ ID NO: 509688 - RNA, 19 nt, Artificial Sequence
  Description of Artificial Sequence: Synthetic oligonucleotide
gauuccccuggggcaucug

SEQ ID NO: 509689 - RNA, 19 nt, Artificial Sequence
  Description of Artificial Sequence: Synthetic oligonucleotide
gggagccccacgugcugag

SEQ ID NO: 509690 - RNA, 19 nt, Artificial Sequence
  Description of Artificial Sequence: Synthetic oligonucleotide
gucgcuggcggauccgccu

SEQ ID NO: 509691 - RNA, 19 nt, Artificial Sequence
  Description of Artificial Sequence: Synthetic oligonucleotide
gcacucucuuggguggaag

SEQ ID NO: 509692 - RNA, 19 nt, Artificial Sequence
  Description of Artificial Sequence: Synthetic oligonucleotide
gcuugugaagcacacccuu

SEQ ID NO: 509693 - RNA, 19 nt, Artificial Sequence
  Description of Artificial Sequence: Synthetic oligonucleotide
ggauguucgugggucuguc

SEQ ID NO: 509694 - RNA, 19 nt, Artificial Sequence
  Description of Artificial Sequence: Synthetic oligonucleotide
cugccggcgagggcagcgg

SEQ ID NO: 509695 - RNA, 19 nt, Artificial Sequence
  Description of Artificial Sequence: Synthetic oligonucleotide
ccuccggcggcccucgaug

SEQ ID NO: 509696 - RNA, 19 nt, Artificial Sequence
  Description of Artificial Sequence: Synthetic oligonucleotide
cuccggcggcccucgauga

SEQ ID NO: 509697 - RNA, 19 nt, Artificial Sequence
  Description of Artificial Sequence: Synthetic oligonucleotide
gcgcucaucaucugccucu

SEQ ID NO: 509698 - RNA, 19 nt, Artificial Sequence
  Description of Artificial Sequence: Synthetic oligonucleotide
gacucgggcucucggcuau

SEQ ID NO: 509699 - RNA, 19 nt, Artificial Sequence
  Description of Artificial Sequence: Synthetic oligonucleotide
gggauggaaccucaagauu

SEQ ID NO: 509700 - RNA, 19 nt, Artificial Sequence
  Description of Artificial Sequence: Synthetic oligonucleotide
cgguacgggaauuugugaa

SEQ ID NO: 509701 - RNA, 19 nt, Artificial Sequence
  Description of Artificial Sequence: Synthetic oligonucleotide
cacuguuugcaaagagguu

SEQ ID NO: 509702 - RNA, 19 nt, Artificial Sequence
  Description of Artificial Sequence: Synthetic oligonucleotide
agcacucucuuggguggaa

SEQ ID NO: 509703 - RNA, 19 nt, Artificial Sequence
  Description of Artificial Sequence: Synthetic oligonucleotide
uggcccuagcagccagcuu

SEQ ID NO: 509704 - RNA, 19 nt, Artificial Sequence
  Description of Artificial Sequence: Synthetic oligonucleotide
gccccacgugcugaggugc

SEQ ID NO: 509705 - RNA, 19 nt, Artificial Sequence
  Description of Artificial Sequence: Synthetic oligonucleotide
ccgggacgcgauccgcucg

SEQ ID NO: 509706 - RNA, 19 nt, Artificial Sequence
  Description of Artificial Sequence: Synthetic oligonucleotide
gcucugucgugggucuugc

SEQ ID NO: 509707 - RNA, 19 nt, Artificial Sequence
  Description of Artificial Sequence: Synthetic oligonucleotide
guacagggagaaguaguuu

SEQ ID NO: 509708 - RNA, 19 nt, Artificial Sequence
  Description of Artificial Sequence: Synthetic oligonucleotide
accaugcgguacgggaauu

SEQ ID NO: 509709 - RNA, 19 nt, Artificial Sequence
  Description of Artificial Sequence: Synthetic oligonucleotide
uccacggacucgggcucuc

SEQ ID NO: 509710 - RNA, 19 nt, Artificial Sequence
  Description of Artificial Sequence: Synthetic oligonucleotide
agccccaaacaugguggua

SEQ ID NO: 509711 - RNA, 19 nt, Artificial Sequence
  Description of Artificial Sequence: Synthetic oligonucleotide
gcgucuguacacggaggac

SEQ ID NO: 509712 - RNA, 19 nt, Artificial Sequence
  Description of Artificial Sequence: Synthetic oligonucleotide
cuggcggauccgccuccuc

SEQ ID NO: 509713 - RNA, 19 nt, Artificial Sequence
  Description of Artificial Sequence: Synthetic oligonucleotide
cgggacgcgauccgcucgg

SEQ ID NO: 509714 - RNA, 19 nt, Artificial Sequence
  Description of Artificial Sequence: Synthetic oligonucleotide
acucgggcucucggcuaug

SEQ ID NO: 509715 - RNA, 19 nt, Artificial Sequence
  Description of Artificial Sequence: Synthetic oligonucleotide
gaaucagcucccggcucau

SEQ ID NO: 509716 - RNA, 19 nt, Artificial Sequence
  Description of Artificial Sequence: Synthetic oligonucleotide
gcgggugccgggccaccag

SEQ ID NO: 509717 - RNA, 19 nt, Artificial Sequence
  Description of Artificial Sequence: Synthetic oligonucleotide
cucugucucgaagcuugua

SEQ ID NO: 509718 - RNA, 19 nt, Artificial Sequence
  Description of Artificial Sequence: Synthetic oligonucleotide
gacugccggcgagggcagc

SEQ ID NO: 509719 - RNA, 19 nt, Artificial Sequence
  Description of Artificial Sequence: Synthetic oligonucleotide
ggacucgggcucucggcua

SEQ ID NO: 509720 - RNA, 19 nt, Artificial Sequence
  Description of Artificial Sequence: Synthetic oligonucleotide
ccugagcacccaacaggga

SEQ ID NO: 509721 - RNA, 19 nt, Artificial Sequence
  Description of Artificial Sequence: Synthetic oligonucleotide
ggucugucgcuggcggauc

SEQ ID NO: 509722 - RNA, 19 nt, Artificial Sequence
  Description of Artificial Sequence: Synthetic oligonucleotide
ccggcggcccucgaugaac

SEQ ID NO: 509723 - RNA, 19 nt, Artificial Sequence
  Description of Artificial Sequence: Synthetic oligonucleotide
gcauucgcccaggguccag

SEQ ID NO: 509724 - RNA, 19 nt, Artificial Sequence
  Description of Artificial Sequence: Synthetic oligonucleotide
ccgcucacacaggucuuug

SEQ ID NO: 509725 - RNA, 19 nt, Artificial Sequence
  Description of Artificial Sequence: Synthetic oligonucleotide
gcggggaucgcgguggcgu

SEQ ID NO: 509726 - RNA, 19 nt, Artificial Sequence
  Description of Artificial Sequence: Synthetic oligonucleotide
gcggauccgccuccucguc

SEQ ID NO: 509727 - RNA, 19 nt, Artificial Sequence
  Description of Artificial Sequence: Synthetic oligonucleotide
cgcagcgacugccggcgag

SEQ ID NO: 509728 - RNA, 19 nt, Artificial Sequence
  Description of Artificial Sequence: Synthetic oligonucleotide
ggcccuccggcggcccucg

SEQ ID NO: 509729 - RNA, 19 nt, Artificial Sequence
  Description of Artificial Sequence: Synthetic oligonucleotide
ggcggcccucgaugaacuc

SEQ ID NO: 509730 - RNA, 19 nt, Artificial Sequence
  Description of Artificial Sequence: Synthetic oligonucleotide
ccacggacucgggcucucg

SEQ ID NO: 509731 - RNA, 19 nt, Artificial Sequence
  Description of Artificial Sequence: Synthetic oligonucleotide
ggggaucgcgguggcguca

SEQ ID NO: 509732 - RNA, 19 nt, Artificial Sequence
  Description of Artificial Sequence: Synthetic oligonucleotide
cguggacaagcugcgucuc

SEQ ID NO: 509733 - RNA, 19 nt, Artificial Sequence
  Description of Artificial Sequence: Synthetic oligonucleotide
ggacgcgauccgcucggcu

SEQ ID NO: 509734 - RNA, 19 nt, Artificial Sequence
  Description of Artificial Sequence: Synthetic oligonucleotide
gggaucgcgguggcgucaa

SEQ ID NO: 509735 - RNA, 19 nt, Artificial Sequence
  Description of Artificial Sequence: Synthetic oligonucleotide
gcccuuguaucugggaguu

SEQ ID NO: 509736 - RNA, 19 nt, Artificial Sequence
  Description of Artificial Sequence: Synthetic oligonucleotide
cgacugccggcgagggcag

SEQ ID NO: 509737 - RNA, 19 nt, Artificial Sequence
  Description of Artificial Sequence: Synthetic oligonucleotide
cucgggcucucggcuaugu

SEQ ID NO: 509738 - RNA, 19 nt, Artificial Sequence
  Description of Artificial Sequence: Synthetic oligonucleotide
ggaucgcgguggcgucaac

SEQ ID NO: 509739 - RNA, 19 nt, Artificial Sequence
  Description of Artificial Sequence: Synthetic oligonucleotide
ccuagagcacugagcuccu

SEQ ID NO: 509740 - RNA, 19 nt, Artificial Sequence
  Description of Artificial Sequence: Synthetic oligonucleotide
ccccacgugcugaggugca

SEQ ID NO: 509741 - RNA, 19 nt, Artificial Sequence
  Description of Artificial Sequence: Synthetic oligonucleotide
cgcuggcggauccgccucc

SEQ ID NO: 509742 - RNA, 19 nt, Artificial Sequence
  Description of Artificial Sequence: Synthetic oligonucleotide
cccuuguaucugggaguuc

SEQ ID NO: 509743 - RNA, 19 nt, Artificial Sequence
  Description of Artificial Sequence: Synthetic oligonucleotide
cggauccgccuccucguca

SEQ ID NO: 509744 - RNA, 19 nt, Artificial Sequence
  Description of Artificial Sequence: Synthetic oligonucleotide
cccuaagcauugugggcau

SEQ ID NO: 509745 - RNA, 19 nt, Artificial Sequence
  Description of Artificial Sequence: Synthetic oligonucleotide
ggcgggugccgggccacca

SEQ ID NO: 509746 - RNA, 19 nt, Artificial Sequence
  Description of Artificial Sequence: Synthetic oligonucleotide
cgguggcgucaacacgcug

SEQ ID NO: 509747 - RNA, 19 nt, Artificial Sequence
  Description of Artificial Sequence: Synthetic oligonucleotide
cggacucgggcucucggcu

SEQ ID NO: 509748 - RNA, 19 nt, Artificial Sequence
  Description of Artificial Sequence: Synthetic oligonucleotide
gcgguggcgucaacacgcu

SEQ ID NO: 509749 - RNA, 19 nt, Artificial Sequence
  Description of Artificial Sequence: Synthetic oligonucleotide
guggacccugaagggccuu

SEQ ID NO: 509750 - RNA, 19 nt, Artificial Sequence
  Description of Artificial Sequence: Synthetic oligonucleotide
gcuggcggauccgccuccu

SEQ ID NO: 509751 - RNA, 19 nt, Artificial Sequence
  Description of Artificial Sequence: Synthetic oligonucleotide
ccaugcgguacgggaauuu

SEQ ID NO: 509752 - RNA, 19 nt, Artificial Sequence
  Description of Artificial Sequence: Synthetic oligonucleotide
cccuagcagccagcuuaca

SEQ ID NO: 509753 - RNA, 19 nt, Artificial Sequence
  Description of Artificial Sequence: Synthetic oligonucleotide
ccaggucacgccgcucagu

SEQ ID NO: 509754 - RNA, 19 nt, Artificial Sequence
  Description of Artificial Sequence: Synthetic oligonucleotide
cgcgauccgcucggcucug

SEQ ID NO: 509755 - RNA, 19 nt, Artificial Sequence
  Description of Artificial Sequence: Synthetic oligonucleotide
cgcucggcucugucucgaa

SEQ ID NO: 509756 - RNA, 19 nt, Artificial Sequence
  Description of Artificial Sequence: Synthetic oligonucleotide
ccgcagcgacugccggcga

SEQ ID NO: 509757 - RNA, 19 nt, Artificial Sequence
  Description of Artificial Sequence: Synthetic oligonucleotide
gcgauccgcucggcucugu

SEQ ID NO: 509758 - RNA, 19 nt, Artificial Sequence
  Description of Artificial Sequence: Synthetic oligonucleotide
cccuccggcggcccucgau

SEQ ID NO: 509759 - RNA, 19 nt, Artificial Sequence
  Description of Artificial Sequence: Synthetic oligonucleotide
gggccgccuccuugagcuu

SEQ ID NO: 509760 - RNA, 19 nt, Artificial Sequence
  Description of Artificial Sequence: Synthetic oligonucleotide
gccgggccaccagguugau

SEQ ID NO: 509761 - RNA, 19 nt, Artificial Sequence
  Description of Artificial Sequence: Synthetic oligonucleotide
aauaguagcaccuucagaa

SEQ ID NO: 509762 - RNA, 19 nt, Artificial Sequence
  Description of Artificial Sequence: Synthetic oligonucleotide
aagacuguggacaaggucc

SEQ ID NO: 509763 - RNA, 19 nt, Artificial Sequence
  Description of Artificial Sequence: Synthetic oligonucleotide
ucccauauggcccaggagg

SEQ ID NO: 509764 - RNA, 19 nt, Artificial Sequence
  Description of Artificial Sequence: Synthetic oligonucleotide
uuaaauccccauuuggagg

SEQ ID NO: 509765 - RNA, 19 nt, Artificial Sequence
  Description of Artificial Sequence: Synthetic oligonucleotide
uguaagguuuugaagaucu

SEQ ID NO: 509766 - RNA, 19 nt, Artificial Sequence
  Description of Artificial Sequence: Synthetic oligonucleotide
acaagagacaauugugagc

SEQ ID NO: 509767 - RNA, 19 nt, Artificial Sequence
  Description of Artificial Sequence: Synthetic oligonucleotide
cauaucugggacuagcugg

SEQ ID NO: 509768 - RNA, 19 nt, Artificial Sequence
  Description of Artificial Sequence: Synthetic oligonucleotide
uguuaaauccccauuugga

SEQ ID NO: 509769 - RNA, 19 nt, Artificial Sequence
  Description of Artificial Sequence: Synthetic oligonucleotide
uccaauguaaccccggcug

SEQ ID NO: 509770 - RNA, 19 nt, Artificial Sequence
  Description of Artificial Sequence: Synthetic oligonucleotide
uucuuaaugcucuggauga

SEQ ID NO: 509771 - RNA, 19 nt, Artificial Sequence
  Description of Artificial Sequence: Synthetic oligonucleotide
acaauugugagcaccagcg

SEQ ID NO: 509772 - RNA, 19 nt, Artificial Sequence
  Description of Artificial Sequence: Synthetic oligonucleotide
agccaauggaaccuagugc

SEQ ID NO: 509773 - RNA, 19 nt, Artificial Sequence
  Description of Artificial Sequence: Synthetic oligonucleotide
uccaggaugacccuugugu

SEQ ID NO: 509774 - RNA, 19 nt, Artificial Sequence
  Description of Artificial Sequence: Synthetic oligonucleotide
agaccuguccauuccaggc

SEQ ID NO: 509775 - RNA, 19 nt, Artificial Sequence
  Description of Artificial Sequence: Synthetic oligonucleotide
uccuuuuggcuccaggagg

SEQ ID NO: 509776 - RNA, 19 nt, Artificial Sequence
  Description of Artificial Sequence: Synthetic oligonucleotide
agaaagacuguggacaagg

SEQ ID NO: 509777 - RNA, 19 nt, Artificial Sequence
  Description of Artificial Sequence: Synthetic oligonucleotide
ugggagguagcauacagca

SEQ ID NO: 509778 - RNA, 19 nt, Artificial Sequence
  Description of Artificial Sequence: Synthetic oligonucleotide
agagacaauugugagcacc

SEQ ID NO: 509779 - RNA, 19 nt, Artificial Sequence
  Description of Artificial Sequence: Synthetic oligonucleotide
uacauuacaagagacaauu

SEQ ID NO: 509780 - RNA, 19 nt, Artificial Sequence
  Description of Artificial Sequence: Synthetic oligonucleotide
agcgauuucacagugggag

SEQ ID NO: 509781 - RNA, 19 nt, Artificial Sequence
  Description of Artificial Sequence: Synthetic oligonucleotide
  modified_base (3)..(3): a, c, u, g, unknown or other
cunagaacugagcagguuc

SEQ ID NO: 509782 - RNA, 19 nt, Artificial Sequence
  Description of Artificial Sequence: Synthetic oligonucleotide
aaauaguagcaccuucaga

SEQ ID NO: 509783 - RNA, 19 nt, Artificial Sequence
  Description of Artificial Sequence: Synthetic oligonucleotide
guaguguaagguuuugaag

SEQ ID NO: 509784 - RNA, 19 nt, Artificial Sequence
  Description of Artificial Sequence: Synthetic oligonucleotide
aauggauugugaugugcug

SEQ ID NO: 509785 - RNA, 19 nt, Artificial Sequence
  Description of Artificial Sequence: Synthetic oligonucleotide
uccuuuuaggcccugggcu

SEQ ID NO: 509786 - RNA, 19 nt, Artificial Sequence
  Description of Artificial Sequence: Synthetic oligonucleotide
  modified_base (2)..(2): a, c, u, g, unknown or other
unagaacugagcagguucu

SEQ ID NO: 509787 - RNA, 19 nt, Artificial Sequence
  Description of Artificial Sequence: Synthetic oligonucleotide
agguccaacuuccaggcgg

SEQ ID NO: 509788 - RNA, 19 nt, Artificial Sequence
  Description of Artificial Sequence: Synthetic oligonucleotide
cacaccgucagguucaggc

SEQ ID NO: 509789 - RNA, 19 nt, Artificial Sequence
  Description of Artificial Sequence: Synthetic oligonucleotide
uagucacauuguuaaaucc

SEQ ID NO: 509790 - RNA, 19 nt, Artificial Sequence
  Description of Artificial Sequence: Synthetic oligonucleotide
  modified_base (17)..(17): a, c, u, g, unknown or other
ugugcugucguccccunag

SEQ ID NO: 509791 - RNA, 19 nt, Artificial Sequence
  Description of Artificial Sequence: Synthetic oligonucleotide
aguccaauguaaccccggc

SEQ ID NO: 509792 - RNA, 19 nt, Artificial Sequence
  Description of Artificial Sequence: Synthetic oligonucleotide
uagccaauggaaccuagug

SEQ ID NO: 509793 - RNA, 19 nt, Artificial Sequence
  Description of Artificial Sequence: Synthetic oligonucleotide
ucugugagcauccauccau

SEQ ID NO: 509794 - RNA, 19 nt, Artificial Sequence
  Description of Artificial Sequence: Synthetic oligonucleotide
gacccgggaguccagaagg

SEQ ID NO: 509795 - RNA, 19 nt, Artificial Sequence
  Description of Artificial Sequence: Synthetic oligonucleotide
auuuccggagagcccaggc

SEQ ID NO: 509796 - RNA, 19 nt, Artificial Sequence
  Description of Artificial Sequence: Synthetic oligonucleotide
augcuagucacauuguuaa

SEQ ID NO: 509797 - RNA, 19 nt, Artificial Sequence
  Description of Artificial Sequence: Synthetic oligonucleotide
cuagucacauuguuaaauc

SEQ ID NO: 509798 - RNA, 19 nt, Artificial Sequence
  Description of Artificial Sequence: Synthetic oligonucleotide
auugugaugugcugucguc

SEQ ID NO: 509799 - RNA, 19 nt, Artificial Sequence
  Description of Artificial Sequence: Synthetic oligonucleotide
ucccacaggaccccgaucu

SEQ ID NO: 509800 - RNA, 19 nt, Artificial Sequence
  Description of Artificial Sequence: Synthetic oligonucleotide
uggagauccagguaauccu

SEQ ID NO: 509801 - RNA, 19 nt, Artificial Sequence
  Description of Artificial Sequence: Synthetic oligonucleotide
ugucccucgcuuuccaggg

SEQ ID NO: 509802 - RNA, 19 nt, Artificial Sequence
  Description of Artificial Sequence: Synthetic oligonucleotide
agucccuucaugccuuugg

SEQ ID NO: 509803 - RNA, 19 nt, Artificial Sequence
  Description of Artificial Sequence: Synthetic oligonucleotide
gucagaggaagcaugcagg

SEQ ID NO: 509804 - RNA, 19 nt, Artificial Sequence
  Description of Artificial Sequence: Synthetic oligonucleotide
ugaagccaaugucuccagg

SEQ ID NO: 509805 - RNA, 19 nt, Artificial Sequence
  Description of Artificial Sequence: Synthetic oligonucleotide
cuggacugcccucaggucc

SEQ ID NO: 509806 - RNA, 19 nt, Artificial Sequence
  Description of Artificial Sequence: Synthetic oligonucleotide
uggauuuccggagagccca

SEQ ID NO: 509807 - RNA, 19 nt, Artificial Sequence
  Description of Artificial Sequence: Synthetic oligonucleotide
ucacauuguuaaaucccca

SEQ ID NO: 509808 - RNA, 19 nt, Artificial Sequence
  Description of Artificial Sequence: Synthetic oligonucleotide
aagagacaauugugagcac

SEQ ID NO: 509809 - RNA, 19 nt, Artificial Sequence
  Description of Artificial Sequence: Synthetic oligonucleotide
aaccuagugcucccauguc

SEQ ID NO: 509810 - RNA, 19 nt, Artificial Sequence
  Description of Artificial Sequence: Synthetic oligonucleotide
gguacugcuucccugauga

SEQ ID NO: 509811 - RNA, 19 nt, Artificial Sequence
  Description of Artificial Sequence: Synthetic oligonucleotide
cuggagauccagguaaucc

SEQ ID NO: 509812 - RNA, 19 nt, Artificial Sequence
  Description of Artificial Sequence: Synthetic oligonucleotide
aaugcuagucacauuguua

SEQ ID NO: 509813 - RNA, 19 nt, Artificial Sequence
  Description of Artificial Sequence: Synthetic oligonucleotide
guccaaagaggccagcuac

SEQ ID NO: 509814 - RNA, 19 nt, Artificial Sequence
  Description of Artificial Sequence: Synthetic oligonucleotide
caaugauaccuuccuuucc

SEQ ID NO: 509815 - RNA, 19 nt, Artificial Sequence
  Description of Artificial Sequence: Synthetic oligonucleotide
aggcaagcccauguuaccc

SEQ ID NO: 509816 - RNA, 19 nt, Artificial Sequence
  Description of Artificial Sequence: Synthetic oligonucleotide
ucccaucaagccaggaggc

SEQ ID NO: 509817 - RNA, 19 nt, Artificial Sequence
  Description of Artificial Sequence: Synthetic oligonucleotide
uugccuggcaggaggggcg

SEQ ID NO: 509818 - RNA, 19 nt, Artificial Sequence
  Description of Artificial Sequence: Synthetic oligonucleotide
ugaaacuggacaggaugcc

SEQ ID NO: 509819 - RNA, 19 nt, Artificial Sequence
  Description of Artificial Sequence: Synthetic oligonucleotide
agagucacccgguuggccu

SEQ ID NO: 509820 - RNA, 19 nt, Artificial Sequence
  Description of Artificial Sequence: Synthetic oligonucleotide
cacuuucacccuugaaucc

SEQ ID NO: 509821 - RNA, 19 nt, Artificial Sequence
  Description of Artificial Sequence: Synthetic oligonucleotide
agcugguccggauagcugu

SEQ ID NO: 509822 - RNA, 19 nt, Artificial Sequence
  Description of Artificial Sequence: Synthetic oligonucleotide
cuuggaggagccuagaggu

SEQ ID NO: 509823 - RNA, 19 nt, Artificial Sequence
  Description of Artificial Sequence: Synthetic oligonucleotide
cauuacaagagacaauugu

SEQ ID NO: 509824 - RNA, 19 nt, Artificial Sequence
  Description of Artificial Sequence: Synthetic oligonucleotide
uuccggagagcccaggcaa

SEQ ID NO: 509825 - RNA, 19 nt, Artificial Sequence
  Description of Artificial Sequence: Synthetic oligonucleotide
gauagcuguaccccugcuc

SEQ ID NO: 509826 - RNA, 19 nt, Artificial Sequence
  Description of Artificial Sequence: Synthetic oligonucleotide
uccaaagaggccagcuacu

SEQ ID NO: 509827 - RNA, 19 nt, Artificial Sequence
  Description of Artificial Sequence: Synthetic oligonucleotide
guccuuuuggcuccaggag

SEQ ID NO: 509828 - RNA, 19 nt, Artificial Sequence
  Description of Artificial Sequence: Synthetic oligonucleotide
  modified_base (8)..(8): a, c, u, g, unknown or other
guccccunagaacugagca

SEQ ID NO: 509829 - RNA, 19 nt, Artificial Sequence
  Description of Artificial Sequence: Synthetic oligonucleotide
gagauccagguaauccugg

SEQ ID NO: 509830 - RNA, 19 nt, Artificial Sequence
  Description of Artificial Sequence: Synthetic oligonucleotide
cuuugggccuugcaguccc

SEQ ID NO: 509831 - RNA, 19 nt, Artificial Sequence
  Description of Artificial Sequence: Synthetic oligonucleotide
guagcauacagcaccccag

SEQ ID NO: 509832 - RNA, 19 nt, Artificial Sequence
  Description of Artificial Sequence: Synthetic oligonucleotide
gacccggcaagccacaguc

SEQ ID NO: 509833 - RNA, 19 nt, Artificial Sequence
  Description of Artificial Sequence: Synthetic oligonucleotide
caggguaaccuuuggcccc

SEQ ID NO: 509834 - RNA, 19 nt, Artificial Sequence
  Description of Artificial Sequence: Synthetic oligonucleotide
cugguugccaggcuuuccc

SEQ ID NO: 509835 - RNA, 19 nt, Artificial Sequence
  Description of Artificial Sequence: Synthetic oligonucleotide
agggucccauaucugggac

SEQ ID NO: 509836 - RNA, 19 nt, Artificial Sequence
  Description of Artificial Sequence: Synthetic oligonucleotide
agcuucgaagaccugucca

SEQ ID NO: 509837 - RNA, 19 nt, Artificial Sequence
  Description of Artificial Sequence: Synthetic oligonucleotide
ugacccuugugucccuucc

SEQ ID NO: 509838 - RNA, 19 nt, Artificial Sequence
  Description of Artificial Sequence: Synthetic oligonucleotide
caucguggaccuugcagcc

SEQ ID NO: 509839 - RNA, 19 nt, Artificial Sequence
  Description of Artificial Sequence: Synthetic oligonucleotide
uucgaagaccuguccauuc

SEQ ID NO: 509840 - RNA, 19 nt, Artificial Sequence
  Description of Artificial Sequence: Synthetic oligonucleotide
uucccauauggcccaggag

SEQ ID NO: 509841 - RNA, 19 nt, Artificial Sequence
  Description of Artificial Sequence: Synthetic oligonucleotide
gccaggguaaccuuuggcc

SEQ ID NO: 509842 - RNA, 19 nt, Artificial Sequence
  Description of Artificial Sequence: Synthetic oligonucleotide
aauguaaccccggcugccu

SEQ ID NO: 509843 - RNA, 19 nt, Artificial Sequence
  Description of Artificial Sequence: Synthetic oligonucleotide
caaagaggccagcuacucc

SEQ ID NO: 509844 - RNA, 19 nt, Artificial Sequence
  Description of Artificial Sequence: Synthetic oligonucleotide
aaccccggcugccuuuggg

SEQ ID NO: 509845 - RNA, 19 nt, Artificial Sequence
  Description of Artificial Sequence: Synthetic oligonucleotide
gacaccucuggccugaacu

SEQ ID NO: 509846 - RNA, 19 nt, Artificial Sequence
  Description of Artificial Sequence: Synthetic oligonucleotide
  modified_base (10)..(10): a, c, u, g, unknown or other
ucguccccunagaacugag

SEQ ID NO: 509847 - RNA, 19 nt, Artificial Sequence
  Description of Artificial Sequence: Synthetic oligonucleotide
uccccuuucuguccuuuug

SEQ ID NO: 509848 - RNA, 19 nt, Artificial Sequence
  Description of Artificial Sequence: Synthetic oligonucleotide
auaguagcaccuucagaau

SEQ ID NO: 509849 - RNA, 19 nt, Artificial Sequence
  Description of Artificial Sequence: Synthetic oligonucleotide
uucggaaggugaacagugu

SEQ ID NO: 509850 - RNA, 19 nt, Artificial Sequence
  Description of Artificial Sequence: Synthetic oligonucleotide
accucgugcaccuggagau

SEQ ID NO: 509851 - RNA, 19 nt, Artificial Sequence
  Description of Artificial Sequence: Synthetic oligonucleotide
ccagcgauuucacaguggg

SEQ ID NO: 509852 - RNA, 19 nt, Artificial Sequence
  Description of Artificial Sequence: Synthetic oligonucleotide
auggauugugaugugcugu

SEQ ID NO: 509853 - RNA, 19 nt, Artificial Sequence
  Description of Artificial Sequence: Synthetic oligonucleotide
gguaguguaagguuuugaa

SEQ ID NO: 509854 - RNA, 19 nt, Artificial Sequence
  Description of Artificial Sequence: Synthetic oligonucleotide
ucuggccugaacugacccc

SEQ ID NO: 509855 - RNA, 19 nt, Artificial Sequence
  Description of Artificial Sequence: Synthetic oligonucleotide
ucucccgccgcccaucagu

SEQ ID NO: 509856 - RNA, 19 nt, Artificial Sequence
  Description of Artificial Sequence: Synthetic oligonucleotide
aggugaacagugucuggug

SEQ ID NO: 509857 - RNA, 19 nt, Artificial Sequence
  Description of Artificial Sequence: Synthetic oligonucleotide
gauccagguaauccuggca

SEQ ID NO: 509858 - RNA, 19 nt, Artificial Sequence
  Description of Artificial Sequence: Synthetic oligonucleotide
gaaccuagugcucccaugu

SEQ ID NO: 509859 - RNA, 19 nt, Artificial Sequence
  Description of Artificial Sequence: Synthetic oligonucleotide
ccaucguggaccuugcagc

SEQ ID NO: 509860 - RNA, 19 nt, Artificial Sequence
  Description of Artificial Sequence: Synthetic oligonucleotide
gaguccaauguaaccccgg

SEQ ID NO: 509861 - RNA, 19 nt, Artificial Sequence
  Description of Artificial Sequence: Synthetic oligonucleotide
agcccauguuacccuuugc

SEQ ID NO: 509862 - RNA, 19 nt, Artificial Sequence
  Description of Artificial Sequence: Synthetic oligonucleotide
uaaggcagggucccauauc

SEQ ID NO: 509863 - RNA, 19 nt, Artificial Sequence
  Description of Artificial Sequence: Synthetic oligonucleotide
aggggaacccaguugccca

SEQ ID NO: 509864 - RNA, 19 nt, Artificial Sequence
  Description of Artificial Sequence: Synthetic oligonucleotide
gagguagcauacagcaccc

SEQ ID NO: 509865 - RNA, 19 nt, Artificial Sequence
  Description of Artificial Sequence: Synthetic oligonucleotide
augcagguccaacuuccag

SEQ ID NO: 509866 - RNA, 19 nt, Artificial Sequence
  Description of Artificial Sequence: Synthetic oligonucleotide
uuccaggcacggaagcgca

SEQ ID NO: 509867 - RNA, 19 nt, Artificial Sequence
  Description of Artificial Sequence: Synthetic oligonucleotide
cucgcuuuccaggggaacc

SEQ ID NO: 509868 - RNA, 19 nt, Artificial Sequence
  Description of Artificial Sequence: Synthetic oligonucleotide
augauaccuuccuuuccca

SEQ ID NO: 509869 - RNA, 19 nt, Artificial Sequence
  Description of Artificial Sequence: Synthetic oligonucleotide
ugguccggauagcuguacc

SEQ ID NO: 509870 - RNA, 19 nt, Artificial Sequence
  Description of Artificial Sequence: Synthetic oligonucleotide
ucccucgcuuuccagggga

SEQ ID NO: 509871 - RNA, 19 nt, Artificial Sequence
  Description of Artificial Sequence: Synthetic oligonucleotide
ggagagaaagacuguggac

SEQ ID NO: 509872 - RNA, 19 nt, Artificial Sequence
  Description of Artificial Sequence: Synthetic oligonucleotide
uccggauagcuguaccccu

SEQ ID NO: 509873 - RNA, 19 nt, Artificial Sequence
  Description of Artificial Sequence: Synthetic oligonucleotide
  modified_base (14)..(14): a, c, u, g, unknown or other
gcugucguccccunagaac

SEQ ID NO: 509874 - RNA, 19 nt, Artificial Sequence
  Description of Artificial Sequence: Synthetic oligonucleotide
gauugugaugugcugucgu

SEQ ID NO: 509875 - RNA, 19 nt, Artificial Sequence
  Description of Artificial Sequence: Synthetic oligonucleotide
uuacccuuugccccaucau

SEQ ID NO: 509876 - RNA, 19 nt, Artificial Sequence
  Description of Artificial Sequence: Synthetic oligonucleotide
ccaggguaaccuuuggccc

SEQ ID NO: 509877 - RNA, 19 nt, Artificial Sequence
  Description of Artificial Sequence: Synthetic oligonucleotide
cccauguuacccuuugccc

SEQ ID NO: 509878 - RNA, 19 nt, Artificial Sequence
  Description of Artificial Sequence: Synthetic oligonucleotide
cacgcugacaaugggcagc

SEQ ID NO: 509879 - RNA, 19 nt, Artificial Sequence
  Description of Artificial Sequence: Synthetic oligonucleotide
gaccuguccauuccaggca

SEQ ID NO: 509880 - RNA, 19 nt, Artificial Sequence
  Description of Artificial Sequence: Synthetic oligonucleotide
caaggagacccgguggacc

SEQ ID NO: 509881 - RNA, 19 nt, Artificial Sequence
  Description of Artificial Sequence: Synthetic oligonucleotide
acauuacaagagacaauug

SEQ ID NO: 509882 - RNA, 19 nt, Artificial Sequence
  Description of Artificial Sequence: Synthetic oligonucleotide
aucucgccccucuugccag

SEQ ID NO: 509883 - RNA, 19 nt, Artificial Sequence
  Description of Artificial Sequence: Synthetic oligonucleotide
caauguaaccccggcugcc

SEQ ID NO: 509884 - RNA, 19 nt, Artificial Sequence
  Description of Artificial Sequence: Synthetic oligonucleotide
  modified_base (6)..(6): a, c, u, g, unknown or other
ccccunagaacugagcagg

SEQ ID NO: 509885 - RNA, 19 nt, Artificial Sequence
  Description of Artificial Sequence: Synthetic oligonucleotide
ucguggaccuugcagccau

SEQ ID NO: 509886 - RNA, 19 nt, Artificial Sequence
  Description of Artificial Sequence: Synthetic oligonucleotide
gagaaagacuguggacaag

SEQ ID NO: 509887 - RNA, 19 nt, Artificial Sequence
  Description of Artificial Sequence: Synthetic oligonucleotide
gggaguccaauguaacccc

SEQ ID NO: 509888 - RNA, 19 nt, Artificial Sequence
  Description of Artificial Sequence: Synthetic oligonucleotide
aagcccggccuacccaucu

SEQ ID NO: 509889 - RNA, 19 nt, Artificial Sequence
  Description of Artificial Sequence: Synthetic oligonucleotide
  modified_base (15)..(15): a, c, u, g, unknown or other
ugcugucguccccunagaa

SEQ ID NO: 509890 - RNA, 19 nt, Artificial Sequence
  Description of Artificial Sequence: Synthetic oligonucleotide
guuacccuuugccccauca

SEQ ID NO: 509891 - RNA, 19 nt, Artificial Sequence
  Description of Artificial Sequence: Synthetic oligonucleotide
cucgugcaccuggagaucc

SEQ ID NO: 509892 - RNA, 19 nt, Artificial Sequence
  Description of Artificial Sequence: Synthetic oligonucleotide
aaauccccauuuggaggag

SEQ ID NO: 509893 - RNA, 19 nt, Artificial Sequence
  Description of Artificial Sequence: Synthetic oligonucleotide
aggccaauuucuccagggu

SEQ ID NO: 509894 - RNA, 19 nt, Artificial Sequence
  Description of Artificial Sequence: Synthetic oligonucleotide
cagaaucuuaaauaaguuu

SEQ ID NO: 509895 - RNA, 19 nt, Artificial Sequence
  Description of Artificial Sequence: Synthetic oligonucleotide
ucgcuuuccaggggaaccc

SEQ ID NO: 509896 - RNA, 19 nt, Artificial Sequence
  Description of Artificial Sequence: Synthetic oligonucleotide
gguagcauacagcacccca

SEQ ID NO: 509897 - RNA, 19 nt, Artificial Sequence
  Description of Artificial Sequence: Synthetic oligonucleotide
caauggauugugaugugcu

SEQ ID NO: 509898 - RNA, 19 nt, Artificial Sequence
  Description of Artificial Sequence: Synthetic oligonucleotide
gccaucguggaccuugcag

SEQ ID NO: 509899 - RNA, 19 nt, Artificial Sequence
  Description of Artificial Sequence: Synthetic oligonucleotide
gcgauuucacagugggagg

SEQ ID NO: 509900 - RNA, 19 nt, Artificial Sequence
  Description of Artificial Sequence: Synthetic oligonucleotide
acggaggccuugaacuccc

SEQ ID NO: 509901 - RNA, 19 nt, Artificial Sequence
  Description of Artificial Sequence: Synthetic oligonucleotide
ccaaugauaccuuccuuuc

SEQ ID NO: 509902 - RNA, 19 nt, Artificial Sequence
  Description of Artificial Sequence: Synthetic oligonucleotide
acccuugugucccuuccgu

SEQ ID NO: 509903 - RNA, 19 nt, Artificial Sequence
  Description of Artificial Sequence: Synthetic oligonucleotide
gauuuccggagagcccagg

SEQ ID NO: 509904 - RNA, 19 nt, Artificial Sequence
  Description of Artificial Sequence: Synthetic oligonucleotide
ucccuuccgucccaagggu

SEQ ID NO: 509905 - RNA, 19 nt, Artificial Sequence
  Description of Artificial Sequence: Synthetic oligonucleotide
cacggaagcgcacggcuug

SEQ ID NO: 509906 - RNA, 19 nt, Artificial Sequence
  Description of Artificial Sequence: Synthetic oligonucleotide
guccggauagcuguacccc

SEQ ID NO: 509907 - RNA, 19 nt, Artificial Sequence
  Description of Artificial Sequence: Synthetic oligonucleotide
uccauccgaccccggcagg

SEQ ID NO: 509908 - RNA, 19 nt, Artificial Sequence
  Description of Artificial Sequence: Synthetic oligonucleotide
aggagccuagaggucagag

SEQ ID NO: 509909 - RNA, 19 nt, Artificial Sequence
  Description of Artificial Sequence: Synthetic oligonucleotide
gaaccccugccugccaggg

SEQ ID NO: 509910 - RNA, 19 nt, Artificial Sequence
  Description of Artificial Sequence: Synthetic oligonucleotide
acccuuugccccaucauga

SEQ ID NO: 509911 - RNA, 19 nt, Artificial Sequence
  Description of Artificial Sequence: Synthetic oligonucleotide
ugcuagucacauuguuaaa

SEQ ID NO: 509912 - RNA, 19 nt, Artificial Sequence
  Description of Artificial Sequence: Synthetic oligonucleotide
agccccgggaguccaaugu

SEQ ID NO: 509913 - RNA, 19 nt, Artificial Sequence
  Description of Artificial Sequence: Synthetic oligonucleotide
gaccuugcagccauccaca

SEQ ID NO: 509914 - RNA, 19 nt, Artificial Sequence
  Description of Artificial Sequence: Synthetic oligonucleotide
cuugaagguaagccagcca

SEQ ID NO: 509915 - RNA, 19 nt, Artificial Sequence
  Description of Artificial Sequence: Synthetic oligonucleotide
agguagcauacagcacccc

SEQ ID NO: 509916 - RNA, 19 nt, Artificial Sequence
  Description of Artificial Sequence: Synthetic oligonucleotide
gaggaccccgaggaccucg

SEQ ID NO: 509917 - RNA, 19 nt, Artificial Sequence
  Description of Artificial Sequence: Synthetic oligonucleotide
uggaaccuagugcucccau

SEQ ID NO: 509918 - RNA, 19 nt, Artificial Sequence
  Description of Artificial Sequence: Synthetic oligonucleotide
gucaccaaugaggccgggg

SEQ ID NO: 509919 - RNA, 19 nt, Artificial Sequence
  Description of Artificial Sequence: Synthetic oligonucleotide
aguccuggguccccuuucu

SEQ ID NO: 509920 - RNA, 19 nt, Artificial Sequence
  Description of Artificial Sequence: Synthetic oligonucleotide
uaaugcucuggaugagguu

SEQ ID NO: 509921 - RNA, 19 nt, Artificial Sequence
  Description of Artificial Sequence: Synthetic oligonucleotide
gagguaguguaagguuuug

SEQ ID NO: 509922 - RNA, 19 nt, Artificial Sequence
  Description of Artificial Sequence: Synthetic oligonucleotide
gaacucccucuugaccagg

SEQ ID NO: 509923 - RNA, 19 nt, Artificial Sequence
  Description of Artificial Sequence: Synthetic oligonucleotide
gugggagguagcauacagc

SEQ ID NO: 509924 - RNA, 19 nt, Artificial Sequence
  Description of Artificial Sequence: Synthetic oligonucleotide
guccacgcugacaaugggc

SEQ ID NO: 509925 - RNA, 19 nt, Artificial Sequence
  Description of Artificial Sequence: Synthetic oligonucleotide
ggacuagcuggucccagcc

SEQ ID NO: 509926 - RNA, 19 nt, Artificial Sequence
  Description of Artificial Sequence: Synthetic oligonucleotide
uccgucccaaggguccugg

SEQ ID NO: 509927 - RNA, 19 nt, Artificial Sequence
  Description of Artificial Sequence: Synthetic oligonucleotide
ccgggaguccagaaggucc

SEQ ID NO: 509928 - RNA, 19 nt, Artificial Sequence
  Description of Artificial Sequence: Synthetic oligonucleotide
cacggucuccucgaucucc

SEQ ID NO: 509929 - RNA, 19 nt, Artificial Sequence
  Description of Artificial Sequence: Synthetic oligonucleotide
cacggaggccuugaacucc

SEQ ID NO: 509930 - RNA, 19 nt, Artificial Sequence
  Description of Artificial Sequence: Synthetic oligonucleotide
cagcuucgaagaccugucc

SEQ ID NO: 509931 - RNA, 19 nt, Artificial Sequence
  Description of Artificial Sequence: Synthetic oligonucleotide
gcaauggauugugaugugc

SEQ ID NO: 509932 - RNA, 19 nt, Artificial Sequence
  Description of Artificial Sequence: Synthetic oligonucleotide
ugguuucccggaaguccug

SEQ ID NO: 509933 - RNA, 19 nt, Artificial Sequence
  Description of Artificial Sequence: Synthetic oligonucleotide
ccuuuuaggcccugggcug

SEQ ID NO: 509934 - RNA, 19 nt, Artificial Sequence
  Description of Artificial Sequence: Synthetic oligonucleotide
ccugguuucccggaagucc

SEQ ID NO: 509935 - RNA, 19 nt, Artificial Sequence
  Description of Artificial Sequence: Synthetic oligonucleotide
accagcgauuucacagugg

SEQ ID NO: 509936 - RNA, 19 nt, Artificial Sequence
  Description of Artificial Sequence: Synthetic oligonucleotide
ccuuccgucccaagggucc

SEQ ID NO: 509937 - RNA, 19 nt, Artificial Sequence
  Description of Artificial Sequence: Synthetic oligonucleotide
ccgguuggccuuuggaucc

SEQ ID NO: 509938 - RNA, 19 nt, Artificial Sequence
  Description of Artificial Sequence: Synthetic oligonucleotide
ggaaccuagugcucccaug

SEQ ID NO: 509939 - RNA, 19 nt, Artificial Sequence
  Description of Artificial Sequence: Synthetic oligonucleotide
acggaagcgcacggcuugc

SEQ ID NO: 509940 - RNA, 19 nt, Artificial Sequence
  Description of Artificial Sequence: Synthetic oligonucleotide
cuacagguccagggaaccc

SEQ ID NO: 509941 - RNA, 19 nt, Artificial Sequence
  Description of Artificial Sequence: Synthetic oligonucleotide
ggauugugaugugcugucg

SEQ ID NO: 509942 - RNA, 19 nt, Artificial Sequence
  Description of Artificial Sequence: Synthetic oligonucleotide
ggaguccaauguaaccccg

SEQ ID NO: 509943 - RNA, 19 nt, Artificial Sequence
  Description of Artificial Sequence: Synthetic oligonucleotide
ccaauguaaccccggcugc

SEQ ID NO: 509944 - RNA, 19 nt, Artificial Sequence
  Description of Artificial Sequence: Synthetic oligonucleotide
caauugugagcaccagcga

SEQ ID NO: 509945 - RNA, 19 nt, Artificial Sequence
  Description of Artificial Sequence: Synthetic oligonucleotide
aggcgguacugcuucccug

SEQ ID NO: 509946 - RNA, 19 nt, Artificial Sequence
  Description of Artificial Sequence: Synthetic oligonucleotide
ggguucggaaggugaacag

SEQ ID NO: 509947 - RNA, 19 nt, Artificial Sequence
  Description of Artificial Sequence: Synthetic oligonucleotide
agaacugagcagguucuua

SEQ ID NO: 509948 - RNA, 19 nt, Artificial Sequence
  Description of Artificial Sequence: Synthetic oligonucleotide
gugaugugcugucgucccc

SEQ ID NO: 509949 - RNA, 19 nt, Artificial Sequence
  Description of Artificial Sequence: Synthetic oligonucleotide
uuuccacggaggccuugaa

SEQ ID NO: 509950 - RNA, 19 nt, Artificial Sequence
  Description of Artificial Sequence: Synthetic oligonucleotide
guguaagguuuugaagauc

SEQ ID NO: 509951 - RNA, 19 nt, Artificial Sequence
  Description of Artificial Sequence: Synthetic oligonucleotide
ccauaucugggacuagcug

SEQ ID NO: 509952 - RNA, 19 nt, Artificial Sequence
  Description of Artificial Sequence: Synthetic oligonucleotide
guggaccuugcagccaucc

SEQ ID NO: 509953 - RNA, 19 nt, Artificial Sequence
  Description of Artificial Sequence: Synthetic oligonucleotide
caccagagucacccgguug

SEQ ID NO: 509954 - RNA, 19 nt, Artificial Sequence
  Description of Artificial Sequence: Synthetic oligonucleotide
cugagguaguguaagguuu

SEQ ID NO: 509955 - RNA, 19 nt, Artificial Sequence
  Description of Artificial Sequence: Synthetic oligonucleotide
cacauuguuaaauccccau

SEQ ID NO: 509956 - RNA, 19 nt, Artificial Sequence
  Description of Artificial Sequence: Synthetic oligonucleotide
ccaucaagccaggaggccc

SEQ ID NO: 509957 - RNA, 19 nt, Artificial Sequence
  Description of Artificial Sequence: Synthetic oligonucleotide
uguggguccuggguucgga

SEQ ID NO: 509958 - RNA, 19 nt, Artificial Sequence
  Description of Artificial Sequence: Synthetic oligonucleotide
cagguccaacuuccaggcg

SEQ ID NO: 509959 - RNA, 19 nt, Artificial Sequence
  Description of Artificial Sequence: Synthetic oligonucleotide
caucucgccccucuugcca

SEQ ID NO: 509960 - RNA, 19 nt, Artificial Sequence
  Description of Artificial Sequence: Synthetic oligonucleotide
guccuggguagccaaugga

SEQ ID NO: 509961 - RNA, 19 nt, Artificial Sequence
  Description of Artificial Sequence: Synthetic oligonucleotide
guacugcuucccugaugag

SEQ ID NO: 509962 - RNA, 19 nt, Artificial Sequence
  Description of Artificial Sequence: Synthetic oligonucleotide
agacccgguggaccccggg

SEQ ID NO: 509963 - RNA, 19 nt, Artificial Sequence
  Description of Artificial Sequence: Synthetic oligonucleotide
cucggcugccucugucacc

SEQ ID NO: 509964 - RNA, 19 nt, Artificial Sequence
  Description of Artificial Sequence: Synthetic oligonucleotide
cgggaguccaauguaaccc

SEQ ID NO: 509965 - RNA, 19 nt, Artificial Sequence
  Description of Artificial Sequence: Synthetic oligonucleotide
  modified_base (16)..(16): a, c, u, g, unknown or other
gugcugucguccccunaga

SEQ ID NO: 509966 - RNA, 19 nt, Artificial Sequence
  Description of Artificial Sequence: Synthetic oligonucleotide
caucagucccuucaugccu

SEQ ID NO: 509967 - RNA, 19 nt, Artificial Sequence
  Description of Artificial Sequence: Synthetic oligonucleotide
ccgggaguccaauguaacc

SEQ ID NO: 509968 - RNA, 19 nt, Artificial Sequence
  Description of Artificial Sequence: Synthetic oligonucleotide
uugggacccgggaguccag

SEQ ID NO: 509969 - RNA, 19 nt, Artificial Sequence
  Description of Artificial Sequence: Synthetic oligonucleotide
acgcugacaaugggcagcu

SEQ ID NO: 509970 - RNA, 19 nt, Artificial Sequence
  Description of Artificial Sequence: Synthetic oligonucleotide
ggcgguacugcuucccuga

SEQ ID NO: 509971 - RNA, 19 nt, Artificial Sequence
  Description of Artificial Sequence: Synthetic oligonucleotide
cagagucacccgguuggcc

SEQ ID NO: 509972 - RNA, 19 nt, Artificial Sequence
  Description of Artificial Sequence: Synthetic oligonucleotide
gauuucacagugggaggua

SEQ ID NO: 509973 - RNA, 19 nt, Artificial Sequence
  Description of Artificial Sequence: Synthetic oligonucleotide
gccagccacaccugguugc

SEQ ID NO: 509974 - RNA, 19 nt, Artificial Sequence
  Description of Artificial Sequence: Synthetic oligonucleotide
ggaaccccugccugccagg

SEQ ID NO: 509975 - RNA, 19 nt, Artificial Sequence
  Description of Artificial Sequence: Synthetic oligonucleotide
ggacccgggaguccagaag

SEQ ID NO: 509976 - RNA, 19 nt, Artificial Sequence
  Description of Artificial Sequence: Synthetic oligonucleotide
guaccccugcucuggucug

SEQ ID NO: 509977 - RNA, 19 nt, Artificial Sequence
  Description of Artificial Sequence: Synthetic oligonucleotide
cgucggaccaggaggaccc

SEQ ID NO: 509978 - RNA, 19 nt, Artificial Sequence
  Description of Artificial Sequence: Synthetic oligonucleotide
gggacuagcuggucccagc

SEQ ID NO: 509979 - RNA, 19 nt, Artificial Sequence
  Description of Artificial Sequence: Synthetic oligonucleotide
ccauuccaggcacggaagc

SEQ ID NO: 509980 - RNA, 19 nt, Artificial Sequence
  Description of Artificial Sequence: Synthetic oligonucleotide
cuggguucggaaggugaac

SEQ ID NO: 509981 - RNA, 19 nt, Artificial Sequence
  Description of Artificial Sequence: Synthetic oligonucleotide
caugcagguccaacuucca

SEQ ID NO: 509982 - RNA, 19 nt, Artificial Sequence
  Description of Artificial Sequence: Synthetic oligonucleotide
gugucuggugccagcggcc

SEQ ID NO: 509983 - RNA, 19 nt, Artificial Sequence
  Description of Artificial Sequence: Synthetic oligonucleotide
caggccgaagagccccggg

SEQ ID NO: 509984 - RNA, 19 nt, Artificial Sequence
  Description of Artificial Sequence: Synthetic oligonucleotide
ugagccuguccuggugaga

SEQ ID NO: 509985 - RNA, 19 nt, Artificial Sequence
  Description of Artificial Sequence: Synthetic oligonucleotide
ggccuacccaucucgcccc

SEQ ID NO: 509986 - RNA, 19 nt, Artificial Sequence
  Description of Artificial Sequence: Synthetic oligonucleotide
agcccggccuacccaucuc

SEQ ID NO: 509987 - RNA, 19 nt, Artificial Sequence
  Description of Artificial Sequence: Synthetic oligonucleotide
gggaaccccugccugccag

SEQ ID NO: 509988 - RNA, 19 nt, Artificial Sequence
  Description of Artificial Sequence: Synthetic oligonucleotide
ccaaggguccuggauuucc

SEQ ID NO: 509989 - RNA, 19 nt, Artificial Sequence
  Description of Artificial Sequence: Synthetic oligonucleotide
ccuacagguccagggaacc

SEQ ID NO: 509990 - RNA, 19 nt, Artificial Sequence
  Description of Artificial Sequence: Synthetic oligonucleotide
cucccgccgcccaucaguc

SEQ ID NO: 509991 - RNA, 19 nt, Artificial Sequence
  Description of Artificial Sequence: Synthetic oligonucleotide
gguccuggauuuccggaga

SEQ ID NO: 509992 - RNA, 19 nt, Artificial Sequence
  Description of Artificial Sequence: Synthetic oligonucleotide
gagccccgggaguccaaug

SEQ ID NO: 509993 - RNA, 19 nt, Artificial Sequence
  Description of Artificial Sequence: Synthetic oligonucleotide
cauccgaccccggcaggcc

SEQ ID NO: 509994 - RNA, 19 nt, Artificial Sequence
  Description of Artificial Sequence: Synthetic oligonucleotide
gcuagucacauuguuaaau

SEQ ID NO: 509995 - RNA, 19 nt, Artificial Sequence
  Description of Artificial Sequence: Synthetic oligonucleotide
uguuacccuuugccccauc

SEQ ID NO: 509996 - RNA, 19 nt, Artificial Sequence
  Description of Artificial Sequence: Synthetic oligonucleotide
aggacccuuugggccuugc

SEQ ID NO: 509997 - RNA, 19 nt, Artificial Sequence
  Description of Artificial Sequence: Synthetic oligonucleotide
ggccuugcaguccccaguc

SEQ ID NO: 509998 - RNA, 19 nt, Artificial Sequence
  Description of Artificial Sequence: Synthetic oligonucleotide
auguaaccccggcugccuu

SEQ ID NO: 509999 - RNA, 19 nt, Artificial Sequence
  Description of Artificial Sequence: Synthetic oligonucleotide
  modified_base (19)..(19): a, c, u, g, unknown or other
gaugugcugucguccccun

SEQ ID NO: 510000 - RNA, 19 nt, Artificial Sequence
  Description of Artificial Sequence: Synthetic oligonucleotide
gucccaaggguccuggauu

SEQ ID NO: 510001 - RNA, 19 nt, Artificial Sequence
  Description of Artificial Sequence: Synthetic oligonucleotide
aucguggaccuugcagcca

SEQ ID NO: 510002 - RNA, 19 nt, Artificial Sequence
  Description of Artificial Sequence: Synthetic oligonucleotide
gaacccaguugcccaggua

SEQ ID NO: 510003 - RNA, 19 nt, Artificial Sequence
  Description of Artificial Sequence: Synthetic oligonucleotide
cccauauggcccaggagga

SEQ ID NO: 510004 - RNA, 19 nt, Artificial Sequence
  Description of Artificial Sequence: Synthetic oligonucleotide
cucaccagagucacccggu

SEQ ID NO: 510005 - RNA, 19 nt, Artificial Sequence
  Description of Artificial Sequence: Synthetic oligonucleotide
uacuccugggaagcccauc

SEQ ID NO: 510006 - RNA, 19 nt, Artificial Sequence
  Description of Artificial Sequence: Synthetic oligonucleotide
  modified_base (18)..(18): a, c, u, g, unknown or other
augugcugucguccccuna

SEQ ID NO: 510007 - RNA, 19 nt, Artificial Sequence
  Description of Artificial Sequence: Synthetic oligonucleotide
aggggcgcccgugggcccc

SEQ ID NO: 510008 - RNA, 19 nt, Artificial Sequence
  Description of Artificial Sequence: Synthetic oligonucleotide
cagcgauuucacaguggga

SEQ ID NO: 510009 - RNA, 19 nt, Artificial Sequence
  Description of Artificial Sequence: Synthetic oligonucleotide
gggcccuuggguccaaaga

SEQ ID NO: 510010 - RNA, 19 nt, Artificial Sequence
  Description of Artificial Sequence: Synthetic oligonucleotide
gguccaaagaggccagcua

SEQ ID NO: 510011 - RNA, 19 nt, Artificial Sequence
  Description of Artificial Sequence: Synthetic oligonucleotide
cugguccggauagcuguac

SEQ ID NO: 510012 - RNA, 19 nt, Artificial Sequence
  Description of Artificial Sequence: Synthetic oligonucleotide
uguccccgggguccuggau

SEQ ID NO: 510013 - RNA, 19 nt, Artificial Sequence
  Description of Artificial Sequence: Synthetic oligonucleotide
ccggcaagccacagucucc

SEQ ID NO: 510014 - RNA, 19 nt, Artificial Sequence
  Description of Artificial Sequence: Synthetic oligonucleotide
cccgggaguccaauguaac

SEQ ID NO: 510015 - RNA, 19 nt, Artificial Sequence
  Description of Artificial Sequence: Synthetic oligonucleotide
acggcuugccuggcaggag

SEQ ID NO: 510016 - RNA, 19 nt, Artificial Sequence
  Description of Artificial Sequence: Synthetic oligonucleotide
gcacggcuugccuggcagg

SEQ ID NO: 510017 - RNA, 19 nt, Artificial Sequence
  Description of Artificial Sequence: Synthetic oligonucleotide
ugggacccgggaguccaga

SEQ ID NO: 510018 - RNA, 19 nt, Artificial Sequence
  Description of Artificial Sequence: Synthetic oligonucleotide
caaugaggccggggacucc

SEQ ID NO: 510019 - RNA, 19 nt, Artificial Sequence
  Description of Artificial Sequence: Synthetic oligonucleotide
ggaggagccuagaggucag

SEQ ID NO: 510020 - RNA, 19 nt, Artificial Sequence
  Description of Artificial Sequence: Synthetic oligonucleotide
aucucccgccgcccaucag

SEQ ID NO: 510021 - RNA, 19 nt, Artificial Sequence
  Description of Artificial Sequence: Synthetic oligonucleotide
ucccgccgcccaucagucc

SEQ ID NO: 510022 - RNA, 19 nt, Artificial Sequence
  Description of Artificial Sequence: Synthetic oligonucleotide
cacccgguuggccuuugga

SEQ ID NO: 510023 - RNA, 19 nt, Artificial Sequence
  Description of Artificial Sequence: Synthetic oligonucleotide
cccggcaagccacagucuc

SEQ ID NO: 510024 - RNA, 19 nt, Artificial Sequence
  Description of Artificial Sequence: Synthetic oligonucleotide
uacccaucucgccccucuu

SEQ ID NO: 510025 - RNA, 19 nt, Artificial Sequence
  Description of Artificial Sequence: Synthetic oligonucleotide
cuaaggcagggucccauau

SEQ ID NO: 510026 - RNA, 19 nt, Artificial Sequence
  Description of Artificial Sequence: Synthetic oligonucleotide
acaaggcuuggaggagccu

SEQ ID NO: 510027 - RNA, 19 nt, Artificial Sequence
  Description of Artificial Sequence: Synthetic oligonucleotide
cagucucccuuggauccug

SEQ ID NO: 510028 - RNA, 19 nt, Artificial Sequence
  Description of Artificial Sequence: Synthetic oligonucleotide
ccggauagcuguaccccug

SEQ ID NO: 510029 - RNA, 19 nt, Artificial Sequence
  Description of Artificial Sequence: Synthetic oligonucleotide
guugccaggcuuucccuuu

SEQ ID NO: 510030 - RNA, 19 nt, Artificial Sequence
  Description of Artificial Sequence: Synthetic oligonucleotide
  modified_base (11)..(11): a, c, u, g, unknown or other
gucguccccunagaacuga

SEQ ID NO: 510031 - RNA, 19 nt, Artificial Sequence
  Description of Artificial Sequence: Synthetic oligonucleotide
  modified_base (9)..(9): a, c, u, g, unknown or other
cguccccunagaacugagc

SEQ ID NO: 510032 - RNA, 19 nt, Artificial Sequence
  Description of Artificial Sequence: Synthetic oligonucleotide
ccucuugaccaggguaucc

SEQ ID NO: 510033 - RNA, 19 nt, Artificial Sequence
  Description of Artificial Sequence: Synthetic oligonucleotide
ccucuggccugaacugacc

SEQ ID NO: 510034 - RNA, 19 nt, Artificial Sequence
  Description of Artificial Sequence: Synthetic oligonucleotide
uuccgucccaaggguccug

SEQ ID NO: 510035 - RNA, 19 nt, Artificial Sequence
  Description of Artificial Sequence: Synthetic oligonucleotide
ccaucucgccccucuugcc

SEQ ID NO: 510036 - RNA, 19 nt, Artificial Sequence
  Description of Artificial Sequence: Synthetic oligonucleotide
gcccuguucuccagggugc

SEQ ID NO: 510037 - RNA, 19 nt, Artificial Sequence
  Description of Artificial Sequence: Synthetic oligonucleotide
gguucccauauggcccagg

SEQ ID NO: 510038 - RNA, 19 nt, Artificial Sequence
  Description of Artificial Sequence: Synthetic oligonucleotide
ccaggggaacccaguugcc

SEQ ID NO: 510039 - RNA, 19 nt, Artificial Sequence
  Description of Artificial Sequence: Synthetic oligonucleotide
cggccuacccaucucgccc

SEQ ID NO: 510040 - RNA, 19 nt, Artificial Sequence
  Description of Artificial Sequence: Synthetic oligonucleotide
ccccaaaaucuccagggaa

SEQ ID NO: 510041 - RNA, 19 nt, Artificial Sequence
  Description of Artificial Sequence: Synthetic oligonucleotide
gagacuggugggagguugu

SEQ ID NO: 510042 - RNA, 19 nt, Artificial Sequence
  Description of Artificial Sequence: Synthetic oligonucleotide
cacggcuugccuggcagga

SEQ ID NO: 510043 - RNA, 19 nt, Artificial Sequence
  Description of Artificial Sequence: Synthetic oligonucleotide
gaggggcgcccgugggccc

SEQ ID NO: 510044 - RNA, 19 nt, Artificial Sequence
  Description of Artificial Sequence: Synthetic oligonucleotide
cccuuugggcccucuucgc

SEQ ID NO: 510045 - RNA, 19 nt, Artificial Sequence
  Description of Artificial Sequence: Synthetic oligonucleotide
cuguggguccuggguucgg

SEQ ID NO: 510046 - RNA, 19 nt, Artificial Sequence
  Description of Artificial Sequence: Synthetic oligonucleotide
gggaacccaguugcccagg

SEQ ID NO: 510047 - RNA, 19 nt, Artificial Sequence
  Description of Artificial Sequence: Synthetic oligonucleotide
ggauuuccggagagcccag

SEQ ID NO: 510048 - RNA, 19 nt, Artificial Sequence
  Description of Artificial Sequence: Synthetic oligonucleotide
cccggcugccuuugggacc

SEQ ID NO: 510049 - RNA, 19 nt, Artificial Sequence
  Description of Artificial Sequence: Synthetic oligonucleotide
ggcaagcccauguuacccu

SEQ ID NO: 510050 - RNA, 19 nt, Artificial Sequence
  Description of Artificial Sequence: Synthetic oligonucleotide
cggcuugccuggcaggagg

SEQ ID NO: 510051 - RNA, 19 nt, Artificial Sequence
  Description of Artificial Sequence: Synthetic oligonucleotide
cuuuuaggcccugggcugu

SEQ ID NO: 510052 - RNA, 19 nt, Artificial Sequence
  Description of Artificial Sequence: Synthetic oligonucleotide
gguucggaaggugaacagu

SEQ ID NO: 510053 - RNA, 19 nt, Artificial Sequence
  Description of Artificial Sequence: Synthetic oligonucleotide
ccggccuacccaucucgcc

SEQ ID NO: 510054 - RNA, 19 nt, Artificial Sequence
  Description of Artificial Sequence: Synthetic oligonucleotide
gcuugccuggcaggagggg

SEQ ID NO: 510055 - RNA, 19 nt, Artificial Sequence
  Description of Artificial Sequence: Synthetic oligonucleotide
gggaagcccggccuaccca

SEQ ID NO: 510056 - RNA, 19 nt, Artificial Sequence
  Description of Artificial Sequence: Synthetic oligonucleotide
gaagcccggccuacccauc

SEQ ID NO: 510057 - RNA, 19 nt, Artificial Sequence
  Description of Artificial Sequence: Synthetic oligonucleotide
agagccccgggaguccaau

SEQ ID NO: 510058 - RNA, 19 nt, Artificial Sequence
  Description of Artificial Sequence: Synthetic oligonucleotide
gguucaggcaauggauugu

SEQ ID NO: 510059 - RNA, 19 nt, Artificial Sequence
  Description of Artificial Sequence: Synthetic oligonucleotide
cggauagcuguaccccugc

SEQ ID NO: 510060 - RNA, 19 nt, Artificial Sequence
  Description of Artificial Sequence: Synthetic oligonucleotide
ccaaugaggccggggacuc

SEQ ID NO: 510061 - RNA, 19 nt, Artificial Sequence
  Description of Artificial Sequence: Synthetic oligonucleotide
acccgggaguccagaaggu

SEQ ID NO: 510062 - RNA, 19 nt, Artificial Sequence
  Description of Artificial Sequence: Synthetic oligonucleotide
ucgccccucuugccaggaa

SEQ ID NO: 510063 - RNA, 19 nt, Artificial Sequence
  Description of Artificial Sequence: Synthetic oligonucleotide
cccacaaggcuuggaggag

SEQ ID NO: 510064 - RNA, 19 nt, Artificial Sequence
  Description of Artificial Sequence: Synthetic oligonucleotide
ccauccgaccccggcaggc

SEQ ID NO: 510065 - RNA, 19 nt, Artificial Sequence
  Description of Artificial Sequence: Synthetic oligonucleotide
gaggagccuagaggucaga

SEQ ID NO: 510066 - RNA, 19 nt, Artificial Sequence
  Description of Artificial Sequence: Synthetic oligonucleotide
ccgucggaccaggaggacc

SEQ ID NO: 510067 - RNA, 19 nt, Artificial Sequence
  Description of Artificial Sequence: Synthetic oligonucleotide
cccggccuacccaucucgc

SEQ ID NO: 510068 - RNA, 19 nt, Artificial Sequence
  Description of Artificial Sequence: Synthetic oligonucleotide
cggcaagccacagucuccc

SEQ ID NO: 510069 - RNA, 19 nt, Artificial Sequence
  Description of Artificial Sequence: Synthetic oligonucleotide
auguuacccuuugccccau

SEQ ID NO: 510070 - RNA, 19 nt, Artificial Sequence
  Description of Artificial Sequence: Synthetic oligonucleotide
gagucacccgguuggccuu

SEQ ID NO: 510071 - RNA, 19 nt, Artificial Sequence
  Description of Artificial Sequence: Synthetic oligonucleotide
ggcaggccgaagagccccg

SEQ ID NO: 510072 - RNA, 19 nt, Artificial Sequence
  Description of Artificial Sequence: Synthetic oligonucleotide
cccuuccgucccaaggguc

SEQ ID NO: 510073 - RNA, 19 nt, Artificial Sequence
  Description of Artificial Sequence: Synthetic oligonucleotide
ggaagcgcacggcuugccu

SEQ ID NO: 510074 - RNA, 19 nt, Artificial Sequence
  Description of Artificial Sequence: Synthetic oligonucleotide
aggaccccgaggaccucgu

SEQ ID NO: 510075 - RNA, 19 nt, Artificial Sequence
  Description of Artificial Sequence: Synthetic oligonucleotide
ccaaggagacccgguggac

SEQ ID NO: 510076 - RNA, 19 nt, Artificial Sequence
  Description of Artificial Sequence: Synthetic oligonucleotide
gccccucuugccaggaaca

SEQ ID NO: 510077 - RNA, 19 nt, Artificial Sequence
  Description of Artificial Sequence: Synthetic oligonucleotide
cuuccccacaaggcuugga

SEQ ID NO: 510078 - RNA, 19 nt, Artificial Sequence
  Description of Artificial Sequence: Synthetic oligonucleotide
cgaagaccuguccauucca

SEQ ID NO: 510079 - RNA, 19 nt, Artificial Sequence
  Description of Artificial Sequence: Synthetic oligonucleotide
caguccccucggcugccuc

SEQ ID NO: 510080 - RNA, 19 nt, Artificial Sequence
  Description of Artificial Sequence: Synthetic oligonucleotide
cuucgaagaccuguccauu

SEQ ID NO: 510081 - RNA, 19 nt, Artificial Sequence
  Description of Artificial Sequence: Synthetic oligonucleotide
gggucccauaucugggacu

SEQ ID NO: 510082 - RNA, 19 nt, Artificial Sequence
  Description of Artificial Sequence: Synthetic oligonucleotide
caggcgguacugcuucccu

SEQ ID NO: 510083 - RNA, 19 nt, Artificial Sequence
  Description of Artificial Sequence: Synthetic oligonucleotide
ggauagcuguaccccugcu

SEQ ID NO: 510084 - RNA, 19 nt, Artificial Sequence
  Description of Artificial Sequence: Synthetic oligonucleotide
cgccccucuugccaggaac

SEQ ID NO: 510085 - RNA, 19 nt, Artificial Sequence
  Description of Artificial Sequence: Synthetic oligonucleotide
agucacccgguuggccuuu

SEQ ID NO: 510086 - RNA, 19 nt, Artificial Sequence
  Description of Artificial Sequence: Synthetic oligonucleotide
ccccgucggaccaggagga

SEQ ID NO: 510087 - RNA, 19 nt, Artificial Sequence
  Description of Artificial Sequence: Synthetic oligonucleotide
gucacccgguuggccuuug

SEQ ID NO: 510088 - RNA, 19 nt, Artificial Sequence
  Description of Artificial Sequence: Synthetic oligonucleotide
ccucgcuuuccaggggaac

SEQ ID NO: 510089 - RNA, 19 nt, Artificial Sequence
  Description of Artificial Sequence: Synthetic oligonucleotide
ccccgggaguccaauguaa

SEQ ID NO: 510090 - RNA, 19 nt, Artificial Sequence
  Description of Artificial Sequence: Synthetic oligonucleotide
ccuaaggcagggucccaua

SEQ ID NO: 510091 - RNA, 19 nt, Artificial Sequence
  Description of Artificial Sequence: Synthetic oligonucleotide
cccagcuucgaagaccugu

SEQ ID NO: 510092 - RNA, 19 nt, Artificial Sequence
  Description of Artificial Sequence: Synthetic oligonucleotide
cucgccccucuugccagga

SEQ ID NO: 510093 - RNA, 19 nt, Artificial Sequence
  Description of Artificial Sequence: Synthetic oligonucleotide
cccgggaguccagaagguc

SEQ ID NO: 510094 - RNA, 19 nt, Artificial Sequence
  Description of Artificial Sequence: Synthetic oligonucleotide
cuuccgucccaaggguccu

SEQ ID NO: 510095 - RNA, 19 nt, Artificial Sequence
  Description of Artificial Sequence: Synthetic oligonucleotide
  modified_base (5)..(5): a, c, u, g, unknown or other
cccunagaacugagcaggu

SEQ ID NO: 510096 - RNA, 19 nt, Artificial Sequence
  Description of Artificial Sequence: Synthetic oligonucleotide
gcaagcccauguuacccuu

SEQ ID NO: 510097 - RNA, 19 nt, Artificial Sequence
  Description of Artificial Sequence: Synthetic oligonucleotide
ggguagccaauggaaccua

SEQ ID NO: 510098 - RNA, 19 nt, Artificial Sequence
  Description of Artificial Sequence: Synthetic oligonucleotide
cgauuucacagugggaggu

SEQ ID NO: 510099 - RNA, 19 nt, Artificial Sequence
  Description of Artificial Sequence: Synthetic oligonucleotide
ggccaucguggaccuugca

SEQ ID NO: 510100 - RNA, 19 nt, Artificial Sequence
  Description of Artificial Sequence: Synthetic oligonucleotide
gccccgggaguccaaugua

SEQ ID NO: 510101 - RNA, 19 nt, Artificial Sequence
  Description of Artificial Sequence: Synthetic oligonucleotide
ggguucccauauggcccag

SEQ ID NO: 510102 - RNA, 19 nt, Artificial Sequence
  Description of Artificial Sequence: Synthetic oligonucleotide
gucagcccuaaggcagggu

SEQ ID NO: 510103 - RNA, 19 nt, Artificial Sequence
  Description of Artificial Sequence: Synthetic oligonucleotide
ccacggucuccucgaucuc

SEQ ID NO: 510104 - RNA, 19 nt, Artificial Sequence
  Description of Artificial Sequence: Synthetic oligonucleotide
cggggacuccugguggccc

SEQ ID NO: 510105 - RNA, 19 nt, Artificial Sequence
  Description of Artificial Sequence: Synthetic oligonucleotide
gucuggugccagcggccau

SEQ ID NO: 510106 - RNA, 19 nt, Artificial Sequence
  Description of Artificial Sequence: Synthetic oligonucleotide
ccccgaggaccucgugcac

SEQ ID NO: 510107 - RNA, 19 nt, Artificial Sequence
  Description of Artificial Sequence: Synthetic oligonucleotide
  modified_base (4)..(4): a, c, u, g, unknown or other
ccunagaacugagcagguu

SEQ ID NO: 510108 - RNA, 19 nt, Artificial Sequence
  Description of Artificial Sequence: Synthetic oligonucleotide
cccgaucucccgccgccca

SEQ ID NO: 510109 - RNA, 19 nt, Artificial Sequence
  Description of Artificial Sequence: Synthetic oligonucleotide
cccucgcuuuccaggggaa

SEQ ID NO: 510110 - RNA, 19 nt, Artificial Sequence
  Description of Artificial Sequence: Synthetic oligonucleotide
gcgcacggcuugccuggca

SEQ ID NO: 510111 - RNA, 19 nt, Artificial Sequence
  Description of Artificial Sequence: Synthetic oligonucleotide
ccuacccaucucgccccuc

SEQ ID NO: 510112 - RNA, 19 nt, Artificial Sequence
  Description of Artificial Sequence: Synthetic oligonucleotide
cccgucggaccaggaggac

SEQ ID NO: 510113 - RNA, 19 nt, Artificial Sequence
  Description of Artificial Sequence: Synthetic oligonucleotide
cccugccugccaggguaac

SEQ ID NO: 510114 - RNA, 19 nt, Artificial Sequence
  Description of Artificial Sequence: Synthetic oligonucleotide
gcacggaagcgcacggcuu

SEQ ID NO: 510115 - RNA, 19 nt, Artificial Sequence
  Description of Artificial Sequence: Synthetic oligonucleotide
ccgucccaaggguccugga

SEQ ID NO: 510116 - RNA, 19 nt, Artificial Sequence
  Description of Artificial Sequence: Synthetic oligonucleotide
gccuacccaucucgccccu

SEQ ID NO: 510117 - RNA, 19 nt, Artificial Sequence
  Description of Artificial Sequence: Synthetic oligonucleotide
gggaggccccgcucuccau

SEQ ID NO: 510118 - RNA, 19 nt, Artificial Sequence
  Description of Artificial Sequence: Synthetic oligonucleotide
cgcugacaaugggcagcug

SEQ ID NO: 510119 - RNA, 19 nt, Artificial Sequence
  Description of Artificial Sequence: Synthetic oligonucleotide
cgaccccggcaggccgaag

SEQ ID NO: 510120 - RNA, 19 nt, Artificial Sequence
  Description of Artificial Sequence: Synthetic oligonucleotide
ccgaccccggcaggccgaa

SEQ ID NO: 510121 - RNA, 19 nt, Artificial Sequence
  Description of Artificial Sequence: Synthetic oligonucleotide
ggggcgcccgugggccccu

SEQ ID NO: 510122 - RNA, 19 nt, Artificial Sequence
  Description of Artificial Sequence: Synthetic oligonucleotide
aaaauaauggugucauugg

SEQ ID NO: 510123 - RNA, 19 nt, Artificial Sequence
  Description of Artificial Sequence: Synthetic oligonucleotide
cuuuauaacacgcacauug

SEQ ID NO: 510124 - RNA, 19 nt, Artificial Sequence
  Description of Artificial Sequence: Synthetic oligonucleotide
uuucuugcgacccagacca

SEQ ID NO: 510125 - RNA, 19 nt, Artificial Sequence
  Description of Artificial Sequence: Synthetic oligonucleotide
agggauaccauacuucucc

SEQ ID NO: 510126 - RNA, 19 nt, Artificial Sequence
  Description of Artificial Sequence: Synthetic oligonucleotide
aaucucaagguuuugcuug

SEQ ID NO: 510127 - RNA, 19 nt, Artificial Sequence
  Description of Artificial Sequence: Synthetic oligonucleotide
cauauugguaaguagagac

SEQ ID NO: 510128 - RNA, 19 nt, Artificial Sequence
  Description of Artificial Sequence: Synthetic oligonucleotide
auaagccuuucuuagaccg

SEQ ID NO: 510129 - RNA, 19 nt, Artificial Sequence
  Description of Artificial Sequence: Synthetic oligonucleotide
aggaacaugauuugagccc

SEQ ID NO: 510130 - RNA, 19 nt, Artificial Sequence
  Description of Artificial Sequence: Synthetic oligonucleotide
uuuauaacacgcacauugg

SEQ ID NO: 510131 - RNA, 19 nt, Artificial Sequence
  Description of Artificial Sequence: Synthetic oligonucleotide
uauaacacgcacauuggag

SEQ ID NO: 510132 - RNA, 19 nt, Artificial Sequence
  Description of Artificial Sequence: Synthetic oligonucleotide
gaugguauaugauuggcug

SEQ ID NO: 510133 - RNA, 19 nt, Artificial Sequence
  Description of Artificial Sequence: Synthetic oligonucleotide
auaacacgcacauuggagg

SEQ ID NO: 510134 - RNA, 19 nt, Artificial Sequence
  Description of Artificial Sequence: Synthetic oligonucleotide
aauaauggugucauuggcg

SEQ ID NO: 510135 - RNA, 19 nt, Artificial Sequence
  Description of Artificial Sequence: Synthetic oligonucleotide
cauaguauagaccagucug

SEQ ID NO: 510136 - RNA, 19 nt, Artificial Sequence
  Description of Artificial Sequence: Synthetic oligonucleotide
uggacgaucaucauuggcc

SEQ ID NO: 510137 - RNA, 19 nt, Artificial Sequence
  Description of Artificial Sequence: Synthetic oligonucleotide
ucgccgaugaaucucaagg

SEQ ID NO: 510138 - RNA, 19 nt, Artificial Sequence
  Description of Artificial Sequence: Synthetic oligonucleotide
uguaagauucuguugaggu

SEQ ID NO: 510139 - RNA, 19 nt, Artificial Sequence
  Description of Artificial Sequence: Synthetic oligonucleotide
aauucauuuucugacaagu

SEQ ID NO: 510140 - RNA, 19 nt, Artificial Sequence
  Description of Artificial Sequence: Synthetic oligonucleotide
gaagccucgguucagcugg

SEQ ID NO: 510141 - RNA, 19 nt, Artificial Sequence
  Description of Artificial Sequence: Synthetic oligonucleotide
uagguugguaaauagauaa

SEQ ID NO: 510142 - RNA, 19 nt, Artificial Sequence
  Description of Artificial Sequence: Synthetic oligonucleotide
aguagcuguagucaacugg

SEQ ID NO: 510143 - RNA, 19 nt, Artificial Sequence
  Description of Artificial Sequence: Synthetic oligonucleotide
ugauuugagcccaauuucc

SEQ ID NO: 510144 - RNA, 19 nt, Artificial Sequence
  Description of Artificial Sequence: Synthetic oligonucleotide
ucguagggcacuaauaggc

SEQ ID NO: 510145 - RNA, 19 nt, Artificial Sequence
  Description of Artificial Sequence: Synthetic oligonucleotide
auacuguuggcucugagca

SEQ ID NO: 510146 - RNA, 19 nt, Artificial Sequence
  Description of Artificial Sequence: Synthetic oligonucleotide
cauagagggaaucugugcc

SEQ ID NO: 510147 - RNA, 19 nt, Artificial Sequence
  Description of Artificial Sequence: Synthetic oligonucleotide
uucgcaaucuguugggccg

SEQ ID NO: 510148 - RNA, 19 nt, Artificial Sequence
  Description of Artificial Sequence: Synthetic oligonucleotide
gauaccauacuucucccug

SEQ ID NO: 510149 - RNA, 19 nt, Artificial Sequence
  Description of Artificial Sequence: Synthetic oligonucleotide
ucaaagucaacagaagcug

SEQ ID NO: 510150 - RNA, 19 nt, Artificial Sequence
  Description of Artificial Sequence: Synthetic oligonucleotide
aagcuguagauaugccacc

SEQ ID NO: 510151 - RNA, 19 nt, Artificial Sequence
  Description of Artificial Sequence: Synthetic oligonucleotide
aagucuaauuuggugagag

SEQ ID NO: 510152 - RNA, 19 nt, Artificial Sequence
  Description of Artificial Sequence: Synthetic oligonucleotide
agagacaucaggaacgggg

SEQ ID NO: 510153 - RNA, 19 nt, Artificial Sequence
  Description of Artificial Sequence: Synthetic oligonucleotide
auaauggugucauuggcgu

SEQ ID NO: 510154 - RNA, 19 nt, Artificial Sequence
  Description of Artificial Sequence: Synthetic oligonucleotide
uucagguugcgcaaaauaa

SEQ ID NO: 510155 - RNA, 19 nt, Artificial Sequence
  Description of Artificial Sequence: Synthetic oligonucleotide
gguaaguagagacaucagg

SEQ ID NO: 510156 - RNA, 19 nt, Artificial Sequence
  Description of Artificial Sequence: Synthetic oligonucleotide
uugcgcaaaauaauggugu

SEQ ID NO: 510157 - RNA, 19 nt, Artificial Sequence
  Description of Artificial Sequence: Synthetic oligonucleotide
uugguaaguagagacauca

SEQ ID NO: 510158 - RNA, 19 nt, Artificial Sequence
  Description of Artificial Sequence: Synthetic oligonucleotide
aaugggugucacaaugccc

SEQ ID NO: 510159 - RNA, 19 nt, Artificial Sequence
  Description of Artificial Sequence: Synthetic oligonucleotide
agauaugccaccguauuuc

SEQ ID NO: 510160 - RNA, 19 nt, Artificial Sequence
  Description of Artificial Sequence: Synthetic oligonucleotide
ugggcugccuccacgaugg

SEQ ID NO: 510161 - RNA, 19 nt, Artificial Sequence
  Description of Artificial Sequence: Synthetic oligonucleotide
agguauguagguccgccgc

SEQ ID NO: 510162 - RNA, 19 nt, Artificial Sequence
  Description of Artificial Sequence: Synthetic oligonucleotide
ucucaaggauagcauagcc

SEQ ID NO: 510163 - RNA, 19 nt, Artificial Sequence
  Description of Artificial Sequence: Synthetic oligonucleotide
ugaaucucaagguuuugcu

SEQ ID NO: 510164 - RNA, 19 nt, Artificial Sequence
  Description of Artificial Sequence: Synthetic oligonucleotide
ucuccuuauguccaucagc

SEQ ID NO: 510165 - RNA, 19 nt, Artificial Sequence
  Description of Artificial Sequence: Synthetic oligonucleotide
ugucuuaugcuucucuuuc

SEQ ID NO: 510166 - RNA, 19 nt, Artificial Sequence
  Description of Artificial Sequence: Synthetic oligonucleotide
cuucucaaggauagcauag

SEQ ID NO: 510167 - RNA, 19 nt, Artificial Sequence
  Description of Artificial Sequence: Synthetic oligonucleotide
ucuuagaccgcuccacacc

SEQ ID NO: 510168 - RNA, 19 nt, Artificial Sequence
  Description of Artificial Sequence: Synthetic oligonucleotide
ucaacuggagucuccucgg

SEQ ID NO: 510169 - RNA, 19 nt, Artificial Sequence
  Description of Artificial Sequence: Synthetic oligonucleotide
uguaguaauacugggaguu

SEQ ID NO: 510170 - RNA, 19 nt, Artificial Sequence
  Description of Artificial Sequence: Synthetic oligonucleotide
cucgaggugggcuuggacg

SEQ ID NO: 510171 - RNA, 19 nt, Artificial Sequence
  Description of Artificial Sequence: Synthetic oligonucleotide
uaaagauacuguuggcucu

SEQ ID NO: 510172 - RNA, 19 nt, Artificial Sequence
  Description of Artificial Sequence: Synthetic oligonucleotide
aggacagcaccgcauaggg

SEQ ID NO: 510173 - RNA, 19 nt, Artificial Sequence
  Description of Artificial Sequence: Synthetic oligonucleotide
ucugaacccugugauaggg

SEQ ID NO: 510174 - RNA, 19 nt, Artificial Sequence
  Description of Artificial Sequence: Synthetic oligonucleotide
uguugaggugaccccauag

SEQ ID NO: 510175 - RNA, 19 nt, Artificial Sequence
  Description of Artificial Sequence: Synthetic oligonucleotide
guugaggugaccccauagg

SEQ ID NO: 510176 - RNA, 19 nt, Artificial Sequence
  Description of Artificial Sequence: Synthetic oligonucleotide
uaguaauacugggaguugg

SEQ ID NO: 510177 - RNA, 19 nt, Artificial Sequence
  Description of Artificial Sequence: Synthetic oligonucleotide
ugagcauuguaguaauacu

SEQ ID NO: 510178 - RNA, 19 nt, Artificial Sequence
  Description of Artificial Sequence: Synthetic oligonucleotide
auaguauagaccagucugg

SEQ ID NO: 510179 - RNA, 19 nt, Artificial Sequence
  Description of Artificial Sequence: Synthetic oligonucleotide
cauuggccaacuuugggag

SEQ ID NO: 510180 - RNA, 19 nt, Artificial Sequence
  Description of Artificial Sequence: Synthetic oligonucleotide
agaugucucaucauauugg

SEQ ID NO: 510181 - RNA, 19 nt, Artificial Sequence
  Description of Artificial Sequence: Synthetic oligonucleotide
agucuaauuuggugagagc

SEQ ID NO: 510182 - RNA, 19 nt, Artificial Sequence
  Description of Artificial Sequence: Synthetic oligonucleotide
guaaguagagacaucagga

SEQ ID NO: 510183 - RNA, 19 nt, Artificial Sequence
  Description of Artificial Sequence: Synthetic oligonucleotide
uaaguagagacaucaggaa

SEQ ID NO: 510184 - RNA, 19 nt, Artificial Sequence
  Description of Artificial Sequence: Synthetic oligonucleotide
ucauaguauagaccagucu

SEQ ID NO: 510185 - RNA, 19 nt, Artificial Sequence
  Description of Artificial Sequence: Synthetic oligonucleotide
ugaugguauaugauuggcu

SEQ ID NO: 510186 - RNA, 19 nt, Artificial Sequence
  Description of Artificial Sequence: Synthetic oligonucleotide
gauaagccuuucuuagacc

SEQ ID NO: 510187 - RNA, 19 nt, Artificial Sequence
  Description of Artificial Sequence: Synthetic oligonucleotide
ugagauucgcccacugggc

SEQ ID NO: 510188 - RNA, 19 nt, Artificial Sequence
  Description of Artificial Sequence: Synthetic oligonucleotide
gauaugccaccguauuucc

SEQ ID NO: 510189 - RNA, 19 nt, Artificial Sequence
  Description of Artificial Sequence: Synthetic oligonucleotide
gcugauugcugauaaagcc

SEQ ID NO: 510190 - RNA, 19 nt, Artificial Sequence
  Description of Artificial Sequence: Synthetic oligonucleotide
cuuugggagauccaugcug

SEQ ID NO: 510191 - RNA, 19 nt, Artificial Sequence
  Description of Artificial Sequence: Synthetic oligonucleotide
ugaacccugugauagggcu

SEQ ID NO: 510192 - RNA, 19 nt, Artificial Sequence
  Description of Artificial Sequence: Synthetic oligonucleotide
uaguauagaccagucuggg

SEQ ID NO: 510193 - RNA, 19 nt, Artificial Sequence
  Description of Artificial Sequence: Synthetic oligonucleotide
uguugauaguagcuguagu

SEQ ID NO: 510194 - RNA, 19 nt, Artificial Sequence
  Description of Artificial Sequence: Synthetic oligonucleotide
uuguaagauucuguugagg

SEQ ID NO: 510195 - RNA, 19 nt, Artificial Sequence
  Description of Artificial Sequence: Synthetic oligonucleotide
uguagauaugccaccguau

SEQ ID NO: 510196 - RNA, 19 nt, Artificial Sequence
  Description of Artificial Sequence: Synthetic oligonucleotide
ucagcuagcgcucccuucu

SEQ ID NO: 510197 - RNA, 19 nt, Artificial Sequence
  Description of Artificial Sequence: Synthetic oligonucleotide
ucgaacccgugucugagcc

SEQ ID NO: 510198 - RNA, 19 nt, Artificial Sequence
  Description of Artificial Sequence: Synthetic oligonucleotide
ugggccucauugaagcggg

SEQ ID NO: 510199 - RNA, 19 nt, Artificial Sequence
  Description of Artificial Sequence: Synthetic oligonucleotide
aaagauacuguuggcucug

SEQ ID NO: 510200 - RNA, 19 nt, Artificial Sequence
  Description of Artificial Sequence: Synthetic oligonucleotide
uuucuuagaccgcuccaca

SEQ ID NO: 510201 - RNA, 19 nt, Artificial Sequence
  Description of Artificial Sequence: Synthetic oligonucleotide
cagguugcgcaaaauaaug

SEQ ID NO: 510202 - RNA, 19 nt, Artificial Sequence
  Description of Artificial Sequence: Synthetic oligonucleotide
gaaguuguacccugacuac

SEQ ID NO: 510203 - RNA, 19 nt, Artificial Sequence
  Description of Artificial Sequence: Synthetic oligonucleotide
uaauccaucccgagugggc

SEQ ID NO: 510204 - RNA, 19 nt, Artificial Sequence
  Description of Artificial Sequence: Synthetic oligonucleotide
uuauuacaaaaggaacaug

SEQ ID NO: 510205 - RNA, 19 nt, Artificial Sequence
  Description of Artificial Sequence: Synthetic oligonucleotide
gguugguaaauagauaagc

SEQ ID NO: 510206 - RNA, 19 nt, Artificial Sequence
  Description of Artificial Sequence: Synthetic oligonucleotide
ucuaauuuggugagagcuu

SEQ ID NO: 510207 - RNA, 19 nt, Artificial Sequence
  Description of Artificial Sequence: Synthetic oligonucleotide
guccuucgcaaucuguugg

SEQ ID NO: 510208 - RNA, 19 nt, Artificial Sequence
  Description of Artificial Sequence: Synthetic oligonucleotide
uaacacgcacauuggagga

SEQ ID NO: 510209 - RNA, 19 nt, Artificial Sequence
  Description of Artificial Sequence: Synthetic oligonucleotide
aucgauggugagcggaggg

SEQ ID NO: 510210 - RNA, 19 nt, Artificial Sequence
  Description of Artificial Sequence: Synthetic oligonucleotide
uuggacgaucaucauuggc

SEQ ID NO: 510211 - RNA, 19 nt, Artificial Sequence
  Description of Artificial Sequence: Synthetic oligonucleotide
ucuuagaacccuuggcaaa

SEQ ID NO: 510212 - RNA, 19 nt, Artificial Sequence
  Description of Artificial Sequence: Synthetic oligonucleotide
cuucuuuccagcccauggc

SEQ ID NO: 510213 - RNA, 19 nt, Artificial Sequence
  Description of Artificial Sequence: Synthetic oligonucleotide
ucgggagaaagccugcagu

SEQ ID NO: 510214 - RNA, 19 nt, Artificial Sequence
  Description of Artificial Sequence: Synthetic oligonucleotide
guagccagaugucucauca

SEQ ID NO: 510215 - RNA, 19 nt, Artificial Sequence
  Description of Artificial Sequence: Synthetic oligonucleotide
auuugcuccaugucauucu

SEQ ID NO: 510216 - RNA, 19 nt, Artificial Sequence
  Description of Artificial Sequence: Synthetic oligonucleotide
ucccucuuagaacccuugg

SEQ ID NO: 510217 - RNA, 19 nt, Artificial Sequence
  Description of Artificial Sequence: Synthetic oligonucleotide
ugguaaguagagacaucag

SEQ ID NO: 510218 - RNA, 19 nt, Artificial Sequence
  Description of Artificial Sequence: Synthetic oligonucleotide
ucgguacuucauuugcucc

SEQ ID NO: 510219 - RNA, 19 nt, Artificial Sequence
  Description of Artificial Sequence: Synthetic oligonucleotide
gaagcucagacuugagcac

SEQ ID NO: 510220 - RNA, 19 nt, Artificial Sequence
  Description of Artificial Sequence: Synthetic oligonucleotide
cucguagggcacuaauagg

SEQ ID NO: 510221 - RNA, 19 nt, Artificial Sequence
  Description of Artificial Sequence: Synthetic oligonucleotide
cuucgcaaucuguugggcc

SEQ ID NO: 510222 - RNA, 19 nt, Artificial Sequence
  Description of Artificial Sequence: Synthetic oligonucleotide
gugacaugaugguauauga

SEQ ID NO: 510223 - RNA, 19 nt, Artificial Sequence
  Description of Artificial Sequence: Synthetic oligonucleotide
acgaucaucauuggccaac

SEQ ID NO: 510224 - RNA, 19 nt, Artificial Sequence
  Description of Artificial Sequence: Synthetic oligonucleotide
caucauuggccaacuuugg

SEQ ID NO: 510225 - RNA, 19 nt, Artificial Sequence
  Description of Artificial Sequence: Synthetic oligonucleotide
agacccucgaacccguguc

SEQ ID NO: 510226 - RNA, 19 nt, Artificial Sequence
  Description of Artificial Sequence: Synthetic oligonucleotide
acuugagcacagcagguga

SEQ ID NO: 510227 - RNA, 19 nt, Artificial Sequence
  Description of Artificial Sequence: Synthetic oligonucleotide
gcacuaauaggcuggaagc

SEQ ID NO: 510228 - RNA, 19 nt, Artificial Sequence
  Description of Artificial Sequence: Synthetic oligonucleotide
cauuguaguaauacuggga

SEQ ID NO: 510229 - RNA, 19 nt, Artificial Sequence
  Description of Artificial Sequence: Synthetic oligonucleotide
acuaauaggcuggaagcug

SEQ ID NO: 510230 - RNA, 19 nt, Artificial Sequence
  Description of Artificial Sequence: Synthetic oligonucleotide
accauugucuugugcagug

SEQ ID NO: 510231 - RNA, 19 nt, Artificial Sequence
  Description of Artificial Sequence: Synthetic oligonucleotide
ugccccagucucaagggag

SEQ ID NO: 510232 - RNA, 19 nt, Artificial Sequence
  Description of Artificial Sequence: Synthetic oligonucleotide
ggcagcauugauucgacug

SEQ ID NO: 510233 - RNA, 19 nt, Artificial Sequence
  Description of Artificial Sequence: Synthetic oligonucleotide
aauccaucccgagugggcu

SEQ ID NO: 510234 - RNA, 19 nt, Artificial Sequence
  Description of Artificial Sequence: Synthetic oligonucleotide
cugucuuucagcuagcgcu

SEQ ID NO: 510235 - RNA, 19 nt, Artificial Sequence
  Description of Artificial Sequence: Synthetic oligonucleotide
uugaagcgggucaccauug

SEQ ID NO: 510236 - RNA, 19 nt, Artificial Sequence
  Description of Artificial Sequence: Synthetic oligonucleotide
aggucaguacuccugggcu

SEQ ID NO: 510237 - RNA, 19 nt, Artificial Sequence
  Description of Artificial Sequence: Synthetic oligonucleotide
gcuuggacgaucaucauug

SEQ ID NO: 510238 - RNA, 19 nt, Artificial Sequence
  Description of Artificial Sequence: Synthetic oligonucleotide
ugacaagugggcucgccga

SEQ ID NO: 510239 - RNA, 19 nt, Artificial Sequence
  Description of Artificial Sequence: Synthetic oligonucleotide
gucucgguacuucauuugc

SEQ ID NO: 510240 - RNA, 19 nt, Artificial Sequence
  Description of Artificial Sequence: Synthetic oligonucleotide
caggccagacccucgaacc

SEQ ID NO: 510241 - RNA, 19 nt, Artificial Sequence
  Description of Artificial Sequence: Synthetic oligonucleotide
auugaagcgggucaccauu

SEQ ID NO: 510242 - RNA, 19 nt, Artificial Sequence
  Description of Artificial Sequence: Synthetic oligonucleotide
agguugcgcaaaauaaugg

SEQ ID NO: 510243 - RNA, 19 nt, Artificial Sequence
  Description of Artificial Sequence: Synthetic oligonucleotide
cugacaagugggcucgccg

SEQ ID NO: 510244 - RNA, 19 nt, Artificial Sequence
  Description of Artificial Sequence: Synthetic oligonucleotide
uucuuagaccgcuccacac

SEQ ID NO: 510245 - RNA, 19 nt, Artificial Sequence
  Description of Artificial Sequence: Synthetic oligonucleotide
augggugucacaaugcccu

SEQ ID NO: 510246 - RNA, 19 nt, Artificial Sequence
  Description of Artificial Sequence: Synthetic oligonucleotide
cuuagaacccuuggcaaac

SEQ ID NO: 510247 - RNA, 19 nt, Artificial Sequence
  Description of Artificial Sequence: Synthetic oligonucleotide
ggaguagguugguaaauag

SEQ ID NO: 510248 - RNA, 19 nt, Artificial Sequence
  Description of Artificial Sequence: Synthetic oligonucleotide
gacaugaugguauaugauu

SEQ ID NO: 510249 - RNA, 19 nt, Artificial Sequence
  Description of Artificial Sequence: Synthetic oligonucleotide
ugucuuucagcuagcgcuc

SEQ ID NO: 510250 - RNA, 19 nt, Artificial Sequence
  Description of Artificial Sequence: Synthetic oligonucleotide
guagcuguagucaacugga

SEQ ID NO: 510251 - RNA, 19 nt, Artificial Sequence
  Description of Artificial Sequence: Synthetic oligonucleotide
ucucgguacuucauuugcu

SEQ ID NO: 510252 - RNA, 19 nt, Artificial Sequence
  Description of Artificial Sequence: Synthetic oligonucleotide
uuaagguagccaugggcau

SEQ ID NO: 510253 - RNA, 19 nt, Artificial Sequence
  Description of Artificial Sequence: Synthetic oligonucleotide
gaugucucaucauauuggu

SEQ ID NO: 510254 - RNA, 19 nt, Artificial Sequence
  Description of Artificial Sequence: Synthetic oligonucleotide
uuggaugauggccccgucu

SEQ ID NO: 510255 - RNA, 19 nt, Artificial Sequence
  Description of Artificial Sequence: Synthetic oligonucleotide
aguagccagaugucucauc

SEQ ID NO: 510256 - RNA, 19 nt, Artificial Sequence
  Description of Artificial Sequence: Synthetic oligonucleotide
gccuaauccaucccgagug

SEQ ID NO: 510257 - RNA, 19 nt, Artificial Sequence
  Description of Artificial Sequence: Synthetic oligonucleotide
cucgguacuucauuugcuc

SEQ ID NO: 510258 - RNA, 19 nt, Artificial Sequence
  Description of Artificial Sequence: Synthetic oligonucleotide
aucaggaacgggguacugg

SEQ ID NO: 510259 - RNA, 19 nt, Artificial Sequence
  Description of Artificial Sequence: Synthetic oligonucleotide
auguugucacugccuaauc

SEQ ID NO: 510260 - RNA, 19 nt, Artificial Sequence
  Description of Artificial Sequence: Synthetic oligonucleotide
agaggcagcauugauucga

SEQ ID NO: 510261 - RNA, 19 nt, Artificial Sequence
  Description of Artificial Sequence: Synthetic oligonucleotide
uagauaugccaccguauuu

SEQ ID NO: 510262 - RNA, 19 nt, Artificial Sequence
  Description of Artificial Sequence: Synthetic oligonucleotide
cauaucccucuuagaaccc

SEQ ID NO: 510263 - RNA, 19 nt, Artificial Sequence
  Description of Artificial Sequence: Synthetic oligonucleotide
ggugucauuggcguucucg

SEQ ID NO: 510264 - RNA, 19 nt, Artificial Sequence
  Description of Artificial Sequence: Synthetic oligonucleotide
agcccaauuucccagcaaa

SEQ ID NO: 510265 - RNA, 19 nt, Artificial Sequence
  Description of Artificial Sequence: Synthetic oligonucleotide
ccuuguaagauucuguuga

SEQ ID NO: 510266 - RNA, 19 nt, Artificial Sequence
  Description of Artificial Sequence: Synthetic oligonucleotide
gagcaugcgacugccaaug

SEQ ID NO: 510267 - RNA, 19 nt, Artificial Sequence
  Description of Artificial Sequence: Synthetic oligonucleotide
cuaauccaucccgaguggg

SEQ ID NO: 510268 - RNA, 19 nt, Artificial Sequence
  Description of Artificial Sequence: Synthetic oligonucleotide
ugcgcaaaauaaugguguc

SEQ ID NO: 510269 - RNA, 19 nt, Artificial Sequence
  Description of Artificial Sequence: Synthetic oligonucleotide
caacuccaagucuaauuug

SEQ ID NO: 510270 - RNA, 19 nt, Artificial Sequence
  Description of Artificial Sequence: Synthetic oligonucleotide
ccugcguucagcugcacgg

SEQ ID NO: 510271 - RNA, 19 nt, Artificial Sequence
  Description of Artificial Sequence: Synthetic oligonucleotide
ugccuaauccaucccgagu

SEQ ID NO: 510272 - RNA, 19 nt, Artificial Sequence
  Description of Artificial Sequence: Synthetic oligonucleotide
cuugagcacagcaggugac

SEQ ID NO: 510273 - RNA, 19 nt, Artificial Sequence
  Description of Artificial Sequence: Synthetic oligonucleotide
ugagcccaauuucccagca

SEQ ID NO: 510274 - RNA, 19 nt, Artificial Sequence
  Description of Artificial Sequence: Synthetic oligonucleotide
uggcucugaacccugugau

SEQ ID NO: 510275 - RNA, 19 nt, Artificial Sequence
  Description of Artificial Sequence: Synthetic oligonucleotide
cuguugauaguagcuguag

SEQ ID NO: 510276 - RNA, 19 nt, Artificial Sequence
  Description of Artificial Sequence: Synthetic oligonucleotide
acacgcacauuggaggagg

SEQ ID NO: 510277 - RNA, 19 nt, Artificial Sequence
  Description of Artificial Sequence: Synthetic oligonucleotide
uguagguccgccgcucucc

SEQ ID NO: 510278 - RNA, 19 nt, Artificial Sequence
  Description of Artificial Sequence: Synthetic oligonucleotide
cuuggacgaucaucauugg

SEQ ID NO: 510279 - RNA, 19 nt, Artificial Sequence
  Description of Artificial Sequence: Synthetic oligonucleotide
gcucugaacccugugauag

SEQ ID NO: 510280 - RNA, 19 nt, Artificial Sequence
  Description of Artificial Sequence: Synthetic oligonucleotide
uucuucccgcucaggaccc

SEQ ID NO: 510281 - RNA, 19 nt, Artificial Sequence
  Description of Artificial Sequence: Synthetic oligonucleotide
gcagcauugauucgacugc

SEQ ID NO: 510282 - RNA, 19 nt, Artificial Sequence
  Description of Artificial Sequence: Synthetic oligonucleotide
accguauuuccuccuuuug

SEQ ID NO: 510283 - RNA, 19 nt, Artificial Sequence
  Description of Artificial Sequence: Synthetic oligonucleotide
uggauggacaccccacauc

SEQ ID NO: 510284 - RNA, 19 nt, Artificial Sequence
  Description of Artificial Sequence: Synthetic oligonucleotide
ugugcaguguuuccuugua

SEQ ID NO: 510285 - RNA, 19 nt, Artificial Sequence
  Description of Artificial Sequence: Synthetic oligonucleotide
uuguacccugacuacugcu

SEQ ID NO: 510286 - RNA, 19 nt, Artificial Sequence
  Description of Artificial Sequence: Synthetic oligonucleotide
ccaagucuaauuuggugag

SEQ ID NO: 510287 - RNA, 19 nt, Artificial Sequence
  Description of Artificial Sequence: Synthetic oligonucleotide
ggugacaugaugguauaug

SEQ ID NO: 510288 - RNA, 19 nt, Artificial Sequence
  Description of Artificial Sequence: Synthetic oligonucleotide
uauguagguccgccgcucu

SEQ ID NO: 510289 - RNA, 19 nt, Artificial Sequence
  Description of Artificial Sequence: Synthetic oligonucleotide
uugcugggaaacuggcggc

SEQ ID NO: 510290 - RNA, 19 nt, Artificial Sequence
  Description of Artificial Sequence: Synthetic oligonucleotide
guaaauagauaagccuuuc

SEQ ID NO: 510291 - RNA, 19 nt, Artificial Sequence
  Description of Artificial Sequence: Synthetic oligonucleotide
gaguagguugguaaauaga

SEQ ID NO: 510292 - RNA, 19 nt, Artificial Sequence
  Description of Artificial Sequence: Synthetic oligonucleotide
uacccugacuacugcuucc

SEQ ID NO: 510293 - RNA, 19 nt, Artificial Sequence
  Description of Artificial Sequence: Synthetic oligonucleotide
ugcugggaaacuggcggcg

SEQ ID NO: 510294 - RNA, 19 nt, Artificial Sequence
  Description of Artificial Sequence: Synthetic oligonucleotide
acgauggguggagagcugg

SEQ ID NO: 510295 - RNA, 19 nt, Artificial Sequence
  Description of Artificial Sequence: Synthetic oligonucleotide
ugguauaugauuggcuguu

SEQ ID NO: 510296 - RNA, 19 nt, Artificial Sequence
  Description of Artificial Sequence: Synthetic oligonucleotide
gagauucgcccacugggca

SEQ ID NO: 510297 - RNA, 19 nt, Artificial Sequence
  Description of Artificial Sequence: Synthetic oligonucleotide
acaugauuugagcccaauu

SEQ ID NO: 510298 - RNA, 19 nt, Artificial Sequence
  Description of Artificial Sequence: Synthetic oligonucleotide
uaguagcuguagucaacug

SEQ ID NO: 510299 - RNA, 19 nt, Artificial Sequence
  Description of Artificial Sequence: Synthetic oligonucleotide
cucugaacccugugauagg

SEQ ID NO: 510300 - RNA, 19 nt, Artificial Sequence
  Description of Artificial Sequence: Synthetic oligonucleotide
acgggguacuggcuguagg

SEQ ID NO: 510301 - RNA, 19 nt, Artificial Sequence
  Description of Artificial Sequence: Synthetic oligonucleotide
guaguaauacugggaguug

SEQ ID NO: 510302 - RNA, 19 nt, Artificial Sequence
  Description of Artificial Sequence: Synthetic oligonucleotide
uagaacccuuggcaaacuc

SEQ ID NO: 510303 - RNA, 19 nt, Artificial Sequence
  Description of Artificial Sequence: Synthetic oligonucleotide
gagacugcgggcccaccgc

SEQ ID NO: 510304 - RNA, 19 nt, Artificial Sequence
  Description of Artificial Sequence: Synthetic oligonucleotide
agguugguaaauagauaag

SEQ ID NO: 510305 - RNA, 19 nt, Artificial Sequence
  Description of Artificial Sequence: Synthetic oligonucleotide
acagcaccgcauagggugc

SEQ ID NO: 510306 - RNA, 19 nt, Artificial Sequence
  Description of Artificial Sequence: Synthetic oligonucleotide
aucuguugggccgucuuug

SEQ ID NO: 510307 - RNA, 19 nt, Artificial Sequence
  Description of Artificial Sequence: Synthetic oligonucleotide
cauggugcuguguggguuc

SEQ ID NO: 510308 - RNA, 19 nt, Artificial Sequence
  Description of Artificial Sequence: Synthetic oligonucleotide
cccaguaaagauacuguug

SEQ ID NO: 510309 - RNA, 19 nt, Artificial Sequence
  Description of Artificial Sequence: Synthetic oligonucleotide
gauggugagcggagggugc

SEQ ID NO: 510310 - RNA, 19 nt, Artificial Sequence
  Description of Artificial Sequence: Synthetic oligonucleotide
gaccccauaggaacugccc

SEQ ID NO: 510311 - RNA, 19 nt, Artificial Sequence
  Description of Artificial Sequence: Synthetic oligonucleotide
gucuccuuauguccaucag

SEQ ID NO: 510312 - RNA, 19 nt, Artificial Sequence
  Description of Artificial Sequence: Synthetic oligonucleotide
gauuggcuguuggaaguug

SEQ ID NO: 510313 - RNA, 19 nt, Artificial Sequence
  Description of Artificial Sequence: Synthetic oligonucleotide
agauucuguugaggugacc

SEQ ID NO: 510314 - RNA, 19 nt, Artificial Sequence
  Description of Artificial Sequence: Synthetic oligonucleotide
ucugcugauugcugauaaa

SEQ ID NO: 510315 - RNA, 19 nt, Artificial Sequence
  Description of Artificial Sequence: Synthetic oligonucleotide
aggaacugccccgggcacc

SEQ ID NO: 510316 - RNA, 19 nt, Artificial Sequence
  Description of Artificial Sequence: Synthetic oligonucleotide
uaggaacugccccgggcac

SEQ ID NO: 510317 - RNA, 19 nt, Artificial Sequence
  Description of Artificial Sequence: Synthetic oligonucleotide
aacaugauuugagcccaau

SEQ ID NO: 510318 - RNA, 19 nt, Artificial Sequence
  Description of Artificial Sequence: Synthetic oligonucleotide
cagcauugauucgacugcc

SEQ ID NO: 510319 - RNA, 19 nt, Artificial Sequence
  Description of Artificial Sequence: Synthetic oligonucleotide
cuccacgauggguggagag

SEQ ID NO: 510320 - RNA, 19 nt, Artificial Sequence
  Description of Artificial Sequence: Synthetic oligonucleotide
gucccagucaugccagggc

SEQ ID NO: 510321 - RNA, 19 nt, Artificial Sequence
  Description of Artificial Sequence: Synthetic oligonucleotide
ugagugccuccuugcuggg

SEQ ID NO: 510322 - RNA, 19 nt, Artificial Sequence
  Description of Artificial Sequence: Synthetic oligonucleotide
gauccaugcuggugugcug

SEQ ID NO: 510323 - RNA, 19 nt, Artificial Sequence
  Description of Artificial Sequence: Synthetic oligonucleotide
cuggugugcugucuuucag

SEQ ID NO: 510324 - RNA, 19 nt, Artificial Sequence
  Description of Artificial Sequence: Synthetic oligonucleotide
ugggcucgggagaaagccu

SEQ ID NO: 510325 - RNA, 19 nt, Artificial Sequence
  Description of Artificial Sequence: Synthetic oligonucleotide
auguagguccgccgcucuc

SEQ ID NO: 510326 - RNA, 19 nt, Artificial Sequence
  Description of Artificial Sequence: Synthetic oligonucleotide
uucagcuagcgcucccuuc

SEQ ID NO: 510327 - RNA, 19 nt, Artificial Sequence
  Description of Artificial Sequence: Synthetic oligonucleotide
aucccgagugggcuguuca

SEQ ID NO: 510328 - RNA, 19 nt, Artificial Sequence
  Description of Artificial Sequence: Synthetic oligonucleotide
guacccugacuacugcuuc

SEQ ID NO: 510329 - RNA, 19 nt, Artificial Sequence
  Description of Artificial Sequence: Synthetic oligonucleotide
cauagccuucauccuguug

SEQ ID NO: 510330 - RNA, 19 nt, Artificial Sequence
  Description of Artificial Sequence: Synthetic oligonucleotide
ggauggacaccccacaucu

SEQ ID NO: 510331 - RNA, 19 nt, Artificial Sequence
  Description of Artificial Sequence: Synthetic oligonucleotide
cuggggaguagguugguaa

SEQ ID NO: 510332 - RNA, 19 nt, Artificial Sequence
  Description of Artificial Sequence: Synthetic oligonucleotide
cucgccgaugaaucucaag

SEQ ID NO: 510333 - RNA, 19 nt, Artificial Sequence
  Description of Artificial Sequence: Synthetic oligonucleotide
aacgggguacuggcuguag

SEQ ID NO: 510334 - RNA, 19 nt, Artificial Sequence
  Description of Artificial Sequence: Synthetic oligonucleotide
gcugccuccacgaugggug

SEQ ID NO: 510335 - RNA, 19 nt, Artificial Sequence
  Description of Artificial Sequence: Synthetic oligonucleotide
guagauaugccaccguauu

SEQ ID NO: 510336 - RNA, 19 nt, Artificial Sequence
  Description of Artificial Sequence: Synthetic oligonucleotide
auaucccucuuagaacccu

SEQ ID NO: 510337 - RNA, 19 nt, Artificial Sequence
  Description of Artificial Sequence: Synthetic oligonucleotide
uaauaggcuggaagcuguu

SEQ ID NO: 510338 - RNA, 19 nt, Artificial Sequence
  Description of Artificial Sequence: Synthetic oligonucleotide
cugacuacugcuucccucu

SEQ ID NO: 510339 - RNA, 19 nt, Artificial Sequence
  Description of Artificial Sequence: Synthetic oligonucleotide
ugagcacagcaggugacau

SEQ ID NO: 510340 - RNA, 19 nt, Artificial Sequence
  Description of Artificial Sequence: Synthetic oligonucleotide
auacuucucccugcguuca

SEQ ID NO: 510341 - RNA, 19 nt, Artificial Sequence
  Description of Artificial Sequence: Synthetic oligonucleotide
cuguagauaugccaccgua

SEQ ID NO: 510342 - RNA, 19 nt, Artificial Sequence
  Description of Artificial Sequence: Synthetic oligonucleotide
gguugcgcaaaauaauggu

SEQ ID NO: 510343 - RNA, 19 nt, Artificial Sequence
  Description of Artificial Sequence: Synthetic oligonucleotide
uguugagacugcgggccca

SEQ ID NO: 510344 - RNA, 19 nt, Artificial Sequence
  Description of Artificial Sequence: Synthetic oligonucleotide
uuauguccaucagcagacu

SEQ ID NO: 510345 - RNA, 19 nt, Artificial Sequence
  Description of Artificial Sequence: Synthetic oligonucleotide
uaauggugucauuggcguu

SEQ ID NO: 510346 - RNA, 19 nt, Artificial Sequence
  Description of Artificial Sequence: Synthetic oligonucleotide
uggcguucucggagcuugg

SEQ ID NO: 510347 - RNA, 19 nt, Artificial Sequence
  Description of Artificial Sequence: Synthetic oligonucleotide
acgcacauuggaggaggac

SEQ ID NO: 510348 - RNA, 19 nt, Artificial Sequence
  Description of Artificial Sequence: Synthetic oligonucleotide
agagggaaucugugcccug

SEQ ID NO: 510349 - RNA, 19 nt, Artificial Sequence
  Description of Artificial Sequence: Synthetic oligonucleotide
ccuaauccaucccgagugg

SEQ ID NO: 510350 - RNA, 19 nt, Artificial Sequence
  Description of Artificial Sequence: Synthetic oligonucleotide
ugggcucgccgaugaaucu

SEQ ID NO: 510351 - RNA, 19 nt, Artificial Sequence
  Description of Artificial Sequence: Synthetic oligonucleotide
gcugucuuucagcuagcgc

SEQ ID NO: 510352 - RNA, 19 nt, Artificial Sequence
  Description of Artificial Sequence: Synthetic oligonucleotide
aguggccgauucccgccuc

SEQ ID NO: 510353 - RNA, 19 nt, Artificial Sequence
  Description of Artificial Sequence: Synthetic oligonucleotide
cucuccccgcuguaggcug

SEQ ID NO: 510354 - RNA, 19 nt, Artificial Sequence
  Description of Artificial Sequence: Synthetic oligonucleotide
gggagauccaugcuggugu

SEQ ID NO: 510355 - RNA, 19 nt, Artificial Sequence
  Description of Artificial Sequence: Synthetic oligonucleotide
auacugggaguugggguca

SEQ ID NO: 510356 - RNA, 19 nt, Artificial Sequence
  Description of Artificial Sequence: Synthetic oligonucleotide
gcgacugccaauguuguca

SEQ ID NO: 510357 - RNA, 19 nt, Artificial Sequence
  Description of Artificial Sequence: Synthetic oligonucleotide
ucucaagguuuugcuugug

SEQ ID NO: 510358 - RNA, 19 nt, Artificial Sequence
  Description of Artificial Sequence: Synthetic oligonucleotide
gaccgcuccacaccucauc

SEQ ID NO: 510359 - RNA, 19 nt, Artificial Sequence
  Description of Artificial Sequence: Synthetic oligonucleotide
aggcagguauguagguccg

SEQ ID NO: 510360 - RNA, 19 nt, Artificial Sequence
  Description of Artificial Sequence: Synthetic oligonucleotide
caagugggcucgccgauga

SEQ ID NO: 510361 - RNA, 19 nt, Artificial Sequence
  Description of Artificial Sequence: Synthetic oligonucleotide
cuagcgcucccuucuucuc

SEQ ID NO: 510362 - RNA, 19 nt, Artificial Sequence
  Description of Artificial Sequence: Synthetic oligonucleotide
gccucauugaagcggguca

SEQ ID NO: 510363 - RNA, 19 nt, Artificial Sequence
  Description of Artificial Sequence: Synthetic oligonucleotide
cacauuggaggaggacagc

SEQ ID NO: 510364 - RNA, 19 nt, Artificial Sequence
  Description of Artificial Sequence: Synthetic oligonucleotide
agacugcgggcccaccgcu

SEQ ID NO: 510365 - RNA, 19 nt, Artificial Sequence
  Description of Artificial Sequence: Synthetic oligonucleotide
ccgagugggcuguucaaag

SEQ ID NO: 510366 - RNA, 19 nt, Artificial Sequence
  Description of Artificial Sequence: Synthetic oligonucleotide
gccccgucuccuuaugucc

SEQ ID NO: 510367 - RNA, 19 nt, Artificial Sequence
  Description of Artificial Sequence: Synthetic oligonucleotide
uccaucccgagugggcugu

SEQ ID NO: 510368 - RNA, 19 nt, Artificial Sequence
  Description of Artificial Sequence: Synthetic oligonucleotide
gacgaucaucauuggccaa

SEQ ID NO: 510369 - RNA, 19 nt, Artificial Sequence
  Description of Artificial Sequence: Synthetic oligonucleotide
guauguagguccgccgcuc

SEQ ID NO: 510370 - RNA, 19 nt, Artificial Sequence
  Description of Artificial Sequence: Synthetic oligonucleotide
uggccccgucuccuuaugu

SEQ ID NO: 510371 - RNA, 19 nt, Artificial Sequence
  Description of Artificial Sequence: Synthetic oligonucleotide
agucucaagggaggccuca

SEQ ID NO: 510372 - RNA, 19 nt, Artificial Sequence
  Description of Artificial Sequence: Synthetic oligonucleotide
agcaugcgacugccaaugu

SEQ ID NO: 510373 - RNA, 19 nt, Artificial Sequence
  Description of Artificial Sequence: Synthetic oligonucleotide
gcaguggccgauucccgcc

SEQ ID NO: 510374 - RNA, 19 nt, Artificial Sequence
  Description of Artificial Sequence: Synthetic oligonucleotide
agcauugauucgacugccu

SEQ ID NO: 510375 - RNA, 19 nt, Artificial Sequence
  Description of Artificial Sequence: Synthetic oligonucleotide
ccaccagcccucgaggugg

SEQ ID NO: 510376 - RNA, 19 nt, Artificial Sequence
  Description of Artificial Sequence: Synthetic oligonucleotide
cuguugggccgucuuuguc

SEQ ID NO: 510377 - RNA, 19 nt, Artificial Sequence
  Description of Artificial Sequence: Synthetic oligonucleotide
ucccgagugggcuguucaa

SEQ ID NO: 510378 - RNA, 19 nt, Artificial Sequence
  Description of Artificial Sequence: Synthetic oligonucleotide
ccugacuacugcuucccuc

SEQ ID NO: 510379 - RNA, 19 nt, Artificial Sequence
  Description of Artificial Sequence: Synthetic oligonucleotide
ucgcaaucuguugggccgu

SEQ ID NO: 510380 - RNA, 19 nt, Artificial Sequence
  Description of Artificial Sequence: Synthetic oligonucleotide
guucucggagcuuggcucu

SEQ ID NO: 510381 - RNA, 19 nt, Artificial Sequence
  Description of Artificial Sequence: Synthetic oligonucleotide
cuuggaugauggccccguc

SEQ ID NO: 510382 - RNA, 19 nt, Artificial Sequence
  Description of Artificial Sequence: Synthetic oligonucleotide
auggugagcggagggugca

SEQ ID NO: 510383 - RNA, 19 nt, Artificial Sequence
  Description of Artificial Sequence: Synthetic oligonucleotide
guggcucagggauaccaua

SEQ ID NO: 510384 - RNA, 19 nt, Artificial Sequence
  Description of Artificial Sequence: Synthetic oligonucleotide
ccagcaaaagucaccaacu

SEQ ID NO: 510385 - RNA, 19 nt, Artificial Sequence
  Description of Artificial Sequence: Synthetic oligonucleotide
gcucugagcauuguaguaa

SEQ ID NO: 510386 - RNA, 19 nt, Artificial Sequence
  Description of Artificial Sequence: Synthetic oligonucleotide
cauagccugcaucugcagu

SEQ ID NO: 510387 - RNA, 19 nt, Artificial Sequence
  Description of Artificial Sequence: Synthetic oligonucleotide
cacuaauaggcuggaagcu

SEQ ID NO: 510388 - RNA, 19 nt, Artificial Sequence
  Description of Artificial Sequence: Synthetic oligonucleotide
uucuugcgacccagaccac

SEQ ID NO: 510389 - RNA, 19 nt, Artificial Sequence
  Description of Artificial Sequence: Synthetic oligonucleotide
ggaacugccccgggcaccc

SEQ ID NO: 510390 - RNA, 19 nt, Artificial Sequence
  Description of Artificial Sequence: Synthetic oligonucleotide
aggugaccccauaggaacu

SEQ ID NO: 510391 - RNA, 19 nt, Artificial Sequence
  Description of Artificial Sequence: Synthetic oligonucleotide
caagucuaauuuggugaga

SEQ ID NO: 510392 - RNA, 19 nt, Artificial Sequence
  Description of Artificial Sequence: Synthetic oligonucleotide
gagucugccccagucucaa

SEQ ID NO: 510393 - RNA, 19 nt, Artificial Sequence
  Description of Artificial Sequence: Synthetic oligonucleotide
aagugggcucgccgaugaa

SEQ ID NO: 510394 - RNA, 19 nt, Artificial Sequence
  Description of Artificial Sequence: Synthetic oligonucleotide
gguccgccgcucuccaucc

SEQ ID NO: 510395 - RNA, 19 nt, Artificial Sequence
  Description of Artificial Sequence: Synthetic oligonucleotide
auggccccgucuccuuaug

SEQ ID NO: 510396 - RNA, 19 nt, Artificial Sequence
  Description of Artificial Sequence: Synthetic oligonucleotide
guugagacugcgggcccac

SEQ ID NO: 510397 - RNA, 19 nt, Artificial Sequence
  Description of Artificial Sequence: Synthetic oligonucleotide
gagcccaauuucccagcaa

SEQ ID NO: 510398 - RNA, 19 nt, Artificial Sequence
  Description of Artificial Sequence: Synthetic oligonucleotide
ucaucucguagggcacuaa

SEQ ID NO: 510399 - RNA, 19 nt, Artificial Sequence
  Description of Artificial Sequence: Synthetic oligonucleotide
guagguccgccgcucucca

SEQ ID NO: 510400 - RNA, 19 nt, Artificial Sequence
  Description of Artificial Sequence: Synthetic oligonucleotide
agggcacuaauaggcugga

SEQ ID NO: 510401 - RNA, 19 nt, Artificial Sequence
  Description of Artificial Sequence: Synthetic oligonucleotide
gacaagugggcucgccgau

SEQ ID NO: 510402 - RNA, 19 nt, Artificial Sequence
  Description of Artificial Sequence: Synthetic oligonucleotide
augucucaucauauuggua

SEQ ID NO: 510403 - RNA, 19 nt, Artificial Sequence
  Description of Artificial Sequence: Synthetic oligonucleotide
uugagacugcgggcccacc

SEQ ID NO: 510404 - RNA, 19 nt, Artificial Sequence
  Description of Artificial Sequence: Synthetic oligonucleotide
ccuggagcaugcgacugcc

SEQ ID NO: 510405 - RNA, 19 nt, Artificial Sequence
  Description of Artificial Sequence: Synthetic oligonucleotide
gcaggugacaugaugguau

SEQ ID NO: 510406 - RNA, 19 nt, Artificial Sequence
  Description of Artificial Sequence: Synthetic oligonucleotide
aggugacaugaugguauau

SEQ ID NO: 510407 - RNA, 19 nt, Artificial Sequence
  Description of Artificial Sequence: Synthetic oligonucleotide
gacccucgaacccgugucu

SEQ ID NO: 510408 - RNA, 19 nt, Artificial Sequence
  Description of Artificial Sequence: Synthetic oligonucleotide
aucaucucguagggcacua

SEQ ID NO: 510409 - RNA, 19 nt, Artificial Sequence
  Description of Artificial Sequence: Synthetic oligonucleotide
ccucauugaagcgggucac

SEQ ID NO: 510410 - RNA, 19 nt, Artificial Sequence
  Description of Artificial Sequence: Synthetic oligonucleotide
gcgcaaaauaaugguguca

SEQ ID NO: 510411 - RNA, 19 nt, Artificial Sequence
  Description of Artificial Sequence: Synthetic oligonucleotide
ggccccgucuccuuauguc

SEQ ID NO: 510412 - RNA, 19 nt, Artificial Sequence
  Description of Artificial Sequence: Synthetic oligonucleotide
cccugggacggccugugag

SEQ ID NO: 510413 - RNA, 19 nt, Artificial Sequence
  Description of Artificial Sequence: Synthetic oligonucleotide
ugauagggcuugggagguc

SEQ ID NO: 510414 - RNA, 19 nt, Artificial Sequence
  Description of Artificial Sequence: Synthetic oligonucleotide
gugauagggcuugggaggu

SEQ ID NO: 510415 - RNA, 19 nt, Artificial Sequence
  Description of Artificial Sequence: Synthetic oligonucleotide
cacgcacauuggaggagga

SEQ ID NO: 510416 - RNA, 19 nt, Artificial Sequence
  Description of Artificial Sequence: Synthetic oligonucleotide
gcccuguuucuugcgaccc

SEQ ID NO: 510417 - RNA, 19 nt, Artificial Sequence
  Description of Artificial Sequence: Synthetic oligonucleotide
gauggguggagagcuggau

SEQ ID NO: 510418 - RNA, 19 nt, Artificial Sequence
  Description of Artificial Sequence: Synthetic oligonucleotide
cugccccagucucaaggga

SEQ ID NO: 510419 - RNA, 19 nt, Artificial Sequence
  Description of Artificial Sequence: Synthetic oligonucleotide
ccuuucuuagaccgcucca

SEQ ID NO: 510420 - RNA, 19 nt, Artificial Sequence
  Description of Artificial Sequence: Synthetic oligonucleotide
ccuucgcaaucuguugggc

SEQ ID NO: 510421 - RNA, 19 nt, Artificial Sequence
  Description of Artificial Sequence: Synthetic oligonucleotide
cauugaagcgggucaccau

SEQ ID NO: 510422 - RNA, 19 nt, Artificial Sequence
  Description of Artificial Sequence: Synthetic oligonucleotide
caucucguagggcacuaau

SEQ ID NO: 510423 - RNA, 19 nt, Artificial Sequence
  Description of Artificial Sequence: Synthetic oligonucleotide
ggcgaagccucgguucagc

SEQ ID NO: 510424 - RNA, 19 nt, Artificial Sequence
  Description of Artificial Sequence: Synthetic oligonucleotide
aggcgaagccucgguucag

SEQ ID NO: 510425 - RNA, 19 nt, Artificial Sequence
  Description of Artificial Sequence: Synthetic oligonucleotide
ugccuccacgaugggugga

SEQ ID NO: 510426 - RNA, 19 nt, Artificial Sequence
  Description of Artificial Sequence: Synthetic oligonucleotide
guugggccgucuuugucuu

SEQ ID NO: 510427 - RNA, 19 nt, Artificial Sequence
  Description of Artificial Sequence: Synthetic oligonucleotide
gccgaugaaucucaagguu

SEQ ID NO: 510428 - RNA, 19 nt, Artificial Sequence
  Description of Artificial Sequence: Synthetic oligonucleotide
ggccucauugaagcggguc

SEQ ID NO: 510429 - RNA, 19 nt, Artificial Sequence
  Description of Artificial Sequence: Synthetic oligonucleotide
ggcucgccgaugaaucuca

SEQ ID NO: 510430 - RNA, 19 nt, Artificial Sequence
  Description of Artificial Sequence: Synthetic oligonucleotide
uggccgauucccgccucuc

SEQ ID NO: 510431 - RNA, 19 nt, Artificial Sequence
  Description of Artificial Sequence: Synthetic oligonucleotide
cuggagcaugcgacugcca

SEQ ID NO: 510432 - RNA, 19 nt, Artificial Sequence
  Description of Artificial Sequence: Synthetic oligonucleotide
gcauugauucgacugccuu

SEQ ID NO: 510433 - RNA, 19 nt, Artificial Sequence
  Description of Artificial Sequence: Synthetic oligonucleotide
uggccaacuuugggagauc

SEQ ID NO: 510434 - RNA, 19 nt, Artificial Sequence
  Description of Artificial Sequence: Synthetic oligonucleotide
gcacggucucgguacuuca

SEQ ID NO: 510435 - RNA, 19 nt, Artificial Sequence
  Description of Artificial Sequence: Synthetic oligonucleotide
gugugcugucuuucagcua

SEQ ID NO: 510436 - RNA, 19 nt, Artificial Sequence
  Description of Artificial Sequence: Synthetic oligonucleotide
ggcucugaacccugugaua

SEQ ID NO: 510437 - RNA, 19 nt, Artificial Sequence
  Description of Artificial Sequence: Synthetic oligonucleotide
caccguauuuccuccuuuu

SEQ ID NO: 510438 - RNA, 19 nt, Artificial Sequence
  Description of Artificial Sequence: Synthetic oligonucleotide
agcccucgaggugggcuug

SEQ ID NO: 510439 - RNA, 19 nt, Artificial Sequence
  Description of Artificial Sequence: Synthetic oligonucleotide
gccaauguugucacugccu

SEQ ID NO: 510440 - RNA, 19 nt, Artificial Sequence
  Description of Artificial Sequence: Synthetic oligonucleotide
ggcguucucggagcuuggc

SEQ ID NO: 510441 - RNA, 19 nt, Artificial Sequence
  Description of Artificial Sequence: Synthetic oligonucleotide
gggcauagagggaaucugu

SEQ ID NO: 510442 - RNA, 19 nt, Artificial Sequence
  Description of Artificial Sequence: Synthetic oligonucleotide
ggugccggaugagugccuc

SEQ ID NO: 510443 - RNA, 19 nt, Artificial Sequence
  Description of Artificial Sequence: Synthetic oligonucleotide
ggcagguauguagguccgc

SEQ ID NO: 510444 - RNA, 19 nt, Artificial Sequence
  Description of Artificial Sequence: Synthetic oligonucleotide
cgauggugagcggagggug

SEQ ID NO: 510445 - RNA, 19 nt, Artificial Sequence
  Description of Artificial Sequence: Synthetic oligonucleotide
uagguccgccgcucuccau

SEQ ID NO: 510446 - RNA, 19 nt, Artificial Sequence
  Description of Artificial Sequence: Synthetic oligonucleotide
caucccgagugggcuguuc

SEQ ID NO: 510447 - RNA, 19 nt, Artificial Sequence
  Description of Artificial Sequence: Synthetic oligonucleotide
gcuguagauaugccaccgu

SEQ ID NO: 510448 - RNA, 19 nt, Artificial Sequence
  Description of Artificial Sequence: Synthetic oligonucleotide
ggcuuggacgaucaucauu

SEQ ID NO: 510449 - RNA, 19 nt, Artificial Sequence
  Description of Artificial Sequence: Synthetic oligonucleotide
acccugggacggccuguga

SEQ ID NO: 510450 - RNA, 19 nt, Artificial Sequence
  Description of Artificial Sequence: Synthetic oligonucleotide
cuccccgcuguaggcugcc

SEQ ID NO: 510451 - RNA, 19 nt, Artificial Sequence
  Description of Artificial Sequence: Synthetic oligonucleotide
ggcucgggagaaagccugc

SEQ ID NO: 510452 - RNA, 19 nt, Artificial Sequence
  Description of Artificial Sequence: Synthetic oligonucleotide
cagacccucgaacccgugu

SEQ ID NO: 510453 - RNA, 19 nt, Artificial Sequence
  Description of Artificial Sequence: Synthetic oligonucleotide
auucgcccacugggcagca

SEQ ID NO: 510454 - RNA, 19 nt, Artificial Sequence
  Description of Artificial Sequence: Synthetic oligonucleotide
ggagcaugcgacugccaau

SEQ ID NO: 510455 - RNA, 19 nt, Artificial Sequence
  Description of Artificial Sequence: Synthetic oligonucleotide
gccagaugucucaucauau

SEQ ID NO: 510456 - RNA, 19 nt, Artificial Sequence
  Description of Artificial Sequence: Synthetic oligonucleotide
ccucgaggugggcuuggac

SEQ ID NO: 510457 - RNA, 19 nt, Artificial Sequence
  Description of Artificial Sequence: Synthetic oligonucleotide
ggccgauucccgccucuca

SEQ ID NO: 510458 - RNA, 19 nt, Artificial Sequence
  Description of Artificial Sequence: Synthetic oligonucleotide
gggcucgccgaugaaucuc

SEQ ID NO: 510459 - RNA, 19 nt, Artificial Sequence
  Description of Artificial Sequence: Synthetic oligonucleotide
ugcgggcccaccgcuccau

SEQ ID NO: 510460 - RNA, 19 nt, Artificial Sequence
  Description of Artificial Sequence: Synthetic oligonucleotide
gggccgucuuugucuuaug

SEQ ID NO: 510461 - RNA, 19 nt, Artificial Sequence
  Description of Artificial Sequence: Synthetic oligonucleotide
cacggucucgguacuucau

SEQ ID NO: 510462 - RNA, 19 nt, Artificial Sequence
  Description of Artificial Sequence: Synthetic oligonucleotide
ccgccgcucuccaucccag

SEQ ID NO: 510463 - RNA, 19 nt, Artificial Sequence
  Description of Artificial Sequence: Synthetic oligonucleotide
gcucgggagaaagccugca

SEQ ID NO: 510464 - RNA, 19 nt, Artificial Sequence
  Description of Artificial Sequence: Synthetic oligonucleotide
guggccgauucccgccucu

SEQ ID NO: 510465 - RNA, 19 nt, Artificial Sequence
  Description of Artificial Sequence: Synthetic oligonucleotide
agcaccgcauagggugcua

SEQ ID NO: 510466 - RNA, 19 nt, Artificial Sequence
  Description of Artificial Sequence: Synthetic oligonucleotide
cguagggcacuaauaggcu

SEQ ID NO: 510467 - RNA, 19 nt, Artificial Sequence
  Description of Artificial Sequence: Synthetic oligonucleotide
caguggccgauucccgccu

SEQ ID NO: 510468 - RNA, 19 nt, Artificial Sequence
  Description of Artificial Sequence: Synthetic oligonucleotide
gcaugcgacugccaauguu

SEQ ID NO: 510469 - RNA, 19 nt, Artificial Sequence
  Description of Artificial Sequence: Synthetic oligonucleotide
cugcguucagcugcacggu

SEQ ID NO: 510470 - RNA, 19 nt, Artificial Sequence
  Description of Artificial Sequence: Synthetic oligonucleotide
ccgcucuccaucccaguaa

SEQ ID NO: 510471 - RNA, 19 nt, Artificial Sequence
  Description of Artificial Sequence: Synthetic oligonucleotide
ucccugcguucagcugcac

SEQ ID NO: 510472 - RNA, 19 nt, Artificial Sequence
  Description of Artificial Sequence: Synthetic oligonucleotide
gguggcucagggauaccau

SEQ ID NO: 510473 - RNA, 19 nt, Artificial Sequence
  Description of Artificial Sequence: Synthetic oligonucleotide
ccagacccucgaacccgug

SEQ ID NO: 510474 - RNA, 19 nt, Artificial Sequence
  Description of Artificial Sequence: Synthetic oligonucleotide
cgccgaugaaucucaaggu

SEQ ID NO: 510475 - RNA, 19 nt, Artificial Sequence
  Description of Artificial Sequence: Synthetic oligonucleotide
ccccgggcacccaggccag

SEQ ID NO: 510476 - RNA, 19 nt, Artificial Sequence
  Description of Artificial Sequence: Synthetic oligonucleotide
cugcgggcccaccgcucca

SEQ ID NO: 510477 - RNA, 19 nt, Artificial Sequence
  Description of Artificial Sequence: Synthetic oligonucleotide
cgagugggcuguucaaagu

SEQ ID NO: 510478 - RNA, 19 nt, Artificial Sequence
  Description of Artificial Sequence: Synthetic oligonucleotide
cccgagugggcuguucaaa

SEQ ID NO: 510479 - RNA, 19 nt, Artificial Sequence
  Description of Artificial Sequence: Synthetic oligonucleotide
ccgucuccuuauguccauc

SEQ ID NO: 510480 - RNA, 19 nt, Artificial Sequence
  Description of Artificial Sequence: Synthetic oligonucleotide
gggcacuaauaggcuggaa

SEQ ID NO: 510481 - RNA, 19 nt, Artificial Sequence
  Description of Artificial Sequence: Synthetic oligonucleotide
gcaaucuguugggccgucu

SEQ ID NO: 510482 - RNA, 19 nt, Artificial Sequence
  Description of Artificial Sequence: Synthetic oligonucleotide
gggcuuggacgaucaucau

SEQ ID NO: 510483 - RNA, 19 nt, Artificial Sequence
  Description of Artificial Sequence: Synthetic oligonucleotide
cagcaccgcauagggugcu

SEQ ID NO: 510484 - RNA, 19 nt, Artificial Sequence
  Description of Artificial Sequence: Synthetic oligonucleotide
cagcuagcgcucccuucuu

SEQ ID NO: 510485 - RNA, 19 nt, Artificial Sequence
  Description of Artificial Sequence: Synthetic oligonucleotide
cccugacuacugcuucccu

SEQ ID NO: 510486 - RNA, 19 nt, Artificial Sequence
  Description of Artificial Sequence: Synthetic oligonucleotide
cccgucuccuuauguccau

SEQ ID NO: 510487 - RNA, 19 nt, Artificial Sequence
  Description of Artificial Sequence: Synthetic oligonucleotide
cgacccagaccacugccuu

SEQ ID NO: 510488 - RNA, 19 nt, Artificial Sequence
  Description of Artificial Sequence: Synthetic oligonucleotide
cgaacccgugucugagccu

SEQ ID NO: 510489 - RNA, 19 nt, Artificial Sequence
  Description of Artificial Sequence: Synthetic oligonucleotide
cugcacggucucgguacuu

SEQ ID NO: 510490 - RNA, 19 nt, Artificial Sequence
  Description of Artificial Sequence: Synthetic oligonucleotide
gcuguucacugggccucau

SEQ ID NO: 510491 - RNA, 19 nt, Artificial Sequence
  Description of Artificial Sequence: Synthetic oligonucleotide
gggccucauugaagcgggu

SEQ ID NO: 510492 - RNA, 19 nt, Artificial Sequence
  Description of Artificial Sequence: Synthetic oligonucleotide
ccaucccgagugggcuguu

SEQ ID NO: 510493 - RNA, 19 nt, Artificial Sequence
  Description of Artificial Sequence: Synthetic oligonucleotide
aaaagguuggaguugguug

SEQ ID NO: 510494 - RNA, 19 nt, Artificial Sequence
  Description of Artificial Sequence: Synthetic oligonucleotide
uugauuaugaagugaaugc

SEQ ID NO: 510495 - RNA, 19 nt, Artificial Sequence
  Description of Artificial Sequence: Synthetic oligonucleotide
uuguaagggaccaacacag

SEQ ID NO: 510496 - RNA, 19 nt, Artificial Sequence
  Description of Artificial Sequence: Synthetic oligonucleotide
aaugcguucaucaaacauc

SEQ ID NO: 510497 - RNA, 19 nt, Artificial Sequence
  Description of Artificial Sequence: Synthetic oligonucleotide
gauaucauagguguugggg

SEQ ID NO: 510498 - RNA, 19 nt, Artificial Sequence
  Description of Artificial Sequence: Synthetic oligonucleotide
ucacggaucaguuuguaag

SEQ ID NO: 510499 - RNA, 19 nt, Artificial Sequence
  Description of Artificial Sequence: Synthetic oligonucleotide
auuuugaugggccucaaca

SEQ ID NO: 510500 - RNA, 19 nt, Artificial Sequence
  Description of Artificial Sequence: Synthetic oligonucleotide
aaaggugcaggguuugcgg

SEQ ID NO: 510501 - RNA, 19 nt, Artificial Sequence
  Description of Artificial Sequence: Synthetic oligonucleotide
auuuccaucccauaaccag

SEQ ID NO: 510502 - RNA, 19 nt, Artificial Sequence
  Description of Artificial Sequence: Synthetic oligonucleotide
caucccauaaccagaaucc

SEQ ID NO: 510503 - RNA, 19 nt, Artificial Sequence
  Description of Artificial Sequence: Synthetic oligonucleotide
augucaauccuugagaguc

SEQ ID NO: 510504 - RNA, 19 nt, Artificial Sequence
  Description of Artificial Sequence: Synthetic oligonucleotide
gaugccuucaggcaguccc

SEQ ID NO: 510505 - RNA, 19 nt, Artificial Sequence
  Description of Artificial Sequence: Synthetic oligonucleotide
aaccagaauccuccgaggg

SEQ ID NO: 510506 - RNA, 19 nt, Artificial Sequence
  Description of Artificial Sequence: Synthetic oligonucleotide
aguacgaacagcuccucgg

SEQ ID NO: 510507 - RNA, 19 nt, Artificial Sequence
  Description of Artificial Sequence: Synthetic oligonucleotide
ugucugaccaagcaguccc

SEQ ID NO: 510508 - RNA, 19 nt, Artificial Sequence
  Description of Artificial Sequence: Synthetic oligonucleotide
guugcuagcuuccagaauc

SEQ ID NO: 510509 - RNA, 19 nt, Artificial Sequence
  Description of Artificial Sequence: Synthetic oligonucleotide
uaagggaccaacacaggcc

SEQ ID NO: 510510 - RNA, 19 nt, Artificial Sequence
  Description of Artificial Sequence: Synthetic oligonucleotide
uucucaccgagccuguugg

SEQ ID NO: 510511 - RNA, 19 nt, Artificial Sequence
  Description of Artificial Sequence: Synthetic oligonucleotide
gaaaaugcguucaucaaac

SEQ ID NO: 510512 - RNA, 19 nt, Artificial Sequence
  Description of Artificial Sequence: Synthetic oligonucleotide
auagugucccuacagaccu

SEQ ID NO: 510513 - RNA, 19 nt, Artificial Sequence
  Description of Artificial Sequence: Synthetic oligonucleotide
agcauggacauucuggaug

SEQ ID NO: 510514 - RNA, 19 nt, Artificial Sequence
  Description of Artificial Sequence: Synthetic oligonucleotide
uuuggcauauuuuguguug

SEQ ID NO: 510515 - RNA, 19 nt, Artificial Sequence
  Description of Artificial Sequence: Synthetic oligonucleotide
augcguucaucaaacaucc

SEQ ID NO: 510516 - RNA, 19 nt, Artificial Sequence
  Description of Artificial Sequence: Synthetic oligonucleotide
uuugacaccgucagugagc

SEQ ID NO: 510517 - RNA, 19 nt, Artificial Sequence
  Description of Artificial Sequence: Synthetic oligonucleotide
ugcaaaagguuggaguugg

SEQ ID NO: 510518 - RNA, 19 nt, Artificial Sequence
  Description of Artificial Sequence: Synthetic oligonucleotide
aaagcaauugggucugcga

SEQ ID NO: 510519 - RNA, 19 nt, Artificial Sequence
  Description of Artificial Sequence: Synthetic oligonucleotide
uccgauaggggacagggac

SEQ ID NO: 510520 - RNA, 19 nt, Artificial Sequence
  Description of Artificial Sequence: Synthetic oligonucleotide
uggacuuguucccuaagug

SEQ ID NO: 510521 - RNA, 19 nt, Artificial Sequence
  Description of Artificial Sequence: Synthetic oligonucleotide
uuggcaaucccaaagcaau

SEQ ID NO: 510522 - RNA, 19 nt, Artificial Sequence
  Description of Artificial Sequence: Synthetic oligonucleotide
cauagugucccuacagacc

SEQ ID NO: 510523 - RNA, 19 nt, Artificial Sequence
  Description of Artificial Sequence: Synthetic oligonucleotide
gaagcauggacauucugga

SEQ ID NO: 510524 - RNA, 19 nt, Artificial Sequence
  Description of Artificial Sequence: Synthetic oligonucleotide
augauaaccauccguacau

SEQ ID NO: 510525 - RNA, 19 nt, Artificial Sequence
  Description of Artificial Sequence: Synthetic oligonucleotide
cuuggaauggccuggugac

SEQ ID NO: 510526 - RNA, 19 nt, Artificial Sequence
  Description of Artificial Sequence: Synthetic oligonucleotide
acaggcaaucuuccgauag

SEQ ID NO: 510527 - RNA, 19 nt, Artificial Sequence
  Description of Artificial Sequence: Synthetic oligonucleotide
aagcaauugggucugcgaa

SEQ ID NO: 510528 - RNA, 19 nt, Artificial Sequence
  Description of Artificial Sequence: Synthetic oligonucleotide
ugauuaugaagugaaugcu

SEQ ID NO: 510529 - RNA, 19 nt, Artificial Sequence
  Description of Artificial Sequence: Synthetic oligonucleotide
guaagggaccaacacaggc

SEQ ID NO: 510530 - RNA, 19 nt, Artificial Sequence
  Description of Artificial Sequence: Synthetic oligonucleotide
uugucauggacgauggaaa

SEQ ID NO: 510531 - RNA, 19 nt, Artificial Sequence
  Description of Artificial Sequence: Synthetic oligonucleotide
guacacggucguuugaagg

SEQ ID NO: 510532 - RNA, 19 nt, Artificial Sequence
  Description of Artificial Sequence: Synthetic oligonucleotide
gaguugguugaugauaacc

SEQ ID NO: 510533 - RNA, 19 nt, Artificial Sequence
  Description of Artificial Sequence: Synthetic oligonucleotide
aagggaaugucauccggga

SEQ ID NO: 510534 - RNA, 19 nt, Artificial Sequence
  Description of Artificial Sequence: Synthetic oligonucleotide
cucaccguauuucucauug

SEQ ID NO: 510535 - RNA, 19 nt, Artificial Sequence
  Description of Artificial Sequence: Synthetic oligonucleotide
uggggcucgaggcaguagg

SEQ ID NO: 510536 - RNA, 19 nt, Artificial Sequence
  Description of Artificial Sequence: Synthetic oligonucleotide
uugaugggccucaacauuc

SEQ ID NO: 510537 - RNA, 19 nt, Artificial Sequence
  Description of Artificial Sequence: Synthetic oligonucleotide
auuccuaguucuccugagg

SEQ ID NO: 510538 - RNA, 19 nt, Artificial Sequence
  Description of Artificial Sequence: Synthetic oligonucleotide
cacggaucaguuuguaagg

SEQ ID NO: 510539 - RNA, 19 nt, Artificial Sequence
  Description of Artificial Sequence: Synthetic oligonucleotide
cuuccgauaggggacaggg

SEQ ID NO: 510540 - RNA, 19 nt, Artificial Sequence
  Description of Artificial Sequence: Synthetic oligonucleotide
accgucagugagcaguucg

SEQ ID NO: 510541 - RNA, 19 nt, Artificial Sequence
  Description of Artificial Sequence: Synthetic oligonucleotide
uuuugaugggccucaacau

SEQ ID NO: 510542 - RNA, 19 nt, Artificial Sequence
  Description of Artificial Sequence: Synthetic oligonucleotide
acuguugcuagcuuccaga

SEQ ID NO: 510543 - RNA, 19 nt, Artificial Sequence
  Description of Artificial Sequence: Synthetic oligonucleotide
aguucgggucucuugauga

SEQ ID NO: 510544 - RNA, 19 nt, Artificial Sequence
  Description of Artificial Sequence: Synthetic oligonucleotide
ugcggaaugggaucccagg

SEQ ID NO: 510545 - RNA, 19 nt, Artificial Sequence
  Description of Artificial Sequence: Synthetic oligonucleotide
ugcgcuuggaagcauggac

SEQ ID NO: 510546 - RNA, 19 nt, Artificial Sequence
  Description of Artificial Sequence: Synthetic oligonucleotide
uucccuaaguguguuggcg

SEQ ID NO: 510547 - RNA, 19 nt, Artificial Sequence
  Description of Artificial Sequence: Synthetic oligonucleotide
uucccugugaaaaugcguu

SEQ ID NO: 510548 - RNA, 19 nt, Artificial Sequence
  Description of Artificial Sequence: Synthetic oligonucleotide
ucaauuuugaugggccuca

SEQ ID NO: 510549 - RNA, 19 nt, Artificial Sequence
  Description of Artificial Sequence: Synthetic oligonucleotide
accccauaaguacacgguc

SEQ ID NO: 510550 - RNA, 19 nt, Artificial Sequence
  Description of Artificial Sequence: Synthetic oligonucleotide
agcaauugggucugcgaag

SEQ ID NO: 510551 - RNA, 19 nt, Artificial Sequence
  Description of Artificial Sequence: Synthetic oligonucleotide
ggaugagaggcccagcagg

SEQ ID NO: 510552 - RNA, 19 nt, Artificial Sequence
  Description of Artificial Sequence: Synthetic oligonucleotide
ugaugauaaccauccguac

SEQ ID NO: 510553 - RNA, 19 nt, Artificial Sequence
  Description of Artificial Sequence: Synthetic oligonucleotide
aguagggcaccuugacugg

SEQ ID NO: 510554 - RNA, 19 nt, Artificial Sequence
  Description of Artificial Sequence: Synthetic oligonucleotide
ucccgcaauguguugaugu

SEQ ID NO: 510555 - RNA, 19 nt, Artificial Sequence
  Description of Artificial Sequence: Synthetic oligonucleotide
uccgggaugcccacaaucu

SEQ ID NO: 510556 - RNA, 19 nt, Artificial Sequence
  Description of Artificial Sequence: Synthetic oligonucleotide
guacgaacagcuccucggg

SEQ ID NO: 510557 - RNA, 19 nt, Artificial Sequence
  Description of Artificial Sequence: Synthetic oligonucleotide
ucaauccuugagagucugg

SEQ ID NO: 510558 - RNA, 19 nt, Artificial Sequence
  Description of Artificial Sequence: Synthetic oligonucleotide
cccauaaccagaauccucc

SEQ ID NO: 510559 - RNA, 19 nt, Artificial Sequence
  Description of Artificial Sequence: Synthetic oligonucleotide
gcugucacggaucaguuug

SEQ ID NO: 510560 - RNA, 19 nt, Artificial Sequence
  Description of Artificial Sequence: Synthetic oligonucleotide
ucccuacagaccucugugg

SEQ ID NO: 510561 - RNA, 19 nt, Artificial Sequence
  Description of Artificial Sequence: Synthetic oligonucleotide
aggaucugggacaguaacc

SEQ ID NO: 510562 - RNA, 19 nt, Artificial Sequence
  Description of Artificial Sequence: Synthetic oligonucleotide
uaaccugaaugaugucuag

SEQ ID NO: 510563 - RNA, 19 nt, Artificial Sequence
  Description of Artificial Sequence: Synthetic oligonucleotide
ucggggugcaucaggaacu

SEQ ID NO: 510564 - RNA, 19 nt, Artificial Sequence
  Description of Artificial Sequence: Synthetic oligonucleotide
ggucucguccacaagacgg

SEQ ID NO: 510565 - RNA, 19 nt, Artificial Sequence
  Description of Artificial Sequence: Synthetic oligonucleotide
cuacagaccucuguggaag

SEQ ID NO: 510566 - RNA, 19 nt, Artificial Sequence
  Description of Artificial Sequence: Synthetic oligonucleotide
uacuguugcuagcuuccag

SEQ ID NO: 510567 - RNA, 19 nt, Artificial Sequence
  Description of Artificial Sequence: Synthetic oligonucleotide
gaccgaguugccuuccgag

SEQ ID NO: 510568 - RNA, 19 nt, Artificial Sequence
  Description of Artificial Sequence: Synthetic oligonucleotide
aguacacggucguuugaag

SEQ ID NO: 510569 - RNA, 19 nt, Artificial Sequence
  Description of Artificial Sequence: Synthetic oligonucleotide
cuguuaaacaggaucugca

SEQ ID NO: 510570 - RNA, 19 nt, Artificial Sequence
  Description of Artificial Sequence: Synthetic oligonucleotide
cacaacuuguucuuugaca

SEQ ID NO: 510571 - RNA, 19 nt, Artificial Sequence
  Description of Artificial Sequence: Synthetic oligonucleotide
agugaaugcugugucgcuc

SEQ ID NO: 510572 - RNA, 19 nt, Artificial Sequence
  Description of Artificial Sequence: Synthetic oligonucleotide
ucucggaggaucaccuucu

SEQ ID NO: 510573 - RNA, 19 nt, Artificial Sequence
  Description of Artificial Sequence: Synthetic oligonucleotide
ucggagaaaucuugggcac

SEQ ID NO: 510574 - RNA, 19 nt, Artificial Sequence
  Description of Artificial Sequence: Synthetic oligonucleotide
cagucggagaaaucuuggg

SEQ ID NO: 510575 - RNA, 19 nt, Artificial Sequence
  Description of Artificial Sequence: Synthetic oligonucleotide
ugaugggccucaacauucc

SEQ ID NO: 510576 - RNA, 19 nt, Artificial Sequence
  Description of Artificial Sequence: Synthetic oligonucleotide
uggauugcuuuugauucgc

SEQ ID NO: 510577 - RNA, 19 nt, Artificial Sequence
  Description of Artificial Sequence: Synthetic oligonucleotide
uccgagacccgcuuucucu

SEQ ID NO: 510578 - RNA, 19 nt, Artificial Sequence
  Description of Artificial Sequence: Synthetic oligonucleotide
ucccuaaguguguuggcga

SEQ ID NO: 510579 - RNA, 19 nt, Artificial Sequence
  Description of Artificial Sequence: Synthetic oligonucleotide
agucccaguacgaacagcu

SEQ ID NO: 510580 - RNA, 19 nt, Artificial Sequence
  Description of Artificial Sequence: Synthetic oligonucleotide
agucccucucugcaguauc

SEQ ID NO: 510581 - RNA, 19 nt, Artificial Sequence
  Description of Artificial Sequence: Synthetic oligonucleotide
auaaccauccguacauucu

SEQ ID NO: 510582 - RNA, 19 nt, Artificial Sequence
  Description of Artificial Sequence: Synthetic oligonucleotide
caaaggugcaggguuugcg

SEQ ID NO: 510583 - RNA, 19 nt, Artificial Sequence
  Description of Artificial Sequence: Synthetic oligonucleotide
cuaguucuccugagguucc

SEQ ID NO: 510584 - RNA, 19 nt, Artificial Sequence
  Description of Artificial Sequence: Synthetic oligonucleotide
acaagacggucccaggagu

SEQ ID NO: 510585 - RNA, 19 nt, Artificial Sequence
  Description of Artificial Sequence: Synthetic oligonucleotide
gauccguuccagguucugg

SEQ ID NO: 510586 - RNA, 19 nt, Artificial Sequence
  Description of Artificial Sequence: Synthetic oligonucleotide
ugucaauccuugagagucu

SEQ ID NO: 510587 - RNA, 19 nt, Artificial Sequence
  Description of Artificial Sequence: Synthetic oligonucleotide
cacgagggagaucugguug

SEQ ID NO: 510588 - RNA, 19 nt, Artificial Sequence
  Description of Artificial Sequence: Synthetic oligonucleotide
acggaucaguuuguaaggg

SEQ ID NO: 510589 - RNA, 19 nt, Artificial Sequence
  Description of Artificial Sequence: Synthetic oligonucleotide
aaguacacggucguuugaa

SEQ ID NO: 510590 - RNA, 19 nt, Artificial Sequence
  Description of Artificial Sequence: Synthetic oligonucleotide
caggcaaucuuccgauagg

SEQ ID NO: 510591 - RNA, 19 nt, Artificial Sequence
  Description of Artificial Sequence: Synthetic oligonucleotide
ucaggcagucccaguacga

SEQ ID NO: 510592 - RNA, 19 nt, Artificial Sequence
  Description of Artificial Sequence: Synthetic oligonucleotide
cagcauagugucccuacag

SEQ ID NO: 510593 - RNA, 19 nt, Artificial Sequence
  Description of Artificial Sequence: Synthetic oligonucleotide
gaaugggaucccaggaggc

SEQ ID NO: 510594 - RNA, 19 nt, Artificial Sequence
  Description of Artificial Sequence: Synthetic oligonucleotide
uuccggaagggaaugucau

SEQ ID NO: 510595 - RNA, 19 nt, Artificial Sequence
  Description of Artificial Sequence: Synthetic oligonucleotide
cuggguuagaggacgagga

SEQ ID NO: 510596 - RNA, 19 nt, Artificial Sequence
  Description of Artificial Sequence: Synthetic oligonucleotide
aaacuggauacuguugcua

SEQ ID NO: 510597 - RNA, 19 nt, Artificial Sequence
  Description of Artificial Sequence: Synthetic oligonucleotide
cacagcgaggauccguucc

SEQ ID NO: 510598 - RNA, 19 nt, Artificial Sequence
  Description of Artificial Sequence: Synthetic oligonucleotide
uccgagguaccaauggcuu

SEQ ID NO: 510599 - RNA, 19 nt, Artificial Sequence
  Description of Artificial Sequence: Synthetic oligonucleotide
ugggucugcgaagagagau

SEQ ID NO: 510600 - RNA, 19 nt, Artificial Sequence
  Description of Artificial Sequence: Synthetic oligonucleotide
ugauucgcuuguaggggac

SEQ ID NO: 510601 - RNA, 19 nt, Artificial Sequence
  Description of Artificial Sequence: Synthetic oligonucleotide
aggagaccgaguugccuuc

SEQ ID NO: 510602 - RNA, 19 nt, Artificial Sequence
  Description of Artificial Sequence: Synthetic oligonucleotide
ucgcucuuccagaauccgc

SEQ ID NO: 510603 - RNA, 19 nt, Artificial Sequence
  Description of Artificial Sequence: Synthetic oligonucleotide
ugcgaagagagaugccuuc

SEQ ID NO: 510604 - RNA, 19 nt, Artificial Sequence
  Description of Artificial Sequence: Synthetic oligonucleotide
cuugucauggacgauggaa

SEQ ID NO: 510605 - RNA, 19 nt, Artificial Sequence
  Description of Artificial Sequence: Synthetic oligonucleotide
aagcauggacauucuggau

SEQ ID NO: 510606 - RNA, 19 nt, Artificial Sequence
  Description of Artificial Sequence: Synthetic oligonucleotide
ugcuguuaaacaggaucug

SEQ ID NO: 510607 - RNA, 19 nt, Artificial Sequence
  Description of Artificial Sequence: Synthetic oligonucleotide
uugcggaaugggaucccag

SEQ ID NO: 510608 - RNA, 19 nt, Artificial Sequence
  Description of Artificial Sequence: Synthetic oligonucleotide
ucggaggaucaccuucuca

SEQ ID NO: 510609 - RNA, 19 nt, Artificial Sequence
  Description of Artificial Sequence: Synthetic oligonucleotide
ucauccgggaggccuuuca

SEQ ID NO: 510610 - RNA, 19 nt, Artificial Sequence
  Description of Artificial Sequence: Synthetic oligonucleotide
gucauggacgauggaaaag

SEQ ID NO: 510611 - RNA, 19 nt, Artificial Sequence
  Description of Artificial Sequence: Synthetic oligonucleotide
uggcucaauuuugaugggc

SEQ ID NO: 510612 - RNA, 19 nt, Artificial Sequence
  Description of Artificial Sequence: Synthetic oligonucleotide
uguaggggaccugcacugg

SEQ ID NO: 510613 - RNA, 19 nt, Artificial Sequence
  Description of Artificial Sequence: Synthetic oligonucleotide
agguaccaauggcuuuggc

SEQ ID NO: 510614 - RNA, 19 nt, Artificial Sequence
  Description of Artificial Sequence: Synthetic oligonucleotide
gaagacgucccacuucucu

SEQ ID NO: 510615 - RNA, 19 nt, Artificial Sequence
  Description of Artificial Sequence: Synthetic oligonucleotide
gaguugccuuccgagaccc

SEQ ID NO: 510616 - RNA, 19 nt, Artificial Sequence
  Description of Artificial Sequence: Synthetic oligonucleotide
acacggucguuugaagggg

SEQ ID NO: 510617 - RNA, 19 nt, Artificial Sequence
  Description of Artificial Sequence: Synthetic oligonucleotide
cucaccgagccuguuggcg

SEQ ID NO: 510618 - RNA, 19 nt, Artificial Sequence
  Description of Artificial Sequence: Synthetic oligonucleotide
caguacgaacagcuccucg

SEQ ID NO: 510619 - RNA, 19 nt, Artificial Sequence
  Description of Artificial Sequence: Synthetic oligonucleotide
agugagucggccaucuccu

SEQ ID NO: 510620 - RNA, 19 nt, Artificial Sequence
  Description of Artificial Sequence: Synthetic oligonucleotide
gacaccgucagugagcagu

SEQ ID NO: 510621 - RNA, 19 nt, Artificial Sequence
  Description of Artificial Sequence: Synthetic oligonucleotide
aggaucaccuucucaccga

SEQ ID NO: 510622 - RNA, 19 nt, Artificial Sequence
  Description of Artificial Sequence: Synthetic oligonucleotide
gagaccgaguugccuuccg

SEQ ID NO: 510623 - RNA, 19 nt, Artificial Sequence
  Description of Artificial Sequence: Synthetic oligonucleotide
gguuggaguugguugauga

SEQ ID NO: 510624 - RNA, 19 nt, Artificial Sequence
  Description of Artificial Sequence: Synthetic oligonucleotide
ucaccguauuucucauuga

SEQ ID NO: 510625 - RNA, 19 nt, Artificial Sequence
  Description of Artificial Sequence: Synthetic oligonucleotide
ccccauaaguacacggucg

SEQ ID NO: 510626 - RNA, 19 nt, Artificial Sequence
  Description of Artificial Sequence: Synthetic oligonucleotide
ggaaaagaggaugcgcuug

SEQ ID NO: 510627 - RNA, 19 nt, Artificial Sequence
  Description of Artificial Sequence: Synthetic oligonucleotide
uguuggcgaugucaauccu

SEQ ID NO: 510628 - RNA, 19 nt, Artificial Sequence
  Description of Artificial Sequence: Synthetic oligonucleotide
gcguucaucaaacauccuc

SEQ ID NO: 510629 - RNA, 19 nt, Artificial Sequence
  Description of Artificial Sequence: Synthetic oligonucleotide
ggcuccgagguaccaaugg

SEQ ID NO: 510630 - RNA, 19 nt, Artificial Sequence
  Description of Artificial Sequence: Synthetic oligonucleotide
ggcucaauuuugaugggcc

SEQ ID NO: 510631 - RNA, 19 nt, Artificial Sequence
  Description of Artificial Sequence: Synthetic oligonucleotide
accgaguugccuuccgaga

SEQ ID NO: 510632 - RNA, 19 nt, Artificial Sequence
  Description of Artificial Sequence: Synthetic oligonucleotide
uuguccgggaugcccacaa

SEQ ID NO: 510633 - RNA, 19 nt, Artificial Sequence
  Description of Artificial Sequence: Synthetic oligonucleotide
gaugucaauccuugagagu

SEQ ID NO: 510634 - RNA, 19 nt, Artificial Sequence
  Description of Artificial Sequence: Synthetic oligonucleotide
caucucuaccugcuuccgc

SEQ ID NO: 510635 - RNA, 19 nt, Artificial Sequence
  Description of Artificial Sequence: Synthetic oligonucleotide
guaaccugaaugaugucua

SEQ ID NO: 510636 - RNA, 19 nt, Artificial Sequence
  Description of Artificial Sequence: Synthetic oligonucleotide
uccgcguaucugcuguuaa

SEQ ID NO: 510637 - RNA, 19 nt, Artificial Sequence
  Description of Artificial Sequence: Synthetic oligonucleotide
ggucugcgaagagagaugc

SEQ ID NO: 510638 - RNA, 19 nt, Artificial Sequence
  Description of Artificial Sequence: Synthetic oligonucleotide
cgaugucaauccuugagag

SEQ ID NO: 510639 - RNA, 19 nt, Artificial Sequence
  Description of Artificial Sequence: Synthetic oligonucleotide
uccguuccagguucuggga

SEQ ID NO: 510640 - RNA, 19 nt, Artificial Sequence
  Description of Artificial Sequence: Synthetic oligonucleotide
uuccgauaggggacaggga

SEQ ID NO: 510641 - RNA, 19 nt, Artificial Sequence
  Description of Artificial Sequence: Synthetic oligonucleotide
cuucauggggucuuuggua

SEQ ID NO: 510642 - RNA, 19 nt, Artificial Sequence
  Description of Artificial Sequence: Synthetic oligonucleotide
guucccuaaguguguuggc

SEQ ID NO: 510643 - RNA, 19 nt, Artificial Sequence
  Description of Artificial Sequence: Synthetic oligonucleotide
ccggaucacaucaccaggg

SEQ ID NO: 510644 - RNA, 19 nt, Artificial Sequence
  Description of Artificial Sequence: Synthetic oligonucleotide
caagcucaggucgcguggg

SEQ ID NO: 510645 - RNA, 19 nt, Artificial Sequence
  Description of Artificial Sequence: Synthetic oligonucleotide
caguauccacaacuuguuc

SEQ ID NO: 510646 - RNA, 19 nt, Artificial Sequence
  Description of Artificial Sequence: Synthetic oligonucleotide
uugccuuccgagacccgcu

SEQ ID NO: 510647 - RNA, 19 nt, Artificial Sequence
  Description of Artificial Sequence: Synthetic oligonucleotide
uccuaguucuccugagguu

SEQ ID NO: 510648 - RNA, 19 nt, Artificial Sequence
  Description of Artificial Sequence: Synthetic oligonucleotide
aauccuccgagggcaggug

SEQ ID NO: 510649 - RNA, 19 nt, Artificial Sequence
  Description of Artificial Sequence: Synthetic oligonucleotide
gccggaucacaucaccagg

SEQ ID NO: 510650 - RNA, 19 nt, Artificial Sequence
  Description of Artificial Sequence: Synthetic oligonucleotide
aagggccggaucacaucac

SEQ ID NO: 510651 - RNA, 19 nt, Artificial Sequence
  Description of Artificial Sequence: Synthetic oligonucleotide
ugugucgcucuuccagaau

SEQ ID NO: 510652 - RNA, 19 nt, Artificial Sequence
  Description of Artificial Sequence: Synthetic oligonucleotide
uccggaagggaaugucauc

SEQ ID NO: 510653 - RNA, 19 nt, Artificial Sequence
  Description of Artificial Sequence: Synthetic oligonucleotide
uggcaaucccaaagcaauu

SEQ ID NO: 510654 - RNA, 19 nt, Artificial Sequence
  Description of Artificial Sequence: Synthetic oligonucleotide
aggguuugcggaaugggau

SEQ ID NO: 510655 - RNA, 19 nt, Artificial Sequence
  Description of Artificial Sequence: Synthetic oligonucleotide
ccgauggauaucauaggug

SEQ ID NO: 510656 - RNA, 19 nt, Artificial Sequence
  Description of Artificial Sequence: Synthetic oligonucleotide
gguuugcggaaugggaucc

SEQ ID NO: 510657 - RNA, 19 nt, Artificial Sequence
  Description of Artificial Sequence: Synthetic oligonucleotide
aggccgauucagucccagg

SEQ ID NO: 510658 - RNA, 19 nt, Artificial Sequence
  Description of Artificial Sequence: Synthetic oligonucleotide
ucggcucccuggcaccuug

SEQ ID NO: 510659 - RNA, 19 nt, Artificial Sequence
  Description of Artificial Sequence: Synthetic oligonucleotide
ggaucaccuucucaccgag

SEQ ID NO: 510660 - RNA, 19 nt, Artificial Sequence
  Description of Artificial Sequence: Synthetic oligonucleotide
gcagucggagaaaucuugg

SEQ ID NO: 510661 - RNA, 19 nt, Artificial Sequence
  Description of Artificial Sequence: Synthetic oligonucleotide
ccuaguucuccugagguuc

SEQ ID NO: 510662 - RNA, 19 nt, Artificial Sequence
  Description of Artificial Sequence: Synthetic oligonucleotide
ugucagccgguauuuccau

SEQ ID NO: 510663 - RNA, 19 nt, Artificial Sequence
  Description of Artificial Sequence: Synthetic oligonucleotide
guucgggucucuugaugac

SEQ ID NO: 510664 - RNA, 19 nt, Artificial Sequence
  Description of Artificial Sequence: Synthetic oligonucleotide
agaccgaguugccuuccga

SEQ ID NO: 510665 - RNA, 19 nt, Artificial Sequence
  Description of Artificial Sequence: Synthetic oligonucleotide
ggcaaucuuccgauagggg

SEQ ID NO: 510666 - RNA, 19 nt, Artificial Sequence
  Description of Artificial Sequence: Synthetic oligonucleotide
caauugggucugcgaagag

SEQ ID NO: 510667 - RNA, 19 nt, Artificial Sequence
  Description of Artificial Sequence: Synthetic oligonucleotide
gccucaacauuccuaguuc

SEQ ID NO: 510668 - RNA, 19 nt, Artificial Sequence
  Description of Artificial Sequence: Synthetic oligonucleotide
uaccaauggcuuuggcaua

SEQ ID NO: 510669 - RNA, 19 nt, Artificial Sequence
  Description of Artificial Sequence: Synthetic oligonucleotide
ugcgcuugggaaugucuuu

SEQ ID NO: 510670 - RNA, 19 nt, Artificial Sequence
  Description of Artificial Sequence: Synthetic oligonucleotide
cagcccaagcucaggucgc

SEQ ID NO: 510671 - RNA, 19 nt, Artificial Sequence
  Description of Artificial Sequence: Synthetic oligonucleotide
ucaguuuguaagggaccaa

SEQ ID NO: 510672 - RNA, 19 nt, Artificial Sequence
  Description of Artificial Sequence: Synthetic oligonucleotide
cauccgggaggccuuucac

SEQ ID NO: 510673 - RNA, 19 nt, Artificial Sequence
  Description of Artificial Sequence: Synthetic oligonucleotide
uccuccgagggcagguguc

SEQ ID NO: 510674 - RNA, 19 nt, Artificial Sequence
  Description of Artificial Sequence: Synthetic oligonucleotide
uuggaauggccuggugacu

SEQ ID NO: 510675 - RNA, 19 nt, Artificial Sequence
  Description of Artificial Sequence: Synthetic oligonucleotide
cuguugcuagcuuccagaa

SEQ ID NO: 510676 - RNA, 19 nt, Artificial Sequence
  Description of Artificial Sequence: Synthetic oligonucleotide
ugcguucaucaaacauccu

SEQ ID NO: 510677 - RNA, 19 nt, Artificial Sequence
  Description of Artificial Sequence: Synthetic oligonucleotide
ggacuuguucccuaagugu

SEQ ID NO: 510678 - RNA, 19 nt, Artificial Sequence
  Description of Artificial Sequence: Synthetic oligonucleotide
ccauaaccagaauccuccg

SEQ ID NO: 510679 - RNA, 19 nt, Artificial Sequence
  Description of Artificial Sequence: Synthetic oligonucleotide
uuccgagacccgcuuucuc

SEQ ID NO: 510680 - RNA, 19 nt, Artificial Sequence
  Description of Artificial Sequence: Synthetic oligonucleotide
ucggggucucguccacaag

SEQ ID NO: 510681 - RNA, 19 nt, Artificial Sequence
  Description of Artificial Sequence: Synthetic oligonucleotide
agaauccgcuucagcuugg

SEQ ID NO: 510682 - RNA, 19 nt, Artificial Sequence
  Description of Artificial Sequence: Synthetic oligonucleotide
gcuccgagguaccaauggc

SEQ ID NO: 510683 - RNA, 19 nt, Artificial Sequence
  Description of Artificial Sequence: Synthetic oligonucleotide
gaucaccuucucaccgagc

SEQ ID NO: 510684 - RNA, 19 nt, Artificial Sequence
  Description of Artificial Sequence: Synthetic oligonucleotide
ugcgggcuucuguccacag

SEQ ID NO: 510685 - RNA, 19 nt, Artificial Sequence
  Description of Artificial Sequence: Synthetic oligonucleotide
ccaagcucaggucgcgugg

SEQ ID NO: 510686 - RNA, 19 nt, Artificial Sequence
  Description of Artificial Sequence: Synthetic oligonucleotide
gggucucguccacaagacg

SEQ ID NO: 510687 - RNA, 19 nt, Artificial Sequence
  Description of Artificial Sequence: Synthetic oligonucleotide
gcaggguuugcggaauggg

SEQ ID NO: 510688 - RNA, 19 nt, Artificial Sequence
  Description of Artificial Sequence: Synthetic oligonucleotide
ccgucagugagcaguucgg

SEQ ID NO: 510689 - RNA, 19 nt, Artificial Sequence
  Description of Artificial Sequence: Synthetic oligonucleotide
ugauaaccauccguacauu

SEQ ID NO: 510690 - RNA, 19 nt, Artificial Sequence
  Description of Artificial Sequence: Synthetic oligonucleotide
gcucuugucugaccaagca

SEQ ID NO: 510691 - RNA, 19 nt, Artificial Sequence
  Description of Artificial Sequence: Synthetic oligonucleotide
cugcucucggaggaucacc

SEQ ID NO: 510692 - RNA, 19 nt, Artificial Sequence
  Description of Artificial Sequence: Synthetic oligonucleotide
cacagcagucggagaaauc

SEQ ID NO: 510693 - RNA, 19 nt, Artificial Sequence
  Description of Artificial Sequence: Synthetic oligonucleotide
gucucuucggggucucguc

SEQ ID NO: 510694 - RNA, 19 nt, Artificial Sequence
  Description of Artificial Sequence: Synthetic oligonucleotide
ugaaugcugugucgcucuu

SEQ ID NO: 510695 - RNA, 19 nt, Artificial Sequence
  Description of Artificial Sequence: Synthetic oligonucleotide
uggcgaugucaauccuuga

SEQ ID NO: 510696 - RNA, 19 nt, Artificial Sequence
  Description of Artificial Sequence: Synthetic oligonucleotide
agugagcaguucgggucuc

SEQ ID NO: 510697 - RNA, 19 nt, Artificial Sequence
  Description of Artificial Sequence: Synthetic oligonucleotide
gcaauugggucugcgaaga

SEQ ID NO: 510698 - RNA, 19 nt, Artificial Sequence
  Description of Artificial Sequence: Synthetic oligonucleotide
ccgauaggggacagggacc

SEQ ID NO: 510699 - RNA, 19 nt, Artificial Sequence
  Description of Artificial Sequence: Synthetic oligonucleotide
cauaaguacacggucguuu

SEQ ID NO: 510700 - RNA, 19 nt, Artificial Sequence
  Description of Artificial Sequence: Synthetic oligonucleotide
auacuguugcuagcuucca

SEQ ID NO: 510701 - RNA, 19 nt, Artificial Sequence
  Description of Artificial Sequence: Synthetic oligonucleotide
uccaucccauaaccagaau

SEQ ID NO: 510702 - RNA, 19 nt, Artificial Sequence
  Description of Artificial Sequence: Synthetic oligonucleotide
ggguuugcggaaugggauc

SEQ ID NO: 510703 - RNA, 19 nt, Artificial Sequence
  Description of Artificial Sequence: Synthetic oligonucleotide
gcguaucugcuguuaaaca

SEQ ID NO: 510704 - RNA, 19 nt, Artificial Sequence
  Description of Artificial Sequence: Synthetic oligonucleotide
ggcucgaggcaguaggcca

SEQ ID NO: 510705 - RNA, 19 nt, Artificial Sequence
  Description of Artificial Sequence: Synthetic oligonucleotide
uucaggcuuugggaugagu

SEQ ID NO: 510706 - RNA, 19 nt, Artificial Sequence
  Description of Artificial Sequence: Synthetic oligonucleotide
cuuugucagccgguauuuc

SEQ ID NO: 510707 - RNA, 19 nt, Artificial Sequence
  Description of Artificial Sequence: Synthetic oligonucleotide
cuccgagguaccaauggcu

SEQ ID NO: 510708 - RNA, 19 nt, Artificial Sequence
  Description of Artificial Sequence: Synthetic oligonucleotide
guuugcggaaugggauccc

SEQ ID NO: 510709 - RNA, 19 nt, Artificial Sequence
  Description of Artificial Sequence: Synthetic oligonucleotide
uccgcaagggccggaucac

SEQ ID NO: 510710 - RNA, 19 nt, Artificial Sequence
  Description of Artificial Sequence: Synthetic oligonucleotide
acgcacucccgcaaugugu

SEQ ID NO: 510711 - RNA, 19 nt, Artificial Sequence
  Description of Artificial Sequence: Synthetic oligonucleotide
cucuggguuagaggacgag

SEQ ID NO: 510712 - RNA, 19 nt, Artificial Sequence
  Description of Artificial Sequence: Synthetic oligonucleotide
cuugcgcuugggaaugucu

SEQ ID NO: 510713 - RNA, 19 nt, Artificial Sequence
  Description of Artificial Sequence: Synthetic oligonucleotide
ugucacggaucaguuugua

SEQ ID NO: 510714 - RNA, 19 nt, Artificial Sequence
  Description of Artificial Sequence: Synthetic oligonucleotide
cccucgaugaggacugaac

SEQ ID NO: 510715 - RNA, 19 nt, Artificial Sequence
  Description of Artificial Sequence: Synthetic oligonucleotide
gccgauggauaucauaggu

SEQ ID NO: 510716 - RNA, 19 nt, Artificial Sequence
  Description of Artificial Sequence: Synthetic oligonucleotide
uagugucccuacagaccuc

SEQ ID NO: 510717 - RNA, 19 nt, Artificial Sequence
  Description of Artificial Sequence: Synthetic oligonucleotide
gucagccgguauuuccauc

SEQ ID NO: 510718 - RNA, 19 nt, Artificial Sequence
  Description of Artificial Sequence: Synthetic oligonucleotide
caccccauaaguacacggu

SEQ ID NO: 510719 - RNA, 19 nt, Artificial Sequence
  Description of Artificial Sequence: Synthetic oligonucleotide
guuggaguugguugaugau

SEQ ID NO: 510720 - RNA, 19 nt, Artificial Sequence
  Description of Artificial Sequence: Synthetic oligonucleotide
ccgcaauguguugaugucc

SEQ ID NO: 510721 - RNA, 19 nt, Artificial Sequence
  Description of Artificial Sequence: Synthetic oligonucleotide
cacggucguuugaagggga

SEQ ID NO: 510722 - RNA, 19 nt, Artificial Sequence
  Description of Artificial Sequence: Synthetic oligonucleotide
cguucaucaaacauccucu

SEQ ID NO: 510723 - RNA, 19 nt, Artificial Sequence
  Description of Artificial Sequence: Synthetic oligonucleotide
gaauccuccgagggcaggu

SEQ ID NO: 510724 - RNA, 19 nt, Artificial Sequence
  Description of Artificial Sequence: Synthetic oligonucleotide
cugugucgcucuuccagaa

SEQ ID NO: 510725 - RNA, 19 nt, Artificial Sequence
  Description of Artificial Sequence: Synthetic oligonucleotide
cucggaggaucaccuucuc

SEQ ID NO: 510726 - RNA, 19 nt, Artificial Sequence
  Description of Artificial Sequence: Synthetic oligonucleotide
caccgagccuguuggcguc

SEQ ID NO: 510727 - RNA, 19 nt, Artificial Sequence
  Description of Artificial Sequence: Synthetic oligonucleotide
gcgcuuggaagcauggaca

SEQ ID NO: 510728 - RNA, 19 nt, Artificial Sequence
  Description of Artificial Sequence: Synthetic oligonucleotide
gcgcuugggaaugucuuug

SEQ ID NO: 510729 - RNA, 19 nt, Artificial Sequence
  Description of Artificial Sequence: Synthetic oligonucleotide
caggccgauucagucccag

SEQ ID NO: 510730 - RNA, 19 nt, Artificial Sequence
  Description of Artificial Sequence: Synthetic oligonucleotide
uuccgcguaucugcuguua

SEQ ID NO: 510731 - RNA, 19 nt, Artificial Sequence
  Description of Artificial Sequence: Synthetic oligonucleotide
ccguuccagguucugggag

SEQ ID NO: 510732 - RNA, 19 nt, Artificial Sequence
  Description of Artificial Sequence: Synthetic oligonucleotide
guagugagucggccaucuc

SEQ ID NO: 510733 - RNA, 19 nt, Artificial Sequence
  Description of Artificial Sequence: Synthetic oligonucleotide
gguuccggaagggaauguc

SEQ ID NO: 510734 - RNA, 19 nt, Artificial Sequence
  Description of Artificial Sequence: Synthetic oligonucleotide
gauggauaucauagguguu

SEQ ID NO: 510735 - RNA, 19 nt, Artificial Sequence
  Description of Artificial Sequence: Synthetic oligonucleotide
gggucugcgaagagagaug

SEQ ID NO: 510736 - RNA, 19 nt, Artificial Sequence
  Description of Artificial Sequence: Synthetic oligonucleotide
cgcguaucugcuguuaaac

SEQ ID NO: 510737 - RNA, 19 nt, Artificial Sequence
  Description of Artificial Sequence: Synthetic oligonucleotide
cguacauucucccuggccu

SEQ ID NO: 510738 - RNA, 19 nt, Artificial Sequence
  Description of Artificial Sequence: Synthetic oligonucleotide
cccgcaauguguugauguc

SEQ ID NO: 510739 - RNA, 19 nt, Artificial Sequence
  Description of Artificial Sequence: Synthetic oligonucleotide
augcgcuuggaagcaugga

SEQ ID NO: 510740 - RNA, 19 nt, Artificial Sequence
  Description of Artificial Sequence: Synthetic oligonucleotide
gggguuccggaagggaaug

SEQ ID NO: 510741 - RNA, 19 nt, Artificial Sequence
  Description of Artificial Sequence: Synthetic oligonucleotide
guacauucucccuggccuu

SEQ ID NO: 510742 - RNA, 19 nt, Artificial Sequence
  Description of Artificial Sequence: Synthetic oligonucleotide
ccacaagacggucccagga

SEQ ID NO: 510743 - RNA, 19 nt, Artificial Sequence
  Description of Artificial Sequence: Synthetic oligonucleotide
ccucuugauuaugaaguga

SEQ ID NO: 510744 - RNA, 19 nt, Artificial Sequence
  Description of Artificial Sequence: Synthetic oligonucleotide
gucccaguacgaacagcuc

SEQ ID NO: 510745 - RNA, 19 nt, Artificial Sequence
  Description of Artificial Sequence: Synthetic oligonucleotide
gaccugcacuggguauuug

SEQ ID NO: 510746 - RNA, 19 nt, Artificial Sequence
  Description of Artificial Sequence: Synthetic oligonucleotide
caucuccucagaaguuggu

SEQ ID NO: 510747 - RNA, 19 nt, Artificial Sequence
  Description of Artificial Sequence: Synthetic oligonucleotide
agguguccagguagugagu

SEQ ID NO: 510748 - RNA, 19 nt, Artificial Sequence
  Description of Artificial Sequence: Synthetic oligonucleotide
caggcagucccaguacgaa

SEQ ID NO: 510749 - RNA, 19 nt, Artificial Sequence
  Description of Artificial Sequence: Synthetic oligonucleotide
cucccgcaauguguugaug

SEQ ID NO: 510750 - RNA, 19 nt, Artificial Sequence
  Description of Artificial Sequence: Synthetic oligonucleotide
guuggcgaugucaauccuu

SEQ ID NO: 510751 - RNA, 19 nt, Artificial Sequence
  Description of Artificial Sequence: Synthetic oligonucleotide
ggagaccgaguugccuucc

SEQ ID NO: 510752 - RNA, 19 nt, Artificial Sequence
  Description of Artificial Sequence: Synthetic oligonucleotide
ccuacagaccucuguggaa

SEQ ID NO: 510753 - RNA, 19 nt, Artificial Sequence
  Description of Artificial Sequence: Synthetic oligonucleotide
gcgggcuucuguccacagc

SEQ ID NO: 510754 - RNA, 19 nt, Artificial Sequence
  Description of Artificial Sequence: Synthetic oligonucleotide
cagaccucuguggaagugu

SEQ ID NO: 510755 - RNA, 19 nt, Artificial Sequence
  Description of Artificial Sequence: Synthetic oligonucleotide
cuggcuccgagguaccaau

SEQ ID NO: 510756 - RNA, 19 nt, Artificial Sequence
  Description of Artificial Sequence: Synthetic oligonucleotide
cugcuuccgcaagggccgg

SEQ ID NO: 510757 - RNA, 19 nt, Artificial Sequence
  Description of Artificial Sequence: Synthetic oligonucleotide
acggucguuugaaggggau

SEQ ID NO: 510758 - RNA, 19 nt, Artificial Sequence
  Description of Artificial Sequence: Synthetic oligonucleotide
ccgaagcuuggcaauccca

SEQ ID NO: 510759 - RNA, 19 nt, Artificial Sequence
  Description of Artificial Sequence: Synthetic oligonucleotide
ggggcucgaggcaguaggc

SEQ ID NO: 510760 - RNA, 19 nt, Artificial Sequence
  Description of Artificial Sequence: Synthetic oligonucleotide
cccaguacgaacagcuccu

SEQ ID NO: 510761 - RNA, 19 nt, Artificial Sequence
  Description of Artificial Sequence: Synthetic oligonucleotide
ccgggaugcccacaaucuc

SEQ ID NO: 510762 - RNA, 19 nt, Artificial Sequence
  Description of Artificial Sequence: Synthetic oligonucleotide
cuugagagucuggugucau

SEQ ID NO: 510763 - RNA, 19 nt, Artificial Sequence
  Description of Artificial Sequence: Synthetic oligonucleotide
ccuccgagggcaggugucc

SEQ ID NO: 510764 - RNA, 19 nt, Artificial Sequence
  Description of Artificial Sequence: Synthetic oligonucleotide
cggaucaguuuguaaggga

SEQ ID NO: 510765 - RNA, 19 nt, Artificial Sequence
  Description of Artificial Sequence: Synthetic oligonucleotide
accgagccuguuggcguca

SEQ ID NO: 510766 - RNA, 19 nt, Artificial Sequence
  Description of Artificial Sequence: Synthetic oligonucleotide
cccauaaguacacggucgu

SEQ ID NO: 510767 - RNA, 19 nt, Artificial Sequence
  Description of Artificial Sequence: Synthetic oligonucleotide
gcacucccgcaauguguug

SEQ ID NO: 510768 - RNA, 19 nt, Artificial Sequence
  Description of Artificial Sequence: Synthetic oligonucleotide
gcaguauccacaacuuguu

SEQ ID NO: 510769 - RNA, 19 nt, Artificial Sequence
  Description of Artificial Sequence: Synthetic oligonucleotide
cagcagucggagaaaucuu

SEQ ID NO: 510770 - RNA, 19 nt, Artificial Sequence
  Description of Artificial Sequence: Synthetic oligonucleotide
ggacugaaccuggauugcu

SEQ ID NO: 510771 - RNA, 19 nt, Artificial Sequence
  Description of Artificial Sequence: Synthetic oligonucleotide
cuuccgagacccgcuuucu

SEQ ID NO: 510772 - RNA, 19 nt, Artificial Sequence
  Description of Artificial Sequence: Synthetic oligonucleotide
caccgucagugagcaguuc

SEQ ID NO: 510773 - RNA, 19 nt, Artificial Sequence
  Description of Artificial Sequence: Synthetic oligonucleotide
acaggccgauucaguccca

SEQ ID NO: 510774 - RNA, 19 nt, Artificial Sequence
  Description of Artificial Sequence: Synthetic oligonucleotide
gagucccucucugcaguau

SEQ ID NO: 510775 - RNA, 19 nt, Artificial Sequence
  Description of Artificial Sequence: Synthetic oligonucleotide
cgagacccgcuuucucuug

SEQ ID NO: 510776 - RNA, 19 nt, Artificial Sequence
  Description of Artificial Sequence: Synthetic oligonucleotide
gccgguauuuccaucccau

SEQ ID NO: 510777 - RNA, 19 nt, Artificial Sequence
  Description of Artificial Sequence: Synthetic oligonucleotide
cugcgggcuucuguccaca

SEQ ID NO: 510778 - RNA, 19 nt, Artificial Sequence
  Description of Artificial Sequence: Synthetic oligonucleotide
gggaccaacacaggccgau

SEQ ID NO: 510779 - RNA, 19 nt, Artificial Sequence
  Description of Artificial Sequence: Synthetic oligonucleotide
ggauugcuuuugauucgcu

SEQ ID NO: 510780 - RNA, 19 nt, Artificial Sequence
  Description of Artificial Sequence: Synthetic oligonucleotide
ccgcguaucugcuguuaaa

SEQ ID NO: 510781 - RNA, 19 nt, Artificial Sequence
  Description of Artificial Sequence: Synthetic oligonucleotide
ccgguauuuccaucccaua

SEQ ID NO: 510782 - RNA, 19 nt, Artificial Sequence
  Description of Artificial Sequence: Synthetic oligonucleotide
gucguuugaaggggaucuu

SEQ ID NO: 510783 - RNA, 19 nt, Artificial Sequence
  Description of Artificial Sequence: Synthetic oligonucleotide
cagguccugcgggcuucug

SEQ ID NO: 510784 - RNA, 19 nt, Artificial Sequence
  Description of Artificial Sequence: Synthetic oligonucleotide
gccucaccguauuucucau

SEQ ID NO: 510785 - RNA, 19 nt, Artificial Sequence
  Description of Artificial Sequence: Synthetic oligonucleotide
cuuccgcguaucugcuguu

SEQ ID NO: 510786 - RNA, 19 nt, Artificial Sequence
  Description of Artificial Sequence: Synthetic oligonucleotide
gccacagcgaggauccguu

SEQ ID NO: 510787 - RNA, 19 nt, Artificial Sequence
  Description of Artificial Sequence: Synthetic oligonucleotide
cgauucagucccagggccu

SEQ ID NO: 510788 - RNA, 19 nt, Artificial Sequence
  Description of Artificial Sequence: Synthetic oligonucleotide
gcaaaagguuggaguuggu

SEQ ID NO: 510789 - RNA, 19 nt, Artificial Sequence
  Description of Artificial Sequence: Synthetic oligonucleotide
gcaccuugacuggcuccga

SEQ ID NO: 510790 - RNA, 19 nt, Artificial Sequence
  Description of Artificial Sequence: Synthetic oligonucleotide
ggguuccggaagggaaugu

SEQ ID NO: 510791 - RNA, 19 nt, Artificial Sequence
  Description of Artificial Sequence: Synthetic oligonucleotide
cgcacucccgcaauguguu

SEQ ID NO: 510792 - RNA, 19 nt, Artificial Sequence
  Description of Artificial Sequence: Synthetic oligonucleotide
ggaccugcacuggguauuu

SEQ ID NO: 510793 - RNA, 19 nt, Artificial Sequence
  Description of Artificial Sequence: Synthetic oligonucleotide
ccgagacccgcuuucucuu

SEQ ID NO: 510794 - RNA, 19 nt, Artificial Sequence
  Description of Artificial Sequence: Synthetic oligonucleotide
ccgagguaccaauggcuuu

SEQ ID NO: 510795 - RNA, 19 nt, Artificial Sequence
  Description of Artificial Sequence: Synthetic oligonucleotide
ggaccaacacaggccgauu

SEQ ID NO: 510796 - RNA, 19 nt, Artificial Sequence
  Description of Artificial Sequence: Synthetic oligonucleotide
ccgcaagggccggaucaca

SEQ ID NO: 510797 - RNA, 19 nt, Artificial Sequence
  Description of Artificial Sequence: Synthetic oligonucleotide
ccauaaguacacggucguu

SEQ ID NO: 510798 - RNA, 19 nt, Artificial Sequence
  Description of Artificial Sequence: Synthetic oligonucleotide
ccucaccguauuucucauu

SEQ ID NO: 510799 - RNA, 19 nt, Artificial Sequence
  Description of Artificial Sequence: Synthetic oligonucleotide
gcccaagcucaggucgcgu

SEQ ID NO: 510800 - RNA, 19 nt, Artificial Sequence
  Description of Artificial Sequence: Synthetic oligonucleotide
cucggcucccuggcaccuu

SEQ ID NO: 510801 - RNA, 19 nt, Artificial Sequence
  Description of Artificial Sequence: Synthetic oligonucleotide
ggcuccucacuggggccuu

SEQ ID NO: 510802 - RNA, 19 nt, Artificial Sequence
  Description of Artificial Sequence: Synthetic oligonucleotide
ccgagccuguuggcgucau

SEQ ID NO: 510803 - RNA, 19 nt, Artificial Sequence
  Description of Artificial Sequence: Synthetic oligonucleotide
aaagucgagauucugagac

SEQ ID NO: 510804 - RNA, 19 nt, Artificial Sequence
  Description of Artificial Sequence: Synthetic oligonucleotide
aacaagaugccauaggugg

SEQ ID NO: 510805 - RNA, 19 nt, Artificial Sequence
  Description of Artificial Sequence: Synthetic oligonucleotide
aacgcguagauacacaugc

SEQ ID NO: 510806 - RNA, 19 nt, Artificial Sequence
  Description of Artificial Sequence: Synthetic oligonucleotide
uaggcgaugaaguacaggg

SEQ ID NO: 510807 - RNA, 19 nt, Artificial Sequence
  Description of Artificial Sequence: Synthetic oligonucleotide
auacccucaaaugagagcc

SEQ ID NO: 510808 - RNA, 19 nt, Artificial Sequence
  Description of Artificial Sequence: Synthetic oligonucleotide
acaucagacauuuaacagg

SEQ ID NO: 510809 - RNA, 19 nt, Artificial Sequence
  Description of Artificial Sequence: Synthetic oligonucleotide
aaggucacguuccuucucc

SEQ ID NO: 510810 - RNA, 19 nt, Artificial Sequence
  Description of Artificial Sequence: Synthetic oligonucleotide
aaaacgaccucuggggugc

SEQ ID NO: 510811 - RNA, 19 nt, Artificial Sequence
  Description of Artificial Sequence: Synthetic oligonucleotide
aggauagcugaguagaagg

SEQ ID NO: 510812 - RNA, 19 nt, Artificial Sequence
  Description of Artificial Sequence: Synthetic oligonucleotide
uacauuggaagucuggcug

SEQ ID NO: 510813 - RNA, 19 nt, Artificial Sequence
  Description of Artificial Sequence: Synthetic oligonucleotide
guaguaaucgcagagcagg

SEQ ID NO: 510814 - RNA, 19 nt, Artificial Sequence
  Description of Artificial Sequence: Synthetic oligonucleotide
gaugacucggagcugaccc

SEQ ID NO: 510815 - RNA, 19 nt, Artificial Sequence
  Description of Artificial Sequence: Synthetic oligonucleotide
ucguuuauuuaccacauau

SEQ ID NO: 510816 - RNA, 19 nt, Artificial Sequence
  Description of Artificial Sequence: Synthetic oligonucleotide
gagauguccauucccaugc

SEQ ID NO: 510817 - RNA, 19 nt, Artificial Sequence
  Description of Artificial Sequence: Synthetic oligonucleotide
uuuacauuggaagucuggc

SEQ ID NO: 510818 - RNA, 19 nt, Artificial Sequence
  Description of Artificial Sequence: Synthetic oligonucleotide
guaaaagagcagcauaccc

SEQ ID NO: 510819 - RNA, 19 nt, Artificial Sequence
  Description of Artificial Sequence: Synthetic oligonucleotide
uucagaauccccgaggccc

SEQ ID NO: 510820 - RNA, 19 nt, Artificial Sequence
  Description of Artificial Sequence: Synthetic oligonucleotide
ucugauaggccuccgacgu

SEQ ID NO: 510821 - RNA, 19 nt, Artificial Sequence
  Description of Artificial Sequence: Synthetic oligonucleotide
uguuauagaugguggaaca

SEQ ID NO: 510822 - RNA, 19 nt, Artificial Sequence
  Description of Artificial Sequence: Synthetic oligonucleotide
ugguaguaaucgcagagca

SEQ ID NO: 510823 - RNA, 19 nt, Artificial Sequence
  Description of Artificial Sequence: Synthetic oligonucleotide
gauagcugaguagaaggcg

SEQ ID NO: 510824 - RNA, 19 nt, Artificial Sequence
  Description of Artificial Sequence: Synthetic oligonucleotide
ugaugaaccacaccaggcu

SEQ ID NO: 510825 - RNA, 19 nt, Artificial Sequence
  Description of Artificial Sequence: Synthetic oligonucleotide
accggagucacguacgccg

SEQ ID NO: 510826 - RNA, 19 nt, Artificial Sequence
  Description of Artificial Sequence: Synthetic oligonucleotide
aguacaucacaccguuggc

SEQ ID NO: 510827 - RNA, 19 nt, Artificial Sequence
  Description of Artificial Sequence: Synthetic oligonucleotide
uaucgccaggacaagaaug

SEQ ID NO: 510828 - RNA, 19 nt, Artificial Sequence
  Description of Artificial Sequence: Synthetic oligonucleotide
uccuccaacaggacgggcg

SEQ ID NO: 510829 - RNA, 19 nt, Artificial Sequence
  Description of Artificial Sequence: Synthetic oligonucleotide
auguuauagaugguggaac

SEQ ID NO: 510830 - RNA, 19 nt, Artificial Sequence
  Description of Artificial Sequence: Synthetic oligonucleotide
uucugauaggccuccgacg

SEQ ID NO: 510831 - RNA, 19 nt, Artificial Sequence
  Description of Artificial Sequence: Synthetic oligonucleotide
guaaucgcagagcagggag

SEQ ID NO: 510832 - RNA, 19 nt, Artificial Sequence
  Description of Artificial Sequence: Synthetic oligonucleotide
agaagguagggugucaccg

SEQ ID NO: 510833 - RNA, 19 nt, Artificial Sequence
  Description of Artificial Sequence: Synthetic oligonucleotide
gaggaugccccacuugugg

SEQ ID NO: 510834 - RNA, 19 nt, Artificial Sequence
  Description of Artificial Sequence: Synthetic oligonucleotide
gaccauuuccucuagccac

SEQ ID NO: 510835 - RNA, 19 nt, Artificial Sequence
  Description of Artificial Sequence: Synthetic oligonucleotide
agauguagaugacucggag

SEQ ID NO: 510836 - RNA, 19 nt, Artificial Sequence
  Description of Artificial Sequence: Synthetic oligonucleotide
gaugaggcaaacucguuga

SEQ ID NO: 510837 - RNA, 19 nt, Artificial Sequence
  Description of Artificial Sequence: Synthetic oligonucleotide
ucgagauucugagacauca

SEQ ID NO: 510838 - RNA, 19 nt, Artificial Sequence
  Description of Artificial Sequence: Synthetic oligonucleotide
uuucgcagugccuugggca

SEQ ID NO: 510839 - RNA, 19 nt, Artificial Sequence
  Description of Artificial Sequence: Synthetic oligonucleotide
uccaggauagcugaguaga

SEQ ID NO: 510840 - RNA, 19 nt, Artificial Sequence
  Description of Artificial Sequence: Synthetic oligonucleotide
uuauagaugguggaacaga

SEQ ID NO: 510841 - RNA, 19 nt, Artificial Sequence
  Description of Artificial Sequence: Synthetic oligonucleotide
uguaaaagagcagcauacc

SEQ ID NO: 510842 - RNA, 19 nt, Artificial Sequence
  Description of Artificial Sequence: Synthetic oligonucleotide
agcacaucuccaucugagc

SEQ ID NO: 510843 - RNA, 19 nt, Artificial Sequence
  Description of Artificial Sequence: Synthetic oligonucleotide
gacauuuaacaggaggggc

SEQ ID NO: 510844 - RNA, 19 nt, Artificial Sequence
  Description of Artificial Sequence: Synthetic oligonucleotide
uggagaaguacaucacacc

SEQ ID NO: 510845 - RNA, 19 nt, Artificial Sequence
  Description of Artificial Sequence: Synthetic oligonucleotide
aaugucccuuccauugagc

SEQ ID NO: 510846 - RNA, 19 nt, Artificial Sequence
  Description of Artificial Sequence: Synthetic oligonucleotide
aggguacggacgcucaggc

SEQ ID NO: 510847 - RNA, 19 nt, Artificial Sequence
  Description of Artificial Sequence: Synthetic oligonucleotide
acagaaugcagccauugaa

SEQ ID NO: 510848 - RNA, 19 nt, Artificial Sequence
  Description of Artificial Sequence: Synthetic oligonucleotide
augcuaaucagggugagca

SEQ ID NO: 510849 - RNA, 19 nt, Artificial Sequence
  Description of Artificial Sequence: Synthetic oligonucleotide
cucgacgccgaacagaaug

SEQ ID NO: 510850 - RNA, 19 nt, Artificial Sequence
  Description of Artificial Sequence: Synthetic oligonucleotide
gaaggcggcacugaacgcg

SEQ ID NO: 510851 - RNA, 19 nt, Artificial Sequence
  Description of Artificial Sequence: Synthetic oligonucleotide
uugacacagagauuucgca

SEQ ID NO: 510852 - RNA, 19 nt, Artificial Sequence
  Description of Artificial Sequence: Synthetic oligonucleotide
ugagucugcgcugaagucc

SEQ ID NO: 510853 - RNA, 19 nt, Artificial Sequence
  Description of Artificial Sequence: Synthetic oligonucleotide
cauccaucauguaagcgug

SEQ ID NO: 510854 - RNA, 19 nt, Artificial Sequence
  Description of Artificial Sequence: Synthetic oligonucleotide
auuuacauuggaagucugg

SEQ ID NO: 510855 - RNA, 19 nt, Artificial Sequence
  Description of Artificial Sequence: Synthetic oligonucleotide
agguacaucggucacucca

SEQ ID NO: 510856 - RNA, 19 nt, Artificial Sequence
  Description of Artificial Sequence: Synthetic oligonucleotide
cuaaguagcgagaugucca

SEQ ID NO: 510857 - RNA, 19 nt, Artificial Sequence
  Description of Artificial Sequence: Synthetic oligonucleotide
acugaacgcguagauacac

SEQ ID NO: 510858 - RNA, 19 nt, Artificial Sequence
  Description of Artificial Sequence: Synthetic oligonucleotide
aagcagucgaugagcacgc

SEQ ID NO: 510859 - RNA, 19 nt, Artificial Sequence
  Description of Artificial Sequence: Synthetic oligonucleotide
cauacccucaaaugagagc

SEQ ID NO: 510860 - RNA, 19 nt, Artificial Sequence
  Description of Artificial Sequence: Synthetic oligonucleotide
acguacgccgucuccaugg

SEQ ID NO: 510861 - RNA, 19 nt, Artificial Sequence
  Description of Artificial Sequence: Synthetic oligonucleotide
aacucguugaggccuguga

SEQ ID NO: 510862 - RNA, 19 nt, Artificial Sequence
  Description of Artificial Sequence: Synthetic oligonucleotide
ugaaagggcgucuccuucc

SEQ ID NO: 510863 - RNA, 19 nt, Artificial Sequence
  Description of Artificial Sequence: Synthetic oligonucleotide
cuggcagcuaaguagcgag

SEQ ID NO: 510864 - RNA, 19 nt, Artificial Sequence
  Description of Artificial Sequence: Synthetic oligonucleotide
ucccaugccacgccgagug

SEQ ID NO: 510865 - RNA, 19 nt, Artificial Sequence
  Description of Artificial Sequence: Synthetic oligonucleotide
ucuuacucugguaguaauc

SEQ ID NO: 510866 - RNA, 19 nt, Artificial Sequence
  Description of Artificial Sequence: Synthetic oligonucleotide
acgcugucuauguuggagg

SEQ ID NO: 510867 - RNA, 19 nt, Artificial Sequence
  Description of Artificial Sequence: Synthetic oligonucleotide
ucugcgcugaaguccauca

SEQ ID NO: 510868 - RNA, 19 nt, Artificial Sequence
  Description of Artificial Sequence: Synthetic oligonucleotide
acucguugaggccugugag

SEQ ID NO: 510869 - RNA, 19 nt, Artificial Sequence
  Description of Artificial Sequence: Synthetic oligonucleotide
guguaaaagagcagcauac

SEQ ID NO: 510870 - RNA, 19 nt, Artificial Sequence
  Description of Artificial Sequence: Synthetic oligonucleotide
uauccgcugagucugcgcu

SEQ ID NO: 510871 - RNA, 19 nt, Artificial Sequence
  Description of Artificial Sequence: Synthetic oligonucleotide
uccauggcguagcugaacu

SEQ ID NO: 510872 - RNA, 19 nt, Artificial Sequence
  Description of Artificial Sequence: Synthetic oligonucleotide
gagacaaggaucugagcca

SEQ ID NO: 510873 - RNA, 19 nt, Artificial Sequence
  Description of Artificial Sequence: Synthetic oligonucleotide
ugaacgcguagauacacau

SEQ ID NO: 510874 - RNA, 19 nt, Artificial Sequence
  Description of Artificial Sequence: Synthetic oligonucleotide
gaaguacaggguacggacg

SEQ ID NO: 510875 - RNA, 19 nt, Artificial Sequence
  Description of Artificial Sequence: Synthetic oligonucleotide
gaacagaggcgucgcaggg

SEQ ID NO: 510876 - RNA, 19 nt, Artificial Sequence
  Description of Artificial Sequence: Synthetic oligonucleotide
augacucggagcugacccc

SEQ ID NO: 510877 - RNA, 19 nt, Artificial Sequence
  Description of Artificial Sequence: Synthetic oligonucleotide
caccgggccacacacaucc

SEQ ID NO: 510878 - RNA, 19 nt, Artificial Sequence
  Description of Artificial Sequence: Synthetic oligonucleotide
acgccgaacagaaugcagc

SEQ ID NO: 510879 - RNA, 19 nt, Artificial Sequence
  Description of Artificial Sequence: Synthetic oligonucleotide
ugguuucgggaccauuucc

SEQ ID NO: 510880 - RNA, 19 nt, Artificial Sequence
  Description of Artificial Sequence: Synthetic oligonucleotide
guagcugaacucgacgccg

SEQ ID NO: 510881 - RNA, 19 nt, Artificial Sequence
  Description of Artificial Sequence: Synthetic oligonucleotide
agguaguugucauggccgg

SEQ ID NO: 510882 - RNA, 19 nt, Artificial Sequence
  Description of Artificial Sequence: Synthetic oligonucleotide
acaucggucacuccaggca

SEQ ID NO: 510883 - RNA, 19 nt, Artificial Sequence
  Description of Artificial Sequence: Synthetic oligonucleotide
uacgccgucuccauggcgu

SEQ ID NO: 510884 - RNA, 19 nt, Artificial Sequence
  Description of Artificial Sequence: Synthetic oligonucleotide
gucccuuccauugagcaag

SEQ ID NO: 510885 - RNA, 19 nt, Artificial Sequence
  Description of Artificial Sequence: Synthetic oligonucleotide
gcacugaacgcguagauac

SEQ ID NO: 510886 - RNA, 19 nt, Artificial Sequence
  Description of Artificial Sequence: Synthetic oligonucleotide
ucgacgccgaacagaaugc

SEQ ID NO: 510887 - RNA, 19 nt, Artificial Sequence
  Description of Artificial Sequence: Synthetic oligonucleotide
gauuucgcagugccuuggg

SEQ ID NO: 510888 - RNA, 19 nt, Artificial Sequence
  Description of Artificial Sequence: Synthetic oligonucleotide
ucucguauuucacaccauu

SEQ ID NO: 510889 - RNA, 19 nt, Artificial Sequence
  Description of Artificial Sequence: Synthetic oligonucleotide
guuauagaugguggaacag

SEQ ID NO: 510890 - RNA, 19 nt, Artificial Sequence
  Description of Artificial Sequence: Synthetic oligonucleotide
agucacguacgccgucucc

SEQ ID NO: 510891 - RNA, 19 nt, Artificial Sequence
  Description of Artificial Sequence: Synthetic oligonucleotide
gaugccccacuuguggucg

SEQ ID NO: 510892 - RNA, 19 nt, Artificial Sequence
  Description of Artificial Sequence: Synthetic oligonucleotide
ugaacucgacgccgaacag

SEQ ID NO: 510893 - RNA, 19 nt, Artificial Sequence
  Description of Artificial Sequence: Synthetic oligonucleotide
aagucgagauucugagaca

SEQ ID NO: 510894 - RNA, 19 nt, Artificial Sequence
  Description of Artificial Sequence: Synthetic oligonucleotide
guugacacagagauuucgc

SEQ ID NO: 510895 - RNA, 19 nt, Artificial Sequence
  Description of Artificial Sequence: Synthetic oligonucleotide
uaggccuccgacguguggg

SEQ ID NO: 510896 - RNA, 19 nt, Artificial Sequence
  Description of Artificial Sequence: Synthetic oligonucleotide
uccauugagcaagagugac

SEQ ID NO: 510897 - RNA, 19 nt, Artificial Sequence
  Description of Artificial Sequence: Synthetic oligonucleotide
uagcgagauguccauuccc

SEQ ID NO: 510898 - RNA, 19 nt, Artificial Sequence
  Description of Artificial Sequence: Synthetic oligonucleotide
uaguugucauggccggccg

SEQ ID NO: 510899 - RNA, 19 nt, Artificial Sequence
  Description of Artificial Sequence: Synthetic oligonucleotide
agaaggcggcacugaacgc

SEQ ID NO: 510900 - RNA, 19 nt, Artificial Sequence
  Description of Artificial Sequence: Synthetic oligonucleotide
caaaacgaccucuggggug

SEQ ID NO: 510901 - RNA, 19 nt, Artificial Sequence
  Description of Artificial Sequence: Synthetic oligonucleotide
agggcgucuccuuccaaac

SEQ ID NO: 510902 - RNA, 19 nt, Artificial Sequence
  Description of Artificial Sequence: Synthetic oligonucleotide
augucccuuccauugagca

SEQ ID NO: 510903 - RNA, 19 nt, Artificial Sequence
  Description of Artificial Sequence: Synthetic oligonucleotide
ggacaagaaugaaagggcg

SEQ ID NO: 510904 - RNA, 19 nt, Artificial Sequence
  Description of Artificial Sequence: Synthetic oligonucleotide
uggagaguguggccaaccc

SEQ ID NO: 510905 - RNA, 19 nt, Artificial Sequence
  Description of Artificial Sequence: Synthetic oligonucleotide
uuucgggaccauuuccucu

SEQ ID NO: 510906 - RNA, 19 nt, Artificial Sequence
  Description of Artificial Sequence: Synthetic oligonucleotide
ggcauguuauagauggugg

SEQ ID NO: 510907 - RNA, 19 nt, Artificial Sequence
  Description of Artificial Sequence: Synthetic oligonucleotide
uaaucgcagagcagggagu

SEQ ID NO: 510908 - RNA, 19 nt, Artificial Sequence
  Description of Artificial Sequence: Synthetic oligonucleotide
ccaaagucgagauucugag

SEQ ID NO: 510909 - RNA, 19 nt, Artificial Sequence
  Description of Artificial Sequence: Synthetic oligonucleotide
cuucgggucgcccuggaac

SEQ ID NO: 510910 - RNA, 19 nt, Artificial Sequence
  Description of Artificial Sequence: Synthetic oligonucleotide
ugagguacaucggucacuc

SEQ ID NO: 510911 - RNA, 19 nt, Artificial Sequence
  Description of Artificial Sequence: Synthetic oligonucleotide
ugguggaacagaggcgucg

SEQ ID NO: 510912 - RNA, 19 nt, Artificial Sequence
  Description of Artificial Sequence: Synthetic oligonucleotide
agagauuucgcagugccuu

SEQ ID NO: 510913 - RNA, 19 nt, Artificial Sequence
  Description of Artificial Sequence: Synthetic oligonucleotide
ucuccaggauagcugagua

SEQ ID NO: 510914 - RNA, 19 nt, Artificial Sequence
  Description of Artificial Sequence: Synthetic oligonucleotide
ggaugaggcaaacucguug

SEQ ID NO: 510915 - RNA, 19 nt, Artificial Sequence
  Description of Artificial Sequence: Synthetic oligonucleotide
cagcaaugccccuaucgcc

SEQ ID NO: 510916 - RNA, 19 nt, Artificial Sequence
  Description of Artificial Sequence: Synthetic oligonucleotide
uucgggucgcccuggaaca

SEQ ID NO: 510917 - RNA, 19 nt, Artificial Sequence
  Description of Artificial Sequence: Synthetic oligonucleotide
uuccaaaccuugagguaca

SEQ ID NO: 510918 - RNA, 19 nt, Artificial Sequence
  Description of Artificial Sequence: Synthetic oligonucleotide
ugccuugggcauguuauag

SEQ ID NO: 510919 - RNA, 19 nt, Artificial Sequence
  Description of Artificial Sequence: Synthetic oligonucleotide
uagaagguagggugucacc

SEQ ID NO: 510920 - RNA, 19 nt, Artificial Sequence
  Description of Artificial Sequence: Synthetic oligonucleotide
uaaguagcgagauguccau

SEQ ID NO: 510921 - RNA, 19 nt, Artificial Sequence
  Description of Artificial Sequence: Synthetic oligonucleotide
aagggcgucuccuuccaaa

SEQ ID NO: 510922 - RNA, 19 nt, Artificial Sequence
  Description of Artificial Sequence: Synthetic oligonucleotide
aacucgacgccgaacagaa

SEQ ID NO: 510923 - RNA, 19 nt, Artificial Sequence
  Description of Artificial Sequence: Synthetic oligonucleotide
uccgccaagacccgccaug

SEQ ID NO: 510924 - RNA, 19 nt, Artificial Sequence
  Description of Artificial Sequence: Synthetic oligonucleotide
uggucgguggcugugucag

SEQ ID NO: 510925 - RNA, 19 nt, Artificial Sequence
  Description of Artificial Sequence: Synthetic oligonucleotide
agaaccggagucacguacg

SEQ ID NO: 510926 - RNA, 19 nt, Artificial Sequence
  Description of Artificial Sequence: Synthetic oligonucleotide
aaccggagucacguacgcc

SEQ ID NO: 510927 - RNA, 19 nt, Artificial Sequence
  Description of Artificial Sequence: Synthetic oligonucleotide
ugauaggccuccgacgugu

SEQ ID NO: 510928 - RNA, 19 nt, Artificial Sequence
  Description of Artificial Sequence: Synthetic oligonucleotide
guaguugucauggccggcc

SEQ ID NO: 510929 - RNA, 19 nt, Artificial Sequence
  Description of Artificial Sequence: Synthetic oligonucleotide
cauucaggaggauguuggc

SEQ ID NO: 510930 - RNA, 19 nt, Artificial Sequence
  Description of Artificial Sequence: Synthetic oligonucleotide
aggagaaccggagucacgu

SEQ ID NO: 510931 - RNA, 19 nt, Artificial Sequence
  Description of Artificial Sequence: Synthetic oligonucleotide
gagguaggcgaugaaguac

SEQ ID NO: 510932 - RNA, 19 nt, Artificial Sequence
  Description of Artificial Sequence: Synthetic oligonucleotide
gagauuucgcagugccuug

SEQ ID NO: 510933 - RNA, 19 nt, Artificial Sequence
  Description of Artificial Sequence: Synthetic oligonucleotide
uucuuacucugguaguaau

SEQ ID NO: 510934 - RNA, 19 nt, Artificial Sequence
  Description of Artificial Sequence: Synthetic oligonucleotide
uuauccgcugagucugcgc

SEQ ID NO: 510935 - RNA, 19 nt, Artificial Sequence
  Description of Artificial Sequence: Synthetic oligonucleotide
cauuuaacaggaggggcug

SEQ ID NO: 510936 - RNA, 19 nt, Artificial Sequence
  Description of Artificial Sequence: Synthetic oligonucleotide
ggaauuucguaggugacac

SEQ ID NO: 510937 - RNA, 19 nt, Artificial Sequence
  Description of Artificial Sequence: Synthetic oligonucleotide
gaauccccgaggcccgugg

SEQ ID NO: 510938 - RNA, 19 nt, Artificial Sequence
  Description of Artificial Sequence: Synthetic oligonucleotide
cagagcguggagaacaaga

SEQ ID NO: 510939 - RNA, 19 nt, Artificial Sequence
  Description of Artificial Sequence: Synthetic oligonucleotide
guagcgagauguccauucc

SEQ ID NO: 510940 - RNA, 19 nt, Artificial Sequence
  Description of Artificial Sequence: Synthetic oligonucleotide
agaugacucggagcugacc

SEQ ID NO: 510941 - RNA, 19 nt, Artificial Sequence
  Description of Artificial Sequence: Synthetic oligonucleotide
auucccaugccacgccgag

SEQ ID NO: 510942 - RNA, 19 nt, Artificial Sequence
  Description of Artificial Sequence: Synthetic oligonucleotide
cucaaaugagagccacccc

SEQ ID NO: 510943 - RNA, 19 nt, Artificial Sequence
  Description of Artificial Sequence: Synthetic oligonucleotide
agauuucgcagugccuugg

SEQ ID NO: 510944 - RNA, 19 nt, Artificial Sequence
  Description of Artificial Sequence: Synthetic oligonucleotide
caucggucacuccaggcac

SEQ ID NO: 510945 - RNA, 19 nt, Artificial Sequence
  Description of Artificial Sequence: Synthetic oligonucleotide
uccaccgggccacacacau

SEQ ID NO: 510946 - RNA, 19 nt, Artificial Sequence
  Description of Artificial Sequence: Synthetic oligonucleotide
uucgggaccauuuccucua

SEQ ID NO: 510947 - RNA, 19 nt, Artificial Sequence
  Description of Artificial Sequence: Synthetic oligonucleotide
gaaccggagucacguacgc

SEQ ID NO: 510948 - RNA, 19 nt, Artificial Sequence
  Description of Artificial Sequence: Synthetic oligonucleotide
auugaagaccagcucccaa

SEQ ID NO: 510949 - RNA, 19 nt, Artificial Sequence
  Description of Artificial Sequence: Synthetic oligonucleotide
aucgccaggacaagaauga

SEQ ID NO: 510950 - RNA, 19 nt, Artificial Sequence
  Description of Artificial Sequence: Synthetic oligonucleotide
agucgagauucugagacau

SEQ ID NO: 510951 - RNA, 19 nt, Artificial Sequence
  Description of Artificial Sequence: Synthetic oligonucleotide
caugccacgccgagugccg

SEQ ID NO: 510952 - RNA, 19 nt, Artificial Sequence
  Description of Artificial Sequence: Synthetic oligonucleotide
acguagccgaacccuccgc

SEQ ID NO: 510953 - RNA, 19 nt, Artificial Sequence
  Description of Artificial Sequence: Synthetic oligonucleotide
guggcuuagagguguccag

SEQ ID NO: 510954 - RNA, 19 nt, Artificial Sequence
  Description of Artificial Sequence: Synthetic oligonucleotide
uucgcagugccuugggcau

SEQ ID NO: 510955 - RNA, 19 nt, Artificial Sequence
  Description of Artificial Sequence: Synthetic oligonucleotide
gaugcuaaucagggugagc

SEQ ID NO: 510956 - RNA, 19 nt, Artificial Sequence
  Description of Artificial Sequence: Synthetic oligonucleotide
augaaguacaggguacgga

SEQ ID NO: 510957 - RNA, 19 nt, Artificial Sequence
  Description of Artificial Sequence: Synthetic oligonucleotide
ucacguuccuucuccugcu

SEQ ID NO: 510958 - RNA, 19 nt, Artificial Sequence
  Description of Artificial Sequence: Synthetic oligonucleotide
agcaaugccccuaucgcca

SEQ ID NO: 510959 - RNA, 19 nt, Artificial Sequence
  Description of Artificial Sequence: Synthetic oligonucleotide
ugcuaaucagggugagcac

SEQ ID NO: 510960 - RNA, 19 nt, Artificial Sequence
  Description of Artificial Sequence: Synthetic oligonucleotide
agcuguuucaccaguggga

SEQ ID NO: 510961 - RNA, 19 nt, Artificial Sequence
  Description of Artificial Sequence: Synthetic oligonucleotide
guaggcgaugaaguacagg

SEQ ID NO: 510962 - RNA, 19 nt, Artificial Sequence
  Description of Artificial Sequence: Synthetic oligonucleotide
ccucaaaugagagccaccc

SEQ ID NO: 510963 - RNA, 19 nt, Artificial Sequence
  Description of Artificial Sequence: Synthetic oligonucleotide
agguaggcgaugaaguaca

SEQ ID NO: 510964 - RNA, 19 nt, Artificial Sequence
  Description of Artificial Sequence: Synthetic oligonucleotide
ccagugggaauuucguagg

SEQ ID NO: 510965 - RNA, 19 nt, Artificial Sequence
  Description of Artificial Sequence: Synthetic oligonucleotide
uuuguuugcugcugucguu

SEQ ID NO: 510966 - RNA, 19 nt, Artificial Sequence
  Description of Artificial Sequence: Synthetic oligonucleotide
auaggccuccgacgugugg

SEQ ID NO: 510967 - RNA, 19 nt, Artificial Sequence
  Description of Artificial Sequence: Synthetic oligonucleotide
uggucgggcaggcccaucu

SEQ ID NO: 510968 - RNA, 19 nt, Artificial Sequence
  Description of Artificial Sequence: Synthetic oligonucleotide
gacgccgaacagaaugcag

SEQ ID NO: 510969 - RNA, 19 nt, Artificial Sequence
  Description of Artificial Sequence: Synthetic oligonucleotide
gcuaaguagcgagaugucc

SEQ ID NO: 510970 - RNA, 19 nt, Artificial Sequence
  Description of Artificial Sequence: Synthetic oligonucleotide
ugucccuuccauugagcaa

SEQ ID NO: 510971 - RNA, 19 nt, Artificial Sequence
  Description of Artificial Sequence: Synthetic oligonucleotide
cacguagccgaacccuccg

SEQ ID NO: 510972 - RNA, 19 nt, Artificial Sequence
  Description of Artificial Sequence: Synthetic oligonucleotide
caucacaccguuggcacug

SEQ ID NO: 510973 - RNA, 19 nt, Artificial Sequence
  Description of Artificial Sequence: Synthetic oligonucleotide
agcgagauguccauuccca

SEQ ID NO: 510974 - RNA, 19 nt, Artificial Sequence
  Description of Artificial Sequence: Synthetic oligonucleotide
gaacgcguagauacacaug

SEQ ID NO: 510975 - RNA, 19 nt, Artificial Sequence
  Description of Artificial Sequence: Synthetic oligonucleotide
gacugcucgcuggagccgg

SEQ ID NO: 510976 - RNA, 19 nt, Artificial Sequence
  Description of Artificial Sequence: Synthetic oligonucleotide
caaccccgugcccaggccg

SEQ ID NO: 510977 - RNA, 19 nt, Artificial Sequence
  Description of Artificial Sequence: Synthetic oligonucleotide
cauguuauagaugguggaa

SEQ ID NO: 510978 - RNA, 19 nt, Artificial Sequence
  Description of Artificial Sequence: Synthetic oligonucleotide
uagcugaacucgacgccga

SEQ ID NO: 510979 - RNA, 19 nt, Artificial Sequence
  Description of Artificial Sequence: Synthetic oligonucleotide
guacaucacaccguuggca

SEQ ID NO: 510980 - RNA, 19 nt, Artificial Sequence
  Description of Artificial Sequence: Synthetic oligonucleotide
aguaaucgcagagcaggga

SEQ ID NO: 510981 - RNA, 19 nt, Artificial Sequence
  Description of Artificial Sequence: Synthetic oligonucleotide
ggauagcugaguagaaggc

SEQ ID NO: 510982 - RNA, 19 nt, Artificial Sequence
  Description of Artificial Sequence: Synthetic oligonucleotide
gcucucguauuucacacca

SEQ ID NO: 510983 - RNA, 19 nt, Artificial Sequence
  Description of Artificial Sequence: Synthetic oligonucleotide
uccucgucagcuguuucac

SEQ ID NO: 510984 - RNA, 19 nt, Artificial Sequence
  Description of Artificial Sequence: Synthetic oligonucleotide
agcuaaguagcgagauguc

SEQ ID NO: 510985 - RNA, 19 nt, Artificial Sequence
  Description of Artificial Sequence: Synthetic oligonucleotide
guugucauggccggccgug

SEQ ID NO: 510986 - RNA, 19 nt, Artificial Sequence
  Description of Artificial Sequence: Synthetic oligonucleotide
ggagaguguggccaacccc

SEQ ID NO: 510987 - RNA, 19 nt, Artificial Sequence
  Description of Artificial Sequence: Synthetic oligonucleotide
gucgcccuggaacaccacc

SEQ ID NO: 510988 - RNA, 19 nt, Artificial Sequence
  Description of Artificial Sequence: Synthetic oligonucleotide
gacguguggggugccuucg

SEQ ID NO: 510989 - RNA, 19 nt, Artificial Sequence
  Description of Artificial Sequence: Synthetic oligonucleotide
acgcguagauacacaugcc

SEQ ID NO: 510990 - RNA, 19 nt, Artificial Sequence
  Description of Artificial Sequence: Synthetic oligonucleotide
gaaguacaucacaccguug

SEQ ID NO: 510991 - RNA, 19 nt, Artificial Sequence
  Description of Artificial Sequence: Synthetic oligonucleotide
uggcagcuaaguagcgaga

SEQ ID NO: 510992 - RNA, 19 nt, Artificial Sequence
  Description of Artificial Sequence: Synthetic oligonucleotide
ggguuauccgcugagucug

SEQ ID NO: 510993 - RNA, 19 nt, Artificial Sequence
  Description of Artificial Sequence: Synthetic oligonucleotide
gccgguuuugucccagugg

SEQ ID NO: 510994 - RNA, 19 nt, Artificial Sequence
  Description of Artificial Sequence: Synthetic oligonucleotide
guuauccgcugagucugcg

SEQ ID NO: 510995 - RNA, 19 nt, Artificial Sequence
  Description of Artificial Sequence: Synthetic oligonucleotide
caaagucgagauucugaga

SEQ ID NO: 510996 - RNA, 19 nt, Artificial Sequence
  Description of Artificial Sequence: Synthetic oligonucleotide
gggcauguuauagauggug

SEQ ID NO: 510997 - RNA, 19 nt, Artificial Sequence
  Description of Artificial Sequence: Synthetic oligonucleotide
gaauuucguaggugacaca

SEQ ID NO: 510998 - RNA, 19 nt, Artificial Sequence
  Description of Artificial Sequence: Synthetic oligonucleotide
cugguuucgggaccauuuc

SEQ ID NO: 510999 - RNA, 19 nt, Artificial Sequence
  Description of Artificial Sequence: Synthetic oligonucleotide
gaagccgguuuugucccag

SEQ ID NO: 511000 - RNA, 19 nt, Artificial Sequence
  Description of Artificial Sequence: Synthetic oligonucleotide
gugcagagcguggagaaca

SEQ ID NO: 511001 - RNA, 19 nt, Artificial Sequence
  Description of Artificial Sequence: Synthetic oligonucleotide
ucgggaccauuuccucuag

SEQ ID NO: 511002 - RNA, 19 nt, Artificial Sequence
  Description of Artificial Sequence: Synthetic oligonucleotide
gaccacauacagguuccug

SEQ ID NO: 511003 - RNA, 19 nt, Artificial Sequence
  Description of Artificial Sequence: Synthetic oligonucleotide
ggucacaccgcuguuguac

SEQ ID NO: 511004 - RNA, 19 nt, Artificial Sequence
  Description of Artificial Sequence: Synthetic oligonucleotide
gcauguuauagauggugga

SEQ ID NO: 511005 - RNA, 19 nt, Artificial Sequence
  Description of Artificial Sequence: Synthetic oligonucleotide
aaacucguugaggccugug

SEQ ID NO: 511006 - RNA, 19 nt, Artificial Sequence
  Description of Artificial Sequence: Synthetic oligonucleotide
ugacugcucgcuggagccg

SEQ ID NO: 511007 - RNA, 19 nt, Artificial Sequence
  Description of Artificial Sequence: Synthetic oligonucleotide
agcauacccucaaaugaga

SEQ ID NO: 511008 - RNA, 19 nt, Artificial Sequence
  Description of Artificial Sequence: Synthetic oligonucleotide
agccgguuuugucccagug

SEQ ID NO: 511009 - RNA, 19 nt, Artificial Sequence
  Description of Artificial Sequence: Synthetic oligonucleotide
caggguacggacgcucagg

SEQ ID NO: 511010 - RNA, 19 nt, Artificial Sequence
  Description of Artificial Sequence: Synthetic oligonucleotide
uagccgaacccuccgccaa

SEQ ID NO: 511011 - RNA, 19 nt, Artificial Sequence
  Description of Artificial Sequence: Synthetic oligonucleotide
acaagaugccauagguggu

SEQ ID NO: 511012 - RNA, 19 nt, Artificial Sequence
  Description of Artificial Sequence: Synthetic oligonucleotide
uccgcugagucugcgcuga

SEQ ID NO: 511013 - RNA, 19 nt, Artificial Sequence
  Description of Artificial Sequence: Synthetic oligonucleotide
accccagaaagugguugac

SEQ ID NO: 511014 - RNA, 19 nt, Artificial Sequence
  Description of Artificial Sequence: Synthetic oligonucleotide
ugguugacacagagauuuc

SEQ ID NO: 511015 - RNA, 19 nt, Artificial Sequence
  Description of Artificial Sequence: Synthetic oligonucleotide
gacaagaaugaaagggcgu

SEQ ID NO: 511016 - RNA, 19 nt, Artificial Sequence
  Description of Artificial Sequence: Synthetic oligonucleotide
gacacacagggaggaguag

SEQ ID NO: 511017 - RNA, 19 nt, Artificial Sequence
  Description of Artificial Sequence: Synthetic oligonucleotide
acuggcagcuaaguagcga

SEQ ID NO: 511018 - RNA, 19 nt, Artificial Sequence
  Description of Artificial Sequence: Synthetic oligonucleotide
gucgggcaggcccaucugc

SEQ ID NO: 511019 - RNA, 19 nt, Artificial Sequence
  Description of Artificial Sequence: Synthetic oligonucleotide
guacgccgucuccauggcg

SEQ ID NO: 511020 - RNA, 19 nt, Artificial Sequence
  Description of Artificial Sequence: Synthetic oligonucleotide
caccucgcccaugaagucc

SEQ ID NO: 511021 - RNA, 19 nt, Artificial Sequence
  Description of Artificial Sequence: Synthetic oligonucleotide
caagacccgccaugagggc

SEQ ID NO: 511022 - RNA, 19 nt, Artificial Sequence
  Description of Artificial Sequence: Synthetic oligonucleotide
auuucguaggugacacaca

SEQ ID NO: 511023 - RNA, 19 nt, Artificial Sequence
  Description of Artificial Sequence: Synthetic oligonucleotide
ugucauggccggccgugaa

SEQ ID NO: 511024 - RNA, 19 nt, Artificial Sequence
  Description of Artificial Sequence: Synthetic oligonucleotide
cugaacgcguagauacaca

SEQ ID NO: 511025 - RNA, 19 nt, Artificial Sequence
  Description of Artificial Sequence: Synthetic oligonucleotide
cgcguagauacacaugccc

SEQ ID NO: 511026 - RNA, 19 nt, Artificial Sequence
  Description of Artificial Sequence: Synthetic oligonucleotide
acgaccucuggggugcaag

SEQ ID NO: 511027 - RNA, 19 nt, Artificial Sequence
  Description of Artificial Sequence: Synthetic oligonucleotide
aagccgguuuugucccagu

SEQ ID NO: 511028 - RNA, 19 nt, Artificial Sequence
  Description of Artificial Sequence: Synthetic oligonucleotide
ucacaccguuggcacugcc

SEQ ID NO: 511029 - RNA, 19 nt, Artificial Sequence
  Description of Artificial Sequence: Synthetic oligonucleotide
ucacguacgccgucuccau

SEQ ID NO: 511030 - RNA, 19 nt, Artificial Sequence
  Description of Artificial Sequence: Synthetic oligonucleotide
gucacguacgccgucucca

SEQ ID NO: 511031 - RNA, 19 nt, Artificial Sequence
  Description of Artificial Sequence: Synthetic oligonucleotide
cuguucugacugcucgcug

SEQ ID NO: 511032 - RNA, 19 nt, Artificial Sequence
  Description of Artificial Sequence: Synthetic oligonucleotide
uggccaaccccgugcccag

SEQ ID NO: 511033 - RNA, 19 nt, Artificial Sequence
  Description of Artificial Sequence: Synthetic oligonucleotide
ccuccaacaggacgggcgg

SEQ ID NO: 511034 - RNA, 19 nt, Artificial Sequence
  Description of Artificial Sequence: Synthetic oligonucleotide
gguccaccgggccacacac

SEQ ID NO: 511035 - RNA, 19 nt, Artificial Sequence
  Description of Artificial Sequence: Synthetic oligonucleotide
aguccaaagucgagauucu

SEQ ID NO: 511036 - RNA, 19 nt, Artificial Sequence
  Description of Artificial Sequence: Synthetic oligonucleotide
gagguacaucggucacucc

SEQ ID NO: 511037 - RNA, 19 nt, Artificial Sequence
  Description of Artificial Sequence: Synthetic oligonucleotide
cacaccgcuguuguacuuc

SEQ ID NO: 511038 - RNA, 19 nt, Artificial Sequence
  Description of Artificial Sequence: Synthetic oligonucleotide
acgccgagugccgucugcg

SEQ ID NO: 511039 - RNA, 19 nt, Artificial Sequence
  Description of Artificial Sequence: Synthetic oligonucleotide
aggucacguuccuucuccu

SEQ ID NO: 511040 - RNA, 19 nt, Artificial Sequence
  Description of Artificial Sequence: Synthetic oligonucleotide
ggcgcugcugggcagcgcc

SEQ ID NO: 511041 - RNA, 19 nt, Artificial Sequence
  Description of Artificial Sequence: Synthetic oligonucleotide
guaagcguggcugggguua

SEQ ID NO: 511042 - RNA, 19 nt, Artificial Sequence
  Description of Artificial Sequence: Synthetic oligonucleotide
cugauaggccuccgacgug

SEQ ID NO: 511043 - RNA, 19 nt, Artificial Sequence
  Description of Artificial Sequence: Synthetic oligonucleotide
uguuccucgucagcuguuu

SEQ ID NO: 511044 - RNA, 19 nt, Artificial Sequence
  Description of Artificial Sequence: Synthetic oligonucleotide
gguggaacagaggcgucgc

SEQ ID NO: 511045 - RNA, 19 nt, Artificial Sequence
  Description of Artificial Sequence: Synthetic oligonucleotide
aguacaggguacggacgcu

SEQ ID NO: 511046 - RNA, 19 nt, Artificial Sequence
  Description of Artificial Sequence: Synthetic oligonucleotide
cacugaacgcguagauaca

SEQ ID NO: 511047 - RNA, 19 nt, Artificial Sequence
  Description of Artificial Sequence: Synthetic oligonucleotide
gccgugaagcagucgauga

SEQ ID NO: 511048 - RNA, 19 nt, Artificial Sequence
  Description of Artificial Sequence: Synthetic oligonucleotide
gccccaagaccagagagac

SEQ ID NO: 511049 - RNA, 19 nt, Artificial Sequence
  Description of Artificial Sequence: Synthetic oligonucleotide
guacaggguacggacgcuc

SEQ ID NO: 511050 - RNA, 19 nt, Artificial Sequence
  Description of Artificial Sequence: Synthetic oligonucleotide
gagucacguacgccgucuc

SEQ ID NO: 511051 - RNA, 19 nt, Artificial Sequence
  Description of Artificial Sequence: Synthetic oligonucleotide
ccgguuuugucccagugga

SEQ ID NO: 511052 - RNA, 19 nt, Artificial Sequence
  Description of Artificial Sequence: Synthetic oligonucleotide
ccggggaaagcugacacug

SEQ ID NO: 511053 - RNA, 19 nt, Artificial Sequence
  Description of Artificial Sequence: Synthetic oligonucleotide
aggcgucgcagggacagug

SEQ ID NO: 511054 - RNA, 19 nt, Artificial Sequence
  Description of Artificial Sequence: Synthetic oligonucleotide
cucgguccugguccaccgg

SEQ ID NO: 511055 - RNA, 19 nt, Artificial Sequence
  Description of Artificial Sequence: Synthetic oligonucleotide
aaguagcgagauguccauu

SEQ ID NO: 511056 - RNA, 19 nt, Artificial Sequence
  Description of Artificial Sequence: Synthetic oligonucleotide
guggccaaccccgugccca

SEQ ID NO: 511057 - RNA, 19 nt, Artificial Sequence
  Description of Artificial Sequence: Synthetic oligonucleotide
cauucccaugccacgccga

SEQ ID NO: 511058 - RNA, 19 nt, Artificial Sequence
  Description of Artificial Sequence: Synthetic oligonucleotide
aucgcagagcagggaguag

SEQ ID NO: 511059 - RNA, 19 nt, Artificial Sequence
  Description of Artificial Sequence: Synthetic oligonucleotide
cguagcugaacucgacgcc

SEQ ID NO: 511060 - RNA, 19 nt, Artificial Sequence
  Description of Artificial Sequence: Synthetic oligonucleotide
ccauucccaugccacgccg

SEQ ID NO: 511061 - RNA, 19 nt, Artificial Sequence
  Description of Artificial Sequence: Synthetic oligonucleotide
augguggaacagaggcguc

SEQ ID NO: 511062 - RNA, 19 nt, Artificial Sequence
  Description of Artificial Sequence: Synthetic oligonucleotide
ggggugcaaguccccaaag

SEQ ID NO: 511063 - RNA, 19 nt, Artificial Sequence
  Description of Artificial Sequence: Synthetic oligonucleotide
ggggcugaugaaccacacc

SEQ ID NO: 511064 - RNA, 19 nt, Artificial Sequence
  Description of Artificial Sequence: Synthetic oligonucleotide
ucgcuggagccggucaacu

SEQ ID NO: 511065 - RNA, 19 nt, Artificial Sequence
  Description of Artificial Sequence: Synthetic oligonucleotide
aaccccgugcccaggccga

SEQ ID NO: 511066 - RNA, 19 nt, Artificial Sequence
  Description of Artificial Sequence: Synthetic oligonucleotide
gccgaaggagagguaggcg

SEQ ID NO: 511067 - RNA, 19 nt, Artificial Sequence
  Description of Artificial Sequence: Synthetic oligonucleotide
ugccuucgggucgcccugg

SEQ ID NO: 511068 - RNA, 19 nt, Artificial Sequence
  Description of Artificial Sequence: Synthetic oligonucleotide
cgccgaacagaaugcagcc

SEQ ID NO: 511069 - RNA, 19 nt, Artificial Sequence
  Description of Artificial Sequence: Synthetic oligonucleotide
gacugaaggucacguuccu

SEQ ID NO: 511070 - RNA, 19 nt, Artificial Sequence
  Description of Artificial Sequence: Synthetic oligonucleotide
cacguacgccgucuccaug

SEQ ID NO: 511071 - RNA, 19 nt, Artificial Sequence
  Description of Artificial Sequence: Synthetic oligonucleotide
ucacaccgcuguuguacuu

SEQ ID NO: 511072 - RNA, 19 nt, Artificial Sequence
  Description of Artificial Sequence: Synthetic oligonucleotide
gucguuuauuuaccacaua

SEQ ID NO: 511073 - RNA, 19 nt, Artificial Sequence
  Description of Artificial Sequence: Synthetic oligonucleotide
ucgccaggacaagaaugaa

SEQ ID NO: 511074 - RNA, 19 nt, Artificial Sequence
  Description of Artificial Sequence: Synthetic oligonucleotide
gggcgucuccuuccaaacc

SEQ ID NO: 511075 - RNA, 19 nt, Artificial Sequence
  Description of Artificial Sequence: Synthetic oligonucleotide
uccaaaccuugagguacau

SEQ ID NO: 511076 - RNA, 19 nt, Artificial Sequence
  Description of Artificial Sequence: Synthetic oligonucleotide
aagcguggcugggguuauc

SEQ ID NO: 511077 - RNA, 19 nt, Artificial Sequence
  Description of Artificial Sequence: Synthetic oligonucleotide
cccucaaaugagagccacc

SEQ ID NO: 511078 - RNA, 19 nt, Artificial Sequence
  Description of Artificial Sequence: Synthetic oligonucleotide
gggguuauccgcugagucu

SEQ ID NO: 511079 - RNA, 19 nt, Artificial Sequence
  Description of Artificial Sequence: Synthetic oligonucleotide
agugguugacacagagauu

SEQ ID NO: 511080 - RNA, 19 nt, Artificial Sequence
  Description of Artificial Sequence: Synthetic oligonucleotide
uaagcguggcugggguuau

SEQ ID NO: 511081 - RNA, 19 nt, Artificial Sequence
  Description of Artificial Sequence: Synthetic oligonucleotide
ccauugagcaagagugaca

SEQ ID NO: 511082 - RNA, 19 nt, Artificial Sequence
  Description of Artificial Sequence: Synthetic oligonucleotide
caccagugggaauuucgua

SEQ ID NO: 511083 - RNA, 19 nt, Artificial Sequence
  Description of Artificial Sequence: Synthetic oligonucleotide
cacauccgggagagccaag

SEQ ID NO: 511084 - RNA, 19 nt, Artificial Sequence
  Description of Artificial Sequence: Synthetic oligonucleotide
gccccuaucgccaggacaa

SEQ ID NO: 511085 - RNA, 19 nt, Artificial Sequence
  Description of Artificial Sequence: Synthetic oligonucleotide
ggucaacucgcucucguau

SEQ ID NO: 511086 - RNA, 19 nt, Artificial Sequence
  Description of Artificial Sequence: Synthetic oligonucleotide
gguaggcgaugaaguacag

SEQ ID NO: 511087 - RNA, 19 nt, Artificial Sequence
  Description of Artificial Sequence: Synthetic oligonucleotide
gguuucgggaccauuuccu

SEQ ID NO: 511088 - RNA, 19 nt, Artificial Sequence
  Description of Artificial Sequence: Synthetic oligonucleotide
cucgcuggagccggucaac

SEQ ID NO: 511089 - RNA, 19 nt, Artificial Sequence
  Description of Artificial Sequence: Synthetic oligonucleotide
gcgucgcagggacaguggc

SEQ ID NO: 511090 - RNA, 19 nt, Artificial Sequence
  Description of Artificial Sequence: Synthetic oligonucleotide
gcguggcugggguuauccg

SEQ ID NO: 511091 - RNA, 19 nt, Artificial Sequence
  Description of Artificial Sequence: Synthetic oligonucleotide
gucaacucgcucucguauu

SEQ ID NO: 511092 - RNA, 19 nt, Artificial Sequence
  Description of Artificial Sequence: Synthetic oligonucleotide
ggccgugaagcagucgaug

SEQ ID NO: 511093 - RNA, 19 nt, Artificial Sequence
  Description of Artificial Sequence: Synthetic oligonucleotide
agaauccccgaggcccgug

SEQ ID NO: 511094 - RNA, 19 nt, Artificial Sequence
  Description of Artificial Sequence: Synthetic oligonucleotide
gucgagauucugagacauc

SEQ ID NO: 511095 - RNA, 19 nt, Artificial Sequence
  Description of Artificial Sequence: Synthetic oligonucleotide
cagagauuucgcagugccu

SEQ ID NO: 511096 - RNA, 19 nt, Artificial Sequence
  Description of Artificial Sequence: Synthetic oligonucleotide
ggcgucgcagggacagugg

SEQ ID NO: 511097 - RNA, 19 nt, Artificial Sequence
  Description of Artificial Sequence: Synthetic oligonucleotide
aggcugcagcaggaauccg

SEQ ID NO: 511098 - RNA, 19 nt, Artificial Sequence
  Description of Artificial Sequence: Synthetic oligonucleotide
ccagcucccaaaacgaccu

SEQ ID NO: 511099 - RNA, 19 nt, Artificial Sequence
  Description of Artificial Sequence: Synthetic oligonucleotide
cccgugcccaggccgaagg

SEQ ID NO: 511100 - RNA, 19 nt, Artificial Sequence
  Description of Artificial Sequence: Synthetic oligonucleotide
cagagggacaggaccacau

SEQ ID NO: 511101 - RNA, 19 nt, Artificial Sequence
  Description of Artificial Sequence: Synthetic oligonucleotide
cuaucgccaggacaagaau

SEQ ID NO: 511102 - RNA, 19 nt, Artificial Sequence
  Description of Artificial Sequence: Synthetic oligonucleotide
ucgggucgcccuggaacac

SEQ ID NO: 511103 - RNA, 19 nt, Artificial Sequence
  Description of Artificial Sequence: Synthetic oligonucleotide
gccuccgacguguggggug

SEQ ID NO: 511104 - RNA, 19 nt, Artificial Sequence
  Description of Artificial Sequence: Synthetic oligonucleotide
gccaaccccgugcccaggc

SEQ ID NO: 511105 - RNA, 19 nt, Artificial Sequence
  Description of Artificial Sequence: Synthetic oligonucleotide
uacggacgcucaggcaguc

SEQ ID NO: 511106 - RNA, 19 nt, Artificial Sequence
  Description of Artificial Sequence: Synthetic oligonucleotide
gguuauccgcugagucugc

SEQ ID NO: 511107 - RNA, 19 nt, Artificial Sequence
  Description of Artificial Sequence: Synthetic oligonucleotide
ggugccuucgggucgcccu

SEQ ID NO: 511108 - RNA, 19 nt, Artificial Sequence
  Description of Artificial Sequence: Synthetic oligonucleotide
uccgacguguggggugccu

SEQ ID NO: 511109 - RNA, 19 nt, Artificial Sequence
  Description of Artificial Sequence: Synthetic oligonucleotide
ccggccgugaagcagucga

SEQ ID NO: 511110 - RNA, 19 nt, Artificial Sequence
  Description of Artificial Sequence: Synthetic oligonucleotide
ggaggaguagaggcagcca

SEQ ID NO: 511111 - RNA, 19 nt, Artificial Sequence
  Description of Artificial Sequence: Synthetic oligonucleotide
gggugcaaguccccaaagu

SEQ ID NO: 511112 - RNA, 19 nt, Artificial Sequence
  Description of Artificial Sequence: Synthetic oligonucleotide
aacgaccucuggggugcaa

SEQ ID NO: 511113 - RNA, 19 nt, Artificial Sequence
  Description of Artificial Sequence: Synthetic oligonucleotide
ggucgggcaggcccaucug

SEQ ID NO: 511114 - RNA, 19 nt, Artificial Sequence
  Description of Artificial Sequence: Synthetic oligonucleotide
cgcucucguauuucacacc

SEQ ID NO: 511115 - RNA, 19 nt, Artificial Sequence
  Description of Artificial Sequence: Synthetic oligonucleotide
gcagagcguggagaacaag

SEQ ID NO: 511116 - RNA, 19 nt, Artificial Sequence
  Description of Artificial Sequence: Synthetic oligonucleotide
cagugggaauuucguaggu

SEQ ID NO: 511117 - RNA, 19 nt, Artificial Sequence
  Description of Artificial Sequence: Synthetic oligonucleotide
gcgccagguaguugucaug

SEQ ID NO: 511118 - RNA, 19 nt, Artificial Sequence
  Description of Artificial Sequence: Synthetic oligonucleotide
ccuccgacguguggggugc

SEQ ID NO: 511119 - RNA, 19 nt, Artificial Sequence
  Description of Artificial Sequence: Synthetic oligonucleotide
ccuuccaaaccuugaggua

SEQ ID NO: 511120 - RNA, 19 nt, Artificial Sequence
  Description of Artificial Sequence: Synthetic oligonucleotide
agcagucgaugagcacgcu

SEQ ID NO: 511121 - RNA, 19 nt, Artificial Sequence
  Description of Artificial Sequence: Synthetic oligonucleotide
ggcacugaacgcguagaua

SEQ ID NO: 511122 - RNA, 19 nt, Artificial Sequence
  Description of Artificial Sequence: Synthetic oligonucleotide
ccaugaaguccguguaaaa

SEQ ID NO: 511123 - RNA, 19 nt, Artificial Sequence
  Description of Artificial Sequence: Synthetic oligonucleotide
ccaaaacgaccucuggggu

SEQ ID NO: 511124 - RNA, 19 nt, Artificial Sequence
  Description of Artificial Sequence: Synthetic oligonucleotide
augccacgccgagugccgu

SEQ ID NO: 511125 - RNA, 19 nt, Artificial Sequence
  Description of Artificial Sequence: Synthetic oligonucleotide
gccgaacagaaugcagcca

SEQ ID NO: 511126 - RNA, 19 nt, Artificial Sequence
  Description of Artificial Sequence: Synthetic oligonucleotide
guacggacgcucaggcagu

SEQ ID NO: 511127 - RNA, 19 nt, Artificial Sequence
  Description of Artificial Sequence: Synthetic oligonucleotide
caguggugacacucagggu

SEQ ID NO: 511128 - RNA, 19 nt, Artificial Sequence
  Description of Artificial Sequence: Synthetic oligonucleotide
ggagucacguacgccgucu

SEQ ID NO: 511129 - RNA, 19 nt, Artificial Sequence
  Description of Artificial Sequence: Synthetic oligonucleotide
ggagaaccggagucacgua

SEQ ID NO: 511130 - RNA, 19 nt, Artificial Sequence
  Description of Artificial Sequence: Synthetic oligonucleotide
cucucguauuucacaccau

SEQ ID NO: 511131 - RNA, 19 nt, Artificial Sequence
  Description of Artificial Sequence: Synthetic oligonucleotide
gccggucaacucgcucucg

SEQ ID NO: 511132 - RNA, 19 nt, Artificial Sequence
  Description of Artificial Sequence: Synthetic oligonucleotide
cagaggcgucgcagggaca

SEQ ID NO: 511133 - RNA, 19 nt, Artificial Sequence
  Description of Artificial Sequence: Synthetic oligonucleotide
ggcacccaacagaggcugc

SEQ ID NO: 511134 - RNA, 19 nt, Artificial Sequence
  Description of Artificial Sequence: Synthetic oligonucleotide
cguacgccgucuccauggc

SEQ ID NO: 511135 - RNA, 19 nt, Artificial Sequence
  Description of Artificial Sequence: Synthetic oligonucleotide
cuguuucaccagugggaau

SEQ ID NO: 511136 - RNA, 19 nt, Artificial Sequence
  Description of Artificial Sequence: Synthetic oligonucleotide
cuccgacguguggggugcc

SEQ ID NO: 511137 - RNA, 19 nt, Artificial Sequence
  Description of Artificial Sequence: Synthetic oligonucleotide
ggggcgcugcugggcagcg

SEQ ID NO: 511138 - RNA, 19 nt, Artificial Sequence
  Description of Artificial Sequence: Synthetic oligonucleotide
cccaugccacgccgagugc

SEQ ID NO: 511139 - RNA, 19 nt, Artificial Sequence
  Description of Artificial Sequence: Synthetic oligonucleotide
ccccagaaagugguugaca

SEQ ID NO: 511140 - RNA, 19 nt, Artificial Sequence
  Description of Artificial Sequence: Synthetic oligonucleotide
gcgagauguccauucccau

SEQ ID NO: 511141 - RNA, 19 nt, Artificial Sequence
  Description of Artificial Sequence: Synthetic oligonucleotide
acucgacgccgaacagaau

SEQ ID NO: 511142 - RNA, 19 nt, Artificial Sequence
  Description of Artificial Sequence: Synthetic oligonucleotide
cgacguguggggugccuuc

SEQ ID NO: 511143 - RNA, 19 nt, Artificial Sequence
  Description of Artificial Sequence: Synthetic oligonucleotide
guccaccgggccacacaca

SEQ ID NO: 511144 - RNA, 19 nt, Artificial Sequence
  Description of Artificial Sequence: Synthetic oligonucleotide
cgagugccgucugcgcugg

SEQ ID NO: 511145 - RNA, 19 nt, Artificial Sequence
  Description of Artificial Sequence: Synthetic oligonucleotide
ggccaaccccgugcccagg

SEQ ID NO: 511146 - RNA, 19 nt, Artificial Sequence
  Description of Artificial Sequence: Synthetic oligonucleotide
cccuaucgccaggacaaga

SEQ ID NO: 511147 - RNA, 19 nt, Artificial Sequence
  Description of Artificial Sequence: Synthetic oligonucleotide
ccaccgggccacacacauc

SEQ ID NO: 511148 - RNA, 19 nt, Artificial Sequence
  Description of Artificial Sequence: Synthetic oligonucleotide
ccacauccgggagagccaa

SEQ ID NO: 511149 - RNA, 19 nt, Artificial Sequence
  Description of Artificial Sequence: Synthetic oligonucleotide
gagugccgucugcgcugga

SEQ ID NO: 511150 - RNA, 19 nt, Artificial Sequence
  Description of Artificial Sequence: Synthetic oligonucleotide
cuggucgggcaggcccauc

SEQ ID NO: 511151 - RNA, 19 nt, Artificial Sequence
  Description of Artificial Sequence: Synthetic oligonucleotide
ccgccaagacccgccauga

SEQ ID NO: 511152 - RNA, 19 nt, Artificial Sequence
  Description of Artificial Sequence: Synthetic oligonucleotide
cccgccaugagggcaugga

SEQ ID NO: 511153 - RNA, 19 nt, Artificial Sequence
  Description of Artificial Sequence: Synthetic oligonucleotide
caaacucguugaggccugu

SEQ ID NO: 511154 - RNA, 19 nt, Artificial Sequence
  Description of Artificial Sequence: Synthetic oligonucleotide
ccccuaucgccaggacaag

SEQ ID NO: 511155 - RNA, 19 nt, Artificial Sequence
  Description of Artificial Sequence: Synthetic oligonucleotide
gaggcgucgcagggacagu

SEQ ID NO: 511156 - RNA, 19 nt, Artificial Sequence
  Description of Artificial Sequence: Synthetic oligonucleotide
cggagucacguacgccguc

SEQ ID NO: 511157 - RNA, 19 nt, Artificial Sequence
  Description of Artificial Sequence: Synthetic oligonucleotide
cacacacagucaggaggau

SEQ ID NO: 511158 - RNA, 19 nt, Artificial Sequence
  Description of Artificial Sequence: Synthetic oligonucleotide
ggccaucccaaugucccuu

SEQ ID NO: 511159 - RNA, 19 nt, Artificial Sequence
  Description of Artificial Sequence: Synthetic oligonucleotide
ccggucaacucgcucucgu

SEQ ID NO: 511160 - RNA, 19 nt, Artificial Sequence
  Description of Artificial Sequence: Synthetic oligonucleotide
cccggggaaagcugacacu

SEQ ID NO: 511161 - RNA, 19 nt, Artificial Sequence
  Description of Artificial Sequence: Synthetic oligonucleotide
ccacuuguggucgguggcu

SEQ ID NO: 511162 - RNA, 19 nt, Artificial Sequence
  Description of Artificial Sequence: Synthetic oligonucleotide
cgacgccgaacagaaugca

SEQ ID NO: 511163 - RNA, 19 nt, Artificial Sequence
  Description of Artificial Sequence: Synthetic oligonucleotide
cuccgccaagacccgccau

SEQ ID NO: 511164 - RNA, 19 nt, Artificial Sequence
  Description of Artificial Sequence: Synthetic oligonucleotide
cgaagccgguuuuguccca

SEQ ID NO: 511165 - RNA, 19 nt, Artificial Sequence
  Description of Artificial Sequence: Synthetic oligonucleotide
gcgcuggacccugcaaacu

SEQ ID NO: 511166 - RNA, 19 nt, Artificial Sequence
  Description of Artificial Sequence: Synthetic oligonucleotide
gggcgcugcugggcagcgc

SEQ ID NO: 511167 - RNA, 19 nt, Artificial Sequence
  Description of Artificial Sequence: Synthetic oligonucleotide
ccgccaugagggcauggau

SEQ ID NO: 511168 - RNA, 19 nt, Artificial Sequence
  Description of Artificial Sequence: Synthetic oligonucleotide
ggccuccgacguguggggu

SEQ ID NO: 511169 - RNA, 19 nt, Artificial Sequence
  Description of Artificial Sequence: Synthetic oligonucleotide
cgguuuugucccaguggau

SEQ ID NO: 511170 - RNA, 19 nt, Artificial Sequence
  Description of Artificial Sequence: Synthetic oligonucleotide
cggcacugaacgcguagau

SEQ ID NO: 511171 - RNA, 19 nt, Artificial Sequence
  Description of Artificial Sequence: Synthetic oligonucleotide
cugcugguuucgggaccau

SEQ ID NO: 511172 - RNA, 19 nt, Artificial Sequence
  Description of Artificial Sequence: Synthetic oligonucleotide
cggccgugaagcagucgau

SEQ ID NO: 511173 - RNA, 19 nt, Artificial Sequence
  Description of Artificial Sequence: Synthetic oligonucleotide
ccgacguguggggugccuu

SEQ ID NO: 511174 - RNA, 19 nt, Artificial Sequence
  Description of Artificial Sequence: Synthetic oligonucleotide
auagucuacauuuagugac

SEQ ID NO: 511175 - RNA, 19 nt, Artificial Sequence
  Description of Artificial Sequence: Synthetic oligonucleotide
aauuaagugauuuucuacu

SEQ ID NO: 511176 - RNA, 19 nt, Artificial Sequence
  Description of Artificial Sequence: Synthetic oligonucleotide
aaugcguuagaacuaaugu

SEQ ID NO: 511177 - RNA, 19 nt, Artificial Sequence
  Description of Artificial Sequence: Synthetic oligonucleotide
cauguuauaguuuaacagc

SEQ ID NO: 511178 - RNA, 19 nt, Artificial Sequence
  Description of Artificial Sequence: Synthetic oligonucleotide
uguaauuauacauuucaug

SEQ ID NO: 511179 - RNA, 19 nt, Artificial Sequence
  Description of Artificial Sequence: Synthetic oligonucleotide
ugaguauuggaaauccucg

SEQ ID NO: 511180 - RNA, 19 nt, Artificial Sequence
  Description of Artificial Sequence: Synthetic oligonucleotide
aaguugcccaaauagacuc

SEQ ID NO: 511181 - RNA, 19 nt, Artificial Sequence
  Description of Artificial Sequence: Synthetic oligonucleotide
aauaaccucauaacaauac

SEQ ID NO: 511182 - RNA, 19 nt, Artificial Sequence
  Description of Artificial Sequence: Synthetic oligonucleotide
uuagaacuaauguacaaug

SEQ ID NO: 511183 - RNA, 19 nt, Artificial Sequence
  Description of Artificial Sequence: Synthetic oligonucleotide
uuguccuuaauaaauaacu

SEQ ID NO: 511184 - RNA, 19 nt, Artificial Sequence
  Description of Artificial Sequence: Synthetic oligonucleotide
aaguuauagacauauuggu

SEQ ID NO: 511185 - RNA, 19 nt, Artificial Sequence
  Description of Artificial Sequence: Synthetic oligonucleotide
augaagaugcaacugguac

SEQ ID NO: 511186 - RNA, 19 nt, Artificial Sequence
  Description of Artificial Sequence: Synthetic oligonucleotide
ugcguuagaacuaauguac

SEQ ID NO: 511187 - RNA, 19 nt, Artificial Sequence
  Description of Artificial Sequence: Synthetic oligonucleotide
caauucaauagcaaggaag

SEQ ID NO: 511188 - RNA, 19 nt, Artificial Sequence
  Description of Artificial Sequence: Synthetic oligonucleotide
caaucuaccaucauagaag

SEQ ID NO: 511189 - RNA, 19 nt, Artificial Sequence
  Description of Artificial Sequence: Synthetic oligonucleotide
uuuauuuagucagucauug

SEQ ID NO: 511190 - RNA, 19 nt, Artificial Sequence
  Description of Artificial Sequence: Synthetic oligonucleotide
uaaaugaguauucacaauu

SEQ ID NO: 511191 - RNA, 19 nt, Artificial Sequence
  Description of Artificial Sequence: Synthetic oligonucleotide
auuuagaagaaauuaaguu

SEQ ID NO: 511192 - RNA, 19 nt, Artificial Sequence
  Description of Artificial Sequence: Synthetic oligonucleotide
uguagaguuuuauugaaac

SEQ ID NO: 511193 - RNA, 19 nt, Artificial Sequence
  Description of Artificial Sequence: Synthetic oligonucleotide
aaugcacaaacaaucuacc

SEQ ID NO: 511194 - RNA, 19 nt, Artificial Sequence
  Description of Artificial Sequence: Synthetic oligonucleotide
aguuuaucuacacaguucu

SEQ ID NO: 511195 - RNA, 19 nt, Artificial Sequence
  Description of Artificial Sequence: Synthetic oligonucleotide
uaaccucauaacaauacag

SEQ ID NO: 511196 - RNA, 19 nt, Artificial Sequence
  Description of Artificial Sequence: Synthetic oligonucleotide
aaagacuugcccugcacag

SEQ ID NO: 511197 - RNA, 19 nt, Artificial Sequence
  Description of Artificial Sequence: Synthetic oligonucleotide
uauacagucaauagucuac

SEQ ID NO: 511198 - RNA, 19 nt, Artificial Sequence
  Description of Artificial Sequence: Synthetic oligonucleotide
aaucuaccaucauagaagu

SEQ ID NO: 511199 - RNA, 19 nt, Artificial Sequence
  Description of Artificial Sequence: Synthetic oligonucleotide
agcgcaaagugcuacaagg

SEQ ID NO: 511200 - RNA, 19 nt, Artificial Sequence
  Description of Artificial Sequence: Synthetic oligonucleotide
gauuuugauccauagcagc

SEQ ID NO: 511201 - RNA, 19 nt, Artificial Sequence
  Description of Artificial Sequence: Synthetic oligonucleotide
uuuagucagucauuguuag

SEQ ID NO: 511202 - RNA, 19 nt, Artificial Sequence
  Description of Artificial Sequence: Synthetic oligonucleotide
acuaauguacaaugcacag

SEQ ID NO: 511203 - RNA, 19 nt, Artificial Sequence
  Description of Artificial Sequence: Synthetic oligonucleotide
ugggcaauagcccaaagaa

SEQ ID NO: 511204 - RNA, 19 nt, Artificial Sequence
  Description of Artificial Sequence: Synthetic oligonucleotide
ugauuuugauccauagcag

SEQ ID NO: 511205 - RNA, 19 nt, Artificial Sequence
  Description of Artificial Sequence: Synthetic oligonucleotide
gaagaaauuaaguucucuc

SEQ ID NO: 511206 - RNA, 19 nt, Artificial Sequence
  Description of Artificial Sequence: Synthetic oligonucleotide
aaaugaguauucacaauuc

SEQ ID NO: 511207 - RNA, 19 nt, Artificial Sequence
  Description of Artificial Sequence: Synthetic oligonucleotide
ucaguuauuuuaaaccuuc

SEQ ID NO: 511208 - RNA, 19 nt, Artificial Sequence
  Description of Artificial Sequence: Synthetic oligonucleotide
uuaguaucaaaaucuuucu

SEQ ID NO: 511209 - RNA, 19 nt, Artificial Sequence
  Description of Artificial Sequence: Synthetic oligonucleotide
aguaucaaaaucuuucuua

SEQ ID NO: 511210 - RNA, 19 nt, Artificial Sequence
  Description of Artificial Sequence: Synthetic oligonucleotide
aguguuauccgaguacugc

SEQ ID NO: 511211 - RNA, 19 nt, Artificial Sequence
  Description of Artificial Sequence: Synthetic oligonucleotide
ucucuauacagucaauagu

SEQ ID NO: 511212 - RNA, 19 nt, Artificial Sequence
  Description of Artificial Sequence: Synthetic oligonucleotide
auagcugaagauuugguau

SEQ ID NO: 511213 - RNA, 19 nt, Artificial Sequence
  Description of Artificial Sequence: Synthetic oligonucleotide
uuuugucuaccacacgaag

SEQ ID NO: 511214 - RNA, 19 nt, Artificial Sequence
  Description of Artificial Sequence: Synthetic oligonucleotide
ugacauguaacacuuccac

SEQ ID NO: 511215 - RNA, 19 nt, Artificial Sequence
  Description of Artificial Sequence: Synthetic oligonucleotide
acaucaaacacuaagcacu

SEQ ID NO: 511216 - RNA, 19 nt, Artificial Sequence
  Description of Artificial Sequence: Synthetic oligonucleotide
ugauccauagcagcaaagg

SEQ ID NO: 511217 - RNA, 19 nt, Artificial Sequence
  Description of Artificial Sequence: Synthetic oligonucleotide
aagagcaugccacaaaaua

SEQ ID NO: 511218 - RNA, 19 nt, Artificial Sequence
  Description of Artificial Sequence: Synthetic oligonucleotide
ucuuucuuacacuguagag

SEQ ID NO: 511219 - RNA, 19 nt, Artificial Sequence
  Description of Artificial Sequence: Synthetic oligonucleotide
aaguuuaucuacacaguuc

SEQ ID NO: 511220 - RNA, 19 nt, Artificial Sequence
  Description of Artificial Sequence: Synthetic oligonucleotide
uccauagcagcaaaggcac

SEQ ID NO: 511221 - RNA, 19 nt, Artificial Sequence
  Description of Artificial Sequence: Synthetic oligonucleotide
auacaaugcaccuucauua

SEQ ID NO: 511222 - RNA, 19 nt, Artificial Sequence
  Description of Artificial Sequence: Synthetic oligonucleotide
acauccaacuaagacaugg

SEQ ID NO: 511223 - RNA, 19 nt, Artificial Sequence
  Description of Artificial Sequence: Synthetic oligonucleotide
cacaaaauagccugccacg

SEQ ID NO: 511224 - RNA, 19 nt, Artificial Sequence
  Description of Artificial Sequence: Synthetic oligonucleotide
uaguaaguuauuuauguuu

SEQ ID NO: 511225 - RNA, 19 nt, Artificial Sequence
  Description of Artificial Sequence: Synthetic oligonucleotide
uaaguugucaucacucuuc

SEQ ID NO: 511226 - RNA, 19 nt, Artificial Sequence
  Description of Artificial Sequence: Synthetic oligonucleotide
acauuucaugucucuauac

SEQ ID NO: 511227 - RNA, 19 nt, Artificial Sequence
  Description of Artificial Sequence: Synthetic oligonucleotide
ucugccaguaaauuuggca

SEQ ID NO: 511228 - RNA, 19 nt, Artificial Sequence
  Description of Artificial Sequence: Synthetic oligonucleotide
cucacagcaacacaacugc

SEQ ID NO: 511229 - RNA, 19 nt, Artificial Sequence
  Description of Artificial Sequence: Synthetic oligonucleotide
ugcacaaacaaucuaccau

SEQ ID NO: 511230 - RNA, 19 nt, Artificial Sequence
  Description of Artificial Sequence: Synthetic oligonucleotide
uuccucgaggggaugaugg

SEQ ID NO: 511231 - RNA, 19 nt, Artificial Sequence
  Description of Artificial Sequence: Synthetic oligonucleotide
ucccuuaccaaaagugagg

SEQ ID NO: 511232 - RNA, 19 nt, Artificial Sequence
  Description of Artificial Sequence: Synthetic oligonucleotide
gacaucaaacacuaagcac

SEQ ID NO: 511233 - RNA, 19 nt, Artificial Sequence
  Description of Artificial Sequence: Synthetic oligonucleotide
aacauauugcuuccaugug

SEQ ID NO: 511234 - RNA, 19 nt, Artificial Sequence
  Description of Artificial Sequence: Synthetic oligonucleotide
guuauaguuuaacagcaac

SEQ ID NO: 511235 - RNA, 19 nt, Artificial Sequence
  Description of Artificial Sequence: Synthetic oligonucleotide
caaaauaaccucauaacaa

SEQ ID NO: 511236 - RNA, 19 nt, Artificial Sequence
  Description of Artificial Sequence: Synthetic oligonucleotide
acugcuagaagaugcaaca

SEQ ID NO: 511237 - RNA, 19 nt, Artificial Sequence
  Description of Artificial Sequence: Synthetic oligonucleotide
uguaacacuuccacauugc

SEQ ID NO: 511238 - RNA, 19 nt, Artificial Sequence
  Description of Artificial Sequence: Synthetic oligonucleotide
aagauaacacaauguuucu

SEQ ID NO: 511239 - RNA, 19 nt, Artificial Sequence
  Description of Artificial Sequence: Synthetic oligonucleotide
uauucuacuuguucaguca

SEQ ID NO: 511240 - RNA, 19 nt, Artificial Sequence
  Description of Artificial Sequence: Synthetic oligonucleotide
acagaggcggggcugaugg

SEQ ID NO: 511241 - RNA, 19 nt, Artificial Sequence
  Description of Artificial Sequence: Synthetic oligonucleotide
uaccacacgaagaacguca

SEQ ID NO: 511242 - RNA, 19 nt, Artificial Sequence
  Description of Artificial Sequence: Synthetic oligonucleotide
accguagccuucuuguccc

SEQ ID NO: 511243 - RNA, 19 nt, Artificial Sequence
  Description of Artificial Sequence: Synthetic oligonucleotide
cauuaucaaugcaggagcg

SEQ ID NO: 511244 - RNA, 19 nt, Artificial Sequence
  Description of Artificial Sequence: Synthetic oligonucleotide
acaaucuaccaucauagaa

SEQ ID NO: 511245 - RNA, 19 nt, Artificial Sequence
  Description of Artificial Sequence: Synthetic oligonucleotide
gucaauagucuacauuuag

SEQ ID NO: 511246 - RNA, 19 nt, Artificial Sequence
  Description of Artificial Sequence: Synthetic oligonucleotide
aacuaauguacaaugcaca

SEQ ID NO: 511247 - RNA, 19 nt, Artificial Sequence
  Description of Artificial Sequence: Synthetic oligonucleotide
agugcuacaaggaggaguc

SEQ ID NO: 511248 - RNA, 19 nt, Artificial Sequence
  Description of Artificial Sequence: Synthetic oligonucleotide
ucuacuuguucagucagcc

SEQ ID NO: 511249 - RNA, 19 nt, Artificial Sequence
  Description of Artificial Sequence: Synthetic oligonucleotide
ugaagaugcaacugguacu

SEQ ID NO: 511250 - RNA, 19 nt, Artificial Sequence
  Description of Artificial Sequence: Synthetic oligonucleotide
auugaaacuguuaaugaca

SEQ ID NO: 511251 - RNA, 19 nt, Artificial Sequence
  Description of Artificial Sequence: Synthetic oligonucleotide
ugauggauccucauuggac

SEQ ID NO: 511252 - RNA, 19 nt, Artificial Sequence
  Description of Artificial Sequence: Synthetic oligonucleotide
ugcuagaagaugcaacaga

SEQ ID NO: 511253 - RNA, 19 nt, Artificial Sequence
  Description of Artificial Sequence: Synthetic oligonucleotide
acauauugcuuccaugugu

SEQ ID NO: 511254 - RNA, 19 nt, Artificial Sequence
  Description of Artificial Sequence: Synthetic oligonucleotide
agacuugcccugcacagcg

SEQ ID NO: 511255 - RNA, 19 nt, Artificial Sequence
  Description of Artificial Sequence: Synthetic oligonucleotide
auaaccucauaacaauaca

SEQ ID NO: 511256 - RNA, 19 nt, Artificial Sequence
  Description of Artificial Sequence: Synthetic oligonucleotide
uguuucuggcacaauggca

SEQ ID NO: 511257 - RNA, 19 nt, Artificial Sequence
  Description of Artificial Sequence: Synthetic oligonucleotide
gucuaccacacgaagaacg

SEQ ID NO: 511258 - RNA, 19 nt, Artificial Sequence
  Description of Artificial Sequence: Synthetic oligonucleotide
uuaucaaugcaggagcgga

SEQ ID NO: 511259 - RNA, 19 nt, Artificial Sequence
  Description of Artificial Sequence: Synthetic oligonucleotide
ugccuauaauacaauaaaa

SEQ ID NO: 511260 - RNA, 19 nt, Artificial Sequence
  Description of Artificial Sequence: Synthetic oligonucleotide
cuagaagaugcaacagagg

SEQ ID NO: 511261 - RNA, 19 nt, Artificial Sequence
  Description of Artificial Sequence: Synthetic oligonucleotide
agagcaugccacaaaauag

SEQ ID NO: 511262 - RNA, 19 nt, Artificial Sequence
  Description of Artificial Sequence: Synthetic oligonucleotide
aaaccguagccuucuuguc

SEQ ID NO: 511263 - RNA, 19 nt, Artificial Sequence
  Description of Artificial Sequence: Synthetic oligonucleotide
cuccuaaagagcaugccac

SEQ ID NO: 511264 - RNA, 19 nt, Artificial Sequence
  Description of Artificial Sequence: Synthetic oligonucleotide
auguaacacuuccacauug

SEQ ID NO: 511265 - RNA, 19 nt, Artificial Sequence
  Description of Artificial Sequence: Synthetic oligonucleotide
agucacauguuauaguuua

SEQ ID NO: 511266 - RNA, 19 nt, Artificial Sequence
  Description of Artificial Sequence: Synthetic oligonucleotide
acauggaaagaaccagagg

SEQ ID NO: 511267 - RNA, 19 nt, Artificial Sequence
  Description of Artificial Sequence: Synthetic oligonucleotide
caauacaaugcguuagaac

SEQ ID NO: 511268 - RNA, 19 nt, Artificial Sequence
  Description of Artificial Sequence: Synthetic oligonucleotide
aaccacuaaguugucauca

SEQ ID NO: 511269 - RNA, 19 nt, Artificial Sequence
  Description of Artificial Sequence: Synthetic oligonucleotide
uuaauuuguuuaucugccu

SEQ ID NO: 511270 - RNA, 19 nt, Artificial Sequence
  Description of Artificial Sequence: Synthetic oligonucleotide
gaguacugcuagaagaugc

SEQ ID NO: 511271 - RNA, 19 nt, Artificial Sequence
  Description of Artificial Sequence: Synthetic oligonucleotide
uguccuuaauaaauaacuu

SEQ ID NO: 511272 - RNA, 19 nt, Artificial Sequence
  Description of Artificial Sequence: Synthetic oligonucleotide
aaguugucaucacucuucu

SEQ ID NO: 511273 - RNA, 19 nt, Artificial Sequence
  Description of Artificial Sequence: Synthetic oligonucleotide
uuaagugauuuucuacuua

SEQ ID NO: 511274 - RNA, 19 nt, Artificial Sequence
  Description of Artificial Sequence: Synthetic oligonucleotide
ucgauagcugaagauuugg

SEQ ID NO: 511275 - RNA, 19 nt, Artificial Sequence
  Description of Artificial Sequence: Synthetic oligonucleotide
uacugaaugcacaaacaau

SEQ ID NO: 511276 - RNA, 19 nt, Artificial Sequence
  Description of Artificial Sequence: Synthetic oligonucleotide
ugcaaugaguauuggaaau

SEQ ID NO: 511277 - RNA, 19 nt, Artificial Sequence
  Description of Artificial Sequence: Synthetic oligonucleotide
acuaaguugucaucacucu

SEQ ID NO: 511278 - RNA, 19 nt, Artificial Sequence
  Description of Artificial Sequence: Synthetic oligonucleotide
cacuaaguugucaucacuc

SEQ ID NO: 511279 - RNA, 19 nt, Artificial Sequence
  Description of Artificial Sequence: Synthetic oligonucleotide
agacucaaaggaauaguac

SEQ ID NO: 511280 - RNA, 19 nt, Artificial Sequence
  Description of Artificial Sequence: Synthetic oligonucleotide
auacuugucaacaaguaaa

SEQ ID NO: 511281 - RNA, 19 nt, Artificial Sequence
  Description of Artificial Sequence: Synthetic oligonucleotide
uaacacaauguuucuggca

SEQ ID NO: 511282 - RNA, 19 nt, Artificial Sequence
  Description of Artificial Sequence: Synthetic oligonucleotide
aacuugagugacagcacac

SEQ ID NO: 511283 - RNA, 19 nt, Artificial Sequence
  Description of Artificial Sequence: Synthetic oligonucleotide
cacacgaagaacgucaaug

SEQ ID NO: 511284 - RNA, 19 nt, Artificial Sequence
  Description of Artificial Sequence: Synthetic oligonucleotide
uacaaugcacaguuuagua

SEQ ID NO: 511285 - RNA, 19 nt, Artificial Sequence
  Description of Artificial Sequence: Synthetic oligonucleotide
acacgaagaacgucaauga

SEQ ID NO: 511286 - RNA, 19 nt, Artificial Sequence
  Description of Artificial Sequence: Synthetic oligonucleotide
agaagaugcaacagaggcg

SEQ ID NO: 511287 - RNA, 19 nt, Artificial Sequence
  Description of Artificial Sequence: Synthetic oligonucleotide
caaugcguuagaacuaaug

SEQ ID NO: 511288 - RNA, 19 nt, Artificial Sequence
  Description of Artificial Sequence: Synthetic oligonucleotide
cucccuuaccaaaagugag

SEQ ID NO: 511289 - RNA, 19 nt, Artificial Sequence
  Description of Artificial Sequence: Synthetic oligonucleotide
aagugcuacaaggaggagu

SEQ ID NO: 511290 - RNA, 19 nt, Artificial Sequence
  Description of Artificial Sequence: Synthetic oligonucleotide
uacagauauaauacauaau

SEQ ID NO: 511291 - RNA, 19 nt, Artificial Sequence
  Description of Artificial Sequence: Synthetic oligonucleotide
ugaaugcacaaacaaucua

SEQ ID NO: 511292 - RNA, 19 nt, Artificial Sequence
  Description of Artificial Sequence: Synthetic oligonucleotide
guaaugccuccucuguugg

SEQ ID NO: 511293 - RNA, 19 nt, Artificial Sequence
  Description of Artificial Sequence: Synthetic oligonucleotide
auuaagugauuuucuacuu

SEQ ID NO: 511294 - RNA, 19 nt, Artificial Sequence
  Description of Artificial Sequence: Synthetic oligonucleotide
acaaugcaccuucauuauc

SEQ ID NO: 511295 - RNA, 19 nt, Artificial Sequence
  Description of Artificial Sequence: Synthetic oligonucleotide
guuauccgaguacugcuag

SEQ ID NO: 511296 - RNA, 19 nt, Artificial Sequence
  Description of Artificial Sequence: Synthetic oligonucleotide
uugaggcccaauuuaauuu

SEQ ID NO: 511297 - RNA, 19 nt, Artificial Sequence
  Description of Artificial Sequence: Synthetic oligonucleotide
acaacugcaaugaguauug

SEQ ID NO: 511298 - RNA, 19 nt, Artificial Sequence
  Description of Artificial Sequence: Synthetic oligonucleotide
auuauacauuucaugucuc

SEQ ID NO: 511299 - RNA, 19 nt, Artificial Sequence
  Description of Artificial Sequence: Synthetic oligonucleotide
uacauuucaugucucuaua

SEQ ID NO: 511300 - RNA, 19 nt, Artificial Sequence
  Description of Artificial Sequence: Synthetic oligonucleotide
aagucgauagcugaagauu

SEQ ID NO: 511301 - RNA, 19 nt, Artificial Sequence
  Description of Artificial Sequence: Synthetic oligonucleotide
uugcacgaagauuuguccu

SEQ ID NO: 511302 - RNA, 19 nt, Artificial Sequence
  Description of Artificial Sequence: Synthetic oligonucleotide
cauuucaacuugcagcauc

SEQ ID NO: 511303 - RNA, 19 nt, Artificial Sequence
  Description of Artificial Sequence: Synthetic oligonucleotide
aguaaguuauuuauguuuu

SEQ ID NO: 511304 - RNA, 19 nt, Artificial Sequence
  Description of Artificial Sequence: Synthetic oligonucleotide
ugacaguccauuucaacuu

SEQ ID NO: 511305 - RNA, 19 nt, Artificial Sequence
  Description of Artificial Sequence: Synthetic oligonucleotide
agaugcaacugguacuugu

SEQ ID NO: 511306 - RNA, 19 nt, Artificial Sequence
  Description of Artificial Sequence: Synthetic oligonucleotide
uggaaagaaccagagguaa

SEQ ID NO: 511307 - RNA, 19 nt, Artificial Sequence
  Description of Artificial Sequence: Synthetic oligonucleotide
uucuacuuguucagucagc

SEQ ID NO: 511308 - RNA, 19 nt, Artificial Sequence
  Description of Artificial Sequence: Synthetic oligonucleotide
aggcgugucuuguccaggc

SEQ ID NO: 511309 - RNA, 19 nt, Artificial Sequence
  Description of Artificial Sequence: Synthetic oligonucleotide
ucuuacacuguagaguuuu

SEQ ID NO: 511310 - RNA, 19 nt, Artificial Sequence
  Description of Artificial Sequence: Synthetic oligonucleotide
cauuggacacaucaaccac

SEQ ID NO: 511311 - RNA, 19 nt, Artificial Sequence
  Description of Artificial Sequence: Synthetic oligonucleotide
cauauugguuaaaguugcc

SEQ ID NO: 511312 - RNA, 19 nt, Artificial Sequence
  Description of Artificial Sequence: Synthetic oligonucleotide
cgaagaacgucaaugacag

SEQ ID NO: 511313 - RNA, 19 nt, Artificial Sequence
  Description of Artificial Sequence: Synthetic oligonucleotide
acagcuaagcaccgaugag

SEQ ID NO: 511314 - RNA, 19 nt, Artificial Sequence
  Description of Artificial Sequence: Synthetic oligonucleotide
aaauaaccucauaacaaua

SEQ ID NO: 511315 - RNA, 19 nt, Artificial Sequence
  Description of Artificial Sequence: Synthetic oligonucleotide
uaucaaugcaggagcggac

SEQ ID NO: 511316 - RNA, 19 nt, Artificial Sequence
  Description of Artificial Sequence: Synthetic oligonucleotide
ucauaaaccguagccuucu

SEQ ID NO: 511317 - RNA, 19 nt, Artificial Sequence
  Description of Artificial Sequence: Synthetic oligonucleotide
aacagcgcaaagugcuaca

SEQ ID NO: 511318 - RNA, 19 nt, Artificial Sequence
  Description of Artificial Sequence: Synthetic oligonucleotide
augcguuagaacuaaugua

SEQ ID NO: 511319 - RNA, 19 nt, Artificial Sequence
  Description of Artificial Sequence: Synthetic oligonucleotide
aaugcaccuucauuaucaa

SEQ ID NO: 511320 - RNA, 19 nt, Artificial Sequence
  Description of Artificial Sequence: Synthetic oligonucleotide
agugacauuuuaaaucagu

SEQ ID NO: 511321 - RNA, 19 nt, Artificial Sequence
  Description of Artificial Sequence: Synthetic oligonucleotide
uccaagucgauagcugaag

SEQ ID NO: 511322 - RNA, 19 nt, Artificial Sequence
  Description of Artificial Sequence: Synthetic oligonucleotide
acagucaauagucuacauu

SEQ ID NO: 511323 - RNA, 19 nt, Artificial Sequence
  Description of Artificial Sequence: Synthetic oligonucleotide
acagacuuaaaagaucuuu

SEQ ID NO: 511324 - RNA, 19 nt, Artificial Sequence
  Description of Artificial Sequence: Synthetic oligonucleotide
cacaguguuauccgaguac

SEQ ID NO: 511325 - RNA, 19 nt, Artificial Sequence
  Description of Artificial Sequence: Synthetic oligonucleotide
acaguguuauccgaguacu

SEQ ID NO: 511326 - RNA, 19 nt, Artificial Sequence
  Description of Artificial Sequence: Synthetic oligonucleotide
uccuaaagagcaugccaca

SEQ ID NO: 511327 - RNA, 19 nt, Artificial Sequence
  Description of Artificial Sequence: Synthetic oligonucleotide
cacuguagaguuuuauuga

SEQ ID NO: 511328 - RNA, 19 nt, Artificial Sequence
  Description of Artificial Sequence: Synthetic oligonucleotide
uguuauccgaguacugcua

SEQ ID NO: 511329 - RNA, 19 nt, Artificial Sequence
  Description of Artificial Sequence: Synthetic oligonucleotide
augcacaaacaaucuacca

SEQ ID NO: 511330 - RNA, 19 nt, Artificial Sequence
  Description of Artificial Sequence: Synthetic oligonucleotide
ucgaggggaugauggaucc

SEQ ID NO: 511331 - RNA, 19 nt, Artificial Sequence
  Description of Artificial Sequence: Synthetic oligonucleotide
ugucucuauacagucaaua

SEQ ID NO: 511332 - RNA, 19 nt, Artificial Sequence
  Description of Artificial Sequence: Synthetic oligonucleotide
uaccaucauagaaguaacu

SEQ ID NO: 511333 - RNA, 19 nt, Artificial Sequence
  Description of Artificial Sequence: Synthetic oligonucleotide
acaaaauagccugccacgu

SEQ ID NO: 511334 - RNA, 19 nt, Artificial Sequence
  Description of Artificial Sequence: Synthetic oligonucleotide
cugccaguaaauuuggcaa

SEQ ID NO: 511335 - RNA, 19 nt, Artificial Sequence
  Description of Artificial Sequence: Synthetic oligonucleotide
agcuccuaaagagcaugcc

SEQ ID NO: 511336 - RNA, 19 nt, Artificial Sequence
  Description of Artificial Sequence: Synthetic oligonucleotide
agcggacagcuuuauuuag

SEQ ID NO: 511337 - RNA, 19 nt, Artificial Sequence
  Description of Artificial Sequence: Synthetic oligonucleotide
aaauagccugccacgucuc

SEQ ID NO: 511338 - RNA, 19 nt, Artificial Sequence
  Description of Artificial Sequence: Synthetic oligonucleotide
agguucuuaaaugaguauu

SEQ ID NO: 511339 - RNA, 19 nt, Artificial Sequence
  Description of Artificial Sequence: Synthetic oligonucleotide
auacagucaauagucuaca

SEQ ID NO: 511340 - RNA, 19 nt, Artificial Sequence
  Description of Artificial Sequence: Synthetic oligonucleotide
uauccgaguacugcuagaa

SEQ ID NO: 511341 - RNA, 19 nt, Artificial Sequence
  Description of Artificial Sequence: Synthetic oligonucleotide
ugguuaaaguugcccaaau

SEQ ID NO: 511342 - RNA, 19 nt, Artificial Sequence
  Description of Artificial Sequence: Synthetic oligonucleotide
auuuagucagucauuguua

SEQ ID NO: 511343 - RNA, 19 nt, Artificial Sequence
  Description of Artificial Sequence: Synthetic oligonucleotide
cauauugcuuccaugugua

SEQ ID NO: 511344 - RNA, 19 nt, Artificial Sequence
  Description of Artificial Sequence: Synthetic oligonucleotide
ggcaauagcccaaagaaaa

SEQ ID NO: 511345 - RNA, 19 nt, Artificial Sequence
  Description of Artificial Sequence: Synthetic oligonucleotide
ugcacgaagauuuguccuu

SEQ ID NO: 511346 - RNA, 19 nt, Artificial Sequence
  Description of Artificial Sequence: Synthetic oligonucleotide
cacagcuaagcaccgauga

SEQ ID NO: 511347 - RNA, 19 nt, Artificial Sequence
  Description of Artificial Sequence: Synthetic oligonucleotide
guuugcacgaagauuuguc

SEQ ID NO: 511348 - RNA, 19 nt, Artificial Sequence
  Description of Artificial Sequence: Synthetic oligonucleotide
uuauccgaguacugcuaga

SEQ ID NO: 511349 - RNA, 19 nt, Artificial Sequence
  Description of Artificial Sequence: Synthetic oligonucleotide
gaugcaacugguacuuguc

SEQ ID NO: 511350 - RNA, 19 nt, Artificial Sequence
  Description of Artificial Sequence: Synthetic oligonucleotide
cuauacagucaauagucua

SEQ ID NO: 511351 - RNA, 19 nt, Artificial Sequence
  Description of Artificial Sequence: Synthetic oligonucleotide
acagguucuuaaaugagua

SEQ ID NO: 511352 - RNA, 19 nt, Artificial Sequence
  Description of Artificial Sequence: Synthetic oligonucleotide
caauagcccaaagaaaaga

SEQ ID NO: 511353 - RNA, 19 nt, Artificial Sequence
  Description of Artificial Sequence: Synthetic oligonucleotide
auaguacuuggccuaucau

SEQ ID NO: 511354 - RNA, 19 nt, Artificial Sequence
  Description of Artificial Sequence: Synthetic oligonucleotide
aucaaugcaggagcggaca

SEQ ID NO: 511355 - RNA, 19 nt, Artificial Sequence
  Description of Artificial Sequence: Synthetic oligonucleotide
agcuaagcaccgaugagga

SEQ ID NO: 511356 - RNA, 19 nt, Artificial Sequence
  Description of Artificial Sequence: Synthetic oligonucleotide
gcaacauauugcuuccaug

SEQ ID NO: 511357 - RNA, 19 nt, Artificial Sequence
  Description of Artificial Sequence: Synthetic oligonucleotide
aguacugcuagaagaugca

SEQ ID NO: 511358 - RNA, 19 nt, Artificial Sequence
  Description of Artificial Sequence: Synthetic oligonucleotide
cuugaggaggcgugucuug

SEQ ID NO: 511359 - RNA, 19 nt, Artificial Sequence
  Description of Artificial Sequence: Synthetic oligonucleotide
agucgauagcugaagauuu

SEQ ID NO: 511360 - RNA, 19 nt, Artificial Sequence
  Description of Artificial Sequence: Synthetic oligonucleotide
cagcuccuaaagagcaugc

SEQ ID NO: 511361 - RNA, 19 nt, Artificial Sequence
  Description of Artificial Sequence: Synthetic oligonucleotide
cugcaaugaguauuggaaa

SEQ ID NO: 511362 - RNA, 19 nt, Artificial Sequence
  Description of Artificial Sequence: Synthetic oligonucleotide
acacaauguuucuggcaca

SEQ ID NO: 511363 - RNA, 19 nt, Artificial Sequence
  Description of Artificial Sequence: Synthetic oligonucleotide
uacagucaauagucuacau

SEQ ID NO: 511364 - RNA, 19 nt, Artificial Sequence
  Description of Artificial Sequence: Synthetic oligonucleotide
guuagaacuaauguacaau

SEQ ID NO: 511365 - RNA, 19 nt, Artificial Sequence
  Description of Artificial Sequence: Synthetic oligonucleotide
aguuugcacgaagauuugu

SEQ ID NO: 511366 - RNA, 19 nt, Artificial Sequence
  Description of Artificial Sequence: Synthetic oligonucleotide
gagcggacagcuuuauuua

SEQ ID NO: 511367 - RNA, 19 nt, Artificial Sequence
  Description of Artificial Sequence: Synthetic oligonucleotide
acgaagauuuguccuuaau

SEQ ID NO: 511368 - RNA, 19 nt, Artificial Sequence
  Description of Artificial Sequence: Synthetic oligonucleotide
cugcuagaagaugcaacag

SEQ ID NO: 511369 - RNA, 19 nt, Artificial Sequence
  Description of Artificial Sequence: Synthetic oligonucleotide
uuguggcuuucagagggug

SEQ ID NO: 511370 - RNA, 19 nt, Artificial Sequence
  Description of Artificial Sequence: Synthetic oligonucleotide
cccuuaccaaaagugaggg

SEQ ID NO: 511371 - RNA, 19 nt, Artificial Sequence
  Description of Artificial Sequence: Synthetic oligonucleotide
ucccucugccaguaaauuu

SEQ ID NO: 511372 - RNA, 19 nt, Artificial Sequence
  Description of Artificial Sequence: Synthetic oligonucleotide
caguguuauccgaguacug

SEQ ID NO: 511373 - RNA, 19 nt, Artificial Sequence
  Description of Artificial Sequence: Synthetic oligonucleotide
aagaugcaacugguacuug

SEQ ID NO: 511374 - RNA, 19 nt, Artificial Sequence
  Description of Artificial Sequence: Synthetic oligonucleotide
acuuaagacuccauuuguu

SEQ ID NO: 511375 - RNA, 19 nt, Artificial Sequence
  Description of Artificial Sequence: Synthetic oligonucleotide
gaagaugcaacugguacuu

SEQ ID NO: 511376 - RNA, 19 nt, Artificial Sequence
  Description of Artificial Sequence: Synthetic oligonucleotide
cuguagaguuuuauugaaa

SEQ ID NO: 511377 - RNA, 19 nt, Artificial Sequence
  Description of Artificial Sequence: Synthetic oligonucleotide
uuucuugaggaggcguguc

SEQ ID NO: 511378 - RNA, 19 nt, Artificial Sequence
  Description of Artificial Sequence: Synthetic oligonucleotide
guguuauccgaguacugcu

SEQ ID NO: 511379 - RNA, 19 nt, Artificial Sequence
  Description of Artificial Sequence: Synthetic oligonucleotide
gucgauagcugaagauuug

SEQ ID NO: 511380 - RNA, 19 nt, Artificial Sequence
  Description of Artificial Sequence: Synthetic oligonucleotide
caguuugcacgaagauuug

SEQ ID NO: 511381 - RNA, 19 nt, Artificial Sequence
  Description of Artificial Sequence: Synthetic oligonucleotide
auauugcuuccauguguaa

SEQ ID NO: 511382 - RNA, 19 nt, Artificial Sequence
  Description of Artificial Sequence: Synthetic oligonucleotide
caacagcgcaaagugcuac

SEQ ID NO: 511383 - RNA, 19 nt, Artificial Sequence
  Description of Artificial Sequence: Synthetic oligonucleotide
cagcgcaaagugcuacaag

SEQ ID NO: 511384 - RNA, 19 nt, Artificial Sequence
  Description of Artificial Sequence: Synthetic oligonucleotide
guauuggaaauccucgguu

SEQ ID NO: 511385 - RNA, 19 nt, Artificial Sequence
  Description of Artificial Sequence: Synthetic oligonucleotide
agccaaauuuccaaauguu

SEQ ID NO: 511386 - RNA, 19 nt, Artificial Sequence
  Description of Artificial Sequence: Synthetic oligonucleotide
gugacauguaacacuucca

SEQ ID NO: 511387 - RNA, 19 nt, Artificial Sequence
  Description of Artificial Sequence: Synthetic oligonucleotide
uagaaguaacuggcagcca

SEQ ID NO: 511388 - RNA, 19 nt, Artificial Sequence
  Description of Artificial Sequence: Synthetic oligonucleotide
ccugccacgucucacagca

SEQ ID NO: 511389 - RNA, 19 nt, Artificial Sequence
  Description of Artificial Sequence: Synthetic oligonucleotide
cagcugccgcccuucacgc

SEQ ID NO: 511390 - RNA, 19 nt, Artificial Sequence
  Description of Artificial Sequence: Synthetic oligonucleotide
gcaaugaguauuggaaauc

SEQ ID NO: 511391 - RNA, 19 nt, Artificial Sequence
  Description of Artificial Sequence: Synthetic oligonucleotide
cgcaaagugcuacaaggag

SEQ ID NO: 511392 - RNA, 19 nt, Artificial Sequence
  Description of Artificial Sequence: Synthetic oligonucleotide
gccaauacaaugcguuaga

SEQ ID NO: 511393 - RNA, 19 nt, Artificial Sequence
  Description of Artificial Sequence: Synthetic oligonucleotide
ccaguuugcacgaagauuu

SEQ ID NO: 511394 - RNA, 19 nt, Artificial Sequence
  Description of Artificial Sequence: Synthetic oligonucleotide
cuacuuguucagucagcca

SEQ ID NO: 511395 - RNA, 19 nt, Artificial Sequence
  Description of Artificial Sequence: Synthetic oligonucleotide
ggagcggacagcuuuauuu

SEQ ID NO: 511396 - RNA, 19 nt, Artificial Sequence
  Description of Artificial Sequence: Synthetic oligonucleotide
caacugcaaugaguauugg

SEQ ID NO: 511397 - RNA, 19 nt, Artificial Sequence
  Description of Artificial Sequence: Synthetic oligonucleotide
guacaaugcacaguuuagu

SEQ ID NO: 511398 - RNA, 19 nt, Artificial Sequence
  Description of Artificial Sequence: Synthetic oligonucleotide
cuaagcaccgaugaggauu

SEQ ID NO: 511399 - RNA, 19 nt, Artificial Sequence
  Description of Artificial Sequence: Synthetic oligonucleotide
gcuacaaggaggaguccag

SEQ ID NO: 511400 - RNA, 19 nt, Artificial Sequence
  Description of Artificial Sequence: Synthetic oligonucleotide
ccuuaccaaaagugagggg

SEQ ID NO: 511401 - RNA, 19 nt, Artificial Sequence
  Description of Artificial Sequence: Synthetic oligonucleotide
aggggaauuaaaacauauu

SEQ ID NO: 511402 - RNA, 19 nt, Artificial Sequence
  Description of Artificial Sequence: Synthetic oligonucleotide
cauucucccuuggggaaug

SEQ ID NO: 511403 - RNA, 19 nt, Artificial Sequence
  Description of Artificial Sequence: Synthetic oligonucleotide
cuuggccuaucauauucua

SEQ ID NO: 511404 - RNA, 19 nt, Artificial Sequence
  Description of Artificial Sequence: Synthetic oligonucleotide
agucaauagucuacauuua

SEQ ID NO: 511405 - RNA, 19 nt, Artificial Sequence
  Description of Artificial Sequence: Synthetic oligonucleotide
ggaggcgugucuuguccag

SEQ ID NO: 511406 - RNA, 19 nt, Artificial Sequence
  Description of Artificial Sequence: Synthetic oligonucleotide
cuccacaacugcaaugagu

SEQ ID NO: 511407 - RNA, 19 nt, Artificial Sequence
  Description of Artificial Sequence: Synthetic oligonucleotide
cacuguacaucagcagauc

SEQ ID NO: 511408 - RNA, 19 nt, Artificial Sequence
  Description of Artificial Sequence: Synthetic oligonucleotide
cuaccacacgaagaacguc

SEQ ID NO: 511409 - RNA, 19 nt, Artificial Sequence
  Description of Artificial Sequence: Synthetic oligonucleotide
caagucgauagcugaagau

SEQ ID NO: 511410 - RNA, 19 nt, Artificial Sequence
  Description of Artificial Sequence: Synthetic oligonucleotide
acagcgcaaagugcuacaa

SEQ ID NO: 511411 - RNA, 19 nt, Artificial Sequence
  Description of Artificial Sequence: Synthetic oligonucleotide
ccucccuuaccaaaaguga

SEQ ID NO: 511412 - RNA, 19 nt, Artificial Sequence
  Description of Artificial Sequence: Synthetic oligonucleotide
guguaauuauacauuucau

SEQ ID NO: 511413 - RNA, 19 nt, Artificial Sequence
  Description of Artificial Sequence: Synthetic oligonucleotide
aguugggcaauagcccaaa

SEQ ID NO: 511414 - RNA, 19 nt, Artificial Sequence
  Description of Artificial Sequence: Synthetic oligonucleotide
cuuccucgaggggaugaug

SEQ ID NO: 511415 - RNA, 19 nt, Artificial Sequence
  Description of Artificial Sequence: Synthetic oligonucleotide
cauagcgugcugcuaauuu

SEQ ID NO: 511416 - RNA, 19 nt, Artificial Sequence
  Description of Artificial Sequence: Synthetic oligonucleotide
acaacugcccagagacaca

SEQ ID NO: 511417 - RNA, 19 nt, Artificial Sequence
  Description of Artificial Sequence: Synthetic oligonucleotide
gccaguaaauuuggcaaca

SEQ ID NO: 511418 - RNA, 19 nt, Artificial Sequence
  Description of Artificial Sequence: Synthetic oligonucleotide
ucauagcgugcugcuaauu

SEQ ID NO: 511419 - RNA, 19 nt, Artificial Sequence
  Description of Artificial Sequence: Synthetic oligonucleotide
uggccccauaagguguucu

SEQ ID NO: 511420 - RNA, 19 nt, Artificial Sequence
  Description of Artificial Sequence: Synthetic oligonucleotide
gcgugucuuguccaggcca

SEQ ID NO: 511421 - RNA, 19 nt, Artificial Sequence
  Description of Artificial Sequence: Synthetic oligonucleotide
ccuuggggaaugugcuggg

SEQ ID NO: 511422 - RNA, 19 nt, Artificial Sequence
  Description of Artificial Sequence: Synthetic oligonucleotide
gcuauggaaagggauuaaa

SEQ ID NO: 511423 - RNA, 19 nt, Artificial Sequence
  Description of Artificial Sequence: Synthetic oligonucleotide
guaggcaggcagcacuccu

SEQ ID NO: 511424 - RNA, 19 nt, Artificial Sequence
  Description of Artificial Sequence: Synthetic oligonucleotide
gcguuagaacuaauguaca

SEQ ID NO: 511425 - RNA, 19 nt, Artificial Sequence
  Description of Artificial Sequence: Synthetic oligonucleotide
ggcgugucuuguccaggcc

SEQ ID NO: 511426 - RNA, 19 nt, Artificial Sequence
  Description of Artificial Sequence: Synthetic oligonucleotide
cacgaagauuuguccuuaa

SEQ ID NO: 511427 - RNA, 19 nt, Artificial Sequence
  Description of Artificial Sequence: Synthetic oligonucleotide
augcacaguuuaguaucaa

SEQ ID NO: 511428 - RNA, 19 nt, Artificial Sequence
  Description of Artificial Sequence: Synthetic oligonucleotide
cagguucuuaaaugaguau

SEQ ID NO: 511429 - RNA, 19 nt, Artificial Sequence
  Description of Artificial Sequence: Synthetic oligonucleotide
aggagcggacagcuuuauu

SEQ ID NO: 511430 - RNA, 19 nt, Artificial Sequence
  Description of Artificial Sequence: Synthetic oligonucleotide
ccccauaagguguucucca

SEQ ID NO: 511431 - RNA, 19 nt, Artificial Sequence
  Description of Artificial Sequence: Synthetic oligonucleotide
ggccccauaagguguucuc

SEQ ID NO: 511432 - RNA, 19 nt, Artificial Sequence
  Description of Artificial Sequence: Synthetic oligonucleotide
cguuagaacuaauguacaa

SEQ ID NO: 511433 - RNA, 19 nt, Artificial Sequence
  Description of Artificial Sequence: Synthetic oligonucleotide
acaaugcguuagaacuaau

SEQ ID NO: 511434 - RNA, 19 nt, Artificial Sequence
  Description of Artificial Sequence: Synthetic oligonucleotide
ggcccaauuuaauuuguuu

SEQ ID NO: 511435 - RNA, 19 nt, Artificial Sequence
  Description of Artificial Sequence: Synthetic oligonucleotide
gcgcaaagugcuacaagga

SEQ ID NO: 511436 - RNA, 19 nt, Artificial Sequence
  Description of Artificial Sequence: Synthetic oligonucleotide
gguaggcaggcagcacucc

SEQ ID NO: 511437 - RNA, 19 nt, Artificial Sequence
  Description of Artificial Sequence: Synthetic oligonucleotide
aggcccaauuuaauuuguu

SEQ ID NO: 511438 - RNA, 19 nt, Artificial Sequence
  Description of Artificial Sequence: Synthetic oligonucleotide
gucauagcgugcugcuaau

SEQ ID NO: 511439 - RNA, 19 nt, Artificial Sequence
  Description of Artificial Sequence: Synthetic oligonucleotide
ccuaaagagcaugccacaa

SEQ ID NO: 511440 - RNA, 19 nt, Artificial Sequence
  Description of Artificial Sequence: Synthetic oligonucleotide
cuacaaggaggaguccagu

SEQ ID NO: 511441 - RNA, 19 nt, Artificial Sequence
  Description of Artificial Sequence: Synthetic oligonucleotide
ccgaguacugcuagaagau

SEQ ID NO: 511442 - RNA, 19 nt, Artificial Sequence
  Description of Artificial Sequence: Synthetic oligonucleotide
cccauaagguguucuccaa

SEQ ID NO: 511443 - RNA, 19 nt, Artificial Sequence
  Description of Artificial Sequence: Synthetic oligonucleotide
ggcuauggaaagggauuaa

SEQ ID NO: 511444 - RNA, 19 nt, Artificial Sequence
  Description of Artificial Sequence: Synthetic oligonucleotide
ggaauaguacuuggccuau

SEQ ID NO: 511445 - RNA, 19 nt, Artificial Sequence
  Description of Artificial Sequence: Synthetic oligonucleotide
ccacuaaguugucaucacu

SEQ ID NO: 511446 - RNA, 19 nt, Artificial Sequence
  Description of Artificial Sequence: Synthetic oligonucleotide
gcaccgaugaggauucuuu

SEQ ID NO: 511447 - RNA, 19 nt, Artificial Sequence
  Description of Artificial Sequence: Synthetic oligonucleotide
ccguagccuucuugucccc

SEQ ID NO: 511448 - RNA, 19 nt, Artificial Sequence
  Description of Artificial Sequence: Synthetic oligonucleotide
ggggaugauggauccucau

SEQ ID NO: 511449 - RNA, 19 nt, Artificial Sequence
  Description of Artificial Sequence: Synthetic oligonucleotide
ggcagccaauacaaugcgu

SEQ ID NO: 511450 - RNA, 19 nt, Artificial Sequence
  Description of Artificial Sequence: Synthetic oligonucleotide
cgauagcugaagauuuggu

SEQ ID NO: 511451 - RNA, 19 nt, Artificial Sequence
  Description of Artificial Sequence: Synthetic oligonucleotide
gcaggagcggacagcuuua

SEQ ID NO: 511452 - RNA, 19 nt, Artificial Sequence
  Description of Artificial Sequence: Synthetic oligonucleotide
gcuaagcaccgaugaggau

SEQ ID NO: 511453 - RNA, 19 nt, Artificial Sequence
  Description of Artificial Sequence: Synthetic oligonucleotide
ccucgaggggaugauggau

SEQ ID NO: 511454 - RNA, 19 nt, Artificial Sequence
  Description of Artificial Sequence: Synthetic oligonucleotide
gcuuccucgaggggaugau

SEQ ID NO: 511455 - RNA, 19 nt, Artificial Sequence
  Description of Artificial Sequence: Synthetic oligonucleotide
gccgcccuucacgcagguc

SEQ ID NO: 511456 - RNA, 19 nt, Artificial Sequence
  Description of Artificial Sequence: Synthetic oligonucleotide
ccauuucaacuugcagcau

SEQ ID NO: 511457 - RNA, 19 nt, Artificial Sequence
  Description of Artificial Sequence: Synthetic oligonucleotide
cgaggggaugauggauccu

SEQ ID NO: 511458 - RNA, 19 nt, Artificial Sequence
  Description of Artificial Sequence: Synthetic oligonucleotide
auuaguaccacucaaagcc

SEQ ID NO: 511459 - RNA, 19 nt, Artificial Sequence
  Description of Artificial Sequence: Synthetic oligonucleotide
aaaucaucccuccauauac

SEQ ID NO: 511460 - RNA, 19 nt, Artificial Sequence
  Description of Artificial Sequence: Synthetic oligonucleotide
uacacuuacaguuuuauag

SEQ ID NO: 511461 - RNA, 19 nt, Artificial Sequence
  Description of Artificial Sequence: Synthetic oligonucleotide
aguaauuugagguacaaca

SEQ ID NO: 511462 - RNA, 19 nt, Artificial Sequence
  Description of Artificial Sequence: Synthetic oligonucleotide
ugauaagagaucaaaacug

SEQ ID NO: 511463 - RNA, 19 nt, Artificial Sequence
  Description of Artificial Sequence: Synthetic oligonucleotide
aaaaccaacagcuacuaga

SEQ ID NO: 511464 - RNA, 19 nt, Artificial Sequence
  Description of Artificial Sequence: Synthetic oligonucleotide
uagguauggauucugauag

SEQ ID NO: 511465 - RNA, 19 nt, Artificial Sequence
  Description of Artificial Sequence: Synthetic oligonucleotide
aauuuuaaggucauggaag

SEQ ID NO: 511466 - RNA, 19 nt, Artificial Sequence
  Description of Artificial Sequence: Synthetic oligonucleotide
ucuauuaacaggcacgcug

SEQ ID NO: 511467 - RNA, 19 nt, Artificial Sequence
  Description of Artificial Sequence: Synthetic oligonucleotide
gaugauaagagaucaaaac

SEQ ID NO: 511468 - RNA, 19 nt, Artificial Sequence
  Description of Artificial Sequence: Synthetic oligonucleotide
aaagacugugacuuuggcg

SEQ ID NO: 511469 - RNA, 19 nt, Artificial Sequence
  Description of Artificial Sequence: Synthetic oligonucleotide
uacacuaccgucuucauga

SEQ ID NO: 511470 - RNA, 19 nt, Artificial Sequence
  Description of Artificial Sequence: Synthetic oligonucleotide
auaguucaugauuuuaugg

SEQ ID NO: 511471 - RNA, 19 nt, Artificial Sequence
  Description of Artificial Sequence: Synthetic oligonucleotide
aauugcaaaucugucuucc

SEQ ID NO: 511472 - RNA, 19 nt, Artificial Sequence
  Description of Artificial Sequence: Synthetic oligonucleotide
uuauauuccuaacagcaug

SEQ ID NO: 511473 - RNA, 19 nt, Artificial Sequence
  Description of Artificial Sequence: Synthetic oligonucleotide
uuuucuaaaacaauugguu

SEQ ID NO: 511474 - RNA, 19 nt, Artificial Sequence
  Description of Artificial Sequence: Synthetic oligonucleotide
auuccuaacagcauguagc

SEQ ID NO: 511475 - RNA, 19 nt, Artificial Sequence
  Description of Artificial Sequence: Synthetic oligonucleotide
aggcguacaauguaguugc

SEQ ID NO: 511476 - RNA, 19 nt, Artificial Sequence
  Description of Artificial Sequence: Synthetic oligonucleotide
uauuccuacgucauuagug

SEQ ID NO: 511477 - RNA, 19 nt, Artificial Sequence
  Description of Artificial Sequence: Synthetic oligonucleotide
ugauuaguaccacucaaag

SEQ ID NO: 511478 - RNA, 19 nt, Artificial Sequence
  Description of Artificial Sequence: Synthetic oligonucleotide
uuuauggacagcuuuagau

SEQ ID NO: 511479 - RNA, 19 nt, Artificial Sequence
  Description of Artificial Sequence: Synthetic oligonucleotide
uuuacuucaguaauguuua

SEQ ID NO: 511480 - RNA, 19 nt, Artificial Sequence
  Description of Artificial Sequence: Synthetic oligonucleotide
auuccuacgucauuagugg

SEQ ID NO: 511481 - RNA, 19 nt, Artificial Sequence
  Description of Artificial Sequence: Synthetic oligonucleotide
uaauguuuaaggaacacuu

SEQ ID NO: 511482 - RNA, 19 nt, Artificial Sequence
  Description of Artificial Sequence: Synthetic oligonucleotide
gauucugauagucuagacc

SEQ ID NO: 511483 - RNA, 19 nt, Artificial Sequence
  Description of Artificial Sequence: Synthetic oligonucleotide
uuuaaggaacacuuguuca

SEQ ID NO: 511484 - RNA, 19 nt, Artificial Sequence
  Description of Artificial Sequence: Synthetic oligonucleotide
uuuuggauauucaaugggu

SEQ ID NO: 511485 - RNA, 19 nt, Artificial Sequence
  Description of Artificial Sequence: Synthetic oligonucleotide
uaauuuuaaggucauggaa

SEQ ID NO: 511486 - RNA, 19 nt, Artificial Sequence
  Description of Artificial Sequence: Synthetic oligonucleotide
auucaauggguguacaguc

SEQ ID NO: 511487 - RNA, 19 nt, Artificial Sequence
  Description of Artificial Sequence: Synthetic oligonucleotide
uaaucgaaauccaucaccu

SEQ ID NO: 511488 - RNA, 19 nt, Artificial Sequence
  Description of Artificial Sequence: Synthetic oligonucleotide
uccuuuaagguuaaaugug

SEQ ID NO: 511489 - RNA, 19 nt, Artificial Sequence
  Description of Artificial Sequence: Synthetic oligonucleotide
aaaacugaucuguccgucg

SEQ ID NO: 511490 - RNA, 19 nt, Artificial Sequence
  Description of Artificial Sequence: Synthetic oligonucleotide
caauuaguaagccaccagg

SEQ ID NO: 511491 - RNA, 19 nt, Artificial Sequence
  Description of Artificial Sequence: Synthetic oligonucleotide
uuuuauagaaacuggcuau

SEQ ID NO: 511492 - RNA, 19 nt, Artificial Sequence
  Description of Artificial Sequence: Synthetic oligonucleotide
uucaugauuuuauggacag

SEQ ID NO: 511493 - RNA, 19 nt, Artificial Sequence
  Description of Artificial Sequence: Synthetic oligonucleotide
auuucuauuaacaggcacg

SEQ ID NO: 511494 - RNA, 19 nt, Artificial Sequence
  Description of Artificial Sequence: Synthetic oligonucleotide
uaguucaugauuuuaugga

SEQ ID NO: 511495 - RNA, 19 nt, Artificial Sequence
  Description of Artificial Sequence: Synthetic oligonucleotide
cauccuuuaagguuaaaug

SEQ ID NO: 511496 - RNA, 19 nt, Artificial Sequence
  Description of Artificial Sequence: Synthetic oligonucleotide
gagcauuuaucuguaaucg

SEQ ID NO: 511497 - RNA, 19 nt, Artificial Sequence
  Description of Artificial Sequence: Synthetic oligonucleotide
aucaauaauccauaacucu

SEQ ID NO: 511498 - RNA, 19 nt, Artificial Sequence
  Description of Artificial Sequence: Synthetic oligonucleotide
aacuggcuaucacacgugc

SEQ ID NO: 511499 - RNA, 19 nt, Artificial Sequence
  Description of Artificial Sequence: Synthetic oligonucleotide
uuuacaugccauuguaagc

SEQ ID NO: 511500 - RNA, 19 nt, Artificial Sequence
  Description of Artificial Sequence: Synthetic oligonucleotide
auccuuuaagguuaaaugu

SEQ ID NO: 511501 - RNA, 19 nt, Artificial Sequence
  Description of Artificial Sequence: Synthetic oligonucleotide
gacgaauagcugcagagag

SEQ ID NO: 511502 - RNA, 19 nt, Artificial Sequence
  Description of Artificial Sequence: Synthetic oligonucleotide
gagccuuuauguuuuagag

SEQ ID NO: 511503 - RNA, 19 nt, Artificial Sequence
  Description of Artificial Sequence: Synthetic oligonucleotide
guaaucgaaauccaucacc

SEQ ID NO: 511504 - RNA, 19 nt, Artificial Sequence
  Description of Artificial Sequence: Synthetic oligonucleotide
caucuuuugucuuuucccg

SEQ ID NO: 511505 - RNA, 19 nt, Artificial Sequence
  Description of Artificial Sequence: Synthetic oligonucleotide
aucgaaauccaucaccuug

SEQ ID NO: 511506 - RNA, 19 nt, Artificial Sequence
  Description of Artificial Sequence: Synthetic oligonucleotide
gauuaguaccacucaaagc

SEQ ID NO: 511507 - RNA, 19 nt, Artificial Sequence
  Description of Artificial Sequence: Synthetic oligonucleotide
uagacgaauagcugcagag

SEQ ID NO: 511508 - RNA, 19 nt, Artificial Sequence
  Description of Artificial Sequence: Synthetic oligonucleotide
ucaucggaagaccuggaag

SEQ ID NO: 511509 - RNA, 19 nt, Artificial Sequence
  Description of Artificial Sequence: Synthetic oligonucleotide
cauguucaugauuaguacc

SEQ ID NO: 511510 - RNA, 19 nt, Artificial Sequence
  Description of Artificial Sequence: Synthetic oligonucleotide
ugccauuguaagcaggucc

SEQ ID NO: 511511 - RNA, 19 nt, Artificial Sequence
  Description of Artificial Sequence: Synthetic oligonucleotide
acccaguuaauauucugac

SEQ ID NO: 511512 - RNA, 19 nt, Artificial Sequence
  Description of Artificial Sequence: Synthetic oligonucleotide
uuuuacacuaccgucuuca

SEQ ID NO: 511513 - RNA, 19 nt, Artificial Sequence
  Description of Artificial Sequence: Synthetic oligonucleotide
cauggaagcacugauacac

SEQ ID NO: 511514 - RNA, 19 nt, Artificial Sequence
  Description of Artificial Sequence: Synthetic oligonucleotide
ucacuagauguccuaggcg

SEQ ID NO: 511515 - RNA, 19 nt, Artificial Sequence
  Description of Artificial Sequence: Synthetic oligonucleotide
uguucaucggaagaccugg

SEQ ID NO: 511516 - RNA, 19 nt, Artificial Sequence
  Description of Artificial Sequence: Synthetic oligonucleotide
ugagcauuuaucuguaauc

SEQ ID NO: 511517 - RNA, 19 nt, Artificial Sequence
  Description of Artificial Sequence: Synthetic oligonucleotide
agagucugagccuuuaugu

SEQ ID NO: 511518 - RNA, 19 nt, Artificial Sequence
  Description of Artificial Sequence: Synthetic oligonucleotide
ugauagucuagaccaacca

SEQ ID NO: 511519 - RNA, 19 nt, Artificial Sequence
  Description of Artificial Sequence: Synthetic oligonucleotide
guguacaguccuuagcugg

SEQ ID NO: 511520 - RNA, 19 nt, Artificial Sequence
  Description of Artificial Sequence: Synthetic oligonucleotide
aguggguaguaauuugagg

SEQ ID NO: 511521 - RNA, 19 nt, Artificial Sequence
  Description of Artificial Sequence: Synthetic oligonucleotide
ugauuuuauggacagcuuu

SEQ ID NO: 511522 - RNA, 19 nt, Artificial Sequence
  Description of Artificial Sequence: Synthetic oligonucleotide
uuaaggaacacuuguucaa

SEQ ID NO: 511523 - RNA, 19 nt, Artificial Sequence
  Description of Artificial Sequence: Synthetic oligonucleotide
aauuaguaagccaccagga

SEQ ID NO: 511524 - RNA, 19 nt, Artificial Sequence
  Description of Artificial Sequence: Synthetic oligonucleotide
uguguuuuacaugccauug

SEQ ID NO: 511525 - RNA, 19 nt, Artificial Sequence
  Description of Artificial Sequence: Synthetic oligonucleotide
uccauaaguaugucugucc

SEQ ID NO: 511526 - RNA, 19 nt, Artificial Sequence
  Description of Artificial Sequence: Synthetic oligonucleotide
acuauuaccacaucugcuu

SEQ ID NO: 511527 - RNA, 19 nt, Artificial Sequence
  Description of Artificial Sequence: Synthetic oligonucleotide
uucaaauuauccucauacu

SEQ ID NO: 511528 - RNA, 19 nt, Artificial Sequence
  Description of Artificial Sequence: Synthetic oligonucleotide
guuuaaggaacacuuguuc

SEQ ID NO: 511529 - RNA, 19 nt, Artificial Sequence
  Description of Artificial Sequence: Synthetic oligonucleotide
caucccuccauauacuccc

SEQ ID NO: 511530 - RNA, 19 nt, Artificial Sequence
  Description of Artificial Sequence: Synthetic oligonucleotide
uuagguauggauucugaua

SEQ ID NO: 511531 - RNA, 19 nt, Artificial Sequence
  Description of Artificial Sequence: Synthetic oligonucleotide
ugacuugggucuuugauau

SEQ ID NO: 511532 - RNA, 19 nt, Artificial Sequence
  Description of Artificial Sequence: Synthetic oligonucleotide
ucgaaauccaucaccuugu

SEQ ID NO: 511533 - RNA, 19 nt, Artificial Sequence
  Description of Artificial Sequence: Synthetic oligonucleotide
aaaugaaggcgcuuguguu

SEQ ID NO: 511534 - RNA, 19 nt, Artificial Sequence
  Description of Artificial Sequence: Synthetic oligonucleotide
caacuauuaccacaucugc

SEQ ID NO: 511535 - RNA, 19 nt, Artificial Sequence
  Description of Artificial Sequence: Synthetic oligonucleotide
auauucaauggguguacag

SEQ ID NO: 511536 - RNA, 19 nt, Artificial Sequence
  Description of Artificial Sequence: Synthetic oligonucleotide
uguauggguaccuuugauc

SEQ ID NO: 511537 - RNA, 19 nt, Artificial Sequence
  Description of Artificial Sequence: Synthetic oligonucleotide
uguauuccuacgucauuag

SEQ ID NO: 511538 - RNA, 19 nt, Artificial Sequence
  Description of Artificial Sequence: Synthetic oligonucleotide
gguuuuggauauucaaugg

SEQ ID NO: 511539 - RNA, 19 nt, Artificial Sequence
  Description of Artificial Sequence: Synthetic oligonucleotide
uucaauggguguacagucc

SEQ ID NO: 511540 - RNA, 19 nt, Artificial Sequence
  Description of Artificial Sequence: Synthetic oligonucleotide
gccuuuauguuuuagaguc

SEQ ID NO: 511541 - RNA, 19 nt, Artificial Sequence
  Description of Artificial Sequence: Synthetic oligonucleotide
aaguuuugguauagacugc

SEQ ID NO: 511542 - RNA, 19 nt, Artificial Sequence
  Description of Artificial Sequence: Synthetic oligonucleotide
agcuacuagagguucaccu

SEQ ID NO: 511543 - RNA, 19 nt, Artificial Sequence
  Description of Artificial Sequence: Synthetic oligonucleotide
guuuuauagaaacuggcua

SEQ ID NO: 511544 - RNA, 19 nt, Artificial Sequence
  Description of Artificial Sequence: Synthetic oligonucleotide
uggccuuauauuccuaaca

SEQ ID NO: 511545 - RNA, 19 nt, Artificial Sequence
  Description of Artificial Sequence: Synthetic oligonucleotide
ugcuuuagacgaauagcug

SEQ ID NO: 511546 - RNA, 19 nt, Artificial Sequence
  Description of Artificial Sequence: Synthetic oligonucleotide
uguucaaaguagcccggag

SEQ ID NO: 511547 - RNA, 19 nt, Artificial Sequence
  Description of Artificial Sequence: Synthetic oligonucleotide
uaucacacgugccaguaaa

SEQ ID NO: 511548 - RNA, 19 nt, Artificial Sequence
  Description of Artificial Sequence: Synthetic oligonucleotide
cuacaaccaauuaguaagc

SEQ ID NO: 511549 - RNA, 19 nt, Artificial Sequence
  Description of Artificial Sequence: Synthetic oligonucleotide
uuaguaccacucaaagcca

SEQ ID NO: 511550 - RNA, 19 nt, Artificial Sequence
  Description of Artificial Sequence: Synthetic oligonucleotide
uguaaucgaaauccaucac

SEQ ID NO: 511551 - RNA, 19 nt, Artificial Sequence
  Description of Artificial Sequence: Synthetic oligonucleotide
uggaagcacugauacacag

SEQ ID NO: 511552 - RNA, 19 nt, Artificial Sequence
  Description of Artificial Sequence: Synthetic oligonucleotide
acaaccaauuaguaagcca

SEQ ID NO: 511553 - RNA, 19 nt, Artificial Sequence
  Description of Artificial Sequence: Synthetic oligonucleotide
aucaucccuccauauacuc

SEQ ID NO: 511554 - RNA, 19 nt, Artificial Sequence
  Description of Artificial Sequence: Synthetic oligonucleotide
cucacuagauguccuaggc

SEQ ID NO: 511555 - RNA, 19 nt, Artificial Sequence
  Description of Artificial Sequence: Synthetic oligonucleotide
uuuuauggacagcuuuaga

SEQ ID NO: 511556 - RNA, 19 nt, Artificial Sequence
  Description of Artificial Sequence: Synthetic oligonucleotide
aaugaaggcgcuuguguuu

SEQ ID NO: 511557 - RNA, 19 nt, Artificial Sequence
  Description of Artificial Sequence: Synthetic oligonucleotide
gcuuuagacgaauagcugc

SEQ ID NO: 511558 - RNA, 19 nt, Artificial Sequence
  Description of Artificial Sequence: Synthetic oligonucleotide
augauuguucaucggaaga

SEQ ID NO: 511559 - RNA, 19 nt, Artificial Sequence
  Description of Artificial Sequence: Synthetic oligonucleotide
uuccuaacagcauguagcu

SEQ ID NO: 511560 - RNA, 19 nt, Artificial Sequence
  Description of Artificial Sequence: Synthetic oligonucleotide
acgcugucauccuuuaagg

SEQ ID NO: 511561 - RNA, 19 nt, Artificial Sequence
  Description of Artificial Sequence: Synthetic oligonucleotide
ugauuguucaucggaagac

SEQ ID NO: 511562 - RNA, 19 nt, Artificial Sequence
  Description of Artificial Sequence: Synthetic oligonucleotide
ugugaucuacucucccagg

SEQ ID NO: 511563 - RNA, 19 nt, Artificial Sequence
  Description of Artificial Sequence: Synthetic oligonucleotide
acacacgggagagagggcc

SEQ ID NO: 511564 - RNA, 19 nt, Artificial Sequence
  Description of Artificial Sequence: Synthetic oligonucleotide
uguccuaggcguacaaugu

SEQ ID NO: 511565 - RNA, 19 nt, Artificial Sequence
  Description of Artificial Sequence: Synthetic oligonucleotide
acacacggaugucuuuucc

SEQ ID NO: 511566 - RNA, 19 nt, Artificial Sequence
  Description of Artificial Sequence: Synthetic oligonucleotide
uccuacgucauuaguggca

SEQ ID NO: 511567 - RNA, 19 nt, Artificial Sequence
  Description of Artificial Sequence: Synthetic oligonucleotide
uaaaucaucccuccauaua

SEQ ID NO: 511568 - RNA, 19 nt, Artificial Sequence
  Description of Artificial Sequence: Synthetic oligonucleotide
uacuucaguaauguuuaag

SEQ ID NO: 511569 - RNA, 19 nt, Artificial Sequence
  Description of Artificial Sequence: Synthetic oligonucleotide
agguuaaaugugcuggcug

SEQ ID NO: 511570 - RNA, 19 nt, Artificial Sequence
  Description of Artificial Sequence: Synthetic oligonucleotide
aacuauuaccacaucugcu

SEQ ID NO: 511571 - RNA, 19 nt, Artificial Sequence
  Description of Artificial Sequence: Synthetic oligonucleotide
ucaucccuccauauacucc

SEQ ID NO: 511572 - RNA, 19 nt, Artificial Sequence
  Description of Artificial Sequence: Synthetic oligonucleotide
auggcaacccucugcaaag

SEQ ID NO: 511573 - RNA, 19 nt, Artificial Sequence
  Description of Artificial Sequence: Synthetic oligonucleotide
auagucuagaccaaccaca

SEQ ID NO: 511574 - RNA, 19 nt, Artificial Sequence
  Description of Artificial Sequence: Synthetic oligonucleotide
uaggcguacaauguaguug

SEQ ID NO: 511575 - RNA, 19 nt, Artificial Sequence
  Description of Artificial Sequence: Synthetic oligonucleotide
uuauagaaacuggcuauca

SEQ ID NO: 511576 - RNA, 19 nt, Artificial Sequence
  Description of Artificial Sequence: Synthetic oligonucleotide
uuccuuuuacacuaccguc

SEQ ID NO: 511577 - RNA, 19 nt, Artificial Sequence
  Description of Artificial Sequence: Synthetic oligonucleotide
aaagagccuccauaaguau

SEQ ID NO: 511578 - RNA, 19 nt, Artificial Sequence
  Description of Artificial Sequence: Synthetic oligonucleotide
guggguaguaauuugaggu

SEQ ID NO: 511579 - RNA, 19 nt, Artificial Sequence
  Description of Artificial Sequence: Synthetic oligonucleotide
uugagguacaacagaaguu

SEQ ID NO: 511580 - RNA, 19 nt, Artificial Sequence
  Description of Artificial Sequence: Synthetic oligonucleotide
auuaguaagccaccaggaa

SEQ ID NO: 511581 - RNA, 19 nt, Artificial Sequence
  Description of Artificial Sequence: Synthetic oligonucleotide
auuauccucauacucgguu

SEQ ID NO: 511582 - RNA, 19 nt, Artificial Sequence
  Description of Artificial Sequence: Synthetic oligonucleotide
uuuauagaaacuggcuauc

SEQ ID NO: 511583 - RNA, 19 nt, Artificial Sequence
  Description of Artificial Sequence: Synthetic oligonucleotide
auauacucccaguauccca

SEQ ID NO: 511584 - RNA, 19 nt, Artificial Sequence
  Description of Artificial Sequence: Synthetic oligonucleotide
ggccuuauauuccuaacag

SEQ ID NO: 511585 - RNA, 19 nt, Artificial Sequence
  Description of Artificial Sequence: Synthetic oligonucleotide
cauguucaaaguagcccgg

SEQ ID NO: 511586 - RNA, 19 nt, Artificial Sequence
  Description of Artificial Sequence: Synthetic oligonucleotide
ugcaguucuaguccccucu

SEQ ID NO: 511587 - RNA, 19 nt, Artificial Sequence
  Description of Artificial Sequence: Synthetic oligonucleotide
ggaaaaguaaguuuuggua

SEQ ID NO: 511588 - RNA, 19 nt, Artificial Sequence
  Description of Artificial Sequence: Synthetic oligonucleotide
guauggguaccuuugaucu

SEQ ID NO: 511589 - RNA, 19 nt, Artificial Sequence
  Description of Artificial Sequence: Synthetic oligonucleotide
uggcgugcaguucuagucc

SEQ ID NO: 511590 - RNA, 19 nt, Artificial Sequence
  Description of Artificial Sequence: Synthetic oligonucleotide
agagaucaaaacugaucug

SEQ ID NO: 511591 - RNA, 19 nt, Artificial Sequence
  Description of Artificial Sequence: Synthetic oligonucleotide
ucauccuuuaagguuaaau

SEQ ID NO: 511592 - RNA, 19 nt, Artificial Sequence
  Description of Artificial Sequence: Synthetic oligonucleotide
ucacuaguuaauugauuaa

SEQ ID NO: 511593 - RNA, 19 nt, Artificial Sequence
  Description of Artificial Sequence: Synthetic oligonucleotide
caguguaaaucaucccucc

SEQ ID NO: 511594 - RNA, 19 nt, Artificial Sequence
  Description of Artificial Sequence: Synthetic oligonucleotide
uagucuagaccaaccacaa

SEQ ID NO: 511595 - RNA, 19 nt, Artificial Sequence
  Description of Artificial Sequence: Synthetic oligonucleotide
uuguucaucggaagaccug

SEQ ID NO: 511596 - RNA, 19 nt, Artificial Sequence
  Description of Artificial Sequence: Synthetic oligonucleotide
agggcuacaaccaauuagu

SEQ ID NO: 511597 - RNA, 19 nt, Artificial Sequence
  Description of Artificial Sequence: Synthetic oligonucleotide
cucucugaaaggacuuagg

SEQ ID NO: 511598 - RNA, 19 nt, Artificial Sequence
  Description of Artificial Sequence: Synthetic oligonucleotide
agcauuuaucuguaaucga

SEQ ID NO: 511599 - RNA, 19 nt, Artificial Sequence
  Description of Artificial Sequence: Synthetic oligonucleotide
caucggaagaccuggaaga

SEQ ID NO: 511600 - RNA, 19 nt, Artificial Sequence
  Description of Artificial Sequence: Synthetic oligonucleotide
caccuuguuccaaaggaac

SEQ ID NO: 511601 - RNA, 19 nt, Artificial Sequence
  Description of Artificial Sequence: Synthetic oligonucleotide
agcgccaacuauuaccaca

SEQ ID NO: 511602 - RNA, 19 nt, Artificial Sequence
  Description of Artificial Sequence: Synthetic oligonucleotide
cauacucgguuacauggag

SEQ ID NO: 511603 - RNA, 19 nt, Artificial Sequence
  Description of Artificial Sequence: Synthetic oligonucleotide
agccuuuauguuuuagagu

SEQ ID NO: 511604 - RNA, 19 nt, Artificial Sequence
  Description of Artificial Sequence: Synthetic oligonucleotide
accagacacacacggaugu

SEQ ID NO: 511605 - RNA, 19 nt, Artificial Sequence
  Description of Artificial Sequence: Synthetic oligonucleotide
uacaaccaauuaguaagcc

SEQ ID NO: 511606 - RNA, 19 nt, Artificial Sequence
  Description of Artificial Sequence: Synthetic oligonucleotide
ucggguuuuggauauucaa

SEQ ID NO: 511607 - RNA, 19 nt, Artificial Sequence
  Description of Artificial Sequence: Synthetic oligonucleotide
gaccuggaagaauuggcac

SEQ ID NO: 511608 - RNA, 19 nt, Artificial Sequence
  Description of Artificial Sequence: Synthetic oligonucleotide
cuacuagagguucaccuuc

SEQ ID NO: 511609 - RNA, 19 nt, Artificial Sequence
  Description of Artificial Sequence: Synthetic oligonucleotide
uuggcgugcaguucuaguc

SEQ ID NO: 511610 - RNA, 19 nt, Artificial Sequence
  Description of Artificial Sequence: Synthetic oligonucleotide
ugugacuuuggcgugcagu

SEQ ID NO: 511611 - RNA, 19 nt, Artificial Sequence
  Description of Artificial Sequence: Synthetic oligonucleotide
auacccaagauuucuucaa

SEQ ID NO: 511612 - RNA, 19 nt, Artificial Sequence
  Description of Artificial Sequence: Synthetic oligonucleotide
auguugacuuuggugcacc

SEQ ID NO: 511613 - RNA, 19 nt, Artificial Sequence
  Description of Artificial Sequence: Synthetic oligonucleotide
uccguuacaggaguguuaa

SEQ ID NO: 511614 - RNA, 19 nt, Artificial Sequence
  Description of Artificial Sequence: Synthetic oligonucleotide
acaggaauucuauguuucu

SEQ ID NO: 511615 - RNA, 19 nt, Artificial Sequence
  Description of Artificial Sequence: Synthetic oligonucleotide
ucacacgugccaguaaaug

SEQ ID NO: 511616 - RNA, 19 nt, Artificial Sequence
  Description of Artificial Sequence: Synthetic oligonucleotide
accaggaaaaguaaguuuu

SEQ ID NO: 511617 - RNA, 19 nt, Artificial Sequence
  Description of Artificial Sequence: Synthetic oligonucleotide
aguaucccauggcaggaug

SEQ ID NO: 511618 - RNA, 19 nt, Artificial Sequence
  Description of Artificial Sequence: Synthetic oligonucleotide
uggguaguaauuugaggua

SEQ ID NO: 511619 - RNA, 19 nt, Artificial Sequence
  Description of Artificial Sequence: Synthetic oligonucleotide
ccauauacucccaguaucc

SEQ ID NO: 511620 - RNA, 19 nt, Artificial Sequence
  Description of Artificial Sequence: Synthetic oligonucleotide
cuuuauguuuuagagucca

SEQ ID NO: 511621 - RNA, 19 nt, Artificial Sequence
  Description of Artificial Sequence: Synthetic oligonucleotide
gaaagagccuccauaagua

SEQ ID NO: 511622 - RNA, 19 nt, Artificial Sequence
  Description of Artificial Sequence: Synthetic oligonucleotide
cauuguaagcagguccucc

SEQ ID NO: 511623 - RNA, 19 nt, Artificial Sequence
  Description of Artificial Sequence: Synthetic oligonucleotide
auuccauaggucuggggau

SEQ ID NO: 511624 - RNA, 19 nt, Artificial Sequence
  Description of Artificial Sequence: Synthetic oligonucleotide
uuccucucaauauccagua

SEQ ID NO: 511625 - RNA, 19 nt, Artificial Sequence
  Description of Artificial Sequence: Synthetic oligonucleotide
guucaaaguagcccggaga

SEQ ID NO: 511626 - RNA, 19 nt, Artificial Sequence
  Description of Artificial Sequence: Synthetic oligonucleotide
caguaaaugaaggcgcuug

SEQ ID NO: 511627 - RNA, 19 nt, Artificial Sequence
  Description of Artificial Sequence: Synthetic oligonucleotide
auggguaccuuugaucuug

SEQ ID NO: 511628 - RNA, 19 nt, Artificial Sequence
  Description of Artificial Sequence: Synthetic oligonucleotide
uggacagcuuuagauauaa

SEQ ID NO: 511629 - RNA, 19 nt, Artificial Sequence
  Description of Artificial Sequence: Synthetic oligonucleotide
acgucauuaguggcaauuc

SEQ ID NO: 511630 - RNA, 19 nt, Artificial Sequence
  Description of Artificial Sequence: Synthetic oligonucleotide
aggaacacuuguucaagaa

SEQ ID NO: 511631 - RNA, 19 nt, Artificial Sequence
  Description of Artificial Sequence: Synthetic oligonucleotide
gguauagacugcaagccgc

SEQ ID NO: 511632 - RNA, 19 nt, Artificial Sequence
  Description of Artificial Sequence: Synthetic oligonucleotide
caauuccuuuuacacuacc

SEQ ID NO: 511633 - RNA, 19 nt, Artificial Sequence
  Description of Artificial Sequence: Synthetic oligonucleotide
uuuggcgugcaguucuagu

SEQ ID NO: 511634 - RNA, 19 nt, Artificial Sequence
  Description of Artificial Sequence: Synthetic oligonucleotide
cauauacucccaguauccc

SEQ ID NO: 511635 - RNA, 19 nt, Artificial Sequence
  Description of Artificial Sequence: Synthetic oligonucleotide
cauuuaucuguaaucgaaa

SEQ ID NO: 511636 - RNA, 19 nt, Artificial Sequence
  Description of Artificial Sequence: Synthetic oligonucleotide
uagcccggagacuugacaa

SEQ ID NO: 511637 - RNA, 19 nt, Artificial Sequence
  Description of Artificial Sequence: Synthetic oligonucleotide
uuuguauuccuacgucauu

SEQ ID NO: 511638 - RNA, 19 nt, Artificial Sequence
  Description of Artificial Sequence: Synthetic oligonucleotide
cauacccaagauuucuuca

SEQ ID NO: 511639 - RNA, 19 nt, Artificial Sequence
  Description of Artificial Sequence: Synthetic oligonucleotide
aaucgaaauccaucaccuu

SEQ ID NO: 511640 - RNA, 19 nt, Artificial Sequence
  Description of Artificial Sequence: Synthetic oligonucleotide
aaucaucccuccauauacu

SEQ ID NO: 511641 - RNA, 19 nt, Artificial Sequence
  Description of Artificial Sequence: Synthetic oligonucleotide
acggaugucuuuuccuugu

SEQ ID NO: 511642 - RNA, 19 nt, Artificial Sequence
  Description of Artificial Sequence: Synthetic oligonucleotide
uuguguuuuacaugccauu

SEQ ID NO: 511643 - RNA, 19 nt, Artificial Sequence
  Description of Artificial Sequence: Synthetic oligonucleotide
cugcuuuagacgaauagcu

SEQ ID NO: 511644 - RNA, 19 nt, Artificial Sequence
  Description of Artificial Sequence: Synthetic oligonucleotide
uuccuacgucauuaguggc

SEQ ID NO: 511645 - RNA, 19 nt, Artificial Sequence
  Description of Artificial Sequence: Synthetic oligonucleotide
gguaccuuugaucuuggga

SEQ ID NO: 511646 - RNA, 19 nt, Artificial Sequence
  Description of Artificial Sequence: Synthetic oligonucleotide
agauuuucacuaguuaauu

SEQ ID NO: 511647 - RNA, 19 nt, Artificial Sequence
  Description of Artificial Sequence: Synthetic oligonucleotide
auuguucaucggaagaccu

SEQ ID NO: 511648 - RNA, 19 nt, Artificial Sequence
  Description of Artificial Sequence: Synthetic oligonucleotide
agggcgcuggacuuucagg

SEQ ID NO: 511649 - RNA, 19 nt, Artificial Sequence
  Description of Artificial Sequence: Synthetic oligonucleotide
cauaggcuauccucuuccc

SEQ ID NO: 511650 - RNA, 19 nt, Artificial Sequence
  Description of Artificial Sequence: Synthetic oligonucleotide
uguccgucggguuuuggau

SEQ ID NO: 511651 - RNA, 19 nt, Artificial Sequence
  Description of Artificial Sequence: Synthetic oligonucleotide
cugucauccuuuaagguua

SEQ ID NO: 511652 - RNA, 19 nt, Artificial Sequence
  Description of Artificial Sequence: Synthetic oligonucleotide
cuuucaaaccaauuccaua

SEQ ID NO: 511653 - RNA, 19 nt, Artificial Sequence
  Description of Artificial Sequence: Synthetic oligonucleotide
uggguaccuuugaucuugg

SEQ ID NO: 511654 - RNA, 19 nt, Artificial Sequence
  Description of Artificial Sequence: Synthetic oligonucleotide
uccuaucugagcagcuuuc

SEQ ID NO: 511655 - RNA, 19 nt, Artificial Sequence
  Description of Artificial Sequence: Synthetic oligonucleotide
cacugauacacagggcagg

SEQ ID NO: 511656 - RNA, 19 nt, Artificial Sequence
  Description of Artificial Sequence: Synthetic oligonucleotide
auuaacaggcacgcuguca

SEQ ID NO: 511657 - RNA, 19 nt, Artificial Sequence
  Description of Artificial Sequence: Synthetic oligonucleotide
cugaaaggacuuagguaug

SEQ ID NO: 511658 - RNA, 19 nt, Artificial Sequence
  Description of Artificial Sequence: Synthetic oligonucleotide
uucaugaaaccagggcuac

SEQ ID NO: 511659 - RNA, 19 nt, Artificial Sequence
  Description of Artificial Sequence: Synthetic oligonucleotide
gcugcuuuagacgaauagc

SEQ ID NO: 511660 - RNA, 19 nt, Artificial Sequence
  Description of Artificial Sequence: Synthetic oligonucleotide
uacucucccagguuuccac

SEQ ID NO: 511661 - RNA, 19 nt, Artificial Sequence
  Description of Artificial Sequence: Synthetic oligonucleotide
ugaucuacucucccagguu

SEQ ID NO: 511662 - RNA, 19 nt, Artificial Sequence
  Description of Artificial Sequence: Synthetic oligonucleotide
cuuggcuagccgcaccagc

SEQ ID NO: 511663 - RNA, 19 nt, Artificial Sequence
  Description of Artificial Sequence: Synthetic oligonucleotide
ucuuccguuacaggagugu

SEQ ID NO: 511664 - RNA, 19 nt, Artificial Sequence
  Description of Artificial Sequence: Synthetic oligonucleotide
cacgugccaguaaaugaag

SEQ ID NO: 511665 - RNA, 19 nt, Artificial Sequence
  Description of Artificial Sequence: Synthetic oligonucleotide
aaacuggcuaucacacgug

SEQ ID NO: 511666 - RNA, 19 nt, Artificial Sequence
  Description of Artificial Sequence: Synthetic oligonucleotide
uauuaacaggcacgcuguc

SEQ ID NO: 511667 - RNA, 19 nt, Artificial Sequence
  Description of Artificial Sequence: Synthetic oligonucleotide
accaauuaguaagccacca

SEQ ID NO: 511668 - RNA, 19 nt, Artificial Sequence
  Description of Artificial Sequence: Synthetic oligonucleotide
cacuagauguccuaggcgu

SEQ ID NO: 511669 - RNA, 19 nt, Artificial Sequence
  Description of Artificial Sequence: Synthetic oligonucleotide
cuuuucccggggaugaaca

SEQ ID NO: 511670 - RNA, 19 nt, Artificial Sequence
  Description of Artificial Sequence: Synthetic oligonucleotide
uaucccauggcaggauggc

SEQ ID NO: 511671 - RNA, 19 nt, Artificial Sequence
  Description of Artificial Sequence: Synthetic oligonucleotide
gccagcgccaacuauuacc

SEQ ID NO: 511672 - RNA, 19 nt, Artificial Sequence
  Description of Artificial Sequence: Synthetic oligonucleotide
ucuacucucccagguuucc

SEQ ID NO: 511673 - RNA, 19 nt, Artificial Sequence
  Description of Artificial Sequence: Synthetic oligonucleotide
ucaugauuuuauggacagc

SEQ ID NO: 511674 - RNA, 19 nt, Artificial Sequence
  Description of Artificial Sequence: Synthetic oligonucleotide
uucacuccuucccaucuuu

SEQ ID NO: 511675 - RNA, 19 nt, Artificial Sequence
  Description of Artificial Sequence: Synthetic oligonucleotide
cuauuaacaggcacgcugu

SEQ ID NO: 511676 - RNA, 19 nt, Artificial Sequence
  Description of Artificial Sequence: Synthetic oligonucleotide
auacacuuacaguuuuaua

SEQ ID NO: 511677 - RNA, 19 nt, Artificial Sequence
  Description of Artificial Sequence: Synthetic oligonucleotide
auggauucugauagucuag

SEQ ID NO: 511678 - RNA, 19 nt, Artificial Sequence
  Description of Artificial Sequence: Synthetic oligonucleotide
agaccaucuuguagcacac

SEQ ID NO: 511679 - RNA, 19 nt, Artificial Sequence
  Description of Artificial Sequence: Synthetic oligonucleotide
cucugaaaggacuuaggua

SEQ ID NO: 511680 - RNA, 19 nt, Artificial Sequence
  Description of Artificial Sequence: Synthetic oligonucleotide
uacgucauuaguggcaauu

SEQ ID NO: 511681 - RNA, 19 nt, Artificial Sequence
  Description of Artificial Sequence: Synthetic oligonucleotide
uuuacacuaccgucuucau

SEQ ID NO: 511682 - RNA, 19 nt, Artificial Sequence
  Description of Artificial Sequence: Synthetic oligonucleotide
uccauacccaagauuucuu

SEQ ID NO: 511683 - RNA, 19 nt, Artificial Sequence
  Description of Artificial Sequence: Synthetic oligonucleotide
accuucuggcaccacccag

SEQ ID NO: 511684 - RNA, 19 nt, Artificial Sequence
  Description of Artificial Sequence: Synthetic oligonucleotide
auucaugaaaccagggcua

SEQ ID NO: 511685 - RNA, 19 nt, Artificial Sequence
  Description of Artificial Sequence: Synthetic oligonucleotide
uccauaggcuauccucuuc

SEQ ID NO: 511686 - RNA, 19 nt, Artificial Sequence
  Description of Artificial Sequence: Synthetic oligonucleotide
agacgaauagcugcagaga

SEQ ID NO: 511687 - RNA, 19 nt, Artificial Sequence
  Description of Artificial Sequence: Synthetic oligonucleotide
augauuaguaccacucaaa

SEQ ID NO: 511688 - RNA, 19 nt, Artificial Sequence
  Description of Artificial Sequence: Synthetic oligonucleotide
uguugacuuuggugcacca

SEQ ID NO: 511689 - RNA, 19 nt, Artificial Sequence
  Description of Artificial Sequence: Synthetic oligonucleotide
cacuaguuaauugauuaaa

SEQ ID NO: 511690 - RNA, 19 nt, Artificial Sequence
  Description of Artificial Sequence: Synthetic oligonucleotide
uggcuaucacacgugccag

SEQ ID NO: 511691 - RNA, 19 nt, Artificial Sequence
  Description of Artificial Sequence: Synthetic oligonucleotide
ggaaagagccuccauaagu

SEQ ID NO: 511692 - RNA, 19 nt, Artificial Sequence
  Description of Artificial Sequence: Synthetic oligonucleotide
ucgguuacauggaguccug

SEQ ID NO: 511693 - RNA, 19 nt, Artificial Sequence
  Description of Artificial Sequence: Synthetic oligonucleotide
gggaacauucaugaaacca

SEQ ID NO: 511694 - RNA, 19 nt, Artificial Sequence
  Description of Artificial Sequence: Synthetic oligonucleotide
uuccguuacaggaguguua

SEQ ID NO: 511695 - RNA, 19 nt, Artificial Sequence
  Description of Artificial Sequence: Synthetic oligonucleotide
acgugccaguaaaugaagg

SEQ ID NO: 511696 - RNA, 19 nt, Artificial Sequence
  Description of Artificial Sequence: Synthetic oligonucleotide
ucuugggaacauucaugaa

SEQ ID NO: 511697 - RNA, 19 nt, Artificial Sequence
  Description of Artificial Sequence: Synthetic oligonucleotide
ggcgccaucaccugccaag

SEQ ID NO: 511698 - RNA, 19 nt, Artificial Sequence
  Description of Artificial Sequence: Synthetic oligonucleotide
uccgucggguuuuggauau

SEQ ID NO: 511699 - RNA, 19 nt, Artificial Sequence
  Description of Artificial Sequence: Synthetic oligonucleotide
auaaagcugcuuggcuagg

SEQ ID NO: 511700 - RNA, 19 nt, Artificial Sequence
  Description of Artificial Sequence: Synthetic oligonucleotide
uaguggcaauuccuuuuac

SEQ ID NO: 511701 - RNA, 19 nt, Artificial Sequence
  Description of Artificial Sequence: Synthetic oligonucleotide
cagaaucgcugcucaggcc

SEQ ID NO: 511702 - RNA, 19 nt, Artificial Sequence
  Description of Artificial Sequence: Synthetic oligonucleotide
acacgugccaguaaaugaa

SEQ ID NO: 511703 - RNA, 19 nt, Artificial Sequence
  Description of Artificial Sequence: Synthetic oligonucleotide
gguguacaguccuuagcug

SEQ ID NO: 511704 - RNA, 19 nt, Artificial Sequence
  Description of Artificial Sequence: Synthetic oligonucleotide
guaagcagguccuccucca

SEQ ID NO: 511705 - RNA, 19 nt, Artificial Sequence
  Description of Artificial Sequence: Synthetic oligonucleotide
caugaaaccagggcuacaa

SEQ ID NO: 511706 - RNA, 19 nt, Artificial Sequence
  Description of Artificial Sequence: Synthetic oligonucleotide
gagggcgcuggacuuucag

SEQ ID NO: 511707 - RNA, 19 nt, Artificial Sequence
  Description of Artificial Sequence: Synthetic oligonucleotide
aaguagcccggagacuuga

SEQ ID NO: 511708 - RNA, 19 nt, Artificial Sequence
  Description of Artificial Sequence: Synthetic oligonucleotide
ugucauccuuuaagguuaa

SEQ ID NO: 511709 - RNA, 19 nt, Artificial Sequence
  Description of Artificial Sequence: Synthetic oligonucleotide
uuacuucaguaauguuuaa

SEQ ID NO: 511710 - RNA, 19 nt, Artificial Sequence
  Description of Artificial Sequence: Synthetic oligonucleotide
cuccauaaguaugucuguc

SEQ ID NO: 511711 - RNA, 19 nt, Artificial Sequence
  Description of Artificial Sequence: Synthetic oligonucleotide
gcauuuaucuguaaucgaa

SEQ ID NO: 511712 - RNA, 19 nt, Artificial Sequence
  Description of Artificial Sequence: Synthetic oligonucleotide
ccuaacagcauguagcucu

SEQ ID NO: 511713 - RNA, 19 nt, Artificial Sequence
  Description of Artificial Sequence: Synthetic oligonucleotide
ccaauuaguaagccaccag

SEQ ID NO: 511714 - RNA, 19 nt, Artificial Sequence
  Description of Artificial Sequence: Synthetic oligonucleotide
agguauggauucugauagu

SEQ ID NO: 511715 - RNA, 19 nt, Artificial Sequence
  Description of Artificial Sequence: Synthetic oligonucleotide
uauagacugcaagccgccu

SEQ ID NO: 511716 - RNA, 19 nt, Artificial Sequence
  Description of Artificial Sequence: Synthetic oligonucleotide
uuagaguccauggcuccau

SEQ ID NO: 511717 - RNA, 19 nt, Artificial Sequence
  Description of Artificial Sequence: Synthetic oligonucleotide
augccauuguaagcagguc

SEQ ID NO: 511718 - RNA, 19 nt, Artificial Sequence
  Description of Artificial Sequence: Synthetic oligonucleotide
caggaguguuaaguggagc

SEQ ID NO: 511719 - RNA, 19 nt, Artificial Sequence
  Description of Artificial Sequence: Synthetic oligonucleotide
ccuuuauguuuuagagucc

SEQ ID NO: 511720 - RNA, 19 nt, Artificial Sequence
  Description of Artificial Sequence: Synthetic oligonucleotide
uauggguaccuuugaucuu

SEQ ID NO: 511721 - RNA, 19 nt, Artificial Sequence
  Description of Artificial Sequence: Synthetic oligonucleotide
gaaggcgcuuguguuuuac

SEQ ID NO: 511722 - RNA, 19 nt, Artificial Sequence
  Description of Artificial Sequence: Synthetic oligonucleotide
ucaugaaaccagggcuaca

SEQ ID NO: 511723 - RNA, 19 nt, Artificial Sequence
  Description of Artificial Sequence: Synthetic oligonucleotide
cuggacuuucaggccacgg

SEQ ID NO: 511724 - RNA, 19 nt, Artificial Sequence
  Description of Artificial Sequence: Synthetic oligonucleotide
cuuuuacacuaccgucuuc

SEQ ID NO: 511725 - RNA, 19 nt, Artificial Sequence
  Description of Artificial Sequence: Synthetic oligonucleotide
guagcccggagacuugaca

SEQ ID NO: 511726 - RNA, 19 nt, Artificial Sequence
  Description of Artificial Sequence: Synthetic oligonucleotide
agagcgugugagcuccuau

SEQ ID NO: 511727 - RNA, 19 nt, Artificial Sequence
  Description of Artificial Sequence: Synthetic oligonucleotide
uugcuguauggguaccuuu

SEQ ID NO: 511728 - RNA, 19 nt, Artificial Sequence
  Description of Artificial Sequence: Synthetic oligonucleotide
ccuuuuguauuccuacguc

SEQ ID NO: 511729 - RNA, 19 nt, Artificial Sequence
  Description of Artificial Sequence: Synthetic oligonucleotide
acuucaacuccaagagccu

SEQ ID NO: 511730 - RNA, 19 nt, Artificial Sequence
  Description of Artificial Sequence: Synthetic oligonucleotide
cacacacggaugucuuuuc

SEQ ID NO: 511731 - RNA, 19 nt, Artificial Sequence
  Description of Artificial Sequence: Synthetic oligonucleotide
guguuuuacaugccauugu

SEQ ID NO: 511732 - RNA, 19 nt, Artificial Sequence
  Description of Artificial Sequence: Synthetic oligonucleotide
uuagcugguuugagcugau

SEQ ID NO: 511733 - RNA, 19 nt, Artificial Sequence
  Description of Artificial Sequence: Synthetic oligonucleotide
agucuagaccaaccacaaa

SEQ ID NO: 511734 - RNA, 19 nt, Artificial Sequence
  Description of Artificial Sequence: Synthetic oligonucleotide
ucacuccuucccaucuuuu

SEQ ID NO: 511735 - RNA, 19 nt, Artificial Sequence
  Description of Artificial Sequence: Synthetic oligonucleotide
ggcgugcaguucuaguccc

SEQ ID NO: 511736 - RNA, 19 nt, Artificial Sequence
  Description of Artificial Sequence: Synthetic oligonucleotide
cuuuggugcaccauccuuu

SEQ ID NO: 511737 - RNA, 19 nt, Artificial Sequence
  Description of Artificial Sequence: Synthetic oligonucleotide
auauauggacagauuucua

SEQ ID NO: 511738 - RNA, 19 nt, Artificial Sequence
  Description of Artificial Sequence: Synthetic oligonucleotide
cuggcugaucauguucaug

SEQ ID NO: 511739 - RNA, 19 nt, Artificial Sequence
  Description of Artificial Sequence: Synthetic oligonucleotide
uaacaggcacgcugucauc

SEQ ID NO: 511740 - RNA, 19 nt, Artificial Sequence
  Description of Artificial Sequence: Synthetic oligonucleotide
agguucaccuucauuuaaa

SEQ ID NO: 511741 - RNA, 19 nt, Artificial Sequence
  Description of Artificial Sequence: Synthetic oligonucleotide
aguagcccggagacuugac

SEQ ID NO: 511742 - RNA, 19 nt, Artificial Sequence
  Description of Artificial Sequence: Synthetic oligonucleotide
cuuuggcgugcaguucuag

SEQ ID NO: 511743 - RNA, 19 nt, Artificial Sequence
  Description of Artificial Sequence: Synthetic oligonucleotide
ccagcgccaacuauuacca

SEQ ID NO: 511744 - RNA, 19 nt, Artificial Sequence
  Description of Artificial Sequence: Synthetic oligonucleotide
cgucauuaguggcaauucc

SEQ ID NO: 511745 - RNA, 19 nt, Artificial Sequence
  Description of Artificial Sequence: Synthetic oligonucleotide
ucuguccgucggguuuugg

SEQ ID NO: 511746 - RNA, 19 nt, Artificial Sequence
  Description of Artificial Sequence: Synthetic oligonucleotide
gacugcccggcugaaguca

SEQ ID NO: 511747 - RNA, 19 nt, Artificial Sequence
  Description of Artificial Sequence: Synthetic oligonucleotide
cauauucacuccuucccau

SEQ ID NO: 511748 - RNA, 19 nt, Artificial Sequence
  Description of Artificial Sequence: Synthetic oligonucleotide
caaaguagcccggagacuu

SEQ ID NO: 511749 - RNA, 19 nt, Artificial Sequence
  Description of Artificial Sequence: Synthetic oligonucleotide
agcccggagacuugacaaa

SEQ ID NO: 511750 - RNA, 19 nt, Artificial Sequence
  Description of Artificial Sequence: Synthetic oligonucleotide
gcauguagcucuuuccaua

SEQ ID NO: 511751 - RNA, 19 nt, Artificial Sequence
  Description of Artificial Sequence: Synthetic oligonucleotide
cuuguagcacacagaggua

SEQ ID NO: 511752 - RNA, 19 nt, Artificial Sequence
  Description of Artificial Sequence: Synthetic oligonucleotide
gcugucauccuuuaagguu

SEQ ID NO: 511753 - RNA, 19 nt, Artificial Sequence
  Description of Artificial Sequence: Synthetic oligonucleotide
cugauacacagggcaggac

SEQ ID NO: 511754 - RNA, 19 nt, Artificial Sequence
  Description of Artificial Sequence: Synthetic oligonucleotide
uauucugacuugggucuuu

SEQ ID NO: 511755 - RNA, 19 nt, Artificial Sequence
  Description of Artificial Sequence: Synthetic oligonucleotide
ugcucaggcccaucauaua

SEQ ID NO: 511756 - RNA, 19 nt, Artificial Sequence
  Description of Artificial Sequence: Synthetic oligonucleotide
uaguccccucucaaauguu

SEQ ID NO: 511757 - RNA, 19 nt, Artificial Sequence
  Description of Artificial Sequence: Synthetic oligonucleotide
uggcaacccucugcaaaga

SEQ ID NO: 511758 - RNA, 19 nt, Artificial Sequence
  Description of Artificial Sequence: Synthetic oligonucleotide
acaauugguuuggcauaca

SEQ ID NO: 511759 - RNA, 19 nt, Artificial Sequence
  Description of Artificial Sequence: Synthetic oligonucleotide
cagcuacuagagguucacc

SEQ ID NO: 511760 - RNA, 19 nt, Artificial Sequence
  Description of Artificial Sequence: Synthetic oligonucleotide
ccaugauuguucaucggaa

SEQ ID NO: 511761 - RNA, 19 nt, Artificial Sequence
  Description of Artificial Sequence: Synthetic oligonucleotide
gacacacgggagagagggc

SEQ ID NO: 511762 - RNA, 19 nt, Artificial Sequence
  Description of Artificial Sequence: Synthetic oligonucleotide
cacacggaugucuuuuccu

SEQ ID NO: 511763 - RNA, 19 nt, Artificial Sequence
  Description of Artificial Sequence: Synthetic oligonucleotide
gccccugagagcgugugag

SEQ ID NO: 511764 - RNA, 19 nt, Artificial Sequence
  Description of Artificial Sequence: Synthetic oligonucleotide
guccuaggcguacaaugua

SEQ ID NO: 511765 - RNA, 19 nt, Artificial Sequence
  Description of Artificial Sequence: Synthetic oligonucleotide
ggcaccacccaguuaauau

SEQ ID NO: 511766 - RNA, 19 nt, Artificial Sequence
  Description of Artificial Sequence: Synthetic oligonucleotide
cacaguucugagcauuuau

SEQ ID NO: 511767 - RNA, 19 nt, Artificial Sequence
  Description of Artificial Sequence: Synthetic oligonucleotide
ugagagcgugugagcuccu

SEQ ID NO: 511768 - RNA, 19 nt, Artificial Sequence
  Description of Artificial Sequence: Synthetic oligonucleotide
ggguaccuuugaucuuggg

SEQ ID NO: 511769 - RNA, 19 nt, Artificial Sequence
  Description of Artificial Sequence: Synthetic oligonucleotide
gucggguuuuggauauuca

SEQ ID NO: 511770 - RNA, 19 nt, Artificial Sequence
  Description of Artificial Sequence: Synthetic oligonucleotide
aucacacgugccaguaaau

SEQ ID NO: 511771 - RNA, 19 nt, Artificial Sequence
  Description of Artificial Sequence: Synthetic oligonucleotide
gccgaccgcccuugcaucg

SEQ ID NO: 511772 - RNA, 19 nt, Artificial Sequence
  Description of Artificial Sequence: Synthetic oligonucleotide
gucuuccguuacaggagug

SEQ ID NO: 511773 - RNA, 19 nt, Artificial Sequence
  Description of Artificial Sequence: Synthetic oligonucleotide
caaccaacagugugaucua

SEQ ID NO: 511774 - RNA, 19 nt, Artificial Sequence
  Description of Artificial Sequence: Synthetic oligonucleotide
gcccggagacuugacaaag

SEQ ID NO: 511775 - RNA, 19 nt, Artificial Sequence
  Description of Artificial Sequence: Synthetic oligonucleotide
guccgucggguuuuggaua

SEQ ID NO: 511776 - RNA, 19 nt, Artificial Sequence
  Description of Artificial Sequence: Synthetic oligonucleotide
gaacaguguaguggguagu

SEQ ID NO: 511777 - RNA, 19 nt, Artificial Sequence
  Description of Artificial Sequence: Synthetic oligonucleotide
gguucaccuucauuuaaau

SEQ ID NO: 511778 - RNA, 19 nt, Artificial Sequence
  Description of Artificial Sequence: Synthetic oligonucleotide
gaccgcccuugcaucgcgg

SEQ ID NO: 511779 - RNA, 19 nt, Artificial Sequence
  Description of Artificial Sequence: Synthetic oligonucleotide
cagcgccaacuauuaccac

SEQ ID NO: 511780 - RNA, 19 nt, Artificial Sequence
  Description of Artificial Sequence: Synthetic oligonucleotide
gcucaggcccaucauauau

SEQ ID NO: 511781 - RNA, 19 nt, Artificial Sequence
  Description of Artificial Sequence: Synthetic oligonucleotide
auugagugcccgggcucca

SEQ ID NO: 511782 - RNA, 19 nt, Artificial Sequence
  Description of Artificial Sequence: Synthetic oligonucleotide
gguuugagcugaucagagu

SEQ ID NO: 511783 - RNA, 19 nt, Artificial Sequence
  Description of Artificial Sequence: Synthetic oligonucleotide
gcguacaauguaguugcca

SEQ ID NO: 511784 - RNA, 19 nt, Artificial Sequence
  Description of Artificial Sequence: Synthetic oligonucleotide
auggacagcuuuagauaua

SEQ ID NO: 511785 - RNA, 19 nt, Artificial Sequence
  Description of Artificial Sequence: Synthetic oligonucleotide
cuacucucccagguuucca

SEQ ID NO: 511786 - RNA, 19 nt, Artificial Sequence
  Description of Artificial Sequence: Synthetic oligonucleotide
cuguauggguaccuuugau

SEQ ID NO: 511787 - RNA, 19 nt, Artificial Sequence
  Description of Artificial Sequence: Synthetic oligonucleotide
gcuaucacacgugccagua

SEQ ID NO: 511788 - RNA, 19 nt, Artificial Sequence
  Description of Artificial Sequence: Synthetic oligonucleotide
gggccugucugccgcuugc

SEQ ID NO: 511789 - RNA, 19 nt, Artificial Sequence
  Description of Artificial Sequence: Synthetic oligonucleotide
uagcugguuugagcugauc

SEQ ID NO: 511790 - RNA, 19 nt, Artificial Sequence
  Description of Artificial Sequence: Synthetic oligonucleotide
ggcauacacuuacaguuuu

SEQ ID NO: 511791 - RNA, 19 nt, Artificial Sequence
  Description of Artificial Sequence: Synthetic oligonucleotide
cagcucacuagauguccua

SEQ ID NO: 511792 - RNA, 19 nt, Artificial Sequence
  Description of Artificial Sequence: Synthetic oligonucleotide
cguuacaggaguguuaagu

SEQ ID NO: 511793 - RNA, 19 nt, Artificial Sequence
  Description of Artificial Sequence: Synthetic oligonucleotide
ccuacgucauuaguggcaa

SEQ ID NO: 511794 - RNA, 19 nt, Artificial Sequence
  Description of Artificial Sequence: Synthetic oligonucleotide
gcccggcugaagucagucc

SEQ ID NO: 511795 - RNA, 19 nt, Artificial Sequence
  Description of Artificial Sequence: Synthetic oligonucleotide
aggcacgcugucauccuuu

SEQ ID NO: 511796 - RNA, 19 nt, Artificial Sequence
  Description of Artificial Sequence: Synthetic oligonucleotide
gggaucacagcuggcccuc

SEQ ID NO: 511797 - RNA, 19 nt, Artificial Sequence
  Description of Artificial Sequence: Synthetic oligonucleotide
cccaguuaauauucugacu

SEQ ID NO: 511798 - RNA, 19 nt, Artificial Sequence
  Description of Artificial Sequence: Synthetic oligonucleotide
cacuaccgucuucaugaua

SEQ ID NO: 511799 - RNA, 19 nt, Artificial Sequence
  Description of Artificial Sequence: Synthetic oligonucleotide
ggcguacaauguaguugcc

SEQ ID NO: 511800 - RNA, 19 nt, Artificial Sequence
  Description of Artificial Sequence: Synthetic oligonucleotide
gacugcaagccgccuucau

SEQ ID NO: 511801 - RNA, 19 nt, Artificial Sequence
  Description of Artificial Sequence: Synthetic oligonucleotide
ccgccuucauugagugccc

SEQ ID NO: 511802 - RNA, 19 nt, Artificial Sequence
  Description of Artificial Sequence: Synthetic oligonucleotide
gcagcauauccaggguaca

SEQ ID NO: 511803 - RNA, 19 nt, Artificial Sequence
  Description of Artificial Sequence: Synthetic oligonucleotide
gcaacccucugcaaagacu

SEQ ID NO: 511804 - RNA, 19 nt, Artificial Sequence
  Description of Artificial Sequence: Synthetic oligonucleotide
acuuuggcgugcaguucua

SEQ ID NO: 511805 - RNA, 19 nt, Artificial Sequence
  Description of Artificial Sequence: Synthetic oligonucleotide
cuuccguuacaggaguguu

SEQ ID NO: 511806 - RNA, 19 nt, Artificial Sequence
  Description of Artificial Sequence: Synthetic oligonucleotide
ccaccagacacacacggau

SEQ ID NO: 511807 - RNA, 19 nt, Artificial Sequence
  Description of Artificial Sequence: Synthetic oligonucleotide
ccuaggcguacaauguagu

SEQ ID NO: 511808 - RNA, 19 nt, Artificial Sequence
  Description of Artificial Sequence: Synthetic oligonucleotide
ccaguaucccauggcagga

SEQ ID NO: 511809 - RNA, 19 nt, Artificial Sequence
  Description of Artificial Sequence: Synthetic oligonucleotide
cccucucaaauguugacuu

SEQ ID NO: 511810 - RNA, 19 nt, Artificial Sequence
  Description of Artificial Sequence: Synthetic oligonucleotide
gcaccacccaguuaauauu

SEQ ID NO: 511811 - RNA, 19 nt, Artificial Sequence
  Description of Artificial Sequence: Synthetic oligonucleotide
ccgcccuugcaucgcggcg

SEQ ID NO: 511812 - RNA, 19 nt, Artificial Sequence
  Description of Artificial Sequence: Synthetic oligonucleotide
ccguuacaggaguguuaag

SEQ ID NO: 511813 - RNA, 19 nt, Artificial Sequence
  Description of Artificial Sequence: Synthetic oligonucleotide
gccaguaaaugaaggcgcu

SEQ ID NO: 511814 - RNA, 19 nt, Artificial Sequence
  Description of Artificial Sequence: Synthetic oligonucleotide
ggccagcgccaacuauuac

SEQ ID NO: 511815 - RNA, 19 nt, Artificial Sequence
  Description of Artificial Sequence: Synthetic oligonucleotide
ggcuaucacacgugccagu

SEQ ID NO: 511816 - RNA, 19 nt, Artificial Sequence
  Description of Artificial Sequence: Synthetic oligonucleotide
cccggagacuugacaaaga

SEQ ID NO: 511817 - RNA, 19 nt, Artificial Sequence
  Description of Artificial Sequence: Synthetic oligonucleotide
cgucggguuuuggauauuc

SEQ ID NO: 511818 - RNA, 19 nt, Artificial Sequence
  Description of Artificial Sequence: Synthetic oligonucleotide
gggcuacaaccaauuagua

SEQ ID NO: 511819 - RNA, 19 nt, Artificial Sequence
  Description of Artificial Sequence: Synthetic oligonucleotide
ccagacacacacggauguc

SEQ ID NO: 511820 - RNA, 19 nt, Artificial Sequence
  Description of Artificial Sequence: Synthetic oligonucleotide
gcgccaacuauuaccacau

SEQ ID NO: 511821 - RNA, 19 nt, Artificial Sequence
  Description of Artificial Sequence: Synthetic oligonucleotide
gcgugcaguucuagucccc

SEQ ID NO: 511822 - RNA, 19 nt, Artificial Sequence
  Description of Artificial Sequence: Synthetic oligonucleotide
gucauccuuuaagguuaaa

SEQ ID NO: 511823 - RNA, 19 nt, Artificial Sequence
  Description of Artificial Sequence: Synthetic oligonucleotide
ccgacugcccggcugaagu

SEQ ID NO: 511824 - RNA, 19 nt, Artificial Sequence
  Description of Artificial Sequence: Synthetic oligonucleotide
gcuauccucuucccacccu

SEQ ID NO: 511825 - RNA, 19 nt, Artificial Sequence
  Description of Artificial Sequence: Synthetic oligonucleotide
gcgccaucaccugccaaga

SEQ ID NO: 511826 - RNA, 19 nt, Artificial Sequence
  Description of Artificial Sequence: Synthetic oligonucleotide
ggacagcuuuagauauaaa

SEQ ID NO: 511827 - RNA, 19 nt, Artificial Sequence
  Description of Artificial Sequence: Synthetic oligonucleotide
cugcgccgaccgcccuugc

SEQ ID NO: 511828 - RNA, 19 nt, Artificial Sequence
  Description of Artificial Sequence: Synthetic oligonucleotide
cgaccgcccuugcaucgcg

SEQ ID NO: 511829 - RNA, 19 nt, Artificial Sequence
  Description of Artificial Sequence: Synthetic oligonucleotide
guacaguccuuagcugguu

SEQ ID NO: 511830 - RNA, 19 nt, Artificial Sequence
  Description of Artificial Sequence: Synthetic oligonucleotide
gggccagcgccaacuauua

SEQ ID NO: 511831 - RNA, 19 nt, Artificial Sequence
  Description of Artificial Sequence: Synthetic oligonucleotide
cuacgucauuaguggcaau

SEQ ID NO: 511832 - RNA, 19 nt, Artificial Sequence
  Description of Artificial Sequence: Synthetic oligonucleotide
gcacgcugucauccuuuaa

SEQ ID NO: 511833 - RNA, 19 nt, Artificial Sequence
  Description of Artificial Sequence: Synthetic oligonucleotide
ccgaccgcccuugcaucgc

SEQ ID NO: 511834 - RNA, 19 nt, Artificial Sequence
  Description of Artificial Sequence: Synthetic oligonucleotide
ccgagggcgcuggacuuuc

SEQ ID NO: 511835 - RNA, 19 nt, Artificial Sequence
  Description of Artificial Sequence: Synthetic oligonucleotide
ccgggcuccauaggcuauc

SEQ ID NO: 511836 - RNA, 19 nt, Artificial Sequence
  Description of Artificial Sequence: Synthetic oligonucleotide
cgccgaccgcccuugcauc

SEQ ID NO: 511837 - RNA, 19 nt, Artificial Sequence
  Description of Artificial Sequence: Synthetic oligonucleotide
cgccaacuauuaccacauc

SEQ ID NO: 511838 - RNA, 19 nt, Artificial Sequence
  Description of Artificial Sequence: Synthetic oligonucleotide
ccaguaaaugaaggcgcuu

SEQ ID NO: 511839 - RNA, 19 nt, Artificial Sequence
  Description of Artificial Sequence: Synthetic oligonucleotide
cgugcaguucuaguccccu

SEQ ID NO: 511840 - RNA, 19 nt, Artificial Sequence
  Description of Artificial Sequence: Synthetic oligonucleotide
ggcugcgccgaccgcccuu

SEQ ID NO: 511841 - RNA, 19 nt, Artificial Sequence
  Description of Artificial Sequence: Synthetic oligonucleotide
cgcccuugcaucgcggcgu

SEQ ID NO: 511842 - RNA, 19 nt, Artificial Sequence
  Description of Artificial Sequence: Synthetic oligonucleotide
cgagggcgcuggacuuuca

SEQ ID NO: 511843 - RNA, 19 nt, Artificial Sequence
  Description of Artificial Sequence: Synthetic oligonucleotide
cccgggcuccauaggcuau

SEQ ID NO: 511844 - RNA, 19 nt, Artificial Sequence
  Description of Artificial Sequence: Synthetic oligonucleotide
ccccgacugcccggcugaa

SEQ ID NO: 511845 - RNA, 19 nt, Artificial Sequence
  Description of Artificial Sequence: Synthetic oligonucleotide
ccgucggguuuuggauauu

SEQ ID NO: 511846 - RNA, 19 nt, Artificial Sequence
  Description of Artificial Sequence: Synthetic oligonucleotide
uuaacaauuaaauuggcag

SEQ ID NO: 511847 - RNA, 19 nt, Artificial Sequence
  Description of Artificial Sequence: Synthetic oligonucleotide
uuuuguaaggauaucaccg

SEQ ID NO: 511848 - RNA, 19 nt, Artificial Sequence
  Description of Artificial Sequence: Synthetic oligonucleotide
auuaggguugcacugaacc

SEQ ID NO: 511849 - RNA, 19 nt, Artificial Sequence
  Description of Artificial Sequence: Synthetic oligonucleotide
aacaauuaaauuggcagac

SEQ ID NO: 511850 - RNA, 19 nt, Artificial Sequence
  Description of Artificial Sequence: Synthetic oligonucleotide
cuugcuuacauuucaaccg

SEQ ID NO: 511851 - RNA, 19 nt, Artificial Sequence
  Description of Artificial Sequence: Synthetic oligonucleotide
auagagauugaccaaucgc

SEQ ID NO: 511852 - RNA, 19 nt, Artificial Sequence
  Description of Artificial Sequence: Synthetic oligonucleotide
ugcugaaugacacggaucc

SEQ ID NO: 511853 - RNA, 19 nt, Artificial Sequence
  Description of Artificial Sequence: Synthetic oligonucleotide
uguaaaaguccauagagau

SEQ ID NO: 511854 - RNA, 19 nt, Artificial Sequence
  Description of Artificial Sequence: Synthetic oligonucleotide
uaaguuucgccgcagaagc

SEQ ID NO: 511855 - RNA, 19 nt, Artificial Sequence
  Description of Artificial Sequence: Synthetic oligonucleotide
aaggauaucaccgaaggcu

SEQ ID NO: 511856 - RNA, 19 nt, Artificial Sequence
  Description of Artificial Sequence: Synthetic oligonucleotide
aauucugaauaggagcccc

SEQ ID NO: 511857 - RNA, 19 nt, Artificial Sequence
  Description of Artificial Sequence: Synthetic oligonucleotide
aacauggagcucuagaagu

SEQ ID NO: 511858 - RNA, 19 nt, Artificial Sequence
  Description of Artificial Sequence: Synthetic oligonucleotide
aaaacauggagcucuagaa

SEQ ID NO: 511859 - RNA, 19 nt, Artificial Sequence
  Description of Artificial Sequence: Synthetic oligonucleotide
acuacggucaucucgggac

SEQ ID NO: 511860 - RNA, 19 nt, Artificial Sequence
  Description of Artificial Sequence: Synthetic oligonucleotide
gagacaaucggcuacugcc

SEQ ID NO: 511861 - RNA, 19 nt, Artificial Sequence
  Description of Artificial Sequence: Synthetic oligonucleotide
uagagauugaccaaucgcu

SEQ ID NO: 511862 - RNA, 19 nt, Artificial Sequence
  Description of Artificial Sequence: Synthetic oligonucleotide
aauucuugcuuacauuuca

SEQ ID NO: 511863 - RNA, 19 nt, Artificial Sequence
  Description of Artificial Sequence: Synthetic oligonucleotide
ucguggauaaguuucgccg

SEQ ID NO: 511864 - RNA, 19 nt, Artificial Sequence
  Description of Artificial Sequence: Synthetic oligonucleotide
aaacauggagcucuagaag

SEQ ID NO: 511865 - RNA, 19 nt, Artificial Sequence
  Description of Artificial Sequence: Synthetic oligonucleotide
aguccauagagauugacca

SEQ ID NO: 511866 - RNA, 19 nt, Artificial Sequence
  Description of Artificial Sequence: Synthetic oligonucleotide
aauauaaaacacgugcagu

SEQ ID NO: 511867 - RNA, 19 nt, Artificial Sequence
  Description of Artificial Sequence: Synthetic oligonucleotide
aaguccauagagauugacc

SEQ ID NO: 511868 - RNA, 19 nt, Artificial Sequence
  Description of Artificial Sequence: Synthetic oligonucleotide
uuugaaacgaccuguggcu

SEQ ID NO: 511869 - RNA, 19 nt, Artificial Sequence
  Description of Artificial Sequence: Synthetic oligonucleotide
ucgauggagccauugaagg

SEQ ID NO: 511870 - RNA, 19 nt, Artificial Sequence
  Description of Artificial Sequence: Synthetic oligonucleotide
uucucgugaagucucgugg

SEQ ID NO: 511871 - RNA, 19 nt, Artificial Sequence
  Description of Artificial Sequence: Synthetic oligonucleotide
uuggcaaugucucucacga

SEQ ID NO: 511872 - RNA, 19 nt, Artificial Sequence
  Description of Artificial Sequence: Synthetic oligonucleotide
cuuugaaacgaccuguggc

SEQ ID NO: 511873 - RNA, 19 nt, Artificial Sequence
  Description of Artificial Sequence: Synthetic oligonucleotide
ucagauuuuguaaggauau

SEQ ID NO: 511874 - RNA, 19 nt, Artificial Sequence
  Description of Artificial Sequence: Synthetic oligonucleotide
auuaaauuggcagacaaau

SEQ ID NO: 511875 - RNA, 19 nt, Artificial Sequence
  Description of Artificial Sequence: Synthetic oligonucleotide
uccauuccgauccuuuugg

SEQ ID NO: 511876 - RNA, 19 nt, Artificial Sequence
  Description of Artificial Sequence: Synthetic oligonucleotide
guggguauuaggcucaagg

SEQ ID NO: 511877 - RNA, 19 nt, Artificial Sequence
  Description of Artificial Sequence: Synthetic oligonucleotide
uuaaauuggcagacaaaug

SEQ ID NO: 511878 - RNA, 19 nt, Artificial Sequence
  Description of Artificial Sequence: Synthetic oligonucleotide
acagcgucgcaguucaucc

SEQ ID NO: 511879 - RNA, 19 nt, Artificial Sequence
  Description of Artificial Sequence: Synthetic oligonucleotide
cuccgucucaaucagaggg

SEQ ID NO: 511880 - RNA, 19 nt, Artificial Sequence
  Description of Artificial Sequence: Synthetic oligonucleotide
uuuaacuaauguucuucag

SEQ ID NO: 511881 - RNA, 19 nt, Artificial Sequence
  Description of Artificial Sequence: Synthetic oligonucleotide
uuacauuucaaccguaguu

SEQ ID NO: 511882 - RNA, 19 nt, Artificial Sequence
  Description of Artificial Sequence: Synthetic oligonucleotide
aaugguugaggaagaauuc

SEQ ID NO: 511883 - RNA, 19 nt, Artificial Sequence
  Description of Artificial Sequence: Synthetic oligonucleotide
uuuguaaggauaucaccga

SEQ ID NO: 511884 - RNA, 19 nt, Artificial Sequence
  Description of Artificial Sequence: Synthetic oligonucleotide
cucggaacggaaaaggccc

SEQ ID NO: 511885 - RNA, 19 nt, Artificial Sequence
  Description of Artificial Sequence: Synthetic oligonucleotide
ucaaccguaguugccaugg

SEQ ID NO: 511886 - RNA, 19 nt, Artificial Sequence
  Description of Artificial Sequence: Synthetic oligonucleotide
uguaacgucuccuccuggg

SEQ ID NO: 511887 - RNA, 19 nt, Artificial Sequence
  Description of Artificial Sequence: Synthetic oligonucleotide
aucguggauaaguuucgcc

SEQ ID NO: 511888 - RNA, 19 nt, Artificial Sequence
  Description of Artificial Sequence: Synthetic oligonucleotide
agguacuacggucaucucg

SEQ ID NO: 511889 - RNA, 19 nt, Artificial Sequence
  Description of Artificial Sequence: Synthetic oligonucleotide
auauaaaacacgugcaguu

SEQ ID NO: 511890 - RNA, 19 nt, Artificial Sequence
  Description of Artificial Sequence: Synthetic oligonucleotide
aacggaaaaggccccuggg

SEQ ID NO: 511891 - RNA, 19 nt, Artificial Sequence
  Description of Artificial Sequence: Synthetic oligonucleotide
uugaccaaucgcuguaacg

SEQ ID NO: 511892 - RNA, 19 nt, Artificial Sequence
  Description of Artificial Sequence: Synthetic oligonucleotide
uguuaccacugucagauuc

SEQ ID NO: 511893 - RNA, 19 nt, Artificial Sequence
  Description of Artificial Sequence: Synthetic oligonucleotide
uuaggcucaagguuugccc

SEQ ID NO: 511894 - RNA, 19 nt, Artificial Sequence
  Description of Artificial Sequence: Synthetic oligonucleotide
guaaagcugguucucgggg

SEQ ID NO: 511895 - RNA, 19 nt, Artificial Sequence
  Description of Artificial Sequence: Synthetic oligonucleotide
aaaguccauagagauugac

SEQ ID NO: 511896 - RNA, 19 nt, Artificial Sequence
  Description of Artificial Sequence: Synthetic oligonucleotide
aucccuuucgccugguugg

SEQ ID NO: 511897 - RNA, 19 nt, Artificial Sequence
  Description of Artificial Sequence: Synthetic oligonucleotide
ugaccaaucgcuguaacgu

SEQ ID NO: 511898 - RNA, 19 nt, Artificial Sequence
  Description of Artificial Sequence: Synthetic oligonucleotide
ucgggcuuccaucaaagug

SEQ ID NO: 511899 - RNA, 19 nt, Artificial Sequence
  Description of Artificial Sequence: Synthetic oligonucleotide
uauaaaacacgugcaguug

SEQ ID NO: 511900 - RNA, 19 nt, Artificial Sequence
  Description of Artificial Sequence: Synthetic oligonucleotide
uaaaacacgugcaguuggc

SEQ ID NO: 511901 - RNA, 19 nt, Artificial Sequence
  Description of Artificial Sequence: Synthetic oligonucleotide
uuaggguugcacugaaccc

SEQ ID NO: 511902 - RNA, 19 nt, Artificial Sequence
  Description of Artificial Sequence: Synthetic oligonucleotide
ucggcuacugccuuccucc

SEQ ID NO: 511903 - RNA, 19 nt, Artificial Sequence
  Description of Artificial Sequence: Synthetic oligonucleotide
gauugaagcucaaguagag

SEQ ID NO: 511904 - RNA, 19 nt, Artificial Sequence
  Description of Artificial Sequence: Synthetic oligonucleotide
cacggauccagguacuacg

SEQ ID NO: 511905 - RNA, 19 nt, Artificial Sequence
  Description of Artificial Sequence: Synthetic oligonucleotide
aaugacacggauccaggua

SEQ ID NO: 511906 - RNA, 19 nt, Artificial Sequence
  Description of Artificial Sequence: Synthetic oligonucleotide
auaaguuucgccgcagaag

SEQ ID NO: 511907 - RNA, 19 nt, Artificial Sequence
  Description of Artificial Sequence: Synthetic oligonucleotide
agacaaauggcuauugcug

SEQ ID NO: 511908 - RNA, 19 nt, Artificial Sequence
  Description of Artificial Sequence: Synthetic oligonucleotide
acucggaacggaaaaggcc

SEQ ID NO: 511909 - RNA, 19 nt, Artificial Sequence
  Description of Artificial Sequence: Synthetic oligonucleotide
aagccggacuuccagguug

SEQ ID NO: 511910 - RNA, 19 nt, Artificial Sequence
  Description of Artificial Sequence: Synthetic oligonucleotide
gggauugaagcucaaguag

SEQ ID NO: 511911 - RNA, 19 nt, Artificial Sequence
  Description of Artificial Sequence: Synthetic oligonucleotide
uggguauuaggcucaaggu

SEQ ID NO: 511912 - RNA, 19 nt, Artificial Sequence
  Description of Artificial Sequence: Synthetic oligonucleotide
ucccuagauggacauacgc

SEQ ID NO: 511913 - RNA, 19 nt, Artificial Sequence
  Description of Artificial Sequence: Synthetic oligonucleotide
agaagugccuacaaucuuc

SEQ ID NO: 511914 - RNA, 19 nt, Artificial Sequence
  Description of Artificial Sequence: Synthetic oligonucleotide
cucggggcuaccaagcucc

SEQ ID NO: 511915 - RNA, 19 nt, Artificial Sequence
  Description of Artificial Sequence: Synthetic oligonucleotide
ucacgaucagauuuuguaa

SEQ ID NO: 511916 - RNA, 19 nt, Artificial Sequence
  Description of Artificial Sequence: Synthetic oligonucleotide
ucgaucuucaaagggucgg

SEQ ID NO: 511917 - RNA, 19 nt, Artificial Sequence
  Description of Artificial Sequence: Synthetic oligonucleotide
aucgcuguaacgucuccuc

SEQ ID NO: 511918 - RNA, 19 nt, Artificial Sequence
  Description of Artificial Sequence: Synthetic oligonucleotide
acuccaaggagccagguuu

SEQ ID NO: 511919 - RNA, 19 nt, Artificial Sequence
  Description of Artificial Sequence: Synthetic oligonucleotide
aaccguaguugccauggug

SEQ ID NO: 511920 - RNA, 19 nt, Artificial Sequence
  Description of Artificial Sequence: Synthetic oligonucleotide
ucuucaaagggucggugaa

SEQ ID NO: 511921 - RNA, 19 nt, Artificial Sequence
  Description of Artificial Sequence: Synthetic oligonucleotide
aucaacuccaaggagccag

SEQ ID NO: 511922 - RNA, 19 nt, Artificial Sequence
  Description of Artificial Sequence: Synthetic oligonucleotide
cucgauggagccauugaag

SEQ ID NO: 511923 - RNA, 19 nt, Artificial Sequence
  Description of Artificial Sequence: Synthetic oligonucleotide
gguacuacggucaucucgg

SEQ ID NO: 511924 - RNA, 19 nt, Artificial Sequence
  Description of Artificial Sequence: Synthetic oligonucleotide
aacugauuuccauuccgau

SEQ ID NO: 511925 - RNA, 19 nt, Artificial Sequence
  Description of Artificial Sequence: Synthetic oligonucleotide
aggaagaauucugaauagg

SEQ ID NO: 511926 - RNA, 19 nt, Artificial Sequence
  Description of Artificial Sequence: Synthetic oligonucleotide
uggguauuaggguugcacu

SEQ ID NO: 511927 - RNA, 19 nt, Artificial Sequence
  Description of Artificial Sequence: Synthetic oligonucleotide
agggaaucgggcuuccauc

SEQ ID NO: 511928 - RNA, 19 nt, Artificial Sequence
  Description of Artificial Sequence: Synthetic oligonucleotide
guaguugccauggugggag

SEQ ID NO: 511929 - RNA, 19 nt, Artificial Sequence
  Description of Artificial Sequence: Synthetic oligonucleotide
accacugucagauuccaaa

SEQ ID NO: 511930 - RNA, 19 nt, Artificial Sequence
  Description of Artificial Sequence: Synthetic oligonucleotide
agcucaaguagagagcauc

SEQ ID NO: 511931 - RNA, 19 nt, Artificial Sequence
  Description of Artificial Sequence: Synthetic oligonucleotide
ucccaacccaccuuggagc

SEQ ID NO: 511932 - RNA, 19 nt, Artificial Sequence
  Description of Artificial Sequence: Synthetic oligonucleotide
auuucaaccguaguugcca

SEQ ID NO: 511933 - RNA, 19 nt, Artificial Sequence
  Description of Artificial Sequence: Synthetic oligonucleotide
caucccgagaguuggcucg

SEQ ID NO: 511934 - RNA, 19 nt, Artificial Sequence
  Description of Artificial Sequence: Synthetic oligonucleotide
aacgaacagucacaggcau

SEQ ID NO: 511935 - RNA, 19 nt, Artificial Sequence
  Description of Artificial Sequence: Synthetic oligonucleotide
gaacggaaaaggccccugg

SEQ ID NO: 511936 - RNA, 19 nt, Artificial Sequence
  Description of Artificial Sequence: Synthetic oligonucleotide
uucaccaucccgagaguug

SEQ ID NO: 511937 - RNA, 19 nt, Artificial Sequence
  Description of Artificial Sequence: Synthetic oligonucleotide
agugccuacaaucuucuuu

SEQ ID NO: 511938 - RNA, 19 nt, Artificial Sequence
  Description of Artificial Sequence: Synthetic oligonucleotide
uuugauccuccggagguag

SEQ ID NO: 511939 - RNA, 19 nt, Artificial Sequence
  Description of Artificial Sequence: Synthetic oligonucleotide
auauccaggcggucauggc

SEQ ID NO: 511940 - RNA, 19 nt, Artificial Sequence
  Description of Artificial Sequence: Synthetic oligonucleotide
cacgguccuacccacagcc

SEQ ID NO: 511941 - RNA, 19 nt, Artificial Sequence
  Description of Artificial Sequence: Synthetic oligonucleotide
aaucgggcuuccaucaaag

SEQ ID NO: 511942 - RNA, 19 nt, Artificial Sequence
  Description of Artificial Sequence: Synthetic oligonucleotide
cacuagaguggguauuagg

SEQ ID NO: 511943 - RNA, 19 nt, Artificial Sequence
  Description of Artificial Sequence: Synthetic oligonucleotide
uggacauacgcgcacgcuc

SEQ ID NO: 511944 - RNA, 19 nt, Artificial Sequence
  Description of Artificial Sequence: Synthetic oligonucleotide
uaucaccgaaggcuugucc

SEQ ID NO: 511945 - RNA, 19 nt, Artificial Sequence
  Description of Artificial Sequence: Synthetic oligonucleotide
cauuucaaccguaguugcc

SEQ ID NO: 511946 - RNA, 19 nt, Artificial Sequence
  Description of Artificial Sequence: Synthetic oligonucleotide
caauuaaauuggcagacaa

SEQ ID NO: 511947 - RNA, 19 nt, Artificial Sequence
  Description of Artificial Sequence: Synthetic oligonucleotide
uggggaaagggacacgguc

SEQ ID NO: 511948 - RNA, 19 nt, Artificial Sequence
  Description of Artificial Sequence: Synthetic oligonucleotide
aguuucgccgcagaagcuc

SEQ ID NO: 511949 - RNA, 19 nt, Artificial Sequence
  Description of Artificial Sequence: Synthetic oligonucleotide
ucucgugaagucucgugga

SEQ ID NO: 511950 - RNA, 19 nt, Artificial Sequence
  Description of Artificial Sequence: Synthetic oligonucleotide
agagccguucgccucgagg

SEQ ID NO: 511951 - RNA, 19 nt, Artificial Sequence
  Description of Artificial Sequence: Synthetic oligonucleotide
cauauccaggcggucaugg

SEQ ID NO: 511952 - RNA, 19 nt, Artificial Sequence
  Description of Artificial Sequence: Synthetic oligonucleotide
guaacgucuccuccugggg

SEQ ID NO: 511953 - RNA, 19 nt, Artificial Sequence
  Description of Artificial Sequence: Synthetic oligonucleotide
uuggcagacaaauggcuau

SEQ ID NO: 511954 - RNA, 19 nt, Artificial Sequence
  Description of Artificial Sequence: Synthetic oligonucleotide
uaacgucuccuccuggggu

SEQ ID NO: 511955 - RNA, 19 nt, Artificial Sequence
  Description of Artificial Sequence: Synthetic oligonucleotide
uagauggacauacgcgcac

SEQ ID NO: 511956 - RNA, 19 nt, Artificial Sequence
  Description of Artificial Sequence: Synthetic oligonucleotide
ucaccgaaggcuuguccag

SEQ ID NO: 511957 - RNA, 19 nt, Artificial Sequence
  Description of Artificial Sequence: Synthetic oligonucleotide
auucucgugaagucucgug

SEQ ID NO: 511958 - RNA, 19 nt, Artificial Sequence
  Description of Artificial Sequence: Synthetic oligonucleotide
aaagggucggugaagggaa

SEQ ID NO: 511959 - RNA, 19 nt, Artificial Sequence
  Description of Artificial Sequence: Synthetic oligonucleotide
gauaaguuucgccgcagaa

SEQ ID NO: 511960 - RNA, 19 nt, Artificial Sequence
  Description of Artificial Sequence: Synthetic oligonucleotide
uccgucucaaucagaggga

SEQ ID NO: 511961 - RNA, 19 nt, Artificial Sequence
  Description of Artificial Sequence: Synthetic oligonucleotide
cacccaagacaucauggcc

SEQ ID NO: 511962 - RNA, 19 nt, Artificial Sequence
  Description of Artificial Sequence: Synthetic oligonucleotide
cucacgaucagauuuugua

SEQ ID NO: 511963 - RNA, 19 nt, Artificial Sequence
  Description of Artificial Sequence: Synthetic oligonucleotide
ucgaggggacucaagggac

SEQ ID NO: 511964 - RNA, 19 nt, Artificial Sequence
  Description of Artificial Sequence: Synthetic oligonucleotide
uggcaucucgcaagagccg

SEQ ID NO: 511965 - RNA, 19 nt, Artificial Sequence
  Description of Artificial Sequence: Synthetic oligonucleotide
caauucuugcuuacauuuc

SEQ ID NO: 511966 - RNA, 19 nt, Artificial Sequence
  Description of Artificial Sequence: Synthetic oligonucleotide
acaaucggcuacugccuuc

SEQ ID NO: 511967 - RNA, 19 nt, Artificial Sequence
  Description of Artificial Sequence: Synthetic oligonucleotide
cucaacugauuuccauucc

SEQ ID NO: 511968 - RNA, 19 nt, Artificial Sequence
  Description of Artificial Sequence: Synthetic oligonucleotide
acgacagcgucgcaguuca

SEQ ID NO: 511969 - RNA, 19 nt, Artificial Sequence
  Description of Artificial Sequence: Synthetic oligonucleotide
accgaaggcuuguccaggg

SEQ ID NO: 511970 - RNA, 19 nt, Artificial Sequence
  Description of Artificial Sequence: Synthetic oligonucleotide
agagauugaccaaucgcug

SEQ ID NO: 511971 - RNA, 19 nt, Artificial Sequence
  Description of Artificial Sequence: Synthetic oligonucleotide
uacgcgcacgcucugcuga

SEQ ID NO: 511972 - RNA, 19 nt, Artificial Sequence
  Description of Artificial Sequence: Synthetic oligonucleotide
ugcuagcuucagcugcccg

SEQ ID NO: 511973 - RNA, 19 nt, Artificial Sequence
  Description of Artificial Sequence: Synthetic oligonucleotide
ugaaacgaccuguggcugu

SEQ ID NO: 511974 - RNA, 19 nt, Artificial Sequence
  Description of Artificial Sequence: Synthetic oligonucleotide
ucucucacgaucagauuuu

SEQ ID NO: 511975 - RNA, 19 nt, Artificial Sequence
  Description of Artificial Sequence: Synthetic oligonucleotide
aagccguagucuccccauc

SEQ ID NO: 511976 - RNA, 19 nt, Artificial Sequence
  Description of Artificial Sequence: Synthetic oligonucleotide
aucucgggacgcugugugc

SEQ ID NO: 511977 - RNA, 19 nt, Artificial Sequence
  Description of Artificial Sequence: Synthetic oligonucleotide
uggcagugaccccaggacu

SEQ ID NO: 511978 - RNA, 19 nt, Artificial Sequence
  Description of Artificial Sequence: Synthetic oligonucleotide
cccuagauggacauacgcg

SEQ ID NO: 511979 - RNA, 19 nt, Artificial Sequence
  Description of Artificial Sequence: Synthetic oligonucleotide
gacucggaacggaaaaggc

SEQ ID NO: 511980 - RNA, 19 nt, Artificial Sequence
  Description of Artificial Sequence: Synthetic oligonucleotide
agauggacauacgcgcacg

SEQ ID NO: 511981 - RNA, 19 nt, Artificial Sequence
  Description of Artificial Sequence: Synthetic oligonucleotide
agcgucgcaguucauccug

SEQ ID NO: 511982 - RNA, 19 nt, Artificial Sequence
  Description of Artificial Sequence: Synthetic oligonucleotide
gaagucucguggacugugg

SEQ ID NO: 511983 - RNA, 19 nt, Artificial Sequence
  Description of Artificial Sequence: Synthetic oligonucleotide
cuagaagugccuacaaucu

SEQ ID NO: 511984 - RNA, 19 nt, Artificial Sequence
  Description of Artificial Sequence: Synthetic oligonucleotide
agauugaccaaucgcugua

SEQ ID NO: 511985 - RNA, 19 nt, Artificial Sequence
  Description of Artificial Sequence: Synthetic oligonucleotide
aucggcuacugccuuccuc

SEQ ID NO: 511986 - RNA, 19 nt, Artificial Sequence
  Description of Artificial Sequence: Synthetic oligonucleotide
uucaggacccucagggaau

SEQ ID NO: 511987 - RNA, 19 nt, Artificial Sequence
  Description of Artificial Sequence: Synthetic oligonucleotide
uauuaggguugcacugaac

SEQ ID NO: 511988 - RNA, 19 nt, Artificial Sequence
  Description of Artificial Sequence: Synthetic oligonucleotide
ucgcuguaacgucuccucc

SEQ ID NO: 511989 - RNA, 19 nt, Artificial Sequence
  Description of Artificial Sequence: Synthetic oligonucleotide
uugaaacgaccuguggcug

SEQ ID NO: 511990 - RNA, 19 nt, Artificial Sequence
  Description of Artificial Sequence: Synthetic oligonucleotide
uacuacggucaucucggga

SEQ ID NO: 511991 - RNA, 19 nt, Artificial Sequence
  Description of Artificial Sequence: Synthetic oligonucleotide
agggacacgguccuaccca

SEQ ID NO: 511992 - RNA, 19 nt, Artificial Sequence
  Description of Artificial Sequence: Synthetic oligonucleotide
gugugcaccucauacaucu

SEQ ID NO: 511993 - RNA, 19 nt, Artificial Sequence
  Description of Artificial Sequence: Synthetic oligonucleotide
cuacggucaucucgggacg

SEQ ID NO: 511994 - RNA, 19 nt, Artificial Sequence
  Description of Artificial Sequence: Synthetic oligonucleotide
uagaagugccuacaaucuu

SEQ ID NO: 511995 - RNA, 19 nt, Artificial Sequence
  Description of Artificial Sequence: Synthetic oligonucleotide
acccaagacaucauggcca

SEQ ID NO: 511996 - RNA, 19 nt, Artificial Sequence
  Description of Artificial Sequence: Synthetic oligonucleotide
ucggaacggaaaaggcccc

SEQ ID NO: 511997 - RNA, 19 nt, Artificial Sequence
  Description of Artificial Sequence: Synthetic oligonucleotide
acucucucgaagccggacu

SEQ ID NO: 511998 - RNA, 19 nt, Artificial Sequence
  Description of Artificial Sequence: Synthetic oligonucleotide
ggaaaguggggaaagggac

SEQ ID NO: 511999 - RNA, 19 nt, Artificial Sequence
  Description of Artificial Sequence: Synthetic oligonucleotide
ggguauuaggguugcacug

SEQ ID NO: 512000 - RNA, 19 nt, Artificial Sequence
  Description of Artificial Sequence: Synthetic oligonucleotide
cucgcaagagccguucgcc

SEQ ID NO: 512001 - RNA, 19 nt, Artificial Sequence
  Description of Artificial Sequence: Synthetic oligonucleotide
ucucacgaucagauuuugu

SEQ ID NO: 512002 - RNA, 19 nt, Artificial Sequence
  Description of Artificial Sequence: Synthetic oligonucleotide
acacgguccuacccacagc

SEQ ID NO: 512003 - RNA, 19 nt, Artificial Sequence
  Description of Artificial Sequence: Synthetic oligonucleotide
guucucggggugucaaaag

SEQ ID NO: 512004 - RNA, 19 nt, Artificial Sequence
  Description of Artificial Sequence: Synthetic oligonucleotide
gagaguuggcucgggauac

SEQ ID NO: 512005 - RNA, 19 nt, Artificial Sequence
  Description of Artificial Sequence: Synthetic oligonucleotide
aaggcuuguccagggcagg

SEQ ID NO: 512006 - RNA, 19 nt, Artificial Sequence
  Description of Artificial Sequence: Synthetic oligonucleotide
guagucuccccaucucggc

SEQ ID NO: 512007 - RNA, 19 nt, Artificial Sequence
  Description of Artificial Sequence: Synthetic oligonucleotide
ggacucggaacggaaaagg

SEQ ID NO: 512008 - RNA, 19 nt, Artificial Sequence
  Description of Artificial Sequence: Synthetic oligonucleotide
aucucgcaagagccguucg

SEQ ID NO: 512009 - RNA, 19 nt, Artificial Sequence
  Description of Artificial Sequence: Synthetic oligonucleotide
gguggagacaaucggcuac

SEQ ID NO: 512010 - RNA, 19 nt, Artificial Sequence
  Description of Artificial Sequence: Synthetic oligonucleotide
acacggauccagguacuac

SEQ ID NO: 512011 - RNA, 19 nt, Artificial Sequence
  Description of Artificial Sequence: Synthetic oligonucleotide
gaacgaacagucacaggca

SEQ ID NO: 512012 - RNA, 19 nt, Artificial Sequence
  Description of Artificial Sequence: Synthetic oligonucleotide
cucgggauaccuuuuccca

SEQ ID NO: 512013 - RNA, 19 nt, Artificial Sequence
  Description of Artificial Sequence: Synthetic oligonucleotide
gaccaaucgcuguaacguc

SEQ ID NO: 512014 - RNA, 19 nt, Artificial Sequence
  Description of Artificial Sequence: Synthetic oligonucleotide
ucucgggacgcugugugca

SEQ ID NO: 512015 - RNA, 19 nt, Artificial Sequence
  Description of Artificial Sequence: Synthetic oligonucleotide
uggauaaguuucgccgcag

SEQ ID NO: 512016 - RNA, 19 nt, Artificial Sequence
  Description of Artificial Sequence: Synthetic oligonucleotide
cagacaaauggcuauugcu

SEQ ID NO: 512017 - RNA, 19 nt, Artificial Sequence
  Description of Artificial Sequence: Synthetic oligonucleotide
agggacucggaacggaaaa

SEQ ID NO: 512018 - RNA, 19 nt, Artificial Sequence
  Description of Artificial Sequence: Synthetic oligonucleotide
cucggcaaacagcccaacc

SEQ ID NO: 512019 - RNA, 19 nt, Artificial Sequence
  Description of Artificial Sequence: Synthetic oligonucleotide
acauacgcgcacgcucugc

SEQ ID NO: 512020 - RNA, 19 nt, Artificial Sequence
  Description of Artificial Sequence: Synthetic oligonucleotide
gagauugaccaaucgcugu

SEQ ID NO: 512021 - RNA, 19 nt, Artificial Sequence
  Description of Artificial Sequence: Synthetic oligonucleotide
uucaaccguaguugccaug

SEQ ID NO: 512022 - RNA, 19 nt, Artificial Sequence
  Description of Artificial Sequence: Synthetic oligonucleotide
ucacuagaguggguauuag

SEQ ID NO: 512023 - RNA, 19 nt, Artificial Sequence
  Description of Artificial Sequence: Synthetic oligonucleotide
caaucggcuacugccuucc

SEQ ID NO: 512024 - RNA, 19 nt, Artificial Sequence
  Description of Artificial Sequence: Synthetic oligonucleotide
uuucaaccguaguugccau

SEQ ID NO: 512025 - RNA, 19 nt, Artificial Sequence
  Description of Artificial Sequence: Synthetic oligonucleotide
gauaccuuuucccaccguu

SEQ ID NO: 512026 - RNA, 19 nt, Artificial Sequence
  Description of Artificial Sequence: Synthetic oligonucleotide
acgaccuguggcugucuuc

SEQ ID NO: 512027 - RNA, 19 nt, Artificial Sequence
  Description of Artificial Sequence: Synthetic oligonucleotide
cucccuagauggacauacg

SEQ ID NO: 512028 - RNA, 19 nt, Artificial Sequence
  Description of Artificial Sequence: Synthetic oligonucleotide
ucaagggacucggaacgga

SEQ ID NO: 512029 - RNA, 19 nt, Artificial Sequence
  Description of Artificial Sequence: Synthetic oligonucleotide
agguugcuagcuucagcug

SEQ ID NO: 512030 - RNA, 19 nt, Artificial Sequence
  Description of Artificial Sequence: Synthetic oligonucleotide
ucgugaagucucguggacu

SEQ ID NO: 512031 - RNA, 19 nt, Artificial Sequence
  Description of Artificial Sequence: Synthetic oligonucleotide
auggcuauugcuggugggu

SEQ ID NO: 512032 - RNA, 19 nt, Artificial Sequence
  Description of Artificial Sequence: Synthetic oligonucleotide
gcuuacauuucaaccguag

SEQ ID NO: 512033 - RNA, 19 nt, Artificial Sequence
  Description of Artificial Sequence: Synthetic oligonucleotide
gcaagagccguucgccucg

SEQ ID NO: 512034 - RNA, 19 nt, Artificial Sequence
  Description of Artificial Sequence: Synthetic oligonucleotide
agaguuggcucgggauacc

SEQ ID NO: 512035 - RNA, 19 nt, Artificial Sequence
  Description of Artificial Sequence: Synthetic oligonucleotide
ggauugaagcucaaguaga

SEQ ID NO: 512036 - RNA, 19 nt, Artificial Sequence
  Description of Artificial Sequence: Synthetic oligonucleotide
cucucgaucuucaaagggu

SEQ ID NO: 512037 - RNA, 19 nt, Artificial Sequence
  Description of Artificial Sequence: Synthetic oligonucleotide
agcucuagaagugccuaca

SEQ ID NO: 512038 - RNA, 19 nt, Artificial Sequence
  Description of Artificial Sequence: Synthetic oligonucleotide
gucucucacgaucagauuu

SEQ ID NO: 512039 - RNA, 19 nt, Artificial Sequence
  Description of Artificial Sequence: Synthetic oligonucleotide
cucgugaagucucguggac

SEQ ID NO: 512040 - RNA, 19 nt, Artificial Sequence
  Description of Artificial Sequence: Synthetic oligonucleotide
ggugggguccccuuagcug

SEQ ID NO: 512041 - RNA, 19 nt, Artificial Sequence
  Description of Artificial Sequence: Synthetic oligonucleotide
uccuuuuggcuggaaucug

SEQ ID NO: 512042 - RNA, 19 nt, Artificial Sequence
  Description of Artificial Sequence: Synthetic oligonucleotide
caaucagagggaaguccuc

SEQ ID NO: 512043 - RNA, 19 nt, Artificial Sequence
  Description of Artificial Sequence: Synthetic oligonucleotide
gggauguccugcauucucg

SEQ ID NO: 512044 - RNA, 19 nt, Artificial Sequence
  Description of Artificial Sequence: Synthetic oligonucleotide
auaucaccgaaggcuuguc

SEQ ID NO: 512045 - RNA, 19 nt, Artificial Sequence
  Description of Artificial Sequence: Synthetic oligonucleotide
agacaaucggcuacugccu

SEQ ID NO: 512046 - RNA, 19 nt, Artificial Sequence
  Description of Artificial Sequence: Synthetic oligonucleotide
agccguucgccucgagggg

SEQ ID NO: 512047 - RNA, 19 nt, Artificial Sequence
  Description of Artificial Sequence: Synthetic oligonucleotide
cuguaacgucuccuccugg

SEQ ID NO: 512048 - RNA, 19 nt, Artificial Sequence
  Description of Artificial Sequence: Synthetic oligonucleotide
guggauaaguuucgccgca

SEQ ID NO: 512049 - RNA, 19 nt, Artificial Sequence
  Description of Artificial Sequence: Synthetic oligonucleotide
gacagcgucgcaguucauc

SEQ ID NO: 512050 - RNA, 19 nt, Artificial Sequence
  Description of Artificial Sequence: Synthetic oligonucleotide
caaugucucucacgaucag

SEQ ID NO: 512051 - RNA, 19 nt, Artificial Sequence
  Description of Artificial Sequence: Synthetic oligonucleotide
auuggcagacaaauggcua

SEQ ID NO: 512052 - RNA, 19 nt, Artificial Sequence
  Description of Artificial Sequence: Synthetic oligonucleotide
ucgcaagagccguucgccu

SEQ ID NO: 512053 - RNA, 19 nt, Artificial Sequence
  Description of Artificial Sequence: Synthetic oligonucleotide
cucaagggacucggaacgg

SEQ ID NO: 512054 - RNA, 19 nt, Artificial Sequence
  Description of Artificial Sequence: Synthetic oligonucleotide
guuucgccgcagaagcucc

SEQ ID NO: 512055 - RNA, 19 nt, Artificial Sequence
  Description of Artificial Sequence: Synthetic oligonucleotide
agggucggugaagggaacg

SEQ ID NO: 512056 - RNA, 19 nt, Artificial Sequence
  Description of Artificial Sequence: Synthetic oligonucleotide
guacuacggucaucucggg

SEQ ID NO: 512057 - RNA, 19 nt, Artificial Sequence
  Description of Artificial Sequence: Synthetic oligonucleotide
gcucgggauaccuuuuccc

SEQ ID NO: 512058 - RNA, 19 nt, Artificial Sequence
  Description of Artificial Sequence: Synthetic oligonucleotide
aggugaggguccguagagg

SEQ ID NO: 512059 - RNA, 19 nt, Artificial Sequence
  Description of Artificial Sequence: Synthetic oligonucleotide
ggcucuguggccacaaaug

SEQ ID NO: 512060 - RNA, 19 nt, Artificial Sequence
  Description of Artificial Sequence: Synthetic oligonucleotide
cuuacauuucaaccguagu

SEQ ID NO: 512061 - RNA, 19 nt, Artificial Sequence
  Description of Artificial Sequence: Synthetic oligonucleotide
gggauaccuuuucccaccg

SEQ ID NO: 512062 - RNA, 19 nt, Artificial Sequence
  Description of Artificial Sequence: Synthetic oligonucleotide
aacgaccuguggcugucuu

SEQ ID NO: 512063 - RNA, 19 nt, Artificial Sequence
  Description of Artificial Sequence: Synthetic oligonucleotide
aggauaucaccgaaggcuu

SEQ ID NO: 512064 - RNA, 19 nt, Artificial Sequence
  Description of Artificial Sequence: Synthetic oligonucleotide
caucguggauaaguuucgc

SEQ ID NO: 512065 - RNA, 19 nt, Artificial Sequence
  Description of Artificial Sequence: Synthetic oligonucleotide
gucggugaagggaacgaac

SEQ ID NO: 512066 - RNA, 19 nt, Artificial Sequence
  Description of Artificial Sequence: Synthetic oligonucleotide
ugucacuagaguggguauu

SEQ ID NO: 512067 - RNA, 19 nt, Artificial Sequence
  Description of Artificial Sequence: Synthetic oligonucleotide
aggcauauccaggcgguca

SEQ ID NO: 512068 - RNA, 19 nt, Artificial Sequence
  Description of Artificial Sequence: Synthetic oligonucleotide
gauaucaccgaaggcuugu

SEQ ID NO: 512069 - RNA, 19 nt, Artificial Sequence
  Description of Artificial Sequence: Synthetic oligonucleotide
agccggacuuccagguugc

SEQ ID NO: 512070 - RNA, 19 nt, Artificial Sequence
  Description of Artificial Sequence: Synthetic oligonucleotide
gaaacgaccuguggcuguc

SEQ ID NO: 512071 - RNA, 19 nt, Artificial Sequence
  Description of Artificial Sequence: Synthetic oligonucleotide
gauugaccaaucgcuguaa

SEQ ID NO: 512072 - RNA, 19 nt, Artificial Sequence
  Description of Artificial Sequence: Synthetic oligonucleotide
gacauacgcgcacgcucug

SEQ ID NO: 512073 - RNA, 19 nt, Artificial Sequence
  Description of Artificial Sequence: Synthetic oligonucleotide
gguauuaggguugcacuga

SEQ ID NO: 512074 - RNA, 19 nt, Artificial Sequence
  Description of Artificial Sequence: Synthetic oligonucleotide
gggaaucgggcuuccauca

SEQ ID NO: 512075 - RNA, 19 nt, Artificial Sequence
  Description of Artificial Sequence: Synthetic oligonucleotide
ggggauugaagcucaagua

SEQ ID NO: 512076 - RNA, 19 nt, Artificial Sequence
  Description of Artificial Sequence: Synthetic oligonucleotide
aucgggcuuccaucaaagu

SEQ ID NO: 512077 - RNA, 19 nt, Artificial Sequence
  Description of Artificial Sequence: Synthetic oligonucleotide
cguggauaaguuucgccgc

SEQ ID NO: 512078 - RNA, 19 nt, Artificial Sequence
  Description of Artificial Sequence: Synthetic oligonucleotide
aaguuucgccgcagaagcu

SEQ ID NO: 512079 - RNA, 19 nt, Artificial Sequence
  Description of Artificial Sequence: Synthetic oligonucleotide
cagauuuuguaaggauauc

SEQ ID NO: 512080 - RNA, 19 nt, Artificial Sequence
  Description of Artificial Sequence: Synthetic oligonucleotide
cugucagauuccaaaggua

SEQ ID NO: 512081 - RNA, 19 nt, Artificial Sequence
  Description of Artificial Sequence: Synthetic oligonucleotide
uccagcacggcccgagcuu

SEQ ID NO: 512082 - RNA, 19 nt, Artificial Sequence
  Description of Artificial Sequence: Synthetic oligonucleotide
ugugcaccucauacaucuc

SEQ ID NO: 512083 - RNA, 19 nt, Artificial Sequence
  Description of Artificial Sequence: Synthetic oligonucleotide
auacgcgcacgcucugcug

SEQ ID NO: 512084 - RNA, 19 nt, Artificial Sequence
  Description of Artificial Sequence: Synthetic oligonucleotide
gacgacagcgucgcaguuc

SEQ ID NO: 512085 - RNA, 19 nt, Artificial Sequence
  Description of Artificial Sequence: Synthetic oligonucleotide
aaucggcuacugccuuccu

SEQ ID NO: 512086 - RNA, 19 nt, Artificial Sequence
  Description of Artificial Sequence: Synthetic oligonucleotide
gaagugccuacaaucuucu

SEQ ID NO: 512087 - RNA, 19 nt, Artificial Sequence
  Description of Artificial Sequence: Synthetic oligonucleotide
guccauagagauugaccaa

SEQ ID NO: 512088 - RNA, 19 nt, Artificial Sequence
  Description of Artificial Sequence: Synthetic oligonucleotide
aucgccugcuggaaggcug

SEQ ID NO: 512089 - RNA, 19 nt, Artificial Sequence
  Description of Artificial Sequence: Synthetic oligonucleotide
gcaaugucucucacgauca

SEQ ID NO: 512090 - RNA, 19 nt, Artificial Sequence
  Description of Artificial Sequence: Synthetic oligonucleotide
uacggucaucucgggacgc

SEQ ID NO: 512091 - RNA, 19 nt, Artificial Sequence
  Description of Artificial Sequence: Synthetic oligonucleotide
cauuccgauccuuuuggcu

SEQ ID NO: 512092 - RNA, 19 nt, Artificial Sequence
  Description of Artificial Sequence: Synthetic oligonucleotide
cagccgacgacagcgucgc

SEQ ID NO: 512093 - RNA, 19 nt, Artificial Sequence
  Description of Artificial Sequence: Synthetic oligonucleotide
uuucgccgcagaagcuccu

SEQ ID NO: 512094 - RNA, 19 nt, Artificial Sequence
  Description of Artificial Sequence: Synthetic oligonucleotide
accccaggacugguguuac

SEQ ID NO: 512095 - RNA, 19 nt, Artificial Sequence
  Description of Artificial Sequence: Synthetic oligonucleotide
cgugaagucucguggacug

SEQ ID NO: 512096 - RNA, 19 nt, Artificial Sequence
  Description of Artificial Sequence: Synthetic oligonucleotide
cacgcucugcugaaugaca

SEQ ID NO: 512097 - RNA, 19 nt, Artificial Sequence
  Description of Artificial Sequence: Synthetic oligonucleotide
ucaucucgggacgcugugu

SEQ ID NO: 512098 - RNA, 19 nt, Artificial Sequence
  Description of Artificial Sequence: Synthetic oligonucleotide
cuacuccaucaacuccaag

SEQ ID NO: 512099 - RNA, 19 nt, Artificial Sequence
  Description of Artificial Sequence: Synthetic oligonucleotide
ucacucucucgaagccgga

SEQ ID NO: 512100 - RNA, 19 nt, Artificial Sequence
  Description of Artificial Sequence: Synthetic oligonucleotide
accaucccgagaguuggcu

SEQ ID NO: 512101 - RNA, 19 nt, Artificial Sequence
  Description of Artificial Sequence: Synthetic oligonucleotide
aagugccuacaaucuucuu

SEQ ID NO: 512102 - RNA, 19 nt, Artificial Sequence
  Description of Artificial Sequence: Synthetic oligonucleotide
gacccaaggcugccagcug

SEQ ID NO: 512103 - RNA, 19 nt, Artificial Sequence
  Description of Artificial Sequence: Synthetic oligonucleotide
aagagccguucgccucgag

SEQ ID NO: 512104 - RNA, 19 nt, Artificial Sequence
  Description of Artificial Sequence: Synthetic oligonucleotide
auggacauacgcgcacgcu

SEQ ID NO: 512105 - RNA, 19 nt, Artificial Sequence
  Description of Artificial Sequence: Synthetic oligonucleotide
ccagccgacgacagcgucg

SEQ ID NO: 512106 - RNA, 19 nt, Artificial Sequence
  Description of Artificial Sequence: Synthetic oligonucleotide
ccguaguugccaugguggg

SEQ ID NO: 512107 - RNA, 19 nt, Artificial Sequence
  Description of Artificial Sequence: Synthetic oligonucleotide
acgguccuacccacagccc

SEQ ID NO: 512108 - RNA, 19 nt, Artificial Sequence
  Description of Artificial Sequence: Synthetic oligonucleotide
ugucggcgggccucuucag

SEQ ID NO: 512109 - RNA, 19 nt, Artificial Sequence
  Description of Artificial Sequence: Synthetic oligonucleotide
cagcaauagcagcacaucu

SEQ ID NO: 512110 - RNA, 19 nt, Artificial Sequence
  Description of Artificial Sequence: Synthetic oligonucleotide
uggcuauugcuggugggua

SEQ ID NO: 512111 - RNA, 19 nt, Artificial Sequence
  Description of Artificial Sequence: Synthetic oligonucleotide
uucgccucgaggggacuca

SEQ ID NO: 512112 - RNA, 19 nt, Artificial Sequence
  Description of Artificial Sequence: Synthetic oligonucleotide
gaagccguagucuccccau

SEQ ID NO: 512113 - RNA, 19 nt, Artificial Sequence
  Description of Artificial Sequence: Synthetic oligonucleotide
cccaucucggcuuucuguc

SEQ ID NO: 512114 - RNA, 19 nt, Artificial Sequence
  Description of Artificial Sequence: Synthetic oligonucleotide
caagggacucggaacggaa

SEQ ID NO: 512115 - RNA, 19 nt, Artificial Sequence
  Description of Artificial Sequence: Synthetic oligonucleotide
gucacuagaguggguauua

SEQ ID NO: 512116 - RNA, 19 nt, Artificial Sequence
  Description of Artificial Sequence: Synthetic oligonucleotide
cugaagccguagucucccc

SEQ ID NO: 512117 - RNA, 19 nt, Artificial Sequence
  Description of Artificial Sequence: Synthetic oligonucleotide
ggcucgggauaccuuuucc

SEQ ID NO: 512118 - RNA, 19 nt, Artificial Sequence
  Description of Artificial Sequence: Synthetic oligonucleotide
ggagcaaccgcugcccggc

SEQ ID NO: 512119 - RNA, 19 nt, Artificial Sequence
  Description of Artificial Sequence: Synthetic oligonucleotide
acggcccgagcuugcucac

SEQ ID NO: 512120 - RNA, 19 nt, Artificial Sequence
  Description of Artificial Sequence: Synthetic oligonucleotide
uugcuagcuucagcugccc

SEQ ID NO: 512121 - RNA, 19 nt, Artificial Sequence
  Description of Artificial Sequence: Synthetic oligonucleotide
ccguagagguuucccaacc

SEQ ID NO: 512122 - RNA, 19 nt, Artificial Sequence
  Description of Artificial Sequence: Synthetic oligonucleotide
ggauaaguuucgccgcaga

SEQ ID NO: 512123 - RNA, 19 nt, Artificial Sequence
  Description of Artificial Sequence: Synthetic oligonucleotide
ccauagagauugaccaauc

SEQ ID NO: 512124 - RNA, 19 nt, Artificial Sequence
  Description of Artificial Sequence: Synthetic oligonucleotide
cugugggguggagacaauc

SEQ ID NO: 512125 - RNA, 19 nt, Artificial Sequence
  Description of Artificial Sequence: Synthetic oligonucleotide
agagcaucgccugcuggaa

SEQ ID NO: 512126 - RNA, 19 nt, Artificial Sequence
  Description of Artificial Sequence: Synthetic oligonucleotide
ucccuuucgccugguuggc

SEQ ID NO: 512127 - RNA, 19 nt, Artificial Sequence
  Description of Artificial Sequence: Synthetic oligonucleotide
aaacgaccuguggcugucu

SEQ ID NO: 512128 - RNA, 19 nt, Artificial Sequence
  Description of Artificial Sequence: Synthetic oligonucleotide
gggacucggaacggaaaag

SEQ ID NO: 512129 - RNA, 19 nt, Artificial Sequence
  Description of Artificial Sequence: Synthetic oligonucleotide
gcuccucggggcuaccaag

SEQ ID NO: 512130 - RNA, 19 nt, Artificial Sequence
  Description of Artificial Sequence: Synthetic oligonucleotide
gcauucucgugaagucucg

SEQ ID NO: 512131 - RNA, 19 nt, Artificial Sequence
  Description of Artificial Sequence: Synthetic oligonucleotide
ggguauuaggcucaagguu

SEQ ID NO: 512132 - RNA, 19 nt, Artificial Sequence
  Description of Artificial Sequence: Synthetic oligonucleotide
cucgggacgcugugugcac

SEQ ID NO: 512133 - RNA, 19 nt, Artificial Sequence
  Description of Artificial Sequence: Synthetic oligonucleotide
ucgggacgcugugugcacc

SEQ ID NO: 512134 - RNA, 19 nt, Artificial Sequence
  Description of Artificial Sequence: Synthetic oligonucleotide
cugucggcgggccucuuca

SEQ ID NO: 512135 - RNA, 19 nt, Artificial Sequence
  Description of Artificial Sequence: Synthetic oligonucleotide
ggcgccgaggguccagagg

SEQ ID NO: 512136 - RNA, 19 nt, Artificial Sequence
  Description of Artificial Sequence: Synthetic oligonucleotide
cacucucucgaagccggac

SEQ ID NO: 512137 - RNA, 19 nt, Artificial Sequence
  Description of Artificial Sequence: Synthetic oligonucleotide
ccauuccgauccuuuuggc

SEQ ID NO: 512138 - RNA, 19 nt, Artificial Sequence
  Description of Artificial Sequence: Synthetic oligonucleotide
ggauaucaccgaaggcuug

SEQ ID NO: 512139 - RNA, 19 nt, Artificial Sequence
  Description of Artificial Sequence: Synthetic oligonucleotide
aacaucccuuucgccuggu

SEQ ID NO: 512140 - RNA, 19 nt, Artificial Sequence
  Description of Artificial Sequence: Synthetic oligonucleotide
ggggcaucccacugacacc

SEQ ID NO: 512141 - RNA, 19 nt, Artificial Sequence
  Description of Artificial Sequence: Synthetic oligonucleotide
gccgacgacagcgucgcag

SEQ ID NO: 512142 - RNA, 19 nt, Artificial Sequence
  Description of Artificial Sequence: Synthetic oligonucleotide
ucucggcaaacagcccaac

SEQ ID NO: 512143 - RNA, 19 nt, Artificial Sequence
  Description of Artificial Sequence: Synthetic oligonucleotide
caguaggcucuguggccac

SEQ ID NO: 512144 - RNA, 19 nt, Artificial Sequence
  Description of Artificial Sequence: Synthetic oligonucleotide
cuaccaagcuccugccucu

SEQ ID NO: 512145 - RNA, 19 nt, Artificial Sequence
  Description of Artificial Sequence: Synthetic oligonucleotide
gacaaucggcuacugccuu

SEQ ID NO: 512146 - RNA, 19 nt, Artificial Sequence
  Description of Artificial Sequence: Synthetic oligonucleotide
gaacagucacaggcauauc

SEQ ID NO: 512147 - RNA, 19 nt, Artificial Sequence
  Description of Artificial Sequence: Synthetic oligonucleotide
ccugacuguaggugaaaga

SEQ ID NO: 512148 - RNA, 19 nt, Artificial Sequence
  Description of Artificial Sequence: Synthetic oligonucleotide
ucggggcuaccaagcuccu

SEQ ID NO: 512149 - RNA, 19 nt, Artificial Sequence
  Description of Artificial Sequence: Synthetic oligonucleotide
gagcaaccgcugcccggcc

SEQ ID NO: 512150 - RNA, 19 nt, Artificial Sequence
  Description of Artificial Sequence: Synthetic oligonucleotide
cacuucacggauggcaucu

SEQ ID NO: 512151 - RNA, 19 nt, Artificial Sequence
  Description of Artificial Sequence: Synthetic oligonucleotide
cauacgcgcacgcucugcu

SEQ ID NO: 512152 - RNA, 19 nt, Artificial Sequence
  Description of Artificial Sequence: Synthetic oligonucleotide
ggguccguagagguuuccc

SEQ ID NO: 512153 - RNA, 19 nt, Artificial Sequence
  Description of Artificial Sequence: Synthetic oligonucleotide
cuagcuucagcugcccgcu

SEQ ID NO: 512154 - RNA, 19 nt, Artificial Sequence
  Description of Artificial Sequence: Synthetic oligonucleotide
gcucuagaagugccuacaa

SEQ ID NO: 512155 - RNA, 19 nt, Artificial Sequence
  Description of Artificial Sequence: Synthetic oligonucleotide
gcgcacgcucugcugaaug

SEQ ID NO: 512156 - RNA, 19 nt, Artificial Sequence
  Description of Artificial Sequence: Synthetic oligonucleotide
cagcucuaccagcgcccgg

SEQ ID NO: 512157 - RNA, 19 nt, Artificial Sequence
  Description of Artificial Sequence: Synthetic oligonucleotide
ggacgcugugugcaccuca

SEQ ID NO: 512158 - RNA, 19 nt, Artificial Sequence
  Description of Artificial Sequence: Synthetic oligonucleotide
gugucacuagaguggguau

SEQ ID NO: 512159 - RNA, 19 nt, Artificial Sequence
  Description of Artificial Sequence: Synthetic oligonucleotide
cccugacuguaggugaaag

SEQ ID NO: 512160 - RNA, 19 nt, Artificial Sequence
  Description of Artificial Sequence: Synthetic oligonucleotide
cagcacggcccgagcuugc

SEQ ID NO: 512161 - RNA, 19 nt, Artificial Sequence
  Description of Artificial Sequence: Synthetic oligonucleotide
uaccaagcuccugccucuc

SEQ ID NO: 512162 - RNA, 19 nt, Artificial Sequence
  Description of Artificial Sequence: Synthetic oligonucleotide
cuuugauccuccggaggua

SEQ ID NO: 512163 - RNA, 19 nt, Artificial Sequence
  Description of Artificial Sequence: Synthetic oligonucleotide
gguccccuuagcugucuga

SEQ ID NO: 512164 - RNA, 19 nt, Artificial Sequence
  Description of Artificial Sequence: Synthetic oligonucleotide
acgaacagucacaggcaua

SEQ ID NO: 512165 - RNA, 19 nt, Artificial Sequence
  Description of Artificial Sequence: Synthetic oligonucleotide
ggggugucaaaagcagguc

SEQ ID NO: 512166 - RNA, 19 nt, Artificial Sequence
  Description of Artificial Sequence: Synthetic oligonucleotide
guucgccucgaggggacuc

SEQ ID NO: 512167 - RNA, 19 nt, Artificial Sequence
  Description of Artificial Sequence: Synthetic oligonucleotide
ccaucccgagaguuggcuc

SEQ ID NO: 512168 - RNA, 19 nt, Artificial Sequence
  Description of Artificial Sequence: Synthetic oligonucleotide
accgcugcccggccaguuu

SEQ ID NO: 512169 - RNA, 19 nt, Artificial Sequence
  Description of Artificial Sequence: Synthetic oligonucleotide
cgucucaaucagagggaag

SEQ ID NO: 512170 - RNA, 19 nt, Artificial Sequence
  Description of Artificial Sequence: Synthetic oligonucleotide
ggacauacgcgcacgcucu

SEQ ID NO: 512171 - RNA, 19 nt, Artificial Sequence
  Description of Artificial Sequence: Synthetic oligonucleotide
acgcgcacgcucugcugaa

SEQ ID NO: 512172 - RNA, 19 nt, Artificial Sequence
  Description of Artificial Sequence: Synthetic oligonucleotide
gaagccggacuuccagguu

SEQ ID NO: 512173 - RNA, 19 nt, Artificial Sequence
  Description of Artificial Sequence: Synthetic oligonucleotide
gacaacucuguggccugcu

SEQ ID NO: 512174 - RNA, 19 nt, Artificial Sequence
  Description of Artificial Sequence: Synthetic oligonucleotide
ggaaucgggcuuccaucaa

SEQ ID NO: 512175 - RNA, 19 nt, Artificial Sequence
  Description of Artificial Sequence: Synthetic oligonucleotide
gggguggagacaaucggcu

SEQ ID NO: 512176 - RNA, 19 nt, Artificial Sequence
  Description of Artificial Sequence: Synthetic oligonucleotide
agcacggcccgagcuugcu

SEQ ID NO: 512177 - RNA, 19 nt, Artificial Sequence
  Description of Artificial Sequence: Synthetic oligonucleotide
ccgaaggcuuguccagggc

SEQ ID NO: 512178 - RNA, 19 nt, Artificial Sequence
  Description of Artificial Sequence: Synthetic oligonucleotide
ccccuuuaacuaauguucu

SEQ ID NO: 512179 - RNA, 19 nt, Artificial Sequence
  Description of Artificial Sequence: Synthetic oligonucleotide
gugggucaucucggcaaac

SEQ ID NO: 512180 - RNA, 19 nt, Artificial Sequence
  Description of Artificial Sequence: Synthetic oligonucleotide
aaccgcugcccggccaguu

SEQ ID NO: 512181 - RNA, 19 nt, Artificial Sequence
  Description of Artificial Sequence: Synthetic oligonucleotide
ggcauauccaggcggucau

SEQ ID NO: 512182 - RNA, 19 nt, Artificial Sequence
  Description of Artificial Sequence: Synthetic oligonucleotide
gggucggugaagggaacga

SEQ ID NO: 512183 - RNA, 19 nt, Artificial Sequence
  Description of Artificial Sequence: Synthetic oligonucleotide
ccuuucgccugguuggcaa

SEQ ID NO: 512184 - RNA, 19 nt, Artificial Sequence
  Description of Artificial Sequence: Synthetic oligonucleotide
cgugcaguuggcuuuggua

SEQ ID NO: 512185 - RNA, 19 nt, Artificial Sequence
  Description of Artificial Sequence: Synthetic oligonucleotide
cccgagcuugcucacucuc

SEQ ID NO: 512186 - RNA, 19 nt, Artificial Sequence
  Description of Artificial Sequence: Synthetic oligonucleotide
gaguggguauuaggcucaa

SEQ ID NO: 512187 - RNA, 19 nt, Artificial Sequence
  Description of Artificial Sequence: Synthetic oligonucleotide
ggguggagacaaucggcua

SEQ ID NO: 512188 - RNA, 19 nt, Artificial Sequence
  Description of Artificial Sequence: Synthetic oligonucleotide
aacccaccuuggagcuucu

SEQ ID NO: 512189 - RNA, 19 nt, Artificial Sequence
  Description of Artificial Sequence: Synthetic oligonucleotide
gcaguuggcuuugguacaa

SEQ ID NO: 512190 - RNA, 19 nt, Artificial Sequence
  Description of Artificial Sequence: Synthetic oligonucleotide
acccuagccucuacuccau

SEQ ID NO: 512191 - RNA, 19 nt, Artificial Sequence
  Description of Artificial Sequence: Synthetic oligonucleotide
gcauauccaggcggucaug

SEQ ID NO: 512192 - RNA, 19 nt, Artificial Sequence
  Description of Artificial Sequence: Synthetic oligonucleotide
ucgccucgaggggacucaa

SEQ ID NO: 512193 - RNA, 19 nt, Artificial Sequence
  Description of Artificial Sequence: Synthetic oligonucleotide
ggucggugaagggaacgaa

SEQ ID NO: 512194 - RNA, 19 nt, Artificial Sequence
  Description of Artificial Sequence: Synthetic oligonucleotide
ccucggggcuaccaagcuc

SEQ ID NO: 512195 - RNA, 19 nt, Artificial Sequence
  Description of Artificial Sequence: Synthetic oligonucleotide
cauucucgugaagucucgu

SEQ ID NO: 512196 - RNA, 19 nt, Artificial Sequence
  Description of Artificial Sequence: Synthetic oligonucleotide
cuuucgccugguuggcaau

SEQ ID NO: 512197 - RNA, 19 nt, Artificial Sequence
  Description of Artificial Sequence: Synthetic oligonucleotide
ccguucgccucgaggggac

SEQ ID NO: 512198 - RNA, 19 nt, Artificial Sequence
  Description of Artificial Sequence: Synthetic oligonucleotide
gggugaccucaacugauuu

SEQ ID NO: 512199 - RNA, 19 nt, Artificial Sequence
  Description of Artificial Sequence: Synthetic oligonucleotide
gccagccgacgacagcguc

SEQ ID NO: 512200 - RNA, 19 nt, Artificial Sequence
  Description of Artificial Sequence: Synthetic oligonucleotide
cagcgucgcaguucauccu

SEQ ID NO: 512201 - RNA, 19 nt, Artificial Sequence
  Description of Artificial Sequence: Synthetic oligonucleotide
ggucaucucgggacgcugu

SEQ ID NO: 512202 - RNA, 19 nt, Artificial Sequence
  Description of Artificial Sequence: Synthetic oligonucleotide
caagagccguucgccucga

SEQ ID NO: 512203 - RNA, 19 nt, Artificial Sequence
  Description of Artificial Sequence: Synthetic oligonucleotide
caaccguaguugccauggu

SEQ ID NO: 512204 - RNA, 19 nt, Artificial Sequence
  Description of Artificial Sequence: Synthetic oligonucleotide
uggccucgacugggcugag

SEQ ID NO: 512205 - RNA, 19 nt, Artificial Sequence
  Description of Artificial Sequence: Synthetic oligonucleotide
ggauaccuuuucccaccgu

SEQ ID NO: 512206 - RNA, 19 nt, Artificial Sequence
  Description of Artificial Sequence: Synthetic oligonucleotide
cccaacccaccuuggagcu

SEQ ID NO: 512207 - RNA, 19 nt, Artificial Sequence
  Description of Artificial Sequence: Synthetic oligonucleotide
agccgacgacagcgucgca

SEQ ID NO: 512208 - RNA, 19 nt, Artificial Sequence
  Description of Artificial Sequence: Synthetic oligonucleotide
ggacacgguccuacccaca

SEQ ID NO: 512209 - RNA, 19 nt, Artificial Sequence
  Description of Artificial Sequence: Synthetic oligonucleotide
ccgucucaaucagagggaa

SEQ ID NO: 512210 - RNA, 19 nt, Artificial Sequence
  Description of Artificial Sequence: Synthetic oligonucleotide
ccgacgacagcgucgcagu

SEQ ID NO: 512211 - RNA, 19 nt, Artificial Sequence
  Description of Artificial Sequence: Synthetic oligonucleotide
ccgagaguuggcucgggau

SEQ ID NO: 512212 - RNA, 19 nt, Artificial Sequence
  Description of Artificial Sequence: Synthetic oligonucleotide
gcgcccgguccuucugcug

SEQ ID NO: 512213 - RNA, 19 nt, Artificial Sequence
  Description of Artificial Sequence: Synthetic oligonucleotide
cccaccguucaggacccuc

SEQ ID NO: 512214 - RNA, 19 nt, Artificial Sequence
  Description of Artificial Sequence: Synthetic oligonucleotide
gugaggguccguagagguu

SEQ ID NO: 512215 - RNA, 19 nt, Artificial Sequence
  Description of Artificial Sequence: Synthetic oligonucleotide
cccgagaguuggcucggga

SEQ ID NO: 512216 - RNA, 19 nt, Artificial Sequence
  Description of Artificial Sequence: Synthetic oligonucleotide
agagcucgauggagccauu

SEQ ID NO: 512217 - RNA, 19 nt, Artificial Sequence
  Description of Artificial Sequence: Synthetic oligonucleotide
ccgagcuugcucacucucu

SEQ ID NO: 512218 - RNA, 19 nt, Artificial Sequence
  Description of Artificial Sequence: Synthetic oligonucleotide
cgucgcaguucauccugca

SEQ ID NO: 512219 - RNA, 19 nt, Artificial Sequence
  Description of Artificial Sequence: Synthetic oligonucleotide
gggacgcugugugcaccuc

SEQ ID NO: 512220 - RNA, 19 nt, Artificial Sequence
  Description of Artificial Sequence: Synthetic oligonucleotide
cgccucgaggggacucaag

SEQ ID NO: 512221 - RNA, 19 nt, Artificial Sequence
  Description of Artificial Sequence: Synthetic oligonucleotide
ggggugaccucaacugauu

SEQ ID NO: 512222 - RNA, 19 nt, Artificial Sequence
  Description of Artificial Sequence: Synthetic oligonucleotide
cgguccuacccacagcccu

SEQ ID NO: 512223 - RNA, 19 nt, Artificial Sequence
  Description of Artificial Sequence: Synthetic oligonucleotide
cagugaccccaggacuggu

SEQ ID NO: 512224 - RNA, 19 nt, Artificial Sequence
  Description of Artificial Sequence: Synthetic oligonucleotide
gcccgagcuugcucacucu

SEQ ID NO: 512225 - RNA, 19 nt, Artificial Sequence
  Description of Artificial Sequence: Synthetic oligonucleotide
cccuuucgccugguuggca

SEQ ID NO: 512226 - RNA, 19 nt, Artificial Sequence
  Description of Artificial Sequence: Synthetic oligonucleotide
gcggcgccgaggguccaga

SEQ ID NO: 512227 - RNA, 19 nt, Artificial Sequence
  Description of Artificial Sequence: Synthetic oligonucleotide
agcugucggcgggccucuu

SEQ ID NO: 512228 - RNA, 19 nt, Artificial Sequence
  Description of Artificial Sequence: Synthetic oligonucleotide
gcgggccagcacugaucaa

SEQ ID NO: 512229 - RNA, 19 nt, Artificial Sequence
  Description of Artificial Sequence: Synthetic oligonucleotide
cgcugcccggccaguuuca

SEQ ID NO: 512230 - RNA, 19 nt, Artificial Sequence
  Description of Artificial Sequence: Synthetic oligonucleotide
cgggacgcugugugcaccu

SEQ ID NO: 512231 - RNA, 19 nt, Artificial Sequence
  Description of Artificial Sequence: Synthetic oligonucleotide
ccgcuccucggggcuacca

SEQ ID NO: 512232 - RNA, 19 nt, Artificial Sequence
  Description of Artificial Sequence: Synthetic oligonucleotide
gcccggccaguuucaccau

SEQ ID NO: 512233 - RNA, 19 nt, Artificial Sequence
  Description of Artificial Sequence: Synthetic oligonucleotide
gccggacuuccagguugcu

SEQ ID NO: 512234 - RNA, 19 nt, Artificial Sequence
  Description of Artificial Sequence: Synthetic oligonucleotide
ccaacccaccuuggagcuu

SEQ ID NO: 512235 - RNA, 19 nt, Artificial Sequence
  Description of Artificial Sequence: Synthetic oligonucleotide
cgacgacagcgucgcaguu

SEQ ID NO: 512236 - RNA, 19 nt, Artificial Sequence
  Description of Artificial Sequence: Synthetic oligonucleotide
cgacagcgucgcaguucau

SEQ ID NO: 512237 - RNA, 19 nt, Artificial Sequence
  Description of Artificial Sequence: Synthetic oligonucleotide
cgcgcacgcucugcugaau

SEQ ID NO: 512238 - RNA, 19 nt, Artificial Sequence
  Description of Artificial Sequence: Synthetic oligonucleotide
auagcgauuauacagaggc

SEQ ID NO: 512239 - RNA, 19 nt, Artificial Sequence
  Description of Artificial Sequence: Synthetic oligonucleotide
acuacauccagcuugugcc

SEQ ID NO: 512240 - RNA, 19 nt, Artificial Sequence
  Description of Artificial Sequence: Synthetic oligonucleotide
uguacagacaugaugagca

SEQ ID NO: 512241 - RNA, 19 nt, Artificial Sequence
  Description of Artificial Sequence: Synthetic oligonucleotide
uccauuaugccuaacaucu

SEQ ID NO: 512242 - RNA, 19 nt, Artificial Sequence
  Description of Artificial Sequence: Synthetic oligonucleotide
aaauguugguaugagauag

SEQ ID NO: 512243 - RNA, 19 nt, Artificial Sequence
  Description of Artificial Sequence: Synthetic oligonucleotide
guugguaugagauagguca

SEQ ID NO: 512244 - RNA, 19 nt, Artificial Sequence
  Description of Artificial Sequence: Synthetic oligonucleotide
auuuccggcacauuggugg

SEQ ID NO: 512245 - RNA, 19 nt, Artificial Sequence
  Description of Artificial Sequence: Synthetic oligonucleotide
cuaucuuacacuaugaaga

SEQ ID NO: 512246 - RNA, 19 nt, Artificial Sequence
  Description of Artificial Sequence: Synthetic oligonucleotide
aacuccacaagccaccggg

SEQ ID NO: 512247 - RNA, 19 nt, Artificial Sequence
  Description of Artificial Sequence: Synthetic oligonucleotide
aaaaccaagauaucaccug

SEQ ID NO: 512248 - RNA, 19 nt, Artificial Sequence
  Description of Artificial Sequence: Synthetic oligonucleotide
caagauaucaccugguggc

SEQ ID NO: 512249 - RNA, 19 nt, Artificial Sequence
  Description of Artificial Sequence: Synthetic oligonucleotide
uaugagauaggucaucaca

SEQ ID NO: 512250 - RNA, 19 nt, Artificial Sequence
  Description of Artificial Sequence: Synthetic oligonucleotide
gaugauagcguacugggug

SEQ ID NO: 512251 - RNA, 19 nt, Artificial Sequence
  Description of Artificial Sequence: Synthetic oligonucleotide
aucacgaccuuucugcugc

SEQ ID NO: 512252 - RNA, 19 nt, Artificial Sequence
  Description of Artificial Sequence: Synthetic oligonucleotide
uucaccgcauccaaggugg

SEQ ID NO: 512253 - RNA, 19 nt, Artificial Sequence
  Description of Artificial Sequence: Synthetic oligonucleotide
ugguauaccacccauucug

SEQ ID NO: 512254 - RNA, 19 nt, Artificial Sequence
  Description of Artificial Sequence: Synthetic oligonucleotide
uguuaaauggaucugcaua

SEQ ID NO: 512255 - RNA, 19 nt, Artificial Sequence
  Description of Artificial Sequence: Synthetic oligonucleotide
aguucauuccuucagcaag

SEQ ID NO: 512256 - RNA, 19 nt, Artificial Sequence
  Description of Artificial Sequence: Synthetic oligonucleotide
uuuguguacaguauuucca

SEQ ID NO: 512257 - RNA, 19 nt, Artificial Sequence
  Description of Artificial Sequence: Synthetic oligonucleotide
uuauuguucuuccaggagu

SEQ ID NO: 512258 - RNA, 19 nt, Artificial Sequence
  Description of Artificial Sequence: Synthetic oligonucleotide
aaauggaucugcauaacag

SEQ ID NO: 512259 - RNA, 19 nt, Artificial Sequence
  Description of Artificial Sequence: Synthetic oligonucleotide
uaguagaugccgucgaugg

SEQ ID NO: 512260 - RNA, 19 nt, Artificial Sequence
  Description of Artificial Sequence: Synthetic oligonucleotide
agcaagguaagaugguccc

SEQ ID NO: 512261 - RNA, 19 nt, Artificial Sequence
  Description of Artificial Sequence: Synthetic oligonucleotide
cauuccuucagcaagcaug

SEQ ID NO: 512262 - RNA, 19 nt, Artificial Sequence
  Description of Artificial Sequence: Synthetic oligonucleotide
ucggagaccuugaagaaag

SEQ ID NO: 512263 - RNA, 19 nt, Artificial Sequence
  Description of Artificial Sequence: Synthetic oligonucleotide
uuaacuccgggacaucagg

SEQ ID NO: 512264 - RNA, 19 nt, Artificial Sequence
  Description of Artificial Sequence: Synthetic oligonucleotide
acacuaugaagacaguuag

SEQ ID NO: 512265 - RNA, 19 nt, Artificial Sequence
  Description of Artificial Sequence: Synthetic oligonucleotide
gucauuaaugcccauggcc

SEQ ID NO: 512266 - RNA, 19 nt, Artificial Sequence
  Description of Artificial Sequence: Synthetic oligonucleotide
augccuaacaucugcuugc

SEQ ID NO: 512267 - RNA, 19 nt, Artificial Sequence
  Description of Artificial Sequence: Synthetic oligonucleotide
aggucauuaaugcccaugg

SEQ ID NO: 512268 - RNA, 19 nt, Artificial Sequence
  Description of Artificial Sequence: Synthetic oligonucleotide
aacaauuccgaagagcaca

SEQ ID NO: 512269 - RNA, 19 nt, Artificial Sequence
  Description of Artificial Sequence: Synthetic oligonucleotide
uaugccuaacaucugcuug

SEQ ID NO: 512270 - RNA, 19 nt, Artificial Sequence
  Description of Artificial Sequence: Synthetic oligonucleotide
aaauagucugucucgggcu

SEQ ID NO: 512271 - RNA, 19 nt, Artificial Sequence
  Description of Artificial Sequence: Synthetic oligonucleotide
auaacagugaucaggcugg

SEQ ID NO: 512272 - RNA, 19 nt, Artificial Sequence
  Description of Artificial Sequence: Synthetic oligonucleotide
cauaacagugaucaggcug

SEQ ID NO: 512273 - RNA, 19 nt, Artificial Sequence
  Description of Artificial Sequence: Synthetic oligonucleotide
uccaacgaugaugauagcg

SEQ ID NO: 512274 - RNA, 19 nt, Artificial Sequence
  Description of Artificial Sequence: Synthetic oligonucleotide
gauaggugucaccacaagc

SEQ ID NO: 512275 - RNA, 19 nt, Artificial Sequence
  Description of Artificial Sequence: Synthetic oligonucleotide
cagcauuucaucucgguag

SEQ ID NO: 512276 - RNA, 19 nt, Artificial Sequence
  Description of Artificial Sequence: Synthetic oligonucleotide
ucauacaggaucucacaag

SEQ ID NO: 512277 - RNA, 19 nt, Artificial Sequence
  Description of Artificial Sequence: Synthetic oligonucleotide
aagacaguuagguuuggaa

SEQ ID NO: 512278 - RNA, 19 nt, Artificial Sequence
  Description of Artificial Sequence: Synthetic oligonucleotide
agcgauuauacagaggcuc

SEQ ID NO: 512279 - RNA, 19 nt, Artificial Sequence
  Description of Artificial Sequence: Synthetic oligonucleotide
gaaagcuggagcaaacucc

SEQ ID NO: 512280 - RNA, 19 nt, Artificial Sequence
  Description of Artificial Sequence: Synthetic oligonucleotide
aacaugguucaugaguguc

SEQ ID NO: 512281 - RNA, 19 nt, Artificial Sequence
  Description of Artificial Sequence: Synthetic oligonucleotide
uguucgguagcccuccugc

SEQ ID NO: 512282 - RNA, 19 nt, Artificial Sequence
  Description of Artificial Sequence: Synthetic oligonucleotide
agcacauccgugugaaugg

SEQ ID NO: 512283 - RNA, 19 nt, Artificial Sequence
  Description of Artificial Sequence: Synthetic oligonucleotide
ugguggcucuguuaaaugg

SEQ ID NO: 512284 - RNA, 19 nt, Artificial Sequence
  Description of Artificial Sequence: Synthetic oligonucleotide
ucauagcgauuauacagag

SEQ ID NO: 512285 - RNA, 19 nt, Artificial Sequence
  Description of Artificial Sequence: Synthetic oligonucleotide
aaaauguugguaugagaua

SEQ ID NO: 512286 - RNA, 19 nt, Artificial Sequence
  Description of Artificial Sequence: Synthetic oligonucleotide
cauucggcuccucauagcg

SEQ ID NO: 512287 - RNA, 19 nt, Artificial Sequence
  Description of Artificial Sequence: Synthetic oligonucleotide
ugaaugguccucucgugag

SEQ ID NO: 512288 - RNA, 19 nt, Artificial Sequence
  Description of Artificial Sequence: Synthetic oligonucleotide
aaucuguguguguugugug

SEQ ID NO: 512289 - RNA, 19 nt, Artificial Sequence
  Description of Artificial Sequence: Synthetic oligonucleotide
agcauuucaucucgguagg

SEQ ID NO: 512290 - RNA, 19 nt, Artificial Sequence
  Description of Artificial Sequence: Synthetic oligonucleotide
uggacuuaccacaggagac

SEQ ID NO: 512291 - RNA, 19 nt, Artificial Sequence
  Description of Artificial Sequence: Synthetic oligonucleotide
cugcauaacagugaucagg

SEQ ID NO: 512292 - RNA, 19 nt, Artificial Sequence
  Description of Artificial Sequence: Synthetic oligonucleotide
aguucaugguauaccaccc

SEQ ID NO: 512293 - RNA, 19 nt, Artificial Sequence
  Description of Artificial Sequence: Synthetic oligonucleotide
aacgaugaugauagcguac

SEQ ID NO: 512294 - RNA, 19 nt, Artificial Sequence
  Description of Artificial Sequence: Synthetic oligonucleotide
gcaaucacgaccuuucugc

SEQ ID NO: 512295 - RNA, 19 nt, Artificial Sequence
  Description of Artificial Sequence: Synthetic oligonucleotide
ucgguaggcacguucagug

SEQ ID NO: 512296 - RNA, 19 nt, Artificial Sequence
  Description of Artificial Sequence: Synthetic oligonucleotide
ugagccucguccaacgaug

SEQ ID NO: 512297 - RNA, 19 nt, Artificial Sequence
  Description of Artificial Sequence: Synthetic oligonucleotide
cuggcguccaaauagucug

SEQ ID NO: 512298 - RNA, 19 nt, Artificial Sequence
  Description of Artificial Sequence: Synthetic oligonucleotide
uagggaacgagccuggaua

SEQ ID NO: 512299 - RNA, 19 nt, Artificial Sequence
  Description of Artificial Sequence: Synthetic oligonucleotide
agacaguuagguuuggaaa

SEQ ID NO: 512300 - RNA, 19 nt, Artificial Sequence
  Description of Artificial Sequence: Synthetic oligonucleotide
guacugagaaaacuucacc

SEQ ID NO: 512301 - RNA, 19 nt, Artificial Sequence
  Description of Artificial Sequence: Synthetic oligonucleotide
auaggugucaccacaagcu

SEQ ID NO: 512302 - RNA, 19 nt, Artificial Sequence
  Description of Artificial Sequence: Synthetic oligonucleotide
agugaugucucugcgaugu

SEQ ID NO: 512303 - RNA, 19 nt, Artificial Sequence
  Description of Artificial Sequence: Synthetic oligonucleotide
ugacuuucagcgccgccgg

SEQ ID NO: 512304 - RNA, 19 nt, Artificial Sequence
  Description of Artificial Sequence: Synthetic oligonucleotide
aaucacgaccuuucugcug

SEQ ID NO: 512305 - RNA, 19 nt, Artificial Sequence
  Description of Artificial Sequence: Synthetic oligonucleotide
auaccacccauucuggcug

SEQ ID NO: 512306 - RNA, 19 nt, Artificial Sequence
  Description of Artificial Sequence: Synthetic oligonucleotide
gaugauuaacuccgggaca

SEQ ID NO: 512307 - RNA, 19 nt, Artificial Sequence
  Description of Artificial Sequence: Synthetic oligonucleotide
guaucaauuucuuccugac

SEQ ID NO: 512308 - RNA, 19 nt, Artificial Sequence
  Description of Artificial Sequence: Synthetic oligonucleotide
gagauaggucaucacagga

SEQ ID NO: 512309 - RNA, 19 nt, Artificial Sequence
  Description of Artificial Sequence: Synthetic oligonucleotide
gaucucacaagcaguauca

SEQ ID NO: 512310 - RNA, 19 nt, Artificial Sequence
  Description of Artificial Sequence: Synthetic oligonucleotide
uaacuuguccaaucugugu

SEQ ID NO: 512311 - RNA, 19 nt, Artificial Sequence
  Description of Artificial Sequence: Synthetic oligonucleotide
uguguguuguguguguaug

SEQ ID NO: 512312 - RNA, 19 nt, Artificial Sequence
  Description of Artificial Sequence: Synthetic oligonucleotide
aguguacagccuguaacac

SEQ ID NO: 512313 - RNA, 19 nt, Artificial Sequence
  Description of Artificial Sequence: Synthetic oligonucleotide
ggaugauuaacuccgggac

SEQ ID NO: 512314 - RNA, 19 nt, Artificial Sequence
  Description of Artificial Sequence: Synthetic oligonucleotide
cacuaugaagacaguuagg

SEQ ID NO: 512315 - RNA, 19 nt, Artificial Sequence
  Description of Artificial Sequence: Synthetic oligonucleotide
caagcgagugagcaggccc

SEQ ID NO: 512316 - RNA, 19 nt, Artificial Sequence
  Description of Artificial Sequence: Synthetic oligonucleotide
augguagugaccucacgca

SEQ ID NO: 512317 - RNA, 19 nt, Artificial Sequence
  Description of Artificial Sequence: Synthetic oligonucleotide
agaguaaacugggaggaug

SEQ ID NO: 512318 - RNA, 19 nt, Artificial Sequence
  Description of Artificial Sequence: Synthetic oligonucleotide
cucauagcgauuauacaga

SEQ ID NO: 512319 - RNA, 19 nt, Artificial Sequence
  Description of Artificial Sequence: Synthetic oligonucleotide
ugugaaugguccucucgug

SEQ ID NO: 512320 - RNA, 19 nt, Artificial Sequence
  Description of Artificial Sequence: Synthetic oligonucleotide
aaacuccacaagccaccgg

SEQ ID NO: 512321 - RNA, 19 nt, Artificial Sequence
  Description of Artificial Sequence: Synthetic oligonucleotide
uaacaauuccgaagagcac

SEQ ID NO: 512322 - RNA, 19 nt, Artificial Sequence
  Description of Artificial Sequence: Synthetic oligonucleotide
ugugccuguccauuaugcc

SEQ ID NO: 512323 - RNA, 19 nt, Artificial Sequence
  Description of Artificial Sequence: Synthetic oligonucleotide
uuccgaagagcacauccgu

SEQ ID NO: 512324 - RNA, 19 nt, Artificial Sequence
  Description of Artificial Sequence: Synthetic oligonucleotide
acaggagacuacauccagc

SEQ ID NO: 512325 - RNA, 19 nt, Artificial Sequence
  Description of Artificial Sequence: Synthetic oligonucleotide
agugaucaggcuggcgucc

SEQ ID NO: 512326 - RNA, 19 nt, Artificial Sequence
  Description of Artificial Sequence: Synthetic oligonucleotide
aacgagccuggauaaaauu

SEQ ID NO: 512327 - RNA, 19 nt, Artificial Sequence
  Description of Artificial Sequence: Synthetic oligonucleotide
auuccgaagagcacauccg

SEQ ID NO: 512328 - RNA, 19 nt, Artificial Sequence
  Description of Artificial Sequence: Synthetic oligonucleotide
uguugguaugagauagguc

SEQ ID NO: 512329 - RNA, 19 nt, Artificial Sequence
  Description of Artificial Sequence: Synthetic oligonucleotide
ucgggucugcaucucacug

SEQ ID NO: 512330 - RNA, 19 nt, Artificial Sequence
  Description of Artificial Sequence: Synthetic oligonucleotide
ucgugagccucguccaacg

SEQ ID NO: 512331 - RNA, 19 nt, Artificial Sequence
  Description of Artificial Sequence: Synthetic oligonucleotide
ccaacaugguucaugagug

SEQ ID NO: 512332 - RNA, 19 nt, Artificial Sequence
  Description of Artificial Sequence: Synthetic oligonucleotide
uguauacagcugcuccaug

SEQ ID NO: 512333 - RNA, 19 nt, Artificial Sequence
  Description of Artificial Sequence: Synthetic oligonucleotide
aguuagguuuggaaaaugu

SEQ ID NO: 512334 - RNA, 19 nt, Artificial Sequence
  Description of Artificial Sequence: Synthetic oligonucleotide
uuaguguucgguagcccuc

SEQ ID NO: 512335 - RNA, 19 nt, Artificial Sequence
  Description of Artificial Sequence: Synthetic oligonucleotide
ugucuguugaagagcgcac

SEQ ID NO: 512336 - RNA, 19 nt, Artificial Sequence
  Description of Artificial Sequence: Synthetic oligonucleotide
gauagguccgaccagggau

SEQ ID NO: 512337 - RNA, 19 nt, Artificial Sequence
  Description of Artificial Sequence: Synthetic oligonucleotide
ucuguguguguugugugug

SEQ ID NO: 512338 - RNA, 19 nt, Artificial Sequence
  Description of Artificial Sequence: Synthetic oligonucleotide
uccuuuguguacaguauuu

SEQ ID NO: 512339 - RNA, 19 nt, Artificial Sequence
  Description of Artificial Sequence: Synthetic oligonucleotide
gauuaacuccgggacauca

SEQ ID NO: 512340 - RNA, 19 nt, Artificial Sequence
  Description of Artificial Sequence: Synthetic oligonucleotide
cuguuuauccuugggucgg

SEQ ID NO: 512341 - RNA, 19 nt, Artificial Sequence
  Description of Artificial Sequence: Synthetic oligonucleotide
aaagcccugcuuaaaucug

SEQ ID NO: 512342 - RNA, 19 nt, Artificial Sequence
  Description of Artificial Sequence: Synthetic oligonucleotide
uuacacuaugaagacaguu

SEQ ID NO: 512343 - RNA, 19 nt, Artificial Sequence
  Description of Artificial Sequence: Synthetic oligonucleotide
auaguagaugccgucgaug

SEQ ID NO: 512344 - RNA, 19 nt, Artificial Sequence
  Description of Artificial Sequence: Synthetic oligonucleotide
uaacuccgggacaucaggu

SEQ ID NO: 512345 - RNA, 19 nt, Artificial Sequence
  Description of Artificial Sequence: Synthetic oligonucleotide
uggaaggauggauguagac

SEQ ID NO: 512346 - RNA, 19 nt, Artificial Sequence
  Description of Artificial Sequence: Synthetic oligonucleotide
agcccagauguacagacau

SEQ ID NO: 512347 - RNA, 19 nt, Artificial Sequence
  Description of Artificial Sequence: Synthetic oligonucleotide
ugcuggucaauuaguguuc

SEQ ID NO: 512348 - RNA, 19 nt, Artificial Sequence
  Description of Artificial Sequence: Synthetic oligonucleotide
uccugcggguccuucuugg

SEQ ID NO: 512349 - RNA, 19 nt, Artificial Sequence
  Description of Artificial Sequence: Synthetic oligonucleotide
ucaaagauucgggucugca

SEQ ID NO: 512350 - RNA, 19 nt, Artificial Sequence
  Description of Artificial Sequence: Synthetic oligonucleotide
augauuaacuccgggacau

SEQ ID NO: 512351 - RNA, 19 nt, Artificial Sequence
  Description of Artificial Sequence: Synthetic oligonucleotide
gaaugguccucucgugagc

SEQ ID NO: 512352 - RNA, 19 nt, Artificial Sequence
  Description of Artificial Sequence: Synthetic oligonucleotide
uucggcuccucauagcgau

SEQ ID NO: 512353 - RNA, 19 nt, Artificial Sequence
  Description of Artificial Sequence: Synthetic oligonucleotide
acgaugaugauagcguacu

SEQ ID NO: 512354 - RNA, 19 nt, Artificial Sequence
  Description of Artificial Sequence: Synthetic oligonucleotide
gagcgcacuggaaggaugg

SEQ ID NO: 512355 - RNA, 19 nt, Artificial Sequence
  Description of Artificial Sequence: Synthetic oligonucleotide
ccuguuuauccuugggucg

SEQ ID NO: 512356 - RNA, 19 nt, Artificial Sequence
  Description of Artificial Sequence: Synthetic oligonucleotide
uuaaaggcuccggccaaag

SEQ ID NO: 512357 - RNA, 19 nt, Artificial Sequence
  Description of Artificial Sequence: Synthetic oligonucleotide
uugguaugagauaggucau

SEQ ID NO: 512358 - RNA, 19 nt, Artificial Sequence
  Description of Artificial Sequence: Synthetic oligonucleotide
gaaaaccaagauaucaccu

SEQ ID NO: 512359 - RNA, 19 nt, Artificial Sequence
  Description of Artificial Sequence: Synthetic oligonucleotide
aagauaucaccugguggcu

SEQ ID NO: 512360 - RNA, 19 nt, Artificial Sequence
  Description of Artificial Sequence: Synthetic oligonucleotide
ugcgggagaggagagugag

SEQ ID NO: 512361 - RNA, 19 nt, Artificial Sequence
  Description of Artificial Sequence: Synthetic oligonucleotide
acgaccuuucugcugccag

SEQ ID NO: 512362 - RNA, 19 nt, Artificial Sequence
  Description of Artificial Sequence: Synthetic oligonucleotide
gagugggucugacuuucag

SEQ ID NO: 512363 - RNA, 19 nt, Artificial Sequence
  Description of Artificial Sequence: Synthetic oligonucleotide
aucuguguguguugugugu

SEQ ID NO: 512364 - RNA, 19 nt, Artificial Sequence
  Description of Artificial Sequence: Synthetic oligonucleotide
auguugguaugagauaggu

SEQ ID NO: 512365 - RNA, 19 nt, Artificial Sequence
  Description of Artificial Sequence: Synthetic oligonucleotide
agcauuuugcagagcauug

SEQ ID NO: 512366 - RNA, 19 nt, Artificial Sequence
  Description of Artificial Sequence: Synthetic oligonucleotide
cuucaccgcauccaaggug

SEQ ID NO: 512367 - RNA, 19 nt, Artificial Sequence
  Description of Artificial Sequence: Synthetic oligonucleotide
aucaggcagaggaagccac

SEQ ID NO: 512368 - RNA, 19 nt, Artificial Sequence
  Description of Artificial Sequence: Synthetic oligonucleotide
ugccuaacaucugcuugcg

SEQ ID NO: 512369 - RNA, 19 nt, Artificial Sequence
  Description of Artificial Sequence: Synthetic oligonucleotide
uuaugccuaacaucugcuu

SEQ ID NO: 512370 - RNA, 19 nt, Artificial Sequence
  Description of Artificial Sequence: Synthetic oligonucleotide
gacuguggacuuaccacag

SEQ ID NO: 512371 - RNA, 19 nt, Artificial Sequence
  Description of Artificial Sequence: Synthetic oligonucleotide
ccaaguacagagacugggg

SEQ ID NO: 512372 - RNA, 19 nt, Artificial Sequence
  Description of Artificial Sequence: Synthetic oligonucleotide
gagagauaggugucaccac

SEQ ID NO: 512373 - RNA, 19 nt, Artificial Sequence
  Description of Artificial Sequence: Synthetic oligonucleotide
gacacgauagucagcaucu

SEQ ID NO: 512374 - RNA, 19 nt, Artificial Sequence
  Description of Artificial Sequence: Synthetic oligonucleotide
ugguagugaccucacgcau

SEQ ID NO: 512375 - RNA, 19 nt, Artificial Sequence
  Description of Artificial Sequence: Synthetic oligonucleotide
cauucuggcugucuguuga

SEQ ID NO: 512376 - RNA, 19 nt, Artificial Sequence
  Description of Artificial Sequence: Synthetic oligonucleotide
agauaucaccugguggcuc

SEQ ID NO: 512377 - RNA, 19 nt, Artificial Sequence
  Description of Artificial Sequence: Synthetic oligonucleotide
ucugacuuucagcgccgcc

SEQ ID NO: 512378 - RNA, 19 nt, Artificial Sequence
  Description of Artificial Sequence: Synthetic oligonucleotide
ucucgguaggcacguucag

SEQ ID NO: 512379 - RNA, 19 nt, Artificial Sequence
  Description of Artificial Sequence: Synthetic oligonucleotide
augguauaccacccauucu

SEQ ID NO: 512380 - RNA, 19 nt, Artificial Sequence
  Description of Artificial Sequence: Synthetic oligonucleotide
acucggacuguggacuuac

SEQ ID NO: 512381 - RNA, 19 nt, Artificial Sequence
  Description of Artificial Sequence: Synthetic oligonucleotide
gauagcguacugggugagg

SEQ ID NO: 512382 - RNA, 19 nt, Artificial Sequence
  Description of Artificial Sequence: Synthetic oligonucleotide
gguauaccacccauucugg

SEQ ID NO: 512383 - RNA, 19 nt, Artificial Sequence
  Description of Artificial Sequence: Synthetic oligonucleotide
gugaaugguccucucguga

SEQ ID NO: 512384 - RNA, 19 nt, Artificial Sequence
  Description of Artificial Sequence: Synthetic oligonucleotide
ugaagacaguuagguuugg

SEQ ID NO: 512385 - RNA, 19 nt, Artificial Sequence
  Description of Artificial Sequence: Synthetic oligonucleotide
gauaucaccugguggcucu

SEQ ID NO: 512386 - RNA, 19 nt, Artificial Sequence
  Description of Artificial Sequence: Synthetic oligonucleotide
cuuucagcgccgccggaag

SEQ ID NO: 512387 - RNA, 19 nt, Artificial Sequence
  Description of Artificial Sequence: Synthetic oligonucleotide
acuacagcccagauguaca

SEQ ID NO: 512388 - RNA, 19 nt, Artificial Sequence
  Description of Artificial Sequence: Synthetic oligonucleotide
agauaggucaucacaggau

SEQ ID NO: 512389 - RNA, 19 nt, Artificial Sequence
  Description of Artificial Sequence: Synthetic oligonucleotide
ucgaugguagugaccucac

SEQ ID NO: 512390 - RNA, 19 nt, Artificial Sequence
  Description of Artificial Sequence: Synthetic oligonucleotide
cucacgcauguauuccuug

SEQ ID NO: 512391 - RNA, 19 nt, Artificial Sequence
  Description of Artificial Sequence: Synthetic oligonucleotide
cuguggacuuaccacagga

SEQ ID NO: 512392 - RNA, 19 nt, Artificial Sequence
  Description of Artificial Sequence: Synthetic oligonucleotide
acuucaccgcauccaaggu

SEQ ID NO: 512393 - RNA, 19 nt, Artificial Sequence
  Description of Artificial Sequence: Synthetic oligonucleotide
guacagagacuggggaggg

SEQ ID NO: 512394 - RNA, 19 nt, Artificial Sequence
  Description of Artificial Sequence: Synthetic oligonucleotide
aguagaugccgucgauggu

SEQ ID NO: 512395 - RNA, 19 nt, Artificial Sequence
  Description of Artificial Sequence: Synthetic oligonucleotide
gagugagugggucugacuu

SEQ ID NO: 512396 - RNA, 19 nt, Artificial Sequence
  Description of Artificial Sequence: Synthetic oligonucleotide
agggaacgagccuggauaa

SEQ ID NO: 512397 - RNA, 19 nt, Artificial Sequence
  Description of Artificial Sequence: Synthetic oligonucleotide
gggucaaucaggcacucuc

SEQ ID NO: 512398 - RNA, 19 nt, Artificial Sequence
  Description of Artificial Sequence: Synthetic oligonucleotide
ugauagcguacugggugag

SEQ ID NO: 512399 - RNA, 19 nt, Artificial Sequence
  Description of Artificial Sequence: Synthetic oligonucleotide
ggcauucggcuccucauag

SEQ ID NO: 512400 - RNA, 19 nt, Artificial Sequence
  Description of Artificial Sequence: Synthetic oligonucleotide
ugcuugcgaauguccuggg

SEQ ID NO: 512401 - RNA, 19 nt, Artificial Sequence
  Description of Artificial Sequence: Synthetic oligonucleotide
agagugagugggucugacu

SEQ ID NO: 512402 - RNA, 19 nt, Artificial Sequence
  Description of Artificial Sequence: Synthetic oligonucleotide
ugggucugacuuucagcgc

SEQ ID NO: 512403 - RNA, 19 nt, Artificial Sequence
  Description of Artificial Sequence: Synthetic oligonucleotide
ggacacgauagucagcauc

SEQ ID NO: 512404 - RNA, 19 nt, Artificial Sequence
  Description of Artificial Sequence: Synthetic oligonucleotide
caucucacugggcagggca

SEQ ID NO: 512405 - RNA, 19 nt, Artificial Sequence
  Description of Artificial Sequence: Synthetic oligonucleotide
guucgcccagcucugccag

SEQ ID NO: 512406 - RNA, 19 nt, Artificial Sequence
  Description of Artificial Sequence: Synthetic oligonucleotide
acaguuagguuuggaaaau

SEQ ID NO: 512407 - RNA, 19 nt, Artificial Sequence
  Description of Artificial Sequence: Synthetic oligonucleotide
cauccugcggcccaagcga

SEQ ID NO: 512408 - RNA, 19 nt, Artificial Sequence
  Description of Artificial Sequence: Synthetic oligonucleotide
ugcgaauguccugggcccg

SEQ ID NO: 512409 - RNA, 19 nt, Artificial Sequence
  Description of Artificial Sequence: Synthetic oligonucleotide
gauuuccggcacauuggug

SEQ ID NO: 512410 - RNA, 19 nt, Artificial Sequence
  Description of Artificial Sequence: Synthetic oligonucleotide
guacugggugaggucaggg

SEQ ID NO: 512411 - RNA, 19 nt, Artificial Sequence
  Description of Artificial Sequence: Synthetic oligonucleotide
augccgucgauggucagug

SEQ ID NO: 512412 - RNA, 19 nt, Artificial Sequence
  Description of Artificial Sequence: Synthetic oligonucleotide
gguaugagauaggucauca

SEQ ID NO: 512413 - RNA, 19 nt, Artificial Sequence
  Description of Artificial Sequence: Synthetic oligonucleotide
cugucuguugaagagcgca

SEQ ID NO: 512414 - RNA, 19 nt, Artificial Sequence
  Description of Artificial Sequence: Synthetic oligonucleotide
cccugcuuaaaucuguuuc

SEQ ID NO: 512415 - RNA, 19 nt, Artificial Sequence
  Description of Artificial Sequence: Synthetic oligonucleotide
caucucgguaggcacguuc

SEQ ID NO: 512416 - RNA, 19 nt, Artificial Sequence
  Description of Artificial Sequence: Synthetic oligonucleotide
gcuugguugggucggagac

SEQ ID NO: 512417 - RNA, 19 nt, Artificial Sequence
  Description of Artificial Sequence: Synthetic oligonucleotide
cuuguccaaucugugugug

SEQ ID NO: 512418 - RNA, 19 nt, Artificial Sequence
  Description of Artificial Sequence: Synthetic oligonucleotide
ccuaacaucugcuugcgaa

SEQ ID NO: 512419 - RNA, 19 nt, Artificial Sequence
  Description of Artificial Sequence: Synthetic oligonucleotide
aagguaagaugguccccuu

SEQ ID NO: 512420 - RNA, 19 nt, Artificial Sequence
  Description of Artificial Sequence: Synthetic oligonucleotide
guguguuguguguguauga

SEQ ID NO: 512421 - RNA, 19 nt, Artificial Sequence
  Description of Artificial Sequence: Synthetic oligonucleotide
agugagugggucugacuuu

SEQ ID NO: 512422 - RNA, 19 nt, Artificial Sequence
  Description of Artificial Sequence: Synthetic oligonucleotide
guagaccaccugcugguca

SEQ ID NO: 512423 - RNA, 19 nt, Artificial Sequence
  Description of Artificial Sequence: Synthetic oligonucleotide
guagugaccucacgcaugu

SEQ ID NO: 512424 - RNA, 19 nt, Artificial Sequence
  Description of Artificial Sequence: Synthetic oligonucleotide
cuugggucgguagaagaca

SEQ ID NO: 512425 - RNA, 19 nt, Artificial Sequence
  Description of Artificial Sequence: Synthetic oligonucleotide
ugguaugagauaggucauc

SEQ ID NO: 512426 - RNA, 19 nt, Artificial Sequence
  Description of Artificial Sequence: Synthetic oligonucleotide
aggcacguucaguguacag

SEQ ID NO: 512427 - RNA, 19 nt, Artificial Sequence
  Description of Artificial Sequence: Synthetic oligonucleotide
cuguaacacuucccugggc

SEQ ID NO: 512428 - RNA, 19 nt, Artificial Sequence
  Description of Artificial Sequence: Synthetic oligonucleotide
cagugaucaggcuggcguc

SEQ ID NO: 512429 - RNA, 19 nt, Artificial Sequence
  Description of Artificial Sequence: Synthetic oligonucleotide
ugagugggucugacuuuca

SEQ ID NO: 512430 - RNA, 19 nt, Artificial Sequence
  Description of Artificial Sequence: Synthetic oligonucleotide
ggauguagaccaccugcug

SEQ ID NO: 512431 - RNA, 19 nt, Artificial Sequence
  Description of Artificial Sequence: Synthetic oligonucleotide
gagacuggggagggaguag

SEQ ID NO: 512432 - RNA, 19 nt, Artificial Sequence
  Description of Artificial Sequence: Synthetic oligonucleotide
aucucgguaggcacguuca

SEQ ID NO: 512433 - RNA, 19 nt, Artificial Sequence
  Description of Artificial Sequence: Synthetic oligonucleotide
ggucaauuaguguucggua

SEQ ID NO: 512434 - RNA, 19 nt, Artificial Sequence
  Description of Artificial Sequence: Synthetic oligonucleotide
caguuagguuuggaaaaug

SEQ ID NO: 512435 - RNA, 19 nt, Artificial Sequence
  Description of Artificial Sequence: Synthetic oligonucleotide
gcccaagcgagugagcagg

SEQ ID NO: 512436 - RNA, 19 nt, Artificial Sequence
  Description of Artificial Sequence: Synthetic oligonucleotide
caaucccuguuuuagaauu

SEQ ID NO: 512437 - RNA, 19 nt, Artificial Sequence
  Description of Artificial Sequence: Synthetic oligonucleotide
gcaagcaugagcuggggua

SEQ ID NO: 512438 - RNA, 19 nt, Artificial Sequence
  Description of Artificial Sequence: Synthetic oligonucleotide
acaauuccgaagagcacau

SEQ ID NO: 512439 - RNA, 19 nt, Artificial Sequence
  Description of Artificial Sequence: Synthetic oligonucleotide
uguguguguugugugugua

SEQ ID NO: 512440 - RNA, 19 nt, Artificial Sequence
  Description of Artificial Sequence: Synthetic oligonucleotide
gcgauuauacagaggcucc

SEQ ID NO: 512441 - RNA, 19 nt, Artificial Sequence
  Description of Artificial Sequence: Synthetic oligonucleotide
guaggcacguucaguguac

SEQ ID NO: 512442 - RNA, 19 nt, Artificial Sequence
  Description of Artificial Sequence: Synthetic oligonucleotide
caacgaugaugauagcgua

SEQ ID NO: 512443 - RNA, 19 nt, Artificial Sequence
  Description of Artificial Sequence: Synthetic oligonucleotide
ucucgugagccucguccaa

SEQ ID NO: 512444 - RNA, 19 nt, Artificial Sequence
  Description of Artificial Sequence: Synthetic oligonucleotide
gggucaaagauucgggucu

SEQ ID NO: 512445 - RNA, 19 nt, Artificial Sequence
  Description of Artificial Sequence: Synthetic oligonucleotide
gggucgguagaagacauuc

SEQ ID NO: 512446 - RNA, 19 nt, Artificial Sequence
  Description of Artificial Sequence: Synthetic oligonucleotide
uguuuauccuugggucggu

SEQ ID NO: 512447 - RNA, 19 nt, Artificial Sequence
  Description of Artificial Sequence: Synthetic oligonucleotide
ggcguagggaacgagccug

SEQ ID NO: 512448 - RNA, 19 nt, Artificial Sequence
  Description of Artificial Sequence: Synthetic oligonucleotide
acacgauagucagcaucuc

SEQ ID NO: 512449 - RNA, 19 nt, Artificial Sequence
  Description of Artificial Sequence: Synthetic oligonucleotide
gguugggucggagaccuug

SEQ ID NO: 512450 - RNA, 19 nt, Artificial Sequence
  Description of Artificial Sequence: Synthetic oligonucleotide
cucucgugagccucgucca

SEQ ID NO: 512451 - RNA, 19 nt, Artificial Sequence
  Description of Artificial Sequence: Synthetic oligonucleotide
uugggucggagaccuugaa

SEQ ID NO: 512452 - RNA, 19 nt, Artificial Sequence
  Description of Artificial Sequence: Synthetic oligonucleotide
ccacaagcuggucaauccc

SEQ ID NO: 512453 - RNA, 19 nt, Artificial Sequence
  Description of Artificial Sequence: Synthetic oligonucleotide
agcaccaguucaugguaua

SEQ ID NO: 512454 - RNA, 19 nt, Artificial Sequence
  Description of Artificial Sequence: Synthetic oligonucleotide
cugcuggucaauuaguguu

SEQ ID NO: 512455 - RNA, 19 nt, Artificial Sequence
  Description of Artificial Sequence: Synthetic oligonucleotide
cuaacaucugcuugcgaau

SEQ ID NO: 512456 - RNA, 19 nt, Artificial Sequence
  Description of Artificial Sequence: Synthetic oligonucleotide
ccucguccaacgaugauga

SEQ ID NO: 512457 - RNA, 19 nt, Artificial Sequence
  Description of Artificial Sequence: Synthetic oligonucleotide
auuaaaggcuccggccaaa

SEQ ID NO: 512458 - RNA, 19 nt, Artificial Sequence
  Description of Artificial Sequence: Synthetic oligonucleotide
ucaccgcauccaagguggc

SEQ ID NO: 512459 - RNA, 19 nt, Artificial Sequence
  Description of Artificial Sequence: Synthetic oligonucleotide
uagcguacugggugagguc

SEQ ID NO: 512460 - RNA, 19 nt, Artificial Sequence
  Description of Artificial Sequence: Synthetic oligonucleotide
uuuccaucgguggggcauc

SEQ ID NO: 512461 - RNA, 19 nt, Artificial Sequence
  Description of Artificial Sequence: Synthetic oligonucleotide
ggaggaugauuaacuccgg

SEQ ID NO: 512462 - RNA, 19 nt, Artificial Sequence
  Description of Artificial Sequence: Synthetic oligonucleotide
agcuugugccuguccauua

SEQ ID NO: 512463 - RNA, 19 nt, Artificial Sequence
  Description of Artificial Sequence: Synthetic oligonucleotide
aguaaacugggaggaugau

SEQ ID NO: 512464 - RNA, 19 nt, Artificial Sequence
  Description of Artificial Sequence: Synthetic oligonucleotide
caaucuguguguguugugu

SEQ ID NO: 512465 - RNA, 19 nt, Artificial Sequence
  Description of Artificial Sequence: Synthetic oligonucleotide
cggacuguggacuuaccac

SEQ ID NO: 512466 - RNA, 19 nt, Artificial Sequence
  Description of Artificial Sequence: Synthetic oligonucleotide
gguggcucuguuaaaugga

SEQ ID NO: 512467 - RNA, 19 nt, Artificial Sequence
  Description of Artificial Sequence: Synthetic oligonucleotide
ccaacgaugaugauagcgu

SEQ ID NO: 512468 - RNA, 19 nt, Artificial Sequence
  Description of Artificial Sequence: Synthetic oligonucleotide
ugauuaacuccgggacauc

SEQ ID NO: 512469 - RNA, 19 nt, Artificial Sequence
  Description of Artificial Sequence: Synthetic oligonucleotide
ucacgaccuuucugcugcc

SEQ ID NO: 512470 - RNA, 19 nt, Artificial Sequence
  Description of Artificial Sequence: Synthetic oligonucleotide
gguaggcacguucagugua

SEQ ID NO: 512471 - RNA, 19 nt, Artificial Sequence
  Description of Artificial Sequence: Synthetic oligonucleotide
cucgugagccucguccaac

SEQ ID NO: 512472 - RNA, 19 nt, Artificial Sequence
  Description of Artificial Sequence: Synthetic oligonucleotide
ggaacgagccuggauaaaa

SEQ ID NO: 512473 - RNA, 19 nt, Artificial Sequence
  Description of Artificial Sequence: Synthetic oligonucleotide
cugggucaaagauucgggu

SEQ ID NO: 512474 - RNA, 19 nt, Artificial Sequence
  Description of Artificial Sequence: Synthetic oligonucleotide
ugagcuugguugggucgga

SEQ ID NO: 512475 - RNA, 19 nt, Artificial Sequence
  Description of Artificial Sequence: Synthetic oligonucleotide
cuaugaagacaguuagguu

SEQ ID NO: 512476 - RNA, 19 nt, Artificial Sequence
  Description of Artificial Sequence: Synthetic oligonucleotide
auucggcuccucauagcga

SEQ ID NO: 512477 - RNA, 19 nt, Artificial Sequence
  Description of Artificial Sequence: Synthetic oligonucleotide
ggucaaagauucgggucug

SEQ ID NO: 512478 - RNA, 19 nt, Artificial Sequence
  Description of Artificial Sequence: Synthetic oligonucleotide
agcgagugagcaggcccuc

SEQ ID NO: 512479 - RNA, 19 nt, Artificial Sequence
  Description of Artificial Sequence: Synthetic oligonucleotide
gucggagaccuugaagaaa

SEQ ID NO: 512480 - RNA, 19 nt, Artificial Sequence
  Description of Artificial Sequence: Synthetic oligonucleotide
gcauucggcuccucauagc

SEQ ID NO: 512481 - RNA, 19 nt, Artificial Sequence
  Description of Artificial Sequence: Synthetic oligonucleotide
ugggucgguagaagacauu

SEQ ID NO: 512482 - RNA, 19 nt, Artificial Sequence
  Description of Artificial Sequence: Synthetic oligonucleotide
guuuccaucgguggggcau

SEQ ID NO: 512483 - RNA, 19 nt, Artificial Sequence
  Description of Artificial Sequence: Synthetic oligonucleotide
gggguaucagggcccuugc

SEQ ID NO: 512484 - RNA, 19 nt, Artificial Sequence
  Description of Artificial Sequence: Synthetic oligonucleotide
ggauagguccgaccaggga

SEQ ID NO: 512485 - RNA, 19 nt, Artificial Sequence
  Description of Artificial Sequence: Synthetic oligonucleotide
cccggcguagggaacgagc

SEQ ID NO: 512486 - RNA, 19 nt, Artificial Sequence
  Description of Artificial Sequence: Synthetic oligonucleotide
ggauuuccggcacauuggu

SEQ ID NO: 512487 - RNA, 19 nt, Artificial Sequence
  Description of Artificial Sequence: Synthetic oligonucleotide
caaucacgaccuuucugcu

SEQ ID NO: 512488 - RNA, 19 nt, Artificial Sequence
  Description of Artificial Sequence: Synthetic oligonucleotide
gaacgagccuggauaaaau

SEQ ID NO: 512489 - RNA, 19 nt, Artificial Sequence
  Description of Artificial Sequence: Synthetic oligonucleotide
gcaagguaagauggucccc

SEQ ID NO: 512490 - RNA, 19 nt, Artificial Sequence
  Description of Artificial Sequence: Synthetic oligonucleotide
gagccucguccaacgauga

SEQ ID NO: 512491 - RNA, 19 nt, Artificial Sequence
  Description of Artificial Sequence: Synthetic oligonucleotide
auccugcggcccaagcgag

SEQ ID NO: 512492 - RNA, 19 nt, Artificial Sequence
  Description of Artificial Sequence: Synthetic oligonucleotide
uccgggacaucagguccca

SEQ ID NO: 512493 - RNA, 19 nt, Artificial Sequence
  Description of Artificial Sequence: Synthetic oligonucleotide
gguucgcccagcucugcca

SEQ ID NO: 512494 - RNA, 19 nt, Artificial Sequence
  Description of Artificial Sequence: Synthetic oligonucleotide
cuccugcggguccuucuug

SEQ ID NO: 512495 - RNA, 19 nt, Artificial Sequence
  Description of Artificial Sequence: Synthetic oligonucleotide
agagcacauccgugugaau

SEQ ID NO: 512496 - RNA, 19 nt, Artificial Sequence
  Description of Artificial Sequence: Synthetic oligonucleotide
cgauagucagcaucucuuc

SEQ ID NO: 512497 - RNA, 19 nt, Artificial Sequence
  Description of Artificial Sequence: Synthetic oligonucleotide
guaaacugggaggaugauu

SEQ ID NO: 512498 - RNA, 19 nt, Artificial Sequence
  Description of Artificial Sequence: Synthetic oligonucleotide
gaugccgucgauggucagu

SEQ ID NO: 512499 - RNA, 19 nt, Artificial Sequence
  Description of Artificial Sequence: Synthetic oligonucleotide
uccggccaaagcccugcuu

SEQ ID NO: 512500 - RNA, 19 nt, Artificial Sequence
  Description of Artificial Sequence: Synthetic oligonucleotide
cuacauccagcuugugccu

SEQ ID NO: 512501 - RNA, 19 nt, Artificial Sequence
  Description of Artificial Sequence: Synthetic oligonucleotide
aggcuggcguccaaauagu

SEQ ID NO: 512502 - RNA, 19 nt, Artificial Sequence
  Description of Artificial Sequence: Synthetic oligonucleotide
guccaacgaugaugauagc

SEQ ID NO: 512503 - RNA, 19 nt, Artificial Sequence
  Description of Artificial Sequence: Synthetic oligonucleotide
ggagaccuugaagaaagcu

SEQ ID NO: 512504 - RNA, 19 nt, Artificial Sequence
  Description of Artificial Sequence: Synthetic oligonucleotide
gucuguugaagagcgcacu

SEQ ID NO: 512505 - RNA, 19 nt, Artificial Sequence
  Description of Artificial Sequence: Synthetic oligonucleotide
gucgauggucagugauguc

SEQ ID NO: 512506 - RNA, 19 nt, Artificial Sequence
  Description of Artificial Sequence: Synthetic oligonucleotide
cauuaaugcccauggccuu

SEQ ID NO: 512507 - RNA, 19 nt, Artificial Sequence
  Description of Artificial Sequence: Synthetic oligonucleotide
cugugaucagaguuuccau

SEQ ID NO: 512508 - RNA, 19 nt, Artificial Sequence
  Description of Artificial Sequence: Synthetic oligonucleotide
guacagacaugaugagcau

SEQ ID NO: 512509 - RNA, 19 nt, Artificial Sequence
  Description of Artificial Sequence: Synthetic oligonucleotide
gucugacuuucagcgccgc

SEQ ID NO: 512510 - RNA, 19 nt, Artificial Sequence
  Description of Artificial Sequence: Synthetic oligonucleotide
guagggaacgagccuggau

SEQ ID NO: 512511 - RNA, 19 nt, Artificial Sequence
  Description of Artificial Sequence: Synthetic oligonucleotide
ggccgguucgcccagcucu

SEQ ID NO: 512512 - RNA, 19 nt, Artificial Sequence
  Description of Artificial Sequence: Synthetic oligonucleotide
ugccgucgauggucaguga

SEQ ID NO: 512513 - RNA, 19 nt, Artificial Sequence
  Description of Artificial Sequence: Synthetic oligonucleotide
cugggcccggcguagggaa

SEQ ID NO: 512514 - RNA, 19 nt, Artificial Sequence
  Description of Artificial Sequence: Synthetic oligonucleotide
cgguggggcauccaugaag

SEQ ID NO: 512515 - RNA, 19 nt, Artificial Sequence
  Description of Artificial Sequence: Synthetic oligonucleotide
ggacuuaccacaggagacu

SEQ ID NO: 512516 - RNA, 19 nt, Artificial Sequence
  Description of Artificial Sequence: Synthetic oligonucleotide
agccucguccaacgaugau

SEQ ID NO: 512517 - RNA, 19 nt, Artificial Sequence
  Description of Artificial Sequence: Synthetic oligonucleotide
gcauuucaucucgguaggc

SEQ ID NO: 512518 - RNA, 19 nt, Artificial Sequence
  Description of Artificial Sequence: Synthetic oligonucleotide
cuguguguguugugugugu

SEQ ID NO: 512519 - RNA, 19 nt, Artificial Sequence
  Description of Artificial Sequence: Synthetic oligonucleotide
guguguguuguguguguau

SEQ ID NO: 512520 - RNA, 19 nt, Artificial Sequence
  Description of Artificial Sequence: Synthetic oligonucleotide
ucggcuccucauagcgauu

SEQ ID NO: 512521 - RNA, 19 nt, Artificial Sequence
  Description of Artificial Sequence: Synthetic oligonucleotide
gcguagggaacgagccugg

SEQ ID NO: 512522 - RNA, 19 nt, Artificial Sequence
  Description of Artificial Sequence: Synthetic oligonucleotide
ggauggauguagaccaccu

SEQ ID NO: 512523 - RNA, 19 nt, Artificial Sequence
  Description of Artificial Sequence: Synthetic oligonucleotide
gggcccggcguagggaacg

SEQ ID NO: 512524 - RNA, 19 nt, Artificial Sequence
  Description of Artificial Sequence: Synthetic oligonucleotide
cccaagcgagugagcaggc

SEQ ID NO: 512525 - RNA, 19 nt, Artificial Sequence
  Description of Artificial Sequence: Synthetic oligonucleotide
cgaugguagugaccucacg

SEQ ID NO: 512526 - RNA, 19 nt, Artificial Sequence
  Description of Artificial Sequence: Synthetic oligonucleotide
gugaccucacgcauguauu

SEQ ID NO: 512527 - RNA, 19 nt, Artificial Sequence
  Description of Artificial Sequence: Synthetic oligonucleotide
cgaugaugauagcguacug

SEQ ID NO: 512528 - RNA, 19 nt, Artificial Sequence
  Description of Artificial Sequence: Synthetic oligonucleotide
ggcguccaaauagucuguc

SEQ ID NO: 512529 - RNA, 19 nt, Artificial Sequence
  Description of Artificial Sequence: Synthetic oligonucleotide
gcuggcguccaaauagucu

SEQ ID NO: 512530 - RNA, 19 nt, Artificial Sequence
  Description of Artificial Sequence: Synthetic oligonucleotide
gcugucuguugaagagcgc

SEQ ID NO: 512531 - RNA, 19 nt, Artificial Sequence
  Description of Artificial Sequence: Synthetic oligonucleotide
ccggccaaagcccugcuua

SEQ ID NO: 512532 - RNA, 19 nt, Artificial Sequence
  Description of Artificial Sequence: Synthetic oligonucleotide
ugaggccaacaugguucau

SEQ ID NO: 512533 - RNA, 19 nt, Artificial Sequence
  Description of Artificial Sequence: Synthetic oligonucleotide
ccgaccagggauggugaag

SEQ ID NO: 512534 - RNA, 19 nt, Artificial Sequence
  Description of Artificial Sequence: Synthetic oligonucleotide
cucgguaggcacguucagu

SEQ ID NO: 512535 - RNA, 19 nt, Artificial Sequence
  Description of Artificial Sequence: Synthetic oligonucleotide
gcguacugggugaggucag

SEQ ID NO: 512536 - RNA, 19 nt, Artificial Sequence
  Description of Artificial Sequence: Synthetic oligonucleotide
accauggguuggagaauuu

SEQ ID NO: 512537 - RNA, 19 nt, Artificial Sequence
  Description of Artificial Sequence: Synthetic oligonucleotide
gcauaacagugaucaggcu

SEQ ID NO: 512538 - RNA, 19 nt, Artificial Sequence
  Description of Artificial Sequence: Synthetic oligonucleotide
ggcuggcguccaaauaguc

SEQ ID NO: 512539 - RNA, 19 nt, Artificial Sequence
  Description of Artificial Sequence: Synthetic oligonucleotide
gcguccaaauagucugucu

SEQ ID NO: 512540 - RNA, 19 nt, Artificial Sequence
  Description of Artificial Sequence: Synthetic oligonucleotide
gccggaaggcucuggagau

SEQ ID NO: 512541 - RNA, 19 nt, Artificial Sequence
  Description of Artificial Sequence: Synthetic oligonucleotide
ucaucucgguaggcacguu

SEQ ID NO: 512542 - RNA, 19 nt, Artificial Sequence
  Description of Artificial Sequence: Synthetic oligonucleotide
ggucgguagaagacauucu

SEQ ID NO: 512543 - RNA, 19 nt, Artificial Sequence
  Description of Artificial Sequence: Synthetic oligonucleotide
gccgucgauggucagugau

SEQ ID NO: 512544 - RNA, 19 nt, Artificial Sequence
  Description of Artificial Sequence: Synthetic oligonucleotide
gccuaacaucugcuugcga

SEQ ID NO: 512545 - RNA, 19 nt, Artificial Sequence
  Description of Artificial Sequence: Synthetic oligonucleotide
cacgaccuuucugcugcca

SEQ ID NO: 512546 - RNA, 19 nt, Artificial Sequence
  Description of Artificial Sequence: Synthetic oligonucleotide
ggucaacuacauaguagau

SEQ ID NO: 512547 - RNA, 19 nt, Artificial Sequence
  Description of Artificial Sequence: Synthetic oligonucleotide
uagugaccucacgcaugua

SEQ ID NO: 512548 - RNA, 19 nt, Artificial Sequence
  Description of Artificial Sequence: Synthetic oligonucleotide
cugaggugacaaucagcuu

SEQ ID NO: 512549 - RNA, 19 nt, Artificial Sequence
  Description of Artificial Sequence: Synthetic oligonucleotide
cgauuauacagaggcucca

SEQ ID NO: 512550 - RNA, 19 nt, Artificial Sequence
  Description of Artificial Sequence: Synthetic oligonucleotide
agguccgaccagggauggu

SEQ ID NO: 512551 - RNA, 19 nt, Artificial Sequence
  Description of Artificial Sequence: Synthetic oligonucleotide
ggguaucagggcccuugcu

SEQ ID NO: 512552 - RNA, 19 nt, Artificial Sequence
  Description of Artificial Sequence: Synthetic oligonucleotide
ccgcauccaagguggcuga

SEQ ID NO: 512553 - RNA, 19 nt, Artificial Sequence
  Description of Artificial Sequence: Synthetic oligonucleotide
ccugguggcucuguuaaau

SEQ ID NO: 512554 - RNA, 19 nt, Artificial Sequence
  Description of Artificial Sequence: Synthetic oligonucleotide
gggaacgagccuggauaaa

SEQ ID NO: 512555 - RNA, 19 nt, Artificial Sequence
  Description of Artificial Sequence: Synthetic oligonucleotide
cugggccgguucgcccagc

SEQ ID NO: 512556 - RNA, 19 nt, Artificial Sequence
  Description of Artificial Sequence: Synthetic oligonucleotide
ccugggccgguucgcccag

SEQ ID NO: 512557 - RNA, 19 nt, Artificial Sequence
  Description of Artificial Sequence: Synthetic oligonucleotide
caccgcauccaagguggcu

SEQ ID NO: 512558 - RNA, 19 nt, Artificial Sequence
  Description of Artificial Sequence: Synthetic oligonucleotide
gcgagugagcaggcccuca

SEQ ID NO: 512559 - RNA, 19 nt, Artificial Sequence
  Description of Artificial Sequence: Synthetic oligonucleotide
ccaucgguggggcauccau

SEQ ID NO: 512560 - RNA, 19 nt, Artificial Sequence
  Description of Artificial Sequence: Synthetic oligonucleotide
ccgguucgcccagcucugc

SEQ ID NO: 512561 - RNA, 19 nt, Artificial Sequence
  Description of Artificial Sequence: Synthetic oligonucleotide
cgugagccucguccaacga

SEQ ID NO: 512562 - RNA, 19 nt, Artificial Sequence
  Description of Artificial Sequence: Synthetic oligonucleotide
gcccggcguagggaacgag

SEQ ID NO: 512563 - RNA, 19 nt, Artificial Sequence
  Description of Artificial Sequence: Synthetic oligonucleotide
ggcccggcguagggaacga

SEQ ID NO: 512564 - RNA, 19 nt, Artificial Sequence
  Description of Artificial Sequence: Synthetic oligonucleotide
ccgggacaucaggucccag

SEQ ID NO: 512565 - RNA, 19 nt, Artificial Sequence
  Description of Artificial Sequence: Synthetic oligonucleotide
gcgggagaggagagugagu

SEQ ID NO: 512566 - RNA, 19 nt, Artificial Sequence
  Description of Artificial Sequence: Synthetic oligonucleotide
cgccgccggaaggcucugg

SEQ ID NO: 512567 - RNA, 19 nt, Artificial Sequence
  Description of Artificial Sequence: Synthetic oligonucleotide
uggacuuuaggccagagca

SEQ ID NO: 512568 - RNA, 19 nt, Artificial Sequence
  Description of Artificial Sequence: Synthetic oligonucleotide
aaugacggaauugugacuc

SEQ ID NO: 512569 - RNA, 19 nt, Artificial Sequence
  Description of Artificial Sequence: Synthetic oligonucleotide
cuugauauaauguaccaug

SEQ ID NO: 512570 - RNA, 19 nt, Artificial Sequence
  Description of Artificial Sequence: Synthetic oligonucleotide
ugaucguugacuaugggca

SEQ ID NO: 512571 - RNA, 19 nt, Artificial Sequence
  Description of Artificial Sequence: Synthetic oligonucleotide
acaaugacggaauugugac

SEQ ID NO: 512572 - RNA, 19 nt, Artificial Sequence
  Description of Artificial Sequence: Synthetic oligonucleotide
ucagagauaggguagcggg

SEQ ID NO: 512573 - RNA, 19 nt, Artificial Sequence
  Description of Artificial Sequence: Synthetic oligonucleotide
guauuugucaucuucccgg

SEQ ID NO: 512574 - RNA, 19 nt, Artificial Sequence
  Description of Artificial Sequence: Synthetic oligonucleotide
auuaccggcaccccaaagc

SEQ ID NO: 512575 - RNA, 19 nt, Artificial Sequence
  Description of Artificial Sequence: Synthetic oligonucleotide
agcgagagagaccugaggc

SEQ ID NO: 512576 - RNA, 19 nt, Artificial Sequence
  Description of Artificial Sequence: Synthetic oligonucleotide
aaagugugcaaaguuaaag

SEQ ID NO: 512577 - RNA, 19 nt, Artificial Sequence
  Description of Artificial Sequence: Synthetic oligonucleotide
uuaauauacaaugacggaa

SEQ ID NO: 512578 - RNA, 19 nt, Artificial Sequence
  Description of Artificial Sequence: Synthetic oligonucleotide
ucaacugcagcugagagga

SEQ ID NO: 512579 - RNA, 19 nt, Artificial Sequence
  Description of Artificial Sequence: Synthetic oligonucleotide
ucaacgucaccccugcugg

SEQ ID NO: 512580 - RNA, 19 nt, Artificial Sequence
  Description of Artificial Sequence: Synthetic oligonucleotide
uggaucgcaggacagacag

SEQ ID NO: 512581 - RNA, 19 nt, Artificial Sequence
  Description of Artificial Sequence: Synthetic oligonucleotide
ucucguaagaguguaagcc

SEQ ID NO: 512582 - RNA, 19 nt, Artificial Sequence
  Description of Artificial Sequence: Synthetic oligonucleotide
gagccuuuauccuggaugg

SEQ ID NO: 512583 - RNA, 19 nt, Artificial Sequence
  Description of Artificial Sequence: Synthetic oligonucleotide
ucugcuugauauaauguac

SEQ ID NO: 512584 - RNA, 19 nt, Artificial Sequence
  Description of Artificial Sequence: Synthetic oligonucleotide
accaucagcuauuaccggc

SEQ ID NO: 512585 - RNA, 19 nt, Artificial Sequence
  Description of Artificial Sequence: Synthetic oligonucleotide
aagucgaugucucgggagg

SEQ ID NO: 512586 - RNA, 19 nt, Artificial Sequence
  Description of Artificial Sequence: Synthetic oligonucleotide
aaagucgaugucucgggag

SEQ ID NO: 512587 - RNA, 19 nt, Artificial Sequence
  Description of Artificial Sequence: Synthetic oligonucleotide
gaauccaugucguaucuug

SEQ ID NO: 512588 - RNA, 19 nt, Artificial Sequence
  Description of Artificial Sequence: Synthetic oligonucleotide
uauucagauuauuuaauau

SEQ ID NO: 512589 - RNA, 19 nt, Artificial Sequence
  Description of Artificial Sequence: Synthetic oligonucleotide
ugauauaauguaccauggc

SEQ ID NO: 512590 - RNA, 19 nt, Artificial Sequence
  Description of Artificial Sequence: Synthetic oligonucleotide
gaacccauagugcaagucc

SEQ ID NO: 512591 - RNA, 19 nt, Artificial Sequence
  Description of Artificial Sequence: Synthetic oligonucleotide
uaccauggcgaucugauac

SEQ ID NO: 512592 - RNA, 19 nt, Artificial Sequence
  Description of Artificial Sequence: Synthetic oligonucleotide
uaauguaccauggcgaucu

SEQ ID NO: 512593 - RNA, 19 nt, Artificial Sequence
  Description of Artificial Sequence: Synthetic oligonucleotide
ucgagaacaucacccacgg

SEQ ID NO: 512594 - RNA, 19 nt, Artificial Sequence
  Description of Artificial Sequence: Synthetic oligonucleotide
aagagaggugcccuauagg

SEQ ID NO: 512595 - RNA, 19 nt, Artificial Sequence
  Description of Artificial Sequence: Synthetic oligonucleotide
uguauucagauuauuuaau

SEQ ID NO: 512596 - RNA, 19 nt, Artificial Sequence
  Description of Artificial Sequence: Synthetic oligonucleotide
ucagcuauuaccggcaccc

SEQ ID NO: 512597 - RNA, 19 nt, Artificial Sequence
  Description of Artificial Sequence: Synthetic oligonucleotide
cuggccuaaguccagaacc

SEQ ID NO: 512598 - RNA, 19 nt, Artificial Sequence
  Description of Artificial Sequence: Synthetic oligonucleotide
agaaagucgaugucucggg

SEQ ID NO: 512599 - RNA, 19 nt, Artificial Sequence
  Description of Artificial Sequence: Synthetic oligonucleotide
cucguaagaguguaagccg

SEQ ID NO: 512600 - RNA, 19 nt, Artificial Sequence
  Description of Artificial Sequence: Synthetic oligonucleotide
aucagcgccagccugagug

SEQ ID NO: 512601 - RNA, 19 nt, Artificial Sequence
  Description of Artificial Sequence: Synthetic oligonucleotide
aaguccguggaccacucag

SEQ ID NO: 512602 - RNA, 19 nt, Artificial Sequence
  Description of Artificial Sequence: Synthetic oligonucleotide
aacuucuugaccuuccgua

SEQ ID NO: 512603 - RNA, 19 nt, Artificial Sequence
  Description of Artificial Sequence: Synthetic oligonucleotide
ucauaauuaggcccucccc

SEQ ID NO: 512604 - RNA, 19 nt, Artificial Sequence
  Description of Artificial Sequence: Synthetic oligonucleotide
uauuugucaucuucccggg

SEQ ID NO: 512605 - RNA, 19 nt, Artificial Sequence
  Description of Artificial Sequence: Synthetic oligonucleotide
uucaacgucaccccugcug

SEQ ID NO: 512606 - RNA, 19 nt, Artificial Sequence
  Description of Artificial Sequence: Synthetic oligonucleotide
agcuaccugacucuguggg

SEQ ID NO: 512607 - RNA, 19 nt, Artificial Sequence
  Description of Artificial Sequence: Synthetic oligonucleotide
auaauuaggcccuccccag

SEQ ID NO: 512608 - RNA, 19 nt, Artificial Sequence
  Description of Artificial Sequence: Synthetic oligonucleotide
ucaggagagcaccauuucc

SEQ ID NO: 512609 - RNA, 19 nt, Artificial Sequence
  Description of Artificial Sequence: Synthetic oligonucleotide
gaaguauucgccaggggcc

SEQ ID NO: 512610 - RNA, 19 nt, Artificial Sequence
  Description of Artificial Sequence: Synthetic oligonucleotide
uguaccauggcgaucugau

SEQ ID NO: 512611 - RNA, 19 nt, Artificial Sequence
  Description of Artificial Sequence: Synthetic oligonucleotide
cucgagaacaucacccacg

SEQ ID NO: 512612 - RNA, 19 nt, Artificial Sequence
  Description of Artificial Sequence: Synthetic oligonucleotide
caauucaucuugaucguug

SEQ ID NO: 512613 - RNA, 19 nt, Artificial Sequence
  Description of Artificial Sequence: Synthetic oligonucleotide
cuuuauccuggauggagcc

SEQ ID NO: 512614 - RNA, 19 nt, Artificial Sequence
  Description of Artificial Sequence: Synthetic oligonucleotide
gaagaaucuagcacuauga

SEQ ID NO: 512615 - RNA, 19 nt, Artificial Sequence
  Description of Artificial Sequence: Synthetic oligonucleotide
uccaugucguaucuuggcc

SEQ ID NO: 512616 - RNA, 19 nt, Artificial Sequence
  Description of Artificial Sequence: Synthetic oligonucleotide
ucucgggagguaacgaugc

SEQ ID NO: 512617 - RNA, 19 nt, Artificial Sequence
  Description of Artificial Sequence: Synthetic oligonucleotide
uaucuuggccucgagaaca

SEQ ID NO: 512618 - RNA, 19 nt, Artificial Sequence
  Description of Artificial Sequence: Synthetic oligonucleotide
ucuuucaacgucaccccug

SEQ ID NO: 512619 - RNA, 19 nt, Artificial Sequence
  Description of Artificial Sequence: Synthetic oligonucleotide
caugcccacacgaagcccg

SEQ ID NO: 512620 - RNA, 19 nt, Artificial Sequence
  Description of Artificial Sequence: Synthetic oligonucleotide
aaccaauuccucccaugag

SEQ ID NO: 512621 - RNA, 19 nt, Artificial Sequence
  Description of Artificial Sequence: Synthetic oligonucleotide
uaauuaggcccuccccagg

SEQ ID NO: 512622 - RNA, 19 nt, Artificial Sequence
  Description of Artificial Sequence: Synthetic oligonucleotide
gaagucuaugaacccuggg

SEQ ID NO: 512623 - RNA, 19 nt, Artificial Sequence
  Description of Artificial Sequence: Synthetic oligonucleotide
ggugacucgggaaugaagg

SEQ ID NO: 512624 - RNA, 19 nt, Artificial Sequence
  Description of Artificial Sequence: Synthetic oligonucleotide
ucguaagaguguaagccgu

SEQ ID NO: 512625 - RNA, 19 nt, Artificial Sequence
  Description of Artificial Sequence: Synthetic oligonucleotide
uuaagccucaccccaucug

SEQ ID NO: 512626 - RNA, 19 nt, Artificial Sequence
  Description of Artificial Sequence: Synthetic oligonucleotide
aucagcuauuaccggcacc

SEQ ID NO: 512627 - RNA, 19 nt, Artificial Sequence
  Description of Artificial Sequence: Synthetic oligonucleotide
uucagagauaggguagcgg

SEQ ID NO: 512628 - RNA, 19 nt, Artificial Sequence
  Description of Artificial Sequence: Synthetic oligonucleotide
cauaauuaggcccucccca

SEQ ID NO: 512629 - RNA, 19 nt, Artificial Sequence
  Description of Artificial Sequence: Synthetic oligonucleotide
ugugcgugcaaugauggcu

SEQ ID NO: 512630 - RNA, 19 nt, Artificial Sequence
  Description of Artificial Sequence: Synthetic oligonucleotide
auauacaaugacggaauug

SEQ ID NO: 512631 - RNA, 19 nt, Artificial Sequence
  Description of Artificial Sequence: Synthetic oligonucleotide
uucucguaagaguguaagc

SEQ ID NO: 512632 - RNA, 19 nt, Artificial Sequence
  Description of Artificial Sequence: Synthetic oligonucleotide
gaugucucgggagguaacg

SEQ ID NO: 512633 - RNA, 19 nt, Artificial Sequence
  Description of Artificial Sequence: Synthetic oligonucleotide
cagaaagucgaugucucgg

SEQ ID NO: 512634 - RNA, 19 nt, Artificial Sequence
  Description of Artificial Sequence: Synthetic oligonucleotide
guagcagugauggggaugc

SEQ ID NO: 512635 - RNA, 19 nt, Artificial Sequence
  Description of Artificial Sequence: Synthetic oligonucleotide
cuuucaacgucaccccugc

SEQ ID NO: 512636 - RNA, 19 nt, Artificial Sequence
  Description of Artificial Sequence: Synthetic oligonucleotide
guguaagccgugcacgccg

SEQ ID NO: 512637 - RNA, 19 nt, Artificial Sequence
  Description of Artificial Sequence: Synthetic oligonucleotide
cuucucguaagaguguaag

SEQ ID NO: 512638 - RNA, 19 nt, Artificial Sequence
  Description of Artificial Sequence: Synthetic oligonucleotide
caagagaggugcccuauag

SEQ ID NO: 512639 - RNA, 19 nt, Artificial Sequence
  Description of Artificial Sequence: Synthetic oligonucleotide
ggaagaaucuagcacuaug

SEQ ID NO: 512640 - RNA, 19 nt, Artificial Sequence
  Description of Artificial Sequence: Synthetic oligonucleotide
aacuugagcucuccugagu

SEQ ID NO: 512641 - RNA, 19 nt, Artificial Sequence
  Description of Artificial Sequence: Synthetic oligonucleotide
auaggagaagagaucagug

SEQ ID NO: 512642 - RNA, 19 nt, Artificial Sequence
  Description of Artificial Sequence: Synthetic oligonucleotide
uggcccacggucuggaugc

SEQ ID NO: 512643 - RNA, 19 nt, Artificial Sequence
  Description of Artificial Sequence: Synthetic oligonucleotide
gaguguaagccgugcacgc

SEQ ID NO: 512644 - RNA, 19 nt, Artificial Sequence
  Description of Artificial Sequence: Synthetic oligonucleotide
aggaacgguacaccugggg

SEQ ID NO: 512645 - RNA, 19 nt, Artificial Sequence
  Description of Artificial Sequence: Synthetic oligonucleotide
uccugaguacaucauggau

SEQ ID NO: 512646 - RNA, 19 nt, Artificial Sequence
  Description of Artificial Sequence: Synthetic oligonucleotide
cacucaguuauggagggag

SEQ ID NO: 512647 - RNA, 19 nt, Artificial Sequence
  Description of Artificial Sequence: Synthetic oligonucleotide
ugcccuauaggagaagcca

SEQ ID NO: 512648 - RNA, 19 nt, Artificial Sequence
  Description of Artificial Sequence: Synthetic oligonucleotide
guauucagauuauuuaaua

SEQ ID NO: 512649 - RNA, 19 nt, Artificial Sequence
  Description of Artificial Sequence: Synthetic oligonucleotide
uauuaccggcaccccaaag

SEQ ID NO: 512650 - RNA, 19 nt, Artificial Sequence
  Description of Artificial Sequence: Synthetic oligonucleotide
agugcaaguccguggacca

SEQ ID NO: 512651 - RNA, 19 nt, Artificial Sequence
  Description of Artificial Sequence: Synthetic oligonucleotide
uagugcaaguccguggacc

SEQ ID NO: 512652 - RNA, 19 nt, Artificial Sequence
  Description of Artificial Sequence: Synthetic oligonucleotide
cuauaggagaagccaggag

SEQ ID NO: 512653 - RNA, 19 nt, Artificial Sequence
  Description of Artificial Sequence: Synthetic oligonucleotide
ugacucgggaaugaagggc

SEQ ID NO: 512654 - RNA, 19 nt, Artificial Sequence
  Description of Artificial Sequence: Synthetic oligonucleotide
guugacuaugggcagcuuc

SEQ ID NO: 512655 - RNA, 19 nt, Artificial Sequence
  Description of Artificial Sequence: Synthetic oligonucleotide
gugacucgggaaugaaggg

SEQ ID NO: 512656 - RNA, 19 nt, Artificial Sequence
  Description of Artificial Sequence: Synthetic oligonucleotide
cacgccgccuucuaucugg

SEQ ID NO: 512657 - RNA, 19 nt, Artificial Sequence
  Description of Artificial Sequence: Synthetic oligonucleotide
aacgguacaccuggggaug

SEQ ID NO: 512658 - RNA, 19 nt, Artificial Sequence
  Description of Artificial Sequence: Synthetic oligonucleotide
cuucuuaagccucacccca

SEQ ID NO: 512659 - RNA, 19 nt, Artificial Sequence
  Description of Artificial Sequence: Synthetic oligonucleotide
gguagugugguccuuuuca

SEQ ID NO: 512660 - RNA, 19 nt, Artificial Sequence
  Description of Artificial Sequence: Synthetic oligonucleotide
ucguaucuuggccucgaga

SEQ ID NO: 512661 - RNA, 19 nt, Artificial Sequence
  Description of Artificial Sequence: Synthetic oligonucleotide
cucaguuauggagggaggc

SEQ ID NO: 512662 - RNA, 19 nt, Artificial Sequence
  Description of Artificial Sequence: Synthetic oligonucleotide
agagaccucccucuggccu

SEQ ID NO: 512663 - RNA, 19 nt, Artificial Sequence
  Description of Artificial Sequence: Synthetic oligonucleotide
uuguagacggccgugcccu

SEQ ID NO: 512664 - RNA, 19 nt, Artificial Sequence
  Description of Artificial Sequence: Synthetic oligonucleotide
gguaacgaugcccaccagc

SEQ ID NO: 512665 - RNA, 19 nt, Artificial Sequence
  Description of Artificial Sequence: Synthetic oligonucleotide
auaggagaagccaggagga

SEQ ID NO: 512666 - RNA, 19 nt, Artificial Sequence
  Description of Artificial Sequence: Synthetic oligonucleotide
guacaucauggaucgcagg

SEQ ID NO: 512667 - RNA, 19 nt, Artificial Sequence
  Description of Artificial Sequence: Synthetic oligonucleotide
auaauguaccauggcgauc

SEQ ID NO: 512668 - RNA, 19 nt, Artificial Sequence
  Description of Artificial Sequence: Synthetic oligonucleotide
auguuagguccacuucauc

SEQ ID NO: 512669 - RNA, 19 nt, Artificial Sequence
  Description of Artificial Sequence: Synthetic oligonucleotide
uucgccaggggccuccgug

SEQ ID NO: 512670 - RNA, 19 nt, Artificial Sequence
  Description of Artificial Sequence: Synthetic oligonucleotide
ggcgaucugauacacugag

SEQ ID NO: 512671 - RNA, 19 nt, Artificial Sequence
  Description of Artificial Sequence: Synthetic oligonucleotide
acgaagcccguccacacca

SEQ ID NO: 512672 - RNA, 19 nt, Artificial Sequence
  Description of Artificial Sequence: Synthetic oligonucleotide
aggguagucucuguucuuc

SEQ ID NO: 512673 - RNA, 19 nt, Artificial Sequence
  Description of Artificial Sequence: Synthetic oligonucleotide
cuugaucguugacuauggg

SEQ ID NO: 512674 - RNA, 19 nt, Artificial Sequence
  Description of Artificial Sequence: Synthetic oligonucleotide
uuuauccuggauggagccc

SEQ ID NO: 512675 - RNA, 19 nt, Artificial Sequence
  Description of Artificial Sequence: Synthetic oligonucleotide
ugagagccaucgcaauggc

SEQ ID NO: 512676 - RNA, 19 nt, Artificial Sequence
  Description of Artificial Sequence: Synthetic oligonucleotide
uguaagccgugcacgccgc

SEQ ID NO: 512677 - RNA, 19 nt, Artificial Sequence
  Description of Artificial Sequence: Synthetic oligonucleotide
gucacgguguccauaggag

SEQ ID NO: 512678 - RNA, 19 nt, Artificial Sequence
  Description of Artificial Sequence: Synthetic oligonucleotide
cuugcuacccauggugccc

SEQ ID NO: 512679 - RNA, 19 nt, Artificial Sequence
  Description of Artificial Sequence: Synthetic oligonucleotide
aaguauucgccaggggccu

SEQ ID NO: 512680 - RNA, 19 nt, Artificial Sequence
  Description of Artificial Sequence: Synthetic oligonucleotide
gaaagucgaugucucggga

SEQ ID NO: 512681 - RNA, 19 nt, Artificial Sequence
  Description of Artificial Sequence: Synthetic oligonucleotide
agcccgagacacccugugc

SEQ ID NO: 512682 - RNA, 19 nt, Artificial Sequence
  Description of Artificial Sequence: Synthetic oligonucleotide
agcuauuaccggcacccca

SEQ ID NO: 512683 - RNA, 19 nt, Artificial Sequence
  Description of Artificial Sequence: Synthetic oligonucleotide
cuacccauggugcccguag

SEQ ID NO: 512684 - RNA, 19 nt, Artificial Sequence
  Description of Artificial Sequence: Synthetic oligonucleotide
acgucaccccugcuggggc

SEQ ID NO: 512685 - RNA, 19 nt, Artificial Sequence
  Description of Artificial Sequence: Synthetic oligonucleotide
uagacggccgugcccuggg

SEQ ID NO: 512686 - RNA, 19 nt, Artificial Sequence
  Description of Artificial Sequence: Synthetic oligonucleotide
ucgggagguaacgaugccc

SEQ ID NO: 512687 - RNA, 19 nt, Artificial Sequence
  Description of Artificial Sequence: Synthetic oligonucleotide
agccagaaagucgaugucu

SEQ ID NO: 512688 - RNA, 19 nt, Artificial Sequence
  Description of Artificial Sequence: Synthetic oligonucleotide
cugauguuagguccacuuc

SEQ ID NO: 512689 - RNA, 19 nt, Artificial Sequence
  Description of Artificial Sequence: Synthetic oligonucleotide
agguucagagauaggguag

SEQ ID NO: 512690 - RNA, 19 nt, Artificial Sequence
  Description of Artificial Sequence: Synthetic oligonucleotide
agguucguucccuccacug

SEQ ID NO: 512691 - RNA, 19 nt, Artificial Sequence
  Description of Artificial Sequence: Synthetic oligonucleotide
acccacgguaugugaaggg

SEQ ID NO: 512692 - RNA, 19 nt, Artificial Sequence
  Description of Artificial Sequence: Synthetic oligonucleotide
ggccccaauauccuggcag

SEQ ID NO: 512693 - RNA, 19 nt, Artificial Sequence
  Description of Artificial Sequence: Synthetic oligonucleotide
caguuauggagggaggcug

SEQ ID NO: 512694 - RNA, 19 nt, Artificial Sequence
  Description of Artificial Sequence: Synthetic oligonucleotide
gaacccugggaggaucagg

SEQ ID NO: 512695 - RNA, 19 nt, Artificial Sequence
  Description of Artificial Sequence: Synthetic oligonucleotide
cacgguaugugaagggcuc

SEQ ID NO: 512696 - RNA, 19 nt, Artificial Sequence
  Description of Artificial Sequence: Synthetic oligonucleotide
ggcagguggucauaauuag

SEQ ID NO: 512697 - RNA, 19 nt, Artificial Sequence
  Description of Artificial Sequence: Synthetic oligonucleotide
uggccucgagaacaucacc

SEQ ID NO: 512698 - RNA, 19 nt, Artificial Sequence
  Description of Artificial Sequence: Synthetic oligonucleotide
ggaaaaggggcagcaagag

SEQ ID NO: 512699 - RNA, 19 nt, Artificial Sequence
  Description of Artificial Sequence: Synthetic oligonucleotide
gacaugguccgcuucucaa

SEQ ID NO: 512700 - RNA, 19 nt, Artificial Sequence
  Description of Artificial Sequence: Synthetic oligonucleotide
caauuccucccaugagagc

SEQ ID NO: 512701 - RNA, 19 nt, Artificial Sequence
  Description of Artificial Sequence: Synthetic oligonucleotide
acggaauugugacuccaaa

SEQ ID NO: 512702 - RNA, 19 nt, Artificial Sequence
  Description of Artificial Sequence: Synthetic oligonucleotide
ggaacgguacaccugggga

SEQ ID NO: 512703 - RNA, 19 nt, Artificial Sequence
  Description of Artificial Sequence: Synthetic oligonucleotide
cccgcuaugagguagggca

SEQ ID NO: 512704 - RNA, 19 nt, Artificial Sequence
  Description of Artificial Sequence: Synthetic oligonucleotide
guagggcacaaacuucuga

SEQ ID NO: 512705 - RNA, 19 nt, Artificial Sequence
  Description of Artificial Sequence: Synthetic oligonucleotide
ugccccgguacuucuuaag

SEQ ID NO: 512706 - RNA, 19 nt, Artificial Sequence
  Description of Artificial Sequence: Synthetic oligonucleotide
acucaguuauggagggagg

SEQ ID NO: 512707 - RNA, 19 nt, Artificial Sequence
  Description of Artificial Sequence: Synthetic oligonucleotide
agugggaccccgagguucg

SEQ ID NO: 512708 - RNA, 19 nt, Artificial Sequence
  Description of Artificial Sequence: Synthetic oligonucleotide
ugacggaauugugacucca

SEQ ID NO: 512709 - RNA, 19 nt, Artificial Sequence
  Description of Artificial Sequence: Synthetic oligonucleotide
uacuucugcuugauauaau

SEQ ID NO: 512710 - RNA, 19 nt, Artificial Sequence
  Description of Artificial Sequence: Synthetic oligonucleotide
uacagccgcuucucguaag

SEQ ID NO: 512711 - RNA, 19 nt, Artificial Sequence
  Description of Artificial Sequence: Synthetic oligonucleotide
cagcgagagagaccugagg

SEQ ID NO: 512712 - RNA, 19 nt, Artificial Sequence
  Description of Artificial Sequence: Synthetic oligonucleotide
guaacgaugcccaccagcu

SEQ ID NO: 512713 - RNA, 19 nt, Artificial Sequence
  Description of Artificial Sequence: Synthetic oligonucleotide
ucguugacuaugggcagcu

SEQ ID NO: 512714 - RNA, 19 nt, Artificial Sequence
  Description of Artificial Sequence: Synthetic oligonucleotide
ucagcgccagccugaguga

SEQ ID NO: 512715 - RNA, 19 nt, Artificial Sequence
  Description of Artificial Sequence: Synthetic oligonucleotide
ucgauccguggugucauca

SEQ ID NO: 512716 - RNA, 19 nt, Artificial Sequence
  Description of Artificial Sequence: Synthetic oligonucleotide
gaagcccguccacaccagc

SEQ ID NO: 512717 - RNA, 19 nt, Artificial Sequence
  Description of Artificial Sequence: Synthetic oligonucleotide
cccuauaggagaagccagg

SEQ ID NO: 512718 - RNA, 19 nt, Artificial Sequence
  Description of Artificial Sequence: Synthetic oligonucleotide
ccucaagccagagaagggg

SEQ ID NO: 512719 - RNA, 19 nt, Artificial Sequence
  Description of Artificial Sequence: Synthetic oligonucleotide
gcuaccugacucugugggg

SEQ ID NO: 512720 - RNA, 19 nt, Artificial Sequence
  Description of Artificial Sequence: Synthetic oligonucleotide
ggccucgagaacaucaccc

SEQ ID NO: 512721 - RNA, 19 nt, Artificial Sequence
  Description of Artificial Sequence: Synthetic oligonucleotide
gucucgggagguaacgaug

SEQ ID NO: 512722 - RNA, 19 nt, Artificial Sequence
  Description of Artificial Sequence: Synthetic oligonucleotide
gaacgguacaccuggggau

SEQ ID NO: 512723 - RNA, 19 nt, Artificial Sequence
  Description of Artificial Sequence: Synthetic oligonucleotide
ugccucuuucaacgucacc

SEQ ID NO: 512724 - RNA, 19 nt, Artificial Sequence
  Description of Artificial Sequence: Synthetic oligonucleotide
ucgaugucucgggagguaa

SEQ ID NO: 512725 - RNA, 19 nt, Artificial Sequence
  Description of Artificial Sequence: Synthetic oligonucleotide
ugucguaucuuggccucga

SEQ ID NO: 512726 - RNA, 19 nt, Artificial Sequence
  Description of Artificial Sequence: Synthetic oligonucleotide
caauauccuggcagccaug

SEQ ID NO: 512727 - RNA, 19 nt, Artificial Sequence
  Description of Artificial Sequence: Synthetic oligonucleotide
cugugcgugcaaugauggc

SEQ ID NO: 512728 - RNA, 19 nt, Artificial Sequence
  Description of Artificial Sequence: Synthetic oligonucleotide
caucagcuauuaccggcac

SEQ ID NO: 512729 - RNA, 19 nt, Artificial Sequence
  Description of Artificial Sequence: Synthetic oligonucleotide
aguaucguuucuggcugcu

SEQ ID NO: 512730 - RNA, 19 nt, Artificial Sequence
  Description of Artificial Sequence: Synthetic oligonucleotide
cugauacacugaguucccc

SEQ ID NO: 512731 - RNA, 19 nt, Artificial Sequence
  Description of Artificial Sequence: Synthetic oligonucleotide
gacggccgugcccuggggc

SEQ ID NO: 512732 - RNA, 19 nt, Artificial Sequence
  Description of Artificial Sequence: Synthetic oligonucleotide
cacccugugcaaucuucac

SEQ ID NO: 512733 - RNA, 19 nt, Artificial Sequence
  Description of Artificial Sequence: Synthetic oligonucleotide
caacgucaccccugcuggg

SEQ ID NO: 512734 - RNA, 19 nt, Artificial Sequence
  Description of Artificial Sequence: Synthetic oligonucleotide
ugcccguagcagugauggg

SEQ ID NO: 512735 - RNA, 19 nt, Artificial Sequence
  Description of Artificial Sequence: Synthetic oligonucleotide
uuucaacgucaccccugcu

SEQ ID NO: 512736 - RNA, 19 nt, Artificial Sequence
  Description of Artificial Sequence: Synthetic oligonucleotide
guggucauaauuaggcccu

SEQ ID NO: 512737 - RNA, 19 nt, Artificial Sequence
  Description of Artificial Sequence: Synthetic oligonucleotide
augucguaucuuggccucg

SEQ ID NO: 512738 - RNA, 19 nt, Artificial Sequence
  Description of Artificial Sequence: Synthetic oligonucleotide
ggacuuuaggccagagcag

SEQ ID NO: 512739 - RNA, 19 nt, Artificial Sequence
  Description of Artificial Sequence: Synthetic oligonucleotide
cagagaccucccucuggcc

SEQ ID NO: 512740 - RNA, 19 nt, Artificial Sequence
  Description of Artificial Sequence: Synthetic oligonucleotide
uaacgaugcccaccagcuu

SEQ ID NO: 512741 - RNA, 19 nt, Artificial Sequence
  Description of Artificial Sequence: Synthetic oligonucleotide
cuccugaguacaucaugga

SEQ ID NO: 512742 - RNA, 19 nt, Artificial Sequence
  Description of Artificial Sequence: Synthetic oligonucleotide
gcaaaguuaaagccuucaa

SEQ ID NO: 512743 - RNA, 19 nt, Artificial Sequence
  Description of Artificial Sequence: Synthetic oligonucleotide
aagccgugcacgccgccuu

SEQ ID NO: 512744 - RNA, 19 nt, Artificial Sequence
  Description of Artificial Sequence: Synthetic oligonucleotide
cguaucuuggccucgagaa

SEQ ID NO: 512745 - RNA, 19 nt, Artificial Sequence
  Description of Artificial Sequence: Synthetic oligonucleotide
caucgcaauggccaugucu

SEQ ID NO: 512746 - RNA, 19 nt, Artificial Sequence
  Description of Artificial Sequence: Synthetic oligonucleotide
ccccgguacuucuuaagcc

SEQ ID NO: 512747 - RNA, 19 nt, Artificial Sequence
  Description of Artificial Sequence: Synthetic oligonucleotide
gccccaauauccuggcagc

SEQ ID NO: 512748 - RNA, 19 nt, Artificial Sequence
  Description of Artificial Sequence: Synthetic oligonucleotide
cucgggagguaacgaugcc

SEQ ID NO: 512749 - RNA, 19 nt, Artificial Sequence
  Description of Artificial Sequence: Synthetic oligonucleotide
gccccgguacuucuuaagc

SEQ ID NO: 512750 - RNA, 19 nt, Artificial Sequence
  Description of Artificial Sequence: Synthetic oligonucleotide
guauucgccaggggccucc

SEQ ID NO: 512751 - RNA, 19 nt, Artificial Sequence
  Description of Artificial Sequence: Synthetic oligonucleotide
uauucgccaggggccuccg

SEQ ID NO: 512752 - RNA, 19 nt, Artificial Sequence
  Description of Artificial Sequence: Synthetic oligonucleotide
gagccucaagccagagaag

SEQ ID NO: 512753 - RNA, 19 nt, Artificial Sequence
  Description of Artificial Sequence: Synthetic oligonucleotide
acacccugugcaaucuuca

SEQ ID NO: 512754 - RNA, 19 nt, Artificial Sequence
  Description of Artificial Sequence: Synthetic oligonucleotide
gucguaucuuggccucgag

SEQ ID NO: 512755 - RNA, 19 nt, Artificial Sequence
  Description of Artificial Sequence: Synthetic oligonucleotide
ugcgugcaaugauggcuac

SEQ ID NO: 512756 - RNA, 19 nt, Artificial Sequence
  Description of Artificial Sequence: Synthetic oligonucleotide
ccgcuucucaaacuugagc

SEQ ID NO: 512757 - RNA, 19 nt, Artificial Sequence
  Description of Artificial Sequence: Synthetic oligonucleotide
agcccguccacaccagcau

SEQ ID NO: 512758 - RNA, 19 nt, Artificial Sequence
  Description of Artificial Sequence: Synthetic oligonucleotide
aguauucgccaggggccuc

SEQ ID NO: 512759 - RNA, 19 nt, Artificial Sequence
  Description of Artificial Sequence: Synthetic oligonucleotide
agcgccagccugagugagc

SEQ ID NO: 512760 - RNA, 19 nt, Artificial Sequence
  Description of Artificial Sequence: Synthetic oligonucleotide
gaucugugcgugcaaugau

SEQ ID NO: 512761 - RNA, 19 nt, Artificial Sequence
  Description of Artificial Sequence: Synthetic oligonucleotide
aguccguggaccacucagu

SEQ ID NO: 512762 - RNA, 19 nt, Artificial Sequence
  Description of Artificial Sequence: Synthetic oligonucleotide
agggcugauguuaggucca

SEQ ID NO: 512763 - RNA, 19 nt, Artificial Sequence
  Description of Artificial Sequence: Synthetic oligonucleotide
gacggaauugugacuccaa

SEQ ID NO: 512764 - RNA, 19 nt, Artificial Sequence
  Description of Artificial Sequence: Synthetic oligonucleotide
uccuggagugggaccccga

SEQ ID NO: 512765 - RNA, 19 nt, Artificial Sequence
  Description of Artificial Sequence: Synthetic oligonucleotide
agccgugcacgccgccuuc

SEQ ID NO: 512766 - RNA, 19 nt, Artificial Sequence
  Description of Artificial Sequence: Synthetic oligonucleotide
uccccgcuaugagguaggg

SEQ ID NO: 512767 - RNA, 19 nt, Artificial Sequence
  Description of Artificial Sequence: Synthetic oligonucleotide
gcguccagagagcccaugc

SEQ ID NO: 512768 - RNA, 19 nt, Artificial Sequence
  Description of Artificial Sequence: Synthetic oligonucleotide
ggucagggcugauguuagg

SEQ ID NO: 512769 - RNA, 19 nt, Artificial Sequence
  Description of Artificial Sequence: Synthetic oligonucleotide
uucccuccacugccuuggc

SEQ ID NO: 512770 - RNA, 19 nt, Artificial Sequence
  Description of Artificial Sequence: Synthetic oligonucleotide
gacuaugggcagcuucccu

SEQ ID NO: 512771 - RNA, 19 nt, Artificial Sequence
  Description of Artificial Sequence: Synthetic oligonucleotide
ccaucagcuauuaccggca

SEQ ID NO: 512772 - RNA, 19 nt, Artificial Sequence
  Description of Artificial Sequence: Synthetic oligonucleotide
guaagccgugcacgccgcc

SEQ ID NO: 512773 - RNA, 19 nt, Artificial Sequence
  Description of Artificial Sequence: Synthetic oligonucleotide
cccacgguaugugaagggc

SEQ ID NO: 512774 - RNA, 19 nt, Artificial Sequence
  Description of Artificial Sequence: Synthetic oligonucleotide
cuuaagccucaccccaucu

SEQ ID NO: 512775 - RNA, 19 nt, Artificial Sequence
  Description of Artificial Sequence: Synthetic oligonucleotide
guacagccgcuucucguaa

SEQ ID NO: 512776 - RNA, 19 nt, Artificial Sequence
  Description of Artificial Sequence: Synthetic oligonucleotide
caaugacggaauugugacu

SEQ ID NO: 512777 - RNA, 19 nt, Artificial Sequence
  Description of Artificial Sequence: Synthetic oligonucleotide
uggucauaauuaggcccuc

SEQ ID NO: 512778 - RNA, 19 nt, Artificial Sequence
  Description of Artificial Sequence: Synthetic oligonucleotide
ggaacccauagugcaaguc

SEQ ID NO: 512779 - RNA, 19 nt, Artificial Sequence
  Description of Artificial Sequence: Synthetic oligonucleotide
auggaucgcaggacagaca

SEQ ID NO: 512780 - RNA, 19 nt, Artificial Sequence
  Description of Artificial Sequence: Synthetic oligonucleotide
ccucgagaacaucacccac

SEQ ID NO: 512781 - RNA, 19 nt, Artificial Sequence
  Description of Artificial Sequence: Synthetic oligonucleotide
acggucuggaugccaccau

SEQ ID NO: 512782 - RNA, 19 nt, Artificial Sequence
  Description of Artificial Sequence: Synthetic oligonucleotide
cagcuauuaccggcacccc

SEQ ID NO: 512783 - RNA, 19 nt, Artificial Sequence
  Description of Artificial Sequence: Synthetic oligonucleotide
cguaagaguguaagccgug

SEQ ID NO: 512784 - RNA, 19 nt, Artificial Sequence
  Description of Artificial Sequence: Synthetic oligonucleotide
gggaccccgagguucguuc

SEQ ID NO: 512785 - RNA, 19 nt, Artificial Sequence
  Description of Artificial Sequence: Synthetic oligonucleotide
guaccauggcgaucugaua

SEQ ID NO: 512786 - RNA, 19 nt, Artificial Sequence
  Description of Artificial Sequence: Synthetic oligonucleotide
acccauagugcaaguccgu

SEQ ID NO: 512787 - RNA, 19 nt, Artificial Sequence
  Description of Artificial Sequence: Synthetic oligonucleotide
cuauuaccggcaccccaaa

SEQ ID NO: 512788 - RNA, 19 nt, Artificial Sequence
  Description of Artificial Sequence: Synthetic oligonucleotide
ggguagcgggcugaggagc

SEQ ID NO: 512789 - RNA, 19 nt, Artificial Sequence
  Description of Artificial Sequence: Synthetic oligonucleotide
cccacggucuggaugccac

SEQ ID NO: 512790 - RNA, 19 nt, Artificial Sequence
  Description of Artificial Sequence: Synthetic oligonucleotide
cuuuaggccagagcaggcu

SEQ ID NO: 512791 - RNA, 19 nt, Artificial Sequence
  Description of Artificial Sequence: Synthetic oligonucleotide
gggcagguggucauaauua

SEQ ID NO: 512792 - RNA, 19 nt, Artificial Sequence
  Description of Artificial Sequence: Synthetic oligonucleotide
augccccgguacuucuuaa

SEQ ID NO: 512793 - RNA, 19 nt, Artificial Sequence
  Description of Artificial Sequence: Synthetic oligonucleotide
ggaaugaagggcagguggu

SEQ ID NO: 512794 - RNA, 19 nt, Artificial Sequence
  Description of Artificial Sequence: Synthetic oligonucleotide
guagcgggcugaggagcag

SEQ ID NO: 512795 - RNA, 19 nt, Artificial Sequence
  Description of Artificial Sequence: Synthetic oligonucleotide
acgguacaccuggggauga

SEQ ID NO: 512796 - RNA, 19 nt, Artificial Sequence
  Description of Artificial Sequence: Synthetic oligonucleotide
caugccccgguacuucuua

SEQ ID NO: 512797 - RNA, 19 nt, Artificial Sequence
  Description of Artificial Sequence: Synthetic oligonucleotide
cucuuucaacgucaccccu

SEQ ID NO: 512798 - RNA, 19 nt, Artificial Sequence
  Description of Artificial Sequence: Synthetic oligonucleotide
gcagcgagagagaccugag

SEQ ID NO: 512799 - RNA, 19 nt, Artificial Sequence
  Description of Artificial Sequence: Synthetic oligonucleotide
aggugcccuauaggagaag

SEQ ID NO: 512800 - RNA, 19 nt, Artificial Sequence
  Description of Artificial Sequence: Synthetic oligonucleotide
gagguucguucccuccacu

SEQ ID NO: 512801 - RNA, 19 nt, Artificial Sequence
  Description of Artificial Sequence: Synthetic oligonucleotide
cccacacaacagcuguuug

SEQ ID NO: 512802 - RNA, 19 nt, Artificial Sequence
  Description of Artificial Sequence: Synthetic oligonucleotide
gagcuggggaacccauagu

SEQ ID NO: 512803 - RNA, 19 nt, Artificial Sequence
  Description of Artificial Sequence: Synthetic oligonucleotide
cgaucugauacacugaguu

SEQ ID NO: 512804 - RNA, 19 nt, Artificial Sequence
  Description of Artificial Sequence: Synthetic oligonucleotide
ggguagugugguccuuuuc

SEQ ID NO: 512805 - RNA, 19 nt, Artificial Sequence
  Description of Artificial Sequence: Synthetic oligonucleotide
cagcccaugcccacacgaa

SEQ ID NO: 512806 - RNA, 19 nt, Artificial Sequence
  Description of Artificial Sequence: Synthetic oligonucleotide
gguagcgggcugaggagca

SEQ ID NO: 512807 - RNA, 19 nt, Artificial Sequence
  Description of Artificial Sequence: Synthetic oligonucleotide
gcuugauauaauguaccau

SEQ ID NO: 512808 - RNA, 19 nt, Artificial Sequence
  Description of Artificial Sequence: Synthetic oligonucleotide
ccgcuaugagguagggcac

SEQ ID NO: 512809 - RNA, 19 nt, Artificial Sequence
  Description of Artificial Sequence: Synthetic oligonucleotide
ccguggaccacucaguuau

SEQ ID NO: 512810 - RNA, 19 nt, Artificial Sequence
  Description of Artificial Sequence: Synthetic oligonucleotide
auucgccaggggccuccgu

SEQ ID NO: 512811 - RNA, 19 nt, Artificial Sequence
  Description of Artificial Sequence: Synthetic oligonucleotide
ccaugucguaucuuggccu

SEQ ID NO: 512812 - RNA, 19 nt, Artificial Sequence
  Description of Artificial Sequence: Synthetic oligonucleotide
cagcucgauccgugguguc

SEQ ID NO: 512813 - RNA, 19 nt, Artificial Sequence
  Description of Artificial Sequence: Synthetic oligonucleotide
cccguccacaccagcauca

SEQ ID NO: 512814 - RNA, 19 nt, Artificial Sequence
  Description of Artificial Sequence: Synthetic oligonucleotide
caaguccguggaccacuca

SEQ ID NO: 512815 - RNA, 19 nt, Artificial Sequence
  Description of Artificial Sequence: Synthetic oligonucleotide
guccguggaccacucaguu

SEQ ID NO: 512816 - RNA, 19 nt, Artificial Sequence
  Description of Artificial Sequence: Synthetic oligonucleotide
gaggguagucucuguucuu

SEQ ID NO: 512817 - RNA, 19 nt, Artificial Sequence
  Description of Artificial Sequence: Synthetic oligonucleotide
acguggcccacggucugga

SEQ ID NO: 512818 - RNA, 19 nt, Artificial Sequence
  Description of Artificial Sequence: Synthetic oligonucleotide
ggcugacaugguccgcuuc

SEQ ID NO: 512819 - RNA, 19 nt, Artificial Sequence
  Description of Artificial Sequence: Synthetic oligonucleotide
cagcaagagaggugcccua

SEQ ID NO: 512820 - RNA, 19 nt, Artificial Sequence
  Description of Artificial Sequence: Synthetic oligonucleotide
gaggguagugugguccuuu

SEQ ID NO: 512821 - RNA, 19 nt, Artificial Sequence
  Description of Artificial Sequence: Synthetic oligonucleotide
ccacggucuggaugccacc

SEQ ID NO: 512822 - RNA, 19 nt, Artificial Sequence
  Description of Artificial Sequence: Synthetic oligonucleotide
ggucaggagagcaccauuu

SEQ ID NO: 512823 - RNA, 19 nt, Artificial Sequence
  Description of Artificial Sequence: Synthetic oligonucleotide
gucgaugucucgggaggua

SEQ ID NO: 512824 - RNA, 19 nt, Artificial Sequence
  Description of Artificial Sequence: Synthetic oligonucleotide
gcgccagccugagugagca

SEQ ID NO: 512825 - RNA, 19 nt, Artificial Sequence
  Description of Artificial Sequence: Synthetic oligonucleotide
ccucacugaaguaucguuu

SEQ ID NO: 512826 - RNA, 19 nt, Artificial Sequence
  Description of Artificial Sequence: Synthetic oligonucleotide
gagagcccaugccccggua

SEQ ID NO: 512827 - RNA, 19 nt, Artificial Sequence
  Description of Artificial Sequence: Synthetic oligonucleotide
gcaagagaggugcccuaua

SEQ ID NO: 512828 - RNA, 19 nt, Artificial Sequence
  Description of Artificial Sequence: Synthetic oligonucleotide
cugcagcgagagagaccug

SEQ ID NO: 512829 - RNA, 19 nt, Artificial Sequence
  Description of Artificial Sequence: Synthetic oligonucleotide
cgagguucguucccuccac

SEQ ID NO: 512830 - RNA, 19 nt, Artificial Sequence
  Description of Artificial Sequence: Synthetic oligonucleotide
auggagcccgagacacccu

SEQ ID NO: 512831 - RNA, 19 nt, Artificial Sequence
  Description of Artificial Sequence: Synthetic oligonucleotide
ugggaccccgagguucguu

SEQ ID NO: 512832 - RNA, 19 nt, Artificial Sequence
  Description of Artificial Sequence: Synthetic oligonucleotide
gcccguccacaccagcauc

SEQ ID NO: 512833 - RNA, 19 nt, Artificial Sequence
  Description of Artificial Sequence: Synthetic oligonucleotide
gcaaguccguggaccacuc

SEQ ID NO: 512834 - RNA, 19 nt, Artificial Sequence
  Description of Artificial Sequence: Synthetic oligonucleotide
ccggcaccccaaagcgccg

SEQ ID NO: 512835 - RNA, 19 nt, Artificial Sequence
  Description of Artificial Sequence: Synthetic oligonucleotide
caccuuccccaggggucag

SEQ ID NO: 512836 - RNA, 19 nt, Artificial Sequence
  Description of Artificial Sequence: Synthetic oligonucleotide
caucagcuaugaagucuau

SEQ ID NO: 512837 - RNA, 19 nt, Artificial Sequence
  Description of Artificial Sequence: Synthetic oligonucleotide
gggcugauguuagguccac

SEQ ID NO: 512838 - RNA, 19 nt, Artificial Sequence
  Description of Artificial Sequence: Synthetic oligonucleotide
ccguggugucaucaccuca

SEQ ID NO: 512839 - RNA, 19 nt, Artificial Sequence
  Description of Artificial Sequence: Synthetic oligonucleotide
ggaagcuaccugacucugu

SEQ ID NO: 512840 - RNA, 19 nt, Artificial Sequence
  Description of Artificial Sequence: Synthetic oligonucleotide
caccgggccugugagccaa

SEQ ID NO: 512841 - RNA, 19 nt, Artificial Sequence
  Description of Artificial Sequence: Synthetic oligonucleotide
gcaccccaaagcgccgggc

SEQ ID NO: 512842 - RNA, 19 nt, Artificial Sequence
  Description of Artificial Sequence: Synthetic oligonucleotide
cgaagcccguccacaccag

SEQ ID NO: 512843 - RNA, 19 nt, Artificial Sequence
  Description of Artificial Sequence: Synthetic oligonucleotide
cccgagacacccugugcaa

SEQ ID NO: 512844 - RNA, 19 nt, Artificial Sequence
  Description of Artificial Sequence: Synthetic oligonucleotide
gggccuccgugguggcagc

SEQ ID NO: 512845 - RNA, 19 nt, Artificial Sequence
  Description of Artificial Sequence: Synthetic oligonucleotide
cccucacugaaguaucguu

SEQ ID NO: 512846 - RNA, 19 nt, Artificial Sequence
  Description of Artificial Sequence: Synthetic oligonucleotide
gcgcugcaagaucucauuu

SEQ ID NO: 512847 - RNA, 19 nt, Artificial Sequence
  Description of Artificial Sequence: Synthetic oligonucleotide
gcgaucugauacacugagu

SEQ ID NO: 512848 - RNA, 19 nt, Artificial Sequence
  Description of Artificial Sequence: Synthetic oligonucleotide
ggacuccacuccucucccu

SEQ ID NO: 512849 - RNA, 19 nt, Artificial Sequence
  Description of Artificial Sequence: Synthetic oligonucleotide
ccgugguggcagccagcag

SEQ ID NO: 512850 - RNA, 19 nt, Artificial Sequence
  Description of Artificial Sequence: Synthetic oligonucleotide
gccguccgcaggccaucac

SEQ ID NO: 512851 - RNA, 19 nt, Artificial Sequence
  Description of Artificial Sequence: Synthetic oligonucleotide
ccccgagguucguucccuc

SEQ ID NO: 512852 - RNA, 19 nt, Artificial Sequence
  Description of Artificial Sequence: Synthetic oligonucleotide
ccaucgcaauggccauguc

SEQ ID NO: 512853 - RNA, 19 nt, Artificial Sequence
  Description of Artificial Sequence: Synthetic oligonucleotide
ggggaccccagaggaucuc

SEQ ID NO: 512854 - RNA, 19 nt, Artificial Sequence
  Description of Artificial Sequence: Synthetic oligonucleotide
ccguccgcaggccaucacu

SEQ ID NO: 512855 - RNA, 19 nt, Artificial Sequence
  Description of Artificial Sequence: Synthetic oligonucleotide
gccuucuaucugggcugac

SEQ ID NO: 512856 - RNA, 19 nt, Artificial Sequence
  Description of Artificial Sequence: Synthetic oligonucleotide
caucagcgccagccugagu

SEQ ID NO: 512857 - RNA, 19 nt, Artificial Sequence
  Description of Artificial Sequence: Synthetic oligonucleotide
caccaccagcucgauccgu

SEQ ID NO: 512858 - RNA, 19 nt, Artificial Sequence
  Description of Artificial Sequence: Synthetic oligonucleotide
gcuacccauggugcccgua

SEQ ID NO: 512859 - RNA, 19 nt, Artificial Sequence
  Description of Artificial Sequence: Synthetic oligonucleotide
gggcauacucagccaccuu

SEQ ID NO: 512860 - RNA, 19 nt, Artificial Sequence
  Description of Artificial Sequence: Synthetic oligonucleotide
cgccgggcauacucagcca

SEQ ID NO: 512861 - RNA, 19 nt, Artificial Sequence
  Description of Artificial Sequence: Synthetic oligonucleotide
ccgagacacccugugcaau

SEQ ID NO: 512862 - RNA, 19 nt, Artificial Sequence
  Description of Artificial Sequence: Synthetic oligonucleotide
gccgugcacgccgccuucu

SEQ ID NO: 512863 - RNA, 19 nt, Artificial Sequence
  Description of Artificial Sequence: Synthetic oligonucleotide
cgugcacgccgccuucuau

SEQ ID NO: 512864 - RNA, 19 nt, Artificial Sequence
  Description of Artificial Sequence: Synthetic oligonucleotide
ggccgugcccuggggccgu

SEQ ID NO: 512865 - RNA, 19 nt, Artificial Sequence
  Description of Artificial Sequence: Synthetic oligonucleotide
gccgugcccuggggccguc

SEQ ID NO: 512866 - RNA, 19 nt, Artificial Sequence
  Description of Artificial Sequence: Synthetic oligonucleotide
uuuuauaugauucaaagaa

SEQ ID NO: 512867 - RNA, 19 nt, Artificial Sequence
  Description of Artificial Sequence: Synthetic oligonucleotide
ucuuucaguagacaaaugg

SEQ ID NO: 512868 - RNA, 19 nt, Artificial Sequence
  Description of Artificial Sequence: Synthetic oligonucleotide
auuuagaucaaauuucuuc

SEQ ID NO: 512869 - RNA, 19 nt, Artificial Sequence
  Description of Artificial Sequence: Synthetic oligonucleotide
aaugaaauucuauaugaug

SEQ ID NO: 512870 - RNA, 19 nt, Artificial Sequence
  Description of Artificial Sequence: Synthetic oligonucleotide
uuuagaucaaauuucuucc

SEQ ID NO: 512871 - RNA, 19 nt, Artificial Sequence
  Description of Artificial Sequence: Synthetic oligonucleotide
aacaauacuggucagagaa

SEQ ID NO: 512872 - RNA, 19 nt, Artificial Sequence
  Description of Artificial Sequence: Synthetic oligonucleotide
aaauuggugauuugagcac

SEQ ID NO: 512873 - RNA, 19 nt, Artificial Sequence
  Description of Artificial Sequence: Synthetic oligonucleotide
gaucauuuggcaaaggacg

SEQ ID NO: 512874 - RNA, 19 nt, Artificial Sequence
  Description of Artificial Sequence: Synthetic oligonucleotide
uucaguagacaaauggugg

SEQ ID NO: 512875 - RNA, 19 nt, Artificial Sequence
  Description of Artificial Sequence: Synthetic oligonucleotide
augaugagcgacuaaacac

SEQ ID NO: 512876 - RNA, 19 nt, Artificial Sequence
  Description of Artificial Sequence: Synthetic oligonucleotide
aaagagagagaggagaggg

SEQ ID NO: 512877 - RNA, 19 nt, Artificial Sequence
  Description of Artificial Sequence: Synthetic oligonucleotide
cauugauuacuuuagaaac

SEQ ID NO: 512878 - RNA, 19 nt, Artificial Sequence
  Description of Artificial Sequence: Synthetic oligonucleotide
aagacuagacucuguaaac

SEQ ID NO: 512879 - RNA, 19 nt, Artificial Sequence
  Description of Artificial Sequence: Synthetic oligonucleotide
uuauaugauucaaagaaaa

SEQ ID NO: 512880 - RNA, 19 nt, Artificial Sequence
  Description of Artificial Sequence: Synthetic oligonucleotide
ucuacaucuacucaggaaa

SEQ ID NO: 512881 - RNA, 19 nt, Artificial Sequence
  Description of Artificial Sequence: Synthetic oligonucleotide
agaacaugccguuuugugc

SEQ ID NO: 512882 - RNA, 19 nt, Artificial Sequence
  Description of Artificial Sequence: Synthetic oligonucleotide
uuucaguagacaaauggug

SEQ ID NO: 512883 - RNA, 19 nt, Artificial Sequence
  Description of Artificial Sequence: Synthetic oligonucleotide
aaagacuagacucuguaaa

SEQ ID NO: 512884 - RNA, 19 nt, Artificial Sequence
  Description of Artificial Sequence: Synthetic oligonucleotide
ugcuauaaaagacugguaa

SEQ ID NO: 512885 - RNA, 19 nt, Artificial Sequence
  Description of Artificial Sequence: Synthetic oligonucleotide
uuugcuauaaaagacuggu

SEQ ID NO: 512886 - RNA, 19 nt, Artificial Sequence
  Description of Artificial Sequence: Synthetic oligonucleotide
gaaaagucuaccugagggg

SEQ ID NO: 512887 - RNA, 19 nt, Artificial Sequence
  Description of Artificial Sequence: Synthetic oligonucleotide
uuccuaacuaccaagagua

SEQ ID NO: 512888 - RNA, 19 nt, Artificial Sequence
  Description of Artificial Sequence: Synthetic oligonucleotide
aagucuguuacaugaaaca

SEQ ID NO: 512889 - RNA, 19 nt, Artificial Sequence
  Description of Artificial Sequence: Synthetic oligonucleotide
aggcgaugaacauuggugc

SEQ ID NO: 512890 - RNA, 19 nt, Artificial Sequence
  Description of Artificial Sequence: Synthetic oligonucleotide
uaaaccaucugccaagcga

SEQ ID NO: 512891 - RNA, 19 nt, Artificial Sequence
  Description of Artificial Sequence: Synthetic oligonucleotide
ucaguagacaaaugguggg

SEQ ID NO: 512892 - RNA, 19 nt, Artificial Sequence
  Description of Artificial Sequence: Synthetic oligonucleotide
uuuauaugauucaaagaaa

SEQ ID NO: 512893 - RNA, 19 nt, Artificial Sequence
  Description of Artificial Sequence: Synthetic oligonucleotide
aauucuauaugaugagcga

SEQ ID NO: 512894 - RNA, 19 nt, Artificial Sequence
  Description of Artificial Sequence: Synthetic oligonucleotide
uaugaugagcgacuaaaca

SEQ ID NO: 512895 - RNA, 19 nt, Artificial Sequence
  Description of Artificial Sequence: Synthetic oligonucleotide
ugcucaagcgauaaagugc

SEQ ID NO: 512896 - RNA, 19 nt, Artificial Sequence
  Description of Artificial Sequence: Synthetic oligonucleotide
gaaaacacguagaagcagg

SEQ ID NO: 512897 - RNA, 19 nt, Artificial Sequence
  Description of Artificial Sequence: Synthetic oligonucleotide
uucacgauggcccagcaac

SEQ ID NO: 512898 - RNA, 19 nt, Artificial Sequence
  Description of Artificial Sequence: Synthetic oligonucleotide
cauuccguuacccacagag

SEQ ID NO: 512899 - RNA, 19 nt, Artificial Sequence
  Description of Artificial Sequence: Synthetic oligonucleotide
agucuauucaguuugccca

SEQ ID NO: 512900 - RNA, 19 nt, Artificial Sequence
  Description of Artificial Sequence: Synthetic oligonucleotide
ucuauccagaaauugguga

SEQ ID NO: 512901 - RNA, 19 nt, Artificial Sequence
  Description of Artificial Sequence: Synthetic oligonucleotide
cuguuuuccaacuuaaguc

SEQ ID NO: 512902 - RNA, 19 nt, Artificial Sequence
  Description of Artificial Sequence: Synthetic oligonucleotide
ugucuugcaaagcuucacg

SEQ ID NO: 512903 - RNA, 19 nt, Artificial Sequence
  Description of Artificial Sequence: Synthetic oligonucleotide
ugaagcgucggucacacac

SEQ ID NO: 512904 - RNA, 19 nt, Artificial Sequence
  Description of Artificial Sequence: Synthetic oligonucleotide
caagaguacuuaaagcagg

SEQ ID NO: 512905 - RNA, 19 nt, Artificial Sequence
  Description of Artificial Sequence: Synthetic oligonucleotide
aacugcucaagcgauaaag

SEQ ID NO: 512906 - RNA, 19 nt, Artificial Sequence
  Description of Artificial Sequence: Synthetic oligonucleotide
agagaaugaaauucuauau

SEQ ID NO: 512907 - RNA, 19 nt, Artificial Sequence
  Description of Artificial Sequence: Synthetic oligonucleotide
aagguuguaaaacugucua

SEQ ID NO: 512908 - RNA, 19 nt, Artificial Sequence
  Description of Artificial Sequence: Synthetic oligonucleotide
cuacucaggaaauggaacc

SEQ ID NO: 512909 - RNA, 19 nt, Artificial Sequence
  Description of Artificial Sequence: Synthetic oligonucleotide
uauaugaugagcgacuaaa

SEQ ID NO: 512910 - RNA, 19 nt, Artificial Sequence
  Description of Artificial Sequence: Synthetic oligonucleotide
gaagaugggccuuaagaug

SEQ ID NO: 512911 - RNA, 19 nt, Artificial Sequence
  Description of Artificial Sequence: Synthetic oligonucleotide
ugagcgacuaaacacucca

SEQ ID NO: 512912 - RNA, 19 nt, Artificial Sequence
  Description of Artificial Sequence: Synthetic oligonucleotide
uucuauaugaugagcgacu

SEQ ID NO: 512913 - RNA, 19 nt, Artificial Sequence
  Description of Artificial Sequence: Synthetic oligonucleotide
acccuaaugguauuucaac

SEQ ID NO: 512914 - RNA, 19 nt, Artificial Sequence
  Description of Artificial Sequence: Synthetic oligonucleotide
aaaagagagagaggagagg

SEQ ID NO: 512915 - RNA, 19 nt, Artificial Sequence
  Description of Artificial Sequence: Synthetic oligonucleotide
caaaagagagagaggagag

SEQ ID NO: 512916 - RNA, 19 nt, Artificial Sequence
  Description of Artificial Sequence: Synthetic oligonucleotide
aaaggacucaacaagguaa

SEQ ID NO: 512917 - RNA, 19 nt, Artificial Sequence
  Description of Artificial Sequence: Synthetic oligonucleotide
uuccguuacccacagagac

SEQ ID NO: 512918 - RNA, 19 nt, Artificial Sequence
  Description of Artificial Sequence: Synthetic oligonucleotide
gaguacuuaaagcaggguc

SEQ ID NO: 512919 - RNA, 19 nt, Artificial Sequence
  Description of Artificial Sequence: Synthetic oligonucleotide
ugacggaucacgcuaguca

SEQ ID NO: 512920 - RNA, 19 nt, Artificial Sequence
  Description of Artificial Sequence: Synthetic oligonucleotide
cuaccaagaguacuuaaag

SEQ ID NO: 512921 - RNA, 19 nt, Artificial Sequence
  Description of Artificial Sequence: Synthetic oligonucleotide
acuuguguaagcaaggcug

SEQ ID NO: 512922 - RNA, 19 nt, Artificial Sequence
  Description of Artificial Sequence: Synthetic oligonucleotide
uuauugccgaauuauuugu

SEQ ID NO: 512923 - RNA, 19 nt, Artificial Sequence
  Description of Artificial Sequence: Synthetic oligonucleotide
ugucauguggcgccgggcg

SEQ ID NO: 512924 - RNA, 19 nt, Artificial Sequence
  Description of Artificial Sequence: Synthetic oligonucleotide
acaucuacucaggaaaugg

SEQ ID NO: 512925 - RNA, 19 nt, Artificial Sequence
  Description of Artificial Sequence: Synthetic oligonucleotide
uuuugugcagccacgggga

SEQ ID NO: 512926 - RNA, 19 nt, Artificial Sequence
  Description of Artificial Sequence: Synthetic oligonucleotide
uucgggaaaagucuaccug

SEQ ID NO: 512927 - RNA, 19 nt, Artificial Sequence
  Description of Artificial Sequence: Synthetic oligonucleotide
aaaagacuagacucuguaa

SEQ ID NO: 512928 - RNA, 19 nt, Artificial Sequence
  Description of Artificial Sequence: Synthetic oligonucleotide
agcuugguauucccgaugg

SEQ ID NO: 512929 - RNA, 19 nt, Artificial Sequence
  Description of Artificial Sequence: Synthetic oligonucleotide
aaaccaagaaaguuuuaua

SEQ ID NO: 512930 - RNA, 19 nt, Artificial Sequence
  Description of Artificial Sequence: Synthetic oligonucleotide
agagagagaggagagggac

SEQ ID NO: 512931 - RNA, 19 nt, Artificial Sequence
  Description of Artificial Sequence: Synthetic oligonucleotide
gagucuauucaguuugccc

SEQ ID NO: 512932 - RNA, 19 nt, Artificial Sequence
  Description of Artificial Sequence: Synthetic oligonucleotide
acuacuaaaaggacucaac

SEQ ID NO: 512933 - RNA, 19 nt, Artificial Sequence
  Description of Artificial Sequence: Synthetic oligonucleotide
agaugggaacuuuugaagu

SEQ ID NO: 512934 - RNA, 19 nt, Artificial Sequence
  Description of Artificial Sequence: Synthetic oligonucleotide
acucauuuaaauaagucaa

SEQ ID NO: 512935 - RNA, 19 nt, Artificial Sequence
  Description of Artificial Sequence: Synthetic oligonucleotide
ucgggaaaagucuaccuga

SEQ ID NO: 512936 - RNA, 19 nt, Artificial Sequence
  Description of Artificial Sequence: Synthetic oligonucleotide
aauggaacccuaaugguau

SEQ ID NO: 512937 - RNA, 19 nt, Artificial Sequence
  Description of Artificial Sequence: Synthetic oligonucleotide
aaacauuggaaaagaaggu

SEQ ID NO: 512938 - RNA, 19 nt, Artificial Sequence
  Description of Artificial Sequence: Synthetic oligonucleotide
caagcgauaaagugcacug

SEQ ID NO: 512939 - RNA, 19 nt, Artificial Sequence
  Description of Artificial Sequence: Synthetic oligonucleotide
ucuugguugucauguggcg

SEQ ID NO: 512940 - RNA, 19 nt, Artificial Sequence
  Description of Artificial Sequence: Synthetic oligonucleotide
auucccgauggccagugac

SEQ ID NO: 512941 - RNA, 19 nt, Artificial Sequence
  Description of Artificial Sequence: Synthetic oligonucleotide
uccuugacgagucacuuuc

SEQ ID NO: 512942 - RNA, 19 nt, Artificial Sequence
  Description of Artificial Sequence: Synthetic oligonucleotide
ucagagaaugaaauucuau

SEQ ID NO: 512943 - RNA, 19 nt, Artificial Sequence
  Description of Artificial Sequence: Synthetic oligonucleotide
aguacuuaaagcaggguca

SEQ ID NO: 512944 - RNA, 19 nt, Artificial Sequence
  Description of Artificial Sequence: Synthetic oligonucleotide
cauagaugggcccaugaac

SEQ ID NO: 512945 - RNA, 19 nt, Artificial Sequence
  Description of Artificial Sequence: Synthetic oligonucleotide
aacaccagacuuguguaag

SEQ ID NO: 512946 - RNA, 19 nt, Artificial Sequence
  Description of Artificial Sequence: Synthetic oligonucleotide
agcgacuaaacacuccaag

SEQ ID NO: 512947 - RNA, 19 nt, Artificial Sequence
  Description of Artificial Sequence: Synthetic oligonucleotide
ggugagucuauucaguuug

SEQ ID NO: 512948 - RNA, 19 nt, Artificial Sequence
  Description of Artificial Sequence: Synthetic oligonucleotide
ucauuacaaaacuuuguua

SEQ ID NO: 512949 - RNA, 19 nt, Artificial Sequence
  Description of Artificial Sequence: Synthetic oligonucleotide
uuaguuacuugggaaggag

SEQ ID NO: 512950 - RNA, 19 nt, Artificial Sequence
  Description of Artificial Sequence: Synthetic oligonucleotide
augggugcgaagaugggcc

SEQ ID NO: 512951 - RNA, 19 nt, Artificial Sequence
  Description of Artificial Sequence: Synthetic oligonucleotide
aaacacguagaagcaggac

SEQ ID NO: 512952 - RNA, 19 nt, Artificial Sequence
  Description of Artificial Sequence: Synthetic oligonucleotide
aguaagucuuccggcaacc

SEQ ID NO: 512953 - RNA, 19 nt, Artificial Sequence
  Description of Artificial Sequence: Synthetic oligonucleotide
agcagaacugcucaagcga

SEQ ID NO: 512954 - RNA, 19 nt, Artificial Sequence
  Description of Artificial Sequence: Synthetic oligonucleotide
uugccgaauuauuuguuug

SEQ ID NO: 512955 - RNA, 19 nt, Artificial Sequence
  Description of Artificial Sequence: Synthetic oligonucleotide
uaguuacuugggaaggagc

SEQ ID NO: 512956 - RNA, 19 nt, Artificial Sequence
  Description of Artificial Sequence: Synthetic oligonucleotide
agacuuguguaagcaaggc

SEQ ID NO: 512957 - RNA, 19 nt, Artificial Sequence
  Description of Artificial Sequence: Synthetic oligonucleotide
aaguuaguacccugucuca

SEQ ID NO: 512958 - RNA, 19 nt, Artificial Sequence
  Description of Artificial Sequence: Synthetic oligonucleotide
uccuccuucgggaaaaguc

SEQ ID NO: 512959 - RNA, 19 nt, Artificial Sequence
  Description of Artificial Sequence: Synthetic oligonucleotide
aaagcagggucauuacaaa

SEQ ID NO: 512960 - RNA, 19 nt, Artificial Sequence
  Description of Artificial Sequence: Synthetic oligonucleotide
acaccagacuuguguaagc

SEQ ID NO: 512961 - RNA, 19 nt, Artificial Sequence
  Description of Artificial Sequence: Synthetic oligonucleotide
agcuggggcaguuagaaaa

SEQ ID NO: 512962 - RNA, 19 nt, Artificial Sequence
  Description of Artificial Sequence: Synthetic oligonucleotide
uccuuugaaauuaguuacu

SEQ ID NO: 512963 - RNA, 19 nt, Artificial Sequence
  Description of Artificial Sequence: Synthetic oligonucleotide
aguuaauuacacauacuca

SEQ ID NO: 512964 - RNA, 19 nt, Artificial Sequence
  Description of Artificial Sequence: Synthetic oligonucleotide
aagucuaccugaggggcac

SEQ ID NO: 512965 - RNA, 19 nt, Artificial Sequence
  Description of Artificial Sequence: Synthetic oligonucleotide
auagaugggcccaugaaca

SEQ ID NO: 512966 - RNA, 19 nt, Artificial Sequence
  Description of Artificial Sequence: Synthetic oligonucleotide
aaacaauacuggucagaga

SEQ ID NO: 512967 - RNA, 19 nt, Artificial Sequence
  Description of Artificial Sequence: Synthetic oligonucleotide
gaauggaacaccagacuug

SEQ ID NO: 512968 - RNA, 19 nt, Artificial Sequence
  Description of Artificial Sequence: Synthetic oligonucleotide
auaaaaguuaguacccugu

SEQ ID NO: 512969 - RNA, 19 nt, Artificial Sequence
  Description of Artificial Sequence: Synthetic oligonucleotide
ugaccaugcauccuuugaa

SEQ ID NO: 512970 - RNA, 19 nt, Artificial Sequence
  Description of Artificial Sequence: Synthetic oligonucleotide
aagcgauaaagugcacugg

SEQ ID NO: 512971 - RNA, 19 nt, Artificial Sequence
  Description of Artificial Sequence: Synthetic oligonucleotide
aguacccugucucauuucu

SEQ ID NO: 512972 - RNA, 19 nt, Artificial Sequence
  Description of Artificial Sequence: Synthetic oligonucleotide
agaaaacacguagaagcag

SEQ ID NO: 512973 - RNA, 19 nt, Artificial Sequence
  Description of Artificial Sequence: Synthetic oligonucleotide
uuucuacaucuacucagga

SEQ ID NO: 512974 - RNA, 19 nt, Artificial Sequence
  Description of Artificial Sequence: Synthetic oligonucleotide
ugccgaauuauuuguuuga

SEQ ID NO: 512975 - RNA, 19 nt, Artificial Sequence
  Description of Artificial Sequence: Synthetic oligonucleotide
uggugauuugagcacaaua

SEQ ID NO: 512976 - RNA, 19 nt, Artificial Sequence
  Description of Artificial Sequence: Synthetic oligonucleotide
cauuuggcaaaggacgggg

SEQ ID NO: 512977 - RNA, 19 nt, Artificial Sequence
  Description of Artificial Sequence: Synthetic oligonucleotide
gaugaacauuggugcaggg

SEQ ID NO: 512978 - RNA, 19 nt, Artificial Sequence
  Description of Artificial Sequence: Synthetic oligonucleotide
uauuuguuugaaugcuggu

SEQ ID NO: 512979 - RNA, 19 nt, Artificial Sequence
  Description of Artificial Sequence: Synthetic oligonucleotide
uucuacaucuacucaggaa

SEQ ID NO: 512980 - RNA, 19 nt, Artificial Sequence
  Description of Artificial Sequence: Synthetic oligonucleotide
aucuaaaacauuugcuaua

SEQ ID NO: 512981 - RNA, 19 nt, Artificial Sequence
  Description of Artificial Sequence: Synthetic oligonucleotide
cugcucaagcgauaaagug

SEQ ID NO: 512982 - RNA, 19 nt, Artificial Sequence
  Description of Artificial Sequence: Synthetic oligonucleotide
ugaaugcuggugauuuaga

SEQ ID NO: 512983 - RNA, 19 nt, Artificial Sequence
  Description of Artificial Sequence: Synthetic oligonucleotide
ucaagcgauaaagugcacu

SEQ ID NO: 512984 - RNA, 19 nt, Artificial Sequence
  Description of Artificial Sequence: Synthetic oligonucleotide
gaucuaaaacauuugcuau

SEQ ID NO: 512985 - RNA, 19 nt, Artificial Sequence
  Description of Artificial Sequence: Synthetic oligonucleotide
augaacauuggugcagggg

SEQ ID NO: 512986 - RNA, 19 nt, Artificial Sequence
  Description of Artificial Sequence: Synthetic oligonucleotide
gaucacgcuagucaucaca

SEQ ID NO: 512987 - RNA, 19 nt, Artificial Sequence
  Description of Artificial Sequence: Synthetic oligonucleotide
uuaguacccugucucauuu

SEQ ID NO: 512988 - RNA, 19 nt, Artificial Sequence
  Description of Artificial Sequence: Synthetic oligonucleotide
ucucaagggagcagugccc

SEQ ID NO: 512989 - RNA, 19 nt, Artificial Sequence
  Description of Artificial Sequence: Synthetic oligonucleotide
aauucuuuggugagcgggu

SEQ ID NO: 512990 - RNA, 19 nt, Artificial Sequence
  Description of Artificial Sequence: Synthetic oligonucleotide
uccaagacauuccguuacc

SEQ ID NO: 512991 - RNA, 19 nt, Artificial Sequence
  Description of Artificial Sequence: Synthetic oligonucleotide
gagacaguucaucugaccu

SEQ ID NO: 512992 - RNA, 19 nt, Artificial Sequence
  Description of Artificial Sequence: Synthetic oligonucleotide
agugugacggaucacgcua

SEQ ID NO: 512993 - RNA, 19 nt, Artificial Sequence
  Description of Artificial Sequence: Synthetic oligonucleotide
uaugggugcgaagaugggc

SEQ ID NO: 512994 - RNA, 19 nt, Artificial Sequence
  Description of Artificial Sequence: Synthetic oligonucleotide
ucaucugaccuugcgaacu

SEQ ID NO: 512995 - RNA, 19 nt, Artificial Sequence
  Description of Artificial Sequence: Synthetic oligonucleotide
aacuacuaaaaggacucaa

SEQ ID NO: 512996 - RNA, 19 nt, Artificial Sequence
  Description of Artificial Sequence: Synthetic oligonucleotide
aacuaccaagaguacuuaa

SEQ ID NO: 512997 - RNA, 19 nt, Artificial Sequence
  Description of Artificial Sequence: Synthetic oligonucleotide
gcuauaaaagacugguaac

SEQ ID NO: 512998 - RNA, 19 nt, Artificial Sequence
  Description of Artificial Sequence: Synthetic oligonucleotide
cagggaaccgucucagccg

SEQ ID NO: 512999 - RNA, 19 nt, Artificial Sequence
  Description of Artificial Sequence: Synthetic oligonucleotide
ccuaaugguauuucaacac

SEQ ID NO: 513000 - RNA, 19 nt, Artificial Sequence
  Description of Artificial Sequence: Synthetic oligonucleotide
agggaaccgucucagccgg

SEQ ID NO: 513001 - RNA, 19 nt, Artificial Sequence
  Description of Artificial Sequence: Synthetic oligonucleotide
gacauuccguuacccacag

SEQ ID NO: 513002 - RNA, 19 nt, Artificial Sequence
  Description of Artificial Sequence: Synthetic oligonucleotide
aguuguugcucuugagcug

SEQ ID NO: 513003 - RNA, 19 nt, Artificial Sequence
  Description of Artificial Sequence: Synthetic oligonucleotide
aauacuggucagagaauga

SEQ ID NO: 513004 - RNA, 19 nt, Artificial Sequence
  Description of Artificial Sequence: Synthetic oligonucleotide
cuccaagacauuccguuac

SEQ ID NO: 513005 - RNA, 19 nt, Artificial Sequence
  Description of Artificial Sequence: Synthetic oligonucleotide
uccguuacccacagagaca

SEQ ID NO: 513006 - RNA, 19 nt, Artificial Sequence
  Description of Artificial Sequence: Synthetic oligonucleotide
aucacgcuagucaucacag

SEQ ID NO: 513007 - RNA, 19 nt, Artificial Sequence
  Description of Artificial Sequence: Synthetic oligonucleotide
acucucaagggagcagugc

SEQ ID NO: 513008 - RNA, 19 nt, Artificial Sequence
  Description of Artificial Sequence: Synthetic oligonucleotide
auugccgaauuauuuguuu

SEQ ID NO: 513009 - RNA, 19 nt, Artificial Sequence
  Description of Artificial Sequence: Synthetic oligonucleotide
uucugcgguggcgagacag

SEQ ID NO: 513010 - RNA, 19 nt, Artificial Sequence
  Description of Artificial Sequence: Synthetic oligonucleotide
acgcuagucaucacagccc

SEQ ID NO: 513011 - RNA, 19 nt, Artificial Sequence
  Description of Artificial Sequence: Synthetic oligonucleotide
agcgggucugaauggcagc

SEQ ID NO: 513012 - RNA, 19 nt, Artificial Sequence
  Description of Artificial Sequence: Synthetic oligonucleotide
agaaacaauacuggucaga

SEQ ID NO: 513013 - RNA, 19 nt, Artificial Sequence
  Description of Artificial Sequence: Synthetic oligonucleotide
ucaaccaguucugaucuaa

SEQ ID NO: 513014 - RNA, 19 nt, Artificial Sequence
  Description of Artificial Sequence: Synthetic oligonucleotide
cuugguugucauguggcgc

SEQ ID NO: 513015 - RNA, 19 nt, Artificial Sequence
  Description of Artificial Sequence: Synthetic oligonucleotide
uuuuccaacuuaagucuuu

SEQ ID NO: 513016 - RNA, 19 nt, Artificial Sequence
  Description of Artificial Sequence: Synthetic oligonucleotide
gaacccuaaugguauuuca

SEQ ID NO: 513017 - RNA, 19 nt, Artificial Sequence
  Description of Artificial Sequence: Synthetic oligonucleotide
acgagucacuuucagaauu

SEQ ID NO: 513018 - RNA, 19 nt, Artificial Sequence
  Description of Artificial Sequence: Synthetic oligonucleotide
guaaaccaucugccaagcg

SEQ ID NO: 513019 - RNA, 19 nt, Artificial Sequence
  Description of Artificial Sequence: Synthetic oligonucleotide
ucuauaugaugagcgacua

SEQ ID NO: 513020 - RNA, 19 nt, Artificial Sequence
  Description of Artificial Sequence: Synthetic oligonucleotide
agacuagacucuguaaacu

SEQ ID NO: 513021 - RNA, 19 nt, Artificial Sequence
  Description of Artificial Sequence: Synthetic oligonucleotide
uauugccgaauuauuuguu

SEQ ID NO: 513022 - RNA, 19 nt, Artificial Sequence
  Description of Artificial Sequence: Synthetic oligonucleotide
aaugguauuucaacacauu

SEQ ID NO: 513023 - RNA, 19 nt, Artificial Sequence
  Description of Artificial Sequence: Synthetic oligonucleotide
aauggcagcgggccauccu

SEQ ID NO: 513024 - RNA, 19 nt, Artificial Sequence
  Description of Artificial Sequence: Synthetic oligonucleotide
ugaggcauagaugggccca

SEQ ID NO: 513025 - RNA, 19 nt, Artificial Sequence
  Description of Artificial Sequence: Synthetic oligonucleotide
gguuguaaaacugucuauc

SEQ ID NO: 513026 - RNA, 19 nt, Artificial Sequence
  Description of Artificial Sequence: Synthetic oligonucleotide
acccugucucauuucuaac

SEQ ID NO: 513027 - RNA, 19 nt, Artificial Sequence
  Description of Artificial Sequence: Synthetic oligonucleotide
auuaguuacuugggaagga

SEQ ID NO: 513028 - RNA, 19 nt, Artificial Sequence
  Description of Artificial Sequence: Synthetic oligonucleotide
cuuguguaagcaaggcuga

SEQ ID NO: 513029 - RNA, 19 nt, Artificial Sequence
  Description of Artificial Sequence: Synthetic oligonucleotide
ugccaagcgagugucuugc

SEQ ID NO: 513030 - RNA, 19 nt, Artificial Sequence
  Description of Artificial Sequence: Synthetic oligonucleotide
cuugguagguggggaaugg

SEQ ID NO: 513031 - RNA, 19 nt, Artificial Sequence
  Description of Artificial Sequence: Synthetic oligonucleotide
accaugcauccuuugaaau

SEQ ID NO: 513032 - RNA, 19 nt, Artificial Sequence
  Description of Artificial Sequence: Synthetic oligonucleotide
uugcuauaaaagacuggua

SEQ ID NO: 513033 - RNA, 19 nt, Artificial Sequence
  Description of Artificial Sequence: Synthetic oligonucleotide
ccagugacgacugggaugg

SEQ ID NO: 513034 - RNA, 19 nt, Artificial Sequence
  Description of Artificial Sequence: Synthetic oligonucleotide
caguuagaaaacacguaga

SEQ ID NO: 513035 - RNA, 19 nt, Artificial Sequence
  Description of Artificial Sequence: Synthetic oligonucleotide
gcugcuaggcaguuguugc

SEQ ID NO: 513036 - RNA, 19 nt, Artificial Sequence
  Description of Artificial Sequence: Synthetic oligonucleotide
agcucuuuauucaaccagu

SEQ ID NO: 513037 - RNA, 19 nt, Artificial Sequence
  Description of Artificial Sequence: Synthetic oligonucleotide
uccagaaauuggugauuug

SEQ ID NO: 513038 - RNA, 19 nt, Artificial Sequence
  Description of Artificial Sequence: Synthetic oligonucleotide
augagcgacuaaacacucc

SEQ ID NO: 513039 - RNA, 19 nt, Artificial Sequence
  Description of Artificial Sequence: Synthetic oligonucleotide
agguggucgcuccucauga

SEQ ID NO: 513040 - RNA, 19 nt, Artificial Sequence
  Description of Artificial Sequence: Synthetic oligonucleotide
agguuguaaaacugucuau

SEQ ID NO: 513041 - RNA, 19 nt, Artificial Sequence
  Description of Artificial Sequence: Synthetic oligonucleotide
ugcugcuaggcaguuguug

SEQ ID NO: 513042 - RNA, 19 nt, Artificial Sequence
  Description of Artificial Sequence: Synthetic oligonucleotide
acuaccaagaguacuuaaa

SEQ ID NO: 513043 - RNA, 19 nt, Artificial Sequence
  Description of Artificial Sequence: Synthetic oligonucleotide
ucacgauggcccagcaacu

SEQ ID NO: 513044 - RNA, 19 nt, Artificial Sequence
  Description of Artificial Sequence: Synthetic oligonucleotide
gcgaagaugggccuuaaga

SEQ ID NO: 513045 - RNA, 19 nt, Artificial Sequence
  Description of Artificial Sequence: Synthetic oligonucleotide
aaagucuaccugaggggca

SEQ ID NO: 513046 - RNA, 19 nt, Artificial Sequence
  Description of Artificial Sequence: Synthetic oligonucleotide
caugaagcgucggucacac

SEQ ID NO: 513047 - RNA, 19 nt, Artificial Sequence
  Description of Artificial Sequence: Synthetic oligonucleotide
uccuaacuaccaagaguac

SEQ ID NO: 513048 - RNA, 19 nt, Artificial Sequence
  Description of Artificial Sequence: Synthetic oligonucleotide
uuguuugaaugcuggugau

SEQ ID NO: 513049 - RNA, 19 nt, Artificial Sequence
  Description of Artificial Sequence: Synthetic oligonucleotide
gaugcucccagacuucucu

SEQ ID NO: 513050 - RNA, 19 nt, Artificial Sequence
  Description of Artificial Sequence: Synthetic oligonucleotide
cuagacucuguaaacuuua

SEQ ID NO: 513051 - RNA, 19 nt, Artificial Sequence
  Description of Artificial Sequence: Synthetic oligonucleotide
gaaccgucucagccggagg

SEQ ID NO: 513052 - RNA, 19 nt, Artificial Sequence
  Description of Artificial Sequence: Synthetic oligonucleotide
gaugagcgacuaaacacuc

SEQ ID NO: 513053 - RNA, 19 nt, Artificial Sequence
  Description of Artificial Sequence: Synthetic oligonucleotide
caucuacucaggaaaugga

SEQ ID NO: 513054 - RNA, 19 nt, Artificial Sequence
  Description of Artificial Sequence: Synthetic oligonucleotide
uggcgagacaguucaucug

SEQ ID NO: 513055 - RNA, 19 nt, Artificial Sequence
  Description of Artificial Sequence: Synthetic oligonucleotide
ugcgaagaugggccuuaag

SEQ ID NO: 513056 - RNA, 19 nt, Artificial Sequence
  Description of Artificial Sequence: Synthetic oligonucleotide
acugcucaagcgauaaagu

SEQ ID NO: 513057 - RNA, 19 nt, Artificial Sequence
  Description of Artificial Sequence: Synthetic oligonucleotide
aagagagagaggagaggga

SEQ ID NO: 513058 - RNA, 19 nt, Artificial Sequence
  Description of Artificial Sequence: Synthetic oligonucleotide
ugacggucaucagggaacc

SEQ ID NO: 513059 - RNA, 19 nt, Artificial Sequence
  Description of Artificial Sequence: Synthetic oligonucleotide
uuugaaugcuggugauuua

SEQ ID NO: 513060 - RNA, 19 nt, Artificial Sequence
  Description of Artificial Sequence: Synthetic oligonucleotide
gucuauccagaaauuggug

SEQ ID NO: 513061 - RNA, 19 nt, Artificial Sequence
  Description of Artificial Sequence: Synthetic oligonucleotide
gggguuuuccacagaaggg

SEQ ID NO: 513062 - RNA, 19 nt, Artificial Sequence
  Description of Artificial Sequence: Synthetic oligonucleotide
cugaggcauagaugggccc

SEQ ID NO: 513063 - RNA, 19 nt, Artificial Sequence
  Description of Artificial Sequence: Synthetic oligonucleotide
cugagaacaugccguuuug

SEQ ID NO: 513064 - RNA, 19 nt, Artificial Sequence
  Description of Artificial Sequence: Synthetic oligonucleotide
cucaugaagcgucggucac

SEQ ID NO: 513065 - RNA, 19 nt, Artificial Sequence
  Description of Artificial Sequence: Synthetic oligonucleotide
ucacgcuagucaucacagc

SEQ ID NO: 513066 - RNA, 19 nt, Artificial Sequence
  Description of Artificial Sequence: Synthetic oligonucleotide
cauuggugcaggggcaagg

SEQ ID NO: 513067 - RNA, 19 nt, Artificial Sequence
  Description of Artificial Sequence: Synthetic oligonucleotide
caagcgagugucuugcaaa

SEQ ID NO: 513068 - RNA, 19 nt, Artificial Sequence
  Description of Artificial Sequence: Synthetic oligonucleotide
gggaaaagucuaccugagg

SEQ ID NO: 513069 - RNA, 19 nt, Artificial Sequence
  Description of Artificial Sequence: Synthetic oligonucleotide
ggugagcgggucugaaugg

SEQ ID NO: 513070 - RNA, 19 nt, Artificial Sequence
  Description of Artificial Sequence: Synthetic oligonucleotide
gugaccaugcauccuuuga

SEQ ID NO: 513071 - RNA, 19 nt, Artificial Sequence
  Description of Artificial Sequence: Synthetic oligonucleotide
aucuacucaggaaauggaa

SEQ ID NO: 513072 - RNA, 19 nt, Artificial Sequence
  Description of Artificial Sequence: Synthetic oligonucleotide
uuaucacagccgucccagc

SEQ ID NO: 513073 - RNA, 19 nt, Artificial Sequence
  Description of Artificial Sequence: Synthetic oligonucleotide
agacucuguaaacuuuauu

SEQ ID NO: 513074 - RNA, 19 nt, Artificial Sequence
  Description of Artificial Sequence: Synthetic oligonucleotide
gccaaggugagucuauuca

SEQ ID NO: 513075 - RNA, 19 nt, Artificial Sequence
  Description of Artificial Sequence: Synthetic oligonucleotide
ucaugaagcgucggucaca

SEQ ID NO: 513076 - RNA, 19 nt, Artificial Sequence
  Description of Artificial Sequence: Synthetic oligonucleotide
ggcgagacaguucaucuga

SEQ ID NO: 513077 - RNA, 19 nt, Artificial Sequence
  Description of Artificial Sequence: Synthetic oligonucleotide
gacuuguguaagcaaggcu

SEQ ID NO: 513078 - RNA, 19 nt, Artificial Sequence
  Description of Artificial Sequence: Synthetic oligonucleotide
gcgucggucacacacagga

SEQ ID NO: 513079 - RNA, 19 nt, Artificial Sequence
  Description of Artificial Sequence: Synthetic oligonucleotide
accagacuuguguaagcaa

SEQ ID NO: 513080 - RNA, 19 nt, Artificial Sequence
  Description of Artificial Sequence: Synthetic oligonucleotide
gucaucagggaaccgucuc

SEQ ID NO: 513081 - RNA, 19 nt, Artificial Sequence
  Description of Artificial Sequence: Synthetic oligonucleotide
acagcuugguauucccgau

SEQ ID NO: 513082 - RNA, 19 nt, Artificial Sequence
  Description of Artificial Sequence: Synthetic oligonucleotide
acgauggcccagcaacucu

SEQ ID NO: 513083 - RNA, 19 nt, Artificial Sequence
  Description of Artificial Sequence: Synthetic oligonucleotide
gcgacuaaacacuccaaga

SEQ ID NO: 513084 - RNA, 19 nt, Artificial Sequence
  Description of Artificial Sequence: Synthetic oligonucleotide
gugcuuugucagguggucg

SEQ ID NO: 513085 - RNA, 19 nt, Artificial Sequence
  Description of Artificial Sequence: Synthetic oligonucleotide
uggaggcgaugaacauugg

SEQ ID NO: 513086 - RNA, 19 nt, Artificial Sequence
  Description of Artificial Sequence: Synthetic oligonucleotide
ugugacggaucacgcuagu

SEQ ID NO: 513087 - RNA, 19 nt, Artificial Sequence
  Description of Artificial Sequence: Synthetic oligonucleotide
gcucaagcgauaaagugca

SEQ ID NO: 513088 - RNA, 19 nt, Artificial Sequence
  Description of Artificial Sequence: Synthetic oligonucleotide
gggagcacucucaagggag

SEQ ID NO: 513089 - RNA, 19 nt, Artificial Sequence
  Description of Artificial Sequence: Synthetic oligonucleotide
acaugccguuuugugcagc

SEQ ID NO: 513090 - RNA, 19 nt, Artificial Sequence
  Description of Artificial Sequence: Synthetic oligonucleotide
uauccagaaauuggugauu

SEQ ID NO: 513091 - RNA, 19 nt, Artificial Sequence
  Description of Artificial Sequence: Synthetic oligonucleotide
aucaagcagaacugcucaa

SEQ ID NO: 513092 - RNA, 19 nt, Artificial Sequence
  Description of Artificial Sequence: Synthetic oligonucleotide
aguuaguacccugucucau

SEQ ID NO: 513093 - RNA, 19 nt, Artificial Sequence
  Description of Artificial Sequence: Synthetic oligonucleotide
acguagaagcaggacccuc

SEQ ID NO: 513094 - RNA, 19 nt, Artificial Sequence
  Description of Artificial Sequence: Synthetic oligonucleotide
uaacuaccaagaguacuua

SEQ ID NO: 513095 - RNA, 19 nt, Artificial Sequence
  Description of Artificial Sequence: Synthetic oligonucleotide
cuauccagaaauuggugau

SEQ ID NO: 513096 - RNA, 19 nt, Artificial Sequence
  Description of Artificial Sequence: Synthetic oligonucleotide
uguuugaaugcuggugauu

SEQ ID NO: 513097 - RNA, 19 nt, Artificial Sequence
  Description of Artificial Sequence: Synthetic oligonucleotide
gacggaucacgcuagucau

SEQ ID NO: 513098 - RNA, 19 nt, Artificial Sequence
  Description of Artificial Sequence: Synthetic oligonucleotide
agcgggccauccugucugc

SEQ ID NO: 513099 - RNA, 19 nt, Artificial Sequence
  Description of Artificial Sequence: Synthetic oligonucleotide
aacugucuauccagaaauu

SEQ ID NO: 513100 - RNA, 19 nt, Artificial Sequence
  Description of Artificial Sequence: Synthetic oligonucleotide
gugacgacugggaugggca

SEQ ID NO: 513101 - RNA, 19 nt, Artificial Sequence
  Description of Artificial Sequence: Synthetic oligonucleotide
cuuccggcaaccugggaaa

SEQ ID NO: 513102 - RNA, 19 nt, Artificial Sequence
  Description of Artificial Sequence: Synthetic oligonucleotide
cagcgggccauccugucug

SEQ ID NO: 513103 - RNA, 19 nt, Artificial Sequence
  Description of Artificial Sequence: Synthetic oligonucleotide
gaagcgucggucacacaca

SEQ ID NO: 513104 - RNA, 19 nt, Artificial Sequence
  Description of Artificial Sequence: Synthetic oligonucleotide
gcgauaaagugcacugggg

SEQ ID NO: 513105 - RNA, 19 nt, Artificial Sequence
  Description of Artificial Sequence: Synthetic oligonucleotide
ggcuugacagucccugcag

SEQ ID NO: 513106 - RNA, 19 nt, Artificial Sequence
  Description of Artificial Sequence: Synthetic oligonucleotide
uuguguaagcaaggcugac

SEQ ID NO: 513107 - RNA, 19 nt, Artificial Sequence
  Description of Artificial Sequence: Synthetic oligonucleotide
gccagugacgacugggaug

SEQ ID NO: 513108 - RNA, 19 nt, Artificial Sequence
  Description of Artificial Sequence: Synthetic oligonucleotide
cagcuugguauucccgaug

SEQ ID NO: 513109 - RNA, 19 nt, Artificial Sequence
  Description of Artificial Sequence: Synthetic oligonucleotide
auuccguuacccacagaga

SEQ ID NO: 513110 - RNA, 19 nt, Artificial Sequence
  Description of Artificial Sequence: Synthetic oligonucleotide
gugugacggaucacgcuag

SEQ ID NO: 513111 - RNA, 19 nt, Artificial Sequence
  Description of Artificial Sequence: Synthetic oligonucleotide
uauucccgauggccaguga

SEQ ID NO: 513112 - RNA, 19 nt, Artificial Sequence
  Description of Artificial Sequence: Synthetic oligonucleotide
agucuuccggcaaccuggg

SEQ ID NO: 513113 - RNA, 19 nt, Artificial Sequence
  Description of Artificial Sequence: Synthetic oligonucleotide
cccuaaugguauuucaaca

SEQ ID NO: 513114 - RNA, 19 nt, Artificial Sequence
  Description of Artificial Sequence: Synthetic oligonucleotide
ugcauguaaagggcuucuc

SEQ ID NO: 513115 - RNA, 19 nt, Artificial Sequence
  Description of Artificial Sequence: Synthetic oligonucleotide
guauucccgauggccagug

SEQ ID NO: 513116 - RNA, 19 nt, Artificial Sequence
  Description of Artificial Sequence: Synthetic oligonucleotide
ggaauggaacaccagacuu

SEQ ID NO: 513117 - RNA, 19 nt, Artificial Sequence
  Description of Artificial Sequence: Synthetic oligonucleotide
agaugggccuuaagauggg

SEQ ID NO: 513118 - RNA, 19 nt, Artificial Sequence
  Description of Artificial Sequence: Synthetic oligonucleotide
ccagaaauuggugauuuga

SEQ ID NO: 513119 - RNA, 19 nt, Artificial Sequence
  Description of Artificial Sequence: Synthetic oligonucleotide
gcgaugaacauuggugcag

SEQ ID NO: 513120 - RNA, 19 nt, Artificial Sequence
  Description of Artificial Sequence: Synthetic oligonucleotide
uaguacccugucucauuuc

SEQ ID NO: 513121 - RNA, 19 nt, Artificial Sequence
  Description of Artificial Sequence: Synthetic oligonucleotide
uggaacccuaaugguauuu

SEQ ID NO: 513122 - RNA, 19 nt, Artificial Sequence
  Description of Artificial Sequence: Synthetic oligonucleotide
ccagugugacggaucacgc

SEQ ID NO: 513123 - RNA, 19 nt, Artificial Sequence
  Description of Artificial Sequence: Synthetic oligonucleotide
gugguuuuccuugacgagu

SEQ ID NO: 513124 - RNA, 19 nt, Artificial Sequence
  Description of Artificial Sequence: Synthetic oligonucleotide
cuucgggaaaagucuaccu

SEQ ID NO: 513125 - RNA, 19 nt, Artificial Sequence
  Description of Artificial Sequence: Synthetic oligonucleotide
ccguuacccacagagacac

SEQ ID NO: 513126 - RNA, 19 nt, Artificial Sequence
  Description of Artificial Sequence: Synthetic oligonucleotide
cuauaugaugagcgacuaa

SEQ ID NO: 513127 - RNA, 19 nt, Artificial Sequence
  Description of Artificial Sequence: Synthetic oligonucleotide
cucaagcgauaaagugcac

SEQ ID NO: 513128 - RNA, 19 nt, Artificial Sequence
  Description of Artificial Sequence: Synthetic oligonucleotide
gcaaccugggaaaauugca

SEQ ID NO: 513129 - RNA, 19 nt, Artificial Sequence
  Description of Artificial Sequence: Synthetic oligonucleotide
ggugacggucaucagggaa

SEQ ID NO: 513130 - RNA, 19 nt, Artificial Sequence
  Description of Artificial Sequence: Synthetic oligonucleotide
ggcaacagcuugguauucc

SEQ ID NO: 513131 - RNA, 19 nt, Artificial Sequence
  Description of Artificial Sequence: Synthetic oligonucleotide
acggaucacgcuagucauc

SEQ ID NO: 513132 - RNA, 19 nt, Artificial Sequence
  Description of Artificial Sequence: Synthetic oligonucleotide
cacuccaagacauuccguu

SEQ ID NO: 513133 - RNA, 19 nt, Artificial Sequence
  Description of Artificial Sequence: Synthetic oligonucleotide
caccagacuuguguaagca

SEQ ID NO: 513134 - RNA, 19 nt, Artificial Sequence
  Description of Artificial Sequence: Synthetic oligonucleotide
guggggaauggaacaccag

SEQ ID NO: 513135 - RNA, 19 nt, Artificial Sequence
  Description of Artificial Sequence: Synthetic oligonucleotide
ggaaccgucucagccggag

SEQ ID NO: 513136 - RNA, 19 nt, Artificial Sequence
  Description of Artificial Sequence: Synthetic oligonucleotide
ggcauagaugggcccauga

SEQ ID NO: 513137 - RNA, 19 nt, Artificial Sequence
  Description of Artificial Sequence: Synthetic oligonucleotide
ggaacccuaaugguauuuc

SEQ ID NO: 513138 - RNA, 19 nt, Artificial Sequence
  Description of Artificial Sequence: Synthetic oligonucleotide
gaugggccuuaagauggga

SEQ ID NO: 513139 - RNA, 19 nt, Artificial Sequence
  Description of Artificial Sequence: Synthetic oligonucleotide
cagucccugcagacaacug

SEQ ID NO: 513140 - RNA, 19 nt, Artificial Sequence
  Description of Artificial Sequence: Synthetic oligonucleotide
cacggggaucauuuggcaa

SEQ ID NO: 513141 - RNA, 19 nt, Artificial Sequence
  Description of Artificial Sequence: Synthetic oligonucleotide
auggaacccuaaugguauu

SEQ ID NO: 513142 - RNA, 19 nt, Artificial Sequence
  Description of Artificial Sequence: Synthetic oligonucleotide
gccacggggaucauuuggc

SEQ ID NO: 513143 - RNA, 19 nt, Artificial Sequence
  Description of Artificial Sequence: Synthetic oligonucleotide
gaacugcucaagcgauaaa

SEQ ID NO: 513144 - RNA, 19 nt, Artificial Sequence
  Description of Artificial Sequence: Synthetic oligonucleotide
gacgagucacuuucagaau

SEQ ID NO: 513145 - RNA, 19 nt, Artificial Sequence
  Description of Artificial Sequence: Synthetic oligonucleotide
guuaguacccugucucauu

SEQ ID NO: 513146 - RNA, 19 nt, Artificial Sequence
  Description of Artificial Sequence: Synthetic oligonucleotide
acauucccauuggaugcca

SEQ ID NO: 513147 - RNA, 19 nt, Artificial Sequence
  Description of Artificial Sequence: Synthetic oligonucleotide
cacgauggcccagcaacuc

SEQ ID NO: 513148 - RNA, 19 nt, Artificial Sequence
  Description of Artificial Sequence: Synthetic oligonucleotide
ggagcacucucaagggagc

SEQ ID NO: 513149 - RNA, 19 nt, Artificial Sequence
  Description of Artificial Sequence: Synthetic oligonucleotide
gcauagaugggcccaugaa

SEQ ID NO: 513150 - RNA, 19 nt, Artificial Sequence
  Description of Artificial Sequence: Synthetic oligonucleotide
ccucaugaagcgucgguca

SEQ ID NO: 513151 - RNA, 19 nt, Artificial Sequence
  Description of Artificial Sequence: Synthetic oligonucleotide
acagaaugacagagacaca

SEQ ID NO: 513152 - RNA, 19 nt, Artificial Sequence
  Description of Artificial Sequence: Synthetic oligonucleotide
ccauuccccacuccugaag

SEQ ID NO: 513153 - RNA, 19 nt, Artificial Sequence
  Description of Artificial Sequence: Synthetic oligonucleotide
gggcaguuagaaaacacgu

SEQ ID NO: 513154 - RNA, 19 nt, Artificial Sequence
  Description of Artificial Sequence: Synthetic oligonucleotide
gccggcaagggcucaagga

SEQ ID NO: 513155 - RNA, 19 nt, Artificial Sequence
  Description of Artificial Sequence: Synthetic oligonucleotide
gcaacucuacuuguccuuc

SEQ ID NO: 513156 - RNA, 19 nt, Artificial Sequence
  Description of Artificial Sequence: Synthetic oligonucleotide
cuauucaguuugcccaccu

SEQ ID NO: 513157 - RNA, 19 nt, Artificial Sequence
  Description of Artificial Sequence: Synthetic oligonucleotide
gugacggaucacgcuaguc

SEQ ID NO: 513158 - RNA, 19 nt, Artificial Sequence
  Description of Artificial Sequence: Synthetic oligonucleotide
ccguuuugugcagccacgg

SEQ ID NO: 513159 - RNA, 19 nt, Artificial Sequence
  Description of Artificial Sequence: Synthetic oligonucleotide
uccggcaaccugggaaaau

SEQ ID NO: 513160 - RNA, 19 nt, Artificial Sequence
  Description of Artificial Sequence: Synthetic oligonucleotide
ggcaguuagaaaacacgua

SEQ ID NO: 513161 - RNA, 19 nt, Artificial Sequence
  Description of Artificial Sequence: Synthetic oligonucleotide
ggccggcaagggcucaagg

SEQ ID NO: 513162 - RNA, 19 nt, Artificial Sequence
  Description of Artificial Sequence: Synthetic oligonucleotide
gagcgacuaaacacuccaa

SEQ ID NO: 513163 - RNA, 19 nt, Artificial Sequence
  Description of Artificial Sequence: Synthetic oligonucleotide
ggggagcacucucaaggga

SEQ ID NO: 513164 - RNA, 19 nt, Artificial Sequence
  Description of Artificial Sequence: Synthetic oligonucleotide
gccgaauuauuuguuugaa

SEQ ID NO: 513165 - RNA, 19 nt, Artificial Sequence
  Description of Artificial Sequence: Synthetic oligonucleotide
uuccggcaaccugggaaaa

SEQ ID NO: 513166 - RNA, 19 nt, Artificial Sequence
  Description of Artificial Sequence: Synthetic oligonucleotide
ccuugguagguggggaaug

SEQ ID NO: 513167 - RNA, 19 nt, Artificial Sequence
  Description of Artificial Sequence: Synthetic oligonucleotide
cagugugacggaucacgcu

SEQ ID NO: 513168 - RNA, 19 nt, Artificial Sequence
  Description of Artificial Sequence: Synthetic oligonucleotide
guaagucuuccggcaaccu

SEQ ID NO: 513169 - RNA, 19 nt, Artificial Sequence
  Description of Artificial Sequence: Synthetic oligonucleotide
ccuaacuaccaagaguacu

SEQ ID NO: 513170 - RNA, 19 nt, Artificial Sequence
  Description of Artificial Sequence: Synthetic oligonucleotide
aggccggcaagggcucaag

SEQ ID NO: 513171 - RNA, 19 nt, Artificial Sequence
  Description of Artificial Sequence: Synthetic oligonucleotide
ggaucacgcuagucaucac

SEQ ID NO: 513172 - RNA, 19 nt, Artificial Sequence
  Description of Artificial Sequence: Synthetic oligonucleotide
agucuaccugaggggcaca

SEQ ID NO: 513173 - RNA, 19 nt, Artificial Sequence
  Description of Artificial Sequence: Synthetic oligonucleotide
gucauguggcgccgggcgu

SEQ ID NO: 513174 - RNA, 19 nt, Artificial Sequence
  Description of Artificial Sequence: Synthetic oligonucleotide
guacccugucucauuucua

SEQ ID NO: 513175 - RNA, 19 nt, Artificial Sequence
  Description of Artificial Sequence: Synthetic oligonucleotide
cugcauguaaagggcuucu

SEQ ID NO: 513176 - RNA, 19 nt, Artificial Sequence
  Description of Artificial Sequence: Synthetic oligonucleotide
ccgucucagccggaggccg

SEQ ID NO: 513177 - RNA, 19 nt, Artificial Sequence
  Description of Artificial Sequence: Synthetic oligonucleotide
cggaucacgcuagucauca

SEQ ID NO: 513178 - RNA, 19 nt, Artificial Sequence
  Description of Artificial Sequence: Synthetic oligonucleotide
gcgagacaguucaucugac

SEQ ID NO: 513179 - RNA, 19 nt, Artificial Sequence
  Description of Artificial Sequence: Synthetic oligonucleotide
ccaagcgagugucuugcaa

SEQ ID NO: 513180 - RNA, 19 nt, Artificial Sequence
  Description of Artificial Sequence: Synthetic oligonucleotide
ggugcgaagaugggccuua

SEQ ID NO: 513181 - RNA, 19 nt, Artificial Sequence
  Description of Artificial Sequence: Synthetic oligonucleotide
gcuagucaucacagcccug

SEQ ID NO: 513182 - RNA, 19 nt, Artificial Sequence
  Description of Artificial Sequence: Synthetic oligonucleotide
ccgaauuauuuguuugaau

SEQ ID NO: 513183 - RNA, 19 nt, Artificial Sequence
  Description of Artificial Sequence: Synthetic oligonucleotide
caucugaccuugcgaacuu

SEQ ID NO: 513184 - RNA, 19 nt, Artificial Sequence
  Description of Artificial Sequence: Synthetic oligonucleotide
cgucggucacacacaggac

SEQ ID NO: 513185 - RNA, 19 nt, Artificial Sequence
  Description of Artificial Sequence: Synthetic oligonucleotide
cagugacgacugggauggg

SEQ ID NO: 513186 - RNA, 19 nt, Artificial Sequence
  Description of Artificial Sequence: Synthetic oligonucleotide
cggggaucauuuggcaaag

SEQ ID NO: 513187 - RNA, 19 nt, Artificial Sequence
  Description of Artificial Sequence: Synthetic oligonucleotide
ggaugcucccagacuucuc

SEQ ID NO: 513188 - RNA, 19 nt, Artificial Sequence
  Description of Artificial Sequence: Synthetic oligonucleotide
cccgauggccagugacgac

SEQ ID NO: 513189 - RNA, 19 nt, Artificial Sequence
  Description of Artificial Sequence: Synthetic oligonucleotide
gcucuuuauucaaccaguu

SEQ ID NO: 513190 - RNA, 19 nt, Artificial Sequence
  Description of Artificial Sequence: Synthetic oligonucleotide
gccaagcgagugucuugca

SEQ ID NO: 513191 - RNA, 19 nt, Artificial Sequence
  Description of Artificial Sequence: Synthetic oligonucleotide
ccggcaagggcucaaggau

SEQ ID NO: 513192 - RNA, 19 nt, Artificial Sequence
  Description of Artificial Sequence: Synthetic oligonucleotide
guucugcgguggcgagaca

SEQ ID NO: 513193 - RNA, 19 nt, Artificial Sequence
  Description of Artificial Sequence: Synthetic oligonucleotide
gguauucccgauggccagu

SEQ ID NO: 513194 - RNA, 19 nt, Artificial Sequence
  Description of Artificial Sequence: Synthetic oligonucleotide
cacguagaagcaggacccu

SEQ ID NO: 513195 - RNA, 19 nt, Artificial Sequence
  Description of Artificial Sequence: Synthetic oligonucleotide
ggccuuaagaugggaacuu

SEQ ID NO: 513196 - RNA, 19 nt, Artificial Sequence
  Description of Artificial Sequence: Synthetic oligonucleotide
ccgauggccagugacgacu

SEQ ID NO: 513197 - RNA, 19 nt, Artificial Sequence
  Description of Artificial Sequence: Synthetic oligonucleotide
ccauuggaugccauuuauu

SEQ ID NO: 513198 - RNA, 19 nt, Artificial Sequence
  Description of Artificial Sequence: Synthetic oligonucleotide
gugcgaagaugggccuuaa

SEQ ID NO: 513199 - RNA, 19 nt, Artificial Sequence
  Description of Artificial Sequence: Synthetic oligonucleotide
cgcuagucaucacagcccu

SEQ ID NO: 513200 - RNA, 19 nt, Artificial Sequence
  Description of Artificial Sequence: Synthetic oligonucleotide
gggguaggaugggcuugac

SEQ ID NO: 513201 - RNA, 19 nt, Artificial Sequence
  Description of Artificial Sequence: Synthetic oligonucleotide
gcgugcuuugucagguggu

SEQ ID NO: 513202 - RNA, 19 nt, Artificial Sequence
  Description of Artificial Sequence: Synthetic oligonucleotide
gccuuaagaugggaacuuu

SEQ ID NO: 513203 - RNA, 19 nt, Artificial Sequence
  Description of Artificial Sequence: Synthetic oligonucleotide
gccuugguagguggggaau

SEQ ID NO: 513204 - RNA, 19 nt, Artificial Sequence
  Description of Artificial Sequence: Synthetic oligonucleotide
ccggcaaccugggaaaauu

SEQ ID NO: 513205 - RNA, 19 nt, Artificial Sequence
  Description of Artificial Sequence: Synthetic oligonucleotide
ggcugagaacaugccguuu

SEQ ID NO: 513206 - RNA, 19 nt, Artificial Sequence
  Description of Artificial Sequence: Synthetic oligonucleotide
gggaaccgucucagccgga

SEQ ID NO: 513207 - RNA, 19 nt, Artificial Sequence
  Description of Artificial Sequence: Synthetic oligonucleotide
aaugauuccagcucgagcc

SEQ ID NO: 513208 - RNA, 19 nt, Artificial Sequence
  Description of Artificial Sequence: Synthetic oligonucleotide
  modified_base (5)..(5): a, c, u, g, unknown or other
  modified_base (7)..(7): a, c, u, g, unknown or other
uguununuuguuuuaaagc

SEQ ID NO: 513209 - RNA, 19 nt, Artificial Sequence
  Description of Artificial Sequence: Synthetic oligonucleotide
  modified_base (2)..(2): a, c, u, g, unknown or other
  modified_base (4)..(4): a, c, u, g, unknown or other
ununuuguuuuaaagcagg

SEQ ID NO: 513210 - RNA, 19 nt, Artificial Sequence
  Description of Artificial Sequence: Synthetic oligonucleotide
gauacguagacauaacagg

SEQ ID NO: 513211 - RNA, 19 nt, Artificial Sequence
  Description of Artificial Sequence: Synthetic oligonucleotide
uuuaguuuagcuuggcugg

SEQ ID NO: 513212 - RNA, 19 nt, Artificial Sequence
  Description of Artificial Sequence: Synthetic oligonucleotide
uuuaucaagcgcaaaaccc

SEQ ID NO: 513213 - RNA, 19 nt, Artificial Sequence
  Description of Artificial Sequence: Synthetic oligonucleotide
cucccuauaaguaacaagg

SEQ ID NO: 513214 - RNA, 19 nt, Artificial Sequence
  Description of Artificial Sequence: Synthetic oligonucleotide
uuuaacuuuacccauuggu

SEQ ID NO: 513215 - RNA, 19 nt, Artificial Sequence
  Description of Artificial Sequence: Synthetic oligonucleotide
uuuuaguuuagcuuggcug

SEQ ID NO: 513216 - RNA, 19 nt, Artificial Sequence
  Description of Artificial Sequence: Synthetic oligonucleotide
uuaugaauuuccaagcagc

SEQ ID NO: 513217 - RNA, 19 nt, Artificial Sequence
  Description of Artificial Sequence: Synthetic oligonucleotide
uuuugaaucaauucaggug

SEQ ID NO: 513218 - RNA, 19 nt, Artificial Sequence
  Description of Artificial Sequence: Synthetic oligonucleotide
  modified_base (4)..(4): a, c, u, g, unknown or other
  modified_base (6)..(6): a, c, u, g, unknown or other
guununuuguuuuaaagca

SEQ ID NO: 513219 - RNA, 19 nt, Artificial Sequence
  Description of Artificial Sequence: Synthetic oligonucleotide
uugcauaucagcuuguuug

SEQ ID NO: 513220 - RNA, 19 nt, Artificial Sequence
  Description of Artificial Sequence: Synthetic oligonucleotide
  modified_base (3)..(3): a, c, u, g, unknown or other
  modified_base (5)..(5): a, c, u, g, unknown or other
uununuuguuuuaaagcag

SEQ ID NO: 513221 - RNA, 19 nt, Artificial Sequence
  Description of Artificial Sequence: Synthetic oligonucleotide
ugcagaaacaaacugaguc

SEQ ID NO: 513222 - RNA, 19 nt, Artificial Sequence
  Description of Artificial Sequence: Synthetic oligonucleotide
ucugucuuuaggaacaacc

SEQ ID NO: 513223 - RNA, 19 nt, Artificial Sequence
  Description of Artificial Sequence: Synthetic oligonucleotide
agugaaaggucacggaugc

SEQ ID NO: 513224 - RNA, 19 nt, Artificial Sequence
  Description of Artificial Sequence: Synthetic oligonucleotide
cuuaaaguccuuaucgccg

SEQ ID NO: 513225 - RNA, 19 nt, Artificial Sequence
  Description of Artificial Sequence: Synthetic oligonucleotide
uuuuaaagcaggugggcgg

SEQ ID NO: 513226 - RNA, 19 nt, Artificial Sequence
  Description of Artificial Sequence: Synthetic oligonucleotide
auaaucugcagaaacaaac

SEQ ID NO: 513227 - RNA, 19 nt, Artificial Sequence
  Description of Artificial Sequence: Synthetic oligonucleotide
uguuugauaaagcaacucu

SEQ ID NO: 513228 - RNA, 19 nt, Artificial Sequence
  Description of Artificial Sequence: Synthetic oligonucleotide
cuaguugagauugugauag

SEQ ID NO: 513229 - RNA, 19 nt, Artificial Sequence
  Description of Artificial Sequence: Synthetic oligonucleotide
auuauaaagcucuucccag

SEQ ID NO: 513230 - RNA, 19 nt, Artificial Sequence
  Description of Artificial Sequence: Synthetic oligonucleotide
uggaucaauaagcaaugcg

SEQ ID NO: 513231 - RNA, 19 nt, Artificial Sequence
  Description of Artificial Sequence: Synthetic oligonucleotide
auaaaugagagggaauccc

SEQ ID NO: 513232 - RNA, 19 nt, Artificial Sequence
  Description of Artificial Sequence: Synthetic oligonucleotide
agauacucaauccaggaug

SEQ ID NO: 513233 - RNA, 19 nt, Artificial Sequence
  Description of Artificial Sequence: Synthetic oligonucleotide
uccaagucgauccacuggg

SEQ ID NO: 513234 - RNA, 19 nt, Artificial Sequence
  Description of Artificial Sequence: Synthetic oligonucleotide
cugguaucgauuauaaagc

SEQ ID NO: 513235 - RNA, 19 nt, Artificial Sequence
  Description of Artificial Sequence: Synthetic oligonucleotide
gauaucguacucuggaaag

SEQ ID NO: 513236 - RNA, 19 nt, Artificial Sequence
  Description of Artificial Sequence: Synthetic oligonucleotide
acugacuucaauaggaugg

SEQ ID NO: 513237 - RNA, 19 nt, Artificial Sequence
  Description of Artificial Sequence: Synthetic oligonucleotide
uuaacuuuacccauugguc

SEQ ID NO: 513238 - RNA, 19 nt, Artificial Sequence
  Description of Artificial Sequence: Synthetic oligonucleotide
uucauucaaccacagauga

SEQ ID NO: 513239 - RNA, 19 nt, Artificial Sequence
  Description of Artificial Sequence: Synthetic oligonucleotide
  modified_base (6)..(6): a, c, u, g, unknown or other
  modified_base (8)..(8): a, c, u, g, unknown or other
uuguununuuguuuuaaag

SEQ ID NO: 513240 - RNA, 19 nt, Artificial Sequence
  Description of Artificial Sequence: Synthetic oligonucleotide
ugcuauacgauauagcauc

SEQ ID NO: 513241 - RNA, 19 nt, Artificial Sequence
  Description of Artificial Sequence: Synthetic oligonucleotide
aagagaguugaaagaaucc

SEQ ID NO: 513242 - RNA, 19 nt, Artificial Sequence
  Description of Artificial Sequence: Synthetic oligonucleotide
ucauguagcauucggauaa

SEQ ID NO: 513243 - RNA, 19 nt, Artificial Sequence
  Description of Artificial Sequence: Synthetic oligonucleotide
auuuguuugguccagguau

SEQ ID NO: 513244 - RNA, 19 nt, Artificial Sequence
  Description of Artificial Sequence: Synthetic oligonucleotide
cugguaauaaacuuuccag

SEQ ID NO: 513245 - RNA, 19 nt, Artificial Sequence
  Description of Artificial Sequence: Synthetic oligonucleotide
gauuauaaagcucuuccca

SEQ ID NO: 513246 - RNA, 19 nt, Artificial Sequence
  Description of Artificial Sequence: Synthetic oligonucleotide
cuguaauccaagucgaucc

SEQ ID NO: 513247 - RNA, 19 nt, Artificial Sequence
  Description of Artificial Sequence: Synthetic oligonucleotide
ugaaguagucuuuauaaaa

SEQ ID NO: 513248 - RNA, 19 nt, Artificial Sequence
  Description of Artificial Sequence: Synthetic oligonucleotide
gaagcuuuagcauaauauc

SEQ ID NO: 513249 - RNA, 19 nt, Artificial Sequence
  Description of Artificial Sequence: Synthetic oligonucleotide
uaaacacggacacacacac

SEQ ID NO: 513250 - RNA, 19 nt, Artificial Sequence
  Description of Artificial Sequence: Synthetic oligonucleotide
uauaggugaaaagacaucu

SEQ ID NO: 513251 - RNA, 19 nt, Artificial Sequence
  Description of Artificial Sequence: Synthetic oligonucleotide
cuauaaguaacaaggcccc

SEQ ID NO: 513252 - RNA, 19 nt, Artificial Sequence
  Description of Artificial Sequence: Synthetic oligonucleotide
uuaucaagcgcaaaacccu

SEQ ID NO: 513253 - RNA, 19 nt, Artificial Sequence
  Description of Artificial Sequence: Synthetic oligonucleotide
augguuuccggucaauuac

SEQ ID NO: 513254 - RNA, 19 nt, Artificial Sequence
  Description of Artificial Sequence: Synthetic oligonucleotide
uauuagucuggauauuaag

SEQ ID NO: 513255 - RNA, 19 nt, Artificial Sequence
  Description of Artificial Sequence: Synthetic oligonucleotide
aagcgcaaaacccucaaca

SEQ ID NO: 513256 - RNA, 19 nt, Artificial Sequence
  Description of Artificial Sequence: Synthetic oligonucleotide
ucuucacuaguugagauug

SEQ ID NO: 513257 - RNA, 19 nt, Artificial Sequence
  Description of Artificial Sequence: Synthetic oligonucleotide
cucgcuuuagccaagcagc

SEQ ID NO: 513258 - RNA, 19 nt, Artificial Sequence
  Description of Artificial Sequence: Synthetic oligonucleotide
aguaacaaggccccaguuc

SEQ ID NO: 513259 - RNA, 19 nt, Artificial Sequence
  Description of Artificial Sequence: Synthetic oligonucleotide
uggauauuaagaacccucc

SEQ ID NO: 513260 - RNA, 19 nt, Artificial Sequence
  Description of Artificial Sequence: Synthetic oligonucleotide
uucuuagaucagcagaaag

SEQ ID NO: 513261 - RNA, 19 nt, Artificial Sequence
  Description of Artificial Sequence: Synthetic oligonucleotide
aaugcggucucccuauaag

SEQ ID NO: 513262 - RNA, 19 nt, Artificial Sequence
  Description of Artificial Sequence: Synthetic oligonucleotide
auucggauaacagaugcac

SEQ ID NO: 513263 - RNA, 19 nt, Artificial Sequence
  Description of Artificial Sequence: Synthetic oligonucleotide
ucacccacaacaaaugcca

SEQ ID NO: 513264 - RNA, 19 nt, Artificial Sequence
  Description of Artificial Sequence: Synthetic oligonucleotide
uugagauugugauaggaac

SEQ ID NO: 513265 - RNA, 19 nt, Artificial Sequence
  Description of Artificial Sequence: Synthetic oligonucleotide
  modified_base (7)..(7): a, c, u, g, unknown or other
  modified_base (9)..(9): a, c, u, g, unknown or other
uuuguununuuguuuuaaa

SEQ ID NO: 513266 - RNA, 19 nt, Artificial Sequence
  Description of Artificial Sequence: Synthetic oligonucleotide
uaacuuuacccauuggucu

SEQ ID NO: 513267 - RNA, 19 nt, Artificial Sequence
  Description of Artificial Sequence: Synthetic oligonucleotide
accaauuacugacacagug

SEQ ID NO: 513268 - RNA, 19 nt, Artificial Sequence
  Description of Artificial Sequence: Synthetic oligonucleotide
gaauguuaucagcaucucg

SEQ ID NO: 513269 - RNA, 19 nt, Artificial Sequence
  Description of Artificial Sequence: Synthetic oligonucleotide
ugaaagaauccccagguua

SEQ ID NO: 513270 - RNA, 19 nt, Artificial Sequence
  Description of Artificial Sequence: Synthetic oligonucleotide
ggaucaauaagcaaugcgg

SEQ ID NO: 513271 - RNA, 19 nt, Artificial Sequence
  Description of Artificial Sequence: Synthetic oligonucleotide
ccugguaucgauuauaaag

SEQ ID NO: 513272 - RNA, 19 nt, Artificial Sequence
  Description of Artificial Sequence: Synthetic oligonucleotide
ugaccuuguuucuacaaag

SEQ ID NO: 513273 - RNA, 19 nt, Artificial Sequence
  Description of Artificial Sequence: Synthetic oligonucleotide
uauucacccacaacaaaug

SEQ ID NO: 513274 - RNA, 19 nt, Artificial Sequence
  Description of Artificial Sequence: Synthetic oligonucleotide
aagaggucauucuguaauc

SEQ ID NO: 513275 - RNA, 19 nt, Artificial Sequence
  Description of Artificial Sequence: Synthetic oligonucleotide
aucuaaggcgucaaguucc

SEQ ID NO: 513276 - RNA, 19 nt, Artificial Sequence
  Description of Artificial Sequence: Synthetic oligonucleotide
ucaauaagcaaugcggucu

SEQ ID NO: 513277 - RNA, 19 nt, Artificial Sequence
  Description of Artificial Sequence: Synthetic oligonucleotide
gauagacaggacuucuuag

SEQ ID NO: 513278 - RNA, 19 nt, Artificial Sequence
  Description of Artificial Sequence: Synthetic oligonucleotide
ucucgcuuuagccaagcag

SEQ ID NO: 513279 - RNA, 19 nt, Artificial Sequence
  Description of Artificial Sequence: Synthetic oligonucleotide
auacaguauaauugggcuc

SEQ ID NO: 513280 - RNA, 19 nt, Artificial Sequence
  Description of Artificial Sequence: Synthetic oligonucleotide
uacgauauagcaucaaaua

SEQ ID NO: 513281 - RNA, 19 nt, Artificial Sequence
  Description of Artificial Sequence: Synthetic oligonucleotide
aauuacugacacagugucc

SEQ ID NO: 513282 - RNA, 19 nt, Artificial Sequence
  Description of Artificial Sequence: Synthetic oligonucleotide
aacaaccagaacgagauau

SEQ ID NO: 513283 - RNA, 19 nt, Artificial Sequence
  Description of Artificial Sequence: Synthetic oligonucleotide
aucaauaagcaaugcgguc

SEQ ID NO: 513284 - RNA, 19 nt, Artificial Sequence
  Description of Artificial Sequence: Synthetic oligonucleotide
uucacccacaacaaaugcc

SEQ ID NO: 513285 - RNA, 19 nt, Artificial Sequence
  Description of Artificial Sequence: Synthetic oligonucleotide
ucggauaacagaugcaccu

SEQ ID NO: 513286 - RNA, 19 nt, Artificial Sequence
  Description of Artificial Sequence: Synthetic oligonucleotide
uuugugaagcuuuagcaua

SEQ ID NO: 513287 - RNA, 19 nt, Artificial Sequence
  Description of Artificial Sequence: Synthetic oligonucleotide
uagcauucggauaacagau

SEQ ID NO: 513288 - RNA, 19 nt, Artificial Sequence
  Description of Artificial Sequence: Synthetic oligonucleotide
acgaguauaaucugcagaa

SEQ ID NO: 513289 - RNA, 19 nt, Artificial Sequence
  Description of Artificial Sequence: Synthetic oligonucleotide
aauacauguucauuccuuu

SEQ ID NO: 513290 - RNA, 19 nt, Artificial Sequence
  Description of Artificial Sequence: Synthetic oligonucleotide
uccuauaggugaaaagaca

SEQ ID NO: 513291 - RNA, 19 nt, Artificial Sequence
  Description of Artificial Sequence: Synthetic oligonucleotide
acauaugguccacuggcac

SEQ ID NO: 513292 - RNA, 19 nt, Artificial Sequence
  Description of Artificial Sequence: Synthetic oligonucleotide
aagcuuuagcauaauaucu

SEQ ID NO: 513293 - RNA, 19 nt, Artificial Sequence
  Description of Artificial Sequence: Synthetic oligonucleotide
agaauccccagguuacagc

SEQ ID NO: 513294 - RNA, 19 nt, Artificial Sequence
  Description of Artificial Sequence: Synthetic oligonucleotide
uuagccaagcagcauucag

SEQ ID NO: 513295 - RNA, 19 nt, Artificial Sequence
  Description of Artificial Sequence: Synthetic oligonucleotide
agauacguagacauaacag

SEQ ID NO: 513296 - RNA, 19 nt, Artificial Sequence
  Description of Artificial Sequence: Synthetic oligonucleotide
guagucauguagcauucgg

SEQ ID NO: 513297 - RNA, 19 nt, Artificial Sequence
  Description of Artificial Sequence: Synthetic oligonucleotide
caagagaguugaaagaauc

SEQ ID NO: 513298 - RNA, 19 nt, Artificial Sequence
  Description of Artificial Sequence: Synthetic oligonucleotide
uacuggguccgauaaaacc

SEQ ID NO: 513299 - RNA, 19 nt, Artificial Sequence
  Description of Artificial Sequence: Synthetic oligonucleotide
ucgaagaaagccuuaacuu

SEQ ID NO: 513300 - RNA, 19 nt, Artificial Sequence
  Description of Artificial Sequence: Synthetic oligonucleotide
  modified_base (2)..(2): a, c, u, g, unknown or other
unuuguuuuaaagcaggug

SEQ ID NO: 513301 - RNA, 19 nt, Artificial Sequence
  Description of Artificial Sequence: Synthetic oligonucleotide
cuggauauuaagaacccuc

SEQ ID NO: 513302 - RNA, 19 nt, Artificial Sequence
  Description of Artificial Sequence: Synthetic oligonucleotide
acgauauagcaucaaauau

SEQ ID NO: 513303 - RNA, 19 nt, Artificial Sequence
  Description of Artificial Sequence: Synthetic oligonucleotide
ucucccuauaaguaacaag

SEQ ID NO: 513304 - RNA, 19 nt, Artificial Sequence
  Description of Artificial Sequence: Synthetic oligonucleotide
ucgagccagagaaaagagg

SEQ ID NO: 513305 - RNA, 19 nt, Artificial Sequence
  Description of Artificial Sequence: Synthetic oligonucleotide
ugggguguaaacacggaca

SEQ ID NO: 513306 - RNA, 19 nt, Artificial Sequence
  Description of Artificial Sequence: Synthetic oligonucleotide
agaaagccuuaacuucucc

SEQ ID NO: 513307 - RNA, 19 nt, Artificial Sequence
  Description of Artificial Sequence: Synthetic oligonucleotide
gauacucaauccaggaugc

SEQ ID NO: 513308 - RNA, 19 nt, Artificial Sequence
  Description of Artificial Sequence: Synthetic oligonucleotide
agucauauucacccacaac

SEQ ID NO: 513309 - RNA, 19 nt, Artificial Sequence
  Description of Artificial Sequence: Synthetic oligonucleotide
uagacauaacagguguucg

SEQ ID NO: 513310 - RNA, 19 nt, Artificial Sequence
  Description of Artificial Sequence: Synthetic oligonucleotide
gauggcuguuaucuaaggc

SEQ ID NO: 513311 - RNA, 19 nt, Artificial Sequence
  Description of Artificial Sequence: Synthetic oligonucleotide
aggauaaggaacauugaag

SEQ ID NO: 513312 - RNA, 19 nt, Artificial Sequence
  Description of Artificial Sequence: Synthetic oligonucleotide
guuugauaaagcaacucug

SEQ ID NO: 513313 - RNA, 19 nt, Artificial Sequence
  Description of Artificial Sequence: Synthetic oligonucleotide
uuaucuaaggcgucaaguu

SEQ ID NO: 513314 - RNA, 19 nt, Artificial Sequence
  Description of Artificial Sequence: Synthetic oligonucleotide
caauuacugacacaguguc

SEQ ID NO: 513315 - RNA, 19 nt, Artificial Sequence
  Description of Artificial Sequence: Synthetic oligonucleotide
uuaaaguccuuaucgccga

SEQ ID NO: 513316 - RNA, 19 nt, Artificial Sequence
  Description of Artificial Sequence: Synthetic oligonucleotide
uaucuaaggcgucaaguuc

SEQ ID NO: 513317 - RNA, 19 nt, Artificial Sequence
  Description of Artificial Sequence: Synthetic oligonucleotide
agaggucauucuguaaucc

SEQ ID NO: 513318 - RNA, 19 nt, Artificial Sequence
  Description of Artificial Sequence: Synthetic oligonucleotide
gggacaagagaguugaaag

SEQ ID NO: 513319 - RNA, 19 nt, Artificial Sequence
  Description of Artificial Sequence: Synthetic oligonucleotide
uauaaucugcagaaacaaa

SEQ ID NO: 513320 - RNA, 19 nt, Artificial Sequence
  Description of Artificial Sequence: Synthetic oligonucleotide
auagguuuaccacuggcau

SEQ ID NO: 513321 - RNA, 19 nt, Artificial Sequence
  Description of Artificial Sequence: Synthetic oligonucleotide
acccacaacaaaugccacc

SEQ ID NO: 513322 - RNA, 19 nt, Artificial Sequence
  Description of Artificial Sequence: Synthetic oligonucleotide
auaagcaaugcggucuccc

SEQ ID NO: 513323 - RNA, 19 nt, Artificial Sequence
  Description of Artificial Sequence: Synthetic oligonucleotide
cccagauuuaacuuuaccc

SEQ ID NO: 513324 - RNA, 19 nt, Artificial Sequence
  Description of Artificial Sequence: Synthetic oligonucleotide
aagauacucaauccaggau

SEQ ID NO: 513325 - RNA, 19 nt, Artificial Sequence
  Description of Artificial Sequence: Synthetic oligonucleotide
auaucguacucuggaaagc

SEQ ID NO: 513326 - RNA, 19 nt, Artificial Sequence
  Description of Artificial Sequence: Synthetic oligonucleotide
cuguuuuccuuccacgugc

SEQ ID NO: 513327 - RNA, 19 nt, Artificial Sequence
  Description of Artificial Sequence: Synthetic oligonucleotide
ucccuauaaguaacaaggc

SEQ ID NO: 513328 - RNA, 19 nt, Artificial Sequence
  Description of Artificial Sequence: Synthetic oligonucleotide
auaucuaaggugcugccau

SEQ ID NO: 513329 - RNA, 19 nt, Artificial Sequence
  Description of Artificial Sequence: Synthetic oligonucleotide
ucccaguuugcccagcacc

SEQ ID NO: 513330 - RNA, 19 nt, Artificial Sequence
  Description of Artificial Sequence: Synthetic oligonucleotide
ugacucucgaagaaagccu

SEQ ID NO: 513331 - RNA, 19 nt, Artificial Sequence
  Description of Artificial Sequence: Synthetic oligonucleotide
uguaauccaagucgaucca

SEQ ID NO: 513332 - RNA, 19 nt, Artificial Sequence
  Description of Artificial Sequence: Synthetic oligonucleotide
cuccuuaaaccgacgacgg

SEQ ID NO: 513333 - RNA, 19 nt, Artificial Sequence
  Description of Artificial Sequence: Synthetic oligonucleotide
gaaagaguagccccaagaa

SEQ ID NO: 513334 - RNA, 19 nt, Artificial Sequence
  Description of Artificial Sequence: Synthetic oligonucleotide
uucggauaacagaugcacc

SEQ ID NO: 513335 - RNA, 19 nt, Artificial Sequence
  Description of Artificial Sequence: Synthetic oligonucleotide
aguauaaucugcagaaaca

SEQ ID NO: 513336 - RNA, 19 nt, Artificial Sequence
  Description of Artificial Sequence: Synthetic oligonucleotide
aaaacccaacuguucccag

SEQ ID NO: 513337 - RNA, 19 nt, Artificial Sequence
  Description of Artificial Sequence: Synthetic oligonucleotide
cuauagguuuaccacuggc

SEQ ID NO: 513338 - RNA, 19 nt, Artificial Sequence
  Description of Artificial Sequence: Synthetic oligonucleotide
uguuaucuaaggcgucaag

SEQ ID NO: 513339 - RNA, 19 nt, Artificial Sequence
  Description of Artificial Sequence: Synthetic oligonucleotide
cuccuauaggugaaaagac

SEQ ID NO: 513340 - RNA, 19 nt, Artificial Sequence
  Description of Artificial Sequence: Synthetic oligonucleotide
uagucauguagcauucgga

SEQ ID NO: 513341 - RNA, 19 nt, Artificial Sequence
  Description of Artificial Sequence: Synthetic oligonucleotide
aauaagcaaugcggucucc

SEQ ID NO: 513342 - RNA, 19 nt, Artificial Sequence
  Description of Artificial Sequence: Synthetic oligonucleotide
auggauggcccacacugac

SEQ ID NO: 513343 - RNA, 19 nt, Artificial Sequence
  Description of Artificial Sequence: Synthetic oligonucleotide
guccuuaucgccgauguag

SEQ ID NO: 513344 - RNA, 19 nt, Artificial Sequence
  Description of Artificial Sequence: Synthetic oligonucleotide
ugauaggaaccauccacug

SEQ ID NO: 513345 - RNA, 19 nt, Artificial Sequence
  Description of Artificial Sequence: Synthetic oligonucleotide
guacucuugaauguuauca

SEQ ID NO: 513346 - RNA, 19 nt, Artificial Sequence
  Description of Artificial Sequence: Synthetic oligonucleotide
uggcuguuaucuaaggcgu

SEQ ID NO: 513347 - RNA, 19 nt, Artificial Sequence
  Description of Artificial Sequence: Synthetic oligonucleotide
uugaaguagucuuuauaaa

SEQ ID NO: 513348 - RNA, 19 nt, Artificial Sequence
  Description of Artificial Sequence: Synthetic oligonucleotide
gaggauaaggaacauugaa

SEQ ID NO: 513349 - RNA, 19 nt, Artificial Sequence
  Description of Artificial Sequence: Synthetic oligonucleotide
uguucgggcaaacuucacu

SEQ ID NO: 513350 - RNA, 19 nt, Artificial Sequence
  Description of Artificial Sequence: Synthetic oligonucleotide
uaauccaagucgauccacu

SEQ ID NO: 513351 - RNA, 19 nt, Artificial Sequence
  Description of Artificial Sequence: Synthetic oligonucleotide
uacagugcuaaugauucca

SEQ ID NO: 513352 - RNA, 19 nt, Artificial Sequence
  Description of Artificial Sequence: Synthetic oligonucleotide
uaauugggcucauucacaa

SEQ ID NO: 513353 - RNA, 19 nt, Artificial Sequence
  Description of Artificial Sequence: Synthetic oligonucleotide
uguacuggguccgauaaaa

SEQ ID NO: 513354 - RNA, 19 nt, Artificial Sequence
  Description of Artificial Sequence: Synthetic oligonucleotide
gacguaccucuucugaaag

SEQ ID NO: 513355 - RNA, 19 nt, Artificial Sequence
  Description of Artificial Sequence: Synthetic oligonucleotide
agaugcaccuuugcuauac

SEQ ID NO: 513356 - RNA, 19 nt, Artificial Sequence
  Description of Artificial Sequence: Synthetic oligonucleotide
ucuccagccauuuuaucaa

SEQ ID NO: 513357 - RNA, 19 nt, Artificial Sequence
  Description of Artificial Sequence: Synthetic oligonucleotide
ucucgcuuauccauuagua

SEQ ID NO: 513358 - RNA, 19 nt, Artificial Sequence
  Description of Artificial Sequence: Synthetic oligonucleotide
ugguaucgauuauaaagcu

SEQ ID NO: 513359 - RNA, 19 nt, Artificial Sequence
  Description of Artificial Sequence: Synthetic oligonucleotide
cacacugacuucaauagga

SEQ ID NO: 513360 - RNA, 19 nt, Artificial Sequence
  Description of Artificial Sequence: Synthetic oligonucleotide
agauaucguacucuggaaa

SEQ ID NO: 513361 - RNA, 19 nt, Artificial Sequence
  Description of Artificial Sequence: Synthetic oligonucleotide
ucgcuuauccauuaguauu

SEQ ID NO: 513362 - RNA, 19 nt, Artificial Sequence
  Description of Artificial Sequence: Synthetic oligonucleotide
ccuuuaugaauuuccaagc

SEQ ID NO: 513363 - RNA, 19 nt, Artificial Sequence
  Description of Artificial Sequence: Synthetic oligonucleotide
uaagauagacaggacuucu

SEQ ID NO: 513364 - RNA, 19 nt, Artificial Sequence
  Description of Artificial Sequence: Synthetic oligonucleotide
auguuugauaaagcaacuc

SEQ ID NO: 513365 - RNA, 19 nt, Artificial Sequence
  Description of Artificial Sequence: Synthetic oligonucleotide
ucaggauaugguuuccggu

SEQ ID NO: 513366 - RNA, 19 nt, Artificial Sequence
  Description of Artificial Sequence: Synthetic oligonucleotide
uugaccuuguuucuacaaa

SEQ ID NO: 513367 - RNA, 19 nt, Artificial Sequence
  Description of Artificial Sequence: Synthetic oligonucleotide
acagaugaguccaccauuc

SEQ ID NO: 513368 - RNA, 19 nt, Artificial Sequence
  Description of Artificial Sequence: Synthetic oligonucleotide
agaugaguccaccauucca

SEQ ID NO: 513369 - RNA, 19 nt, Artificial Sequence
  Description of Artificial Sequence: Synthetic oligonucleotide
ucccagauuuaacuuuacc

SEQ ID NO: 513370 - RNA, 19 nt, Artificial Sequence
  Description of Artificial Sequence: Synthetic oligonucleotide
uaugguuuccggucaauua

SEQ ID NO: 513371 - RNA, 19 nt, Artificial Sequence
  Description of Artificial Sequence: Synthetic oligonucleotide
gaugggcgaguucaugucc

SEQ ID NO: 513372 - RNA, 19 nt, Artificial Sequence
  Description of Artificial Sequence: Synthetic oligonucleotide
cucaggucgcuccauacag

SEQ ID NO: 513373 - RNA, 19 nt, Artificial Sequence
  Description of Artificial Sequence: Synthetic oligonucleotide
ucuugaauguuaucagcau

SEQ ID NO: 513374 - RNA, 19 nt, Artificial Sequence
  Description of Artificial Sequence: Synthetic oligonucleotide
auacguagacauaacaggu

SEQ ID NO: 513375 - RNA, 19 nt, Artificial Sequence
  Description of Artificial Sequence: Synthetic oligonucleotide
aauucaggugaaagaguag

SEQ ID NO: 513376 - RNA, 19 nt, Artificial Sequence
  Description of Artificial Sequence: Synthetic oligonucleotide
uuaguuuagcuuggcuggg

SEQ ID NO: 513377 - RNA, 19 nt, Artificial Sequence
  Description of Artificial Sequence: Synthetic oligonucleotide
uugcuauacgauauagcau

SEQ ID NO: 513378 - RNA, 19 nt, Artificial Sequence
  Description of Artificial Sequence: Synthetic oligonucleotide
caggauaugguuuccgguc

SEQ ID NO: 513379 - RNA, 19 nt, Artificial Sequence
  Description of Artificial Sequence: Synthetic oligonucleotide
aagaauccccagguuacag

SEQ ID NO: 513380 - RNA, 19 nt, Artificial Sequence
  Description of Artificial Sequence: Synthetic oligonucleotide
ugcaccuuugcuauacgau

SEQ ID NO: 513381 - RNA, 19 nt, Artificial Sequence
  Description of Artificial Sequence: Synthetic oligonucleotide
  modified_base (11)..(11): a, c, u, g, unknown or other
  modified_base (13)..(13): a, c, u, g, unknown or other
uuguuuuguununuuguuu

SEQ ID NO: 513382 - RNA, 19 nt, Artificial Sequence
  Description of Artificial Sequence: Synthetic oligonucleotide
aaccucuacagugcuaaug

SEQ ID NO: 513383 - RNA, 19 nt, Artificial Sequence
  Description of Artificial Sequence: Synthetic oligonucleotide
uccuuaaaccgacgacggg

SEQ ID NO: 513384 - RNA, 19 nt, Artificial Sequence
  Description of Artificial Sequence: Synthetic oligonucleotide
aucgauuauaaagcucuuc

SEQ ID NO: 513385 - RNA, 19 nt, Artificial Sequence
  Description of Artificial Sequence: Synthetic oligonucleotide
auaugguccacuggcacag

SEQ ID NO: 513386 - RNA, 19 nt, Artificial Sequence
  Description of Artificial Sequence: Synthetic oligonucleotide
uguucccagauuuaacuuu

SEQ ID NO: 513387 - RNA, 19 nt, Artificial Sequence
  Description of Artificial Sequence: Synthetic oligonucleotide
aagaaagccuuaacuucuc

SEQ ID NO: 513388 - RNA, 19 nt, Artificial Sequence
  Description of Artificial Sequence: Synthetic oligonucleotide
uaucaagcgcaaaacccuc

SEQ ID NO: 513389 - RNA, 19 nt, Artificial Sequence
  Description of Artificial Sequence: Synthetic oligonucleotide
ggauaaggaacauugaagu

SEQ ID NO: 513390 - RNA, 19 nt, Artificial Sequence
  Description of Artificial Sequence: Synthetic oligonucleotide
cuauaggugaaaagacauc

SEQ ID NO: 513391 - RNA, 19 nt, Artificial Sequence
  Description of Artificial Sequence: Synthetic oligonucleotide
agagcaacccacuggcgug

SEQ ID NO: 513392 - RNA, 19 nt, Artificial Sequence
  Description of Artificial Sequence: Synthetic oligonucleotide
uuaucgccgauguagucau

SEQ ID NO: 513393 - RNA, 19 nt, Artificial Sequence
  Description of Artificial Sequence: Synthetic oligonucleotide
gcauucggauaacagaugc

SEQ ID NO: 513394 - RNA, 19 nt, Artificial Sequence
  Description of Artificial Sequence: Synthetic oligonucleotide
caauucaggugaaagagua

SEQ ID NO: 513395 - RNA, 19 nt, Artificial Sequence
  Description of Artificial Sequence: Synthetic oligonucleotide
agauagacaggacuucuua

SEQ ID NO: 513396 - RNA, 19 nt, Artificial Sequence
  Description of Artificial Sequence: Synthetic oligonucleotide
guccgauaaaacccaacug

SEQ ID NO: 513397 - RNA, 19 nt, Artificial Sequence
  Description of Artificial Sequence: Synthetic oligonucleotide
gcuccuuaaaccgacgacg

SEQ ID NO: 513398 - RNA, 19 nt, Artificial Sequence
  Description of Artificial Sequence: Synthetic oligonucleotide
gucuuuaggaacaaccaga

SEQ ID NO: 513399 - RNA, 19 nt, Artificial Sequence
  Description of Artificial Sequence: Synthetic oligonucleotide
uguagucauguagcauucg

SEQ ID NO: 513400 - RNA, 19 nt, Artificial Sequence
  Description of Artificial Sequence: Synthetic oligonucleotide
cacacaccgucuuuugacc

SEQ ID NO: 513401 - RNA, 19 nt, Artificial Sequence
  Description of Artificial Sequence: Synthetic oligonucleotide
aggauaugguuuccgguca

SEQ ID NO: 513402 - RNA, 19 nt, Artificial Sequence
  Description of Artificial Sequence: Synthetic oligonucleotide
uccuuaucgccgauguagu

SEQ ID NO: 513403 - RNA, 19 nt, Artificial Sequence
  Description of Artificial Sequence: Synthetic oligonucleotide
uaaagcaacucugucuuua

SEQ ID NO: 513404 - RNA, 19 nt, Artificial Sequence
  Description of Artificial Sequence: Synthetic oligonucleotide
auucaaccacagaugaguc

SEQ ID NO: 513405 - RNA, 19 nt, Artificial Sequence
  Description of Artificial Sequence: Synthetic oligonucleotide
ugaguccagauaucguacu

SEQ ID NO: 513406 - RNA, 19 nt, Artificial Sequence
  Description of Artificial Sequence: Synthetic oligonucleotide
caaaccauugaugggcgag

SEQ ID NO: 513407 - RNA, 19 nt, Artificial Sequence
  Description of Artificial Sequence: Synthetic oligonucleotide
ccagauuuaacuuuaccca

SEQ ID NO: 513408 - RNA, 19 nt, Artificial Sequence
  Description of Artificial Sequence: Synthetic oligonucleotide
cauccccaugcuuuaaaac

SEQ ID NO: 513409 - RNA, 19 nt, Artificial Sequence
  Description of Artificial Sequence: Synthetic oligonucleotide
agguguucgggcaaacuuc

SEQ ID NO: 513410 - RNA, 19 nt, Artificial Sequence
  Description of Artificial Sequence: Synthetic oligonucleotide
cacaaccagagcaacccac

SEQ ID NO: 513411 - RNA, 19 nt, Artificial Sequence
  Description of Artificial Sequence: Synthetic oligonucleotide
uaguugagauugugauagg

SEQ ID NO: 513412 - RNA, 19 nt, Artificial Sequence
  Description of Artificial Sequence: Synthetic oligonucleotide
ucuaaggcgucaaguuccu

SEQ ID NO: 513413 - RNA, 19 nt, Artificial Sequence
  Description of Artificial Sequence: Synthetic oligonucleotide
agaacccucccugguaucg

SEQ ID NO: 513414 - RNA, 19 nt, Artificial Sequence
  Description of Artificial Sequence: Synthetic oligonucleotide
uucaauaggauggcuguua

SEQ ID NO: 513415 - RNA, 19 nt, Artificial Sequence
  Description of Artificial Sequence: Synthetic oligonucleotide
acuaguugagauugugaua

SEQ ID NO: 513416 - RNA, 19 nt, Artificial Sequence
  Description of Artificial Sequence: Synthetic oligonucleotide
ugcggucucccuauaagua

SEQ ID NO: 513417 - RNA, 19 nt, Artificial Sequence
  Description of Artificial Sequence: Synthetic oligonucleotide
agauuccaaaccauugaug

SEQ ID NO: 513418 - RNA, 19 nt, Artificial Sequence
  Description of Artificial Sequence: Synthetic oligonucleotide
uggucuacacaaagauacu

SEQ ID NO: 513419 - RNA, 19 nt, Artificial Sequence
  Description of Artificial Sequence: Synthetic oligonucleotide
gaucaauaagcaaugcggu

SEQ ID NO: 513420 - RNA, 19 nt, Artificial Sequence
  Description of Artificial Sequence: Synthetic oligonucleotide
augggcgaguucauguccc

SEQ ID NO: 513421 - RNA, 19 nt, Artificial Sequence
  Description of Artificial Sequence: Synthetic oligonucleotide
cugacuucaauaggauggc

SEQ ID NO: 513422 - RNA, 19 nt, Artificial Sequence
  Description of Artificial Sequence: Synthetic oligonucleotide
cgauauagcaucaaauauc

SEQ ID NO: 513423 - RNA, 19 nt, Artificial Sequence
  Description of Artificial Sequence: Synthetic oligonucleotide
auaacagguguucgggcaa

SEQ ID NO: 513424 - RNA, 19 nt, Artificial Sequence
  Description of Artificial Sequence: Synthetic oligonucleotide
uacucaauccaggaugcaa

SEQ ID NO: 513425 - RNA, 19 nt, Artificial Sequence
  Description of Artificial Sequence: Synthetic oligonucleotide
cccuauaaguaacaaggcc

SEQ ID NO: 513426 - RNA, 19 nt, Artificial Sequence
  Description of Artificial Sequence: Synthetic oligonucleotide
uuggaucaauaagcaaugc

SEQ ID NO: 513427 - RNA, 19 nt, Artificial Sequence
  Description of Artificial Sequence: Synthetic oligonucleotide
auaauugggcucauucaca

SEQ ID NO: 513428 - RNA, 19 nt, Artificial Sequence
  Description of Artificial Sequence: Synthetic oligonucleotide
agcuauagguuuaccacug

SEQ ID NO: 513429 - RNA, 19 nt, Artificial Sequence
  Description of Artificial Sequence: Synthetic oligonucleotide
caauaagcaaugcggucuc

SEQ ID NO: 513430 - RNA, 19 nt, Artificial Sequence
  Description of Artificial Sequence: Synthetic oligonucleotide
augcggucucccuauaagu

SEQ ID NO: 513431 - RNA, 19 nt, Artificial Sequence
  Description of Artificial Sequence: Synthetic oligonucleotide
gucuggauauuaagaaccc

SEQ ID NO: 513432 - RNA, 19 nt, Artificial Sequence
  Description of Artificial Sequence: Synthetic oligonucleotide
aacagguguucgggcaaac

SEQ ID NO: 513433 - RNA, 19 nt, Artificial Sequence
  Description of Artificial Sequence: Synthetic oligonucleotide
agguuuaccacuggcauuu

SEQ ID NO: 513434 - RNA, 19 nt, Artificial Sequence
  Description of Artificial Sequence: Synthetic oligonucleotide
cucgaagaaagccuuaacu

SEQ ID NO: 513435 - RNA, 19 nt, Artificial Sequence
  Description of Artificial Sequence: Synthetic oligonucleotide
agaguagccccaagaacuc

SEQ ID NO: 513436 - RNA, 19 nt, Artificial Sequence
  Description of Artificial Sequence: Synthetic oligonucleotide
cuuaucgccgauguaguca

SEQ ID NO: 513437 - RNA, 19 nt, Artificial Sequence
  Description of Artificial Sequence: Synthetic oligonucleotide
ccacgugcuccuuaaaccg

SEQ ID NO: 513438 - RNA, 19 nt, Artificial Sequence
  Description of Artificial Sequence: Synthetic oligonucleotide
agcaaugcggucucccuau

SEQ ID NO: 513439 - RNA, 19 nt, Artificial Sequence
  Description of Artificial Sequence: Synthetic oligonucleotide
ugggcacgaguauaaucug

SEQ ID NO: 513440 - RNA, 19 nt, Artificial Sequence
  Description of Artificial Sequence: Synthetic oligonucleotide
caucaggauaugguuuccg

SEQ ID NO: 513441 - RNA, 19 nt, Artificial Sequence
  Description of Artificial Sequence: Synthetic oligonucleotide
uggcgugaugaagaacagg

SEQ ID NO: 513442 - RNA, 19 nt, Artificial Sequence
  Description of Artificial Sequence: Synthetic oligonucleotide
ucaagacuacauucaucuc

SEQ ID NO: 513443 - RNA, 19 nt, Artificial Sequence
  Description of Artificial Sequence: Synthetic oligonucleotide
aagcaaugcggucucccua

SEQ ID NO: 513444 - RNA, 19 nt, Artificial Sequence
  Description of Artificial Sequence: Synthetic oligonucleotide
guaagauagacaggacuuc

SEQ ID NO: 513445 - RNA, 19 nt, Artificial Sequence
  Description of Artificial Sequence: Synthetic oligonucleotide
ccuuaaaccgacgacgggc

SEQ ID NO: 513446 - RNA, 19 nt, Artificial Sequence
  Description of Artificial Sequence: Synthetic oligonucleotide
guuugugaagcuuuagcau

SEQ ID NO: 513447 - RNA, 19 nt, Artificial Sequence
  Description of Artificial Sequence: Synthetic oligonucleotide
acacaccgucuuuugaccu

SEQ ID NO: 513448 - RNA, 19 nt, Artificial Sequence
  Description of Artificial Sequence: Synthetic oligonucleotide
ggcgugaugaagaacagga

SEQ ID NO: 513449 - RNA, 19 nt, Artificial Sequence
  Description of Artificial Sequence: Synthetic oligonucleotide
cauaugguccacuggcaca

SEQ ID NO: 513450 - RNA, 19 nt, Artificial Sequence
  Description of Artificial Sequence: Synthetic oligonucleotide
gaugccugguaauaaacuu

SEQ ID NO: 513451 - RNA, 19 nt, Artificial Sequence
  Description of Artificial Sequence: Synthetic oligonucleotide
auaugcccugcuuuuccca

SEQ ID NO: 513452 - RNA, 19 nt, Artificial Sequence
  Description of Artificial Sequence: Synthetic oligonucleotide
gaguccagauaucguacuc

SEQ ID NO: 513453 - RNA, 19 nt, Artificial Sequence
  Description of Artificial Sequence: Synthetic oligonucleotide
uuccugggcacgaguauaa

SEQ ID NO: 513454 - RNA, 19 nt, Artificial Sequence
  Description of Artificial Sequence: Synthetic oligonucleotide
aaaccgacgacgggcuucu

SEQ ID NO: 513455 - RNA, 19 nt, Artificial Sequence
  Description of Artificial Sequence: Synthetic oligonucleotide
guuaucuaaggcgucaagu

SEQ ID NO: 513456 - RNA, 19 nt, Artificial Sequence
  Description of Artificial Sequence: Synthetic oligonucleotide
cauugaaguagucuuuaua

SEQ ID NO: 513457 - RNA, 19 nt, Artificial Sequence
  Description of Artificial Sequence: Synthetic oligonucleotide
agcuuuagcauaauaucua

SEQ ID NO: 513458 - RNA, 19 nt, Artificial Sequence
  Description of Artificial Sequence: Synthetic oligonucleotide
uacauucauguuugauaaa

SEQ ID NO: 513459 - RNA, 19 nt, Artificial Sequence
  Description of Artificial Sequence: Synthetic oligonucleotide
acagugcuaaugauuccag

SEQ ID NO: 513460 - RNA, 19 nt, Artificial Sequence
  Description of Artificial Sequence: Synthetic oligonucleotide
uaaaccgacgacgggcuuc

SEQ ID NO: 513461 - RNA, 19 nt, Artificial Sequence
  Description of Artificial Sequence: Synthetic oligonucleotide
ccagguauucaucacagca

SEQ ID NO: 513462 - RNA, 19 nt, Artificial Sequence
  Description of Artificial Sequence: Synthetic oligonucleotide
uaucgauuauaaagcucuu

SEQ ID NO: 513463 - RNA, 19 nt, Artificial Sequence
  Description of Artificial Sequence: Synthetic oligonucleotide
agaaacaaacugaguccag

SEQ ID NO: 513464 - RNA, 19 nt, Artificial Sequence
  Description of Artificial Sequence: Synthetic oligonucleotide
cagaugaguccaccauucc

SEQ ID NO: 513465 - RNA, 19 nt, Artificial Sequence
  Description of Artificial Sequence: Synthetic oligonucleotide
uaucuaaggugcugccauc

SEQ ID NO: 513466 - RNA, 19 nt, Artificial Sequence
  Description of Artificial Sequence: Synthetic oligonucleotide
agugcaucuagaugaccuu

SEQ ID NO: 513467 - RNA, 19 nt, Artificial Sequence
  Description of Artificial Sequence: Synthetic oligonucleotide
caguaagauagacaggacu

SEQ ID NO: 513468 - RNA, 19 nt, Artificial Sequence
  Description of Artificial Sequence: Synthetic oligonucleotide
gggaucuucacuaguugag

SEQ ID NO: 513469 - RNA, 19 nt, Artificial Sequence
  Description of Artificial Sequence: Synthetic oligonucleotide
ugaaucaauucaggugaaa

SEQ ID NO: 513470 - RNA, 19 nt, Artificial Sequence
  Description of Artificial Sequence: Synthetic oligonucleotide
gccgauguagucauguagc

SEQ ID NO: 513471 - RNA, 19 nt, Artificial Sequence
  Description of Artificial Sequence: Synthetic oligonucleotide
uagguuuaccacuggcauu

SEQ ID NO: 513472 - RNA, 19 nt, Artificial Sequence
  Description of Artificial Sequence: Synthetic oligonucleotide
ugccaccagauacguagac

SEQ ID NO: 513473 - RNA, 19 nt, Artificial Sequence
  Description of Artificial Sequence: Synthetic oligonucleotide
aucgccgauguagucaugu

SEQ ID NO: 513474 - RNA, 19 nt, Artificial Sequence
  Description of Artificial Sequence: Synthetic oligonucleotide
acgugcuccuuaaaccgac

SEQ ID NO: 513475 - RNA, 19 nt, Artificial Sequence
  Description of Artificial Sequence: Synthetic oligonucleotide
cacuaguugagauugugau

SEQ ID NO: 513476 - RNA, 19 nt, Artificial Sequence
  Description of Artificial Sequence: Synthetic oligonucleotide
guggacguaccucuucuga

SEQ ID NO: 513477 - RNA, 19 nt, Artificial Sequence
  Description of Artificial Sequence: Synthetic oligonucleotide
ugccauaugcccugcuuuu

SEQ ID NO: 513478 - RNA, 19 nt, Artificial Sequence
  Description of Artificial Sequence: Synthetic oligonucleotide
guaauccaagucgauccac

SEQ ID NO: 513479 - RNA, 19 nt, Artificial Sequence
  Description of Artificial Sequence: Synthetic oligonucleotide
cuggcgugaugaagaacag

SEQ ID NO: 513480 - RNA, 19 nt, Artificial Sequence
  Description of Artificial Sequence: Synthetic oligonucleotide
guuuagcuuggcugggauc

SEQ ID NO: 513481 - RNA, 19 nt, Artificial Sequence
  Description of Artificial Sequence: Synthetic oligonucleotide
agaggauaaggaacauuga

SEQ ID NO: 513482 - RNA, 19 nt, Artificial Sequence
  Description of Artificial Sequence: Synthetic oligonucleotide
aagauagacaggacuucuu

SEQ ID NO: 513483 - RNA, 19 nt, Artificial Sequence
  Description of Artificial Sequence: Synthetic oligonucleotide
gcuauagguuuaccacugg

SEQ ID NO: 513484 - RNA, 19 nt, Artificial Sequence
  Description of Artificial Sequence: Synthetic oligonucleotide
aguguccuguggacguacc

SEQ ID NO: 513485 - RNA, 19 nt, Artificial Sequence
  Description of Artificial Sequence: Synthetic oligonucleotide
guaccucuucugaaagugc

SEQ ID NO: 513486 - RNA, 19 nt, Artificial Sequence
  Description of Artificial Sequence: Synthetic oligonucleotide
acggaugccugguaauaaa

SEQ ID NO: 513487 - RNA, 19 nt, Artificial Sequence
  Description of Artificial Sequence: Synthetic oligonucleotide
ggaacaaccagaacgagau

SEQ ID NO: 513488 - RNA, 19 nt, Artificial Sequence
  Description of Artificial Sequence: Synthetic oligonucleotide
cuuaaaccgacgacgggcu

SEQ ID NO: 513489 - RNA, 19 nt, Artificial Sequence
  Description of Artificial Sequence: Synthetic oligonucleotide
acguaccucuucugaaagu

SEQ ID NO: 513490 - RNA, 19 nt, Artificial Sequence
  Description of Artificial Sequence: Synthetic oligonucleotide
acaaccagagcaacccacu

SEQ ID NO: 513491 - RNA, 19 nt, Artificial Sequence
  Description of Artificial Sequence: Synthetic oligonucleotide
ccgacgacgggcuucuucc

SEQ ID NO: 513492 - RNA, 19 nt, Artificial Sequence
  Description of Artificial Sequence: Synthetic oligonucleotide
gguccgauaaaacccaacu

SEQ ID NO: 513493 - RNA, 19 nt, Artificial Sequence
  Description of Artificial Sequence: Synthetic oligonucleotide
aacccucccugguaucgau

SEQ ID NO: 513494 - RNA, 19 nt, Artificial Sequence
  Description of Artificial Sequence: Synthetic oligonucleotide
gucauguagcauucggaua

SEQ ID NO: 513495 - RNA, 19 nt, Artificial Sequence
  Description of Artificial Sequence: Synthetic oligonucleotide
agcauucggauaacagaug

SEQ ID NO: 513496 - RNA, 19 nt, Artificial Sequence
  Description of Artificial Sequence: Synthetic oligonucleotide
aggaugcaaagccuucauu

SEQ ID NO: 513497 - RNA, 19 nt, Artificial Sequence
  Description of Artificial Sequence: Synthetic oligonucleotide
gauggauggcccacacuga

SEQ ID NO: 513498 - RNA, 19 nt, Artificial Sequence
  Description of Artificial Sequence: Synthetic oligonucleotide
aucucucgcuuauccauua

SEQ ID NO: 513499 - RNA, 19 nt, Artificial Sequence
  Description of Artificial Sequence: Synthetic oligonucleotide
cagauaucguacucuggaa

SEQ ID NO: 513500 - RNA, 19 nt, Artificial Sequence
  Description of Artificial Sequence: Synthetic oligonucleotide
cacccacaacaaaugccac

SEQ ID NO: 513501 - RNA, 19 nt, Artificial Sequence
  Description of Artificial Sequence: Synthetic oligonucleotide
agguuacagcucaggucgc

SEQ ID NO: 513502 - RNA, 19 nt, Artificial Sequence
  Description of Artificial Sequence: Synthetic oligonucleotide
auguugccauaugcccugc

SEQ ID NO: 513503 - RNA, 19 nt, Artificial Sequence
  Description of Artificial Sequence: Synthetic oligonucleotide
ucacggaugccugguaaua

SEQ ID NO: 513504 - RNA, 19 nt, Artificial Sequence
  Description of Artificial Sequence: Synthetic oligonucleotide
uuaaaccgacgacgggcuu

SEQ ID NO: 513505 - RNA, 19 nt, Artificial Sequence
  Description of Artificial Sequence: Synthetic oligonucleotide
accuuugcuauacgauaua

SEQ ID NO: 513506 - RNA, 19 nt, Artificial Sequence
  Description of Artificial Sequence: Synthetic oligonucleotide
gcacgaguauaaucugcag

SEQ ID NO: 513507 - RNA, 19 nt, Artificial Sequence
  Description of Artificial Sequence: Synthetic oligonucleotide
gguacucuugaauguuauc

SEQ ID NO: 513508 - RNA, 19 nt, Artificial Sequence
  Description of Artificial Sequence: Synthetic oligonucleotide
caucucgcuuuagccaagc

SEQ ID NO: 513509 - RNA, 19 nt, Artificial Sequence
  Description of Artificial Sequence: Synthetic oligonucleotide
aucucgcuuuagccaagca

SEQ ID NO: 513510 - RNA, 19 nt, Artificial Sequence
  Description of Artificial Sequence: Synthetic oligonucleotide
gcuguacuggguccgauaa

SEQ ID NO: 513511 - RNA, 19 nt, Artificial Sequence
  Description of Artificial Sequence: Synthetic oligonucleotide
ugggcgaguucauguccca

SEQ ID NO: 513512 - RNA, 19 nt, Artificial Sequence
  Description of Artificial Sequence: Synthetic oligonucleotide
cauguagcauucggauaac

SEQ ID NO: 513513 - RNA, 19 nt, Artificial Sequence
  Description of Artificial Sequence: Synthetic oligonucleotide
cgauaaaacccaacuguuc

SEQ ID NO: 513514 - RNA, 19 nt, Artificial Sequence
  Description of Artificial Sequence: Synthetic oligonucleotide
ggcacgaguauaaucugca

SEQ ID NO: 513515 - RNA, 19 nt, Artificial Sequence
  Description of Artificial Sequence: Synthetic oligonucleotide
uaacagguguucgggcaaa

SEQ ID NO: 513516 - RNA, 19 nt, Artificial Sequence
  Description of Artificial Sequence: Synthetic oligonucleotide
uggguccgauaaaacccaa

SEQ ID NO: 513517 - RNA, 19 nt, Artificial Sequence
  Description of Artificial Sequence: Synthetic oligonucleotide
aucaagcgcaaaacccuca

SEQ ID NO: 513518 - RNA, 19 nt, Artificial Sequence
  Description of Artificial Sequence: Synthetic oligonucleotide
ccuauaggugaaaagacau

SEQ ID NO: 513519 - RNA, 19 nt, Artificial Sequence
  Description of Artificial Sequence: Synthetic oligonucleotide
cucuacagugcuaaugauu

SEQ ID NO: 513520 - RNA, 19 nt, Artificial Sequence
  Description of Artificial Sequence: Synthetic oligonucleotide
guuacagcucaggucgcuc

SEQ ID NO: 513521 - RNA, 19 nt, Artificial Sequence
  Description of Artificial Sequence: Synthetic oligonucleotide
uaucagcaucucgcuuuag

SEQ ID NO: 513522 - RNA, 19 nt, Artificial Sequence
  Description of Artificial Sequence: Synthetic oligonucleotide
guacuggguccgauaaaac

SEQ ID NO: 513523 - RNA, 19 nt, Artificial Sequence
  Description of Artificial Sequence: Synthetic oligonucleotide
ggaucuucacuaguugaga

SEQ ID NO: 513524 - RNA, 19 nt, Artificial Sequence
  Description of Artificial Sequence: Synthetic oligonucleotide
cucgcuuauccauuaguau

SEQ ID NO: 513525 - RNA, 19 nt, Artificial Sequence
  Description of Artificial Sequence: Synthetic oligonucleotide
gcaccuuugcuauacgaua

SEQ ID NO: 513526 - RNA, 19 nt, Artificial Sequence
  Description of Artificial Sequence: Synthetic oligonucleotide
agauugugauaggaaccau

SEQ ID NO: 513527 - RNA, 19 nt, Artificial Sequence
  Description of Artificial Sequence: Synthetic oligonucleotide
cguaccucuucugaaagug

SEQ ID NO: 513528 - RNA, 19 nt, Artificial Sequence
  Description of Artificial Sequence: Synthetic oligonucleotide
cacgugcuccuuaaaccga

SEQ ID NO: 513529 - RNA, 19 nt, Artificial Sequence
  Description of Artificial Sequence: Synthetic oligonucleotide
agagggaaucccauuuguu

SEQ ID NO: 513530 - RNA, 19 nt, Artificial Sequence
  Description of Artificial Sequence: Synthetic oligonucleotide
uuuacccauuggucugguu

SEQ ID NO: 513531 - RNA, 19 nt, Artificial Sequence
  Description of Artificial Sequence: Synthetic oligonucleotide
gguguucgggcaaacuuca

SEQ ID NO: 513532 - RNA, 19 nt, Artificial Sequence
  Description of Artificial Sequence: Synthetic oligonucleotide
cauucaucucucgcuuauc

SEQ ID NO: 513533 - RNA, 19 nt, Artificial Sequence
  Description of Artificial Sequence: Synthetic oligonucleotide
ucaccgacauaugguccac

SEQ ID NO: 513534 - RNA, 19 nt, Artificial Sequence
  Description of Artificial Sequence: Synthetic oligonucleotide
gcgcaaaacccucaacaga

SEQ ID NO: 513535 - RNA, 19 nt, Artificial Sequence
  Description of Artificial Sequence: Synthetic oligonucleotide
uaucgccgauguagucaug

SEQ ID NO: 513536 - RNA, 19 nt, Artificial Sequence
  Description of Artificial Sequence: Synthetic oligonucleotide
caccuuugcuauacgauau

SEQ ID NO: 513537 - RNA, 19 nt, Artificial Sequence
  Description of Artificial Sequence: Synthetic oligonucleotide
cccacaacaaaugccacca

SEQ ID NO: 513538 - RNA, 19 nt, Artificial Sequence
  Description of Artificial Sequence: Synthetic oligonucleotide
cuuaacuucuccagccauu

SEQ ID NO: 513539 - RNA, 19 nt, Artificial Sequence
  Description of Artificial Sequence: Synthetic oligonucleotide
gggcacgaguauaaucugc

SEQ ID NO: 513540 - RNA, 19 nt, Artificial Sequence
  Description of Artificial Sequence: Synthetic oligonucleotide
gccaacugggguguaaaca

SEQ ID NO: 513541 - RNA, 19 nt, Artificial Sequence
  Description of Artificial Sequence: Synthetic oligonucleotide
ccaauuacugacacagugu

SEQ ID NO: 513542 - RNA, 19 nt, Artificial Sequence
  Description of Artificial Sequence: Synthetic oligonucleotide
ucgccgauguagucaugua

SEQ ID NO: 513543 - RNA, 19 nt, Artificial Sequence
  Description of Artificial Sequence: Synthetic oligonucleotide
caccaagccccucaggagu

SEQ ID NO: 513544 - RNA, 19 nt, Artificial Sequence
  Description of Artificial Sequence: Synthetic oligonucleotide
gcggaggcuucacacugag

SEQ ID NO: 513545 - RNA, 19 nt, Artificial Sequence
  Description of Artificial Sequence: Synthetic oligonucleotide
gacucucgaagaaagccuu

SEQ ID NO: 513546 - RNA, 19 nt, Artificial Sequence
  Description of Artificial Sequence: Synthetic oligonucleotide
gcuauacgauauagcauca

SEQ ID NO: 513547 - RNA, 19 nt, Artificial Sequence
  Description of Artificial Sequence: Synthetic oligonucleotide
cucucgcuuauccauuagu

SEQ ID NO: 513548 - RNA, 19 nt, Artificial Sequence
  Description of Artificial Sequence: Synthetic oligonucleotide
gagcaacccacuggcguga

SEQ ID NO: 513549 - RNA, 19 nt, Artificial Sequence
  Description of Artificial Sequence: Synthetic oligonucleotide
uggcccacacugacuucaa

SEQ ID NO: 513550 - RNA, 19 nt, Artificial Sequence
  Description of Artificial Sequence: Synthetic oligonucleotide
cgccgauguagucauguag

SEQ ID NO: 513551 - RNA, 19 nt, Artificial Sequence
  Description of Artificial Sequence: Synthetic oligonucleotide
caaugcggucucccuauaa

SEQ ID NO: 513552 - RNA, 19 nt, Artificial Sequence
  Description of Artificial Sequence: Synthetic oligonucleotide
gaacccucccugguaucga

SEQ ID NO: 513553 - RNA, 19 nt, Artificial Sequence
  Description of Artificial Sequence: Synthetic oligonucleotide
accgucuuuugaccuuguu

SEQ ID NO: 513554 - RNA, 19 nt, Artificial Sequence
  Description of Artificial Sequence: Synthetic oligonucleotide
ggcucuccgcuggaggagg

SEQ ID NO: 513555 - RNA, 19 nt, Artificial Sequence
  Description of Artificial Sequence: Synthetic oligonucleotide
caaccucaagugcaaauuu

SEQ ID NO: 513556 - RNA, 19 nt, Artificial Sequence
  Description of Artificial Sequence: Synthetic oligonucleotide
gcucaggucgcuccauaca

SEQ ID NO: 513557 - RNA, 19 nt, Artificial Sequence
  Description of Artificial Sequence: Synthetic oligonucleotide
cagguguucgggcaaacuu

SEQ ID NO: 513558 - RNA, 19 nt, Artificial Sequence
  Description of Artificial Sequence: Synthetic oligonucleotide
ccgauguagucauguagca

SEQ ID NO: 513559 - RNA, 19 nt, Artificial Sequence
  Description of Artificial Sequence: Synthetic oligonucleotide
cuaaggcgucaaguuccug

SEQ ID NO: 513560 - RNA, 19 nt, Artificial Sequence
  Description of Artificial Sequence: Synthetic oligonucleotide
cagcagcuauagguuuacc

SEQ ID NO: 513561 - RNA, 19 nt, Artificial Sequence
  Description of Artificial Sequence: Synthetic oligonucleotide
ucgcuccauacaguauaau

SEQ ID NO: 513562 - RNA, 19 nt, Artificial Sequence
  Description of Artificial Sequence: Synthetic oligonucleotide
ccuuaucgccgauguaguc

SEQ ID NO: 513563 - RNA, 19 nt, Artificial Sequence
  Description of Artificial Sequence: Synthetic oligonucleotide
cacggaugccugguaauaa

SEQ ID NO: 513564 - RNA, 19 nt, Artificial Sequence
  Description of Artificial Sequence: Synthetic oligonucleotide
ggauaacagaugcaccuuu

SEQ ID NO: 513565 - RNA, 19 nt, Artificial Sequence
  Description of Artificial Sequence: Synthetic oligonucleotide
ggauaugguuuccggucaa

SEQ ID NO: 513566 - RNA, 19 nt, Artificial Sequence
  Description of Artificial Sequence: Synthetic oligonucleotide
gagacagccucagcacucu

SEQ ID NO: 513567 - RNA, 19 nt, Artificial Sequence
  Description of Artificial Sequence: Synthetic oligonucleotide
gauaugguuuccggucaau

SEQ ID NO: 513568 - RNA, 19 nt, Artificial Sequence
  Description of Artificial Sequence: Synthetic oligonucleotide
gucacggaugccugguaau

SEQ ID NO: 513569 - RNA, 19 nt, Artificial Sequence
  Description of Artificial Sequence: Synthetic oligonucleotide
uccugggcacgaguauaau

SEQ ID NO: 513570 - RNA, 19 nt, Artificial Sequence
  Description of Artificial Sequence: Synthetic oligonucleotide
ggguugggaggcucuccgc

SEQ ID NO: 513571 - RNA, 19 nt, Artificial Sequence
  Description of Artificial Sequence: Synthetic oligonucleotide
acccaacuguucccagauu

SEQ ID NO: 513572 - RNA, 19 nt, Artificial Sequence
  Description of Artificial Sequence: Synthetic oligonucleotide
ggucucccuauaaguaaca

SEQ ID NO: 513573 - RNA, 19 nt, Artificial Sequence
  Description of Artificial Sequence: Synthetic oligonucleotide
gaguagccccaagaacucu

SEQ ID NO: 513574 - RNA, 19 nt, Artificial Sequence
  Description of Artificial Sequence: Synthetic oligonucleotide
ggguccgauaaaacccaac

SEQ ID NO: 513575 - RNA, 19 nt, Artificial Sequence
  Description of Artificial Sequence: Synthetic oligonucleotide
caucucucgcuuauccauu

SEQ ID NO: 513576 - RNA, 19 nt, Artificial Sequence
  Description of Artificial Sequence: Synthetic oligonucleotide
guguucgggcaaacuucac

SEQ ID NO: 513577 - RNA, 19 nt, Artificial Sequence
  Description of Artificial Sequence: Synthetic oligonucleotide
gguauucaucacagcagcu

SEQ ID NO: 513578 - RNA, 19 nt, Artificial Sequence
  Description of Artificial Sequence: Synthetic oligonucleotide
aggucgcuccauacaguau

SEQ ID NO: 513579 - RNA, 19 nt, Artificial Sequence
  Description of Artificial Sequence: Synthetic oligonucleotide
ggcuguuaucuaaggcguc

SEQ ID NO: 513580 - RNA, 19 nt, Artificial Sequence
  Description of Artificial Sequence: Synthetic oligonucleotide
ggugggcggaggcuucaca

SEQ ID NO: 513581 - RNA, 19 nt, Artificial Sequence
  Description of Artificial Sequence: Synthetic oligonucleotide
ccucaggagugcaucuaga

SEQ ID NO: 513582 - RNA, 19 nt, Artificial Sequence
  Description of Artificial Sequence: Synthetic oligonucleotide
gcauaauaucuaaggugcu

SEQ ID NO: 513583 - RNA, 19 nt, Artificial Sequence
  Description of Artificial Sequence: Synthetic oligonucleotide
gcaucucgcuuuagccaag

SEQ ID NO: 513584 - RNA, 19 nt, Artificial Sequence
  Description of Artificial Sequence: Synthetic oligonucleotide
ccuuccacgugcuccuuaa

SEQ ID NO: 513585 - RNA, 19 nt, Artificial Sequence
  Description of Artificial Sequence: Synthetic oligonucleotide
gccauccccaugcuuuaaa

SEQ ID NO: 513586 - RNA, 19 nt, Artificial Sequence
  Description of Artificial Sequence: Synthetic oligonucleotide
cagauggauggcccacacu

SEQ ID NO: 513587 - RNA, 19 nt, Artificial Sequence
  Description of Artificial Sequence: Synthetic oligonucleotide
ccaaaccauugaugggcga

SEQ ID NO: 513588 - RNA, 19 nt, Artificial Sequence
  Description of Artificial Sequence: Synthetic oligonucleotide
cgcuuauccauuaguauuu

SEQ ID NO: 513589 - RNA, 19 nt, Artificial Sequence
  Description of Artificial Sequence: Synthetic oligonucleotide
gggcgaguucaugucccac

SEQ ID NO: 513590 - RNA, 19 nt, Artificial Sequence
  Description of Artificial Sequence: Synthetic oligonucleotide
gguagaggauaaggaacau

SEQ ID NO: 513591 - RNA, 19 nt, Artificial Sequence
  Description of Artificial Sequence: Synthetic oligonucleotide
gguuacagcucaggucgcu

SEQ ID NO: 513592 - RNA, 19 nt, Artificial Sequence
  Description of Artificial Sequence: Synthetic oligonucleotide
acccucccugguaucgauu

SEQ ID NO: 513593 - RNA, 19 nt, Artificial Sequence
  Description of Artificial Sequence: Synthetic oligonucleotide
cccugguaucgauuauaaa

SEQ ID NO: 513594 - RNA, 19 nt, Artificial Sequence
  Description of Artificial Sequence: Synthetic oligonucleotide
ccacuggcgugaugaagaa

SEQ ID NO: 513595 - RNA, 19 nt, Artificial Sequence
  Description of Artificial Sequence: Synthetic oligonucleotide
caggugggcggaggcuuca

SEQ ID NO: 513596 - RNA, 19 nt, Artificial Sequence
  Description of Artificial Sequence: Synthetic oligonucleotide
cgaguauaaucugcagaaa

SEQ ID NO: 513597 - RNA, 19 nt, Artificial Sequence
  Description of Artificial Sequence: Synthetic oligonucleotide
gcaaugcggucucccuaua

SEQ ID NO: 513598 - RNA, 19 nt, Artificial Sequence
  Description of Artificial Sequence: Synthetic oligonucleotide
caccgucuuuugaccuugu

SEQ ID NO: 513599 - RNA, 19 nt, Artificial Sequence
  Description of Artificial Sequence: Synthetic oligonucleotide
ccucuacagugcuaaugau

SEQ ID NO: 513600 - RNA, 19 nt, Artificial Sequence
  Description of Artificial Sequence: Synthetic oligonucleotide
cuuugccaacuggggugua

SEQ ID NO: 513601 - RNA, 19 nt, Artificial Sequence
  Description of Artificial Sequence: Synthetic oligonucleotide
cucuccgcuggaggaggua

SEQ ID NO: 513602 - RNA, 19 nt, Artificial Sequence
  Description of Artificial Sequence: Synthetic oligonucleotide
aaccgacgacgggcuucuu

SEQ ID NO: 513603 - RNA, 19 nt, Artificial Sequence
  Description of Artificial Sequence: Synthetic oligonucleotide
caccgacauaugguccacu

SEQ ID NO: 513604 - RNA, 19 nt, Artificial Sequence
  Description of Artificial Sequence: Synthetic oligonucleotide
cgauguagucauguagcau

SEQ ID NO: 513605 - RNA, 19 nt, Artificial Sequence
  Description of Artificial Sequence: Synthetic oligonucleotide
gcucuccgcuggaggaggu

SEQ ID NO: 513606 - RNA, 19 nt, Artificial Sequence
  Description of Artificial Sequence: Synthetic oligonucleotide
cggauaacagaugcaccuu

SEQ ID NO: 513607 - RNA, 19 nt, Artificial Sequence
  Description of Artificial Sequence: Synthetic oligonucleotide
aauuauuaaaauaccgacc

SEQ ID NO: 513608 - RNA, 19 nt, Artificial Sequence
  Description of Artificial Sequence: Synthetic oligonucleotide
uaaaauaccgaccaggacu

SEQ ID NO: 513609 - RNA, 19 nt, Artificial Sequence
  Description of Artificial Sequence: Synthetic oligonucleotide
aggacuacagcccugaccc

SEQ ID NO: 513610 - RNA, 19 nt, Artificial Sequence
  Description of Artificial Sequence: Synthetic oligonucleotide
aaugcuuccggaucauucc

SEQ ID NO: 513611 - RNA, 19 nt, Artificial Sequence
  Description of Artificial Sequence: Synthetic oligonucleotide
aaugagaccauaacgacgg

SEQ ID NO: 513612 - RNA, 19 nt, Artificial Sequence
  Description of Artificial Sequence: Synthetic oligonucleotide
auacugaucauaauuaccc

SEQ ID NO: 513613 - RNA, 19 nt, Artificial Sequence
  Description of Artificial Sequence: Synthetic oligonucleotide
aagagcaacucucauccgc

SEQ ID NO: 513614 - RNA, 19 nt, Artificial Sequence
  Description of Artificial Sequence: Synthetic oligonucleotide
gauuuuaccacacgguggg

SEQ ID NO: 513615 - RNA, 19 nt, Artificial Sequence
  Description of Artificial Sequence: Synthetic oligonucleotide
aauucuagauuauuguaga

SEQ ID NO: 513616 - RNA, 19 nt, Artificial Sequence
  Description of Artificial Sequence: Synthetic oligonucleotide
auaauuacccguguaauac

SEQ ID NO: 513617 - RNA, 19 nt, Artificial Sequence
  Description of Artificial Sequence: Synthetic oligonucleotide
auugguacagacuccauuc

SEQ ID NO: 513618 - RNA, 19 nt, Artificial Sequence
  Description of Artificial Sequence: Synthetic oligonucleotide
aaauucuagauuauuguag

SEQ ID NO: 513619 - RNA, 19 nt, Artificial Sequence
  Description of Artificial Sequence: Synthetic oligonucleotide
aaaagaguggacuucccug

SEQ ID NO: 513620 - RNA, 19 nt, Artificial Sequence
  Description of Artificial Sequence: Synthetic oligonucleotide
augggaaacggacaugugc

SEQ ID NO: 513621 - RNA, 19 nt, Artificial Sequence
  Description of Artificial Sequence: Synthetic oligonucleotide
uuaaguuccucuuccagcc

SEQ ID NO: 513622 - RNA, 19 nt, Artificial Sequence
  Description of Artificial Sequence: Synthetic oligonucleotide
uccaucacaacacuccaag

SEQ ID NO: 513623 - RNA, 19 nt, Artificial Sequence
  Description of Artificial Sequence: Synthetic oligonucleotide
ugacacaaggaccaggaug

SEQ ID NO: 513624 - RNA, 19 nt, Artificial Sequence
  Description of Artificial Sequence: Synthetic oligonucleotide
cuuggguuaacccagggac

SEQ ID NO: 513625 - RNA, 19 nt, Artificial Sequence
  Description of Artificial Sequence: Synthetic oligonucleotide
uuugaggugcuccuuguag

SEQ ID NO: 513626 - RNA, 19 nt, Artificial Sequence
  Description of Artificial Sequence: Synthetic oligonucleotide
caucauauacuccaauggc

SEQ ID NO: 513627 - RNA, 19 nt, Artificial Sequence
  Description of Artificial Sequence: Synthetic oligonucleotide
auccucgugagcuaaccgc

SEQ ID NO: 513628 - RNA, 19 nt, Artificial Sequence
  Description of Artificial Sequence: Synthetic oligonucleotide
uaacccaagacucugugaa

SEQ ID NO: 513629 - RNA, 19 nt, Artificial Sequence
  Description of Artificial Sequence: Synthetic oligonucleotide
caaugagaccauaacgacg

SEQ ID NO: 513630 - RNA, 19 nt, Artificial Sequence
  Description of Artificial Sequence: Synthetic oligonucleotide
aucauauacuccaauggcg

SEQ ID NO: 513631 - RNA, 19 nt, Artificial Sequence
  Description of Artificial Sequence: Synthetic oligonucleotide
accgaccaggacuacagcc

SEQ ID NO: 513632 - RNA, 19 nt, Artificial Sequence
  Description of Artificial Sequence: Synthetic oligonucleotide
agcguuuucucuuugcucu

SEQ ID NO: 513633 - RNA, 19 nt, Artificial Sequence
  Description of Artificial Sequence: Synthetic oligonucleotide
augagaaugcuuccggauc

SEQ ID NO: 513634 - RNA, 19 nt, Artificial Sequence
  Description of Artificial Sequence: Synthetic oligonucleotide
cugacuagcaucauaccac

SEQ ID NO: 513635 - RNA, 19 nt, Artificial Sequence
  Description of Artificial Sequence: Synthetic oligonucleotide
ugggaaacggacaugugcu

SEQ ID NO: 513636 - RNA, 19 nt, Artificial Sequence
  Description of Artificial Sequence: Synthetic oligonucleotide
aagggccgaauaaagaggg

SEQ ID NO: 513637 - RNA, 19 nt, Artificial Sequence
  Description of Artificial Sequence: Synthetic oligonucleotide
cuuccagccgcucauagag

SEQ ID NO: 513638 - RNA, 19 nt, Artificial Sequence
  Description of Artificial Sequence: Synthetic oligonucleotide
aauggcgaaagguccaggu

SEQ ID NO: 513639 - RNA, 19 nt, Artificial Sequence
  Description of Artificial Sequence: Synthetic oligonucleotide
aaccagaagcaauaaggga

SEQ ID NO: 513640 - RNA, 19 nt, Artificial Sequence
  Description of Artificial Sequence: Synthetic oligonucleotide
agcaauaagggauggggug

SEQ ID NO: 513641 - RNA, 19 nt, Artificial Sequence
  Description of Artificial Sequence: Synthetic oligonucleotide
cacggugggaaauaaaaug

SEQ ID NO: 513642 - RNA, 19 nt, Artificial Sequence
  Description of Artificial Sequence: Synthetic oligonucleotide
cuaucuugacaugagaaug

SEQ ID NO: 513643 - RNA, 19 nt, Artificial Sequence
  Description of Artificial Sequence: Synthetic oligonucleotide
auaacgacggccugaguug

SEQ ID NO: 513644 - RNA, 19 nt, Artificial Sequence
  Description of Artificial Sequence: Synthetic oligonucleotide
caugaagggccgaauaaag

SEQ ID NO: 513645 - RNA, 19 nt, Artificial Sequence
  Description of Artificial Sequence: Synthetic oligonucleotide
augguaacgcccuaucuug

SEQ ID NO: 513646 - RNA, 19 nt, Artificial Sequence
  Description of Artificial Sequence: Synthetic oligonucleotide
cucacagacccaaaucucc

SEQ ID NO: 513647 - RNA, 19 nt, Artificial Sequence
  Description of Artificial Sequence: Synthetic oligonucleotide
aucauaauuacccguguaa

SEQ ID NO: 513648 - RNA, 19 nt, Artificial Sequence
  Description of Artificial Sequence: Synthetic oligonucleotide
auaucucccaaugaucuuc

SEQ ID NO: 513649 - RNA, 19 nt, Artificial Sequence
  Description of Artificial Sequence: Synthetic oligonucleotide
ucccaguaaggccauaucu

SEQ ID NO: 513650 - RNA, 19 nt, Artificial Sequence
  Description of Artificial Sequence: Synthetic oligonucleotide
ggaucauuccaucuguggg

SEQ ID NO: 513651 - RNA, 19 nt, Artificial Sequence
  Description of Artificial Sequence: Synthetic oligonucleotide
ugugaaacccagcccaugu

SEQ ID NO: 513652 - RNA, 19 nt, Artificial Sequence
  Description of Artificial Sequence: Synthetic oligonucleotide
uggucagcaaaucaacuuc

SEQ ID NO: 513653 - RNA, 19 nt, Artificial Sequence
  Description of Artificial Sequence: Synthetic oligonucleotide
agugaaaccucuucaucug

SEQ ID NO: 513654 - RNA, 19 nt, Artificial Sequence
  Description of Artificial Sequence: Synthetic oligonucleotide
agcaugugaggguucugcc

SEQ ID NO: 513655 - RNA, 19 nt, Artificial Sequence
  Description of Artificial Sequence: Synthetic oligonucleotide
aaacggacaugugcugucc

SEQ ID NO: 513656 - RNA, 19 nt, Artificial Sequence
  Description of Artificial Sequence: Synthetic oligonucleotide
gaagggccgaauaaagagg

SEQ ID NO: 513657 - RNA, 19 nt, Artificial Sequence
  Description of Artificial Sequence: Synthetic oligonucleotide
ugacuagcaucauaccacc

SEQ ID NO: 513658 - RNA, 19 nt, Artificial Sequence
  Description of Artificial Sequence: Synthetic oligonucleotide
ucacaacccuuucuguuag

SEQ ID NO: 513659 - RNA, 19 nt, Artificial Sequence
  Description of Artificial Sequence: Synthetic oligonucleotide
acccguguaauacuuaagu

SEQ ID NO: 513660 - RNA, 19 nt, Artificial Sequence
  Description of Artificial Sequence: Synthetic oligonucleotide
accauuagguccuaccaga

SEQ ID NO: 513661 - RNA, 19 nt, Artificial Sequence
  Description of Artificial Sequence: Synthetic oligonucleotide
agcucuugaccaugaaagg

SEQ ID NO: 513662 - RNA, 19 nt, Artificial Sequence
  Description of Artificial Sequence: Synthetic oligonucleotide
agggcucacacguuguggg

SEQ ID NO: 513663 - RNA, 19 nt, Artificial Sequence
  Description of Artificial Sequence: Synthetic oligonucleotide
gggaaugugacacaaggac

SEQ ID NO: 513664 - RNA, 19 nt, Artificial Sequence
  Description of Artificial Sequence: Synthetic oligonucleotide
ugagcuaaccgcucggccu

SEQ ID NO: 513665 - RNA, 19 nt, Artificial Sequence
  Description of Artificial Sequence: Synthetic oligonucleotide
agagcaacucucauccgcc

SEQ ID NO: 513666 - RNA, 19 nt, Artificial Sequence
  Description of Artificial Sequence: Synthetic oligonucleotide
aguaaggccauaucuccca

SEQ ID NO: 513667 - RNA, 19 nt, Artificial Sequence
  Description of Artificial Sequence: Synthetic oligonucleotide
cuccaauggcgaaaggucc

SEQ ID NO: 513668 - RNA, 19 nt, Artificial Sequence
  Description of Artificial Sequence: Synthetic oligonucleotide
agauuauuguagaugcaag

SEQ ID NO: 513669 - RNA, 19 nt, Artificial Sequence
  Description of Artificial Sequence: Synthetic oligonucleotide
ucauaccacccucaaacuc

SEQ ID NO: 513670 - RNA, 19 nt, Artificial Sequence
  Description of Artificial Sequence: Synthetic oligonucleotide
ugcaccauuagguccuacc

SEQ ID NO: 513671 - RNA, 19 nt, Artificial Sequence
  Description of Artificial Sequence: Synthetic oligonucleotide
ugauugguaggcucgucca

SEQ ID NO: 513672 - RNA, 19 nt, Artificial Sequence
  Description of Artificial Sequence: Synthetic oligonucleotide
ucucuuagggcaagguaac

SEQ ID NO: 513673 - RNA, 19 nt, Artificial Sequence
  Description of Artificial Sequence: Synthetic oligonucleotide
uguagcguuuucucuuugc

SEQ ID NO: 513674 - RNA, 19 nt, Artificial Sequence
  Description of Artificial Sequence: Synthetic oligonucleotide
caguauugcagcagugcgg

SEQ ID NO: 513675 - RNA, 19 nt, Artificial Sequence
  Description of Artificial Sequence: Synthetic oligonucleotide
uccgacagguuccggauug

SEQ ID NO: 513676 - RNA, 19 nt, Artificial Sequence
  Description of Artificial Sequence: Synthetic oligonucleotide
caggugauugguaggcucg

SEQ ID NO: 513677 - RNA, 19 nt, Artificial Sequence
  Description of Artificial Sequence: Synthetic oligonucleotide
aggccaaacacacucgaca

SEQ ID NO: 513678 - RNA, 19 nt, Artificial Sequence
  Description of Artificial Sequence: Synthetic oligonucleotide
acggccugaguugaguucc

SEQ ID NO: 513679 - RNA, 19 nt, Artificial Sequence
  Description of Artificial Sequence: Synthetic oligonucleotide
uaauuacccguguaauacu

SEQ ID NO: 513680 - RNA, 19 nt, Artificial Sequence
  Description of Artificial Sequence: Synthetic oligonucleotide
uauugguacagacuccauu

SEQ ID NO: 513681 - RNA, 19 nt, Artificial Sequence
  Description of Artificial Sequence: Synthetic oligonucleotide
ugggaaugugacacaagga

SEQ ID NO: 513682 - RNA, 19 nt, Artificial Sequence
  Description of Artificial Sequence: Synthetic oligonucleotide
ugaugguaacgcccuaucu

SEQ ID NO: 513683 - RNA, 19 nt, Artificial Sequence
  Description of Artificial Sequence: Synthetic oligonucleotide
ugcaagguccgucuuuugu

SEQ ID NO: 513684 - RNA, 19 nt, Artificial Sequence
  Description of Artificial Sequence: Synthetic oligonucleotide
gacuccauucagaaagucc

SEQ ID NO: 513685 - RNA, 19 nt, Artificial Sequence
  Description of Artificial Sequence: Synthetic oligonucleotide
gacacuucugcccauccga

SEQ ID NO: 513686 - RNA, 19 nt, Artificial Sequence
  Description of Artificial Sequence: Synthetic oligonucleotide
uuacccguguaauacuuaa

SEQ ID NO: 513687 - RNA, 19 nt, Artificial Sequence
  Description of Artificial Sequence: Synthetic oligonucleotide
acguucugcaccaugauga

SEQ ID NO: 513688 - RNA, 19 nt, Artificial Sequence
  Description of Artificial Sequence: Synthetic oligonucleotide
gcaguauugcagcagugcg

SEQ ID NO: 513689 - RNA, 19 nt, Artificial Sequence
  Description of Artificial Sequence: Synthetic oligonucleotide
gugauugguaggcucgucc

SEQ ID NO: 513690 - RNA, 19 nt, Artificial Sequence
  Description of Artificial Sequence: Synthetic oligonucleotide
agcagugcgggagugcagc

SEQ ID NO: 513691 - RNA, 19 nt, Artificial Sequence
  Description of Artificial Sequence: Synthetic oligonucleotide
agguccgucuuuuguguac

SEQ ID NO: 513692 - RNA, 19 nt, Artificial Sequence
  Description of Artificial Sequence: Synthetic oligonucleotide
auggcgaaagguccagguc

SEQ ID NO: 513693 - RNA, 19 nt, Artificial Sequence
  Description of Artificial Sequence: Synthetic oligonucleotide
gggauuuuaccacacggug

SEQ ID NO: 513694 - RNA, 19 nt, Artificial Sequence
  Description of Artificial Sequence: Synthetic oligonucleotide
uggguuaacccagggaccc

SEQ ID NO: 513695 - RNA, 19 nt, Artificial Sequence
  Description of Artificial Sequence: Synthetic oligonucleotide
uccucgugagcuaaccgcu

SEQ ID NO: 513696 - RNA, 19 nt, Artificial Sequence
  Description of Artificial Sequence: Synthetic oligonucleotide
uaacgcccuaucuugacau

SEQ ID NO: 513697 - RNA, 19 nt, Artificial Sequence
  Description of Artificial Sequence: Synthetic oligonucleotide
uuuaccacacggugggaaa

SEQ ID NO: 513698 - RNA, 19 nt, Artificial Sequence
  Description of Artificial Sequence: Synthetic oligonucleotide
cauaacccaagacucugug

SEQ ID NO: 513699 - RNA, 19 nt, Artificial Sequence
  Description of Artificial Sequence: Synthetic oligonucleotide
acaacccuuucuguuaguc

SEQ ID NO: 513700 - RNA, 19 nt, Artificial Sequence
  Description of Artificial Sequence: Synthetic oligonucleotide
uuagguccuaccagagcca

SEQ ID NO: 513701 - RNA, 19 nt, Artificial Sequence
  Description of Artificial Sequence: Synthetic oligonucleotide
ggauuuuaccacacggugg

SEQ ID NO: 513702 - RNA, 19 nt, Artificial Sequence
  Description of Artificial Sequence: Synthetic oligonucleotide
aucucuuagggcaagguaa

SEQ ID NO: 513703 - RNA, 19 nt, Artificial Sequence
  Description of Artificial Sequence: Synthetic oligonucleotide
aagcaauaagggauggggu

SEQ ID NO: 513704 - RNA, 19 nt, Artificial Sequence
  Description of Artificial Sequence: Synthetic oligonucleotide
ugcgcugcauggcaggugu

SEQ ID NO: 513705 - RNA, 19 nt, Artificial Sequence
  Description of Artificial Sequence: Synthetic oligonucleotide
acggugggaaauaaaauga

SEQ ID NO: 513706 - RNA, 19 nt, Artificial Sequence
  Description of Artificial Sequence: Synthetic oligonucleotide
acagacccaaaucuccugu

SEQ ID NO: 513707 - RNA, 19 nt, Artificial Sequence
  Description of Artificial Sequence: Synthetic oligonucleotide
cuuuauuggacacuuugua

SEQ ID NO: 513708 - RNA, 19 nt, Artificial Sequence
  Description of Artificial Sequence: Synthetic oligonucleotide
auaagggauggggugauga

SEQ ID NO: 513709 - RNA, 19 nt, Artificial Sequence
  Description of Artificial Sequence: Synthetic oligonucleotide
ugcccauccgacagguucc

SEQ ID NO: 513710 - RNA, 19 nt, Artificial Sequence
  Description of Artificial Sequence: Synthetic oligonucleotide
uugaucuccggguagcauu

SEQ ID NO: 513711 - RNA, 19 nt, Artificial Sequence
  Description of Artificial Sequence: Synthetic oligonucleotide
uacccguguaauacuuaag

SEQ ID NO: 513712 - RNA, 19 nt, Artificial Sequence
  Description of Artificial Sequence: Synthetic oligonucleotide
ucgugagcuaaccgcucgg

SEQ ID NO: 513713 - RNA, 19 nt, Artificial Sequence
  Description of Artificial Sequence: Synthetic oligonucleotide
uuuuaccacacggugggaa

SEQ ID NO: 513714 - RNA, 19 nt, Artificial Sequence
  Description of Artificial Sequence: Synthetic oligonucleotide
cguguaauacuuaaguuuc

SEQ ID NO: 513715 - RNA, 19 nt, Artificial Sequence
  Description of Artificial Sequence: Synthetic oligonucleotide
caguaaggccauaucuccc

SEQ ID NO: 513716 - RNA, 19 nt, Artificial Sequence
  Description of Artificial Sequence: Synthetic oligonucleotide
cauuagguccuaccagagc

SEQ ID NO: 513717 - RNA, 19 nt, Artificial Sequence
  Description of Artificial Sequence: Synthetic oligonucleotide
agaagcaauaagggauggg

SEQ ID NO: 513718 - RNA, 19 nt, Artificial Sequence
  Description of Artificial Sequence: Synthetic oligonucleotide
auucuagauuauuguagau

SEQ ID NO: 513719 - RNA, 19 nt, Artificial Sequence
  Description of Artificial Sequence: Synthetic oligonucleotide
acaugagaaugcuuccgga

SEQ ID NO: 513720 - RNA, 19 nt, Artificial Sequence
  Description of Artificial Sequence: Synthetic oligonucleotide
guaaccagcaagggucugg

SEQ ID NO: 513721 - RNA, 19 nt, Artificial Sequence
  Description of Artificial Sequence: Synthetic oligonucleotide
agcgucuugucacucacaa

SEQ ID NO: 513722 - RNA, 19 nt, Artificial Sequence
  Description of Artificial Sequence: Synthetic oligonucleotide
gaagaugggaaacggacau

SEQ ID NO: 513723 - RNA, 19 nt, Artificial Sequence
  Description of Artificial Sequence: Synthetic oligonucleotide
aauuacccguguaauacuu

SEQ ID NO: 513724 - RNA, 19 nt, Artificial Sequence
  Description of Artificial Sequence: Synthetic oligonucleotide
cacacggugggaaauaaaa

SEQ ID NO: 513725 - RNA, 19 nt, Artificial Sequence
  Description of Artificial Sequence: Synthetic oligonucleotide
caccauuagguccuaccag

SEQ ID NO: 513726 - RNA, 19 nt, Artificial Sequence
  Description of Artificial Sequence: Synthetic oligonucleotide
caggguuccaaaccagaag

SEQ ID NO: 513727 - RNA, 19 nt, Artificial Sequence
  Description of Artificial Sequence: Synthetic oligonucleotide
uucuugcgcugcauggcag

SEQ ID NO: 513728 - RNA, 19 nt, Artificial Sequence
  Description of Artificial Sequence: Synthetic oligonucleotide
uugaccaugaaaggucagu

SEQ ID NO: 513729 - RNA, 19 nt, Artificial Sequence
  Description of Artificial Sequence: Synthetic oligonucleotide
ccaguaaggccauaucucc

SEQ ID NO: 513730 - RNA, 19 nt, Artificial Sequence
  Description of Artificial Sequence: Synthetic oligonucleotide
caagggguuuucucgcuag

SEQ ID NO: 513731 - RNA, 19 nt, Artificial Sequence
  Description of Artificial Sequence: Synthetic oligonucleotide
caggcggugggauuuuacc

SEQ ID NO: 513732 - RNA, 19 nt, Artificial Sequence
  Description of Artificial Sequence: Synthetic oligonucleotide
auaccgaccaggacuacag

SEQ ID NO: 513733 - RNA, 19 nt, Artificial Sequence
  Description of Artificial Sequence: Synthetic oligonucleotide
guacagacuccauucagaa

SEQ ID NO: 513734 - RNA, 19 nt, Artificial Sequence
  Description of Artificial Sequence: Synthetic oligonucleotide
uagaagcucuccagugagc

SEQ ID NO: 513735 - RNA, 19 nt, Artificial Sequence
  Description of Artificial Sequence: Synthetic oligonucleotide
gacuacagcccugacccag

SEQ ID NO: 513736 - RNA, 19 nt, Artificial Sequence
  Description of Artificial Sequence: Synthetic oligonucleotide
gccaaauucuagauuauug

SEQ ID NO: 513737 - RNA, 19 nt, Artificial Sequence
  Description of Artificial Sequence: Synthetic oligonucleotide
uguguacuugaagcucacg

SEQ ID NO: 513738 - RNA, 19 nt, Artificial Sequence
  Description of Artificial Sequence: Synthetic oligonucleotide
cuaccaguuuggauuugag

SEQ ID NO: 513739 - RNA, 19 nt, Artificial Sequence
  Description of Artificial Sequence: Synthetic oligonucleotide
uggaugagucugaagucau

SEQ ID NO: 513740 - RNA, 19 nt, Artificial Sequence
  Description of Artificial Sequence: Synthetic oligonucleotide
cauccucgugagcuaaccg

SEQ ID NO: 513741 - RNA, 19 nt, Artificial Sequence
  Description of Artificial Sequence: Synthetic oligonucleotide
ucgacacuucugcccaucc

SEQ ID NO: 513742 - RNA, 19 nt, Artificial Sequence
  Description of Artificial Sequence: Synthetic oligonucleotide
aacggacaugugcugucca

SEQ ID NO: 513743 - RNA, 19 nt, Artificial Sequence
  Description of Artificial Sequence: Synthetic oligonucleotide
cauaauuacccguguaaua

SEQ ID NO: 513744 - RNA, 19 nt, Artificial Sequence
  Description of Artificial Sequence: Synthetic oligonucleotide
gaagaagaugggaaacgga

SEQ ID NO: 513745 - RNA, 19 nt, Artificial Sequence
  Description of Artificial Sequence: Synthetic oligonucleotide
gccauuuagugauugucug

SEQ ID NO: 513746 - RNA, 19 nt, Artificial Sequence
  Description of Artificial Sequence: Synthetic oligonucleotide
augagaccauaacgacggc

SEQ ID NO: 513747 - RNA, 19 nt, Artificial Sequence
  Description of Artificial Sequence: Synthetic oligonucleotide
uggaugauauugguacaga

SEQ ID NO: 513748 - RNA, 19 nt, Artificial Sequence
  Description of Artificial Sequence: Synthetic oligonucleotide
gagggcucacacguugugg

SEQ ID NO: 513749 - RNA, 19 nt, Artificial Sequence
  Description of Artificial Sequence: Synthetic oligonucleotide
uccuaccagagccacccgu

SEQ ID NO: 513750 - RNA, 19 nt, Artificial Sequence
  Description of Artificial Sequence: Synthetic oligonucleotide
ugguaacgcccuaucuuga

SEQ ID NO: 513751 - RNA, 19 nt, Artificial Sequence
  Description of Artificial Sequence: Synthetic oligonucleotide
gcugacuagcaucauacca

SEQ ID NO: 513752 - RNA, 19 nt, Artificial Sequence
  Description of Artificial Sequence: Synthetic oligonucleotide
aacgcccuaucuugacaug

SEQ ID NO: 513753 - RNA, 19 nt, Artificial Sequence
  Description of Artificial Sequence: Synthetic oligonucleotide
accauaacgacggccugag

SEQ ID NO: 513754 - RNA, 19 nt, Artificial Sequence
  Description of Artificial Sequence: Synthetic oligonucleotide
gacagguuccggauugggc

SEQ ID NO: 513755 - RNA, 19 nt, Artificial Sequence
  Description of Artificial Sequence: Synthetic oligonucleotide
ugaucuccggguagcauuu

SEQ ID NO: 513756 - RNA, 19 nt, Artificial Sequence
  Description of Artificial Sequence: Synthetic oligonucleotide
ccaaacggaaggaagaaga

SEQ ID NO: 513757 - RNA, 19 nt, Artificial Sequence
  Description of Artificial Sequence: Synthetic oligonucleotide
gcuagccaauagcagagag

SEQ ID NO: 513758 - RNA, 19 nt, Artificial Sequence
  Description of Artificial Sequence: Synthetic oligonucleotide
ugggcccuuggguuaaccc

SEQ ID NO: 513759 - RNA, 19 nt, Artificial Sequence
  Description of Artificial Sequence: Synthetic oligonucleotide
acggacaugugcuguccag

SEQ ID NO: 513760 - RNA, 19 nt, Artificial Sequence
  Description of Artificial Sequence: Synthetic oligonucleotide
aaccgcucggccucccucu

SEQ ID NO: 513761 - RNA, 19 nt, Artificial Sequence
  Description of Artificial Sequence: Synthetic oligonucleotide
caagagcaacucucauccg

SEQ ID NO: 513762 - RNA, 19 nt, Artificial Sequence
  Description of Artificial Sequence: Synthetic oligonucleotide
gcaagguccgucuuuugug

SEQ ID NO: 513763 - RNA, 19 nt, Artificial Sequence
  Description of Artificial Sequence: Synthetic oligonucleotide
cuguaagugcugaugguaa

SEQ ID NO: 513764 - RNA, 19 nt, Artificial Sequence
  Description of Artificial Sequence: Synthetic oligonucleotide
ggugggauuuuaccacacg

SEQ ID NO: 513765 - RNA, 19 nt, Artificial Sequence
  Description of Artificial Sequence: Synthetic oligonucleotide
ucacacuccgcauccucgu

SEQ ID NO: 513766 - RNA, 19 nt, Artificial Sequence
  Description of Artificial Sequence: Synthetic oligonucleotide
ucauuccaucuguggguag

SEQ ID NO: 513767 - RNA, 19 nt, Artificial Sequence
  Description of Artificial Sequence: Synthetic oligonucleotide
uccagugagcagcuucaaa

SEQ ID NO: 513768 - RNA, 19 nt, Artificial Sequence
  Description of Artificial Sequence: Synthetic oligonucleotide
gugagcuaaccgcucggcc

SEQ ID NO: 513769 - RNA, 19 nt, Artificial Sequence
  Description of Artificial Sequence: Synthetic oligonucleotide
aauaagggauggggugaug

SEQ ID NO: 513770 - RNA, 19 nt, Artificial Sequence
  Description of Artificial Sequence: Synthetic oligonucleotide
ggagggaacagccagccaa

SEQ ID NO: 513771 - RNA, 19 nt, Artificial Sequence
  Description of Artificial Sequence: Synthetic oligonucleotide
uuaguccugaugccaucau

SEQ ID NO: 513772 - RNA, 19 nt, Artificial Sequence
  Description of Artificial Sequence: Synthetic oligonucleotide
uucccaguaaggccauauc

SEQ ID NO: 513773 - RNA, 19 nt, Artificial Sequence
  Description of Artificial Sequence: Synthetic oligonucleotide
auuggacacuuuguagaug

SEQ ID NO: 513774 - RNA, 19 nt, Artificial Sequence
  Description of Artificial Sequence: Synthetic oligonucleotide
guagaugcaagguccgucu

SEQ ID NO: 513775 - RNA, 19 nt, Artificial Sequence
  Description of Artificial Sequence: Synthetic oligonucleotide
uguuaguccugaugccauc

SEQ ID NO: 513776 - RNA, 19 nt, Artificial Sequence
  Description of Artificial Sequence: Synthetic oligonucleotide
agucauggcugacuagcau

SEQ ID NO: 513777 - RNA, 19 nt, Artificial Sequence
  Description of Artificial Sequence: Synthetic oligonucleotide
gagcuaaccgcucggccuc

SEQ ID NO: 513778 - RNA, 19 nt, Artificial Sequence
  Description of Artificial Sequence: Synthetic oligonucleotide
ggguagaagcucuccagug

SEQ ID NO: 513779 - RNA, 19 nt, Artificial Sequence
  Description of Artificial Sequence: Synthetic oligonucleotide
cugaugguaacgcccuauc

SEQ ID NO: 513780 - RNA, 19 nt, Artificial Sequence
  Description of Artificial Sequence: Synthetic oligonucleotide
agaccauaacgacggccug

SEQ ID NO: 513781 - RNA, 19 nt, Artificial Sequence
  Description of Artificial Sequence: Synthetic oligonucleotide
guaacgcccuaucuugaca

SEQ ID NO: 513782 - RNA, 19 nt, Artificial Sequence
  Description of Artificial Sequence: Synthetic oligonucleotide
cauaacgacggccugaguu

SEQ ID NO: 513783 - RNA, 19 nt, Artificial Sequence
  Description of Artificial Sequence: Synthetic oligonucleotide
uccaagggguuuucucgcu

SEQ ID NO: 513784 - RNA, 19 nt, Artificial Sequence
  Description of Artificial Sequence: Synthetic oligonucleotide
cuggcaagagcaacucuca

SEQ ID NO: 513785 - RNA, 19 nt, Artificial Sequence
  Description of Artificial Sequence: Synthetic oligonucleotide
guuaguccugaugccauca

SEQ ID NO: 513786 - RNA, 19 nt, Artificial Sequence
  Description of Artificial Sequence: Synthetic oligonucleotide
acggaaggaagaagauggg

SEQ ID NO: 513787 - RNA, 19 nt, Artificial Sequence
  Description of Artificial Sequence: Synthetic oligonucleotide
cuccggguagcauuucauc

SEQ ID NO: 513788 - RNA, 19 nt, Artificial Sequence
  Description of Artificial Sequence: Synthetic oligonucleotide
uaacgacggccugaguuga

SEQ ID NO: 513789 - RNA, 19 nt, Artificial Sequence
  Description of Artificial Sequence: Synthetic oligonucleotide
gacagcgucuugucacuca

SEQ ID NO: 513790 - RNA, 19 nt, Artificial Sequence
  Description of Artificial Sequence: Synthetic oligonucleotide
agcagccgcuuucuucauc

SEQ ID NO: 513791 - RNA, 19 nt, Artificial Sequence
  Description of Artificial Sequence: Synthetic oligonucleotide
gacggccugaguugaguuc

SEQ ID NO: 513792 - RNA, 19 nt, Artificial Sequence
  Description of Artificial Sequence: Synthetic oligonucleotide
ccaaaucuccugugcaacc

SEQ ID NO: 513793 - RNA, 19 nt, Artificial Sequence
  Description of Artificial Sequence: Synthetic oligonucleotide
ggucucgauguccagguga

SEQ ID NO: 513794 - RNA, 19 nt, Artificial Sequence
  Description of Artificial Sequence: Synthetic oligonucleotide
cccaguaaggccauaucuc

SEQ ID NO: 513795 - RNA, 19 nt, Artificial Sequence
  Description of Artificial Sequence: Synthetic oligonucleotide
aagguccgucuuuugugua

SEQ ID NO: 513796 - RNA, 19 nt, Artificial Sequence
  Description of Artificial Sequence: Synthetic oligonucleotide
ugccaaauucuagauuauu

SEQ ID NO: 513797 - RNA, 19 nt, Artificial Sequence
  Description of Artificial Sequence: Synthetic oligonucleotide
caggccaaacacacucgac

SEQ ID NO: 513798 - RNA, 19 nt, Artificial Sequence
  Description of Artificial Sequence: Synthetic oligonucleotide
gcaacucucauccgccagc

SEQ ID NO: 513799 - RNA, 19 nt, Artificial Sequence
  Description of Artificial Sequence: Synthetic oligonucleotide
uaaggccauaucucccaau

SEQ ID NO: 513800 - RNA, 19 nt, Artificial Sequence
  Description of Artificial Sequence: Synthetic oligonucleotide
ccgaccaggacuacagccc

SEQ ID NO: 513801 - RNA, 19 nt, Artificial Sequence
  Description of Artificial Sequence: Synthetic oligonucleotide
ccaaauucuagauuauugu

SEQ ID NO: 513802 - RNA, 19 nt, Artificial Sequence
  Description of Artificial Sequence: Synthetic oligonucleotide
cucuuagggcaagguaacc

SEQ ID NO: 513803 - RNA, 19 nt, Artificial Sequence
  Description of Artificial Sequence: Synthetic oligonucleotide
uagguccuaccagagccac

SEQ ID NO: 513804 - RNA, 19 nt, Artificial Sequence
  Description of Artificial Sequence: Synthetic oligonucleotide
acaggcggugggauuuuac

SEQ ID NO: 513805 - RNA, 19 nt, Artificial Sequence
  Description of Artificial Sequence: Synthetic oligonucleotide
agggccgaauaaagagggc

SEQ ID NO: 513806 - RNA, 19 nt, Artificial Sequence
  Description of Artificial Sequence: Synthetic oligonucleotide
caagguaaccagcaagggu

SEQ ID NO: 513807 - RNA, 19 nt, Artificial Sequence
  Description of Artificial Sequence: Synthetic oligonucleotide
gguacagacuccauucaga

SEQ ID NO: 513808 - RNA, 19 nt, Artificial Sequence
  Description of Artificial Sequence: Synthetic oligonucleotide
guaggcucauccagaagca

SEQ ID NO: 513809 - RNA, 19 nt, Artificial Sequence
  Description of Artificial Sequence: Synthetic oligonucleotide
gaccauaacgacggccuga

SEQ ID NO: 513810 - RNA, 19 nt, Artificial Sequence
  Description of Artificial Sequence: Synthetic oligonucleotide
gguaacgcccuaucuugac

SEQ ID NO: 513811 - RNA, 19 nt, Artificial Sequence
  Description of Artificial Sequence: Synthetic oligonucleotide
uagaugcaagguccgucuu

SEQ ID NO: 513812 - RNA, 19 nt, Artificial Sequence
  Description of Artificial Sequence: Synthetic oligonucleotide
acgcccuaucuugacauga

SEQ ID NO: 513813 - RNA, 19 nt, Artificial Sequence
  Description of Artificial Sequence: Synthetic oligonucleotide
acacggugggaaauaaaau

SEQ ID NO: 513814 - RNA, 19 nt, Artificial Sequence
  Description of Artificial Sequence: Synthetic oligonucleotide
aaguccagacacagacaga

SEQ ID NO: 513815 - RNA, 19 nt, Artificial Sequence
  Description of Artificial Sequence: Synthetic oligonucleotide
gccgcgucuucacauacug

SEQ ID NO: 513816 - RNA, 19 nt, Artificial Sequence
  Description of Artificial Sequence: Synthetic oligonucleotide
caucucuuagggcaaggua

SEQ ID NO: 513817 - RNA, 19 nt, Artificial Sequence
  Description of Artificial Sequence: Synthetic oligonucleotide
cagcuucaaaagaguggac

SEQ ID NO: 513818 - RNA, 19 nt, Artificial Sequence
  Description of Artificial Sequence: Synthetic oligonucleotide
cauuccaucuguggguaga

SEQ ID NO: 513819 - RNA, 19 nt, Artificial Sequence
  Description of Artificial Sequence: Synthetic oligonucleotide
caugagaaugcuuccggau

SEQ ID NO: 513820 - RNA, 19 nt, Artificial Sequence
  Description of Artificial Sequence: Synthetic oligonucleotide
gggaaacggacaugugcug

SEQ ID NO: 513821 - RNA, 19 nt, Artificial Sequence
  Description of Artificial Sequence: Synthetic oligonucleotide
uccaggugauugguaggcu

SEQ ID NO: 513822 - RNA, 19 nt, Artificial Sequence
  Description of Artificial Sequence: Synthetic oligonucleotide
ggacacuuuguagaugaca

SEQ ID NO: 513823 - RNA, 19 nt, Artificial Sequence
  Description of Artificial Sequence: Synthetic oligonucleotide
gacccaagccuggcugagg

SEQ ID NO: 513824 - RNA, 19 nt, Artificial Sequence
  Description of Artificial Sequence: Synthetic oligonucleotide
augcaagguccgucuuuug

SEQ ID NO: 513825 - RNA, 19 nt, Artificial Sequence
  Description of Artificial Sequence: Synthetic oligonucleotide
ggguuuucucgcuagccaa

SEQ ID NO: 513826 - RNA, 19 nt, Artificial Sequence
  Description of Artificial Sequence: Synthetic oligonucleotide
guggcauuccugacccaag

SEQ ID NO: 513827 - RNA, 19 nt, Artificial Sequence
  Description of Artificial Sequence: Synthetic oligonucleotide
guuaacccagggacccuug

SEQ ID NO: 513828 - RNA, 19 nt, Artificial Sequence
  Description of Artificial Sequence: Synthetic oligonucleotide
ggcccuuggguuaacccag

SEQ ID NO: 513829 - RNA, 19 nt, Artificial Sequence
  Description of Artificial Sequence: Synthetic oligonucleotide
gcccauguaagauccuuga

SEQ ID NO: 513830 - RNA, 19 nt, Artificial Sequence
  Description of Artificial Sequence: Synthetic oligonucleotide
caaacggaaggaagaagau

SEQ ID NO: 513831 - RNA, 19 nt, Artificial Sequence
  Description of Artificial Sequence: Synthetic oligonucleotide
caagguccgucuuuugugu

SEQ ID NO: 513832 - RNA, 19 nt, Artificial Sequence
  Description of Artificial Sequence: Synthetic oligonucleotide
aggucagugaaagguugau

SEQ ID NO: 513833 - RNA, 19 nt, Artificial Sequence
  Description of Artificial Sequence: Synthetic oligonucleotide
aacgacggccugaguugag

SEQ ID NO: 513834 - RNA, 19 nt, Artificial Sequence
  Description of Artificial Sequence: Synthetic oligonucleotide
gcaugugaggguucugcca

SEQ ID NO: 513835 - RNA, 19 nt, Artificial Sequence
  Description of Artificial Sequence: Synthetic oligonucleotide
cccauguaagauccuugag

SEQ ID NO: 513836 - RNA, 19 nt, Artificial Sequence
  Description of Artificial Sequence: Synthetic oligonucleotide
gaugcaagguccgucuuuu

SEQ ID NO: 513837 - RNA, 19 nt, Artificial Sequence
  Description of Artificial Sequence: Synthetic oligonucleotide
ccaauuccauuuaagccaa

SEQ ID NO: 513838 - RNA, 19 nt, Artificial Sequence
  Description of Artificial Sequence: Synthetic oligonucleotide
gggcccuuggguuaaccca

SEQ ID NO: 513839 - RNA, 19 nt, Artificial Sequence
  Description of Artificial Sequence: Synthetic oligonucleotide
auuuuaccacacgguggga

SEQ ID NO: 513840 - RNA, 19 nt, Artificial Sequence
  Description of Artificial Sequence: Synthetic oligonucleotide
gccauaucucccaaugauc

SEQ ID NO: 513841 - RNA, 19 nt, Artificial Sequence
  Description of Artificial Sequence: Synthetic oligonucleotide
uccgcauccucgugagcua

SEQ ID NO: 513842 - RNA, 19 nt, Artificial Sequence
  Description of Artificial Sequence: Synthetic oligonucleotide
auuacccguguaauacuua

SEQ ID NO: 513843 - RNA, 19 nt, Artificial Sequence
  Description of Artificial Sequence: Synthetic oligonucleotide
cggugggaaauaaaaugac

SEQ ID NO: 513844 - RNA, 19 nt, Artificial Sequence
  Description of Artificial Sequence: Synthetic oligonucleotide
aguuuggauuugaggugcu

SEQ ID NO: 513845 - RNA, 19 nt, Artificial Sequence
  Description of Artificial Sequence: Synthetic oligonucleotide
aggugauugguaggcucgu

SEQ ID NO: 513846 - RNA, 19 nt, Artificial Sequence
  Description of Artificial Sequence: Synthetic oligonucleotide
ugcgggagugcagccccag

SEQ ID NO: 513847 - RNA, 19 nt, Artificial Sequence
  Description of Artificial Sequence: Synthetic oligonucleotide
uugcgcugcauggcaggug

SEQ ID NO: 513848 - RNA, 19 nt, Artificial Sequence
  Description of Artificial Sequence: Synthetic oligonucleotide
gugaaacccagcccaugua

SEQ ID NO: 513849 - RNA, 19 nt, Artificial Sequence
  Description of Artificial Sequence: Synthetic oligonucleotide
ggccauaucucccaaugau

SEQ ID NO: 513850 - RNA, 19 nt, Artificial Sequence
  Description of Artificial Sequence: Synthetic oligonucleotide
auaccacccucaaacucau

SEQ ID NO: 513851 - RNA, 19 nt, Artificial Sequence
  Description of Artificial Sequence: Synthetic oligonucleotide
accacacggugggaaauaa

SEQ ID NO: 513852 - RNA, 19 nt, Artificial Sequence
  Description of Artificial Sequence: Synthetic oligonucleotide
auauugguacagacuccau

SEQ ID NO: 513853 - RNA, 19 nt, Artificial Sequence
  Description of Artificial Sequence: Synthetic oligonucleotide
augccaaauucuagauuau

SEQ ID NO: 513854 - RNA, 19 nt, Artificial Sequence
  Description of Artificial Sequence: Synthetic oligonucleotide
ccguguaauacuuaaguuu

SEQ ID NO: 513855 - RNA, 19 nt, Artificial Sequence
  Description of Artificial Sequence: Synthetic oligonucleotide
ggccgaauaaagagggcuc

SEQ ID NO: 513856 - RNA, 19 nt, Artificial Sequence
  Description of Artificial Sequence: Synthetic oligonucleotide
gcauccucgugagcuaacc

SEQ ID NO: 513857 - RNA, 19 nt, Artificial Sequence
  Description of Artificial Sequence: Synthetic oligonucleotide
gugacggcucgagcagccg

SEQ ID NO: 513858 - RNA, 19 nt, Artificial Sequence
  Description of Artificial Sequence: Synthetic oligonucleotide
auccgacagguuccggauu

SEQ ID NO: 513859 - RNA, 19 nt, Artificial Sequence
  Description of Artificial Sequence: Synthetic oligonucleotide
cucgacacuucugcccauc

SEQ ID NO: 513860 - RNA, 19 nt, Artificial Sequence
  Description of Artificial Sequence: Synthetic oligonucleotide
ggugacggcucgagcagcc

SEQ ID NO: 513861 - RNA, 19 nt, Artificial Sequence
  Description of Artificial Sequence: Synthetic oligonucleotide
gcguuuucucuuugcucug

SEQ ID NO: 513862 - RNA, 19 nt, Artificial Sequence
  Description of Artificial Sequence: Synthetic oligonucleotide
ccgccagccaccacugaag

SEQ ID NO: 513863 - RNA, 19 nt, Artificial Sequence
  Description of Artificial Sequence: Synthetic oligonucleotide
guaagauccuugaggcccu

SEQ ID NO: 513864 - RNA, 19 nt, Artificial Sequence
  Description of Artificial Sequence: Synthetic oligonucleotide
ugugugcgaucugguccug

SEQ ID NO: 513865 - RNA, 19 nt, Artificial Sequence
  Description of Artificial Sequence: Synthetic oligonucleotide
aggacgccggugacggcuc

SEQ ID NO: 513866 - RNA, 19 nt, Artificial Sequence
  Description of Artificial Sequence: Synthetic oligonucleotide
cagagccacccguguauca

SEQ ID NO: 513867 - RNA, 19 nt, Artificial Sequence
  Description of Artificial Sequence: Synthetic oligonucleotide
ggcucgagcagccgcuuuc

SEQ ID NO: 513868 - RNA, 19 nt, Artificial Sequence
  Description of Artificial Sequence: Synthetic oligonucleotide
gcucuugaccaugaaaggu

SEQ ID NO: 513869 - RNA, 19 nt, Artificial Sequence
  Description of Artificial Sequence: Synthetic oligonucleotide
ccuaucuugacaugagaau

SEQ ID NO: 513870 - RNA, 19 nt, Artificial Sequence
  Description of Artificial Sequence: Synthetic oligonucleotide
ccuggcaauguaguucuuc

SEQ ID NO: 513871 - RNA, 19 nt, Artificial Sequence
  Description of Artificial Sequence: Synthetic oligonucleotide
cacucacaacccuuucugu

SEQ ID NO: 513872 - RNA, 19 nt, Artificial Sequence
  Description of Artificial Sequence: Synthetic oligonucleotide
gaugcgcuugaaagucuua

SEQ ID NO: 513873 - RNA, 19 nt, Artificial Sequence
  Description of Artificial Sequence: Synthetic oligonucleotide
cacccucaaacucauugau

SEQ ID NO: 513874 - RNA, 19 nt, Artificial Sequence
  Description of Artificial Sequence: Synthetic oligonucleotide
guauugcagcagugcggga

SEQ ID NO: 513875 - RNA, 19 nt, Artificial Sequence
  Description of Artificial Sequence: Synthetic oligonucleotide
cauccgacagguuccggau

SEQ ID NO: 513876 - RNA, 19 nt, Artificial Sequence
  Description of Artificial Sequence: Synthetic oligonucleotide
gcggugggauuuuaccaca

SEQ ID NO: 513877 - RNA, 19 nt, Artificial Sequence
  Description of Artificial Sequence: Synthetic oligonucleotide
gcccuaucuugacaugaga

SEQ ID NO: 513878 - RNA, 19 nt, Artificial Sequence
  Description of Artificial Sequence: Synthetic oligonucleotide
gugugcgaucugguccugc

SEQ ID NO: 513879 - RNA, 19 nt, Artificial Sequence
  Description of Artificial Sequence: Synthetic oligonucleotide
ggcgaaagguccaggucca

SEQ ID NO: 513880 - RNA, 19 nt, Artificial Sequence
  Description of Artificial Sequence: Synthetic oligonucleotide
gcaucauaccacccucaaa

SEQ ID NO: 513881 - RNA, 19 nt, Artificial Sequence
  Description of Artificial Sequence: Synthetic oligonucleotide
ccaggccauuuagugauug

SEQ ID NO: 513882 - RNA, 19 nt, Artificial Sequence
  Description of Artificial Sequence: Synthetic oligonucleotide
ccggaucauuccaucugug

SEQ ID NO: 513883 - RNA, 19 nt, Artificial Sequence
  Description of Artificial Sequence: Synthetic oligonucleotide
ccuuggguuaacccaggga

SEQ ID NO: 513884 - RNA, 19 nt, Artificial Sequence
  Description of Artificial Sequence: Synthetic oligonucleotide
cauaucucccaaugaucuu

SEQ ID NO: 513885 - RNA, 19 nt, Artificial Sequence
  Description of Artificial Sequence: Synthetic oligonucleotide
cguucugcaccaugaugac

SEQ ID NO: 513886 - RNA, 19 nt, Artificial Sequence
  Description of Artificial Sequence: Synthetic oligonucleotide
gaucuccggguagcauuuc

SEQ ID NO: 513887 - RNA, 19 nt, Artificial Sequence
  Description of Artificial Sequence: Synthetic oligonucleotide
gguaaccagcaagggucug

SEQ ID NO: 513888 - RNA, 19 nt, Artificial Sequence
  Description of Artificial Sequence: Synthetic oligonucleotide
ccgaauaaagagggcucug

SEQ ID NO: 513889 - RNA, 19 nt, Artificial Sequence
  Description of Artificial Sequence: Synthetic oligonucleotide
cuucccaguaaggccauau

SEQ ID NO: 513890 - RNA, 19 nt, Artificial Sequence
  Description of Artificial Sequence: Synthetic oligonucleotide
cgcccuaucuugacaugag

SEQ ID NO: 513891 - RNA, 19 nt, Artificial Sequence
  Description of Artificial Sequence: Synthetic oligonucleotide
gggcaguauugcagcagug

SEQ ID NO: 513892 - RNA, 19 nt, Artificial Sequence
  Description of Artificial Sequence: Synthetic oligonucleotide
agccgcgucuucacauacu

SEQ ID NO: 513893 - RNA, 19 nt, Artificial Sequence
  Description of Artificial Sequence: Synthetic oligonucleotide
auccgccagccaccacuga

SEQ ID NO: 513894 - RNA, 19 nt, Artificial Sequence
  Description of Artificial Sequence: Synthetic oligonucleotide
gcgggagugcagccccagg

SEQ ID NO: 513895 - RNA, 19 nt, Artificial Sequence
  Description of Artificial Sequence: Synthetic oligonucleotide
ggugauugguaggcucguc

SEQ ID NO: 513896 - RNA, 19 nt, Artificial Sequence
  Description of Artificial Sequence: Synthetic oligonucleotide
gggucagaccagggcuugg

SEQ ID NO: 513897 - RNA, 19 nt, Artificial Sequence
  Description of Artificial Sequence: Synthetic oligonucleotide
uggcucgcucuguguccac

SEQ ID NO: 513898 - RNA, 19 nt, Artificial Sequence
  Description of Artificial Sequence: Synthetic oligonucleotide
caauaagggauggggugau

SEQ ID NO: 513899 - RNA, 19 nt, Artificial Sequence
  Description of Artificial Sequence: Synthetic oligonucleotide
gccgaauaaagagggcucu

SEQ ID NO: 513900 - RNA, 19 nt, Artificial Sequence
  Description of Artificial Sequence: Synthetic oligonucleotide
gggacccuuggcugcaucu

SEQ ID NO: 513901 - RNA, 19 nt, Artificial Sequence
  Description of Artificial Sequence: Synthetic oligonucleotide
cgugagcuaaccgcucggc

SEQ ID NO: 513902 - RNA, 19 nt, Artificial Sequence
  Description of Artificial Sequence: Synthetic oligonucleotide
ggacgccggugacggcucg

SEQ ID NO: 513903 - RNA, 19 nt, Artificial Sequence
  Description of Artificial Sequence: Synthetic oligonucleotide
gccugaguugaguuccagu

SEQ ID NO: 513904 - RNA, 19 nt, Artificial Sequence
  Description of Artificial Sequence: Synthetic oligonucleotide
ggacuacagcccugaccca

SEQ ID NO: 513905 - RNA, 19 nt, Artificial Sequence
  Description of Artificial Sequence: Synthetic oligonucleotide
gguccgucuuuuguguacu

SEQ ID NO: 513906 - RNA, 19 nt, Artificial Sequence
  Description of Artificial Sequence: Synthetic oligonucleotide
cccguguaauacuuaaguu

SEQ ID NO: 513907 - RNA, 19 nt, Artificial Sequence
  Description of Artificial Sequence: Synthetic oligonucleotide
ccgacagguuccggauugg

SEQ ID NO: 513908 - RNA, 19 nt, Artificial Sequence
  Description of Artificial Sequence: Synthetic oligonucleotide
cuugggcccuuggguuaac

SEQ ID NO: 513909 - RNA, 19 nt, Artificial Sequence
  Description of Artificial Sequence: Synthetic oligonucleotide
gacaggcggugggauuuua

SEQ ID NO: 513910 - RNA, 19 nt, Artificial Sequence
  Description of Artificial Sequence: Synthetic oligonucleotide
gacgccggugacggcucga

SEQ ID NO: 513911 - RNA, 19 nt, Artificial Sequence
  Description of Artificial Sequence: Synthetic oligonucleotide
gguuuucucgcuagccaau

SEQ ID NO: 513912 - RNA, 19 nt, Artificial Sequence
  Description of Artificial Sequence: Synthetic oligonucleotide
gcgaaagguccagguccag

SEQ ID NO: 513913 - RNA, 19 nt, Artificial Sequence
  Description of Artificial Sequence: Synthetic oligonucleotide
ccucaucuaccaguuugga

SEQ ID NO: 513914 - RNA, 19 nt, Artificial Sequence
  Description of Artificial Sequence: Synthetic oligonucleotide
cacaacccuuucuguuagu

SEQ ID NO: 513915 - RNA, 19 nt, Artificial Sequence
  Description of Artificial Sequence: Synthetic oligonucleotide
caauagcagagagcagcau

SEQ ID NO: 513916 - RNA, 19 nt, Artificial Sequence
  Description of Artificial Sequence: Synthetic oligonucleotide
ggcccucaucuccgcuuug

SEQ ID NO: 513917 - RNA, 19 nt, Artificial Sequence
  Description of Artificial Sequence: Synthetic oligonucleotide
ccggguagcauuucaucau

SEQ ID NO: 513918 - RNA, 19 nt, Artificial Sequence
  Description of Artificial Sequence: Synthetic oligonucleotide
ccacacggugggaaauaaa

SEQ ID NO: 513919 - RNA, 19 nt, Artificial Sequence
  Description of Artificial Sequence: Synthetic oligonucleotide
agcucacguucugcaccau

SEQ ID NO: 513920 - RNA, 19 nt, Artificial Sequence
  Description of Artificial Sequence: Synthetic oligonucleotide
caauuccauuuaagccaau

SEQ ID NO: 513921 - RNA, 19 nt, Artificial Sequence
  Description of Artificial Sequence: Synthetic oligonucleotide
caaggaccaggaugcgcuu

SEQ ID NO: 513922 - RNA, 19 nt, Artificial Sequence
  Description of Artificial Sequence: Synthetic oligonucleotide
gagcagccgcuuucuucau

SEQ ID NO: 513923 - RNA, 19 nt, Artificial Sequence
  Description of Artificial Sequence: Synthetic oligonucleotide
ccgcgucuucacauacuga

SEQ ID NO: 513924 - RNA, 19 nt, Artificial Sequence
  Description of Artificial Sequence: Synthetic oligonucleotide
gcuugggcccuuggguuaa

SEQ ID NO: 513925 - RNA, 19 nt, Artificial Sequence
  Description of Artificial Sequence: Synthetic oligonucleotide
guccgucuuuuguguacuu

SEQ ID NO: 513926 - RNA, 19 nt, Artificial Sequence
  Description of Artificial Sequence: Synthetic oligonucleotide
accuggcaauguaguucuu

SEQ ID NO: 513927 - RNA, 19 nt, Artificial Sequence
  Description of Artificial Sequence: Synthetic oligonucleotide
ggguuaacccagggacccu

SEQ ID NO: 513928 - RNA, 19 nt, Artificial Sequence
  Description of Artificial Sequence: Synthetic oligonucleotide
cgacggccugaguugaguu

SEQ ID NO: 513929 - RNA, 19 nt, Artificial Sequence
  Description of Artificial Sequence: Synthetic oligonucleotide
ggcugagggcucacacguu

SEQ ID NO: 513930 - RNA, 19 nt, Artificial Sequence
  Description of Artificial Sequence: Synthetic oligonucleotide
cggcucgagcagccgcuuu

SEQ ID NO: 513931 - RNA, 19 nt, Artificial Sequence
  Description of Artificial Sequence: Synthetic oligonucleotide
aacaguaucaucauugagc

SEQ ID NO: 513932 - RNA, 19 nt, Artificial Sequence
  Description of Artificial Sequence: Synthetic oligonucleotide
aauaaugcgugcuauuaac

SEQ ID NO: 513933 - RNA, 19 nt, Artificial Sequence
  Description of Artificial Sequence: Synthetic oligonucleotide
ugaauauucacauaucuca

SEQ ID NO: 513934 - RNA, 19 nt, Artificial Sequence
  Description of Artificial Sequence: Synthetic oligonucleotide
ucuuguaaaguucuaaaag

SEQ ID NO: 513935 - RNA, 19 nt, Artificial Sequence
  Description of Artificial Sequence: Synthetic oligonucleotide
uuuuaaucgaauauaagaa

SEQ ID NO: 513936 - RNA, 19 nt, Artificial Sequence
  Description of Artificial Sequence: Synthetic oligonucleotide
aaugcgugcuauuaacagc

SEQ ID NO: 513937 - RNA, 19 nt, Artificial Sequence
  Description of Artificial Sequence: Synthetic oligonucleotide
uuuaaucgaauauaagaag

SEQ ID NO: 513938 - RNA, 19 nt, Artificial Sequence
  Description of Artificial Sequence: Synthetic oligonucleotide
augggauuaaucuucacgg

SEQ ID NO: 513939 - RNA, 19 nt, Artificial Sequence
  Description of Artificial Sequence: Synthetic oligonucleotide
uuaaucgaauauaagaagu

SEQ ID NO: 513940 - RNA, 19 nt, Artificial Sequence
  Description of Artificial Sequence: Synthetic oligonucleotide
aagcacuccacacacuucc

SEQ ID NO: 513941 - RNA, 19 nt, Artificial Sequence
  Description of Artificial Sequence: Synthetic oligonucleotide
gagaauauaguuuucccag

SEQ ID NO: 513942 - RNA, 19 nt, Artificial Sequence
  Description of Artificial Sequence: Synthetic oligonucleotide
uucacuagaauaaugcgug

SEQ ID NO: 513943 - RNA, 19 nt, Artificial Sequence
  Description of Artificial Sequence: Synthetic oligonucleotide
uguaaauugagccgaacug

SEQ ID NO: 513944 - RNA, 19 nt, Artificial Sequence
  Description of Artificial Sequence: Synthetic oligonucleotide
uuaaccacugcccugacca

SEQ ID NO: 513945 - RNA, 19 nt, Artificial Sequence
  Description of Artificial Sequence: Synthetic oligonucleotide
agaauaacagcauccaguc

SEQ ID NO: 513946 - RNA, 19 nt, Artificial Sequence
  Description of Artificial Sequence: Synthetic oligonucleotide
aauugagccgaacugaaga

SEQ ID NO: 513947 - RNA, 19 nt, Artificial Sequence
  Description of Artificial Sequence: Synthetic oligonucleotide
agcaguauaaacuuggggu

SEQ ID NO: 513948 - RNA, 19 nt, Artificial Sequence
  Description of Artificial Sequence: Synthetic oligonucleotide
aacaauuggacuguguguc

SEQ ID NO: 513949 - RNA, 19 nt, Artificial Sequence
  Description of Artificial Sequence: Synthetic oligonucleotide
uguuguagcaucuuucucc

SEQ ID NO: 513950 - RNA, 19 nt, Artificial Sequence
  Description of Artificial Sequence: Synthetic oligonucleotide
uaaaagucgaccugaauca

SEQ ID NO: 513951 - RNA, 19 nt, Artificial Sequence
  Description of Artificial Sequence: Synthetic oligonucleotide
uuugaccucacuaaacugc

SEQ ID NO: 513952 - RNA, 19 nt, Artificial Sequence
  Description of Artificial Sequence: Synthetic oligonucleotide
ugguuaauuacuccguggg

SEQ ID NO: 513953 - RNA, 19 nt, Artificial Sequence
  Description of Artificial Sequence: Synthetic oligonucleotide
auuaucagguuccaggguc

SEQ ID NO: 513954 - RNA, 19 nt, Artificial Sequence
  Description of Artificial Sequence: Synthetic oligonucleotide
cuaaaagucgaccugaauc

SEQ ID NO: 513955 - RNA, 19 nt, Artificial Sequence
  Description of Artificial Sequence: Synthetic oligonucleotide
auagcuguuauuucauugg

SEQ ID NO: 513956 - RNA, 19 nt, Artificial Sequence
  Description of Artificial Sequence: Synthetic oligonucleotide
uugaauagcuaaaagucga

SEQ ID NO: 513957 - RNA, 19 nt, Artificial Sequence
  Description of Artificial Sequence: Synthetic oligonucleotide
aucuagaaugagcaggccc

SEQ ID NO: 513958 - RNA, 19 nt, Artificial Sequence
  Description of Artificial Sequence: Synthetic oligonucleotide
uuacuuuggauaacaagcc

SEQ ID NO: 513959 - RNA, 19 nt, Artificial Sequence
  Description of Artificial Sequence: Synthetic oligonucleotide
uguucacuagaauaaugcg

SEQ ID NO: 513960 - RNA, 19 nt, Artificial Sequence
  Description of Artificial Sequence: Synthetic oligonucleotide
uaaucgaauauaagaagug

SEQ ID NO: 513961 - RNA, 19 nt, Artificial Sequence
  Description of Artificial Sequence: Synthetic oligonucleotide
acuuguaugccuucaagag

SEQ ID NO: 513962 - RNA, 19 nt, Artificial Sequence
  Description of Artificial Sequence: Synthetic oligonucleotide
ucuagaaugagcaggccca

SEQ ID NO: 513963 - RNA, 19 nt, Artificial Sequence
  Description of Artificial Sequence: Synthetic oligonucleotide
ucguuggucacucuugacg

SEQ ID NO: 513964 - RNA, 19 nt, Artificial Sequence
  Description of Artificial Sequence: Synthetic oligonucleotide
aagcaguauaaacuugggg

SEQ ID NO: 513965 - RNA, 19 nt, Artificial Sequence
  Description of Artificial Sequence: Synthetic oligonucleotide
uguuauuucauugguuagg

SEQ ID NO: 513966 - RNA, 19 nt, Artificial Sequence
  Description of Artificial Sequence: Synthetic oligonucleotide
acaugugcgaguccuaugg

SEQ ID NO: 513967 - RNA, 19 nt, Artificial Sequence
  Description of Artificial Sequence: Synthetic oligonucleotide
ucgaauauaagaaguggac

SEQ ID NO: 513968 - RNA, 19 nt, Artificial Sequence
  Description of Artificial Sequence: Synthetic oligonucleotide
ucaaccuguaacuugcuga

SEQ ID NO: 513969 - RNA, 19 nt, Artificial Sequence
  Description of Artificial Sequence: Synthetic oligonucleotide
uaaugcgugcuauuaacag

SEQ ID NO: 513970 - RNA, 19 nt, Artificial Sequence
  Description of Artificial Sequence: Synthetic oligonucleotide
ugagccgaacugaagaaag

SEQ ID NO: 513971 - RNA, 19 nt, Artificial Sequence
  Description of Artificial Sequence: Synthetic oligonucleotide
uaauuuaugucugauguuc

SEQ ID NO: 513972 - RNA, 19 nt, Artificial Sequence
  Description of Artificial Sequence: Synthetic oligonucleotide
ucguaguugcauuucagag

SEQ ID NO: 513973 - RNA, 19 nt, Artificial Sequence
  Description of Artificial Sequence: Synthetic oligonucleotide
uuuauagccacaugugcga

SEQ ID NO: 513974 - RNA, 19 nt, Artificial Sequence
  Description of Artificial Sequence: Synthetic oligonucleotide
cucgcugcauuuuauagcc

SEQ ID NO: 513975 - RNA, 19 nt, Artificial Sequence
  Description of Artificial Sequence: Synthetic oligonucleotide
acugaauuggucuuuugcu

SEQ ID NO: 513976 - RNA, 19 nt, Artificial Sequence
  Description of Artificial Sequence: Synthetic oligonucleotide
uuuguccggaggaucaagg

SEQ ID NO: 513977 - RNA, 19 nt, Artificial Sequence
  Description of Artificial Sequence: Synthetic oligonucleotide
uugguuaauuacuccgugg

SEQ ID NO: 513978 - RNA, 19 nt, Artificial Sequence
  Description of Artificial Sequence: Synthetic oligonucleotide
aggccaaguaggcacaccc

SEQ ID NO: 513979 - RNA, 19 nt, Artificial Sequence
  Description of Artificial Sequence: Synthetic oligonucleotide
aauauucacauaucucaaa

SEQ ID NO: 513980 - RNA, 19 nt, Artificial Sequence
  Description of Artificial Sequence: Synthetic oligonucleotide
acauaucucaaaguccacc

SEQ ID NO: 513981 - RNA, 19 nt, Artificial Sequence
  Description of Artificial Sequence: Synthetic oligonucleotide
ucacacaacgcugaaacgc

SEQ ID NO: 513982 - RNA, 19 nt, Artificial Sequence
  Description of Artificial Sequence: Synthetic oligonucleotide
ucaagcuuuguccggagga

SEQ ID NO: 513983 - RNA, 19 nt, Artificial Sequence
  Description of Artificial Sequence: Synthetic oligonucleotide
accaucuagaaugagcagg

SEQ ID NO: 513984 - RNA, 19 nt, Artificial Sequence
  Description of Artificial Sequence: Synthetic oligonucleotide
ucuguuagcuuaugaacug

SEQ ID NO: 513985 - RNA, 19 nt, Artificial Sequence
  Description of Artificial Sequence: Synthetic oligonucleotide
ucacggagcguucaaagca

SEQ ID NO: 513986 - RNA, 19 nt, Artificial Sequence
  Description of Artificial Sequence: Synthetic oligonucleotide
aaagucgaccugaaucacc

SEQ ID NO: 513987 - RNA, 19 nt, Artificial Sequence
  Description of Artificial Sequence: Synthetic oligonucleotide
uuucguaacagauggucac

SEQ ID NO: 513988 - RNA, 19 nt, Artificial Sequence
  Description of Artificial Sequence: Synthetic oligonucleotide
guaucuuuguauuugucuc

SEQ ID NO: 513989 - RNA, 19 nt, Artificial Sequence
  Description of Artificial Sequence: Synthetic oligonucleotide
uuagcuuaugaacuggguu

SEQ ID NO: 513990 - RNA, 19 nt, Artificial Sequence
  Description of Artificial Sequence: Synthetic oligonucleotide
uacuuuggauaacaagccc

SEQ ID NO: 513991 - RNA, 19 nt, Artificial Sequence
  Description of Artificial Sequence: Synthetic oligonucleotide
ugugugucacacuuguaug

SEQ ID NO: 513992 - RNA, 19 nt, Artificial Sequence
  Description of Artificial Sequence: Synthetic oligonucleotide
uacaugugcacauuccaga

SEQ ID NO: 513993 - RNA, 19 nt, Artificial Sequence
  Description of Artificial Sequence: Synthetic oligonucleotide
aaaagucgaccugaaucac

SEQ ID NO: 513994 - RNA, 19 nt, Artificial Sequence
  Description of Artificial Sequence: Synthetic oligonucleotide
uuuaaggaccugaguaucu

SEQ ID NO: 513995 - RNA, 19 nt, Artificial Sequence
  Description of Artificial Sequence: Synthetic oligonucleotide
gauggauucaccaucuaga

SEQ ID NO: 513996 - RNA, 19 nt, Artificial Sequence
  Description of Artificial Sequence: Synthetic oligonucleotide
uuagcaguacugaauuggu

SEQ ID NO: 513997 - RNA, 19 nt, Artificial Sequence
  Description of Artificial Sequence: Synthetic oligonucleotide
aaguggacaaauuguucca

SEQ ID NO: 513998 - RNA, 19 nt, Artificial Sequence
  Description of Artificial Sequence: Synthetic oligonucleotide
uugguuaggucuccaaaga

SEQ ID NO: 513999 - RNA, 19 nt, Artificial Sequence
  Description of Artificial Sequence: Synthetic oligonucleotide
ugugccacgaaguuuuccu

SEQ ID NO: 514000 - RNA, 19 nt, Artificial Sequence
  Description of Artificial Sequence: Synthetic oligonucleotide
uauuaacagcaguaugggc

SEQ ID NO: 514001 - RNA, 19 nt, Artificial Sequence
  Description of Artificial Sequence: Synthetic oligonucleotide
uuaaucuucacggagcguu

SEQ ID NO: 514002 - RNA, 19 nt, Artificial Sequence
  Description of Artificial Sequence: Synthetic oligonucleotide
guuccgaagauggaggagg

SEQ ID NO: 514003 - RNA, 19 nt, Artificial Sequence
  Description of Artificial Sequence: Synthetic oligonucleotide
ugaauagcuaaaagucgac

SEQ ID NO: 514004 - RNA, 19 nt, Artificial Sequence
  Description of Artificial Sequence: Synthetic oligonucleotide
ucucgcugcauuuuauagc

SEQ ID NO: 514005 - RNA, 19 nt, Artificial Sequence
  Description of Artificial Sequence: Synthetic oligonucleotide
aauauaagaaguggacaaa

SEQ ID NO: 514006 - RNA, 19 nt, Artificial Sequence
  Description of Artificial Sequence: Synthetic oligonucleotide
uguucguaguugcauuuca

SEQ ID NO: 514007 - RNA, 19 nt, Artificial Sequence
  Description of Artificial Sequence: Synthetic oligonucleotide
ugucgugacagcucccagg

SEQ ID NO: 514008 - RNA, 19 nt, Artificial Sequence
  Description of Artificial Sequence: Synthetic oligonucleotide
cuuuggauaacaagcccug

SEQ ID NO: 514009 - RNA, 19 nt, Artificial Sequence
  Description of Artificial Sequence: Synthetic oligonucleotide
uaaauguuguagcaucuuu

SEQ ID NO: 514010 - RNA, 19 nt, Artificial Sequence
  Description of Artificial Sequence: Synthetic oligonucleotide
gaauagcuaaaagucgacc

SEQ ID NO: 514011 - RNA, 19 nt, Artificial Sequence
  Description of Artificial Sequence: Synthetic oligonucleotide
ugccacgaaguuuuccugg

SEQ ID NO: 514012 - RNA, 19 nt, Artificial Sequence
  Description of Artificial Sequence: Synthetic oligonucleotide
aaacuccuuguuccgaaga

SEQ ID NO: 514013 - RNA, 19 nt, Artificial Sequence
  Description of Artificial Sequence: Synthetic oligonucleotide
gcuucgaucagucacacca

SEQ ID NO: 514014 - RNA, 19 nt, Artificial Sequence
  Description of Artificial Sequence: Synthetic oligonucleotide
ccuagagaaaaccagacuc

SEQ ID NO: 514015 - RNA, 19 nt, Artificial Sequence
  Description of Artificial Sequence: Synthetic oligonucleotide
ggugguaagcuuuaauggc

SEQ ID NO: 514016 - RNA, 19 nt, Artificial Sequence
  Description of Artificial Sequence: Synthetic oligonucleotide
caagcaguauaaacuuggg

SEQ ID NO: 514017 - RNA, 19 nt, Artificial Sequence
  Description of Artificial Sequence: Synthetic oligonucleotide
ugggcauauagucuccaga

SEQ ID NO: 514018 - RNA, 19 nt, Artificial Sequence
  Description of Artificial Sequence: Synthetic oligonucleotide
guaguugcauuucagagcu

SEQ ID NO: 514019 - RNA, 19 nt, Artificial Sequence
  Description of Artificial Sequence: Synthetic oligonucleotide
uuccgaagauggaggaggg

SEQ ID NO: 514020 - RNA, 19 nt, Artificial Sequence
  Description of Artificial Sequence: Synthetic oligonucleotide
gaaacgccuuugcugagcc

SEQ ID NO: 514021 - RNA, 19 nt, Artificial Sequence
  Description of Artificial Sequence: Synthetic oligonucleotide
auagccacaugugcgaguc

SEQ ID NO: 514022 - RNA, 19 nt, Artificial Sequence
  Description of Artificial Sequence: Synthetic oligonucleotide
gcauuaucagguuccaggg

SEQ ID NO: 514023 - RNA, 19 nt, Artificial Sequence
  Description of Artificial Sequence: Synthetic oligonucleotide
uuuaugucugauguucacu

SEQ ID NO: 514024 - RNA, 19 nt, Artificial Sequence
  Description of Artificial Sequence: Synthetic oligonucleotide
aguauaaacuugggguuuc

SEQ ID NO: 514025 - RNA, 19 nt, Artificial Sequence
  Description of Artificial Sequence: Synthetic oligonucleotide
caucugaaacuguucacug

SEQ ID NO: 514026 - RNA, 19 nt, Artificial Sequence
  Description of Artificial Sequence: Synthetic oligonucleotide
cuagaaucagcugugccac

SEQ ID NO: 514027 - RNA, 19 nt, Artificial Sequence
  Description of Artificial Sequence: Synthetic oligonucleotide
uuuuaaggaccugaguauc

SEQ ID NO: 514028 - RNA, 19 nt, Artificial Sequence
  Description of Artificial Sequence: Synthetic oligonucleotide
ugcuuuacuuuggauaaca

SEQ ID NO: 514029 - RNA, 19 nt, Artificial Sequence
  Description of Artificial Sequence: Synthetic oligonucleotide
ggcucuuugaacaacuucc

SEQ ID NO: 514030 - RNA, 19 nt, Artificial Sequence
  Description of Artificial Sequence: Synthetic oligonucleotide
cuuugaccucacuaaacug

SEQ ID NO: 514031 - RNA, 19 nt, Artificial Sequence
  Description of Artificial Sequence: Synthetic oligonucleotide
uucguaacagauggucacg

SEQ ID NO: 514032 - RNA, 19 nt, Artificial Sequence
  Description of Artificial Sequence: Synthetic oligonucleotide
uucacggagcguucaaagc

SEQ ID NO: 514033 - RNA, 19 nt, Artificial Sequence
  Description of Artificial Sequence: Synthetic oligonucleotide
uuaauuuaugucugauguu

SEQ ID NO: 514034 - RNA, 19 nt, Artificial Sequence
  Description of Artificial Sequence: Synthetic oligonucleotide
guaaauugagccgaacuga

SEQ ID NO: 514035 - RNA, 19 nt, Artificial Sequence
  Description of Artificial Sequence: Synthetic oligonucleotide
ugugcgaguccuauggcuc

SEQ ID NO: 514036 - RNA, 19 nt, Artificial Sequence
  Description of Artificial Sequence: Synthetic oligonucleotide
uggaauugaauagcuaaaa

SEQ ID NO: 514037 - RNA, 19 nt, Artificial Sequence
  Description of Artificial Sequence: Synthetic oligonucleotide
gggauuaaucuucacggag

SEQ ID NO: 514038 - RNA, 19 nt, Artificial Sequence
  Description of Artificial Sequence: Synthetic oligonucleotide
gguugcuuaggucuuguag

SEQ ID NO: 514039 - RNA, 19 nt, Artificial Sequence
  Description of Artificial Sequence: Synthetic oligonucleotide
cugaguaucuuuguauuug

SEQ ID NO: 514040 - RNA, 19 nt, Artificial Sequence
  Description of Artificial Sequence: Synthetic oligonucleotide
auguuguagcaucuuucuc

SEQ ID NO: 514041 - RNA, 19 nt, Artificial Sequence
  Description of Artificial Sequence: Synthetic oligonucleotide
cauauagucuccagauuuc

SEQ ID NO: 514042 - RNA, 19 nt, Artificial Sequence
  Description of Artificial Sequence: Synthetic oligonucleotide
uccuuugaccucacuaaac

SEQ ID NO: 514043 - RNA, 19 nt, Artificial Sequence
  Description of Artificial Sequence: Synthetic oligonucleotide
cuugguuaauuacuccgug

SEQ ID NO: 514044 - RNA, 19 nt, Artificial Sequence
  Description of Artificial Sequence: Synthetic oligonucleotide
ucgaccugaaucaccuuca

SEQ ID NO: 514045 - RNA, 19 nt, Artificial Sequence
  Description of Artificial Sequence: Synthetic oligonucleotide
aucgaauauaagaagugga

SEQ ID NO: 514046 - RNA, 19 nt, Artificial Sequence
  Description of Artificial Sequence: Synthetic oligonucleotide
uucgaagccgguugcuuag

SEQ ID NO: 514047 - RNA, 19 nt, Artificial Sequence
  Description of Artificial Sequence: Synthetic oligonucleotide
gagcaagccugcaagcugg

SEQ ID NO: 514048 - RNA, 19 nt, Artificial Sequence
  Description of Artificial Sequence: Synthetic oligonucleotide
cagaucaaccuguaacuug

SEQ ID NO: 514049 - RNA, 19 nt, Artificial Sequence
  Description of Artificial Sequence: Synthetic oligonucleotide
auauaagaaguggacaaau

SEQ ID NO: 514050 - RNA, 19 nt, Artificial Sequence
  Description of Artificial Sequence: Synthetic oligonucleotide
aagucgaccugaaucaccu

SEQ ID NO: 514051 - RNA, 19 nt, Artificial Sequence
  Description of Artificial Sequence: Synthetic oligonucleotide
uugcuuaggucuuguagcu

SEQ ID NO: 514052 - RNA, 19 nt, Artificial Sequence
  Description of Artificial Sequence: Synthetic oligonucleotide
uagcuguuauuucauuggu

SEQ ID NO: 514053 - RNA, 19 nt, Artificial Sequence
  Description of Artificial Sequence: Synthetic oligonucleotide
aaacgccuuugcugagccc

SEQ ID NO: 514054 - RNA, 19 nt, Artificial Sequence
  Description of Artificial Sequence: Synthetic oligonucleotide
acuagaauaaugcgugcua

SEQ ID NO: 514055 - RNA, 19 nt, Artificial Sequence
  Description of Artificial Sequence: Synthetic oligonucleotide
auagcaggagugguccugc

SEQ ID NO: 514056 - RNA, 19 nt, Artificial Sequence
  Description of Artificial Sequence: Synthetic oligonucleotide
gaaacuccuuguuccgaag

SEQ ID NO: 514057 - RNA, 19 nt, Artificial Sequence
  Description of Artificial Sequence: Synthetic oligonucleotide
uaacagauggucacgucuu

SEQ ID NO: 514058 - RNA, 19 nt, Artificial Sequence
  Description of Artificial Sequence: Synthetic oligonucleotide
aaauugagccgaacugaag

SEQ ID NO: 514059 - RNA, 19 nt, Artificial Sequence
  Description of Artificial Sequence: Synthetic oligonucleotide
aggaucaaggcugacgucu

SEQ ID NO: 514060 - RNA, 19 nt, Artificial Sequence
  Description of Artificial Sequence: Synthetic oligonucleotide
aguaugggcuuugagguca

SEQ ID NO: 514061 - RNA, 19 nt, Artificial Sequence
  Description of Artificial Sequence: Synthetic oligonucleotide
ugcaugggauuaaucuuca

SEQ ID NO: 514062 - RNA, 19 nt, Artificial Sequence
  Description of Artificial Sequence: Synthetic oligonucleotide
uagcuaaaagucgaccuga

SEQ ID NO: 514063 - RNA, 19 nt, Artificial Sequence
  Description of Artificial Sequence: Synthetic oligonucleotide
gucauagcaggaguggucc

SEQ ID NO: 514064 - RNA, 19 nt, Artificial Sequence
  Description of Artificial Sequence: Synthetic oligonucleotide
agcucaagauucuugguua

SEQ ID NO: 514065 - RNA, 19 nt, Artificial Sequence
  Description of Artificial Sequence: Synthetic oligonucleotide
gguuaauuacuccgugggg

SEQ ID NO: 514066 - RNA, 19 nt, Artificial Sequence
  Description of Artificial Sequence: Synthetic oligonucleotide
uccgcuucgaucagucaca

SEQ ID NO: 514067 - RNA, 19 nt, Artificial Sequence
  Description of Artificial Sequence: Synthetic oligonucleotide
gaauaaugcgugcuauuaa

SEQ ID NO: 514068 - RNA, 19 nt, Artificial Sequence
  Description of Artificial Sequence: Synthetic oligonucleotide
ugggauuaaucuucacgga

SEQ ID NO: 514069 - RNA, 19 nt, Artificial Sequence
  Description of Artificial Sequence: Synthetic oligonucleotide
cuuucguaacagaugguca

SEQ ID NO: 514070 - RNA, 19 nt, Artificial Sequence
  Description of Artificial Sequence: Synthetic oligonucleotide
aggucaggcaucugaaacu

SEQ ID NO: 514071 - RNA, 19 nt, Artificial Sequence
  Description of Artificial Sequence: Synthetic oligonucleotide
ucaagauucuugguuaauu

SEQ ID NO: 514072 - RNA, 19 nt, Artificial Sequence
  Description of Artificial Sequence: Synthetic oligonucleotide
auugagccgaacugaagaa

SEQ ID NO: 514073 - RNA, 19 nt, Artificial Sequence
  Description of Artificial Sequence: Synthetic oligonucleotide
cuuuagcaguacugaauug

SEQ ID NO: 514074 - RNA, 19 nt, Artificial Sequence
  Description of Artificial Sequence: Synthetic oligonucleotide
cucuugacgucacucugcc

SEQ ID NO: 514075 - RNA, 19 nt, Artificial Sequence
  Description of Artificial Sequence: Synthetic oligonucleotide
acccuagagaaaaccagac

SEQ ID NO: 514076 - RNA, 19 nt, Artificial Sequence
  Description of Artificial Sequence: Synthetic oligonucleotide
augcgugcuauuaacagca

SEQ ID NO: 514077 - RNA, 19 nt, Artificial Sequence
  Description of Artificial Sequence: Synthetic oligonucleotide
uuguccggaggaucaaggc

SEQ ID NO: 514078 - RNA, 19 nt, Artificial Sequence
  Description of Artificial Sequence: Synthetic oligonucleotide
uuucaagcuuuguccggag

SEQ ID NO: 514079 - RNA, 19 nt, Artificial Sequence
  Description of Artificial Sequence: Synthetic oligonucleotide
uuauagccacaugugcgag

SEQ ID NO: 514080 - RNA, 19 nt, Artificial Sequence
  Description of Artificial Sequence: Synthetic oligonucleotide
cagaauaacagcauccagu

SEQ ID NO: 514081 - RNA, 19 nt, Artificial Sequence
  Description of Artificial Sequence: Synthetic oligonucleotide
ggauuaaucuucacggagc

SEQ ID NO: 514082 - RNA, 19 nt, Artificial Sequence
  Description of Artificial Sequence: Synthetic oligonucleotide
guacuggacaacaauagaa

SEQ ID NO: 514083 - RNA, 19 nt, Artificial Sequence
  Description of Artificial Sequence: Synthetic oligonucleotide
augaugugaaggccagcag

SEQ ID NO: 514084 - RNA, 19 nt, Artificial Sequence
  Description of Artificial Sequence: Synthetic oligonucleotide
cuuugguugugaaaguaaa

SEQ ID NO: 514085 - RNA, 19 nt, Artificial Sequence
  Description of Artificial Sequence: Synthetic oligonucleotide
guaacagauggucacgucu

SEQ ID NO: 514086 - RNA, 19 nt, Artificial Sequence
  Description of Artificial Sequence: Synthetic oligonucleotide
aucguuggucacucuugac

SEQ ID NO: 514087 - RNA, 19 nt, Artificial Sequence
  Description of Artificial Sequence: Synthetic oligonucleotide
ccaacaauuggacugugug

SEQ ID NO: 514088 - RNA, 19 nt, Artificial Sequence
  Description of Artificial Sequence: Synthetic oligonucleotide
cuccgcuucgaucagucac

SEQ ID NO: 514089 - RNA, 19 nt, Artificial Sequence
  Description of Artificial Sequence: Synthetic oligonucleotide
augugcgaguccuauggcu

SEQ ID NO: 514090 - RNA, 19 nt, Artificial Sequence
  Description of Artificial Sequence: Synthetic oligonucleotide
uugggcauauagucuccag

SEQ ID NO: 514091 - RNA, 19 nt, Artificial Sequence
  Description of Artificial Sequence: Synthetic oligonucleotide
cuguuagcuuaugaacugg

SEQ ID NO: 514092 - RNA, 19 nt, Artificial Sequence
  Description of Artificial Sequence: Synthetic oligonucleotide
acacccuagagaaaaccag

SEQ ID NO: 514093 - RNA, 19 nt, Artificial Sequence
  Description of Artificial Sequence: Synthetic oligonucleotide
auaaugcgugcuauuaaca

SEQ ID NO: 514094 - RNA, 19 nt, Artificial Sequence
  Description of Artificial Sequence: Synthetic oligonucleotide
uuucgaagccgguugcuua

SEQ ID NO: 514095 - RNA, 19 nt, Artificial Sequence
  Description of Artificial Sequence: Synthetic oligonucleotide
uucucccaacaauuggacu

SEQ ID NO: 514096 - RNA, 19 nt, Artificial Sequence
  Description of Artificial Sequence: Synthetic oligonucleotide
ggugaauauucacauaucu

SEQ ID NO: 514097 - RNA, 19 nt, Artificial Sequence
  Description of Artificial Sequence: Synthetic oligonucleotide
ccaagcaagcaguauaaac

SEQ ID NO: 514098 - RNA, 19 nt, Artificial Sequence
  Description of Artificial Sequence: Synthetic oligonucleotide
uuauuucauugguuagguc

SEQ ID NO: 514099 - RNA, 19 nt, Artificial Sequence
  Description of Artificial Sequence: Synthetic oligonucleotide
agccgaacugaagaaagug

SEQ ID NO: 514100 - RNA, 19 nt, Artificial Sequence
  Description of Artificial Sequence: Synthetic oligonucleotide
accugaguaucuuuguauu

SEQ ID NO: 514101 - RNA, 19 nt, Artificial Sequence
  Description of Artificial Sequence: Synthetic oligonucleotide
acaauuggacuguguguca

SEQ ID NO: 514102 - RNA, 19 nt, Artificial Sequence
  Description of Artificial Sequence: Synthetic oligonucleotide
caggcuuuucacuccgccc

SEQ ID NO: 514103 - RNA, 19 nt, Artificial Sequence
  Description of Artificial Sequence: Synthetic oligonucleotide
ucgaucagucacaccauua

SEQ ID NO: 514104 - RNA, 19 nt, Artificial Sequence
  Description of Artificial Sequence: Synthetic oligonucleotide
uagaaucagcugugccacg

SEQ ID NO: 514105 - RNA, 19 nt, Artificial Sequence
  Description of Artificial Sequence: Synthetic oligonucleotide
ccucuguuagcuuaugaac

SEQ ID NO: 514106 - RNA, 19 nt, Artificial Sequence
  Description of Artificial Sequence: Synthetic oligonucleotide
ugauguucacuagaauaau

SEQ ID NO: 514107 - RNA, 19 nt, Artificial Sequence
  Description of Artificial Sequence: Synthetic oligonucleotide
cacggagcguucaaagcac

SEQ ID NO: 514108 - RNA, 19 nt, Artificial Sequence
  Description of Artificial Sequence: Synthetic oligonucleotide
cacacccuagagaaaacca

SEQ ID NO: 514109 - RNA, 19 nt, Artificial Sequence
  Description of Artificial Sequence: Synthetic oligonucleotide
caguacugguuucgaagcc

SEQ ID NO: 514110 - RNA, 19 nt, Artificial Sequence
  Description of Artificial Sequence: Synthetic oligonucleotide
acuccggugucgugacagc

SEQ ID NO: 514111 - RNA, 19 nt, Artificial Sequence
  Description of Artificial Sequence: Synthetic oligonucleotide
ucauugguuaggucuccaa

SEQ ID NO: 514112 - RNA, 19 nt, Artificial Sequence
  Description of Artificial Sequence: Synthetic oligonucleotide
cguaguugcauuucagagc

SEQ ID NO: 514113 - RNA, 19 nt, Artificial Sequence
  Description of Artificial Sequence: Synthetic oligonucleotide
guucacuagaauaaugcgu

SEQ ID NO: 514114 - RNA, 19 nt, Artificial Sequence
  Description of Artificial Sequence: Synthetic oligonucleotide
cggugguaagcuuuaaugg

SEQ ID NO: 514115 - RNA, 19 nt, Artificial Sequence
  Description of Artificial Sequence: Synthetic oligonucleotide
ucguaacagauggucacgu

SEQ ID NO: 514116 - RNA, 19 nt, Artificial Sequence
  Description of Artificial Sequence: Synthetic oligonucleotide
ccggugguaagcuuuaaug

SEQ ID NO: 514117 - RNA, 19 nt, Artificial Sequence
  Description of Artificial Sequence: Synthetic oligonucleotide
aacuuccuuaaauguugua

SEQ ID NO: 514118 - RNA, 19 nt, Artificial Sequence
  Description of Artificial Sequence: Synthetic oligonucleotide
aggaccugaguaucuuugu

SEQ ID NO: 514119 - RNA, 19 nt, Artificial Sequence
  Description of Artificial Sequence: Synthetic oligonucleotide
agaaucagcugugccacga

SEQ ID NO: 514120 - RNA, 19 nt, Artificial Sequence
  Description of Artificial Sequence: Synthetic oligonucleotide
ucagaucaaccuguaacuu

SEQ ID NO: 514121 - RNA, 19 nt, Artificial Sequence
  Description of Artificial Sequence: Synthetic oligonucleotide
auggucacgucuucccaca

SEQ ID NO: 514122 - RNA, 19 nt, Artificial Sequence
  Description of Artificial Sequence: Synthetic oligonucleotide
ggguacuggacaacaauag

SEQ ID NO: 514123 - RNA, 19 nt, Artificial Sequence
  Description of Artificial Sequence: Synthetic oligonucleotide
uucaggcguuccaguacag

SEQ ID NO: 514124 - RNA, 19 nt, Artificial Sequence
  Description of Artificial Sequence: Synthetic oligonucleotide
ugcgugcuauuaacagcag

SEQ ID NO: 514125 - RNA, 19 nt, Artificial Sequence
  Description of Artificial Sequence: Synthetic oligonucleotide
gacgucacucugccgaaca

SEQ ID NO: 514126 - RNA, 19 nt, Artificial Sequence
  Description of Artificial Sequence: Synthetic oligonucleotide
gaagccgguugcuuagguc

SEQ ID NO: 514127 - RNA, 19 nt, Artificial Sequence
  Description of Artificial Sequence: Synthetic oligonucleotide
acaugaugugaaggccagc

SEQ ID NO: 514128 - RNA, 19 nt, Artificial Sequence
  Description of Artificial Sequence: Synthetic oligonucleotide
cacccuagagaaaaccaga

SEQ ID NO: 514129 - RNA, 19 nt, Artificial Sequence
  Description of Artificial Sequence: Synthetic oligonucleotide
caugugcgaguccuauggc

SEQ ID NO: 514130 - RNA, 19 nt, Artificial Sequence
  Description of Artificial Sequence: Synthetic oligonucleotide
uaugaacuggguuguucuu

SEQ ID NO: 514131 - RNA, 19 nt, Artificial Sequence
  Description of Artificial Sequence: Synthetic oligonucleotide
guaugccuucaagagacac

SEQ ID NO: 514132 - RNA, 19 nt, Artificial Sequence
  Description of Artificial Sequence: Synthetic oligonucleotide
aagcugcaugggauuaauc

SEQ ID NO: 514133 - RNA, 19 nt, Artificial Sequence
  Description of Artificial Sequence: Synthetic oligonucleotide
uugagccgaacugaagaaa

SEQ ID NO: 514134 - RNA, 19 nt, Artificial Sequence
  Description of Artificial Sequence: Synthetic oligonucleotide
ugcuugguacagucaguac

SEQ ID NO: 514135 - RNA, 19 nt, Artificial Sequence
  Description of Artificial Sequence: Synthetic oligonucleotide
gguacuggacaacaauaga

SEQ ID NO: 514136 - RNA, 19 nt, Artificial Sequence
  Description of Artificial Sequence: Synthetic oligonucleotide
aacucacuccuggaaggga

SEQ ID NO: 514137 - RNA, 19 nt, Artificial Sequence
  Description of Artificial Sequence: Synthetic oligonucleotide
guccuauggcucuuugaac

SEQ ID NO: 514138 - RNA, 19 nt, Artificial Sequence
  Description of Artificial Sequence: Synthetic oligonucleotide
gaccugaguaucuuuguau

SEQ ID NO: 514139 - RNA, 19 nt, Artificial Sequence
  Description of Artificial Sequence: Synthetic oligonucleotide
cacuccggugucgugacag

SEQ ID NO: 514140 - RNA, 19 nt, Artificial Sequence
  Description of Artificial Sequence: Synthetic oligonucleotide
agucaguacugguuucgaa

SEQ ID NO: 514141 - RNA, 19 nt, Artificial Sequence
  Description of Artificial Sequence: Synthetic oligonucleotide
ugcugagcccauguagucu

SEQ ID NO: 514142 - RNA, 19 nt, Artificial Sequence
  Description of Artificial Sequence: Synthetic oligonucleotide
gaguccuauggcucuuuga

SEQ ID NO: 514143 - RNA, 19 nt, Artificial Sequence
  Description of Artificial Sequence: Synthetic oligonucleotide
ugcccugaccagaauuuua

SEQ ID NO: 514144 - RNA, 19 nt, Artificial Sequence
  Description of Artificial Sequence: Synthetic oligonucleotide
cauagcaggagugguccug

SEQ ID NO: 514145 - RNA, 19 nt, Artificial Sequence
  Description of Artificial Sequence: Synthetic oligonucleotide
guauaaacuugggguuucc

SEQ ID NO: 514146 - RNA, 19 nt, Artificial Sequence
  Description of Artificial Sequence: Synthetic oligonucleotide
cuuuguccggaggaucaag

SEQ ID NO: 514147 - RNA, 19 nt, Artificial Sequence
  Description of Artificial Sequence: Synthetic oligonucleotide
uccggugucgugacagcuc

SEQ ID NO: 514148 - RNA, 19 nt, Artificial Sequence
  Description of Artificial Sequence: Synthetic oligonucleotide
ucauagcaggagugguccu

SEQ ID NO: 514149 - RNA, 19 nt, Artificial Sequence
  Description of Artificial Sequence: Synthetic oligonucleotide
guuuuccuggaaccguguc

SEQ ID NO: 514150 - RNA, 19 nt, Artificial Sequence
  Description of Artificial Sequence: Synthetic oligonucleotide
uucccaugcugccccgccc

SEQ ID NO: 514151 - RNA, 19 nt, Artificial Sequence
  Description of Artificial Sequence: Synthetic oligonucleotide
ugcacuccggugucgugac

SEQ ID NO: 514152 - RNA, 19 nt, Artificial Sequence
  Description of Artificial Sequence: Synthetic oligonucleotide
ggagcguucaaagcacucc

SEQ ID NO: 514153 - RNA, 19 nt, Artificial Sequence
  Description of Artificial Sequence: Synthetic oligonucleotide
gaaguuuuccuggaaccgu

SEQ ID NO: 514154 - RNA, 19 nt, Artificial Sequence
  Description of Artificial Sequence: Synthetic oligonucleotide
cuucccaugcugccccgcc

SEQ ID NO: 514155 - RNA, 19 nt, Artificial Sequence
  Description of Artificial Sequence: Synthetic oligonucleotide
auuaaucuucacggagcgu

SEQ ID NO: 514156 - RNA, 19 nt, Artificial Sequence
  Description of Artificial Sequence: Synthetic oligonucleotide
acuccaagcugcaugggau

SEQ ID NO: 514157 - RNA, 19 nt, Artificial Sequence
  Description of Artificial Sequence: Synthetic oligonucleotide
uugacgucacucugccgaa

SEQ ID NO: 514158 - RNA, 19 nt, Artificial Sequence
  Description of Artificial Sequence: Synthetic oligonucleotide
cauccaguccuuugaccuc

SEQ ID NO: 514159 - RNA, 19 nt, Artificial Sequence
  Description of Artificial Sequence: Synthetic oligonucleotide
acgcugaaacgccuuugcu

SEQ ID NO: 514160 - RNA, 19 nt, Artificial Sequence
  Description of Artificial Sequence: Synthetic oligonucleotide
gugccacgaaguuuuccug

SEQ ID NO: 514161 - RNA, 19 nt, Artificial Sequence
  Description of Artificial Sequence: Synthetic oligonucleotide
cuauggcucuuugaacaac

SEQ ID NO: 514162 - RNA, 19 nt, Artificial Sequence
  Description of Artificial Sequence: Synthetic oligonucleotide
cacaugugcgaguccuaug

SEQ ID NO: 514163 - RNA, 19 nt, Artificial Sequence
  Description of Artificial Sequence: Synthetic oligonucleotide
caacaauuggacugugugu

SEQ ID NO: 514164 - RNA, 19 nt, Artificial Sequence
  Description of Artificial Sequence: Synthetic oligonucleotide
ccagaauaacagcauccag

SEQ ID NO: 514165 - RNA, 19 nt, Artificial Sequence
  Description of Artificial Sequence: Synthetic oligonucleotide
cugaaacgccuuugcugag

SEQ ID NO: 514166 - RNA, 19 nt, Artificial Sequence
  Description of Artificial Sequence: Synthetic oligonucleotide
cugccgaacaacuccugca

SEQ ID NO: 514167 - RNA, 19 nt, Artificial Sequence
  Description of Artificial Sequence: Synthetic oligonucleotide
ugcucucgcugcauuuuau

SEQ ID NO: 514168 - RNA, 19 nt, Artificial Sequence
  Description of Artificial Sequence: Synthetic oligonucleotide
acaacgcugaaacgccuuu

SEQ ID NO: 514169 - RNA, 19 nt, Artificial Sequence
  Description of Artificial Sequence: Synthetic oligonucleotide
gccgaacugaagaaagugc

SEQ ID NO: 514170 - RNA, 19 nt, Artificial Sequence
  Description of Artificial Sequence: Synthetic oligonucleotide
ccaaguaggcacacccuag

SEQ ID NO: 514171 - RNA, 19 nt, Artificial Sequence
  Description of Artificial Sequence: Synthetic oligonucleotide
ucgaagccgguugcuuagg

SEQ ID NO: 514172 - RNA, 19 nt, Artificial Sequence
  Description of Artificial Sequence: Synthetic oligonucleotide
caucguuggucacucuuga

SEQ ID NO: 514173 - RNA, 19 nt, Artificial Sequence
  Description of Artificial Sequence: Synthetic oligonucleotide
uggucacucuugacgucac

SEQ ID NO: 514174 - RNA, 19 nt, Artificial Sequence
  Description of Artificial Sequence: Synthetic oligonucleotide
gaaucaccuucaaauaaau

SEQ ID NO: 514175 - RNA, 19 nt, Artificial Sequence
  Description of Artificial Sequence: Synthetic oligonucleotide
caguaugggcuuugagguc

SEQ ID NO: 514176 - RNA, 19 nt, Artificial Sequence
  Description of Artificial Sequence: Synthetic oligonucleotide
caguccuuugaccucacua

SEQ ID NO: 514177 - RNA, 19 nt, Artificial Sequence
  Description of Artificial Sequence: Synthetic oligonucleotide
gcccagaauaacagcaucc

SEQ ID NO: 514178 - RNA, 19 nt, Artificial Sequence
  Description of Artificial Sequence: Synthetic oligonucleotide
gugguaagcuuuaauggcu

SEQ ID NO: 514179 - RNA, 19 nt, Artificial Sequence
  Description of Artificial Sequence: Synthetic oligonucleotide
uucccagauuugccagugu

SEQ ID NO: 514180 - RNA, 19 nt, Artificial Sequence
  Description of Artificial Sequence: Synthetic oligonucleotide
guccuuugaccucacuaaa

SEQ ID NO: 514181 - RNA, 19 nt, Artificial Sequence
  Description of Artificial Sequence: Synthetic oligonucleotide
uccugacaucuagaaucag

SEQ ID NO: 514182 - RNA, 19 nt, Artificial Sequence
  Description of Artificial Sequence: Synthetic oligonucleotide
ucgugacagcucccaggcc

SEQ ID NO: 514183 - RNA, 19 nt, Artificial Sequence
  Description of Artificial Sequence: Synthetic oligonucleotide
cugacgucugaauggccca

SEQ ID NO: 514184 - RNA, 19 nt, Artificial Sequence
  Description of Artificial Sequence: Synthetic oligonucleotide
caguuuucagcaagagcaa

SEQ ID NO: 514185 - RNA, 19 nt, Artificial Sequence
  Description of Artificial Sequence: Synthetic oligonucleotide
acgucuucccacaucucca

SEQ ID NO: 514186 - RNA, 19 nt, Artificial Sequence
  Description of Artificial Sequence: Synthetic oligonucleotide
ggcguuccaguacagaugu

SEQ ID NO: 514187 - RNA, 19 nt, Artificial Sequence
  Description of Artificial Sequence: Synthetic oligonucleotide
augucuccgcuucgaucag

SEQ ID NO: 514188 - RNA, 19 nt, Artificial Sequence
  Description of Artificial Sequence: Synthetic oligonucleotide
guuggucacucuugacguc

SEQ ID NO: 514189 - RNA, 19 nt, Artificial Sequence
  Description of Artificial Sequence: Synthetic oligonucleotide
uuuggagcgcugggcacgu

SEQ ID NO: 514190 - RNA, 19 nt, Artificial Sequence
  Description of Artificial Sequence: Synthetic oligonucleotide
gcccaacucaaagagcaag

SEQ ID NO: 514191 - RNA, 19 nt, Artificial Sequence
  Description of Artificial Sequence: Synthetic oligonucleotide
acucacuccuggaagggau

SEQ ID NO: 514192 - RNA, 19 nt, Artificial Sequence
  Description of Artificial Sequence: Synthetic oligonucleotide
cugaauuggucuuuugcuu

SEQ ID NO: 514193 - RNA, 19 nt, Artificial Sequence
  Description of Artificial Sequence: Synthetic oligonucleotide
ccaucguuggucacucuug

SEQ ID NO: 514194 - RNA, 19 nt, Artificial Sequence
  Description of Artificial Sequence: Synthetic oligonucleotide
gugucgugacagcucccag

SEQ ID NO: 514195 - RNA, 19 nt, Artificial Sequence
  Description of Artificial Sequence: Synthetic oligonucleotide
ccaacaaagcagccauagc

SEQ ID NO: 514196 - RNA, 19 nt, Artificial Sequence
  Description of Artificial Sequence: Synthetic oligonucleotide
cugugccacgaaguuuucc

SEQ ID NO: 514197 - RNA, 19 nt, Artificial Sequence
  Description of Artificial Sequence: Synthetic oligonucleotide
cgcugaaacgccuuugcug

SEQ ID NO: 514198 - RNA, 19 nt, Artificial Sequence
  Description of Artificial Sequence: Synthetic oligonucleotide
ugcuuaggucuuguagcuc

SEQ ID NO: 514199 - RNA, 19 nt, Artificial Sequence
  Description of Artificial Sequence: Synthetic oligonucleotide
ugccccgcccuuucguaac

SEQ ID NO: 514200 - RNA, 19 nt, Artificial Sequence
  Description of Artificial Sequence: Synthetic oligonucleotide
uccacucgccgugugcuuc

SEQ ID NO: 514201 - RNA, 19 nt, Artificial Sequence
  Description of Artificial Sequence: Synthetic oligonucleotide
agcuguuauuucauugguu

SEQ ID NO: 514202 - RNA, 19 nt, Artificial Sequence
  Description of Artificial Sequence: Synthetic oligonucleotide
cacugucugcuuaacuuua

SEQ ID NO: 514203 - RNA, 19 nt, Artificial Sequence
  Description of Artificial Sequence: Synthetic oligonucleotide
ccagggucacacaacgcug

SEQ ID NO: 514204 - RNA, 19 nt, Artificial Sequence
  Description of Artificial Sequence: Synthetic oligonucleotide
gggcauauagucuccagau

SEQ ID NO: 514205 - RNA, 19 nt, Artificial Sequence
  Description of Artificial Sequence: Synthetic oligonucleotide
gguuaggucuccaaagacu

SEQ ID NO: 514206 - RNA, 19 nt, Artificial Sequence
  Description of Artificial Sequence: Synthetic oligonucleotide
ugaggcgagcgcuccucaa

SEQ ID NO: 514207 - RNA, 19 nt, Artificial Sequence
  Description of Artificial Sequence: Synthetic oligonucleotide
gcaguauaaacuugggguu

SEQ ID NO: 514208 - RNA, 19 nt, Artificial Sequence
  Description of Artificial Sequence: Synthetic oligonucleotide
guuagcuuaugaacugggu

SEQ ID NO: 514209 - RNA, 19 nt, Artificial Sequence
  Description of Artificial Sequence: Synthetic oligonucleotide
ccggugucgugacagcucc

SEQ ID NO: 514210 - RNA, 19 nt, Artificial Sequence
  Description of Artificial Sequence: Synthetic oligonucleotide
cgaauauaagaaguggaca

SEQ ID NO: 514211 - RNA, 19 nt, Artificial Sequence
  Description of Artificial Sequence: Synthetic oligonucleotide
guguucguaguugcauuuc

SEQ ID NO: 514212 - RNA, 19 nt, Artificial Sequence
  Description of Artificial Sequence: Synthetic oligonucleotide
ucccaacaauuggacugug

SEQ ID NO: 514213 - RNA, 19 nt, Artificial Sequence
  Description of Artificial Sequence: Synthetic oligonucleotide
gcaucuuucucccaacaau

SEQ ID NO: 514214 - RNA, 19 nt, Artificial Sequence
  Description of Artificial Sequence: Synthetic oligonucleotide
acgucacucugccgaacaa

SEQ ID NO: 514215 - RNA, 19 nt, Artificial Sequence
  Description of Artificial Sequence: Synthetic oligonucleotide
gugcacauuccagauggaa

SEQ ID NO: 514216 - RNA, 19 nt, Artificial Sequence
  Description of Artificial Sequence: Synthetic oligonucleotide
acacaacgcugaaacgccu

SEQ ID NO: 514217 - RNA, 19 nt, Artificial Sequence
  Description of Artificial Sequence: Synthetic oligonucleotide
agcuaaaagucgaccugaa

SEQ ID NO: 514218 - RNA, 19 nt, Artificial Sequence
  Description of Artificial Sequence: Synthetic oligonucleotide
gccgaacaacuccugcagc

SEQ ID NO: 514219 - RNA, 19 nt, Artificial Sequence
  Description of Artificial Sequence: Synthetic oligonucleotide
cacuagaauaaugcgugcu

SEQ ID NO: 514220 - RNA, 19 nt, Artificial Sequence
  Description of Artificial Sequence: Synthetic oligonucleotide
cauuaucagguuccagggu

SEQ ID NO: 514221 - RNA, 19 nt, Artificial Sequence
  Description of Artificial Sequence: Synthetic oligonucleotide
ggaucaaggcugacgucug

SEQ ID NO: 514222 - RNA, 19 nt, Artificial Sequence
  Description of Artificial Sequence: Synthetic oligonucleotide
acucgccgugugcuuccuc

SEQ ID NO: 514223 - RNA, 19 nt, Artificial Sequence
  Description of Artificial Sequence: Synthetic oligonucleotide
gcaucugaaacuguucacu

SEQ ID NO: 514224 - RNA, 19 nt, Artificial Sequence
  Description of Artificial Sequence: Synthetic oligonucleotide
ugucuccgcuucgaucagu
